United States Patent Application Publication US 2005/0244851 A1 - sequence listing, part 86

SEQ ID NO: 3349644 - DNA, 25 bp, Homo sapien
gatttgctccatgagacaggagttt

SEQ ID NO: 3349645 - DNA, 25 bp, Homo sapien
tctagcatttggtcaggggctttca

SEQ ID NO: 3349646 - DNA, 25 bp, Homo sapien
caggtgcatacatgctccaatagat

SEQ ID NO: 3349647 - DNA, 25 bp, Homo sapien
ggtcaggggctttcaaagattcagc

SEQ ID NO: 3349648 - DNA, 25 bp, Homo sapien
tctctattttcccccaatattggta

SEQ ID NO: 3349649 - DNA, 25 bp, Homo sapien
ttctgtctctattttcccccaatat

SEQ ID NO: 3349650 - DNA, 25 bp, Homo sapien
ctgatttctgtctctattttccccc

SEQ ID NO: 3349651 - DNA, 25 bp, Homo sapien
tgtctctattttcccccaatattgg

SEQ ID NO: 3349652 - DNA, 25 bp, Homo sapien
caggaagtcccatctactcattcct

SEQ ID NO: 3349653 - DNA, 25 bp, Homo sapien
gaagtcccatctactcattcctagt

SEQ ID NO: 3349654 - DNA, 25 bp, Homo sapien
tcccaggaagtcccatctactcatt

SEQ ID NO: 3349655 - DNA, 25 bp, Homo sapien
cttctgagaatctctggagtctcac

SEQ ID NO: 3349656 - DNA, 25 bp, Homo sapien
aaaattgtcagccaggtccctgcca

SEQ ID NO: 3349657 - DNA, 25 bp, Homo sapien
aattgtcagccaggtccctgccaaa

SEQ ID NO: 3349658 - DNA, 25 bp, Homo sapien
ttgtcagccaggtccctgccaaata

SEQ ID NO: 3349659 - DNA, 25 bp, Homo sapien
aaattgtcagccaggtccctgccaa

SEQ ID NO: 3349660 - DNA, 25 bp, Homo sapien
catctcttccgcagagccactgagc

SEQ ID NO: 3349661 - DNA, 25 bp, Homo sapien
tgcattgaggttcttcagagccatc

SEQ ID NO: 3349662 - DNA, 25 bp, Homo sapien
gttcttcagagccatctttcggcat

SEQ ID NO: 3349663 - DNA, 25 bp, Homo sapien
ccactgagcctgcattgaggttctt

SEQ ID NO: 3349664 - DNA, 25 bp, Homo sapien
tcacacactataggagttctcacgg

SEQ ID NO: 3349665 - DNA, 25 bp, Homo sapien
cacggtgtcagcatggtgctgtttt

SEQ ID NO: 3349666 - DNA, 25 bp, Homo sapien
ggagttctcacggtgtcagcatggt

SEQ ID NO: 3349667 - DNA, 25 bp, Homo sapien
cactataggagttctcacggtgtca

SEQ ID NO: 3349668 - DNA, 25 bp, Homo sapien
gttgtgcggaatcaagaccattttt

SEQ ID NO: 3349669 - DNA, 25 bp, Homo sapien
caagatgcatgttgtgcggaatcaa

SEQ ID NO: 3349670 - DNA, 25 bp, Homo sapien
gatgcatgttgtgcggaatcaagac

SEQ ID NO: 3349671 - DNA, 25 bp, Homo sapien
gcatgttgtgcggaatcaagaccat

SEQ ID NO: 3349672 - DNA, 25 bp, Homo sapien
tcctgtatacaatgctcatcacaaa

SEQ ID NO: 3349673 - DNA, 25 bp, Homo sapien
ctgtatacaatgctcatcacaaacc

SEQ ID NO: 3349674 - DNA, 25 bp, Homo sapien
tcttcctgtatacaatgctcatcac

SEQ ID NO: 3349675 - DNA, 25 bp, Homo sapien
ctttcttcctgtatacaatgctcat

SEQ ID NO: 3349676 - DNA, 25 bp, Homo sapien
gaaatcagtctaccactccacaatg

SEQ ID NO: 3349677 - DNA, 25 bp, Homo sapien
gaatctcttgatattaccatgcgct

SEQ ID NO: 3349678 - DNA, 25 bp, Homo sapien
tatgcatggaatacaggagcttcct

SEQ ID NO: 3349679 - DNA, 25 bp, Homo sapien
ccatgacattacgttggagaaacac

SEQ ID NO: 3349680 - DNA, 25 bp, Homo sapien
tagagggttggtcccaaacatgtgg

SEQ ID NO: 3349681 - DNA, 25 bp, Homo sapien
ccagctctgtggaggtcggcaagtc

SEQ ID NO: 3349682 - DNA, 25 bp, Homo sapien
gttgctgtgttgtggtctccagctc

SEQ ID NO: 3349683 - DNA, 25 bp, Homo sapien
gatttcaggatagccacattttttc

SEQ ID NO: 3349684 - DNA, 25 bp, Homo sapien
gggatcatgactgctgtccaggatt

SEQ ID NO: 3349685 - DNA, 25 bp, Homo sapien
tgaagtctcggagtggaagcatctt

SEQ ID NO: 3349686 - DNA, 25 bp, Homo sapien
accaccaccattagtctctttgaag

SEQ ID NO: 3349687 - DNA, 25 bp, Homo sapien
gactgctgtccaggatttcagtgtg

SEQ ID NO: 3349688 - DNA, 25 bp, Homo sapien
tagtctcttaagcagggcagtccaa

SEQ ID NO: 3349689 - DNA, 25 bp, Homo sapien
cagtccaatctgctaaaacgtcagg

SEQ ID NO: 3349690 - DNA, 25 bp, Homo sapien
tcttaagcagggcagtccaatctgc

SEQ ID NO: 3349691 - DNA, 25 bp, Homo sapien
aaaacgtcaggtaaaatgtcatggc

SEQ ID NO: 3349692 - DNA, 25 bp, Homo sapien
tgtatatagattaaacgtttctcca

SEQ ID NO: 3349693 - DNA, 25 bp, Homo sapien
agaagtcacgaagatgtcatgtata

SEQ ID NO: 3349694 - DNA, 25 bp, Homo sapien
tgatttgaggtgctatgaagaagtc

SEQ ID NO: 3349695 - DNA, 25 bp, Homo sapien
tttcatataaaggaccgcggacctg

SEQ ID NO: 3349696 - DNA, 25 bp, Homo sapien
aaaatggcatccatgattctccaaa

SEQ ID NO: 3349697 - DNA, 25 bp, Homo sapien
catttgccaaatagtacgataagag

SEQ ID NO: 3349698 - DNA, 25 bp, Homo sapien
aagaatggatattgttaccagatcc

SEQ ID NO: 3349699 - DNA, 25 bp, Homo sapien
gccaaatagtacgataagagtaaga

SEQ ID NO: 3349700 - DNA, 25 bp, Homo sapien
gagatactctggctgttaggttcat

SEQ ID NO: 3349701 - DNA, 25 bp, Homo sapien
ctttaatgatccatattgcactcct

SEQ ID NO: 3349702 - DNA, 25 bp, Homo sapien
tcgttaaagtaggagatactctggc

SEQ ID NO: 3349703 - DNA, 25 bp, Homo sapien
gcactcctttggcagtcgttaaagt

SEQ ID NO: 3349704 - DNA, 25 bp, Homo sapien
catttacaccactcttcttagtgaa

SEQ ID NO: 3349705 - DNA, 25 bp, Homo sapien
ctcttcttagtgaaggtaggataaa

SEQ ID NO: 3349706 - DNA, 25 bp, Homo sapien
caggtgataccatttacaccactct

SEQ ID NO: 3349707 - DNA, 25 bp, Homo sapien
ttcttagtgaaggtaggataaagca

SEQ ID NO: 3349708 - DNA, 25 bp, Homo sapien
tgcttgccagtagaatgccaaataa

SEQ ID NO: 3349709 - DNA, 25 bp, Homo sapien
taatatatgcttgccagtagaatgc

SEQ ID NO: 3349710 - DNA, 25 bp, Homo sapien
tctgtgcattcagtacccggtaata

SEQ ID NO: 3349711 - DNA, 25 bp, Homo sapien
cagtacccggtaatatatgcttgcc

SEQ ID NO: 3349712 - DNA, 25 bp, Homo sapien
cttgcttcattgagcaggcacaggg

SEQ ID NO: 3349713 - DNA, 25 bp, Homo sapien
gaagaggatgttacagtctgctgcc

SEQ ID NO: 3349714 - DNA, 25 bp, Homo sapien
gggattgcatgaagaggatgttaca

SEQ ID NO: 3349715 - DNA, 25 bp, Homo sapien
tgtaacacttgcttcattgagcagg

SEQ ID NO: 3349716 - DNA, 25 bp, Homo sapien
tgttccatatgattccactgtggac

SEQ ID NO: 3349717 - DNA, 25 bp, Homo sapien
ctctttctgagatgttccatatgat

SEQ ID NO: 3349718 - DNA, 25 bp, Homo sapien
atgttccatatgattccactgtgga

SEQ ID NO: 3349719 - DNA, 25 bp, Homo sapien
tccatatgattccactgtggactcc

SEQ ID NO: 3349720 - DNA, 25 bp, Homo sapien
gagacagggtccgggtagtttggca

SEQ ID NO: 3349721 - DNA, 25 bp, Homo sapien
tcatcttgggtagtctgattttctt

SEQ ID NO: 3349722 - DNA, 25 bp, Homo sapien
gaaaatgacaaattccttgttctac

SEQ ID NO: 3349723 - DNA, 25 bp, Homo sapien
tatcttcactcagaataggaaaatg

SEQ ID NO: 3349724 - DNA, 25 bp, Homo sapien
taaggatgattggttattcttggca

SEQ ID NO: 3349725 - DNA, 25 bp, Homo sapien
taaagagcagtaacctatttgggac

SEQ ID NO: 3349726 - DNA, 25 bp, Homo sapien
tttggtactcaagtcgcacattggg

SEQ ID NO: 3349727 - DNA, 25 bp, Homo sapien
cattgggtgccgaatagctatggtt

SEQ ID NO: 3349728 - DNA, 25 bp, Homo sapien
cagcttcaaatcttctaagaaaagt

SEQ ID NO: 3349729 - DNA, 25 bp, Homo sapien
tccctaggggactgagaaaattgta

SEQ ID NO: 3349730 - DNA, 25 bp, Homo sapien
ttgtacgatgttgcaaaaggaaact

SEQ ID NO: 3349731 - DNA, 25 bp, Homo sapien
tcagttgaacaatttgctcatcaca

SEQ ID NO: 3349732 - DNA, 25 bp, Homo sapien
acttgtacgatgttgcaaaaggaaa

SEQ ID NO: 3349733 - DNA, 25 bp, Homo sapien
ttctctacccttaactcaggaataa

SEQ ID NO: 3349734 - DNA, 25 bp, Homo sapien
cattctctacccttaactcaggaat

SEQ ID NO: 3349735 - DNA, 25 bp, Homo sapien
tctctacccttaactcaggaataag

SEQ ID NO: 3349736 - DNA, 25 bp, Homo sapien
ctctacccttaactcaggaataagt

SEQ ID NO: 3349737 - DNA, 25 bp, Homo sapien
actgccacagctatgggctggagac

SEQ ID NO: 3349738 - DNA, 25 bp, Homo sapien
ttcatattaactgccacagctatgg

SEQ ID NO: 3349739 - DNA, 25 bp, Homo sapien
tggctttcatattaactgccacagc

SEQ ID NO: 3349740 - DNA, 25 bp, Homo sapien
tattaactgccacagctatgggctg

SEQ ID NO: 3349741 - DNA, 25 bp, Homo sapien
cacctgtggtaacgtcagaatgttc

SEQ ID NO: 3349742 - DNA, 25 bp, Homo sapien
cacacctgtggtaacgtcagaatgt

SEQ ID NO: 3349743 - DNA, 25 bp, Homo sapien
aggcacacctgtggtaacgtcagaa

SEQ ID NO: 3349744 - DNA, 25 bp, Homo sapien
tacatgtgtaggtggccacaagcca

SEQ ID NO: 3349745 - DNA, 25 bp, Homo sapien
atcatgaggtagatgtcgggaagtt

SEQ ID NO: 3349746 - DNA, 25 bp, Homo sapien
tcagggccaccagtgttgcctgcaa

SEQ ID NO: 3349747 - DNA, 25 bp, Homo sapien
gagcacactgctgtcctttttgata

SEQ ID NO: 3349748 - DNA, 25 bp, Homo sapien
cagtgttgcctgcaaaaaatcctgg

SEQ ID NO: 3349749 - DNA, 25 bp, Homo sapien
gaattctgacatgcacgatggctta

SEQ ID NO: 3349750 - DNA, 25 bp, Homo sapien
tgcacgatggcttacaaaacaaata

SEQ ID NO: 3349751 - DNA, 25 bp, Homo sapien
tctgtggtcccaagtccacttcagc

SEQ ID NO: 3349752 - DNA, 25 bp, Homo sapien
tttcttctgtggtcccaagtccact

SEQ ID NO: 3349753 - DNA, 25 bp, Homo sapien
tctcggtcactgttttctcacactt

SEQ ID NO: 3349754 - DNA, 25 bp, Homo sapien
ctctcggtcactgttttctcacact

SEQ ID NO: 3349755 - DNA, 25 bp, Homo sapien
ttcaaaacttgtgagactctgcttg

SEQ ID NO: 3349756 - DNA, 25 bp, Homo sapien
tttcaaaacttgtgagactctgctt

SEQ ID NO: 3349757 - DNA, 25 bp, Homo sapien
taatgtgagccacatacgtgagctc

SEQ ID NO: 3349758 - DNA, 25 bp, Homo sapien
cgtgagctcaatatgcagtttcaag

SEQ ID NO: 3349759 - DNA, 25 bp, Homo sapien
cagaggaaagaacatcacacatagt

SEQ ID NO: 3349760 - DNA, 25 bp, Homo sapien
ggtattattccccatatcagcatag

SEQ ID NO: 3349761 - DNA, 25 bp, Homo sapien
gctccgtttctgacattaacatata

SEQ ID NO: 3349762 - DNA, 25 bp, Homo sapien
gaaaatattacttctggagattatt

SEQ ID NO: 3349763 - DNA, 25 bp, Homo sapien
tgctccgtttctgacattaacatat

SEQ ID NO: 3349764 - DNA, 25 bp, Homo sapien
taatggaaaatattacttctggaga

SEQ ID NO: 3349765 - DNA, 25 bp, Homo sapien
gagaagagcagacccttcgctgaca

SEQ ID NO: 3349766 - DNA, 25 bp, Homo sapien
gagcagacccttcgctgacagattg

SEQ ID NO: 3349767 - DNA, 25 bp, Homo sapien
cagacccttcgctgacagattgctc

SEQ ID NO: 3349768 - DNA, 25 bp, Homo sapien
ctccactaccacttacatgggccat

SEQ ID NO: 3349769 - DNA, 25 bp, Homo sapien
tcacaacgagcactggaatctctct

SEQ ID NO: 3349770 - DNA, 25 bp, Homo sapien
ttcagtgtagcaggacttgctacca

SEQ ID NO: 3349771 - DNA, 25 bp, Homo sapien
gctaccatttatcacaacgagcact

SEQ ID NO: 3349772 - DNA, 25 bp, Homo sapien
tagcaggacttgctaccatttatca

SEQ ID NO: 3349773 - DNA, 25 bp, Homo sapien
ttatccagtggcattgttctgtcac

SEQ ID NO: 3349774 - DNA, 25 bp, Homo sapien
tctgagggcctttttatccagtggc

SEQ ID NO: 3349775 - DNA, 25 bp, Homo sapien
tgggtcatctgagggcctttttatc

SEQ ID NO: 3349776 - DNA, 25 bp, Homo sapien
gggcctttttatccagtggcattgt

SEQ ID NO: 3349777 - DNA, 25 bp, Homo sapien
ctaaagtagcaggttattgttgcaa

SEQ ID NO: 3349778 - DNA, 25 bp, Homo sapien
gcaattggattgtaacgggcttgaa

SEQ ID NO: 3349779 - DNA, 25 bp, Homo sapien
tattgttgcaattggattgtaacgg

SEQ ID NO: 3349780 - DNA, 25 bp, Homo sapien
gtaacgggcttgaatgctgtttctc

SEQ ID NO: 3349781 - DNA, 25 bp, Homo sapien
ccaaagccatttgcctcaatgtaaa

SEQ ID NO: 3349782 - DNA, 25 bp, Homo sapien
gccaccaaagccatttgcctcaatg

SEQ ID NO: 3349783 - DNA, 25 bp, Homo sapien
gcaatcactggcagaaggtttgctc

SEQ ID NO: 3349784 - DNA, 25 bp, Homo sapien
tcactggcagaaggtttgctcctct

SEQ ID NO: 3349785 - DNA, 25 bp, Homo sapien
ttgttccacttagcctgtccactgg

SEQ ID NO: 3349786 - DNA, 25 bp, Homo sapien
tcttgttccacttagcctgtccact

SEQ ID NO: 3349787 - DNA, 25 bp, Homo sapien
ccctcttgttccacttagcctgtcc

SEQ ID NO: 3349788 - DNA, 25 bp, Homo sapien
gttccacttagcctgtccactgggc

SEQ ID NO: 3349789 - DNA, 25 bp, Homo sapien
cacatttggtgacagtgctcagaga

SEQ ID NO: 3349790 - DNA, 25 bp, Homo sapien
tcatatcacggtgtccttgagcttg

SEQ ID NO: 3349791 - DNA, 25 bp, Homo sapien
acggtgtccttgagcttgtaattga

SEQ ID NO: 3349792 - DNA, 25 bp, Homo sapien
ttgtaattgactgtcagtttctcag

SEQ ID NO: 3349793 - DNA, 25 bp, Homo sapien
tttagatcaacactgctaatggcct

SEQ ID NO: 3349794 - DNA, 25 bp, Homo sapien
aagaaatttagatcaacactgctaa

SEQ ID NO: 3349795 - DNA, 25 bp, Homo sapien
aatttagatcaacactgctaatggc

SEQ ID NO: 3349796 - DNA, 25 bp, Homo sapien
agatcaacactgctaatggccttta

SEQ ID NO: 3349797 - DNA, 25 bp, Homo sapien
tctggcaagaatggtaattcctcca

SEQ ID NO: 3349798 - DNA, 25 bp, Homo sapien
ttatctggggttgcacttcaaaatc

SEQ ID NO: 3349799 - DNA, 25 bp, Homo sapien
aatctggcaagaatggtaattcctc

SEQ ID NO: 3349800 - DNA, 25 bp, Homo sapien
caaaatctggcaagaatggtaattc

SEQ ID NO: 3349801 - DNA, 25 bp, Homo sapien
tcaatatgcaataatgaagacaaat

SEQ ID NO: 3349802 - DNA, 25 bp, Homo sapien
cagctgacagtagcgtgcaatgact

SEQ ID NO: 3349803 - DNA, 25 bp, Homo sapien
taattcttgaaagttcatgatgaca

SEQ ID NO: 3349804 - DNA, 25 bp, Homo sapien
aatttttgcagaagccccataattc

SEQ ID NO: 3349805 - DNA, 25 bp, Homo sapien
tatttctgagtctagactatgaaca

SEQ ID NO: 3349806 - DNA, 25 bp, Homo sapien
acattgacatcagagacaaaggcaa

SEQ ID NO: 3349807 - DNA, 25 bp, Homo sapien
gactatgaacattgacatcagagac

SEQ ID NO: 3349808 - DNA, 25 bp, Homo sapien
tggattatcacattgatattatctt

SEQ ID NO: 3349809 - DNA, 25 bp, Homo sapien
tttggatcaacaatgacagcactat

SEQ ID NO: 3349810 - DNA, 25 bp, Homo sapien
cttttagccagaagaccacttcatg

SEQ ID NO: 3349811 - DNA, 25 bp, Homo sapien
gttgactaatatttcaagcaacaaa

SEQ ID NO: 3349812 - DNA, 25 bp, Homo sapien
gagtttattctggtatataacaaca

SEQ ID NO: 3349813 - DNA, 25 bp, Homo sapien
gggtcctcttgaagacacaattgag

SEQ ID NO: 3349814 - DNA, 25 bp, Homo sapien
ggtcctcttgaagacacaattgagt

SEQ ID NO: 3349815 - DNA, 25 bp, Homo sapien
ttcccacaaaggcaaattgccaatc

SEQ ID NO: 3349816 - DNA, 25 bp, Homo sapien
ccacaaaggcaaattgccaatcaat

SEQ ID NO: 3349817 - DNA, 25 bp, Homo sapien
ggcaaattgccaatcaatatgaaat

SEQ ID NO: 3349818 - DNA, 25 bp, Homo sapien
attttcccacaaaggcaaattgcca

SEQ ID NO: 3349819 - DNA, 25 bp, Homo sapien
tttgtgtgtccttgtttgtttttgc

SEQ ID NO: 3349820 - DNA, 25 bp, Homo sapien
tgtgtgtccttgtttgtttttgctc

SEQ ID NO: 3349821 - DNA, 25 bp, Homo sapien
tttgctcttttcctgcaatacccat

SEQ ID NO: 3349822 - DNA, 25 bp, Homo sapien
gtttttgctcttttcctgcaatacc

SEQ ID NO: 3349823 - DNA, 25 bp, Homo sapien
gacacttctgtccatgttattgata

SEQ ID NO: 3349824 - DNA, 25 bp, Homo sapien
tgacacttctgtccatgttattgat

SEQ ID NO: 3349825 - DNA, 25 bp, Homo sapien
tgtcatttgttgaatgttctgcact

SEQ ID NO: 3349826 - DNA, 25 bp, Homo sapien
catttgttgaatgttctgcacttac

SEQ ID NO: 3349827 - DNA, 25 bp, Homo sapien
ctgtcatttgttgaatgttctgcac

SEQ ID NO: 3349828 - DNA, 25 bp, Homo sapien
tcatttgttgaatgttctgcactta

SEQ ID NO: 3349829 - DNA, 25 bp, Homo sapien
gttcactggtctatgctcggcacta

SEQ ID NO: 3349830 - DNA, 25 bp, Homo sapien
tatgctcggcactatttggtgtact

SEQ ID NO: 3349831 - DNA, 25 bp, Homo sapien
actggtctatgctcggcactatttg

SEQ ID NO: 3349832 - DNA, 25 bp, Homo sapien
cattgttcactggtctatgctcggc

SEQ ID NO: 3349833 - DNA, 25 bp, Homo sapien
cagaaaatgttgcaatatggactgg

SEQ ID NO: 3349834 - DNA, 25 bp, Homo sapien
cagctccgtactggaggtcttgtgc

SEQ ID NO: 3349835 - DNA, 25 bp, Homo sapien
tgcacttccaaagttcaactgagta

SEQ ID NO: 3349836 - DNA, 25 bp, Homo sapien
caatatggactggtgaaaggctgaa

SEQ ID NO: 3349837 - DNA, 25 bp, Homo sapien
ttgccctctgaacataggtaataag

SEQ ID NO: 3349838 - DNA, 25 bp, Homo sapien
cactttatacaccaatgatctgaca

SEQ ID NO: 3349839 - DNA, 25 bp, Homo sapien
tgtttgctgtagtaataatacacac

SEQ ID NO: 3349840 - DNA, 25 bp, Homo sapien
taaagtagatctattgccctctgaa

SEQ ID NO: 3349841 - DNA, 25 bp, Homo sapien
ttttacgttccttatatcctagaga

SEQ ID NO: 3349842 - DNA, 25 bp, Homo sapien
cctgactctagtgtctcagcaaaca

SEQ ID NO: 3349843 - DNA, 25 bp, Homo sapien
tatctggtatatggttatggcatca

SEQ ID NO: 3349844 - DNA, 25 bp, Homo sapien
atacctagcattgccttagaccaag

SEQ ID NO: 3349845 - DNA, 25 bp, Homo sapien
tagaggattgttgacccacaaatgc

SEQ ID NO: 3349846 - DNA, 25 bp, Homo sapien
cttggctttcctcgagaataggatc

SEQ ID NO: 3349847 - DNA, 25 bp, Homo sapien
gaataggatctatagaggattgttg

SEQ ID NO: 3349848 - DNA, 25 bp, Homo sapien
gattgttgacccacaaatgctaaca

SEQ ID NO: 3349849 - DNA, 25 bp, Homo sapien
gaatgttaatagacgcagttttcca

SEQ ID NO: 3349850 - DNA, 25 bp, Homo sapien
caaacaacatggtactccttactta

SEQ ID NO: 3349851 - DNA, 25 bp, Homo sapien
ccaactacatgctggctacaggaaa

SEQ ID NO: 3349852 - DNA, 25 bp, Homo sapien
tggaaatcacattgcaaaaacctgt

SEQ ID NO: 3349853 - DNA, 25 bp, Homo sapien
gttttgagtgaaatctggtaaatgt

SEQ ID NO: 3349854 - DNA, 25 bp, Homo sapien
ttttgagtgaaatctggtaaatgta

SEQ ID NO: 3349855 - DNA, 25 bp, Homo sapien
ccaacacagtcctttccaaacagtt

SEQ ID NO: 3349856 - DNA, 25 bp, Homo sapien
tacagctgaggtactgcatccaaca

SEQ ID NO: 3349857 - DNA, 25 bp, Homo sapien
aatttgcaataggagtttctggaaa

SEQ ID NO: 3349858 - DNA, 25 bp, Homo sapien
ggtggccgccttctttacagctgag

SEQ ID NO: 3349859 - DNA, 25 bp, Homo sapien
gccctgggaattaactggccgtcat

SEQ ID NO: 3349860 - DNA, 25 bp, Homo sapien
actggccgtcatcatgggagatcat

SEQ ID NO: 3349861 - DNA, 25 bp, Homo sapien
taactttcaaggagagttctctccc

SEQ ID NO: 3349862 - DNA, 25 bp, Homo sapien
aattaactggccgtcatcatgggag

SEQ ID NO: 3349863 - DNA, 25 bp, Homo sapien
ttagggtagcagaagtcagcattag

SEQ ID NO: 3349864 - DNA, 25 bp, Homo sapien
cttagggtagcagaagtcagcatta

SEQ ID NO: 3349865 - DNA, 25 bp, Homo sapien
agggtagcagaagtcagcattaggt

SEQ ID NO: 3349866 - DNA, 25 bp, Homo sapien
tagggtagcagaagtcagcattagg

SEQ ID NO: 3349867 - DNA, 25 bp, Homo sapien
taagtgagcaatttgtgctacttca

SEQ ID NO: 3349868 - DNA, 25 bp, Homo sapien
tttgtgctacttcaacaatatcaga

SEQ ID NO: 3349869 - DNA, 25 bp, Homo sapien
gctacttcaacaatatcagaggcat

SEQ ID NO: 3349870 - DNA, 25 bp, Homo sapien
tgagcaatttgtgctacttcaacaa

SEQ ID NO: 3349871 - DNA, 25 bp, Homo sapien
agccgcagacttttgatccctcact

SEQ ID NO: 3349872 - DNA, 25 bp, Homo sapien
tttgatccctcactcggtaatttgg

SEQ ID NO: 3349873 - DNA, 25 bp, Homo sapien
gaggatggtagtaagttttggataa

SEQ ID NO: 3349874 - DNA, 25 bp, Homo sapien
taatgagtatagctctagaggcagg

SEQ ID NO: 3349875 - DNA, 25 bp, Homo sapien
gcctttgacgacataacagcttacc

SEQ ID NO: 3349876 - DNA, 25 bp, Homo sapien
tgacgacataacagcttaccaaggg

SEQ ID NO: 3349877 - DNA, 25 bp, Homo sapien
ttttgcctttgacgacataacagct

SEQ ID NO: 3349878 - DNA, 25 bp, Homo sapien
tttgacgacataacagcttaccaag

SEQ ID NO: 3349879 - DNA, 25 bp, Homo sapien
cattcattatgacagtagaacaaga

SEQ ID NO: 3349880 - DNA, 25 bp, Homo sapien
agtaaatgtgtttgctatggtcttg

SEQ ID NO: 3349881 - DNA, 25 bp, Homo sapien
aatctttatccagtttgacagtctg

SEQ ID NO: 3349882 - DNA, 25 bp, Homo sapien
aatgtctgttttatcagatattagg

SEQ ID NO: 3349883 - DNA, 25 bp, Homo sapien
tgatctttttggtttaatgtctgtt

SEQ ID NO: 3349884 - DNA, 25 bp, Homo sapien
taatttccattagcttggtaaatct

SEQ ID NO: 3349885 - DNA, 25 bp, Homo sapien
tatgtgatatcccactggcaggtaa

SEQ ID NO: 3349886 - DNA, 25 bp, Homo sapien
atgtgatatcccactggcaggtaag

SEQ ID NO: 3349887 - DNA, 25 bp, Homo sapien
ttatgtgatatcccactggcaggta

SEQ ID NO: 3349888 - DNA, 25 bp, Homo sapien
gcatcctttaggtcatggcacttac

SEQ ID NO: 3349889 - DNA, 25 bp, Homo sapien
tagggaagggctagtgtaggcatcc

SEQ ID NO: 3349890 - DNA, 25 bp, Homo sapien
tgcttgattttagccatgttaggga

SEQ ID NO: 3349891 - DNA, 25 bp, Homo sapien
tcttgtggaacctggcaatgcttga

SEQ ID NO: 3349892 - DNA, 25 bp, Homo sapien
atttacccttgtctaaagctgtcat

SEQ ID NO: 3349893 - DNA, 25 bp, Homo sapien
tcaaatttacccttgtctaaagctg

SEQ ID NO: 3349894 - DNA, 25 bp, Homo sapien
caaatttacccttgtctaaagctgt

SEQ ID NO: 3349895 - DNA, 25 bp, Homo sapien
aatttacccttgtctaaagctgtca

SEQ ID NO: 3349896 - DNA, 25 bp, Homo sapien
aacttttagttattgtcaaggccat

SEQ ID NO: 3349897 - DNA, 25 bp, Homo sapien
ctgccattccaaggtgagaaaactt

SEQ ID NO: 3349898 - DNA, 25 bp, Homo sapien
tgtagccacaacagaattcaaatat

SEQ ID NO: 3349899 - DNA, 25 bp, Homo sapien
gagctaaggatacatgaataaacta

SEQ ID NO: 3349900 - DNA, 25 bp, Homo sapien
tctggatgcaactgttgagcaatac

SEQ ID NO: 3349901 - DNA, 25 bp, Homo sapien
aactagactcatggcctaatgctcc

SEQ ID NO: 3349902 - DNA, 25 bp, Homo sapien
cagggataaaggaaattgcttctga

SEQ ID NO: 3349903 - DNA, 25 bp, Homo sapien
ggataaaggaaattgcttctgagtt

SEQ ID NO: 3349904 - DNA, 25 bp, Homo sapien
tttctatatccacgtagaatgtaac

SEQ ID NO: 3349905 - DNA, 25 bp, Homo sapien
tatatccacgtagaatgtaacatgt

SEQ ID NO: 3349906 - DNA, 25 bp, Homo sapien
caagagatgttgattagtgggcaaa

SEQ ID NO: 3349907 - DNA, 25 bp, Homo sapien
acaaaactggaacctagacagtctt

SEQ ID NO: 3349908 - DNA, 25 bp, Homo sapien
ttgattagtgggcaaagccattctt

SEQ ID NO: 3349909 - DNA, 25 bp, Homo sapien
gagatgttgattagtgggcaaagcc

SEQ ID NO: 3349910 - DNA, 25 bp, Homo sapien
gccttttcatcacttaacactcttt

SEQ ID NO: 3349911 - DNA, 25 bp, Homo sapien
gaaaatccatctatttcttgatgtc

SEQ ID NO: 3349912 - DNA, 25 bp, Homo sapien
ctgtccattcccagtgcatttcaca

SEQ ID NO: 3349913 - DNA, 25 bp, Homo sapien
ccagtgcatttcacatgccttttca

SEQ ID NO: 3349914 - DNA, 25 bp, Homo sapien
gagaaatctagacttgatcccaaga

SEQ ID NO: 3349915 - DNA, 25 bp, Homo sapien
gaatgagccatctagtatacctcgc

SEQ ID NO: 3349916 - DNA, 25 bp, Homo sapien
cttgtgtaagcaacatgggttcagg

SEQ ID NO: 3349917 - DNA, 25 bp, Homo sapien
caccagtggtaagtacgtgacccag

SEQ ID NO: 3349918 - DNA, 25 bp, Homo sapien
ggacaatacagattccacggactga

SEQ ID NO: 3349919 - DNA, 25 bp, Homo sapien
tgcgctcagcctggaatgacacact

SEQ ID NO: 3349920 - DNA, 25 bp, Homo sapien
gaaatgagccactaaacagaagaag

SEQ ID NO: 3349921 - DNA, 25 bp, Homo sapien
cagacaactggtagagcatagggca

SEQ ID NO: 3349922 - DNA, 25 bp, Homo sapien
ccctcacctgattctcataaagctg

SEQ ID NO: 3349923 - DNA, 25 bp, Homo sapien
ctgattctcataaagctgtaattgc

SEQ ID NO: 3349924 - DNA, 25 bp, Homo sapien
tcacctgattctcataaagctgtaa

SEQ ID NO: 3349925 - DNA, 25 bp, Homo sapien
cctgattctcataaagctgtaattg

SEQ ID NO: 3349926 - DNA, 25 bp, Homo sapien
ttgctgtagaccctgaagaatgtca

SEQ ID NO: 3349927 - DNA, 25 bp, Homo sapien
ccttccaatagaagagacgaagata

SEQ ID NO: 3349928 - DNA, 25 bp, Homo sapien
gacgaagatacattgctgtagaccc

SEQ ID NO: 3349929 - DNA, 25 bp, Homo sapien
attcagctgtgtaaccttccaatag

SEQ ID NO: 3349930 - DNA, 25 bp, Homo sapien
tccattgtccgaatgaatcttaaag

SEQ ID NO: 3349931 - DNA, 25 bp, Homo sapien
cattgtccgaatgaatcttaaaggt

SEQ ID NO: 3349932 - DNA, 25 bp, Homo sapien
tcactccattgtccgaatgaatctt

SEQ ID NO: 3349933 - DNA, 25 bp, Homo sapien
tgtcactccattgtccgaatgaatc

SEQ ID NO: 3349934 - DNA, 25 bp, Homo sapien
catgtgggtcatctctgaagggtac

SEQ ID NO: 3349935 - DNA, 25 bp, Homo sapien
atgtgggtcatctctgaagggtaca

SEQ ID NO: 3349936 - DNA, 25 bp, Homo sapien
ccatgtgggtcatctctgaagggta

SEQ ID NO: 3349937 - DNA, 25 bp, Homo sapien
ctgcccctcccacagtagtgagagt

SEQ ID NO: 3349938 - DNA, 25 bp, Homo sapien
tagaaatggttcactgcccctccca

SEQ ID NO: 3349939 - DNA, 25 bp, Homo sapien
gcccctcccacagtagtgagagtct

SEQ ID NO: 3349940 - DNA, 25 bp, Homo sapien
cctcccacagtagtgagagtcttac

SEQ ID NO: 3349941 - DNA, 25 bp, Homo sapien
tgtgttttctcgatgaagatgagag

SEQ ID NO: 3349942 - DNA, 25 bp, Homo sapien
gatgtgtgttttctcgatgaagatg

SEQ ID NO: 3349943 - DNA, 25 bp, Homo sapien
ttttctcgatgaagatgagagtatt

SEQ ID NO: 3349944 - DNA, 25 bp, Homo sapien
cctagaagcaatggaaccttgcctg

SEQ ID NO: 3349945 - DNA, 25 bp, Homo sapien
gcatccacatggtgtaagctacaaa

SEQ ID NO: 3349946 - DNA, 25 bp, Homo sapien
caaaagaaggatgtatgcgacagac

SEQ ID NO: 3349947 - DNA, 25 bp, Homo sapien
tacagtgtctcaagtaggaggattc

SEQ ID NO: 3349948 - DNA, 25 bp, Homo sapien
taggcagttgacatcccagacaaac

SEQ ID NO: 3349949 - DNA, 25 bp, Homo sapien
cattaatgctgacaaggtagtggcc

SEQ ID NO: 3349950 - DNA, 25 bp, Homo sapien
tatgccaatgactgaggaacgcact

SEQ ID NO: 3349951 - DNA, 25 bp, Homo sapien
tctggagagacatatggagtgcccg

SEQ ID NO: 3349952 - DNA, 25 bp, Homo sapien
gaagtagtagcctcccaagtgtgta

SEQ ID NO: 3349953 - DNA, 25 bp, Homo sapien
gtttcaagatcaattttttgtagtg

SEQ ID NO: 3349954 - DNA, 25 bp, Homo sapien
caagatcaattttttgtagtgcagc

SEQ ID NO: 3349955 - DNA, 25 bp, Homo sapien
gtagtgcagcttcatctttatgaag

SEQ ID NO: 3349956 - DNA, 25 bp, Homo sapien
catctttatgaagaataaatccaaa

SEQ ID NO: 3349957 - DNA, 25 bp, Homo sapien
ttcactagaggcactgcttcagtac

SEQ ID NO: 3349958 - DNA, 25 bp, Homo sapien
tagaggcactgcttcagtacttact

SEQ ID NO: 3349959 - DNA, 25 bp, Homo sapien
tccaccttcactagaggcactgctt

SEQ ID NO: 3349960 - DNA, 25 bp, Homo sapien
gaggcactgcttcagtacttactga

SEQ ID NO: 3349961 - DNA, 25 bp, Homo sapien
tgaggaggtcctagtaccagagagc

SEQ ID NO: 3349962 - DNA, 25 bp, Homo sapien
tgtggctcagaagggcctcactcag

SEQ ID NO: 3349963 - DNA, 25 bp, Homo sapien
gacacttgaatggaagaagagccca

SEQ ID NO: 3349964 - DNA, 25 bp, Homo sapien
catccgcagggttgtttggtaacag

SEQ ID NO: 3349965 - DNA, 25 bp, Homo sapien
ggaatgatcatagagaaggtgatga

SEQ ID NO: 3349966 - DNA, 25 bp, Homo sapien
tgaatatctcggaaactaggaagtt

SEQ ID NO: 3349967 - DNA, 25 bp, Homo sapien
ttgaatatctcggaaactaggaagt

SEQ ID NO: 3349968 - DNA, 25 bp, Homo sapien
aactaggaagttttggaatgatcat

SEQ ID NO: 3349969 - DNA, 25 bp, Homo sapien
gatctaggaaatatcctcaaagggc

SEQ ID NO: 3349970 - DNA, 25 bp, Homo sapien
gagagagagatacagttagaaagtt

SEQ ID NO: 3349971 - DNA, 25 bp, Homo sapien
tgaagcacatctacgagatctagga

SEQ ID NO: 3349972 - DNA, 25 bp, Homo sapien
aagaggtatccatattcaagtcaaa

SEQ ID NO: 3349973 - DNA, 25 bp, Homo sapien
aaaatcatccactctgtcaaattgc

SEQ ID NO: 3349974 - DNA, 25 bp, Homo sapien
gatcgtgtggtgaggcacattccca

SEQ ID NO: 3349975 - DNA, 25 bp, Homo sapien
attgctttcccactggttgggtgtg

SEQ ID NO: 3349976 - DNA, 25 bp, Homo sapien
ttcccactggttgggtgtggatcgt

SEQ ID NO: 3349977 - DNA, 25 bp, Homo sapien
gtcttctccaaggtaccccagctta

SEQ ID NO: 3349978 - DNA, 25 bp, Homo sapien
tttgtcatagtgtaatttaactggg

SEQ ID NO: 3349979 - DNA, 25 bp, Homo sapien
cacccagacctgatcatgtgatttg

SEQ ID NO: 3349980 - DNA, 25 bp, Homo sapien
aaggtaccccagcttagcacccaga

SEQ ID NO: 3349981 - DNA, 25 bp, Homo sapien
tctagtaataaatctgatagcaatc

SEQ ID NO: 3349982 - DNA, 25 bp, Homo sapien
catgtcttgatgttggtcacttttg

SEQ ID NO: 3349983 - DNA, 25 bp, Homo sapien
agttggactttgttgatcttcatgg

SEQ ID NO: 3349984 - DNA, 25 bp, Homo sapien
ccttctgggactgccgcagtgcata

SEQ ID NO: 3349985 - DNA, 25 bp, Homo sapien
cggttctgtaatgataagcaggaat

SEQ ID NO: 3349986 - DNA, 25 bp, Homo sapien
tcaattccggttctgtaatgataag

SEQ ID NO: 3349987 - DNA, 25 bp, Homo sapien
aattccggttctgtaatgataagca

SEQ ID NO: 3349988 - DNA, 25 bp, Homo sapien
gttctgtaatgataagcaggaatgt

SEQ ID NO: 3349989 - DNA, 25 bp, Homo sapien
cctctgcctgctccgactgtgcctt

SEQ ID NO: 3349990 - DNA, 25 bp, Homo sapien
tctgcctgctccgactgtgccttcc

SEQ ID NO: 3349991 - DNA, 25 bp, Homo sapien
ctctgcctgctccgactgtgccttc

SEQ ID NO: 3349992 - DNA, 25 bp, Homo sapien
ctgcctgctccgactgtgccttcct

SEQ ID NO: 3349993 - DNA, 25 bp, Homo sapien
catcaacaataaggactctgtccaa

SEQ ID NO: 3349994 - DNA, 25 bp, Homo sapien
caactttttgggactgcacatcaac

SEQ ID NO: 3349995 - DNA, 25 bp, Homo sapien
tctttgacattaacagctgatgccc

SEQ ID NO: 3349996 - DNA, 25 bp, Homo sapien
caaagttggctgtgcaacataaatg

SEQ ID NO: 3349997 - DNA, 25 bp, Homo sapien
taggaaagagaaaatgaaatttata

SEQ ID NO: 3349998 - DNA, 25 bp, Homo sapien
tgtaatttaggaaagagaaaatgaa

SEQ ID NO: 3349999 - DNA, 25 bp, Homo sapien
ctgtaatttaggaaagagaaaatga

SEQ ID NO: 3350000 - DNA, 25 bp, Homo sapien
gaaatatttgcatacgtgaacacga

SEQ ID NO: 3350001 - DNA, 25 bp, Homo sapien
cagaaatgaaggtgttgtaacccaa

SEQ ID NO: 3350002 - DNA, 25 bp, Homo sapien
tactatcatggtcaggtaacaacca

SEQ ID NO: 3350003 - DNA, 25 bp, Homo sapien
tgttgctgatcccatgttagtgtac

SEQ ID NO: 3350004 - DNA, 25 bp, Homo sapien
tgaggaccaagtttgcagaagtata

SEQ ID NO: 3350005 - DNA, 25 bp, Homo sapien
ccaagtttgcagaagtataagtgga

SEQ ID NO: 3350006 - DNA, 25 bp, Homo sapien
gggaaatgaattgtttgcatcatgt

SEQ ID NO: 3350007 - DNA, 25 bp, Homo sapien
aatgaattgtttgcatcatgtaaag

SEQ ID NO: 3350008 - DNA, 25 bp, Homo sapien
taaggatggaacagtagtagaaaac

SEQ ID NO: 3350009 - DNA, 25 bp, Homo sapien
tctgaatccataagtctgaaataga

SEQ ID NO: 3350010 - DNA, 25 bp, Homo sapien
tactccaggtgacaagatgaaatca

SEQ ID NO: 3350011 - DNA, 25 bp, Homo sapien
gcagcagctagatctataacaagca

SEQ ID NO: 3350012 - DNA, 25 bp, Homo sapien
ctatgggttgtatcactttgattcc

SEQ ID NO: 3350013 - DNA, 25 bp, Homo sapien
aaacatagaacatgttcccaattcc

SEQ ID NO: 3350014 - DNA, 25 bp, Homo sapien
gtatcactttgattccatcttcata

SEQ ID NO: 3350015 - DNA, 25 bp, Homo sapien
cactaggcttaatgtgcctctgaaa

SEQ ID NO: 3350016 - DNA, 25 bp, Homo sapien
cttcttctctccataatatgttagc

SEQ ID NO: 3350017 - DNA, 25 bp, Homo sapien
tcttctctccataatatgttagcta

SEQ ID NO: 3350018 - DNA, 25 bp, Homo sapien
ttcttctctccataatatgttagct

SEQ ID NO: 3350019 - DNA, 25 bp, Homo sapien
tttgcacatttatgccattatctga

SEQ ID NO: 3350020 - DNA, 25 bp, Homo sapien
gcacatttatgccattatctgaccg

SEQ ID NO: 3350021 - DNA, 25 bp, Homo sapien
tttatgccattatctgaccgaattc

SEQ ID NO: 3350022 - DNA, 25 bp, Homo sapien
atttgttttgttaactctttgcaca

SEQ ID NO: 3350023 - DNA, 25 bp, Homo sapien
ttggctaggtgttttactgttgtaa

SEQ ID NO: 3350024 - DNA, 25 bp, Homo sapien
tgtatgatttgttgactaagggagc

SEQ ID NO: 3350025 - DNA, 25 bp, Homo sapien
tgttgactaagggagctttggctag

SEQ ID NO: 3350026 - DNA, 25 bp, Homo sapien
tcacacactaaaaggttgtatgatt

SEQ ID NO: 3350027 - DNA, 25 bp, Homo sapien
gctgtacaggtcttaatccagtgac

SEQ ID NO: 3350028 - DNA, 25 bp, Homo sapien
ttaccactgaaccttctgtagagaa

SEQ ID NO: 3350029 - DNA, 25 bp, Homo sapien
ccttctgtagagaaggatgctgtac

SEQ ID NO: 3350030 - DNA, 25 bp, Homo sapien
tgtagagaaggatgctgtacaggtc

SEQ ID NO: 3350031 - DNA, 25 bp, Homo sapien
gtgtgctgttgggtggttctataca

SEQ ID NO: 3350032 - DNA, 25 bp, Homo sapien
tgtgctgttgggtggttctatacat

SEQ ID NO: 3350033 - DNA, 25 bp, Homo sapien
aaaagtacgttgaatatggtgtgtg

SEQ ID NO: 3350034 - DNA, 25 bp, Homo sapien
agctgtaaaaaagtacgttgaatat

SEQ ID NO: 3350035 - DNA, 25 bp, Homo sapien
tgcttcattctttgcgatacaagtg

SEQ ID NO: 3350036 - DNA, 25 bp, Homo sapien
tacaagtgtatgctccagtatcttc

SEQ ID NO: 3350037 - DNA, 25 bp, Homo sapien
cattgcttatgtgaacctcactgcc

SEQ ID NO: 3350038 - DNA, 25 bp, Homo sapien
agatgtcttcatccactcctgcttc

SEQ ID NO: 3350039 - DNA, 25 bp, Homo sapien
gtgtccctgcacctagttctttgag

SEQ ID NO: 3350040 - DNA, 25 bp, Homo sapien
tgatcttgctctttcaatcgtgagg

SEQ ID NO: 3350041 - DNA, 25 bp, Homo sapien
tagaagtgatcagaaagcaacctca

SEQ ID NO: 3350042 - DNA, 25 bp, Homo sapien
gatgttaccactttattgccagaac

SEQ ID NO: 3350043 - DNA, 25 bp, Homo sapien
ctctgcatggcacctaagactggca

SEQ ID NO: 3350044 - DNA, 25 bp, Homo sapien
tgactctctggatacacccggatga

SEQ ID NO: 3350045 - DNA, 25 bp, Homo sapien
gaggctttggtatgccctctgcatg

SEQ ID NO: 3350046 - DNA, 25 bp, Homo sapien
ttgaagcgtgagttgtttggaaagc

SEQ ID NO: 3350047 - DNA, 25 bp, Homo sapien
gctctccggttaatgcatgtatttt

SEQ ID NO: 3350048 - DNA, 25 bp, Homo sapien
ttgtccttgataagaatatgacttg

SEQ ID NO: 3350049 - DNA, 25 bp, Homo sapien
gaagaggactccagttctctgtcaa

SEQ ID NO: 3350050 - DNA, 25 bp, Homo sapien
tgttcacttggaccatttgctctcc

SEQ ID NO: 3350051 - DNA, 25 bp, Homo sapien
cagcataactggctgttttggaagc

SEQ ID NO: 3350052 - DNA, 25 bp, Homo sapien
tattgccgcagagtatggagacagc

SEQ ID NO: 3350053 - DNA, 25 bp, Homo sapien
tttctgcattattgccgcagagtat

SEQ ID NO: 3350054 - DNA, 25 bp, Homo sapien
tggagacagcataactggctgtttt

SEQ ID NO: 3350055 - DNA, 25 bp, Homo sapien
cagctgcaactgttcgaaaaggttc

SEQ ID NO: 3350056 - DNA, 25 bp, Homo sapien
gctggattgttctgtttgtattatg

SEQ ID NO: 3350057 - DNA, 25 bp, Homo sapien
tctaagaaagcttgagggtaagaat

SEQ ID NO: 3350058 - DNA, 25 bp, Homo sapien
tgaagtagtgctgactcacagcggc

SEQ ID NO: 3350059 - DNA, 25 bp, Homo sapien
tttgtcaatcttactgcttcctcca

SEQ ID NO: 3350060 - DNA, 25 bp, Homo sapien
gcttttgtcaatcttactgcttcct

SEQ ID NO: 3350061 - DNA, 25 bp, Homo sapien
ttttgtcaatcttactgcttcctcc

SEQ ID NO: 3350062 - DNA, 25 bp, Homo sapien
ttgtcaatcttactgcttcctccat

SEQ ID NO: 3350063 - DNA, 25 bp, Homo sapien
ctcttggtgaggtatatgtcagcag

SEQ ID NO: 3350064 - DNA, 25 bp, Homo sapien
cagagtcagctaaagaatatatggc

SEQ ID NO: 3350065 - DNA, 25 bp, Homo sapien
tgctgggtccaaaattgcctgttcc

SEQ ID NO: 3350066 - DNA, 25 bp, Homo sapien
gatccctgtggagtgcatttcgtaa

SEQ ID NO: 3350067 - DNA, 25 bp, Homo sapien
ataagcccaggatacaaatgtttaa

SEQ ID NO: 3350068 - DNA, 25 bp, Homo sapien
aaatggattgcaaaacccagtgaga

SEQ ID NO: 3350069 - DNA, 25 bp, Homo sapien
gcccaggatacaaatgtttaagtta

SEQ ID NO: 3350070 - DNA, 25 bp, Homo sapien
tgggcgatggcgcaagaccatttca

SEQ ID NO: 3350071 - DNA, 25 bp, Homo sapien
accagacgtgcaagaacaatttccc

SEQ ID NO: 3350072 - DNA, 25 bp, Homo sapien
aatttccccatggatgctgcattta

SEQ ID NO: 3350073 - DNA, 25 bp, Homo sapien
tagaaggtgaggaccagacgtgcaa

SEQ ID NO: 3350074 - DNA, 25 bp, Homo sapien
caaaatagaaggtgaggaccagacg

SEQ ID NO: 3350075 - DNA, 25 bp, Homo sapien
tctgatagacttgttcatagccatc

SEQ ID NO: 3350076 - DNA, 25 bp, Homo sapien
catctgcatagcaggtgtaattgcc

SEQ ID NO: 3350077 - DNA, 25 bp, Homo sapien
ccaacgtgagttgtggtaaccttag

SEQ ID NO: 3350078 - DNA, 25 bp, Homo sapien
tagtaatatacaaggacccatcatc

SEQ ID NO: 3350079 - DNA, 25 bp, Homo sapien
ggattacaggtgctacaggcttgtg

SEQ ID NO: 3350080 - DNA, 25 bp, Homo sapien
accacaggagcactccatcacaccc

SEQ ID NO: 3350081 - DNA, 25 bp, Homo sapien
atcacacccagttaattgttggttt

SEQ ID NO: 3350082 - DNA, 25 bp, Homo sapien
gattacaggtgctacaggcttgtgc

SEQ ID NO: 3350083 - DNA, 25 bp, Homo sapien
gcatatccatagacatagaagacgg

SEQ ID NO: 3350084 - DNA, 25 bp, Homo sapien
catagctgtatactattgtatgcaa

SEQ ID NO: 3350085 - DNA, 25 bp, Homo sapien
ggcctttgcatgaatcttgaaatta

SEQ ID NO: 3350086 - DNA, 25 bp, Homo sapien
acggatttgtggtaaccagggactg

SEQ ID NO: 3350087 - DNA, 25 bp, Homo sapien
ctgagcattgaggaagttgcacaca

SEQ ID NO: 3350088 - DNA, 25 bp, Homo sapien
gtttcatgttctgctagagcctgag

SEQ ID NO: 3350089 - DNA, 25 bp, Homo sapien
gcccggcccgattatctgtgaagta

SEQ ID NO: 3350090 - DNA, 25 bp, Homo sapien
tccgactgactaccggcttcaggtg

SEQ ID NO: 3350091 - DNA, 25 bp, Homo sapien
aattcataggagtcattgcattgga

SEQ ID NO: 3350092 - DNA, 25 bp, Homo sapien
gtacattttttaccttaagctgaga

SEQ ID NO: 3350093 - DNA, 25 bp, Homo sapien
tcttagcagttaaatttgcaaggca

SEQ ID NO: 3350094 - DNA, 25 bp, Homo sapien
gaaaagatagctataaccaattaag

SEQ ID NO: 3350095 - DNA, 25 bp, Homo sapien
taccaaattgaagtgtggacctctg

SEQ ID NO: 3350096 - DNA, 25 bp, Homo sapien
gtttttcataagacaaagacaatgg

SEQ ID NO: 3350097 - DNA, 25 bp, Homo sapien
tttgtgacagaaatccaacttcctc

SEQ ID NO: 3350098 - DNA, 25 bp, Homo sapien
ccaatgctccctgctttatttggct

SEQ ID NO: 3350099 - DNA, 25 bp, Homo sapien
aagcttttggatcataaatattctc

SEQ ID NO: 3350100 - DNA, 25 bp, Homo sapien
aacttcctcagctatgccaatgctc

SEQ ID NO: 3350101 - DNA, 25 bp, Homo sapien
cttgaatggcacagctcagaacagc

SEQ ID NO: 3350102 - DNA, 25 bp, Homo sapien
tctggcagactcaactggatcactt

SEQ ID NO: 3350103 - DNA, 25 bp, Homo sapien
tccagataatgggaggtctcagggt

SEQ ID NO: 3350104 - DNA, 25 bp, Homo sapien
tcagaacagcactttgtcccacagt

SEQ ID NO: 3350105 - DNA, 25 bp, Homo sapien
cagcactaagttttgttgggaagca

SEQ ID NO: 3350106 - DNA, 25 bp, Homo sapien
caaaaattacacttgcggcttgcag

SEQ ID NO: 3350107 - DNA, 25 bp, Homo sapien
tctgtggagtagaagccgaatgctg

SEQ ID NO: 3350108 - DNA, 25 bp, Homo sapien
cattttgtgggtcagagccagtcac

SEQ ID NO: 3350109 - DNA, 25 bp, Homo sapien
tctacttgcttaaggtgtaaagtta

SEQ ID NO: 3350110 - DNA, 25 bp, Homo sapien
cataccagggtatcgctttagagta

SEQ ID NO: 3350111 - DNA, 25 bp, Homo sapien
gcaactagtacaaagctgagctcca

SEQ ID NO: 3350112 - DNA, 25 bp, Homo sapien
gatttctcgtgtcatagcactcatg

SEQ ID NO: 3350113 - DNA, 25 bp, Homo sapien
gccatacagtcatcctccaaaaggg

SEQ ID NO: 3350114 - DNA, 25 bp, Homo sapien
gttttgctcgcattattccctctgg

SEQ ID NO: 3350115 - DNA, 25 bp, Homo sapien
tactgagacaacagaggtccactcc

SEQ ID NO: 3350116 - DNA, 25 bp, Homo sapien
tacgagccactagaggtgcagtcct

SEQ ID NO: 3350117 - DNA, 25 bp, Homo sapien
tagaagggactgttaatactgagac

SEQ ID NO: 3350118 - DNA, 25 bp, Homo sapien
ctaaaatagcatcagtatattttct

SEQ ID NO: 3350119 - DNA, 25 bp, Homo sapien
atattttctaaaatagcatcagtat

SEQ ID NO: 3350120 - DNA, 25 bp, Homo sapien
ttttctaaaatagcatcagtatatt

SEQ ID NO: 3350121 - DNA, 25 bp, Homo sapien
tctaaaatagcatcagtatattttc

SEQ ID NO: 3350122 - DNA, 25 bp, Homo sapien
ttaattggcctatatgcctgggttt

SEQ ID NO: 3350123 - DNA, 25 bp, Homo sapien
attttatttaattggcctatatgcc

SEQ ID NO: 3350124 - DNA, 25 bp, Homo sapien
ttattccaagactatactgttttga

SEQ ID NO: 3350125 - DNA, 25 bp, Homo sapien
aattaggacttacgatacttccagt

SEQ ID NO: 3350126 - DNA, 25 bp, Homo sapien
ggaaacatttgtacactattgatgg

SEQ ID NO: 3350127 - DNA, 25 bp, Homo sapien
ggaaaaagcatggagatcagtcaaa

SEQ ID NO: 3350128 - DNA, 25 bp, Homo sapien
ggatgatcccagaggccattatgct

SEQ ID NO: 3350129 - DNA, 25 bp, Homo sapien
tgtaaatcggtgtagtcactaggaa

SEQ ID NO: 3350130 - DNA, 25 bp, Homo sapien
tgtgcttacctttaaccaaatgtac

SEQ ID NO: 3350131 - DNA, 25 bp, Homo sapien
ggcttttccttgacaggtagtctat

SEQ ID NO: 3350132 - DNA, 25 bp, Homo sapien
aaccatgaggttatcctgttttcca

SEQ ID NO: 3350133 - DNA, 25 bp, Homo sapien
tctaattggatcacttaatgccaga

SEQ ID NO: 3350134 - DNA, 25 bp, Homo sapien
gaaaagacttacacgattggcgaat

SEQ ID NO: 3350135 - DNA, 25 bp, Homo sapien
tcacatgaaaagacttacacgattg

SEQ ID NO: 3350136 - DNA, 25 bp, Homo sapien
catgaaaagacttacacgattggcg

SEQ ID NO: 3350137 - DNA, 25 bp, Homo sapien
tgaaaagacttacacgattggcgaa

SEQ ID NO: 3350138 - DNA, 25 bp, Homo sapien
aatgaccatcaataagggcatttga

SEQ ID NO: 3350139 - DNA, 25 bp, Homo sapien
cagaagatgtatgattaaatgacca

SEQ ID NO: 3350140 - DNA, 25 bp, Homo sapien
taactatggacagaagatgtatgat

SEQ ID NO: 3350141 - DNA, 25 bp, Homo sapien
ttaaggtactaactatggacagaag

SEQ ID NO: 3350142 - DNA, 25 bp, Homo sapien
tacgagtatgtttgtcccttagatg

SEQ ID NO: 3350143 - DNA, 25 bp, Homo sapien
tcacaccatgtgatttatgtacaaa

SEQ ID NO: 3350144 - DNA, 25 bp, Homo sapien
tatgttgagaatatatacgagtatg

SEQ ID NO: 3350145 - DNA, 25 bp, Homo sapien
cattacagcatatatccatgtgaca

SEQ ID NO: 3350146 - DNA, 25 bp, Homo sapien
gaacccgtatagcaacagcaacaca

SEQ ID NO: 3350147 - DNA, 25 bp, Homo sapien
ttccctaagaacccgtatagcaaca

SEQ ID NO: 3350148 - DNA, 25 bp, Homo sapien
ccctaagaacccgtatagcaacagc

SEQ ID NO: 3350149 - DNA, 25 bp, Homo sapien
aagaacccgtatagcaacagcaaca

SEQ ID NO: 3350150 - DNA, 25 bp, Homo sapien
ccaagcatggctgtagaagttgcct

SEQ ID NO: 3350151 - DNA, 25 bp, Homo sapien
tactcttgttgatgctgggtaaact

SEQ ID NO: 3350152 - DNA, 25 bp, Homo sapien
ttccactgttgcaccaccaacaata

SEQ ID NO: 3350153 - DNA, 25 bp, Homo sapien
gaagttgcctacttctgttagtcaa

SEQ ID NO: 3350154 - DNA, 25 bp, Homo sapien
cagcttgtactatgagagcaagcaa

SEQ ID NO: 3350155 - DNA, 25 bp, Homo sapien
taagaaacagcttgtactatgagag

SEQ ID NO: 3350156 - DNA, 25 bp, Homo sapien
atagaccatattgtgtaaagcaaca

SEQ ID NO: 3350157 - DNA, 25 bp, Homo sapien
catattgtgtaaagcaacaggaaaa

SEQ ID NO: 3350158 - DNA, 25 bp, Homo sapien
caaagagatccttgccaagttcttc

SEQ ID NO: 3350159 - DNA, 25 bp, Homo sapien
tttcaatagaacatacaaagtacaa

SEQ ID NO: 3350160 - DNA, 25 bp, Homo sapien
agtacaatcaaagagatccttgcca

SEQ ID NO: 3350161 - DNA, 25 bp, Homo sapien
caatcaaagagatccttgccaagtt

SEQ ID NO: 3350162 - DNA, 25 bp, Homo sapien
gcaaaatccacctcaagatatgtta

SEQ ID NO: 3350163 - DNA, 25 bp, Homo sapien
tattcactgttaagggtaggagcaa

SEQ ID NO: 3350164 - DNA, 25 bp, Homo sapien
tagggatcatcaagaagtcagcaaa

SEQ ID NO: 3350165 - DNA, 25 bp, Homo sapien
ccaaacctatattcactgttaaggg

SEQ ID NO: 3350166 - DNA, 25 bp, Homo sapien
tatgtcgtcgccattaggattttca

SEQ ID NO: 3350167 - DNA, 25 bp, Homo sapien
ctgagttagttcattaatatctaca

SEQ ID NO: 3350168 - DNA, 25 bp, Homo sapien
gcttcttccgagatatgtcgtcgcc

SEQ ID NO: 3350169 - DNA, 25 bp, Homo sapien
tttgatccaccaatagcttcttccg

SEQ ID NO: 3350170 - DNA, 25 bp, Homo sapien
ttttgtaaatctaatagcatatttt

SEQ ID NO: 3350171 - DNA, 25 bp, Homo sapien
ttgtaaatctaatagcatatttttc

SEQ ID NO: 3350172 - DNA, 25 bp, Homo sapien
gtaaatctaatagcatatttttcat

SEQ ID NO: 3350173 - DNA, 25 bp, Homo sapien
ttgattttgtaaatctaatagcata

SEQ ID NO: 3350174 - DNA, 25 bp, Homo sapien
tgctgtattcagtagtcttgcactt

SEQ ID NO: 3350175 - DNA, 25 bp, Homo sapien
ttgctgtattcagtagtcttgcact

SEQ ID NO: 3350176 - DNA, 25 bp, Homo sapien
cttgctgtattcagtagtcttgcac

SEQ ID NO: 3350177 - DNA, 25 bp, Homo sapien
gctgtattcagtagtcttgcactta

SEQ ID NO: 3350178 - DNA, 25 bp, Homo sapien
tcacttagtaatatgaatgtatgtt

SEQ ID NO: 3350179 - DNA, 25 bp, Homo sapien
tgtactccatctattcatcactttc

SEQ ID NO: 3350180 - DNA, 25 bp, Homo sapien
ttagtaatatgaatgtatgtttcca

SEQ ID NO: 3350181 - DNA, 25 bp, Homo sapien
tcctctgtactccatctattcatca

SEQ ID NO: 3350182 - DNA, 25 bp, Homo sapien
ctgttttgatgctagaagcaaagag

SEQ ID NO: 3350183 - DNA, 25 bp, Homo sapien
tgtaaacatagcacaccacggtagt

SEQ ID NO: 3350184 - DNA, 25 bp, Homo sapien
agtgagttatgagagatccaataaa

SEQ ID NO: 3350185 - DNA, 25 bp, Homo sapien
gatatccctttatgatgccctgatg

SEQ ID NO: 3350186 - DNA, 25 bp, Homo sapien
tgataagttctttgggatcatatta

SEQ ID NO: 3350187 - DNA, 25 bp, Homo sapien
cctctctcagtagtctgataagttc

SEQ ID NO: 3350188 - DNA, 25 bp, Homo sapien
atgtgtttccacatgttgctctatc

SEQ ID NO: 3350189 - DNA, 25 bp, Homo sapien
ccacatgttgctctatctgtcccag

SEQ ID NO: 3350190 - DNA, 25 bp, Homo sapien
gctgctaaagggtcccagtggtgat

SEQ ID NO: 3350191 - DNA, 25 bp, Homo sapien
tattagaaagaacaccctggaaaca

SEQ ID NO: 3350192 - DNA, 25 bp, Homo sapien
tgttgaggatacgttgttgaagagc

SEQ ID NO: 3350193 - DNA, 25 bp, Homo sapien
tcatggaggctcttgcatgctcttt

SEQ ID NO: 3350194 - DNA, 25 bp, Homo sapien
gactcaagatgggatagattggaat

SEQ ID NO: 3350195 - DNA, 25 bp, Homo sapien
taaaggagactcaagatgggataga

SEQ ID NO: 3350196 - DNA, 25 bp, Homo sapien
actgaaataaaggagactcaagatg

SEQ ID NO: 3350197 - DNA, 25 bp, Homo sapien
tgtgcttgaaacatgttagaaatac

SEQ ID NO: 3350198 - DNA, 25 bp, Homo sapien
tcccgatggtagagctgatgcagag

SEQ ID NO: 3350199 - DNA, 25 bp, Homo sapien
ggaatggacatgctacccagctgta

SEQ ID NO: 3350200 - DNA, 25 bp, Homo sapien
gcactacagttttctttcgggaaga

SEQ ID NO: 3350201 - DNA, 25 bp, Homo sapien
cagctgtatcaaccatgggattcta

SEQ ID NO: 3350202 - DNA, 25 bp, Homo sapien
cactagatgggaagcctctgccctt

SEQ ID NO: 3350203 - DNA, 25 bp, Homo sapien
tacaatattgtagccttaggcagac

SEQ ID NO: 3350204 - DNA, 25 bp, Homo sapien
aaacataggcaagtgagatattaca

SEQ ID NO: 3350205 - DNA, 25 bp, Homo sapien
tgtcccagttcaggttaacttactg

SEQ ID NO: 3350206 - DNA, 25 bp, Homo sapien
tcttcattgtgaacaatggtaatct

SEQ ID NO: 3350207 - DNA, 25 bp, Homo sapien
cattgtgaacaatggtaatcttttg

SEQ ID NO: 3350208 - DNA, 25 bp, Homo sapien
taaagaagcagtcttcattgtgaac

SEQ ID NO: 3350209 - DNA, 25 bp, Homo sapien
gaagcagtcttcattgtgaacaatg

SEQ ID NO: 3350210 - DNA, 25 bp, Homo sapien
cacacaggtttgtagtgacgtttgc

SEQ ID NO: 3350211 - DNA, 25 bp, Homo sapien
gacgtttgcaaaggtccatacaggc

SEQ ID NO: 3350212 - DNA, 25 bp, Homo sapien
aggcaagcagctctgtgcacttcac

SEQ ID NO: 3350213 - DNA, 25 bp, Homo sapien
tctgctggtaacacagtgtcttccc

SEQ ID NO: 3350214 - DNA, 25 bp, Homo sapien
ttagaaacaatgtcagattttttaa

SEQ ID NO: 3350215 - DNA, 25 bp, Homo sapien
tgcattagaaacaatgtcagatttt

SEQ ID NO: 3350216 - DNA, 25 bp, Homo sapien
ctgatctttaatagctttaaggagt

SEQ ID NO: 3350217 - DNA, 25 bp, Homo sapien
aagctgatctttaatagctttaagg

SEQ ID NO: 3350218 - DNA, 25 bp, Homo sapien
cactgggaccgtagaagctgatctt

SEQ ID NO: 3350219 - DNA, 25 bp, Homo sapien
tcactgggaccgtagaagctgatct

SEQ ID NO: 3350220 - DNA, 25 bp, Homo sapien
tggcacagcctgtagcagtcaggcc

SEQ ID NO: 3350221 - DNA, 25 bp, Homo sapien
tggcgctgcagtgcttcatactctg

SEQ ID NO: 3350222 - DNA, 25 bp, Homo sapien
tctgctgtcctgagcaattatgcct

SEQ ID NO: 3350223 - DNA, 25 bp, Homo sapien
tactctggaaagtaccaggtgcctc

SEQ ID NO: 3350224 - DNA, 25 bp, Homo sapien
ttgacctaaacttcctttcaatatc

SEQ ID NO: 3350225 - DNA, 25 bp, Homo sapien
atctccaatgtttgacctaaacttc

SEQ ID NO: 3350226 - DNA, 25 bp, Homo sapien
tttctagaataggataactgaatgg

SEQ ID NO: 3350227 - DNA, 25 bp, Homo sapien
ttaagcaaactaagagcctcatgga

SEQ ID NO: 3350228 - DNA, 25 bp, Homo sapien
atcactcgcagagccttcacagagg

SEQ ID NO: 3350229 - DNA, 25 bp, Homo sapien
gcaaaagtgcattgagcttgataaa

SEQ ID NO: 3350230 - DNA, 25 bp, Homo sapien
ggaggtctgggttgtgctggctctc

SEQ ID NO: 3350231 - DNA, 25 bp, Homo sapien
taacagatgggctgaatgctatcat

SEQ ID NO: 3350232 - DNA, 25 bp, Homo sapien
ggctgaatgctatcatcatgtagat

SEQ ID NO: 3350233 - DNA, 25 bp, Homo sapien
tcatcatgtagattatctgcaagca

SEQ ID NO: 3350234 - DNA, 25 bp, Homo sapien
ccacataacagatgggctgaatgct

SEQ ID NO: 3350235 - DNA, 25 bp, Homo sapien
aaggtgaggagagcagatcacctga

SEQ ID NO: 3350236 - DNA, 25 bp, Homo sapien
ggaaggtgaggagagcagatcacct

SEQ ID NO: 3350237 - DNA, 25 bp, Homo sapien
tttgggaaggtgaggagagcagatc

SEQ ID NO: 3350238 - DNA, 25 bp, Homo sapien
tgggaaggtgaggagagcagatcac

SEQ ID NO: 3350239 - DNA, 25 bp, Homo sapien
tttgactcttgaactttcttgattt

SEQ ID NO: 3350240 - DNA, 25 bp, Homo sapien
ctttgactcttgaactttcttgatt

SEQ ID NO: 3350241 - DNA, 25 bp, Homo sapien
ttgactcttgaactttcttgatttt

SEQ ID NO: 3350242 - DNA, 25 bp, Homo sapien
cagtttctactatgcttgtatgcat

SEQ ID NO: 3350243 - DNA, 25 bp, Homo sapien
ttactcctcagtgtcagatccagca

SEQ ID NO: 3350244 - DNA, 25 bp, Homo sapien
tactcctcagtgtcagatccagcat

SEQ ID NO: 3350245 - DNA, 25 bp, Homo sapien
tcctcagtgtcagatccagcatagc

SEQ ID NO: 3350246 - DNA, 25 bp, Homo sapien
ctcctcagtgtcagatccagcatag

SEQ ID NO: 3350247 - DNA, 25 bp, Homo sapien
gataggatttaaggccatatcctcc

SEQ ID NO: 3350248 - DNA, 25 bp, Homo sapien
gcaatctcattagaggctgatagga

SEQ ID NO: 3350249 - DNA, 25 bp, Homo sapien
ttggttggccttccttccgactcca

SEQ ID NO: 3350250 - DNA, 25 bp, Homo sapien
gaatccgagaaccaagacaactgac

SEQ ID NO: 3350251 - DNA, 25 bp, Homo sapien
tagatatcaggaagctgtagtcttt

SEQ ID NO: 3350252 - DNA, 25 bp, Homo sapien
ctagatatcaggaagctgtagtctt

SEQ ID NO: 3350253 - DNA, 25 bp, Homo sapien
ttttggtggtctgctggtatcctgt

SEQ ID NO: 3350254 - DNA, 25 bp, Homo sapien
gctggtatcctgtaggaccgcttac

SEQ ID NO: 3350255 - DNA, 25 bp, Homo sapien
gagtgattaccttatttgaggctct

SEQ ID NO: 3350256 - DNA, 25 bp, Homo sapien
tccagatatgtcaagccccacagag

SEQ ID NO: 3350257 - DNA, 25 bp, Homo sapien
gctgcattagggcaaagaaaactgt

SEQ ID NO: 3350258 - DNA, 25 bp, Homo sapien
taagaaacaacttcaagtacaagtg

SEQ ID NO: 3350259 - DNA, 25 bp, Homo sapien
tgcctctctcgacagctagagtcat

SEQ ID NO: 3350260 - DNA, 25 bp, Homo sapien
tctgagattctctgacgaccttgcc

SEQ ID NO: 3350261 - DNA, 25 bp, Homo sapien
gaccttgcctctctcgacagctaga

SEQ ID NO: 3350262 - DNA, 25 bp, Homo sapien
gattctctgacgaccttgcctctct

SEQ ID NO: 3350263 - DNA, 25 bp, Homo sapien
taatgcgattactgggtagatagcc

SEQ ID NO: 3350264 - DNA, 25 bp, Homo sapien
taaggagactagtgcaaagaatgtc

SEQ ID NO: 3350265 - DNA, 25 bp, Homo sapien
tagcaagcactggagtctacaagag

SEQ ID NO: 3350266 - DNA, 25 bp, Homo sapien
cagacctcagcatcagggaatatat

SEQ ID NO: 3350267 - DNA, 25 bp, Homo sapien
cattcaattaccaacagcacaagcg

SEQ ID NO: 3350268 - DNA, 25 bp, Homo sapien
gcgactataatacaagcgaatactg

SEQ ID NO: 3350269 - DNA, 25 bp, Homo sapien
gggatgacatttgctagtcaacagc

SEQ ID NO: 3350270 - DNA, 25 bp, Homo sapien
tttacatccacctctaacctgaggg

SEQ ID NO: 3350271 - DNA, 25 bp, Homo sapien
caagagggcgttgccttcaggtgct

SEQ ID NO: 3350272 - DNA, 25 bp, Homo sapien
ccaaagtcacgcctgaatgagcgcc

SEQ ID NO: 3350273 - DNA, 25 bp, Homo sapien
cagaaagattcctaaacgctgtgga

SEQ ID NO: 3350274 - DNA, 25 bp, Homo sapien
gtcctgttggtgaagcgggtcccac

SEQ ID NO: 3350275 - DNA, 25 bp, Homo sapien
tttcaaagacataaccccttggaga

SEQ ID NO: 3350276 - DNA, 25 bp, Homo sapien
ggagtgatgctaacagggatacaaa

SEQ ID NO: 3350277 - DNA, 25 bp, Homo sapien
tcttggcattctaaatgaagccgga

SEQ ID NO: 3350278 - DNA, 25 bp, Homo sapien
ggagcaccaaccatggtccttctga

SEQ ID NO: 3350279 - DNA, 25 bp, Homo sapien
tttcttattgatagaatcatcattc

SEQ ID NO: 3350280 - DNA, 25 bp, Homo sapien
ttttcttattgatagaatcatcatt

SEQ ID NO: 3350281 - DNA, 25 bp, Homo sapien
tttttcttattgatagaatcatcat

SEQ ID NO: 3350282 - DNA, 25 bp, Homo sapien
cccttttatcccgctccagcatttt

SEQ ID NO: 3350283 - DNA, 25 bp, Homo sapien
ccttttatcccgctccagcattttt

SEQ ID NO: 3350284 - DNA, 25 bp, Homo sapien
tttcccttttatcccgctccagcat

SEQ ID NO: 3350285 - DNA, 25 bp, Homo sapien
catttcccttttatcccgctccagc

SEQ ID NO: 3350286 - DNA, 25 bp, Homo sapien
tagattttctatgcccaatctcttg

SEQ ID NO: 3350287 - DNA, 25 bp, Homo sapien
tttctatgcccaatctcttgatttc

SEQ ID NO: 3350288 - DNA, 25 bp, Homo sapien
tctatgcccaatctcttgatttcct

SEQ ID NO: 3350289 - DNA, 25 bp, Homo sapien
ctcccttagattttctatgcccaat

SEQ ID NO: 3350290 - DNA, 25 bp, Homo sapien
tggcacaatctaataatcatcattt

SEQ ID NO: 3350291 - DNA, 25 bp, Homo sapien
tcattaattttacggatatgtggca

SEQ ID NO: 3350292 - DNA, 25 bp, Homo sapien
ggcacaatctaataatcatcatttt

SEQ ID NO: 3350293 - DNA, 25 bp, Homo sapien
cccagtcattaattttacggatatg

SEQ ID NO: 3350294 - DNA, 25 bp, Homo sapien
gacgcaggtagaagattaggccact

SEQ ID NO: 3350295 - DNA, 25 bp, Homo sapien
tatgtgtagcctgaggacgcaggta

SEQ ID NO: 3350296 - DNA, 25 bp, Homo sapien
caacgaagttggtaagattcttagg

SEQ ID NO: 3350297 - DNA, 25 bp, Homo sapien
tttcctgagttcaacgaagttggta

SEQ ID NO: 3350298 - DNA, 25 bp, Homo sapien
gacttcttgtctcgccatcacttaa

SEQ ID NO: 3350299 - DNA, 25 bp, Homo sapien
ctaattgtcatatcctaacttgtgg

SEQ ID NO: 3350300 - DNA, 25 bp, Homo sapien
tcctaacttgtggtctgatagactt

SEQ ID NO: 3350301 - DNA, 25 bp, Homo sapien
cagccttgaatttaagtacattgaa

SEQ ID NO: 3350302 - DNA, 25 bp, Homo sapien
gcactatcaatatacgtttcccatt

SEQ ID NO: 3350303 - DNA, 25 bp, Homo sapien
tatcaatatacgtttcccatttcca

SEQ ID NO: 3350304 - DNA, 25 bp, Homo sapien
ttttagcactatcaatatacgtttc

SEQ ID NO: 3350305 - DNA, 25 bp, Homo sapien
tagcactatcaatatacgtttccca

SEQ ID NO: 3350306 - DNA, 25 bp, Homo sapien
gaaccactactaattccaggcattt

SEQ ID NO: 3350307 - DNA, 25 bp, Homo sapien
agcagttagtgaagcagctttggaa

SEQ ID NO: 3350308 - DNA, 25 bp, Homo sapien
tattcaggggagcagtggcatcacc

SEQ ID NO: 3350309 - DNA, 25 bp, Homo sapien
tgggagcgtaaaaaggaacaatggc

SEQ ID NO: 3350310 - DNA, 25 bp, Homo sapien
tgtgacacagacctgatccatatga

SEQ ID NO: 3350311 - DNA, 25 bp, Homo sapien
tgacacagacctgatccatatgaca

SEQ ID NO: 3350312 - DNA, 25 bp, Homo sapien
gtgacacagacctgatccatatgac

SEQ ID NO: 3350313 - DNA, 25 bp, Homo sapien
gtagcacaaccacagatttcagtgc

SEQ ID NO: 3350314 - DNA, 25 bp, Homo sapien
tgtcctcaactatagtttctgagca

SEQ ID NO: 3350315 - DNA, 25 bp, Homo sapien
ccacagatttcagtgcagaggtgtc

SEQ ID NO: 3350316 - DNA, 25 bp, Homo sapien
tcttgatgcccttcataaccagttg

SEQ ID NO: 3350317 - DNA, 25 bp, Homo sapien
tctactacagtggacattggaacat

SEQ ID NO: 3350318 - DNA, 25 bp, Homo sapien
cgtctactacagtggacattggaac

SEQ ID NO: 3350319 - DNA, 25 bp, Homo sapien
tactacagtggacattggaacatat

SEQ ID NO: 3350320 - DNA, 25 bp, Homo sapien
tacagtggacattggaacatatttc

SEQ ID NO: 3350321 - DNA, 25 bp, Homo sapien
agaccaacggatggctgttatcctt

SEQ ID NO: 3350322 - DNA, 25 bp, Homo sapien
cggatggctgttatcctttaaaagt

SEQ ID NO: 3350323 - DNA, 25 bp, Homo sapien
caacggatggctgttatcctttaaa

SEQ ID NO: 3350324 - DNA, 25 bp, Homo sapien
taagaccaacggatggctgttatcc

SEQ ID NO: 3350325 - DNA, 25 bp, Homo sapien
ctattcttcagacacagtatcttta

SEQ ID NO: 3350326 - DNA, 25 bp, Homo sapien
tattcttcagacacagtatctttac

SEQ ID NO: 3350327 - DNA, 25 bp, Homo sapien
taatttcgtagatggtcttgtatgc

SEQ ID NO: 3350328 - DNA, 25 bp, Homo sapien
ctttgtaatttcgtagatggtcttg

SEQ ID NO: 3350329 - DNA, 25 bp, Homo sapien
gtaatttcgtagatggtcttgtatg

SEQ ID NO: 3350330 - DNA, 25 bp, Homo sapien
caagagtcatgctgccgcttaggag

SEQ ID NO: 3350331 - DNA, 25 bp, Homo sapien
cagatatttgtcacaagagtcatgc

SEQ ID NO: 3350332 - DNA, 25 bp, Homo sapien
cttgggacagcaaccagatatttgt

SEQ ID NO: 3350333 - DNA, 25 bp, Homo sapien
agcaaccagatatttgtcacaagag

SEQ ID NO: 3350334 - DNA, 25 bp, Homo sapien
tctttattcgcccatgattctctat

SEQ ID NO: 3350335 - DNA, 25 bp, Homo sapien
tttatcctctttattcgcccatgat

SEQ ID NO: 3350336 - DNA, 25 bp, Homo sapien
gtgaaaataacagtgcttgtctgcc

SEQ ID NO: 3350337 - DNA, 25 bp, Homo sapien
cttgtctgcctgtggacctgtagct

SEQ ID NO: 3350338 - DNA, 25 bp, Homo sapien
tgaaacctcacagattctaagaggg

SEQ ID NO: 3350339 - DNA, 25 bp, Homo sapien
tgtacactgaaacctcacagattct

SEQ ID NO: 3350340 - DNA, 25 bp, Homo sapien
acctcacagattctaagagggccat

SEQ ID NO: 3350341 - DNA, 25 bp, Homo sapien
ctctagaggtcaaattaattctgtt

SEQ ID NO: 3350342 - DNA, 25 bp, Homo sapien
gcagaagaggagcagctagataacc

SEQ ID NO: 3350343 - DNA, 25 bp, Homo sapien
cagaagaggagcagctagataacca

SEQ ID NO: 3350344 - DNA, 25 bp, Homo sapien
tggtgccccaggtgttcccctctct

SEQ ID NO: 3350345 - DNA, 25 bp, Homo sapien
ctctctgctgggtctgttttaaaag

SEQ ID NO: 3350346 - DNA, 25 bp, Homo sapien
tagtggtgccccaggtgttcccctc

SEQ ID NO: 3350347 - DNA, 25 bp, Homo sapien
tgctgggtctgttttaaaagattcc

SEQ ID NO: 3350348 - DNA, 25 bp, Homo sapien
gttttagtgtaaagtgcattgcatt

SEQ ID NO: 3350349 - DNA, 25 bp, Homo sapien
tcagcatagttttagtgtaaagtgc

SEQ ID NO: 3350350 - DNA, 25 bp, Homo sapien
attttttcacctcatacgctcccca

SEQ ID NO: 3350351 - DNA, 25 bp, Homo sapien
gatattccctgcttcaactgtctta

SEQ ID NO: 3350352 - DNA, 25 bp, Homo sapien
tactccttatgtagttgttcaaatt

SEQ ID NO: 3350353 - DNA, 25 bp, Homo sapien
atattttgtcatactccttatgtag

SEQ ID NO: 3350354 - DNA, 25 bp, Homo sapien
tgtatattttgtcatactccttatg

SEQ ID NO: 3350355 - DNA, 25 bp, Homo sapien
tatgtagttgttcaaatttactacc

SEQ ID NO: 3350356 - DNA, 25 bp, Homo sapien
ccttgcaagctggaatcactctcta

SEQ ID NO: 3350357 - DNA, 25 bp, Homo sapien
cttgcaagctggaatcactctctag

SEQ ID NO: 3350358 - DNA, 25 bp, Homo sapien
aagggtaatttcctgaggctgcatc

SEQ ID NO: 3350359 - DNA, 25 bp, Homo sapien
cagcccacaagaagggtaatttcct

SEQ ID NO: 3350360 - DNA, 25 bp, Homo sapien
tcgccccaacgacctacagcctctt

SEQ ID NO: 3350361 - DNA, 25 bp, Homo sapien
cacgtgagaaggttgtgcactctca

SEQ ID NO: 3350362 - DNA, 25 bp, Homo sapien
tgagaaggttgtgcactctcagcat

SEQ ID NO: 3350363 - DNA, 25 bp, Homo sapien
tcccacgtgagaaggttgtgcactc

SEQ ID NO: 3350364 - DNA, 25 bp, Homo sapien
tcaggtgtcagcttggtcagcaatt

SEQ ID NO: 3350365 - DNA, 25 bp, Homo sapien
gaactaccgcaaacctgatcctcat

SEQ ID NO: 3350366 - DNA, 25 bp, Homo sapien
tttccagaccttccgaactaccgca

SEQ ID NO: 3350367 - DNA, 25 bp, Homo sapien
tcagcttggtcagcaattccttgga

SEQ ID NO: 3350368 - DNA, 25 bp, Homo sapien
tttggggtttgtaacagccatctcc

SEQ ID NO: 3350369 - DNA, 25 bp, Homo sapien
gcataaactcagactgtctttgtag

SEQ ID NO: 3350370 - DNA, 25 bp, Homo sapien
ttctagggatgttgcatgttctttc

SEQ ID NO: 3350371 - DNA, 25 bp, Homo sapien
ttctttctgtggtacgtagaccttg

SEQ ID NO: 3350372 - DNA, 25 bp, Homo sapien
cagtgccacggacagcaagggcagc

SEQ ID NO: 3350373 - DNA, 25 bp, Homo sapien
gtgccacggacagcaagggcagcat

SEQ ID NO: 3350374 - DNA, 25 bp, Homo sapien
agtgccacggacagcaagggcagca

SEQ ID NO: 3350375 - DNA, 25 bp, Homo sapien
aaacggctgccagaaggaatgccag

SEQ ID NO: 3350376 - DNA, 25 bp, Homo sapien
aatggagcaaccaggaccgaaacgg

SEQ ID NO: 3350377 - DNA, 25 bp, Homo sapien
gagcaaccaggaccgaaacggctgc

SEQ ID NO: 3350378 - DNA, 25 bp, Homo sapien
ggaccgaaacggctgccagaaggaa

SEQ ID NO: 3350379 - DNA, 25 bp, Homo sapien
gcttagacttgcattggcatgtaaa

SEQ ID NO: 3350380 - DNA, 25 bp, Homo sapien
tggcatgtaaactctttttggttcc

SEQ ID NO: 3350381 - DNA, 25 bp, Homo sapien
cttttgcttagacttgcattggcat

SEQ ID NO: 3350382 - DNA, 25 bp, Homo sapien
gacttgcattggcatgtaaactctt

SEQ ID NO: 3350383 - DNA, 25 bp, Homo sapien
taagctacaaatgctaaaagcaatt

SEQ ID NO: 3350384 - DNA, 25 bp, Homo sapien
caattaagctacaaatgctaaaagc

SEQ ID NO: 3350385 - DNA, 25 bp, Homo sapien
ttaagctacaaatgctaaaagcaat

SEQ ID NO: 3350386 - DNA, 25 bp, Homo sapien
aattaagctacaaatgctaaaagca

SEQ ID NO: 3350387 - DNA, 25 bp, Homo sapien
cttgaattgtgtcacccataatttc

SEQ ID NO: 3350388 - DNA, 25 bp, Homo sapien
aattgtgtcacccataatttccacg

SEQ ID NO: 3350389 - DNA, 25 bp, Homo sapien
ccaggggcaggtaattgaattacgg

SEQ ID NO: 3350390 - DNA, 25 bp, Homo sapien
tgaacatatgtgatacagtttctgt

SEQ ID NO: 3350391 - DNA, 25 bp, Homo sapien
gacaggatcctaaaatcagtgaaag

SEQ ID NO: 3350392 - DNA, 25 bp, Homo sapien
ggagctccgatatgtctggccacag

SEQ ID NO: 3350393 - DNA, 25 bp, Homo sapien
aaggtcaagggtagagacaggatcc

SEQ ID NO: 3350394 - DNA, 25 bp, Homo sapien
tctcaatggaaaacctataggccag

SEQ ID NO: 3350395 - DNA, 25 bp, Homo sapien
ctggctcttctttctgtccggaatt

SEQ ID NO: 3350396 - DNA, 25 bp, Homo sapien
gctcttctttctgtccggaattatt

SEQ ID NO: 3350397 - DNA, 25 bp, Homo sapien
tggctcttctttctgtccggaatta

SEQ ID NO: 3350398 - DNA, 25 bp, Homo sapien
tctttctgtccggaattattttgta

SEQ ID NO: 3350399 - DNA, 25 bp, Homo sapien
gaagtgccacactccatctgtggtg

SEQ ID NO: 3350400 - DNA, 25 bp, Homo sapien
ttcactcttggagggacctactgcc

SEQ ID NO: 3350401 - DNA, 25 bp, Homo sapien
ccaaagattgcagttgactaggact

SEQ ID NO: 3350402 - DNA, 25 bp, Homo sapien
tattaggcctacaagccagtgtgtg

SEQ ID NO: 3350403 - DNA, 25 bp, Homo sapien
gaatgagtgtcagctccagacttcc

SEQ ID NO: 3350404 - DNA, 25 bp, Homo sapien
aatgtggaggtcagagccaacagca

SEQ ID NO: 3350405 - DNA, 25 bp, Homo sapien
cagcaaggctggacatttggaatga

SEQ ID NO: 3350406 - DNA, 25 bp, Homo sapien
tctgcagcagaagctaaagtatcag

SEQ ID NO: 3350407 - DNA, 25 bp, Homo sapien
ctccattttctagtatgtaatttgt

SEQ ID NO: 3350408 - DNA, 25 bp, Homo sapien
attggactctaggaacagaattcta

SEQ ID NO: 3350409 - DNA, 25 bp, Homo sapien
tctagtatgtaatttgttccacata

SEQ ID NO: 3350410 - DNA, 25 bp, Homo sapien
ggactctaggaacagaattctatct

SEQ ID NO: 3350411 - DNA, 25 bp, Homo sapien
ctgcagtcccccttgctgaggagat

SEQ ID NO: 3350412 - DNA, 25 bp, Homo sapien
agtattcatcaattgcttgttgagt

SEQ ID NO: 3350413 - DNA, 25 bp, Homo sapien
aacttctgggacagctccacaattt

SEQ ID NO: 3350414 - DNA, 25 bp, Homo sapien
gacctgagttttcaataggaggaag

SEQ ID NO: 3350415 - DNA, 25 bp, Homo sapien
ctagtcaaattctgccacaagcgac

SEQ ID NO: 3350416 - DNA, 25 bp, Homo sapien
tctgccacaagcgactggtgaggca

SEQ ID NO: 3350417 - DNA, 25 bp, Homo sapien
gagatttgaatccattccctgccac

SEQ ID NO: 3350418 - DNA, 25 bp, Homo sapien
tgttcttgcttcaagaattccaaca

SEQ ID NO: 3350419 - DNA, 25 bp, Homo sapien
gaattccaacagattcagacgtcat

SEQ ID NO: 3350420 - DNA, 25 bp, Homo sapien
tgcttcaagaattccaacagattca

SEQ ID NO: 3350421 - DNA, 25 bp, Homo sapien
tcaagaattccaacagattcagacg

SEQ ID NO: 3350422 - DNA, 25 bp, Homo sapien
gatagttgtcactcttctcaactcc

SEQ ID NO: 3350423 - DNA, 25 bp, Homo sapien
cgatattccccagaaatgttttgtt

SEQ ID NO: 3350424 - DNA, 25 bp, Homo sapien
ttctcaactcccatgcgatattccc

SEQ ID NO: 3350425 - DNA, 25 bp, Homo sapien
ttgccatggcaacttatatagatag

SEQ ID NO: 3350426 - DNA, 25 bp, Homo sapien
caatagctcgaatacccagggaagc

SEQ ID NO: 3350427 - DNA, 25 bp, Homo sapien
tttccagtgctaatgtgacaatagc

SEQ ID NO: 3350428 - DNA, 25 bp, Homo sapien
gcaccattacttctcaagccaatag

SEQ ID NO: 3350429 - DNA, 25 bp, Homo sapien
cattacttctcaagccaatagagtt

SEQ ID NO: 3350430 - DNA, 25 bp, Homo sapien
ttagcatggaatttctcctgtcagt

SEQ ID NO: 3350431 - DNA, 25 bp, Homo sapien
atggaatttctcctgtcagtcccac

SEQ ID NO: 3350432 - DNA, 25 bp, Homo sapien
gcatggaatttctcctgtcagtccc

SEQ ID NO: 3350433 - DNA, 25 bp, Homo sapien
tagcatggaatttctcctgtcagtc

SEQ ID NO: 3350434 - DNA, 25 bp, Homo sapien
tccacataagcgtttattggcttca

SEQ ID NO: 3350435 - DNA, 25 bp, Homo sapien
tgccacacttgtgctgaccttccac

SEQ ID NO: 3350436 - DNA, 25 bp, Homo sapien
cacataagcgtttattggcttcaag

SEQ ID NO: 3350437 - DNA, 25 bp, Homo sapien
accttccacataagcgtttattggc

SEQ ID NO: 3350438 - DNA, 25 bp, Homo sapien
tgtttggcatggtgggacaagcaaa

SEQ ID NO: 3350439 - DNA, 25 bp, Homo sapien
ggtgggacaagcaaattataatccg

SEQ ID NO: 3350440 - DNA, 25 bp, Homo sapien
tggttcggggtcatcaggatccagt

SEQ ID NO: 3350441 - DNA, 25 bp, Homo sapien
taatccgatagtagttacccaggac

SEQ ID NO: 3350442 - DNA, 25 bp, Homo sapien
cacaaattaattatttcctgtagca

SEQ ID NO: 3350443 - DNA, 25 bp, Homo sapien
ttggttggaatgtacacaaattaat

SEQ ID NO: 3350444 - DNA, 25 bp, Homo sapien
acaatctcatttggttggaatgtac

SEQ ID NO: 3350445 - DNA, 25 bp, Homo sapien
tcagagactgccaaacaatctcatt

SEQ ID NO: 3350446 - DNA, 25 bp, Homo sapien
agcaagacaaggtagatcttcgtgc

SEQ ID NO: 3350447 - DNA, 25 bp, Homo sapien
gggcagcaagacaaggtagatcttc

SEQ ID NO: 3350448 - DNA, 25 bp, Homo sapien
tcaagggcagcaagacaaggtagat

SEQ ID NO: 3350449 - DNA, 25 bp, Homo sapien
gaatgtcagtttcaagggcagcaag

SEQ ID NO: 3350450 - DNA, 25 bp, Homo sapien
tcttcttgaaaagccctcttgtccc

SEQ ID NO: 3350451 - DNA, 25 bp, Homo sapien
aaagccctcttgtcccacttctgtg

SEQ ID NO: 3350452 - DNA, 25 bp, Homo sapien
tgaaaagccctcttgtcccacttct

SEQ ID NO: 3350453 - DNA, 25 bp, Homo sapien
tcctcttcttgaaaagccctcttgt

SEQ ID NO: 3350454 - DNA, 25 bp, Homo sapien
tggcaatccccctccaactgagagc

SEQ ID NO: 3350455 - DNA, 25 bp, Homo sapien
ctggcaatccccctccaactgagag

SEQ ID NO: 3350456 - DNA, 25 bp, Homo sapien
ttaactggcaatccccctccaactg

SEQ ID NO: 3350457 - DNA, 25 bp, Homo sapien
aactggcaatccccctccaactgag

SEQ ID NO: 3350458 - DNA, 25 bp, Homo sapien
cttgttccatagtccgggggctgca

SEQ ID NO: 3350459 - DNA, 25 bp, Homo sapien
ccttgttccatagtccgggggctgc

SEQ ID NO: 3350460 - DNA, 25 bp, Homo sapien
tgttccatagtccgggggctgcatt

SEQ ID NO: 3350461 - DNA, 25 bp, Homo sapien
gccttgttccatagtccgggggctg

SEQ ID NO: 3350462 - DNA, 25 bp, Homo sapien
agcaaatggcccagtcactgaatga

SEQ ID NO: 3350463 - DNA, 25 bp, Homo sapien
tgcagcaaatggcccagtcactgaa

SEQ ID NO: 3350464 - DNA, 25 bp, Homo sapien
gtttgcagcaaatggcccagtcact

SEQ ID NO: 3350465 - DNA, 25 bp, Homo sapien
tttgcagcaaatggcccagtcactg

SEQ ID NO: 3350466 - DNA, 25 bp, Homo sapien
tgcgctacttccaactgcttcaata

SEQ ID NO: 3350467 - DNA, 25 bp, Homo sapien
gctcttattcctcggctgataatgt

SEQ ID NO: 3350468 - DNA, 25 bp, Homo sapien
tattcctcggctgataatgtttgcg

SEQ ID NO: 3350469 - DNA, 25 bp, Homo sapien
gctgataatgtttgcgctacttcca

SEQ ID NO: 3350470 - DNA, 25 bp, Homo sapien
attgtcctccctgtcctcccagtga

SEQ ID NO: 3350471 - DNA, 25 bp, Homo sapien
cattgtcctccctgtcctcccagtg

SEQ ID NO: 3350472 - DNA, 25 bp, Homo sapien
cctccctgtcctcccagtgaccagc

SEQ ID NO: 3350473 - DNA, 25 bp, Homo sapien
tgtcctccctgtcctcccagtgacc

SEQ ID NO: 3350474 - DNA, 25 bp, Homo sapien
cttgactgtgtgtttcaggacatcc

SEQ ID NO: 3350475 - DNA, 25 bp, Homo sapien
atccaaatagcgcagctcctcagac

SEQ ID NO: 3350476 - DNA, 25 bp, Homo sapien
tccaaatagcgcagctcctcagaca

SEQ ID NO: 3350477 - DNA, 25 bp, Homo sapien
gactgtgtgtttcaggacatccaaa

SEQ ID NO: 3350478 - DNA, 25 bp, Homo sapien
gcagcagtagggagacaagctgaca

SEQ ID NO: 3350479 - DNA, 25 bp, Homo sapien
ttctctccaccgcaggttgcagagc

SEQ ID NO: 3350480 - DNA, 25 bp, Homo sapien
ctccaccgcaggttgcagagcagca

SEQ ID NO: 3350481 - DNA, 25 bp, Homo sapien
caagctgacacgttccttcatttat

SEQ ID NO: 3350482 - DNA, 25 bp, Homo sapien
agatgttgttagcccttcccaccac

SEQ ID NO: 3350483 - DNA, 25 bp, Homo sapien
tgcatagataagttcagcacttccc

SEQ ID NO: 3350484 - DNA, 25 bp, Homo sapien
ctgcatagataagttcagcacttcc

SEQ ID NO: 3350485 - DNA, 25 bp, Homo sapien
gcagatgttgttagcccttcccacc

SEQ ID NO: 3350486 - DNA, 25 bp, Homo sapien
tataaaattccttaaggagagaagc

SEQ ID NO: 3350487 - DNA, 25 bp, Homo sapien
attccttaaggagagaagcatctgc

SEQ ID NO: 3350488 - DNA, 25 bp, Homo sapien
aaaattccttaaggagagaagcatc

SEQ ID NO: 3350489 - DNA, 25 bp, Homo sapien
tccttaaggagagaagcatctgctg

SEQ ID NO: 3350490 - DNA, 25 bp, Homo sapien
cagacattcacaggtatagccgctg

SEQ ID NO: 3350491 - DNA, 25 bp, Homo sapien
aatcaccagtgaagtagaagcagca

SEQ ID NO: 3350492 - DNA, 25 bp, Homo sapien
gatgattacaaggagtccggtccca

SEQ ID NO: 3350493 - DNA, 25 bp, Homo sapien
aagcagcacttgctccagtagactg

SEQ ID NO: 3350494 - DNA, 25 bp, Homo sapien
taatgcttccactccgagtttctga

SEQ ID NO: 3350495 - DNA, 25 bp, Homo sapien
cacttcaccttgaggcttggctggt

SEQ ID NO: 3350496 - DNA, 25 bp, Homo sapien
tctgaggaatctgaaggcacttcac

SEQ ID NO: 3350497 - DNA, 25 bp, Homo sapien
ctggtggaagcgatcttcggaagcc

SEQ ID NO: 3350498 - DNA, 25 bp, Homo sapien
tgaatcggtgggacccagaaagcga

SEQ ID NO: 3350499 - DNA, 25 bp, Homo sapien
ctgcttcgagtgaatcggtgggacc

SEQ ID NO: 3350500 - DNA, 25 bp, Homo sapien
cagaaagcgaggctgagatcttgat

SEQ ID NO: 3350501 - DNA, 25 bp, Homo sapien
agcgaggctgagatcttgatatttg

SEQ ID NO: 3350502 - DNA, 25 bp, Homo sapien
agtggtcttcaatcgcagtccggga

SEQ ID NO: 3350503 - DNA, 25 bp, Homo sapien
ccaggtgcaagcctcggaaaaggcc

SEQ ID NO: 3350504 - DNA, 25 bp, Homo sapien
cgcccaggatgtcgacactcagaag

SEQ ID NO: 3350505 - DNA, 25 bp, Homo sapien
tgactatcacgaccagctccaggtg

SEQ ID NO: 3350506 - DNA, 25 bp, Homo sapien
tttgaaatggctcagcagtcacaag

SEQ ID NO: 3350507 - DNA, 25 bp, Homo sapien
tcagcagtcacaagtataaaccacg

SEQ ID NO: 3350508 - DNA, 25 bp, Homo sapien
cacgatgtctgaatgctgttatcaa

SEQ ID NO: 3350509 - DNA, 25 bp, Homo sapien
tataaaccacgatgtctgaatgctg

SEQ ID NO: 3350510 - DNA, 25 bp, Homo sapien
gcgtgacaagcttcaccaagtttga

SEQ ID NO: 3350511 - DNA, 25 bp, Homo sapien
tttctgacattactaggaccattgc

SEQ ID NO: 3350512 - DNA, 25 bp, Homo sapien
tacttgggacagtgctgagctaatg

SEQ ID NO: 3350513 - DNA, 25 bp, Homo sapien
gagctaatgtgatacggcgtgacaa

SEQ ID NO: 3350514 - DNA, 25 bp, Homo sapien
caagcagccgcttgtctatgaattt

SEQ ID NO: 3350515 - DNA, 25 bp, Homo sapien
agccgcttgtctatgaatttcttca

SEQ ID NO: 3350516 - DNA, 25 bp, Homo sapien
aagcttaattcaagcagccgcttgt

SEQ ID NO: 3350517 - DNA, 25 bp, Homo sapien
gcttaattcaagcagccgcttgtct

SEQ ID NO: 3350518 - DNA, 25 bp, Homo sapien
tacagtgcaccagtgggtcttgcct

SEQ ID NO: 3350519 - DNA, 25 bp, Homo sapien
gatgctagctagcacacgctagttg

SEQ ID NO: 3350520 - DNA, 25 bp, Homo sapien
gaacctggagatttgttgaagtcag

SEQ ID NO: 3350521 - DNA, 25 bp, Homo sapien
tagcaattcataggttaatcaccca

SEQ ID NO: 3350522 - DNA, 25 bp, Homo sapien
tcattcactggcacttggtaaggta

SEQ ID NO: 3350523 - DNA, 25 bp, Homo sapien
gattgctttgaccacctgttgttgc

SEQ ID NO: 3350524 - DNA, 25 bp, Homo sapien
cagcttctgtactggacttgattgc

SEQ ID NO: 3350525 - DNA, 25 bp, Homo sapien
caaagactctcgcttggaagccaga

SEQ ID NO: 3350526 - DNA, 25 bp, Homo sapien
tgtaataatctcatggcaaaatttc

SEQ ID NO: 3350527 - DNA, 25 bp, Homo sapien
cagaaaagggaggtatttgatgtaa

SEQ ID NO: 3350528 - DNA, 25 bp, Homo sapien
ggcagaaaagggaggtatttgatgt

SEQ ID NO: 3350529 - DNA, 25 bp, Homo sapien
tatttgatgtaataatctcatggca

SEQ ID NO: 3350530 - DNA, 25 bp, Homo sapien
ttccggcgctcttctagtgcaaggg

SEQ ID NO: 3350531 - DNA, 25 bp, Homo sapien
tctgttccggcgctcttctagtgca

SEQ ID NO: 3350532 - DNA, 25 bp, Homo sapien
cacagttctgttccggcgctcttct

SEQ ID NO: 3350533 - DNA, 25 bp, Homo sapien
cggcgctcttctagtgcaagggaaa

SEQ ID NO: 3350534 - DNA, 25 bp, Homo sapien
cctgttcactgctgaaggattcctc

SEQ ID NO: 3350535 - DNA, 25 bp, Homo sapien
ctgtttgtccccctactgccctgtt

SEQ ID NO: 3350536 - DNA, 25 bp, Homo sapien
tgccctgttcactgctgaaggattc

SEQ ID NO: 3350537 - DNA, 25 bp, Homo sapien
gttcactgctgaaggattcctcaca

SEQ ID NO: 3350538 - DNA, 25 bp, Homo sapien
aaacacagtatccaccagtatatta

SEQ ID NO: 3350539 - DNA, 25 bp, Homo sapien
gtatattaaattgtctagcatcaca

SEQ ID NO: 3350540 - DNA, 25 bp, Homo sapien
catcacaaatcttcaggtccctcat

SEQ ID NO: 3350541 - DNA, 25 bp, Homo sapien
cacagtatccaccagtatattaaat

SEQ ID NO: 3350542 - DNA, 25 bp, Homo sapien
taaggctgtagttctattaatgcca

SEQ ID NO: 3350543 - DNA, 25 bp, Homo sapien
agaatcctggcaaagcaatctttcc

SEQ ID NO: 3350544 - DNA, 25 bp, Homo sapien
aatgccatatttggtgtacttcgca

SEQ ID NO: 3350545 - DNA, 25 bp, Homo sapien
taattagccggtcagaaagatcact

SEQ ID NO: 3350546 - DNA, 25 bp, Homo sapien
tgctacttacgtcattttgctagta

SEQ ID NO: 3350547 - DNA, 25 bp, Homo sapien
caaaagcaagtctctatgtgtactt

SEQ ID NO: 3350548 - DNA, 25 bp, Homo sapien
gctagtaaaggggatcattgggccc

SEQ ID NO: 3350549 - DNA, 25 bp, Homo sapien
gactcttgctacttacgtcattttg

SEQ ID NO: 3350550 - DNA, 25 bp, Homo sapien
tctccaggacagagctttccctctt

SEQ ID NO: 3350551 - DNA, 25 bp, Homo sapien
aggtacactgtgctctcgctgtgca

SEQ ID NO: 3350552 - DNA, 25 bp, Homo sapien
agatcgtcttgtaggaatgacttga

SEQ ID NO: 3350553 - DNA, 25 bp, Homo sapien
tctgtttcaggtttagatcgtcttg

SEQ ID NO: 3350554 - DNA, 25 bp, Homo sapien
tatatcaacagcgatgtaagtaagg

SEQ ID NO: 3350555 - DNA, 25 bp, Homo sapien
cactgtaattgcttataggcaggga

SEQ ID NO: 3350556 - DNA, 25 bp, Homo sapien
gacatacaggaattgaaacatcaga

SEQ ID NO: 3350557 - DNA, 25 bp, Homo sapien
tggcccttgaccttaaaagatctta

SEQ ID NO: 3350558 - DNA, 25 bp, Homo sapien
tatctacctatgctaatctgaaaca

SEQ ID NO: 3350559 - DNA, 25 bp, Homo sapien
tctgaaacattagcctacaattgtt

SEQ ID NO: 3350560 - DNA, 25 bp, Homo sapien
aaagttttgagtagttacactccat

SEQ ID NO: 3350561 - DNA, 25 bp, Homo sapien
gcttctatcttcgtatttcttatca

SEQ ID NO: 3350562 - DNA, 25 bp, Homo sapien
acagaaaggtgtctcctagaattac

SEQ ID NO: 3350563 - DNA, 25 bp, Homo sapien
tttgcacagaaaggtgtctcctaga

SEQ ID NO: 3350564 - DNA, 25 bp, Homo sapien
attttgcacagaaaggtgtctccta

SEQ ID NO: 3350565 - DNA, 25 bp, Homo sapien
tgcacagaaaggtgtctcctagaat

SEQ ID NO: 3350566 - DNA, 25 bp, Homo sapien
tctgcatagatatagagattactgt

SEQ ID NO: 3350567 - DNA, 25 bp, Homo sapien
catagatatagagattactgtcatc

SEQ ID NO: 3350568 - DNA, 25 bp, Homo sapien
ctcacactctgcatagatatagaga

SEQ ID NO: 3350569 - DNA, 25 bp, Homo sapien
agatatagagattactgtcatcttc

SEQ ID NO: 3350570 - DNA, 25 bp, Homo sapien
gataagaatgcttgactaggctggt

SEQ ID NO: 3350571 - DNA, 25 bp, Homo sapien
caccagccataccatcatttgagga

SEQ ID NO: 3350572 - DNA, 25 bp, Homo sapien
catttgaggatacagtactctcccc

SEQ ID NO: 3350573 - DNA, 25 bp, Homo sapien
catggcaactcttctatggataaga

SEQ ID NO: 3350574 - DNA, 25 bp, Homo sapien
tgaccctcctaccttaagagacagg

SEQ ID NO: 3350575 - DNA, 25 bp, Homo sapien
aatggatcaagcatgaactctgtga

SEQ ID NO: 3350576 - DNA, 25 bp, Homo sapien
gaatcaattagaaaaggggactgag

SEQ ID NO: 3350577 - DNA, 25 bp, Homo sapien
taaataaagatgtcagggagtttgt

SEQ ID NO: 3350578 - DNA, 25 bp, Homo sapien
tcaaaaatgcaattagaccgtatat

SEQ ID NO: 3350579 - DNA, 25 bp, Homo sapien
ctggaagttttgctctccatcatgt

SEQ ID NO: 3350580 - DNA, 25 bp, Homo sapien
aatgcaattagaccgtatatccttt

SEQ ID NO: 3350581 - DNA, 25 bp, Homo sapien
gcaattagaccgtatatcctttttg

SEQ ID NO: 3350582 - DNA, 25 bp, Homo sapien
ctacatttgtgagatctgcttgcaa

SEQ ID NO: 3350583 - DNA, 25 bp, Homo sapien
actggtaaaggtatctggacctggg

SEQ ID NO: 3350584 - DNA, 25 bp, Homo sapien
gagtgccaagttgataaattcagaa

SEQ ID NO: 3350585 - DNA, 25 bp, Homo sapien
tgttgtcctcacaaatgggtgacat

SEQ ID NO: 3350586 - DNA, 25 bp, Homo sapien
tgtctcctaggatactaagtcttct

SEQ ID NO: 3350587 - DNA, 25 bp, Homo sapien
aaaaaccttgcagattgattagcct

SEQ ID NO: 3350588 - DNA, 25 bp, Homo sapien
tatggatagaacagcatggatacac

SEQ ID NO: 3350589 - DNA, 25 bp, Homo sapien
gctatctgtaaaggtcagcactctg

SEQ ID NO: 3350590 - DNA, 25 bp, Homo sapien
gttgttgccaacaaatatacgaaca

SEQ ID NO: 3350591 - DNA, 25 bp, Homo sapien
tgttgccaacaaatatacgaacaat

SEQ ID NO: 3350592 - DNA, 25 bp, Homo sapien
gttgccaacaaatatacgaacaatt

SEQ ID NO: 3350593 - DNA, 25 bp, Homo sapien
tgccaacaaatatacgaacaattat

SEQ ID NO: 3350594 - DNA, 25 bp, Homo sapien
taagtattttaccatttgatacatg

SEQ ID NO: 3350595 - DNA, 25 bp, Homo sapien
tgcatatatctagtctgccaatgac

SEQ ID NO: 3350596 - DNA, 25 bp, Homo sapien
gacagcaatttatcattgcacagag

SEQ ID NO: 3350597 - DNA, 25 bp, Homo sapien
taattttattgctgctagtagctca

SEQ ID NO: 3350598 - DNA, 25 bp, Homo sapien
gcatgtagtccatttccatacagga

SEQ ID NO: 3350599 - DNA, 25 bp, Homo sapien
cagtgtagctgcaacattacctgaa

SEQ ID NO: 3350600 - DNA, 25 bp, Homo sapien
tgtatcccgaatgcactaaatcatg

SEQ ID NO: 3350601 - DNA, 25 bp, Homo sapien
gattggactgggttacaaaatgaga

SEQ ID NO: 3350602 - DNA, 25 bp, Homo sapien
ttttggaggcaccatgaactatgcc

SEQ ID NO: 3350603 - DNA, 25 bp, Homo sapien
gctgaggcaaactaaaagctaggcc

SEQ ID NO: 3350604 - DNA, 25 bp, Homo sapien
gtagcaatcccacacctagcaagtg

SEQ ID NO: 3350605 - DNA, 25 bp, Homo sapien
tatagagaggaaggcaaccagacct

SEQ ID NO: 3350606 - DNA, 25 bp, Homo sapien
agatctagataagatggatgcacta

SEQ ID NO: 3350607 - DNA, 25 bp, Homo sapien
gaaaaactatgcctggatgacagca

SEQ ID NO: 3350608 - DNA, 25 bp, Homo sapien
ctgtagaacgggaatcaatgcctgg

SEQ ID NO: 3350609 - DNA, 25 bp, Homo sapien
gatggatgcactaaacactaaacaa

SEQ ID NO: 3350610 - DNA, 25 bp, Homo sapien
gatccgaggccacaatatctgtgag

SEQ ID NO: 3350611 - DNA, 25 bp, Homo sapien
tgtgtgactcacttgactgcaatgg

SEQ ID NO: 3350612 - DNA, 25 bp, Homo sapien
ttagtcagcggccaacagcacttga

SEQ ID NO: 3350613 - DNA, 25 bp, Homo sapien
tgagtccagaccttccaacagctaa

SEQ ID NO: 3350614 - DNA, 25 bp, Homo sapien
ctggggtaaagaaatggacagattt

SEQ ID NO: 3350615 - DNA, 25 bp, Homo sapien
ggacagatttttactttgagatgga

SEQ ID NO: 3350616 - DNA, 25 bp, Homo sapien
aagaaatggacagatttttactttg

SEQ ID NO: 3350617 - DNA, 25 bp, Homo sapien
aatggacagatttttactttgagat

SEQ ID NO: 3350618 - DNA, 25 bp, Homo sapien
tccagattactccaatgtgccatac

SEQ ID NO: 3350619 - DNA, 25 bp, Homo sapien
tagtaaagccttctgaacagtgccc

SEQ ID NO: 3350620 - DNA, 25 bp, Homo sapien
cagataatggaagcttgcctatgca

SEQ ID NO: 3350621 - DNA, 25 bp, Homo sapien
gaaacatctacttagtggaaactgc

SEQ ID NO: 3350622 - DNA, 25 bp, Homo sapien
tattacataatttaatgttctccca

SEQ ID NO: 3350623 - DNA, 25 bp, Homo sapien
aatctagctccataatcactcttga

SEQ ID NO: 3350624 - DNA, 25 bp, Homo sapien
caacttacaacagaaggaatcattt

SEQ ID NO: 3350625 - DNA, 25 bp, Homo sapien
cttacaacagaaggaatcatttagt

SEQ ID NO: 3350626 - DNA, 25 bp, Homo sapien
cacataatatgaaaagtccacattt

SEQ ID NO: 3350627 - DNA, 25 bp, Homo sapien
catttctctggaaatgcatagtcac

SEQ ID NO: 3350628 - DNA, 25 bp, Homo sapien
acataatatgaaaagtccacatttc

SEQ ID NO: 3350629 - DNA, 25 bp, Homo sapien
ccacatttctctggaaatgcatagt

SEQ ID NO: 3350630 - DNA, 25 bp, Homo sapien
ggtgtagcccaacccatgtttacag

SEQ ID NO: 3350631 - DNA, 25 bp, Homo sapien
tggatgagcagccatgtttggtgta

SEQ ID NO: 3350632 - DNA, 25 bp, Homo sapien
gggtattgtggcataatgggattat

SEQ ID NO: 3350633 - DNA, 25 bp, Homo sapien
tatgcatgtcaaacactggaagagg

SEQ ID NO: 3350634 - DNA, 25 bp, Homo sapien
gttctgagttatagaaatgctgagg

SEQ ID NO: 3350635 - DNA, 25 bp, Homo sapien
tctgttacgatatccttttgcatgc

SEQ ID NO: 3350636 - DNA, 25 bp, Homo sapien
gcctgccatggcaagatcgagggta

SEQ ID NO: 3350637 - DNA, 25 bp, Homo sapien
cctggaaaatcctcgtgtgaattct

SEQ ID NO: 3350638 - DNA, 25 bp, Homo sapien
cctagacttctatccttgacaggca

SEQ ID NO: 3350639 - DNA, 25 bp, Homo sapien
gaaaatgtggcaccatccctacaca

SEQ ID NO: 3350640 - DNA, 25 bp, Homo sapien
tattatccagtatatcttgtggcag

SEQ ID NO: 3350641 - DNA, 25 bp, Homo sapien
atccctacacactctcaaaggctga

SEQ ID NO: 3350642 - DNA, 25 bp, Homo sapien
cagatttgagttttttccggccttg

SEQ ID NO: 3350643 - DNA, 25 bp, Homo sapien
tgagttttttccggccttgaatctg

SEQ ID NO: 3350644 - DNA, 25 bp, Homo sapien
ccaagtgggcataaacctgattcat

SEQ ID NO: 3350645 - DNA, 25 bp, Homo sapien
tcatacctgtatagaaccctccaag

SEQ ID NO: 3350646 - DNA, 25 bp, Homo sapien
tgcttaggtccgaaacaagagggat

SEQ ID NO: 3350647 - DNA, 25 bp, Homo sapien
aatctgtaatactggctgggcaagg

SEQ ID NO: 3350648 - DNA, 25 bp, Homo sapien
ggcagtatggctgctagccagtatt

SEQ ID NO: 3350649 - DNA, 25 bp, Homo sapien
gaatacatgcgctaggacaggataa

SEQ ID NO: 3350650 - DNA, 25 bp, Homo sapien
cactgaaaggtatgaaatagtcatc

SEQ ID NO: 3350651 - DNA, 25 bp, Homo sapien
tctaggacggtgagagaatacatgc

SEQ ID NO: 3350652 - DNA, 25 bp, Homo sapien
cattcttccatgatgcatctgatcc

SEQ ID NO: 3350653 - DNA, 25 bp, Homo sapien
ctggtggtggttcctgatcattctt

SEQ ID NO: 3350654 - DNA, 25 bp, Homo sapien
attcttccatgatgcatctgatccc

SEQ ID NO: 3350655 - DNA, 25 bp, Homo sapien
ggatgggagtcaaaaaagtattcat

SEQ ID NO: 3350656 - DNA, 25 bp, Homo sapien
gggatgggagtcaaaaaagtattca

SEQ ID NO: 3350657 - DNA, 25 bp, Homo sapien
caatgtgatctgaagaattaaaccg

SEQ ID NO: 3350658 - DNA, 25 bp, Homo sapien
taaaccgtaacacataaaatggatg

SEQ ID NO: 3350659 - DNA, 25 bp, Homo sapien
tgaaatctttcattgatggagcaaa

SEQ ID NO: 3350660 - DNA, 25 bp, Homo sapien
taatacctttactctcaatgtgatc

SEQ ID NO: 3350661 - DNA, 25 bp, Homo sapien
ttaactggaggtaggttagtcatag

SEQ ID NO: 3350662 - DNA, 25 bp, Homo sapien
tcattaactggaggtaggttagtca

SEQ ID NO: 3350663 - DNA, 25 bp, Homo sapien
aactggaggtaggttagtcatagat

SEQ ID NO: 3350664 - DNA, 25 bp, Homo sapien
gctgcttgtcgatcacttttaaaaa

SEQ ID NO: 3350665 - DNA, 25 bp, Homo sapien
gttcaataatacttgaaaccatccc

SEQ ID NO: 3350666 - DNA, 25 bp, Homo sapien
ataatacttgaaaccatcccaagag

SEQ ID NO: 3350667 - DNA, 25 bp, Homo sapien
tatcttcaggcagaataatagtgag

SEQ ID NO: 3350668 - DNA, 25 bp, Homo sapien
gcagaataatagtgagttcttcaac

SEQ ID NO: 3350669 - DNA, 25 bp, Homo sapien
tatttgagatgacgggctagttcct

SEQ ID NO: 3350670 - DNA, 25 bp, Homo sapien
tacagttgtcttcataaagggtcct

SEQ ID NO: 3350671 - DNA, 25 bp, Homo sapien
tatctttatccaaactactagccag

SEQ ID NO: 3350672 - DNA, 25 bp, Homo sapien
tatttatctcactacacttcagaac

SEQ ID NO: 3350673 - DNA, 25 bp, Homo sapien
gaccagattccaacgttgctatgca

SEQ ID NO: 3350674 - DNA, 25 bp, Homo sapien
cacagttccaagtcaaaagctttat

SEQ ID NO: 3350675 - DNA, 25 bp, Homo sapien
tacttctacacataacaaagagtag

SEQ ID NO: 3350676 - DNA, 25 bp, Homo sapien
caaacaccacagcatttcgcaaatg

SEQ ID NO: 3350677 - DNA, 25 bp, Homo sapien
gaagctaatatgtcaaaagtggccc

SEQ ID NO: 3350678 - DNA, 25 bp, Homo sapien
aatgggtgcctaaaactttcaatgc

SEQ ID NO: 3350679 - DNA, 25 bp, Homo sapien
gataacagatactcgtaacgatggc

SEQ ID NO: 3350680 - DNA, 25 bp, Homo sapien
tgtccaactgcatgtaatcaaaaag

SEQ ID NO: 3350681 - DNA, 25 bp, Homo sapien
tgatgctattaggtgagccttcact

SEQ ID NO: 3350682 - DNA, 25 bp, Homo sapien
cagatatggttggaaagtaggatcc

SEQ ID NO: 3350683 - DNA, 25 bp, Homo sapien
tccctggagtactgagagccatgac

SEQ ID NO: 3350684 - DNA, 25 bp, Homo sapien
gtactgagagccatgactgaatttt

SEQ ID NO: 3350685 - DNA, 25 bp, Homo sapien
attaagaagtaattcatcttttgtt

SEQ ID NO: 3350686 - DNA, 25 bp, Homo sapien
aggaagacgatgaacttgaactatc

SEQ ID NO: 3350687 - DNA, 25 bp, Homo sapien
tccgcaggccggcgattcagccggt

SEQ ID NO: 3350688 - DNA, 25 bp, Homo sapien
ggcaggcttaacctccacggtctgc

SEQ ID NO: 3350689 - DNA, 25 bp, Homo sapien
acccctcaaacgactgtagcggcgg

SEQ ID NO: 3350690 - DNA, 25 bp, Homo sapien
gagtccgaatccgagtccgaggtct

SEQ ID NO: 3350691 - DNA, 25 bp, Homo sapien
tccaaagtcggtgccattgaatttc

SEQ ID NO: 3350692 - DNA, 25 bp, Homo sapien
aagtcggtgccattgaatttcagag

SEQ ID NO: 3350693 - DNA, 25 bp, Homo sapien
caactccaaagtcggtgccattgaa

SEQ ID NO: 3350694 - DNA, 25 bp, Homo sapien
ttccccaactccaaagtcggtgcca

SEQ ID NO: 3350695 - DNA, 25 bp, Homo sapien
cgtttctcaggtaactacacgcgga

SEQ ID NO: 3350696 - DNA, 25 bp, Homo sapien
gccatttacgcagcaacgctttccg

SEQ ID NO: 3350697 - DNA, 25 bp, Homo sapien
gctcacggctctctccagaaataga

SEQ ID NO: 3350698 - DNA, 25 bp, Homo sapien
gaaaaacaacttaggcaaccgcagc

SEQ ID NO: 3350699 - DNA, 25 bp, Homo sapien
tcatcacctggctcctttttcaagg

SEQ ID NO: 3350700 - DNA, 25 bp, Homo sapien
ttgatatgtggaacctcatcacctg

SEQ ID NO: 3350701 - DNA, 25 bp, Homo sapien
ccacattccctgtagagcattcact

SEQ ID NO: 3350702 - DNA, 25 bp, Homo sapien
ctagaaacccgaccgcacagagcgc

SEQ ID NO: 3350703 - DNA, 25 bp, Homo sapien
ggagcatactgatggacccagagac

SEQ ID NO: 3350704 - DNA, 25 bp, Homo sapien
catatggtgttgatgcccctgtggc

SEQ ID NO: 3350705 - DNA, 25 bp, Homo sapien
ttgacgggtttctgactgagagccc

SEQ ID NO: 3350706 - DNA, 25 bp, Homo sapien
ccctgtggcagcagaccttgtaacc

SEQ ID NO: 3350707 - DNA, 25 bp, Homo sapien
ctcaagtatcctggtatcaaaatta

SEQ ID NO: 3350708 - DNA, 25 bp, Homo sapien
ggtatcaaaattaccatatgtttct

SEQ ID NO: 3350709 - DNA, 25 bp, Homo sapien
aagtatcctggtatcaaaattacca

SEQ ID NO: 3350710 - DNA, 25 bp, Homo sapien
tcctggtatcaaaattaccatatgt

SEQ ID NO: 3350711 - DNA, 25 bp, Homo sapien
gtcttcatcagatctagctctggtt

SEQ ID NO: 3350712 - DNA, 25 bp, Homo sapien
cttcatcagatctagctctggtttc

SEQ ID NO: 3350713 - DNA, 25 bp, Homo sapien
aagtcagaatttctgggtgatattc

SEQ ID NO: 3350714 - DNA, 25 bp, Homo sapien
gggtgatattccatcgtcttcatca

SEQ ID NO: 3350715 - DNA, 25 bp, Homo sapien
gacttgttcccctctagataggaca

SEQ ID NO: 3350716 - DNA, 25 bp, Homo sapien
ctgctgagatcccaattgagagtgt

SEQ ID NO: 3350717 - DNA, 25 bp, Homo sapien
gataggacaaaaaccttgagactgg

SEQ ID NO: 3350718 - DNA, 25 bp, Homo sapien
cttggagaagatcaaaacgctggga

SEQ ID NO: 3350719 - DNA, 25 bp, Homo sapien
ctatgaaccaaagcaaggggaagat

SEQ ID NO: 3350720 - DNA, 25 bp, Homo sapien
atttaatgtgtcaatatgttttagt

SEQ ID NO: 3350721 - DNA, 25 bp, Homo sapien
ttaatgtgtcaatatgttttagtcc

SEQ ID NO: 3350722 - DNA, 25 bp, Homo sapien
tttaatgtgtcaatatgttttagtc

SEQ ID NO: 3350723 - DNA, 25 bp, Homo sapien
gaaaaaatgaaactgaaagagactc

SEQ ID NO: 3350724 - DNA, 25 bp, Homo sapien
tgaaactgaaagagactcctcagaa

SEQ ID NO: 3350725 - DNA, 25 bp, Homo sapien
ggaagtcatgggatgagaaaaaatg

SEQ ID NO: 3350726 - DNA, 25 bp, Homo sapien
aaaatgaaactgaaagagactcctc

SEQ ID NO: 3350727 - DNA, 25 bp, Homo sapien
tcataaagtaaggatggcccaatct

SEQ ID NO: 3350728 - DNA, 25 bp, Homo sapien
tcatccgggaccataggctataagt

SEQ ID NO: 3350729 - DNA, 25 bp, Homo sapien
taaaatgctcttgttgtcaggtacc

SEQ ID NO: 3350730 - DNA, 25 bp, Homo sapien
tctacaaattgtaagcggaaatgcc

SEQ ID NO: 3350731 - DNA, 25 bp, Homo sapien
ttttaaatgcgactgggcttgcttg

SEQ ID NO: 3350732 - DNA, 25 bp, Homo sapien
tatcattgctgtgaggtggcagagc

SEQ ID NO: 3350733 - DNA, 25 bp, Homo sapien
tcataatcatcatcccgagaccgga

SEQ ID NO: 3350734 - DNA, 25 bp, Homo sapien
gactgcaaatgctaccacaatggag

SEQ ID NO: 3350735 - DNA, 25 bp, Homo sapien
ttaaatagaaacactcatttgatga

SEQ ID NO: 3350736 - DNA, 25 bp, Homo sapien
taaatagaaacactcatttgatgag

SEQ ID NO: 3350737 - DNA, 25 bp, Homo sapien
cacatgatggcaacaagcaagtctg

SEQ ID NO: 3350738 - DNA, 25 bp, Homo sapien
tacattttggaacggctcatcagtc

SEQ ID NO: 3350739 - DNA, 25 bp, Homo sapien
tgatgtcgttccacagcaatgagaa

SEQ ID NO: 3350740 - DNA, 25 bp, Homo sapien
taagacaacctatgagagtccgatg

SEQ ID NO: 3350741 - DNA, 25 bp, Homo sapien
gactgaatgattttcaacctgggaa

SEQ ID NO: 3350742 - DNA, 25 bp, Homo sapien
gtggactgaatgattttcaacctgg

SEQ ID NO: 3350743 - DNA, 25 bp, Homo sapien
ctgagaaattagagtggactgaatg

SEQ ID NO: 3350744 - DNA, 25 bp, Homo sapien
gagtggactgaatgattttcaacct

SEQ ID NO: 3350745 - DNA, 25 bp, Homo sapien
attggaatccatttaccaaaattat

SEQ ID NO: 3350746 - DNA, 25 bp, Homo sapien
ttagacaaatggacagtatgtttct

SEQ ID NO: 3350747 - DNA, 25 bp, Homo sapien
ttcttattccccatattggaatcca

SEQ ID NO: 3350748 - DNA, 25 bp, Homo sapien
ttcaaagcaggtcaactgttcagct

SEQ ID NO: 3350749 - DNA, 25 bp, Homo sapien
taattggacttgcttacagaacaag

SEQ ID NO: 3350750 - DNA, 25 bp, Homo sapien
cataatggtctataagttagtaagg

SEQ ID NO: 3350751 - DNA, 25 bp, Homo sapien
tataaatattatgccccaagtctta

SEQ ID NO: 3350752 - DNA, 25 bp, Homo sapien
tattgagggcagtcaaaatgacttc

SEQ ID NO: 3350753 - DNA, 25 bp, Homo sapien
cagttactccgcgaaaactccggtg

SEQ ID NO: 3350754 - DNA, 25 bp, Homo sapien
cagccagctcaagacacgtaaggaa

SEQ ID NO: 3350755 - DNA, 25 bp, Homo sapien
tgatttggagcaacctgcgacctgc

SEQ ID NO: 3350756 - DNA, 25 bp, Homo sapien
tctctggaaaggcataaactcgcaa

SEQ ID NO: 3350757 - DNA, 25 bp, Homo sapien
ctctttggaatttgtctttttcgct

SEQ ID NO: 3350758 - DNA, 25 bp, Homo sapien
tctttggaatttgtctttttcgctc

SEQ ID NO: 3350759 - DNA, 25 bp, Homo sapien
tctcctgctcagatcctaaagattg

SEQ ID NO: 3350760 - DNA, 25 bp, Homo sapien
gaagccacacattattcgacacaga

SEQ ID NO: 3350761 - DNA, 25 bp, Homo sapien
tcatcccggatcacgtgacggcgtc

SEQ ID NO: 3350762 - DNA, 25 bp, Homo sapien
tgatgaagctaggaagagacgcctc

SEQ ID NO: 3350763 - DNA, 25 bp, Homo sapien
cacgccagtgccgagaatttgtttt

SEQ ID NO: 3350764 - DNA, 25 bp, Homo sapien
tgtggccgaagtcatacccggctgg

SEQ ID NO: 3350765 - DNA, 25 bp, Homo sapien
ccaggaatcaaagggctcgctggga

SEQ ID NO: 3350766 - DNA, 25 bp, Homo sapien
cgaggcttgaaaaagtcggtgccac

SEQ ID NO: 3350767 - DNA, 25 bp, Homo sapien
tacgttgaaggcggccaaacccatc

SEQ ID NO: 3350768 - DNA, 25 bp, Homo sapien
cgttgaaggcggccaaacccatcat

SEQ ID NO: 3350769 - DNA, 25 bp, Homo sapien
acgttgaaggcggccaaacccatca

SEQ ID NO: 3350770 - DNA, 25 bp, Homo sapien
gcacaagcaggtgcatgcaaaaatg

SEQ ID NO: 3350771 - DNA, 25 bp, Homo sapien
caggtgcatgcaaaaatggcacgaa

SEQ ID NO: 3350772 - DNA, 25 bp, Homo sapien
tgcatgcaaaaatggcacgaaatgt

SEQ ID NO: 3350773 - DNA, 25 bp, Homo sapien
aaaatggcacgaaatgttctgaggc

SEQ ID NO: 3350774 - DNA, 25 bp, Homo sapien
cacgtgttctcgagacgccgttaaa

SEQ ID NO: 3350775 - DNA, 25 bp, Homo sapien
ccaaacagcggcgtaggtctgggac

SEQ ID NO: 3350776 - DNA, 25 bp, Homo sapien
tttcgcgccgggtaggcctgcaccg

SEQ ID NO: 3350777 - DNA, 25 bp, Homo sapien
ctttggaagaggctggcgcggagca

SEQ ID NO: 3350778 - DNA, 25 bp, Homo sapien
agacagcggagagggtactgggctg

SEQ ID NO: 3350779 - DNA, 25 bp, Homo sapien
tcgtgccgagcaggtccctccggtt

SEQ ID NO: 3350780 - DNA, 25 bp, Homo sapien
gggctgaattctttcgtgccgagca

SEQ ID NO: 3350781 - DNA, 25 bp, Homo sapien
tcccaactcacccgggtggagcagg

SEQ ID NO: 3350782 - DNA, 25 bp, Homo sapien
ggaaaatagcctaaggctctttcag

SEQ ID NO: 3350783 - DNA, 25 bp, Homo sapien
ttcagcagaattttgcagtccgaat

SEQ ID NO: 3350784 - DNA, 25 bp, Homo sapien
atagcctaaggctctttcagcagaa

SEQ ID NO: 3350785 - DNA, 25 bp, Homo sapien
cagtccgaatgcaattttagatttc

SEQ ID NO: 3350786 - DNA, 25 bp, Homo sapien
tctgtcttgctggatcagtggatgt

SEQ ID NO: 3350787 - DNA, 25 bp, Homo sapien
ctttcacactgacgtctgtcttgct

SEQ ID NO: 3350788 - DNA, 25 bp, Homo sapien
cactgacgtctgtcttgctggatca

SEQ ID NO: 3350789 - DNA, 25 bp, Homo sapien
cttgctggatcagtggatgtttggc

SEQ ID NO: 3350790 - DNA, 25 bp, Homo sapien
caaaaccaaacggagaacacagctc

SEQ ID NO: 3350791 - DNA, 25 bp, Homo sapien
tcttcttcaaactgaaggtggttat

SEQ ID NO: 3350792 - DNA, 25 bp, Homo sapien
aaaaccaaacggagaacacagctct

SEQ ID NO: 3350793 - DNA, 25 bp, Homo sapien
gaatccgtgtgaagctgtaccccta

SEQ ID NO: 3350794 - DNA, 25 bp, Homo sapien
gggaaaggtaacctgtgtccatgga

SEQ ID NO: 3350795 - DNA, 25 bp, Homo sapien
tctgcctattaagggcactggacac

SEQ ID NO: 3350796 - DNA, 25 bp, Homo sapien
cacagtgacgtcagtgataaaccaa

SEQ ID NO: 3350797 - DNA, 25 bp, Homo sapien
gagtatgtacttgttcaatatagtt

SEQ ID NO: 3350798 - DNA, 25 bp, Homo sapien
agatgtcccagtgttctctggtctt

SEQ ID NO: 3350799 - DNA, 25 bp, Homo sapien
tctctggtctttcagcacggcttcc

SEQ ID NO: 3350800 - DNA, 25 bp, Homo sapien
ggttgtctctgctctgagtgatgtc

SEQ ID NO: 3350801 - DNA, 25 bp, Homo sapien
agtgttctctggtctttcagcacgg

SEQ ID NO: 3350802 - DNA, 25 bp, Homo sapien
cagtgttaaatttggattctcagaa

SEQ ID NO: 3350803 - DNA, 25 bp, Homo sapien
agtgttaaatttggattctcagaaa

SEQ ID NO: 3350804 - DNA, 25 bp, Homo sapien
aatccaagcacaagttcccaatttc

SEQ ID NO: 3350805 - DNA, 25 bp, Homo sapien
tcatgttcttgatatcgtaggtcac

SEQ ID NO: 3350806 - DNA, 25 bp, Homo sapien
gatatcgtaggtcacaatccaagca

SEQ ID NO: 3350807 - DNA, 25 bp, Homo sapien
taggtcacaatccaagcacaagttc

SEQ ID NO: 3350808 - DNA, 25 bp, Homo sapien
ccactgaatacatgtatggctgaga

SEQ ID NO: 3350809 - DNA, 25 bp, Homo sapien
tccactgaatacatgtatggctgag

SEQ ID NO: 3350810 - DNA, 25 bp, Homo sapien
gattgaagacaatactgtcgagctc

SEQ ID NO: 3350811 - DNA, 25 bp, Homo sapien
gagaaggctttaagattgaagacaa

SEQ ID NO: 3350812 - DNA, 25 bp, Homo sapien
tcaaaagtcttgtcatatgttattg

SEQ ID NO: 3350813 - DNA, 25 bp, Homo sapien
aaaagtcttgtcatatgttattgac

SEQ ID NO: 3350814 - DNA, 25 bp, Homo sapien
tctcaaaagtcttgtcatatgttat

SEQ ID NO: 3350815 - DNA, 25 bp, Homo sapien
catatgttattgacttaactttctc

SEQ ID NO: 3350816 - DNA, 25 bp, Homo sapien
ccttttgctattgcatctgttctct

SEQ ID NO: 3350817 - DNA, 25 bp, Homo sapien
tccaaggcaactgcagtcaaacatt

SEQ ID NO: 3350818 - DNA, 25 bp, Homo sapien
caaagataccagtgcttttgggcca

SEQ ID NO: 3350819 - DNA, 25 bp, Homo sapien
caagtagtgtggtgcatcaagagat

SEQ ID NO: 3350820 - DNA, 25 bp, Homo sapien
tgtgtagtgtgcaaactagaaccag

SEQ ID NO: 3350821 - DNA, 25 bp, Homo sapien
tgtcccaagcggttcacgtcgaaga

SEQ ID NO: 3350822 - DNA, 25 bp, Homo sapien
cattcccttggtattggcggctaga

SEQ ID NO: 3350823 - DNA, 25 bp, Homo sapien
tttatcattgacaccgtggcggacc

SEQ ID NO: 3350824 - DNA, 25 bp, Homo sapien
tagaggataggagcagcatgtcccc

SEQ ID NO: 3350825 - DNA, 25 bp, Homo sapien
cttcacgtcgggcttggcgtcgttg

SEQ ID NO: 3350826 - DNA, 25 bp, Homo sapien
cgggcttggcgtcgttggccatcat

SEQ ID NO: 3350827 - DNA, 25 bp, Homo sapien
tcgggcttggcgtcgttggccatca

SEQ ID NO: 3350828 - DNA, 25 bp, Homo sapien
gcacggtcttcacgtcgggcttggc

SEQ ID NO: 3350829 - DNA, 25 bp, Homo sapien
ttgtcggtttggcaaagcaaacggc

SEQ ID NO: 3350830 - DNA, 25 bp, Homo sapien
accgcggcagtgctctcacgtgacc

SEQ ID NO: 3350831 - DNA, 25 bp, Homo sapien
tctcttttgtcggtttggcaaagca

SEQ ID NO: 3350832 - DNA, 25 bp, Homo sapien
gtttggcaaagcaaacggcgccgca

SEQ ID NO: 3350833 - DNA, 25 bp, Homo sapien
aataaccttatgtaatgctctatgg

SEQ ID NO: 3350834 - DNA, 25 bp, Homo sapien
gatacataataaccttatgtaatgc

SEQ ID NO: 3350835 - DNA, 25 bp, Homo sapien
cataataaccttatgtaatgctcta

SEQ ID NO: 3350836 - DNA, 25 bp, Homo sapien
accttatgtaatgctctatggagga

SEQ ID NO: 3350837 - DNA, 25 bp, Homo sapien
aataccttgcccctagattcaggaa

SEQ ID NO: 3350838 - DNA, 25 bp, Homo sapien
gatgcatgaatgtgctgcctccaca

SEQ ID NO: 3350839 - DNA, 25 bp, Homo sapien
tccccgtccttaagtgatgcatgaa

SEQ ID NO: 3350840 - DNA, 25 bp, Homo sapien
cttgtggaagaccaatgggaaacct

SEQ ID NO: 3350841 - DNA, 25 bp, Homo sapien
tgaatgattacattgtctacggaat

SEQ ID NO: 3350842 - DNA, 25 bp, Homo sapien
cattgtctacggaattctaacatgt

SEQ ID NO: 3350843 - DNA, 25 bp, Homo sapien
catgtatgggtgaaacaaagactct

SEQ ID NO: 3350844 - DNA, 25 bp, Homo sapien
tattgttggagtatccccagtacca

SEQ ID NO: 3350845 - DNA, 25 bp, Homo sapien
gggacgctttagagaaacgcactcg

SEQ ID NO: 3350846 - DNA, 25 bp, Homo sapien
attcggcccgggtgctcttgtgagc

SEQ ID NO: 3350847 - DNA, 25 bp, Homo sapien
ttctcaggcgccacgtgggattcgg

SEQ ID NO: 3350848 - DNA, 25 bp, Homo sapien
cacgggcgaaaaagacgcggtctca

SEQ ID NO: 3350849 - DNA, 25 bp, Homo sapien
cacgaggacgtcaccatggtgggcc

SEQ ID NO: 3350850 - DNA, 25 bp, Homo sapien
tgggtctagagtgcggagctgctcc

SEQ ID NO: 3350851 - DNA, 25 bp, Homo sapien
cagagagggagggtgcggtttcggg

SEQ ID NO: 3350852 - DNA, 25 bp, Homo sapien
cccggaaggctcttgttgagcaggc

SEQ ID NO: 3350853 - DNA, 25 bp, Homo sapien
aacgcatcgaggagtttggcaaaac

SEQ ID NO: 3350854 - DNA, 25 bp, Homo sapien
gactcagtatgtgggcttagtcgcc

SEQ ID NO: 3350855 - DNA, 25 bp, Homo sapien
tctctggcctgggtagactcagtat

SEQ ID NO: 3350856 - DNA, 25 bp, Homo sapien
aaacttctgagatcgctggccctac

SEQ ID NO: 3350857 - DNA, 25 bp, Homo sapien
ttattttgatccactgctgacgcat

SEQ ID NO: 3350858 - DNA, 25 bp, Homo sapien
cgttgtttcgcgagttttttgtgct

SEQ ID NO: 3350859 - DNA, 25 bp, Homo sapien
agtctggttctttcgttgtttcgcg

SEQ ID NO: 3350860 - DNA, 25 bp, Homo sapien
tctggttctttcgttgtttcgcgag

SEQ ID NO: 3350861 - DNA, 25 bp, Homo sapien
catcctccgtgcatttatccatgca

SEQ ID NO: 3350862 - DNA, 25 bp, Homo sapien
cattgaaaagtgtgccatcatcctc

SEQ ID NO: 3350863 - DNA, 25 bp, Homo sapien
catcatcctccgtgcatttatccat

SEQ ID NO: 3350864 - DNA, 25 bp, Homo sapien
gaaaagtgtgccatcatcctccgtg

SEQ ID NO: 3350865 - DNA, 25 bp, Homo sapien
tgttatctctggaaagaactagtcc

SEQ ID NO: 3350866 - DNA, 25 bp, Homo sapien
tggaaagaactagtccttccttcat

SEQ ID NO: 3350867 - DNA, 25 bp, Homo sapien
tctggaaagaactagtccttccttc

SEQ ID NO: 3350868 - DNA, 25 bp, Homo sapien
tatctctggaaagaactagtccttc

SEQ ID NO: 3350869 - DNA, 25 bp, Homo sapien
tcagtttagctccttttgattgtat

SEQ ID NO: 3350870 - DNA, 25 bp, Homo sapien
aattgatatatcattcagtgtcatg

SEQ ID NO: 3350871 - DNA, 25 bp, Homo sapien
cacaatgtaggtgtatttgagtatt

SEQ ID NO: 3350872 - DNA, 25 bp, Homo sapien
ttaaaagagcacaatgtaggtgtat

SEQ ID NO: 3350873 - DNA, 25 bp, Homo sapien
tgtatctcaggttgttgggctcact

SEQ ID NO: 3350874 - DNA, 25 bp, Homo sapien
tatgtaaaatagcaccattgggctg

SEQ ID NO: 3350875 - DNA, 25 bp, Homo sapien
tataatcacgtgtagaagcagcgca

SEQ ID NO: 3350876 - DNA, 25 bp, Homo sapien
tcgtctgtctgggactataatcacg

SEQ ID NO: 3350877 - DNA, 25 bp, Homo sapien
tgttgccattactaacccacaggga

SEQ ID NO: 3350878 - DNA, 25 bp, Homo sapien
tagccgatcatcctccactgtgaaa

SEQ ID NO: 3350879 - DNA, 25 bp, Homo sapien
taatcccttggatatggtgccatgg

SEQ ID NO: 3350880 - DNA, 25 bp, Homo sapien
tccccgggaatatctgtaagcagca

SEQ ID NO: 3350881 - DNA, 25 bp, Homo sapien
gtttcctgactgaataccttaacat

SEQ ID NO: 3350882 - DNA, 25 bp, Homo sapien
atatacatgactacacacacgccat

SEQ ID NO: 3350883 - DNA, 25 bp, Homo sapien
ccttaacattttccccgcatatata

SEQ ID NO: 3350884 - DNA, 25 bp, Homo sapien
tacatgactacacacacgccataca

SEQ ID NO: 3350885 - DNA, 25 bp, Homo sapien
cccagatttgtgcagtgtgatactc

SEQ ID NO: 3350886 - DNA, 25 bp, Homo sapien
aaagtgcatccatgtgatacccaga

SEQ ID NO: 3350887 - DNA, 25 bp, Homo sapien
gacatctttctttgacaggctactg

SEQ ID NO: 3350888 - DNA, 25 bp, Homo sapien
ttctaactgagcaagggaaatcctg

SEQ ID NO: 3350889 - DNA, 25 bp, Homo sapien
cagcactgtattagaggaaccagat

SEQ ID NO: 3350890 - DNA, 25 bp, Homo sapien
taatacacatcgcaattcaagtctg

SEQ ID NO: 3350891 - DNA, 25 bp, Homo sapien
tacgctattacttcatgggctcctg

SEQ ID NO: 3350892 - DNA, 25 bp, Homo sapien
cagttaacattacaaggccctagaa

SEQ ID NO: 3350893 - DNA, 25 bp, Homo sapien
gactgatacaacttcaggggggcca

SEQ ID NO: 3350894 - DNA, 25 bp, Homo sapien
cttcaggggggccaccctctgcaga

SEQ ID NO: 3350895 - DNA, 25 bp, Homo sapien
ctctgcagatggcagtgaatttgca

SEQ ID NO: 3350896 - DNA, 25 bp, Homo sapien
tctgcagatggcagtgaatttgcac

SEQ ID NO: 3350897 - DNA, 25 bp, Homo sapien
aagatcacacggttgtaggccttca

SEQ ID NO: 3350898 - DNA, 25 bp, Homo sapien
agcctgcgccacaactgaacataga

SEQ ID NO: 3350899 - DNA, 25 bp, Homo sapien
catgaagacaagacctcctgtgaag

SEQ ID NO: 3350900 - DNA, 25 bp, Homo sapien
tgaagccaatggctaccacaaccag

SEQ ID NO: 3350901 - DNA, 25 bp, Homo sapien
gctgtggaagacaataacttacgtc

SEQ ID NO: 3350902 - DNA, 25 bp, Homo sapien
gactcagtgtagaccataggttcac

SEQ ID NO: 3350903 - DNA, 25 bp, Homo sapien
ggagaacaatcatctgaaacactga

SEQ ID NO: 3350904 - DNA, 25 bp, Homo sapien
caggcatgctgctggacatcctaca

SEQ ID NO: 3350905 - DNA, 25 bp, Homo sapien
tgctcttttgcttgccttcatacaa

SEQ ID NO: 3350906 - DNA, 25 bp, Homo sapien
aatgaccatctttaacagacagcct

SEQ ID NO: 3350907 - DNA, 25 bp, Homo sapien
gaccatctttaacagacagcctgct

SEQ ID NO: 3350908 - DNA, 25 bp, Homo sapien
agcctgctcttttgcttgccttcat

SEQ ID NO: 3350909 - DNA, 25 bp, Homo sapien
ccttcaaataagtggacacgatttt

SEQ ID NO: 3350910 - DNA, 25 bp, Homo sapien
tgccttcaaataagtggacacgatt

SEQ ID NO: 3350911 - DNA, 25 bp, Homo sapien
tcttgccttcaaataagtggacacg

SEQ ID NO: 3350912 - DNA, 25 bp, Homo sapien
cttgccttcaaataagtggacacga

SEQ ID NO: 3350913 - DNA, 25 bp, Homo sapien
gaattaccacggacactgcttcttg

SEQ ID NO: 3350914 - DNA, 25 bp, Homo sapien
gcttcttgatacatatcttgctttc

SEQ ID NO: 3350915 - DNA, 25 bp, Homo sapien
gctggcaagcggctctacaggaatt

SEQ ID NO: 3350916 - DNA, 25 bp, Homo sapien
agagctgtcccgctggcaagcggct

SEQ ID NO: 3350917 - DNA, 25 bp, Homo sapien
tgcacgctggcgtgtgctgctgcca

SEQ ID NO: 3350918 - DNA, 25 bp, Homo sapien
cccatccacaattcctatcgtgggt

SEQ ID NO: 3350919 - DNA, 25 bp, Homo sapien
ttcctatcgtgggtcctggccttcc

SEQ ID NO: 3350920 - DNA, 25 bp, Homo sapien
cctctttgacgcacagaaaccccat

SEQ ID NO: 3350921 - DNA, 25 bp, Homo sapien
attttaatgtgagaatatgccttac

SEQ ID NO: 3350922 - DNA, 25 bp, Homo sapien
cattttaatgtgagaatatgcctta

SEQ ID NO: 3350923 - DNA, 25 bp, Homo sapien
ccattttaatgtgagaatatgcctt

SEQ ID NO: 3350924 - DNA, 25 bp, Homo sapien
tgcagacttgacaccatccttcaca

SEQ ID NO: 3350925 - DNA, 25 bp, Homo sapien
tttgcagacttgacaccatccttca

SEQ ID NO: 3350926 - DNA, 25 bp, Homo sapien
catccttcacaatcaaacttcgcat

SEQ ID NO: 3350927 - DNA, 25 bp, Homo sapien
ttctttgcagacttgacaccatcct

SEQ ID NO: 3350928 - DNA, 25 bp, Homo sapien
tgcttgatttcctccgctgtccggt

SEQ ID NO: 3350929 - DNA, 25 bp, Homo sapien
gctgtccggtctatcaatacataca

SEQ ID NO: 3350930 - DNA, 25 bp, Homo sapien
ccacacaggtgatcgcgattacgtg

SEQ ID NO: 3350931 - DNA, 25 bp, Homo sapien
cgattacgtggaatgtgacagagca

SEQ ID NO: 3350932 - DNA, 25 bp, Homo sapien
cataattaagtgggagagtgttcat

SEQ ID NO: 3350933 - DNA, 25 bp, Homo sapien
ttcataattaagtgggagagtgttc

SEQ ID NO: 3350934 - DNA, 25 bp, Homo sapien
ctggaattcataattaagtgggaga

SEQ ID NO: 3350935 - DNA, 25 bp, Homo sapien
gaattcataattaagtgggagagtg

SEQ ID NO: 3350936 - DNA, 25 bp, Homo sapien
gaggttgaaacccttgccgagcgga

SEQ ID NO: 3350937 - DNA, 25 bp, Homo sapien
gccgagcggactcttggatgacact

SEQ ID NO: 3350938 - DNA, 25 bp, Homo sapien
tctgttgtgggctcttcgcctctta

SEQ ID NO: 3350939 - DNA, 25 bp, Homo sapien
gccattgatgatgttttccctggaa

SEQ ID NO: 3350940 - DNA, 25 bp, Homo sapien
tctgttgttctgaggagatgcttga

SEQ ID NO: 3350941 - DNA, 25 bp, Homo sapien
gatgggtcttctgctactcaacttg

SEQ ID NO: 3350942 - DNA, 25 bp, Homo sapien
cggagaagatagaaggttctctggc

SEQ ID NO: 3350943 - DNA, 25 bp, Homo sapien
caagtggaggagatgcttcggagaa

SEQ ID NO: 3350944 - DNA, 25 bp, Homo sapien
gaaacaggacgatgagctgcaggca

SEQ ID NO: 3350945 - DNA, 25 bp, Homo sapien
aatgtgggctatgtttaagcagatc

SEQ ID NO: 3350946 - DNA, 25 bp, Homo sapien
aggtaaacaggcttttgcgttgcca

SEQ ID NO: 3350947 - DNA, 25 bp, Homo sapien
gacagcccgtatagagagagtctgc

SEQ ID NO: 3350948 - DNA, 25 bp, Homo sapien
tactgttcggtacatatttctataa

SEQ ID NO: 3350949 - DNA, 25 bp, Homo sapien
caaatcttttgtgcgttgagatgga

SEQ ID NO: 3350950 - DNA, 25 bp, Homo sapien
caggctcaaatcttttgtgcgttga

SEQ ID NO: 3350951 - DNA, 25 bp, Homo sapien
tccttaaccattcgccttactgttc

SEQ ID NO: 3350952 - DNA, 25 bp, Homo sapien
cagcactcaaaagactgtctgtagc

SEQ ID NO: 3350953 - DNA, 25 bp, Homo sapien
aaatggtacgctttggtgctcctgg

SEQ ID NO: 3350954 - DNA, 25 bp, Homo sapien
ccttcattgaaatggtacgctttgg

SEQ ID NO: 3350955 - DNA, 25 bp, Homo sapien
cactcaaaagactgtctgtagcagt

SEQ ID NO: 3350956 - DNA, 25 bp, Homo sapien
gagggttgatgctgcatagcaatct

SEQ ID NO: 3350957 - DNA, 25 bp, Homo sapien
cactggatcatcaaggtggagggtt

SEQ ID NO: 3350958 - DNA, 25 bp, Homo sapien
aatagttatcactggatcatcaagg

SEQ ID NO: 3350959 - DNA, 25 bp, Homo sapien
tatcactggatcatcaaggtggagg

SEQ ID NO: 3350960 - DNA, 25 bp, Homo sapien
tctagattgtaaacttaagccagca

SEQ ID NO: 3350961 - DNA, 25 bp, Homo sapien
cagcataacccttatctggatggcc

SEQ ID NO: 3350962 - DNA, 25 bp, Homo sapien
ttaggttactggactcacccaaagc

SEQ ID NO: 3350963 - DNA, 25 bp, Homo sapien
aatgtgcacgctaccctcttgttgg

SEQ ID NO: 3350964 - DNA, 25 bp, Homo sapien
aaatactgggtatgcattgctcagc

SEQ ID NO: 3350965 - DNA, 25 bp, Homo sapien
taaagatatgctaccagtctccttg

SEQ ID NO: 3350966 - DNA, 25 bp, Homo sapien
gtcagaataacaaagctagcccatt

SEQ ID NO: 3350967 - DNA, 25 bp, Homo sapien
tttgtgccacgggaagggagtacaa

SEQ ID NO: 3350968 - DNA, 25 bp, Homo sapien
tctttggagattgcatgtttccaga

SEQ ID NO: 3350969 - DNA, 25 bp, Homo sapien
ctagttagtggcctattgaccttgt

SEQ ID NO: 3350970 - DNA, 25 bp, Homo sapien
gaggtgtccataatagtctttggac

SEQ ID NO: 3350971 - DNA, 25 bp, Homo sapien
tcaaagagcgaactttttgttgcat

SEQ ID NO: 3350972 - DNA, 25 bp, Homo sapien
gaataagctcttttgctgcctagag

SEQ ID NO: 3350973 - DNA, 25 bp, Homo sapien
cagtagactatatgctccccaaggg

SEQ ID NO: 3350974 - DNA, 25 bp, Homo sapien
ctatgtttacggatggatgcttccc

SEQ ID NO: 3350975 - DNA, 25 bp, Homo sapien
cttgttcactactgcacatgactgg

SEQ ID NO: 3350976 - DNA, 25 bp, Homo sapien
tagatactacaaaagctggcggtgg

SEQ ID NO: 3350977 - DNA, 25 bp, Homo sapien
gatagtaggtacataggtgcccact

SEQ ID NO: 3350978 - DNA, 25 bp, Homo sapien
tcagcatctgtccagcggatgaagc

SEQ ID NO: 3350979 - DNA, 25 bp, Homo sapien
tatttctggcattgacacctctggg

SEQ ID NO: 3350980 - DNA, 25 bp, Homo sapien
aattgaggctaccacaaaagcaagg

SEQ ID NO: 3350981 - DNA, 25 bp, Homo sapien
tacatgctaaaatccagaagtccag

SEQ ID NO: 3350982 - DNA, 25 bp, Homo sapien
tgagaactggcttccgtaagcacaa

SEQ ID NO: 3350983 - DNA, 25 bp, Homo sapien
tacagcctgatgcacaatatggaaa

SEQ ID NO: 3350984 - DNA, 25 bp, Homo sapien
tcttcatccccttcgcagtgacaga

SEQ ID NO: 3350985 - DNA, 25 bp, Homo sapien
gagcttggtctccattatgaagtca

SEQ ID NO: 3350986 - DNA, 25 bp, Homo sapien
gacaaagcgcagtgtcccagtgcag

SEQ ID NO: 3350987 - DNA, 25 bp, Homo sapien
gagctcacagcagcgtgtatctgag

SEQ ID NO: 3350988 - DNA, 25 bp, Homo sapien
atttctgctaaaactactacctgaa

SEQ ID NO: 3350989 - DNA, 25 bp, Homo sapien
gtttactatcgtccagcttcttatg

SEQ ID NO: 3350990 - DNA, 25 bp, Homo sapien
cttatgtctcataaagtccttttta

SEQ ID NO: 3350991 - DNA, 25 bp, Homo sapien
tgctaaaactactacctgaagcacc

SEQ ID NO: 3350992 - DNA, 25 bp, Homo sapien
cctgtcatctgccattgaaaggggg

SEQ ID NO: 3350993 - DNA, 25 bp, Homo sapien
tgaaagggggtgtcttcaaccgcat

SEQ ID NO: 3350994 - DNA, 25 bp, Homo sapien
gtcttcaaccgcatcatttgcattt

SEQ ID NO: 3350995 - DNA, 25 bp, Homo sapien
tctgccattgaaagggggtgtcttc

SEQ ID NO: 3350996 - DNA, 25 bp, Homo sapien
tcaggcagaacatggagaggttttg

SEQ ID NO: 3350997 - DNA, 25 bp, Homo sapien
taatgtcgatactaaaatccgtcgc

SEQ ID NO: 3350998 - DNA, 25 bp, Homo sapien
gaacaagctggtaaaaatcaggcag

SEQ ID NO: 3350999 - DNA, 25 bp, Homo sapien
ttagcacttgttgggtaaccttcag

SEQ ID NO: 3351000 - DNA, 25 bp, Homo sapien
tcagttctgcataaacctgaaagtg

SEQ ID NO: 3351001 - DNA, 25 bp, Homo sapien
aggagaactaacacgctcctggagt

SEQ ID NO: 3351002 - DNA, 25 bp, Homo sapien
atgaaggagaactaacacgctcctg

SEQ ID NO: 3351003 - DNA, 25 bp, Homo sapien
ttctgcataaacctgaaagtgaatg

SEQ ID NO: 3351004 - DNA, 25 bp, Homo sapien
agcaaaagaaaactcgttgaggttg

SEQ ID NO: 3351005 - DNA, 25 bp, Homo sapien
agagcaaaagaaaactcgttgaggt

SEQ ID NO: 3351006 - DNA, 25 bp, Homo sapien
taacacgtaaatattgatccatgtc

SEQ ID NO: 3351007 - DNA, 25 bp, Homo sapien
gcacaatatagcctcataacacgta

SEQ ID NO: 3351008 - DNA, 25 bp, Homo sapien
tatgattggatattcaacaaactag

SEQ ID NO: 3351009 - DNA, 25 bp, Homo sapien
gaagtgactgtttagctaaattaga

SEQ ID NO: 3351010 - DNA, 25 bp, Homo sapien
cactgattcggaagctgtcccaaaa

SEQ ID NO: 3351011 - DNA, 25 bp, Homo sapien
tgagcactgcctgaattgttctgag

SEQ ID NO: 3351012 - DNA, 25 bp, Homo sapien
ttgttctgagtattgtggagggcac

SEQ ID NO: 3351013 - DNA, 25 bp, Homo sapien
caaaacagatgtaaggcaggactcc

SEQ ID NO: 3351014 - DNA, 25 bp, Homo sapien
taaaaagagcaagaacgctgccaca

SEQ ID NO: 3351015 - DNA, 25 bp, Homo sapien
aggctcttgcaaccccactgatacg

SEQ ID NO: 3351016 - DNA, 25 bp, Homo sapien
gagtcagcccctttaccaggataaa

SEQ ID NO: 3351017 - DNA, 25 bp, Homo sapien
tgagtcttcaattaccctgctgagt

SEQ ID NO: 3351018 - DNA, 25 bp, Homo sapien
cccatcgtcataggtggcaggaggc

SEQ ID NO: 3351019 - DNA, 25 bp, Homo sapien
acttctaaattatcagacccatcgt

SEQ ID NO: 3351020 - DNA, 25 bp, Homo sapien
cagacccatcgtcataggtggcagg

SEQ ID NO: 3351021 - DNA, 25 bp, Homo sapien
taaattatcagacccatcgtcatag

SEQ ID NO: 3351022 - DNA, 25 bp, Homo sapien
tcaattccgttaggagtggaagacc

SEQ ID NO: 3351023 - DNA, 25 bp, Homo sapien
gaggatctctgtggtgatatctgcc

SEQ ID NO: 3351024 - DNA, 25 bp, Homo sapien
cttgagtcagagaagggttgcattc

SEQ ID NO: 3351025 - DNA, 25 bp, Homo sapien
cttaccagactccttcctagcaggg

SEQ ID NO: 3351026 - DNA, 25 bp, Homo sapien
tctgacatgtcatgcaagatggcag

SEQ ID NO: 3351027 - DNA, 25 bp, Homo sapien
tgacatgtcatgcaagatggcagat

SEQ ID NO: 3351028 - DNA, 25 bp, Homo sapien
ggtgcaatactcaaatgactcttct

SEQ ID NO: 3351029 - DNA, 25 bp, Homo sapien
caaatgactcttctgacatgtcatg

SEQ ID NO: 3351030 - DNA, 25 bp, Homo sapien
ctagacagagcagcaggcaaaggat

SEQ ID NO: 3351031 - DNA, 25 bp, Homo sapien
gagcagcaggcaaaggatgggaaat

SEQ ID NO: 3351032 - DNA, 25 bp, Homo sapien
cagcaggcaaaggatgggaaatggg

SEQ ID NO: 3351033 - DNA, 25 bp, Homo sapien
agagcagcaggcaaaggatgggaaa

SEQ ID NO: 3351034 - DNA, 25 bp, Homo sapien
gcagatgtcctgagtggatggacag

SEQ ID NO: 3351035 - DNA, 25 bp, Homo sapien
agatgtcctgagtggatggacagac

SEQ ID NO: 3351036 - DNA, 25 bp, Homo sapien
cagatgtcctgagtggatggacaga

SEQ ID NO: 3351037 - DNA, 25 bp, Homo sapien
ggagaaacaagttagataatttggc

SEQ ID NO: 3351038 - DNA, 25 bp, Homo sapien
agataatttggcatcttggttaagg

SEQ ID NO: 3351039 - DNA, 25 bp, Homo sapien
tggcatcttggttaaggtaatacat

SEQ ID NO: 3351040 - DNA, 25 bp, Homo sapien
caagttagataatttggcatcttgg

SEQ ID NO: 3351041 - DNA, 25 bp, Homo sapien
aaaaattacaacaaacgtggctgct

SEQ ID NO: 3351042 - DNA, 25 bp, Homo sapien
aacctggaacagctgagatgctgcg

SEQ ID NO: 3351043 - DNA, 25 bp, Homo sapien
aacttatttgaggaacctggaacag

SEQ ID NO: 3351044 - DNA, 25 bp, Homo sapien
acagagaatataggaagtttgaggt

SEQ ID NO: 3351045 - DNA, 25 bp, Homo sapien
tgcaaaagtaaaacttatttgagga

SEQ ID NO: 3351046 - DNA, 25 bp, Homo sapien
aaacactaccaagcagagacacttg

SEQ ID NO: 3351047 - DNA, 25 bp, Homo sapien
cagtgacagatgaaatgggttggaa

SEQ ID NO: 3351048 - DNA, 25 bp, Homo sapien
caccagagttaaagttaatgtgact

SEQ ID NO: 3351049 - DNA, 25 bp, Homo sapien
tgactttataacagaaagccacaga

SEQ ID NO: 3351050 - DNA, 25 bp, Homo sapien
attcctgattctatgagaatccacg

SEQ ID NO: 3351051 - DNA, 25 bp, Homo sapien
cacctctagggacaactctcaataa

SEQ ID NO: 3351052 - DNA, 25 bp, Homo sapien
tcttgcacaagcctaaatgggacgg

SEQ ID NO: 3351053 - DNA, 25 bp, Homo sapien
atgggacggcgttaacacctctagg

SEQ ID NO: 3351054 - DNA, 25 bp, Homo sapien
ggagccgggaatacaatacttatcg

SEQ ID NO: 3351055 - DNA, 25 bp, Homo sapien
cagttggatgcagagggtatcttct

SEQ ID NO: 3351056 - DNA, 25 bp, Homo sapien
tagcttcctgtagtgcctagcaatg

SEQ ID NO: 3351057 - DNA, 25 bp, Homo sapien
tgaccatgaggatagctaggctgac

SEQ ID NO: 3351058 - DNA, 25 bp, Homo sapien
tttgaaatgttacttgatcgacttg

SEQ ID NO: 3351059 - DNA, 25 bp, Homo sapien
tacttgatcgacttgcagatcgccc

SEQ ID NO: 3351060 - DNA, 25 bp, Homo sapien
tgatcgacttgcagatcgccctggg

SEQ ID NO: 3351061 - DNA, 25 bp, Homo sapien
gaaatgttacttgatcgacttgcag

SEQ ID NO: 3351062 - DNA, 25 bp, Homo sapien
tgtagcagcagctggcatctagata

SEQ ID NO: 3351063 - DNA, 25 bp, Homo sapien
gcagctggcatctagatacaaggtt

SEQ ID NO: 3351064 - DNA, 25 bp, Homo sapien
agttagttgcaatccccccctgtag

SEQ ID NO: 3351065 - DNA, 25 bp, Homo sapien
gctggcatctagatacaaggtttct

SEQ ID NO: 3351066 - DNA, 25 bp, Homo sapien
ccgtaggtgttagcatctgctattg

SEQ ID NO: 3351067 - DNA, 25 bp, Homo sapien
agccgtaggtgttagcatctgctat

SEQ ID NO: 3351068 - DNA, 25 bp, Homo sapien
ctctgatattgttccagccgtaggt

SEQ ID NO: 3351069 - DNA, 25 bp, Homo sapien
tctgatattgttccagccgtaggtg

SEQ ID NO: 3351070 - DNA, 25 bp, Homo sapien
gaagcttgtctttgatcttgagcac

SEQ ID NO: 3351071 - DNA, 25 bp, Homo sapien
cgtaagttgaccactgaagcttgtc

SEQ ID NO: 3351072 - DNA, 25 bp, Homo sapien
gcaaatccggagacgtaagttgacc

SEQ ID NO: 3351073 - DNA, 25 bp, Homo sapien
aaaactaaatgaaagcgcaaatccg

SEQ ID NO: 3351074 - DNA, 25 bp, Homo sapien
ttattgtgtcaattccagaatgaac

SEQ ID NO: 3351075 - DNA, 25 bp, Homo sapien
gaacactgagcaatatcacctttgg

SEQ ID NO: 3351076 - DNA, 25 bp, Homo sapien
caatgttgttaggatgggtgtttgc

SEQ ID NO: 3351077 - DNA, 25 bp, Homo sapien
tgaacagcaatagcggcagaagagc

SEQ ID NO: 3351078 - DNA, 25 bp, Homo sapien
accagtttgcacatatgctgcaaca

SEQ ID NO: 3351079 - DNA, 25 bp, Homo sapien
ccagtttgcacatatgctgcaacat

SEQ ID NO: 3351080 - DNA, 25 bp, Homo sapien
ttaccagtttgcacatatgctgcaa

SEQ ID NO: 3351081 - DNA, 25 bp, Homo sapien
taccagtttgcacatatgctgcaac

SEQ ID NO: 3351082 - DNA, 25 bp, Homo sapien
gatatattccttgagggtttagtag

SEQ ID NO: 3351083 - DNA, 25 bp, Homo sapien
atgatatattccttgagggtttagt

SEQ ID NO: 3351084 - DNA, 25 bp, Homo sapien
tatattccttgagggtttagtaggc

SEQ ID NO: 3351085 - DNA, 25 bp, Homo sapien
tgaatgatatattccttgagggttt

SEQ ID NO: 3351086 - DNA, 25 bp, Homo sapien
gcaagggtgcagctttaggctatat

SEQ ID NO: 3351087 - DNA, 25 bp, Homo sapien
tctgaacccttgcatacactgtctt

SEQ ID NO: 3351088 - DNA, 25 bp, Homo sapien
aaggaacttgcttacggtcaattag

SEQ ID NO: 3351089 - DNA, 25 bp, Homo sapien
ggctttgtgttcaaatccagacctg

SEQ ID NO: 3351090 - DNA, 25 bp, Homo sapien
cggaggggagcctttagctgatcaa

SEQ ID NO: 3351091 - DNA, 25 bp, Homo sapien
tgagcccaattggtggcggagggga

SEQ ID NO: 3351092 - DNA, 25 bp, Homo sapien
tggaatcactcttgataagtgacat

SEQ ID NO: 3351093 - DNA, 25 bp, Homo sapien
agctgatcaatggaatcactcttga

SEQ ID NO: 3351094 - DNA, 25 bp, Homo sapien
tctgttctgttctaattaccggtgc

SEQ ID NO: 3351095 - DNA, 25 bp, Homo sapien
tgctcactcagggagcttggttgtt

SEQ ID NO: 3351096 - DNA, 25 bp, Homo sapien
agtcgatcacgaccctctcatgcag

SEQ ID NO: 3351097 - DNA, 25 bp, Homo sapien
gacgtgagtcttgccgaagctcccg

SEQ ID NO: 3351098 - DNA, 25 bp, Homo sapien
taagagtgctttagatctgactgca

SEQ ID NO: 3351099 - DNA, 25 bp, Homo sapien
taagtatgtagtcaagctttctctc

SEQ ID NO: 3351100 - DNA, 25 bp, Homo sapien
tttggcttaatgtctaattcatgtg

SEQ ID NO: 3351101 - DNA, 25 bp, Homo sapien
tggacttctccccatcattgttctg

SEQ ID NO: 3351102 - DNA, 25 bp, Homo sapien
tgtctttggtattatgtactctcag

SEQ ID NO: 3351103 - DNA, 25 bp, Homo sapien
caggtttctgttcctgctatcaaga

SEQ ID NO: 3351104 - DNA, 25 bp, Homo sapien
agttggtagtcctttgtaagtgatc

SEQ ID NO: 3351105 - DNA, 25 bp, Homo sapien
tatatttatattgctctcaggtttc

SEQ ID NO: 3351106 - DNA, 25 bp, Homo sapien
agacaggatatgtgtttgcacttag

SEQ ID NO: 3351107 - DNA, 25 bp, Homo sapien
tatatcaaaaccctaatcaccaatg

SEQ ID NO: 3351108 - DNA, 25 bp, Homo sapien
tcatatatcaaaaccctaatcacca

SEQ ID NO: 3351109 - DNA, 25 bp, Homo sapien
gtcttcaagacaggatatgtgtttg

SEQ ID NO: 3351110 - DNA, 25 bp, Homo sapien
actgcttgaatttacatgactggtc

SEQ ID NO: 3351111 - DNA, 25 bp, Homo sapien
acacttccagtggttttctgaaagg

SEQ ID NO: 3351112 - DNA, 25 bp, Homo sapien
tattatcctggttggttgtctctaa

SEQ ID NO: 3351113 - DNA, 25 bp, Homo sapien
tcctcaggacaatgcacagcatgaa

SEQ ID NO: 3351114 - DNA, 25 bp, Homo sapien
tctagacagaggtatagagctgttt

SEQ ID NO: 3351115 - DNA, 25 bp, Homo sapien
gctgtttgtccccttgattgaaggt

SEQ ID NO: 3351116 - DNA, 25 bp, Homo sapien
tcaggttcaggagagattcacgagg

SEQ ID NO: 3351117 - DNA, 25 bp, Homo sapien
tctgaaccaaccctgtcaagtcagg

SEQ ID NO: 3351118 - DNA, 25 bp, Homo sapien
cttagtaaaggctttgtaatagcaa

SEQ ID NO: 3351119 - DNA, 25 bp, Homo sapien
ttagtaaaggctttgtaatagcaat

SEQ ID NO: 3351120 - DNA, 25 bp, Homo sapien
tggctaaccagagatcacggatttg

SEQ ID NO: 3351121 - DNA, 25 bp, Homo sapien
cacggatttgtgctgaaattagtga

SEQ ID NO: 3351122 - DNA, 25 bp, Homo sapien
ccagagatcacggatttgtgctgaa

SEQ ID NO: 3351123 - DNA, 25 bp, Homo sapien
tgaggacaatggctaaccagagatc

SEQ ID NO: 3351124 - DNA, 25 bp, Homo sapien
tataagccaatttgaggtaaagtaa

SEQ ID NO: 3351125 - DNA, 25 bp, Homo sapien
tacatataagccaatttgaggtaaa

SEQ ID NO: 3351126 - DNA, 25 bp, Homo sapien
ttacatataagccaatttgaggtaa

SEQ ID NO: 3351127 - DNA, 25 bp, Homo sapien
catataagccaatttgaggtaaagt

SEQ ID NO: 3351128 - DNA, 25 bp, Homo sapien
cgcgtgttgtttggaattctgtgag

SEQ ID NO: 3351129 - DNA, 25 bp, Homo sapien
cagccaaatcccctgagatctcggg

SEQ ID NO: 3351130 - DNA, 25 bp, Homo sapien
gttacgggctatcgcttcacaccag

SEQ ID NO: 3351131 - DNA, 25 bp, Homo sapien
caatgtggaggtttgtgaggcgtca

SEQ ID NO: 3351132 - DNA, 25 bp, Homo sapien
tcctcttatcccttttcaatttctg

SEQ ID NO: 3351133 - DNA, 25 bp, Homo sapien
ttctccttcctcttatcccttttca

SEQ ID NO: 3351134 - DNA, 25 bp, Homo sapien
ctccttcctcttatcccttttcaat

SEQ ID NO: 3351135 - DNA, 25 bp, Homo sapien
tctccttcctcttatcccttttcaa

SEQ ID NO: 3351136 - DNA, 25 bp, Homo sapien
gctaaggacttcttgcttgggttga

SEQ ID NO: 3351137 - DNA, 25 bp, Homo sapien
aagacttggggttccaatgaccgct

SEQ ID NO: 3351138 - DNA, 25 bp, Homo sapien
ctaaggacttcttgcttgggttgaa

SEQ ID NO: 3351139 - DNA, 25 bp, Homo sapien
ttccaatgaccgctaaggacttctt

SEQ ID NO: 3351140 - DNA, 25 bp, Homo sapien
ggaatcagtttttgtgttctatagc

SEQ ID NO: 3351141 - DNA, 25 bp, Homo sapien
aattacagctagattaaggaatcag

SEQ ID NO: 3351142 - DNA, 25 bp, Homo sapien
gaacaaattttgtatgttcccaaca

SEQ ID NO: 3351143 - DNA, 25 bp, Homo sapien
aaattacagctagattaaggaatca

SEQ ID NO: 3351144 - DNA, 25 bp, Homo sapien
tgtactgcataaatgataatgacag

SEQ ID NO: 3351145 - DNA, 25 bp, Homo sapien
gcttctttgatctgttatcacttgt

SEQ ID NO: 3351146 - DNA, 25 bp, Homo sapien
tttcatccctactgaaaagttcttg

SEQ ID NO: 3351147 - DNA, 25 bp, Homo sapien
atcacttgtgatatcaagatcatta

SEQ ID NO: 3351148 - DNA, 25 bp, Homo sapien
ctatgaactttacttgggcccataa

SEQ ID NO: 3351149 - DNA, 25 bp, Homo sapien
tatgaactttacttgggcccataac

SEQ ID NO: 3351150 - DNA, 25 bp, Homo sapien
cctatgaactttacttgggcccata

SEQ ID NO: 3351151 - DNA, 25 bp, Homo sapien
tctcacctggacttgtataatagca

SEQ ID NO: 3351152 - DNA, 25 bp, Homo sapien
ttcgaatgcttatgacttctcacct

SEQ ID NO: 3351153 - DNA, 25 bp, Homo sapien
ctaatgatattcactcccttcttga

SEQ ID NO: 3351154 - DNA, 25 bp, Homo sapien
caattgtccctctacgacacttctt

SEQ ID NO: 3351155 - DNA, 25 bp, Homo sapien
taagcctgtgtaacttgatagtcaa

SEQ ID NO: 3351156 - DNA, 25 bp, Homo sapien
tctggacactggtactccagtatct

SEQ ID NO: 3351157 - DNA, 25 bp, Homo sapien
gataactgaggagaatgagccttcc

SEQ ID NO: 3351158 - DNA, 25 bp, Homo sapien
ggatagccactcttgttatcaaaca

SEQ ID NO: 3351159 - DNA, 25 bp, Homo sapien
tctgcgtctctcgaaaaatgtatgg

SEQ ID NO: 3351160 - DNA, 25 bp, Homo sapien
aacttggagcctgattgaatgccag

SEQ ID NO: 3351161 - DNA, 25 bp, Homo sapien
tctgctgtaaactgcctcagggtgg

SEQ ID NO: 3351162 - DNA, 25 bp, Homo sapien
ttctgcctgccattagacagttggg

SEQ ID NO: 3351163 - DNA, 25 bp, Homo sapien
aatgtgtaagaacccagataaccat

SEQ ID NO: 3351164 - DNA, 25 bp, Homo sapien
atgtgtaagaacccagataaccatg

SEQ ID NO: 3351165 - DNA, 25 bp, Homo sapien
taatgtgtaagaacccagataacca

SEQ ID NO: 3351166 - DNA, 25 bp, Homo sapien
tgtgtaagaacccagataaccatga

SEQ ID NO: 3351167 - DNA, 25 bp, Homo sapien
cgattgatgctgataccttgtagtt

SEQ ID NO: 3351168 - DNA, 25 bp, Homo sapien
ggttggtcaaagatgctagacttgg

SEQ ID NO: 3351169 - DNA, 25 bp, Homo sapien
aattaattgtataaaactctcttgg

SEQ ID NO: 3351170 - DNA, 25 bp, Homo sapien
gctagacttggtattgccatcgatt

SEQ ID NO: 3351171 - DNA, 25 bp, Homo sapien
tgcctgcacgctggctaaaacggct

SEQ ID NO: 3351172 - DNA, 25 bp, Homo sapien
gcagaacttgatacactgaatgaag

SEQ ID NO: 3351173 - DNA, 25 bp, Homo sapien
tgaatgaagattcatccaaaagaca

SEQ ID NO: 3351174 - DNA, 25 bp, Homo sapien
cattatggagtttcttagagacaac

SEQ ID NO: 3351175 - DNA, 25 bp, Homo sapien
gaaggtagttctcagatcctcaggc

SEQ ID NO: 3351176 - DNA, 25 bp, Homo sapien
tgtgcacatcaaggctggttctgga

SEQ ID NO: 3351177 - DNA, 25 bp, Homo sapien
tatgtaggcatgattccgggtgtcc

SEQ ID NO: 3351178 - DNA, 25 bp, Homo sapien
gacattgtgacctgggactgaggcc

SEQ ID NO: 3351179 - DNA, 25 bp, Homo sapien
cctcatccaacaaacagctctgaag

SEQ ID NO: 3351180 - DNA, 25 bp, Homo sapien
ttccatctgcccctcatccaacaaa

SEQ ID NO: 3351181 - DNA, 25 bp, Homo sapien
caacaaacagctctgaagtgcaata

SEQ ID NO: 3351182 - DNA, 25 bp, Homo sapien
tcatccaacaaacagctctgaagtg

SEQ ID NO: 3351183 - DNA, 25 bp, Homo sapien
ttgccccaaactgaagaacagtcca

SEQ ID NO: 3351184 - DNA, 25 bp, Homo sapien
tgccccaaactgaagaacagtccat

SEQ ID NO: 3351185 - DNA, 25 bp, Homo sapien
cttgccccaaactgaagaacagtcc

SEQ ID NO: 3351186 - DNA, 25 bp, Homo sapien
tcaaaaaacatagtgttgcaagcat

SEQ ID NO: 3351187 - DNA, 25 bp, Homo sapien
cagtgtaattgttatggttgtaaag

SEQ ID NO: 3351188 - DNA, 25 bp, Homo sapien
aaatagattgtcacatcctttcaaa

SEQ ID NO: 3351189 - DNA, 25 bp, Homo sapien
ttaatcagtctagcaatgtcaaaga

SEQ ID NO: 3351190 - DNA, 25 bp, Homo sapien
tgtcccacggtgcagagagcagtgt

SEQ ID NO: 3351191 - DNA, 25 bp, Homo sapien
gaagtgtccctatggatctggctcc

SEQ ID NO: 3351192 - DNA, 25 bp, Homo sapien
ccatctgtcaagtaggaagtgtccc

SEQ ID NO: 3351193 - DNA, 25 bp, Homo sapien
gaagtttaatatgtccctgccagtt

SEQ ID NO: 3351194 - DNA, 25 bp, Homo sapien
ctcccattgctggcagtctcccgtg

SEQ ID NO: 3351195 - DNA, 25 bp, Homo sapien
cccattgaatttctcccattgctgg

SEQ ID NO: 3351196 - DNA, 25 bp, Homo sapien
ggtggaggggcatattggcagggct

SEQ ID NO: 3351197 - DNA, 25 bp, Homo sapien
gcaggtggccaatccctgattggat

SEQ ID NO: 3351198 - DNA, 25 bp, Homo sapien
ctggtggaggggcatattggcaggg

SEQ ID NO: 3351199 - DNA, 25 bp, Homo sapien
tgcaggtggccaatccctgattgga

SEQ ID NO: 3351200 - DNA, 25 bp, Homo sapien
cttatctcttcactcgccctgagta

SEQ ID NO: 3351201 - DNA, 25 bp, Homo sapien
tatctcttcactcgccctgagtagc

SEQ ID NO: 3351202 - DNA, 25 bp, Homo sapien
cctgagtagcccacctgcacaattg

SEQ ID NO: 3351203 - DNA, 25 bp, Homo sapien
tgagtagcccacctgcacaattgtt

SEQ ID NO: 3351204 - DNA, 25 bp, Homo sapien
acatgttggttacagggggcttgaa

SEQ ID NO: 3351205 - DNA, 25 bp, Homo sapien
atgttggttacagggggcttgaagg

SEQ ID NO: 3351206 - DNA, 25 bp, Homo sapien
tacatgttggttacagggggcttga

SEQ ID NO: 3351207 - DNA, 25 bp, Homo sapien
ctacatgttggttacagggggcttg

SEQ ID NO: 3351208 - DNA, 25 bp, Homo sapien
taggcactcaaaactgttaggttac

SEQ ID NO: 3351209 - DNA, 25 bp, Homo sapien
ctaggcactcaaaactgttaggtta

SEQ ID NO: 3351210 - DNA, 25 bp, Homo sapien
ggcactcaaaactgttaggttacaa

SEQ ID NO: 3351211 - DNA, 25 bp, Homo sapien
aggcactcaaaactgttaggttaca

SEQ ID NO: 3351212 - DNA, 25 bp, Homo sapien
caattgcgctaggtctctccaggtg

SEQ ID NO: 3351213 - DNA, 25 bp, Homo sapien
cctctttagctataacacctgttga

SEQ ID NO: 3351214 - DNA, 25 bp, Homo sapien
tgctgttccctgcaggatttccact

SEQ ID NO: 3351215 - DNA, 25 bp, Homo sapien
tataacacctgttgagtgggtcttc

SEQ ID NO: 3351216 - DNA, 25 bp, Homo sapien
tggaatctgtcatgctttgtccgca

SEQ ID NO: 3351217 - DNA, 25 bp, Homo sapien
gatgactgacattgaaatagagcag

SEQ ID NO: 3351218 - DNA, 25 bp, Homo sapien
tctgtgcatttccaagctaaaatac

SEQ ID NO: 3351219 - DNA, 25 bp, Homo sapien
cagagttgctgctacacttgaatga

SEQ ID NO: 3351220 - DNA, 25 bp, Homo sapien
cagcaggacagttgagtatattctc

SEQ ID NO: 3351221 - DNA, 25 bp, Homo sapien
tctcagagttcttttggggtacatt

SEQ ID NO: 3351222 - DNA, 25 bp, Homo sapien
aattatcacagtggaccccagcagc

SEQ ID NO: 3351223 - DNA, 25 bp, Homo sapien
tctcactgtagtaatgacaaagcca

SEQ ID NO: 3351224 - DNA, 25 bp, Homo sapien
tggctcataggttcttccaggtgtt

SEQ ID NO: 3351225 - DNA, 25 bp, Homo sapien
ttagggtcaaattatcacagtggac

SEQ ID NO: 3351226 - DNA, 25 bp, Homo sapien
ccctacaagtcgcaacatagagccc

SEQ ID NO: 3351227 - DNA, 25 bp, Homo sapien
tcacccctacaagtcgcaacataga

SEQ ID NO: 3351228 - DNA, 25 bp, Homo sapien
acccctacaagtcgcaacatagagc

SEQ ID NO: 3351229 - DNA, 25 bp, Homo sapien
ctacaagtcgcaacatagagcccat

SEQ ID NO: 3351230 - DNA, 25 bp, Homo sapien
cttagcaacagcttcaaggactcct

SEQ ID NO: 3351231 - DNA, 25 bp, Homo sapien
ttagcaacagcttcaaggactcctt

SEQ ID NO: 3351232 - DNA, 25 bp, Homo sapien
tccttagcaacagcttcaaggactc

SEQ ID NO: 3351233 - DNA, 25 bp, Homo sapien
agcaacagcttcaaggactccttca

SEQ ID NO: 3351234 - DNA, 25 bp, Homo sapien
tgagcactgagtttgccaggggcat

SEQ ID NO: 3351235 - DNA, 25 bp, Homo sapien
tctgtttctataagtggtttatcaa

SEQ ID NO: 3351236 - DNA, 25 bp, Homo sapien
tggtttatcaatgagcactgagttt

SEQ ID NO: 3351237 - DNA, 25 bp, Homo sapien
ttctataagtggtttatcaatgagc

SEQ ID NO: 3351238 - DNA, 25 bp, Homo sapien
ctatactaggaacttgcagctgcta

SEQ ID NO: 3351239 - DNA, 25 bp, Homo sapien
tccttatgaaaagttctaggcacaa

SEQ ID NO: 3351240 - DNA, 25 bp, Homo sapien
gctgctatgccaatgacctttgtct

SEQ ID NO: 3351241 - DNA, 25 bp, Homo sapien
gctaggcacttttcggaagaagcat

SEQ ID NO: 3351242 - DNA, 25 bp, Homo sapien
atttattgaggtctccaattctatg

SEQ ID NO: 3351243 - DNA, 25 bp, Homo sapien
gaatttattgaggtctccaattcta

SEQ ID NO: 3351244 - DNA, 25 bp, Homo sapien
tagaatttattgaggtctccaattc

SEQ ID NO: 3351245 - DNA, 25 bp, Homo sapien
ctagaatttattgaggtctccaatt

SEQ ID NO: 3351246 - DNA, 25 bp, Homo sapien
gaggggatatgggtaaaaacagtca

SEQ ID NO: 3351247 - DNA, 25 bp, Homo sapien
gccatctacctctccatcgttataa

SEQ ID NO: 3351248 - DNA, 25 bp, Homo sapien
cttcctcgccatctacctctccatc

SEQ ID NO: 3351249 - DNA, 25 bp, Homo sapien
ctcgccatctacctctccatcgtta

SEQ ID NO: 3351250 - DNA, 25 bp, Homo sapien
tcattttcgcttctgacccctttct

SEQ ID NO: 3351251 - DNA, 25 bp, Homo sapien
ctgagcatcttcatcatactcctcc

SEQ ID NO: 3351252 - DNA, 25 bp, Homo sapien
cttcatcatactcctcctcatgctc

SEQ ID NO: 3351253 - DNA, 25 bp, Homo sapien
tcttcatcatactcctcctcatgct

SEQ ID NO: 3351254 - DNA, 25 bp, Homo sapien
agcatcttcatcatactcctcctca

SEQ ID NO: 3351255 - DNA, 25 bp, Homo sapien
cctcctcctcgtcatccaggccctc

SEQ ID NO: 3351256 - DNA, 25 bp, Homo sapien
tcctcctcgtcatccaggccctcca

SEQ ID NO: 3351257 - DNA, 25 bp, Homo sapien
ctcctcctcgtcatccaggccctcc

SEQ ID NO: 3351258 - DNA, 25 bp, Homo sapien
cctcctcgtcatccaggccctccac

SEQ ID NO: 3351259 - DNA, 25 bp, Homo sapien
cagtaacagctgtcgagatatgtga

SEQ ID NO: 3351260 - DNA, 25 bp, Homo sapien
gtcccagtaacagctgtcgagatat

SEQ ID NO: 3351261 - DNA, 25 bp, Homo sapien
tcaatatctgagtaaggggcctcct

SEQ ID NO: 3351262 - DNA, 25 bp, Homo sapien
gaagcttgaacacgttttctccgta

SEQ ID NO: 3351263 - DNA, 25 bp, Homo sapien
agactcttagttcaagctttctcaa

SEQ ID NO: 3351264 - DNA, 25 bp, Homo sapien
ctgagactcttagttcaagctttct

SEQ ID NO: 3351265 - DNA, 25 bp, Homo sapien
caagctttctcaactttaactttgg

SEQ ID NO: 3351266 - DNA, 25 bp, Homo sapien
tagttcaagctttctcaactttaac

SEQ ID NO: 3351267 - DNA, 25 bp, Homo sapien
cgtgccagccgaattcaatcaataa

SEQ ID NO: 3351268 - DNA, 25 bp, Homo sapien
tcgtgccagccgaattcaatcaata

SEQ ID NO: 3351269 - DNA, 25 bp, Homo sapien
gctctcgtgccagccgaattcaatc

SEQ ID NO: 3351270 - DNA, 25 bp, Homo sapien
tctcgtgccagccgaattcaatcaa

SEQ ID NO: 3351271 - DNA, 25 bp, Homo sapien
ttctaatcctccaagtgtaggtcct

SEQ ID NO: 3351272 - DNA, 25 bp, Homo sapien
ccatggcttgagtagattgtctccc

SEQ ID NO: 3351273 - DNA, 25 bp, Homo sapien
tctaggccaaccacgggacaggact

SEQ ID NO: 3351274 - DNA, 25 bp, Homo sapien
gcccaggcaacaaggatgatcaatg

SEQ ID NO: 3351275 - DNA, 25 bp, Homo sapien
tactcagcggtgctattgatttaca

SEQ ID NO: 3351276 - DNA, 25 bp, Homo sapien
gaatttctactcagcggtgctattg

SEQ ID NO: 3351277 - DNA, 25 bp, Homo sapien
ctcagcggtgctattgatttacaca

SEQ ID NO: 3351278 - DNA, 25 bp, Homo sapien
cagcaactgaatttctactcagcgg

SEQ ID NO: 3351279 - DNA, 25 bp, Homo sapien
gtcaccaccaggaaggaagcactaa

SEQ ID NO: 3351280 - DNA, 25 bp, Homo sapien
acatggaaaggaacaaccagtacca

SEQ ID NO: 3351281 - DNA, 25 bp, Homo sapien
gaacaaccagtaccagccgctgcaa

SEQ ID NO: 3351282 - DNA, 25 bp, Homo sapien
tttgtcaccaccaggaaggaagcac

SEQ ID NO: 3351283 - DNA, 25 bp, Homo sapien
gcctggaaccttttctcccatataa

SEQ ID NO: 3351284 - DNA, 25 bp, Homo sapien
caggatatttgccattgttactgca

SEQ ID NO: 3351285 - DNA, 25 bp, Homo sapien
gagtcttcatttatcattccttgac

SEQ ID NO: 3351286 - DNA, 25 bp, Homo sapien
tcccatataaacatagagattgctc

SEQ ID NO: 3351287 - DNA, 25 bp, Homo sapien
taaccatatcagtaggcatgtgttg

SEQ ID NO: 3351288 - DNA, 25 bp, Homo sapien
tcacaagaagagcacgggggaaact

SEQ ID NO: 3351289 - DNA, 25 bp, Homo sapien
taaactcagagaaaaatactagtat

SEQ ID NO: 3351290 - DNA, 25 bp, Homo sapien
acagttcagtacagcttgggaggcc

SEQ ID NO: 3351291 - DNA, 25 bp, Homo sapien
aaaacttgggcgtctctctgcctcg

SEQ ID NO: 3351292 - DNA, 25 bp, Homo sapien
cagcacctggataactgcgacactc

SEQ ID NO: 3351293 - DNA, 25 bp, Homo sapien
gggataaaacttgggcgtctctctg

SEQ ID NO: 3351294 - DNA, 25 bp, Homo sapien
tctgcctcgactggtcactccactt

SEQ ID NO: 3351295 - DNA, 25 bp, Homo sapien
gctggccgcaggaacacaatgacat

SEQ ID NO: 3351296 - DNA, 25 bp, Homo sapien
gactcagggttgagcgcatcagcgc

SEQ ID NO: 3351297 - DNA, 25 bp, Homo sapien
acagttgcagtgaacccgactcagg

SEQ ID NO: 3351298 - DNA, 25 bp, Homo sapien
catcagcgctaaacccaagacaaag

SEQ ID NO: 3351299 - DNA, 25 bp, Homo sapien
gggtgcggctccgtgactagtacca

SEQ ID NO: 3351300 - DNA, 25 bp, Homo sapien
taggagcgcgtgagcctgtgaagtg

SEQ ID NO: 3351301 - DNA, 25 bp, Homo sapien
gtaccacgccggtgtaaacagcgcg

SEQ ID NO: 3351302 - DNA, 25 bp, Homo sapien
atagtagcaactaccccaggctgcg

SEQ ID NO: 3351303 - DNA, 25 bp, Homo sapien
agccccgctcgggatcagggacaag

SEQ ID NO: 3351304 - DNA, 25 bp, Homo sapien
tgatgctgtgccaagccccgctcgg

SEQ ID NO: 3351305 - DNA, 25 bp, Homo sapien
ctcgggatcagggacaagccgccca

SEQ ID NO: 3351306 - DNA, 25 bp, Homo sapien
tgccaagccccgctcgggatcaggg

SEQ ID NO: 3351307 - DNA, 25 bp, Homo sapien
cggagagaaggggctcccagtgagg

SEQ ID NO: 3351308 - DNA, 25 bp, Homo sapien
ctaccagccggagagaaggggctcc

SEQ ID NO: 3351309 - DNA, 25 bp, Homo sapien
accagccggagagaaggggctccca

SEQ ID NO: 3351310 - DNA, 25 bp, Homo sapien
gccggagagaaggggctcccagtga

SEQ ID NO: 3351311 - DNA, 25 bp, Homo sapien
gattgaatgaatgatgtttgcagtc

SEQ ID NO: 3351312 - DNA, 25 bp, Homo sapien
ctgattgaatgaatgatgtttgcag

SEQ ID NO: 3351313 - DNA, 25 bp, Homo sapien
ttgaatgaatgatgtttgcagtcac

SEQ ID NO: 3351314 - DNA, 25 bp, Homo sapien
tgaatgaatgatgtttgcagtcact

SEQ ID NO: 3351315 - DNA, 25 bp, Homo sapien
cggcggagggtgaagtagctcaggc

SEQ ID NO: 3351316 - DNA, 25 bp, Homo sapien
gttgcgggtggagcgctcctcccca

SEQ ID NO: 3351317 - DNA, 25 bp, Homo sapien
tctcccatcctttgtcagttgcggg

SEQ ID NO: 3351318 - DNA, 25 bp, Homo sapien
tcagttgcgggtggagcgctcctcc

SEQ ID NO: 3351319 - DNA, 25 bp, Homo sapien
ctcccatcctttgtcagttgcgggt

SEQ ID NO: 3351320 - DNA, 25 bp, Homo sapien
ccggctctggctcggctccccagtc

SEQ ID NO: 3351321 - DNA, 25 bp, Homo sapien
cggacgagcagccgggtggcaggca

SEQ ID NO: 3351322 - DNA, 25 bp, Homo sapien
agcggacgagcagccgggtggcagg

SEQ ID NO: 3351323 - DNA, 25 bp, Homo sapien
ctagcggacgagcagccgggtggca

SEQ ID NO: 3351324 - DNA, 25 bp, Homo sapien
caccatctgtgagaccacatccaag

SEQ ID NO: 3351325 - DNA, 25 bp, Homo sapien
ctagaatggctcattcaagtgtcca

SEQ ID NO: 3351326 - DNA, 25 bp, Homo sapien
tgtccaatggcataaacggcatagt

SEQ ID NO: 3351327 - DNA, 25 bp, Homo sapien
catccaaggattcttggatctggaa

SEQ ID NO: 3351328 - DNA, 25 bp, Homo sapien
gagccccagttctaaatgagaggta

SEQ ID NO: 3351329 - DNA, 25 bp, Homo sapien
tcagagccccagttctaaatgagag

SEQ ID NO: 3351330 - DNA, 25 bp, Homo sapien
cagttctaaatgagaggtaggcaga

SEQ ID NO: 3351331 - DNA, 25 bp, Homo sapien
cccagttctaaatgagaggtaggca

SEQ ID NO: 3351332 - DNA, 25 bp, Homo sapien
aagcactagcttaagtttgtgcatt

SEQ ID NO: 3351333 - DNA, 25 bp, Homo sapien
tgaagcactagcttaagtttgtgca

SEQ ID NO: 3351334 - DNA, 25 bp, Homo sapien
attttcttgtacatcaggctgtcag

SEQ ID NO: 3351335 - DNA, 25 bp, Homo sapien
gcactagcttaagtttgtgcatttt

SEQ ID NO: 3351336 - DNA, 25 bp, Homo sapien
agtggagtcagagctcctaatgtcc

SEQ ID NO: 3351337 - DNA, 25 bp, Homo sapien
tcagagctcctaatgtccttgaagt

SEQ ID NO: 3351338 - DNA, 25 bp, Homo sapien
tgtccttgaagttactagctatact

SEQ ID NO: 3351339 - DNA, 25 bp, Homo sapien
ttgaagttactagctatactggctc

SEQ ID NO: 3351340 - DNA, 25 bp, Homo sapien
ctaggatatcagtgtaacggacagt

SEQ ID NO: 3351341 - DNA, 25 bp, Homo sapien
gatatcagtgtaacggacagttttc

SEQ ID NO: 3351342 - DNA, 25 bp, Homo sapien
cagtgtaacggacagttttccacca

SEQ ID NO: 3351343 - DNA, 25 bp, Homo sapien
atcagtgtaacggacagttttccac

SEQ ID NO: 3351344 - DNA, 25 bp, Homo sapien
gcctgaatttgagcgtcatcttctt

SEQ ID NO: 3351345 - DNA, 25 bp, Homo sapien
ttgcataggtagtgcctgaatttga

SEQ ID NO: 3351346 - DNA, 25 bp, Homo sapien
catttcccatcttcttatggaaaca

SEQ ID NO: 3351347 - DNA, 25 bp, Homo sapien
catcttcttatggaaacactaatga

SEQ ID NO: 3351348 - DNA, 25 bp, Homo sapien
tggtattaactctcctgtactttgg

SEQ ID NO: 3351349 - DNA, 25 bp, Homo sapien
gctgatttgcatttcggatagggca

SEQ ID NO: 3351350 - DNA, 25 bp, Homo sapien
tagggcactctggtattaactctcc

SEQ ID NO: 3351351 - DNA, 25 bp, Homo sapien
cttggtgctctatcatggttagaac

SEQ ID NO: 3351352 - DNA, 25 bp, Homo sapien
cgtgtgggtgtgcatcagatcaaag

SEQ ID NO: 3351353 - DNA, 25 bp, Homo sapien
tgggtgtgcatcagatcaaagaggt

SEQ ID NO: 3351354 - DNA, 25 bp, Homo sapien
cctgcgtgtgggtgtgcatcagatc

SEQ ID NO: 3351355 - DNA, 25 bp, Homo sapien
taaacttcatgtttagattgactat

SEQ ID NO: 3351356 - DNA, 25 bp, Homo sapien
gcagcatttccagtgatttgtttat

SEQ ID NO: 3351357 - DNA, 25 bp, Homo sapien
tgatttgtttatagtaggccctgca

SEQ ID NO: 3351358 - DNA, 25 bp, Homo sapien
ttgtttatagtaggccctgcatgta

SEQ ID NO: 3351359 - DNA, 25 bp, Homo sapien
tgtgcagcatttccagtgatttgtt

SEQ ID NO: 3351360 - DNA, 25 bp, Homo sapien
agaggggttgttcgcaggaaagaca

SEQ ID NO: 3351361 - DNA, 25 bp, Homo sapien
ggggttgttcgcaggaaagacagcc

SEQ ID NO: 3351362 - DNA, 25 bp, Homo sapien
aggggttgttcgcaggaaagacagc

SEQ ID NO: 3351363 - DNA, 25 bp, Homo sapien
agaagaggggttgttcgcaggaaag

SEQ ID NO: 3351364 - DNA, 25 bp, Homo sapien
ttctctattacctctttatcataga

SEQ ID NO: 3351365 - DNA, 25 bp, Homo sapien
tctctattacctctttatcatagac

SEQ ID NO: 3351366 - DNA, 25 bp, Homo sapien
tattacctctttatcatagaccaga

SEQ ID NO: 3351367 - DNA, 25 bp, Homo sapien
tctattacctctttatcatagacca

SEQ ID NO: 3351368 - DNA, 25 bp, Homo sapien
ttctgattgatatcaaatcgatgac

SEQ ID NO: 3351369 - DNA, 25 bp, Homo sapien
gacttctgattgatatcaaatcgat

SEQ ID NO: 3351370 - DNA, 25 bp, Homo sapien
tgacttctgattgatatcaaatcga

SEQ ID NO: 3351371 - DNA, 25 bp, Homo sapien
tatgacttctgattgatatcaaatc

SEQ ID NO: 3351372 - DNA, 25 bp, Homo sapien
aaacgggaccaggtgttctccagct

SEQ ID NO: 3351373 - DNA, 25 bp, Homo sapien
acgggaccaggtgttctccagcttg

SEQ ID NO: 3351374 - DNA, 25 bp, Homo sapien
aacgggaccaggtgttctccagctt

SEQ ID NO: 3351375 - DNA, 25 bp, Homo sapien
tgcagttcctcctcgggcagtagca

SEQ ID NO: 3351376 - DNA, 25 bp, Homo sapien
tttgcagttcctcctcgggcagtag

SEQ ID NO: 3351377 - DNA, 25 bp, Homo sapien
agctttgcagttcctcctcgggcag

SEQ ID NO: 3351378 - DNA, 25 bp, Homo sapien
gcagttcctcctcgggcagtagcat

SEQ ID NO: 3351379 - DNA, 25 bp, Homo sapien
ctgcggatgagatcgtggctctcac

SEQ ID NO: 3351380 - DNA, 25 bp, Homo sapien
tgagatcgtggctctcacagaggga

SEQ ID NO: 3351381 - DNA, 25 bp, Homo sapien
tgcggatgagatcgtggctctcaca

SEQ ID NO: 3351382 - DNA, 25 bp, Homo sapien
ggatgagatcgtggctctcacagag

SEQ ID NO: 3351383 - DNA, 25 bp, Homo sapien
agttgcctgtattctaggaccagtg

SEQ ID NO: 3351384 - DNA, 25 bp, Homo sapien
atcagtagttgcctgtattctagga

SEQ ID NO: 3351385 - DNA, 25 bp, Homo sapien
cagtagttgcctgtattctaggacc

SEQ ID NO: 3351386 - DNA, 25 bp, Homo sapien
ggtctcccgcagtgctaactgctct

SEQ ID NO: 3351387 - DNA, 25 bp, Homo sapien
ctatgtttcaacttgggaaattgat

SEQ ID NO: 3351388 - DNA, 25 bp, Homo sapien
ggcagcaccgattgagtgtgagctt

SEQ ID NO: 3351389 - DNA, 25 bp, Homo sapien
gtggcgttgcacctttctctcaggg

SEQ ID NO: 3351390 - DNA, 25 bp, Homo sapien
cgcccctcatttgggtatgtggcgt

SEQ ID NO: 3351391 - DNA, 25 bp, Homo sapien
tcatttgggtatgtggcgttgcacc

SEQ ID NO: 3351392 - DNA, 25 bp, Homo sapien
gaattgagttcctgtgtagatgcta

SEQ ID NO: 3351393 - DNA, 25 bp, Homo sapien
tcagaatactgcaatagtcttatcc

SEQ ID NO: 3351394 - DNA, 25 bp, Homo sapien
gtgtagatgctattaaatgctgtgg

SEQ ID NO: 3351395 - DNA, 25 bp, Homo sapien
caaaaactggaattgagttcctgtg

SEQ ID NO: 3351396 - DNA, 25 bp, Homo sapien
gactgagcccaagcaggatctctgc

SEQ ID NO: 3351397 - DNA, 25 bp, Homo sapien
gtacagctcactggaaatattgcag

SEQ ID NO: 3351398 - DNA, 25 bp, Homo sapien
ttctggtgtgcctccaaggtgacag

SEQ ID NO: 3351399 - DNA, 25 bp, Homo sapien
aatattgcagttgtttgcagaacac

SEQ ID NO: 3351400 - DNA, 25 bp, Homo sapien
ttgcccggggataacctgtcctcag

SEQ ID NO: 3351401 - DNA, 25 bp, Homo sapien
aggacacaatccctcggcaaccttg

SEQ ID NO: 3351402 - DNA, 25 bp, Homo sapien
catgcactctgaaggccctcttgtc

SEQ ID NO: 3351403 - DNA, 25 bp, Homo sapien
tcttgtcctgcagccacgtagcacg

SEQ ID NO: 3351404 - DNA, 25 bp, Homo sapien
gtggcaggagaaaagttcaatgcaa

SEQ ID NO: 3351405 - DNA, 25 bp, Homo sapien
gcagtggcaggaatgtccgtcatac

SEQ ID NO: 3351406 - DNA, 25 bp, Homo sapien
gccagcagtggcaggaatgtccgtc

SEQ ID NO: 3351407 - DNA, 25 bp, Homo sapien
cagcagtggcaggaatgtccgtcat

SEQ ID NO: 3351408 - DNA, 25 bp, Homo sapien
catcccatttgccagcagtggcagg

SEQ ID NO: 3351409 - DNA, 25 bp, Homo sapien
tactcttaggccttcattaatatgt

SEQ ID NO: 3351410 - DNA, 25 bp, Homo sapien
taggccttcattaatatgttcaaaa

SEQ ID NO: 3351411 - DNA, 25 bp, Homo sapien
ctttctccaacccattccttgcatt

SEQ ID NO: 3351412 - DNA, 25 bp, Homo sapien
tgcattttactcttaggccttcatt

SEQ ID NO: 3351413 - DNA, 25 bp, Homo sapien
cattagagggttggtctaactgtaa

SEQ ID NO: 3351414 - DNA, 25 bp, Homo sapien
agagggttggtctaactgtaagaga

SEQ ID NO: 3351415 - DNA, 25 bp, Homo sapien
ctttgtgatgcattagagggttggt

SEQ ID NO: 3351416 - DNA, 25 bp, Homo sapien
tgatgcattagagggttggtctaac

SEQ ID NO: 3351417 - DNA, 25 bp, Homo sapien
gttgcattttccgacattactaagg

SEQ ID NO: 3351418 - DNA, 25 bp, Homo sapien
gcattttccgacattactaaggaag

SEQ ID NO: 3351419 - DNA, 25 bp, Homo sapien
aaagaaaatcactgataacgatgga

SEQ ID NO: 3351420 - DNA, 25 bp, Homo sapien
tccgacattactaaggaagtaagaa

SEQ ID NO: 3351421 - DNA, 25 bp, Homo sapien
aaggtttgttcatgttgtagcaaat

SEQ ID NO: 3351422 - DNA, 25 bp, Homo sapien
attcagtactttcaatggtaccttt

SEQ ID NO: 3351423 - DNA, 25 bp, Homo sapien
gttcatgttgtagcaaatattcagt

SEQ ID NO: 3351424 - DNA, 25 bp, Homo sapien
ttgttcatgttgtagcaaatattca

SEQ ID NO: 3351425 - DNA, 25 bp, Homo sapien
acagattatacttgccagcttctcc

SEQ ID NO: 3351426 - DNA, 25 bp, Homo sapien
tacagattatacttgccagcttctc

SEQ ID NO: 3351427 - DNA, 25 bp, Homo sapien
aatacagattatacttgccagcttc

SEQ ID NO: 3351428 - DNA, 25 bp, Homo sapien
atacagattatacttgccagcttct

SEQ ID NO: 3351429 - DNA, 25 bp, Homo sapien
cacacagcatctacaataggaagga

SEQ ID NO: 3351430 - DNA, 25 bp, Homo sapien
atgcacacagcatctacaataggaa

SEQ ID NO: 3351431 - DNA, 25 bp, Homo sapien
ggaaggagactcaataagaagagca

SEQ ID NO: 3351432 - DNA, 25 bp, Homo sapien
gtccccttggcccttgatgcatgca

SEQ ID NO: 3351433 - DNA, 25 bp, Homo sapien
tcagcttcaaggctagcctctgaat

SEQ ID NO: 3351434 - DNA, 25 bp, Homo sapien
tgaatgtttgcggattccatagatc

SEQ ID NO: 3351435 - DNA, 25 bp, Homo sapien
aaggctagcctctgaatgtttgcgg

SEQ ID NO: 3351436 - DNA, 25 bp, Homo sapien
atagatctgcaaataattagctgac

SEQ ID NO: 3351437 - DNA, 25 bp, Homo sapien
cagaaacaggtctgtcagcagcatt

SEQ ID NO: 3351438 - DNA, 25 bp, Homo sapien
ctgtcagcagcattggtgttaagca

SEQ ID NO: 3351439 - DNA, 25 bp, Homo sapien
ctggaatgcagaaacaggtctgtca

SEQ ID NO: 3351440 - DNA, 25 bp, Homo sapien
tgcagaaacaggtctgtcagcagca

SEQ ID NO: 3351441 - DNA, 25 bp, Homo sapien
gaagaaacgagtgttcactagtctc

SEQ ID NO: 3351442 - DNA, 25 bp, Homo sapien
gaaacgagtgttcactagtctcttc

SEQ ID NO: 3351443 - DNA, 25 bp, Homo sapien
cgagtgttcactagtctcttctcag

SEQ ID NO: 3351444 - DNA, 25 bp, Homo sapien
ctaggaagaaacgagtgttcactag

SEQ ID NO: 3351445 - DNA, 25 bp, Homo sapien
tctgtctcctttcgctaggtgtaat

SEQ ID NO: 3351446 - DNA, 25 bp, Homo sapien
gctctgtctcctttcgctaggtgta

SEQ ID NO: 3351447 - DNA, 25 bp, Homo sapien
tgtctcctttcgctaggtgtaatcc

SEQ ID NO: 3351448 - DNA, 25 bp, Homo sapien
ctcctttcgctaggtgtaatccctt

SEQ ID NO: 3351449 - DNA, 25 bp, Homo sapien
tggttttttggtaacacagtcatgc

SEQ ID NO: 3351450 - DNA, 25 bp, Homo sapien
tatggttttttggtaacacagtcat

SEQ ID NO: 3351451 - DNA, 25 bp, Homo sapien
atatggttttttggtaacacagtca

SEQ ID NO: 3351452 - DNA, 25 bp, Homo sapien
ggttttttggtaacacagtcatgct

SEQ ID NO: 3351453 - DNA, 25 bp, Homo sapien
ctggaagaactacattggcatcctg

SEQ ID NO: 3351454 - DNA, 25 bp, Homo sapien
ggaagaactacattggcatcctgtc

SEQ ID NO: 3351455 - DNA, 25 bp, Homo sapien
tggaagaactacattggcatcctgt

SEQ ID NO: 3351456 - DNA, 25 bp, Homo sapien
tactggaagaactacattggcatcc

SEQ ID NO: 3351457 - DNA, 25 bp, Homo sapien
aatgtgtaataattctttccataga

SEQ ID NO: 3351458 - DNA, 25 bp, Homo sapien
aaatgtgtaataattctttccatag

SEQ ID NO: 3351459 - DNA, 25 bp, Homo sapien
tgatttctccttacaaaatgtgtaa

SEQ ID NO: 3351460 - DNA, 25 bp, Homo sapien
aaaactgatttctccttacaaaatg

SEQ ID NO: 3351461 - DNA, 25 bp, Homo sapien
cacctcaggagtgggtataagcctt

SEQ ID NO: 3351462 - DNA, 25 bp, Homo sapien
gaatgaataatgtgcgtctcggcca

SEQ ID NO: 3351463 - DNA, 25 bp, Homo sapien
tcatagcgagaatagaggactctac

SEQ ID NO: 3351464 - DNA, 25 bp, Homo sapien
catgttgatgtagtccagtgggccc

SEQ ID NO: 3351465 - DNA, 25 bp, Homo sapien
tccatgcctggagtcttgaggcagt

SEQ ID NO: 3351466 - DNA, 25 bp, Homo sapien
agggccatgaacaatcccagcccct

SEQ ID NO: 3351467 - DNA, 25 bp, Homo sapien
cagtgtctttaggtacagaggtggc

SEQ ID NO: 3351468 - DNA, 25 bp, Homo sapien
taactggtgggaagatgtcttggcc

SEQ ID NO: 3351469 - DNA, 25 bp, Homo sapien
ctcagcaatggatggtgtctctctc

SEQ ID NO: 3351470 - DNA, 25 bp, Homo sapien
tctctctgctgtcggagatcacctg

SEQ ID NO: 3351471 - DNA, 25 bp, Homo sapien
tctgctgtcggagatcacctgaacc

SEQ ID NO: 3351472 - DNA, 25 bp, Homo sapien
tgccttggctcagcaatggatggtg

SEQ ID NO: 3351473 - DNA, 25 bp, Homo sapien
gcaggaggtgacagcagggcatggt

SEQ ID NO: 3351474 - DNA, 25 bp, Homo sapien
agtgctatcctcttgatcggttgtc

SEQ ID NO: 3351475 - DNA, 25 bp, Homo sapien
tcttgatcggttgtctgcaggaggt

SEQ ID NO: 3351476 - DNA, 25 bp, Homo sapien
gtgttatttagtgcaatgatacctc

SEQ ID NO: 3351477 - DNA, 25 bp, Homo sapien
ggaactgtggtctcgtggggtccag

SEQ ID NO: 3351478 - DNA, 25 bp, Homo sapien
gccctggaactgtggtctcgtgggg

SEQ ID NO: 3351479 - DNA, 25 bp, Homo sapien
cctggaactgtggtctcgtggggtc

SEQ ID NO: 3351480 - DNA, 25 bp, Homo sapien
aggtgctccccctcttaagggccat

SEQ ID NO: 3351481 - DNA, 25 bp, Homo sapien
cttttcaaggatctttttgcagtct

SEQ ID NO: 3351482 - DNA, 25 bp, Homo sapien
acttggcgagatttggcttcctttt

SEQ ID NO: 3351483 - DNA, 25 bp, Homo sapien
ctacttggcgagatttggcttcctt

SEQ ID NO: 3351484 - DNA, 25 bp, Homo sapien
gcgagatttggcttccttttcaagg

SEQ ID NO: 3351485 - DNA, 25 bp, Homo sapien
ctacatggacagttgtgccattagc

SEQ ID NO: 3351486 - DNA, 25 bp, Homo sapien
acagttgtgccattagccttttccc

SEQ ID NO: 3351487 - DNA, 25 bp, Homo sapien
cagttgtgccattagccttttccca

SEQ ID NO: 3351488 - DNA, 25 bp, Homo sapien
catggacagttgtgccattagcctt

SEQ ID NO: 3351489 - DNA, 25 bp, Homo sapien
gttcaatgtagatgacatatttctt

SEQ ID NO: 3351490 - DNA, 25 bp, Homo sapien
tcaatgtagatgacatatttctttc

SEQ ID NO: 3351491 - DNA, 25 bp, Homo sapien
tgttcaatgtagatgacatatttct

SEQ ID NO: 3351492 - DNA, 25 bp, Homo sapien
ctgttcaatgtagatgacatatttc

SEQ ID NO: 3351493 - DNA, 25 bp, Homo sapien
agtgtcctcgtacaacctgaacttc

SEQ ID NO: 3351494 - DNA, 25 bp, Homo sapien
tatagtgtcctcgtacaacctgaac

SEQ ID NO: 3351495 - DNA, 25 bp, Homo sapien
gtgtcctcgtacaacctgaacttca

SEQ ID NO: 3351496 - DNA, 25 bp, Homo sapien
ctttatagtgtcctcgtacaacctg

SEQ ID NO: 3351497 - DNA, 25 bp, Homo sapien
ctgaaatgacttttgtggttcttgc

SEQ ID NO: 3351498 - DNA, 25 bp, Homo sapien
aagggattgaacttcattttggctg

SEQ ID NO: 3351499 - DNA, 25 bp, Homo sapien
tgtcagaagtcacaaagggattgaa

SEQ ID NO: 3351500 - DNA, 25 bp, Homo sapien
ctgtcagaagtcacaaagggattga

SEQ ID NO: 3351501 - DNA, 25 bp, Homo sapien
tcacaaagggattgaacttcatttt

SEQ ID NO: 3351502 - DNA, 25 bp, Homo sapien
cttcagtgatggctgcaaaaggaaa

SEQ ID NO: 3351503 - DNA, 25 bp, Homo sapien
ctgcaaagagactgtcgaagcggct

SEQ ID NO: 3351504 - DNA, 25 bp, Homo sapien
caagtatagtcgtcgctggatctct

SEQ ID NO: 3351505 - DNA, 25 bp, Homo sapien
aggaacgcagtgctcgcttagccca

SEQ ID NO: 3351506 - DNA, 25 bp, Homo sapien
tgaagccaccgctgttggacaagta

SEQ ID NO: 3351507 - DNA, 25 bp, Homo sapien
ggcgctgcccctggtctccaacatc

SEQ ID NO: 3351508 - DNA, 25 bp, Homo sapien
cgctgcccctggtctccaacatcat

SEQ ID NO: 3351509 - DNA, 25 bp, Homo sapien
gctgcccctggtctccaacatcatc

SEQ ID NO: 3351510 - DNA, 25 bp, Homo sapien
gcgctgcccctggtctccaacatca

SEQ ID NO: 3351511 - DNA, 25 bp, Homo sapien
ccagaagttgaagtccagaggcggt

SEQ ID NO: 3351512 - DNA, 25 bp, Homo sapien
cacccagaagttgaagtccagaggc

SEQ ID NO: 3351513 - DNA, 25 bp, Homo sapien
tctcacccagaagttgaagtccaga

SEQ ID NO: 3351514 - DNA, 25 bp, Homo sapien
cccagaagttgaagtccagaggcgg

SEQ ID NO: 3351515 - DNA, 25 bp, Homo sapien
cagaagatcattcctgaggtccgca

SEQ ID NO: 3351516 - DNA, 25 bp, Homo sapien
caggcgatcttgacagctgccaggt

SEQ ID NO: 3351517 - DNA, 25 bp, Homo sapien
aattccagaagatccagaagatcat

SEQ ID NO: 3351518 - DNA, 25 bp, Homo sapien
aggtccgcagatgcctcatacagtg

SEQ ID NO: 3351519 - DNA, 25 bp, Homo sapien
acaagcaccagctggcctttctgct

SEQ ID NO: 3351520 - DNA, 25 bp, Homo sapien
ccagtttgaaatacgctctccagca

SEQ ID NO: 3351521 - DNA, 25 bp, Homo sapien
gtaatgttctgagtctgagttccct

SEQ ID NO: 3351522 - DNA, 25 bp, Homo sapien
tccagcaccagatacgcccggtgtt

SEQ ID NO: 3351523 - DNA, 25 bp, Homo sapien
agaagcctctttagcagggttcagt

SEQ ID NO: 3351524 - DNA, 25 bp, Homo sapien
gagaagcctctttagcagggttcag

SEQ ID NO: 3351525 - DNA, 25 bp, Homo sapien
agcctctttagcagggttcagttcc

SEQ ID NO: 3351526 - DNA, 25 bp, Homo sapien
gaagcctctttagcagggttcagtt

SEQ ID NO: 3351527 - DNA, 25 bp, Homo sapien
tgcggctccacattcggtgcccatg

SEQ ID NO: 3351528 - DNA, 25 bp, Homo sapien
ggtggaggactctgcggctccacat

SEQ ID NO: 3351529 - DNA, 25 bp, Homo sapien
tccacattcggtgcccatgagaggc

SEQ ID NO: 3351530 - DNA, 25 bp, Homo sapien
gctccacattcggtgcccatgagag

SEQ ID NO: 3351531 - DNA, 25 bp, Homo sapien
tacacatatgatctggtatttaaat

SEQ ID NO: 3351532 - DNA, 25 bp, Homo sapien
tgacaatgtgattgtaacagcttgt

SEQ ID NO: 3351533 - DNA, 25 bp, Homo sapien
tgtactgcatgaactacggaatggc

SEQ ID NO: 3351534 - DNA, 25 bp, Homo sapien
catgaactacggaatggctgaattt

SEQ ID NO: 3351535 - DNA, 25 bp, Homo sapien
ctgcatgaactacggaatggctgaa

SEQ ID NO: 3351536 - DNA, 25 bp, Homo sapien
ttccttgtactgcatgaactacgga

SEQ ID NO: 3351537 - DNA, 25 bp, Homo sapien
tccttttcacattaagtgatctcaa

SEQ ID NO: 3351538 - DNA, 25 bp, Homo sapien
taattccttcctccatgttgccatc

SEQ ID NO: 3351539 - DNA, 25 bp, Homo sapien
tgatctcaaaattgggacttcacac

SEQ ID NO: 3351540 - DNA, 25 bp, Homo sapien
cacattaagtgatctcaaaattggg

SEQ ID NO: 3351541 - DNA, 25 bp, Homo sapien
cattccctcttgctcgtcacggtga

SEQ ID NO: 3351542 - DNA, 25 bp, Homo sapien
tgtggcgcaactgggtgtttgctcc

SEQ ID NO: 3351543 - DNA, 25 bp, Homo sapien
gagcaggactagaccctgactgtgc

SEQ ID NO: 3351544 - DNA, 25 bp, Homo sapien
tcaatgggcaacaagggatgatcct

SEQ ID NO: 3351545 - DNA, 25 bp, Homo sapien
ggtgactgggtccttcatgtaatcc

SEQ ID NO: 3351546 - DNA, 25 bp, Homo sapien
tggtgactgggtccttcatgtaatc

SEQ ID NO: 3351547 - DNA, 25 bp, Homo sapien
tgactgggtccttcatgtaatccag

SEQ ID NO: 3351548 - DNA, 25 bp, Homo sapien
gtgactgggtccttcatgtaatcca

SEQ ID NO: 3351549 - DNA, 25 bp, Homo sapien
gctccactcagtgcatgatgtgtta

SEQ ID NO: 3351550 - DNA, 25 bp, Homo sapien
cattctgcaggtccctacccctgtc

SEQ ID NO: 3351551 - DNA, 25 bp, Homo sapien
cagtgcatgatgtgttacttccgca

SEQ ID NO: 3351552 - DNA, 25 bp, Homo sapien
ttatgctccactcagtgcatgatgt

SEQ ID NO: 3351553 - DNA, 25 bp, Homo sapien
gactgtgttgcgtcttctgacctgg

SEQ ID NO: 3351554 - DNA, 25 bp, Homo sapien
gacctggatcgacgaagaaacagct

SEQ ID NO: 3351555 - DNA, 25 bp, Homo sapien
tgaacaagaagtagggactgtgttg

SEQ ID NO: 3351556 - DNA, 25 bp, Homo sapien
tgttgcgtcttctgacctggatcga

SEQ ID NO: 3351557 - DNA, 25 bp, Homo sapien
aagtcggagcggcagagcagtgatt

SEQ ID NO: 3351558 - DNA, 25 bp, Homo sapien
agcagtgattgggtgcggccggcac

SEQ ID NO: 3351559 - DNA, 25 bp, Homo sapien
ctgggcttcgacttccgggtgagac

SEQ ID NO: 3351560 - DNA, 25 bp, Homo sapien
aaggtgtggcgcgacgttggagacc

SEQ ID NO: 3351561 - DNA, 25 bp, Homo sapien
agtgtctctttgctcagacatccag

SEQ ID NO: 3351562 - DNA, 25 bp, Homo sapien
ctcagacatccagggacgaccacat

SEQ ID NO: 3351563 - DNA, 25 bp, Homo sapien
gaccacattcgtccaacagcggtcg

SEQ ID NO: 3351564 - DNA, 25 bp, Homo sapien
cagagaggaattttagtggcagcat

SEQ ID NO: 3351565 - DNA, 25 bp, Homo sapien
gaaaagtcaggaagagaaccaccat

SEQ ID NO: 3351566 - DNA, 25 bp, Homo sapien
ggctgtcacgccaccgaaattgcca

SEQ ID NO: 3351567 - DNA, 25 bp, Homo sapien
ccaggccactccaagtcagaaggac

SEQ ID NO: 3351568 - DNA, 25 bp, Homo sapien
tgtcacgccaccgaaattgccaggc

SEQ ID NO: 3351569 - DNA, 25 bp, Homo sapien
cgaagatagtcgaatattagaggaa

SEQ ID NO: 3351570 - DNA, 25 bp, Homo sapien
acatctgacatctgaaacagcaagt

SEQ ID NO: 3351571 - DNA, 25 bp, Homo sapien
tacatgaatgctaccgaagatagtc

SEQ ID NO: 3351572 - DNA, 25 bp, Homo sapien
agccaaaactaaaccaatcgttatg

SEQ ID NO: 3351573 - DNA, 25 bp, Homo sapien
ggaaaaagacgccatcacaatagga

SEQ ID NO: 3351574 - DNA, 25 bp, Homo sapien
gacttctgccacaacattatggtcg

SEQ ID NO: 3351575 - DNA, 25 bp, Homo sapien
cagtgcgatttggaaagacaccaca

SEQ ID NO: 3351576 - DNA, 25 bp, Homo sapien
gggatgatgattctagacttctgcc

SEQ ID NO: 3351577 - DNA, 25 bp, Homo sapien
tagagagctattagttcattccagc

SEQ ID NO: 3351578 - DNA, 25 bp, Homo sapien
gggtcatgccatcctacaccaaatt

SEQ ID NO: 3351579 - DNA, 25 bp, Homo sapien
gatttattccagtgaccttgctatt

SEQ ID NO: 3351580 - DNA, 25 bp, Homo sapien
agaatttaggtctctcgcaccaccc

SEQ ID NO: 3351581 - DNA, 25 bp, Homo sapien
actggctcagttatgtctactaggt

SEQ ID NO: 3351582 - DNA, 25 bp, Homo sapien
cagttatgtctactaggtgaaagaa

SEQ ID NO: 3351583 - DNA, 25 bp, Homo sapien
ggctcagttatgtctactaggtgaa

SEQ ID NO: 3351584 - DNA, 25 bp, Homo sapien
gctcagttatgtctactaggtgaaa

SEQ ID NO: 3351585 - DNA, 25 bp, Homo sapien
tgtctaggccagaatattgtggagg

SEQ ID NO: 3351586 - DNA, 25 bp, Homo sapien
ttgtctaggccagaatattgtggag

SEQ ID NO: 3351587 - DNA, 25 bp, Homo sapien
gaccttgaaatctgatcaactatca

SEQ ID NO: 3351588 - DNA, 25 bp, Homo sapien
ccttgaaatctgatcaactatcagt

SEQ ID NO: 3351589 - DNA, 25 bp, Homo sapien
actgccacgaacacttcacagcctg

SEQ ID NO: 3351590 - DNA, 25 bp, Homo sapien
agctcaagacccagtacacagtgga

SEQ ID NO: 3351591 - DNA, 25 bp, Homo sapien
agggacctctgcccttgaaagcggg

SEQ ID NO: 3351592 - DNA, 25 bp, Homo sapien
ctgcccttgaaagcggggtattgtc

SEQ ID NO: 3351593 - DNA, 25 bp, Homo sapien
cttgaaagcggggtattgtccaagg

SEQ ID NO: 3351594 - DNA, 25 bp, Homo sapien
gcacaatgcactgcggaaagccaca

SEQ ID NO: 3351595 - DNA, 25 bp, Homo sapien
atgctgctggcctgcggactgtact

SEQ ID NO: 3351596 - DNA, 25 bp, Homo sapien
cttgcattataatcacctggaggtc

SEQ ID NO: 3351597 - DNA, 25 bp, Homo sapien
tgctgctggcctgcggactgtactt

SEQ ID NO: 3351598 - DNA, 25 bp, Homo sapien
aagagctacgccagacactaaggag

SEQ ID NO: 3351599 - DNA, 25 bp, Homo sapien
agcgacccggaggtttaggcacaga

SEQ ID NO: 3351600 - DNA, 25 bp, Homo sapien
cactaaggagatccagtcgtgggca

SEQ ID NO: 3351601 - DNA, 25 bp, Homo sapien
tggtgggttctcaactggcagctac

SEQ ID NO: 3351602 - DNA, 25 bp, Homo sapien
ctggagcagacggatcagcaaatcc

SEQ ID NO: 3351603 - DNA, 25 bp, Homo sapien
cccgcgaggaaggactcatacccca

SEQ ID NO: 3351604 - DNA, 25 bp, Homo sapien
aaccccaccaagtgggctgcttcct

SEQ ID NO: 3351605 - DNA, 25 bp, Homo sapien
aaagaatactcaggacccaccgagc

SEQ ID NO: 3351606 - DNA, 25 bp, Homo sapien
caagtaagtctgcaagttggtttta

SEQ ID NO: 3351607 - DNA, 25 bp, Homo sapien
tcgcagggtggagtcgttgagcact

SEQ ID NO: 3351608 - DNA, 25 bp, Homo sapien
tggagagctttgcagggtcaactgc

SEQ ID NO: 3351609 - DNA, 25 bp, Homo sapien
tatgagtaaacttgagggtccaagt

SEQ ID NO: 3351610 - DNA, 25 bp, Homo sapien
accgataaagcaaagtccttgttcg

SEQ ID NO: 3351611 - DNA, 25 bp, Homo sapien
ccgataaagcaaagtccttgttcgt

SEQ ID NO: 3351612 - DNA, 25 bp, Homo sapien
gataaagcaaagtccttgttcgtaa

SEQ ID NO: 3351613 - DNA, 25 bp, Homo sapien
cgataaagcaaagtccttgttcgta

SEQ ID NO: 3351614 - DNA, 25 bp, Homo sapien
tcctgagcgctggaggatttgatgc

SEQ ID NO: 3351615 - DNA, 25 bp, Homo sapien
ctcactatcctgagcgctggaggat

SEQ ID NO: 3351616 - DNA, 25 bp, Homo sapien
ctatcctgagcgctggaggatttga

SEQ ID NO: 3351617 - DNA, 25 bp, Homo sapien
cctgagcgctggaggatttgatgct

SEQ ID NO: 3351618 - DNA, 25 bp, Homo sapien
ctacaggagtgtgcagggagtctct

SEQ ID NO: 3351619 - DNA, 25 bp, Homo sapien
cagcgatgctctgacatcagcatca

SEQ ID NO: 3351620 - DNA, 25 bp, Homo sapien
agaaacacaggacaccgggctacag

SEQ ID NO: 3351621 - DNA, 25 bp, Homo sapien
gtctcttcagcgatgctctgacatc

SEQ ID NO: 3351622 - DNA, 25 bp, Homo sapien
aaagttcattcctcgtcctgcagcg

SEQ ID NO: 3351623 - DNA, 25 bp, Homo sapien
tggagacagtgattcccggaacgga

SEQ ID NO: 3351624 - DNA, 25 bp, Homo sapien
tctttctagatacaggagggccctg

SEQ ID NO: 3351625 - DNA, 25 bp, Homo sapien
ggaaaccgtcaacagctgcataact

SEQ ID NO: 3351626 - DNA, 25 bp, Homo sapien
taaatctgggtctcagcgctgacct

SEQ ID NO: 3351627 - DNA, 25 bp, Homo sapien
ctcagtctggtgcaagagtgtcctc

SEQ ID NO: 3351628 - DNA, 25 bp, Homo sapien
gccggcaacttgtgaaggaatccaa

SEQ ID NO: 3351629 - DNA, 25 bp, Homo sapien
taagccgggagtaggactcagtacc

SEQ ID NO: 3351630 - DNA, 25 bp, Homo sapien
gcagctcagactccttcccattggt

SEQ ID NO: 3351631 - DNA, 25 bp, Homo sapien
agctcagactccttcccattggttc

SEQ ID NO: 3351632 - DNA, 25 bp, Homo sapien
ctcagactccttcccattggttctc

SEQ ID NO: 3351633 - DNA, 25 bp, Homo sapien
cagcagctcagactccttcccattg

SEQ ID NO: 3351634 - DNA, 25 bp, Homo sapien
gtggagcaggctggcgctttagttg

SEQ ID NO: 3351635 - DNA, 25 bp, Homo sapien
tggcgctttagttgaacccaggtac

SEQ ID NO: 3351636 - DNA, 25 bp, Homo sapien
ggctggcgctttagttgaacccagg

SEQ ID NO: 3351637 - DNA, 25 bp, Homo sapien
agcaggctggcgctttagttgaacc

SEQ ID NO: 3351638 - DNA, 25 bp, Homo sapien
tatatcgggcgcctctcctctttcc

SEQ ID NO: 3351639 - DNA, 25 bp, Homo sapien
tcccttggtgtctacaatatcatct

SEQ ID NO: 3351640 - DNA, 25 bp, Homo sapien
caagtccatgttttctaaagggcct

SEQ ID NO: 3351641 - DNA, 25 bp, Homo sapien
tagagaacatatatcgggcgcctct

SEQ ID NO: 3351642 - DNA, 25 bp, Homo sapien
ttgcccattgagcaagcggcagcca

SEQ ID NO: 3351643 - DNA, 25 bp, Homo sapien
gctcgaaagctacattcatccctga

SEQ ID NO: 3351644 - DNA, 25 bp, Homo sapien
cacaggaggaagctcgaaagctaca

SEQ ID NO: 3351645 - DNA, 25 bp, Homo sapien
cagctctggctatgggggttacttt

SEQ ID NO: 3351646 - DNA, 25 bp, Homo sapien
gaagcgtgaactatctggtggagcc

SEQ ID NO: 3351647 - DNA, 25 bp, Homo sapien
agcgtgaactatctggtggagcctg

SEQ ID NO: 3351648 - DNA, 25 bp, Homo sapien
tgaagcgtgaactatctggtggagc

SEQ ID NO: 3351649 - DNA, 25 bp, Homo sapien
tcatgaagcgtgaactatctggtgg

SEQ ID NO: 3351650 - DNA, 25 bp, Homo sapien
taggacaaagagccaatgatgtcac

SEQ ID NO: 3351651 - DNA, 25 bp, Homo sapien
ctaggacaaagagccaatgatgtca

SEQ ID NO: 3351652 - DNA, 25 bp, Homo sapien
ctttttcagaggctcaaggtagctt

SEQ ID NO: 3351653 - DNA, 25 bp, Homo sapien
cagggccagaccctgactgtgtttc

SEQ ID NO: 3351654 - DNA, 25 bp, Homo sapien
ggaagctgctggacaatatcagtca

SEQ ID NO: 3351655 - DNA, 25 bp, Homo sapien
gaacttcctcccatgcatagctgca

SEQ ID NO: 3351656 - DNA, 25 bp, Homo sapien
tgcaccctgcggcattgagcatgct

SEQ ID NO: 3351657 - DNA, 25 bp, Homo sapien
caccgcgctggtcaattgtatgcct

SEQ ID NO: 3351658 - DNA, 25 bp, Homo sapien
tgtgtgagggtttccgctctgcgcc

SEQ ID NO: 3351659 - DNA, 25 bp, Homo sapien
aaccaaggcgcccagggttgtgtga

SEQ ID NO: 3351660 - DNA, 25 bp, Homo sapien
cgccggtccaactgctccaggtaag

SEQ ID NO: 3351661 - DNA, 25 bp, Homo sapien
agccgccggtccaactgctccaggt

SEQ ID NO: 3351662 - DNA, 25 bp, Homo sapien
gcctgagccgccggtccaactgctc

SEQ ID NO: 3351663 - DNA, 25 bp, Homo sapien
cctgagccgccggtccaactgctcc

SEQ ID NO: 3351664 - DNA, 25 bp, Homo sapien
gccaaggcctttactgcggtccagt

SEQ ID NO: 3351665 - DNA, 25 bp, Homo sapien
caacatagtgggatgctacctctac

SEQ ID NO: 3351666 - DNA, 25 bp, Homo sapien
taacagtattaagggcaaccaagcc

SEQ ID NO: 3351667 - DNA, 25 bp, Homo sapien
tgctgaaggctggacacagaggctc

SEQ ID NO: 3351668 - DNA, 25 bp, Homo sapien
tctttggtctcttggacagatgact

SEQ ID NO: 3351669 - DNA, 25 bp, Homo sapien
ttgtctcccattagagccactctgg

SEQ ID NO: 3351670 - DNA, 25 bp, Homo sapien
gatcccctaggagcgggaccctgct

SEQ ID NO: 3351671 - DNA, 25 bp, Homo sapien
tatcagtccctttacagttgtcctg

SEQ ID NO: 3351672 - DNA, 25 bp, Homo sapien
cacagtagtaagcaaaagatagagc

SEQ ID NO: 3351673 - DNA, 25 bp, Homo sapien
tacattctatcaggagacacagaca

SEQ ID NO: 3351674 - DNA, 25 bp, Homo sapien
cactgttctatgtatgaaggacaca

SEQ ID NO: 3351675 - DNA, 25 bp, Homo sapien
aataatctctcagttcaggacatca

SEQ ID NO: 3351676 - DNA, 25 bp, Homo sapien
ctataataaaagttacgtgtggtgg

SEQ ID NO: 3351677 - DNA, 25 bp, Homo sapien
gaatcattgcaagacctcaggtgat

SEQ ID NO: 3351678 - DNA, 25 bp, Homo sapien
ataataaaagttacgtgtggtggtg

SEQ ID NO: 3351679 - DNA, 25 bp, Homo sapien
aatcattgcaagacctcaggtgatg

SEQ ID NO: 3351680 - DNA, 25 bp, Homo sapien
ggggggacggattctcactcttgtc

SEQ ID NO: 3351681 - DNA, 25 bp, Homo sapien
acccaggctggagtacagctgtgcg

SEQ ID NO: 3351682 - DNA, 25 bp, Homo sapien
tggagtacagctgtgcgatcttggc

SEQ ID NO: 3351683 - DNA, 25 bp, Homo sapien
cacctcccaggttcaagtgattctc

SEQ ID NO: 3351684 - DNA, 25 bp, Homo sapien
taaatactaacagaactcaagagac

SEQ ID NO: 3351685 - DNA, 25 bp, Homo sapien
tgtctcggtgtaaagctgaccattc

SEQ ID NO: 3351686 - DNA, 25 bp, Homo sapien
gctacactcccctcgtcaagatatt

SEQ ID NO: 3351687 - DNA, 25 bp, Homo sapien
agaactcaagagaccggcgccggtg

SEQ ID NO: 3351688 - DNA, 25 bp, Homo sapien
aggtgcacttcactgcacctggcta

SEQ ID NO: 3351689 - DNA, 25 bp, Homo sapien
cacctggctattttgtatttttagt

SEQ ID NO: 3351690 - DNA, 25 bp, Homo sapien
attacaggtgcacttcactgcacct

SEQ ID NO: 3351691 - DNA, 25 bp, Homo sapien
actgcgcccagccttaattttgtat

SEQ ID NO: 3351692 - DNA, 25 bp, Homo sapien
cactattggtaagggtatggagacc

SEQ ID NO: 3351693 - DNA, 25 bp, Homo sapien
cgtggagctcctacagcatgttggg

SEQ ID NO: 3351694 - DNA, 25 bp, Homo sapien
ttttggttccagctatacacagtgc

SEQ ID NO: 3351695 - DNA, 25 bp, Homo sapien
tgctagcacaattaccagcctggtg

SEQ ID NO: 3351696 - DNA, 25 bp, Homo sapien
aaacttttagaatgccccggcaatg

SEQ ID NO: 3351697 - DNA, 25 bp, Homo sapien
gagttaatcatctaccactggtgtt

SEQ ID NO: 3351698 - DNA, 25 bp, Homo sapien
cccggcaatggctgtatctaaaaga

SEQ ID NO: 3351699 - DNA, 25 bp, Homo sapien
gattacataagaacataggcaccct

SEQ ID NO: 3351700 - DNA, 25 bp, Homo sapien
caggttcgtctaacacaggtcggtc

SEQ ID NO: 3351701 - DNA, 25 bp, Homo sapien
caggtcggtctaacactggtccaag

SEQ ID NO: 3351702 - DNA, 25 bp, Homo sapien
cccgtggcagcttgtcaggtggtca

SEQ ID NO: 3351703 - DNA, 25 bp, Homo sapien
gcaattgctgtcatgaccgtgagcc

SEQ ID NO: 3351704 - DNA, 25 bp, Homo sapien
tcacgttctacttggctgacagccc

SEQ ID NO: 3351705 - DNA, 25 bp, Homo sapien
caacaatcgcttactcagcagcgca

SEQ ID NO: 3351706 - DNA, 25 bp, Homo sapien
cgcattgtgtcgcttcaggtattca

SEQ ID NO: 3351707 - DNA, 25 bp, Homo sapien
ctgaggaagtgagagccaacaatcg

SEQ ID NO: 3351708 - DNA, 25 bp, Homo sapien
caaccatcgatggtccctttctcct

SEQ ID NO: 3351709 - DNA, 25 bp, Homo sapien
tcaaccatcgatggtccctttctcc

SEQ ID NO: 3351710 - DNA, 25 bp, Homo sapien
tgctagtgtgggtaggttggtcttt

SEQ ID NO: 3351711 - DNA, 25 bp, Homo sapien
ttctgctagtgtgggtaggttggtc

SEQ ID NO: 3351712 - DNA, 25 bp, Homo sapien
tcttcttcaagtatatcaggctctg

SEQ ID NO: 3351713 - DNA, 25 bp, Homo sapien
caggctctggtttagctttattaaa

SEQ ID NO: 3351714 - DNA, 25 bp, Homo sapien
cagtctccgaggtaatattgctggg

SEQ ID NO: 3351715 - DNA, 25 bp, Homo sapien
gctggggtaagcatagattttttct

SEQ ID NO: 3351716 - DNA, 25 bp, Homo sapien
cattattagatcgaattctgaaaga

SEQ ID NO: 3351717 - DNA, 25 bp, Homo sapien
tattagatcgaattctgaaagacaa

SEQ ID NO: 3351718 - DNA, 25 bp, Homo sapien
ttctgaaagacaagtctagtttcat

SEQ ID NO: 3351719 - DNA, 25 bp, Homo sapien
aaagtcattattagatcgaattctg

SEQ ID NO: 3351720 - DNA, 25 bp, Homo sapien
gcagggaagctgttaacaatcagag

SEQ ID NO: 3351721 - DNA, 25 bp, Homo sapien
cctggatgtagccatgcaagagatg

SEQ ID NO: 3351722 - DNA, 25 bp, Homo sapien
gatttatcaagtggatgcaggctgg

SEQ ID NO: 3351723 - DNA, 25 bp, Homo sapien
gatgagtacctaaccaaggcagtgg

SEQ ID NO: 3351724 - DNA, 25 bp, Homo sapien
agtatgaggagaagcactgtgttgc

SEQ ID NO: 3351725 - DNA, 25 bp, Homo sapien
gagttccagtgccaagatggccaga

SEQ ID NO: 3351726 - DNA, 25 bp, Homo sapien
caagatacaatctgccaggctctgg

SEQ ID NO: 3351727 - DNA, 25 bp, Homo sapien
taaatgaggagacatatcagggaac

SEQ ID NO: 3351728 - DNA, 25 bp, Homo sapien
gagatgccttgttgatcggtagatc

SEQ ID NO: 3351729 - DNA, 25 bp, Homo sapien
tcggtagatcaagttatagcctcgg

SEQ ID NO: 3351730 - DNA, 25 bp, Homo sapien
tataaccgtctgaactttcaatggg

SEQ ID NO: 3351731 - DNA, 25 bp, Homo sapien
cagaggactgtatcatcaacgcaag

SEQ ID NO: 3351732 - DNA, 25 bp, Homo sapien
gaagattcactatgatgactgtagg

SEQ ID NO: 3351733 - DNA, 25 bp, Homo sapien
caatactctgggtgatatccaagga

SEQ ID NO: 3351734 - DNA, 25 bp, Homo sapien
gcatccagaagtgggtcgtcttcaa

SEQ ID NO: 3351735 - DNA, 25 bp, Homo sapien
tggaatcggggtctaaagtgagctt

SEQ ID NO: 3351736 - DNA, 25 bp, Homo sapien
ctggatacccctaatctggattgtg

SEQ ID NO: 3351737 - DNA, 25 bp, Homo sapien
gggcatcatcaaagacctgggctaa

SEQ ID NO: 3351738 - DNA, 25 bp, Homo sapien
agctgtggttaaggtcaggctccta

SEQ ID NO: 3351739 - DNA, 25 bp, Homo sapien
tggattcaagcacaagttttaccgc

SEQ ID NO: 3351740 - DNA, 25 bp, Homo sapien
ggctcctaagggcaaactgcctgga

SEQ ID NO: 3351741 - DNA, 25 bp, Homo sapien
cctccatcctgccccccgccgccat

SEQ ID NO: 3351742 - DNA, 25 bp, Homo sapien
gtcctccatcctgccccccgccgcc

SEQ ID NO: 3351743 - DNA, 25 bp, Homo sapien
tcctccatcctgccccccgccgcca

SEQ ID NO: 3351744 - DNA, 25 bp, Homo sapien
ctctggccgcgaaactcgccacctt

SEQ ID NO: 3351745 - DNA, 25 bp, Homo sapien
tgtaagcctctggccgcgaaactcg

SEQ ID NO: 3351746 - DNA, 25 bp, Homo sapien
ctccacctggacctgtaagcctctg

SEQ ID NO: 3351747 - DNA, 25 bp, Homo sapien
gcgaaactcgccaccttctgggacc

SEQ ID NO: 3351748 - DNA, 25 bp, Homo sapien
cttctcctccctaatgccagatctt

SEQ ID NO: 3351749 - DNA, 25 bp, Homo sapien
cagatctttgagtgcaacatgaagc

SEQ ID NO: 3351750 - DNA, 25 bp, Homo sapien
atgccagatctttgagtgcaacatg

SEQ ID NO: 3351751 - DNA, 25 bp, Homo sapien
ctttgagtgcaacatgaagcttttg

SEQ ID NO: 3351752 - DNA, 25 bp, Homo sapien
tcttcatttccctctgtcaggtcca

SEQ ID NO: 3351753 - DNA, 25 bp, Homo sapien
caagttcttcatttccctctgtcag

SEQ ID NO: 3351754 - DNA, 25 bp, Homo sapien
tttccctctgtcaggtccacagcaa

SEQ ID NO: 3351755 - DNA, 25 bp, Homo sapien
ttccctctgtcaggtccacagcaag

SEQ ID NO: 3351756 - DNA, 25 bp, Homo sapien
gaaattcagaatcagcccagataat

SEQ ID NO: 3351757 - DNA, 25 bp, Homo sapien
ttcagaatcagcccagataattaag

SEQ ID NO: 3351758 - DNA, 25 bp, Homo sapien
tcagaatcagcccagataattaagt

SEQ ID NO: 3351759 - DNA, 25 bp, Homo sapien
aattcagaatcagcccagataatta

SEQ ID NO: 3351760 - DNA, 25 bp, Homo sapien
gaggttaccccatgtctaaaagcca

SEQ ID NO: 3351761 - DNA, 25 bp, Homo sapien
gacttgggccgagctcaaattttag

SEQ ID NO: 3351762 - DNA, 25 bp, Homo sapien
caagtaatacaaactccctgaggta

SEQ ID NO: 3351763 - DNA, 25 bp, Homo sapien
catgggaatgcattctaggaaagac

SEQ ID NO: 3351764 - DNA, 25 bp, Homo sapien
tctgtttcgttcgtacctcgggcaa

SEQ ID NO: 3351765 - DNA, 25 bp, Homo sapien
caaattagtagcgtatcgacctgcc

SEQ ID NO: 3351766 - DNA, 25 bp, Homo sapien
ggcactgcagaacgttttatccaga

SEQ ID NO: 3351767 - DNA, 25 bp, Homo sapien
gaacgttttatccagaaatcagcat

SEQ ID NO: 3351768 - DNA, 25 bp, Homo sapien
gattgtaccgcaccagtctcttgtg

SEQ ID NO: 3351769 - DNA, 25 bp, Homo sapien
tgatgttcagcccttttaggagagc

SEQ ID NO: 3351770 - DNA, 25 bp, Homo sapien
gtcgttctccggtcaaatttggcaa

SEQ ID NO: 3351771 - DNA, 25 bp, Homo sapien
ggcagaattccagccaaaataagga

SEQ ID NO: 3351772 - DNA, 25 bp, Homo sapien
ctttgagggctctgagatttggtca

SEQ ID NO: 3351773 - DNA, 25 bp, Homo sapien
tctcgatagctgtggctttgagggc

SEQ ID NO: 3351774 - DNA, 25 bp, Homo sapien
cgatagctgtggctttgagggctct

SEQ ID NO: 3351775 - DNA, 25 bp, Homo sapien
gctctgagatttggtcatgttcttc

SEQ ID NO: 3351776 - DNA, 25 bp, Homo sapien
tttctgctggtgttaatgtgagtgg

SEQ ID NO: 3351777 - DNA, 25 bp, Homo sapien
taacaccaagtgctccttcccttgg

SEQ ID NO: 3351778 - DNA, 25 bp, Homo sapien
ctgcagggaaggtaacaccaagtgc

SEQ ID NO: 3351779 - DNA, 25 bp, Homo sapien
ggcacgggtagccttggctttctgc

SEQ ID NO: 3351780 - DNA, 25 bp, Homo sapien
ctttgtgtggcaccctttcagcagc

SEQ ID NO: 3351781 - DNA, 25 bp, Homo sapien
ttctttgtgtggcaccctttcagca

SEQ ID NO: 3351782 - DNA, 25 bp, Homo sapien
tctttgtgtggcaccctttcagcag

SEQ ID NO: 3351783 - DNA, 25 bp, Homo sapien
tgttctttgtgtggcaccctttcag

SEQ ID NO: 3351784 - DNA, 25 bp, Homo sapien
tcaaggagtcctcccgctgcagcct

SEQ ID NO: 3351785 - DNA, 25 bp, Homo sapien
tgtgatcatggatcatgcagcctcg

SEQ ID NO: 3351786 - DNA, 25 bp, Homo sapien
acccgatcttggtctgtctctcagg

SEQ ID NO: 3351787 - DNA, 25 bp, Homo sapien
tctctcagggtggtgtgtggtggtg

SEQ ID NO: 3351788 - DNA, 25 bp, Homo sapien
gatggtgatcaactagtgggtcaag

SEQ ID NO: 3351789 - DNA, 25 bp, Homo sapien
tcaggaagacataggtactcagtgg

SEQ ID NO: 3351790 - DNA, 25 bp, Homo sapien
tctatgctggctcatggtgcaattc

SEQ ID NO: 3351791 - DNA, 25 bp, Homo sapien
gaaaatagcagatcctagcaagtct

SEQ ID NO: 3351792 - DNA, 25 bp, Homo sapien
gacattctagcacccagaaatcagt

SEQ ID NO: 3351793 - DNA, 25 bp, Homo sapien
ggtcagctagtttgagaaaacctag

SEQ ID NO: 3351794 - DNA, 25 bp, Homo sapien
tagatggatacgaaacccaaagtgg

SEQ ID NO: 3351795 - DNA, 25 bp, Homo sapien
taagtctgaatttggtaatcctcat

SEQ ID NO: 3351796 - DNA, 25 bp, Homo sapien
ggccaacacctatgcaggcaagtgg

SEQ ID NO: 3351797 - DNA, 25 bp, Homo sapien
ctgaatttgggaggaaactgcttgg

SEQ ID NO: 3351798 - DNA, 25 bp, Homo sapien
gcaagtggagtagacctcagctgaa

SEQ ID NO: 3351799 - DNA, 25 bp, Homo sapien
ggaggaaactgcttggtttttgata

SEQ ID NO: 3351800 - DNA, 25 bp, Homo sapien
gactcaagtcctgttccagtagtgt

SEQ ID NO: 3351801 - DNA, 25 bp, Homo sapien
agactcaagtcctgttccagtagtg

SEQ ID NO: 3351802 - DNA, 25 bp, Homo sapien
actcaagtcctgttccagtagtgtt

SEQ ID NO: 3351803 - DNA, 25 bp, Homo sapien
gtgtcatcgcattaagagacaattg

SEQ ID NO: 3351804 - DNA, 25 bp, Homo sapien
gtcatcgcattaagagacaattgct

SEQ ID NO: 3351805 - DNA, 25 bp, Homo sapien
agacaattgctgggttgttctttca

SEQ ID NO: 3351806 - DNA, 25 bp, Homo sapien
agagacaattgctgggttgttcttt

SEQ ID NO: 3351807 - DNA, 25 bp, Homo sapien
gctccgattaacattgccatgctac

SEQ ID NO: 3351808 - DNA, 25 bp, Homo sapien
ttgctccgattaacattgccatgct

SEQ ID NO: 3351809 - DNA, 25 bp, Homo sapien
cttgctccgattaacattgccatgc

SEQ ID NO: 3351810 - DNA, 25 bp, Homo sapien
ccgattaacattgccatgctactca

SEQ ID NO: 3351811 - DNA, 25 bp, Homo sapien
tgttgaaaagcatagtcctacttgc

SEQ ID NO: 3351812 - DNA, 25 bp, Homo sapien
tctggagattgagttgtaacccaac

SEQ ID NO: 3351813 - DNA, 25 bp, Homo sapien
tctgtacagtggacacctccattga

SEQ ID NO: 3351814 - DNA, 25 bp, Homo sapien
ttaatctgaggttcaaaccgctcca

SEQ ID NO: 3351815 - DNA, 25 bp, Homo sapien
tgaactagcctcacttctttactgg

SEQ ID NO: 3351816 - DNA, 25 bp, Homo sapien
aggccgcgcgagtccgctgaactag

SEQ ID NO: 3351817 - DNA, 25 bp, Homo sapien
ttctcctgccataaacgccttcaga

SEQ ID NO: 3351818 - DNA, 25 bp, Homo sapien
tttactggctggctagcaggctact

SEQ ID NO: 3351819 - DNA, 25 bp, Homo sapien
cttggatggaggacgtatcggatat

SEQ ID NO: 3351820 - DNA, 25 bp, Homo sapien
cccttggatggaggacgtatcggat

SEQ ID NO: 3351821 - DNA, 25 bp, Homo sapien
aactgataagaacagatactacact

SEQ ID NO: 3351822 - DNA, 25 bp, Homo sapien
tggatggaggacgtatcggatatta

SEQ ID NO: 3351823 - DNA, 25 bp, Homo sapien
catgggtttttgactgcgtggaggg

SEQ ID NO: 3351824 - DNA, 25 bp, Homo sapien
cctgacccccatgtcggttcaaggg

SEQ ID NO: 3351825 - DNA, 25 bp, Homo sapien
cgtttggtcaactgtaagctattag

SEQ ID NO: 3351826 - DNA, 25 bp, Homo sapien
tagtaattaaattatgcgggagtaa

SEQ ID NO: 3351827 - DNA, 25 bp, Homo sapien
tcctcctgccttcgtattataatga

SEQ ID NO: 3351828 - DNA, 25 bp, Homo sapien
tttcactgtcatttagattcaaatg

SEQ ID NO: 3351829 - DNA, 25 bp, Homo sapien
tattgataaaccattatgagcctga

SEQ ID NO: 3351830 - DNA, 25 bp, Homo sapien
agagatacagagtgctgcctgtgac

SEQ ID NO: 3351831 - DNA, 25 bp, Homo sapien
gatcagatacagtttttctgagatc

SEQ ID NO: 3351832 - DNA, 25 bp, Homo sapien
aacactttggcatgaacattactgc

SEQ ID NO: 3351833 - DNA, 25 bp, Homo sapien
catggtcttcggaattttttctgtg

SEQ ID NO: 3351834 - DNA, 25 bp, Homo sapien
tctgtgtgtataaatttagctgcta

SEQ ID NO: 3351835 - DNA, 25 bp, Homo sapien
taatcaaaacatgtgtacgccgtaa

SEQ ID NO: 3351836 - DNA, 25 bp, Homo sapien
tgcaacaacacctgggcgttctctg

SEQ ID NO: 3351837 - DNA, 25 bp, Homo sapien
ttcactagcccaaatgatgcccctg

SEQ ID NO: 3351838 - DNA, 25 bp, Homo sapien
ggcactcatcgtccagcacaacaat

SEQ ID NO: 3351839 - DNA, 25 bp, Homo sapien
gacaatagaatgcagattgcagttg

SEQ ID NO: 3351840 - DNA, 25 bp, Homo sapien
gagtaagttcagtgcagtgatgaca

SEQ ID NO: 3351841 - DNA, 25 bp, Homo sapien
gcagtgatgacaatagaatgcagat

SEQ ID NO: 3351842 - DNA, 25 bp, Homo sapien
ttttagtaagagtaagttcagtgca

SEQ ID NO: 3351843 - DNA, 25 bp, Homo sapien
tatgtgagtatgttttgcattgacc

SEQ ID NO: 3351844 - DNA, 25 bp, Homo sapien
tgaccgtgattacatggtgtgccaa

SEQ ID NO: 3351845 - DNA, 25 bp, Homo sapien
gcccggccaattagaattgctttga

SEQ ID NO: 3351846 - DNA, 25 bp, Homo sapien
gctttgatgtagctttgtcaactgg

SEQ ID NO: 3351847 - DNA, 25 bp, Homo sapien
gaagctgaatatgcacatcctttgg

SEQ ID NO: 3351848 - DNA, 25 bp, Homo sapien
aatcaaacagttggatatcatagcc

SEQ ID NO: 3351849 - DNA, 25 bp, Homo sapien
tgtcttaggctccatttggaatgga

SEQ ID NO: 3351850 - DNA, 25 bp, Homo sapien
catgggtgaccattcgtttattaga

SEQ ID NO: 3351851 - DNA, 25 bp, Homo sapien
cctaaagatcaaaatatcatggatt

SEQ ID NO: 3351852 - DNA, 25 bp, Homo sapien
tccaaatcaagaaaagccggcacca

SEQ ID NO: 3351853 - DNA, 25 bp, Homo sapien
caagaacttccattctaatctagag

SEQ ID NO: 3351854 - DNA, 25 bp, Homo sapien
catcaattgatagcagtgagtgact

SEQ ID NO: 3351855 - DNA, 25 bp, Homo sapien
tgcgtcgtcccggacgccatttggc

SEQ ID NO: 3351856 - DNA, 25 bp, Homo sapien
gagccagcaaataacgccagcagcc

SEQ ID NO: 3351857 - DNA, 25 bp, Homo sapien
gacgccatttggctgttgacgtggt

SEQ ID NO: 3351858 - DNA, 25 bp, Homo sapien
tgttgacgtggttccgagccagcaa

SEQ ID NO: 3351859 - DNA, 25 bp, Homo sapien
tgcagcaagaggacggcatctcctt

SEQ ID NO: 3351860 - DNA, 25 bp, Homo sapien
tcctggtcatcgagctgtccgacaa

SEQ ID NO: 3351861 - DNA, 25 bp, Homo sapien
cgccatcagcaggatttacacggtg

SEQ ID NO: 3351862 - DNA, 25 bp, Homo sapien
tgtccgtgtggctgcagtgcaccgc

SEQ ID NO: 3351863 - DNA, 25 bp, Homo sapien
taacttagtcttttacagtctcagc

SEQ ID NO: 3351864 - DNA, 25 bp, Homo sapien
gaacaataatcatcaagcaagcttg

SEQ ID NO: 3351865 - DNA, 25 bp, Homo sapien
aatcaagcaagcgtcactcaatagg

SEQ ID NO: 3351866 - DNA, 25 bp, Homo sapien
tcaataggaacaaagtgtgcatcag

SEQ ID NO: 3351867 - DNA, 25 bp, Homo sapien
tttgaggcaatgccattgcgttcct

SEQ ID NO: 3351868 - DNA, 25 bp, Homo sapien
ttgaggcaatgccattgcgttcctt

SEQ ID NO: 3351869 - DNA, 25 bp, Homo sapien
gggaaatgtttctcaaccctcagag

SEQ ID NO: 3351870 - DNA, 25 bp, Homo sapien
tatgccaagggtcaatgcacagtac

SEQ ID NO: 3351871 - DNA, 25 bp, Homo sapien
ttaaatagcacaggatagaacttga

SEQ ID NO: 3351872 - DNA, 25 bp, Homo sapien
cagtactggtaatgatttgattcgg

SEQ ID NO: 3351873 - DNA, 25 bp, Homo sapien
gattctggccggttacatgacacca

SEQ ID NO: 3351874 - DNA, 25 bp, Homo sapien
agaattgttgagatgcatacttcag

SEQ ID NO: 3351875 - DNA, 25 bp, Homo sapien
tctagtgattctggccggttacatg

SEQ ID NO: 3351876 - DNA, 25 bp, Homo sapien
taaatgactggtcccatttgtaacc

SEQ ID NO: 3351877 - DNA, 25 bp, Homo sapien
tatacaatgagcacagtgggttcca

SEQ ID NO: 3351878 - DNA, 25 bp, Homo sapien
caccttccaatagcgcaaactctaa

SEQ ID NO: 3351879 - DNA, 25 bp, Homo sapien
agcgcaaactctaattcacagtcag

SEQ ID NO: 3351880 - DNA, 25 bp, Homo sapien
cacagtgggttccaccttccaatag

SEQ ID NO: 3351881 - DNA, 25 bp, Homo sapien
tcactgatgaaacttcttgttaggg

SEQ ID NO: 3351882 - DNA, 25 bp, Homo sapien
ctgggcttcatacagatccacaaag

SEQ ID NO: 3351883 - DNA, 25 bp, Homo sapien
atccacaaagcagaaaggccctcca

SEQ ID NO: 3351884 - DNA, 25 bp, Homo sapien
acaaagcagaaaggccctccaagac

SEQ ID NO: 3351885 - DNA, 25 bp, Homo sapien
cacaaagcagaaaggccctccaaga

SEQ ID NO: 3351886 - DNA, 25 bp, Homo sapien
agacttgctaaaataccgttcatgt

SEQ ID NO: 3351887 - DNA, 25 bp, Homo sapien
tgagcccgaagacggctccaatgtc

SEQ ID NO: 3351888 - DNA, 25 bp, Homo sapien
gaagctgagcccgaagacggctcca

SEQ ID NO: 3351889 - DNA, 25 bp, Homo sapien
aaataccgttcatgtcagaattcaa

SEQ ID NO: 3351890 - DNA, 25 bp, Homo sapien
ctgatagatggaaaagcccttccca

SEQ ID NO: 3351891 - DNA, 25 bp, Homo sapien
gatagatggaaaagcccttcccaga

SEQ ID NO: 3351892 - DNA, 25 bp, Homo sapien
tgatagatggaaaagcccttcccag

SEQ ID NO: 3351893 - DNA, 25 bp, Homo sapien
tctatgtcagtagttctgggtttcc

SEQ ID NO: 3351894 - DNA, 25 bp, Homo sapien
aagcccttggacaccatctatgtca

SEQ ID NO: 3351895 - DNA, 25 bp, Homo sapien
tatgtcagtagttctgggtttccac

SEQ ID NO: 3351896 - DNA, 25 bp, Homo sapien
ctaggaagcccttggacaccatcta

SEQ ID NO: 3351897 - DNA, 25 bp, Homo sapien
atccagcttctttgggtcaactcct

SEQ ID NO: 3351898 - DNA, 25 bp, Homo sapien
cccaaaggctttgcccagatctttg

SEQ ID NO: 3351899 - DNA, 25 bp, Homo sapien
gctttgcccagatctttggccacat

SEQ ID NO: 3351900 - DNA, 25 bp, Homo sapien
ctttggccacatgtttcgctacatc

SEQ ID NO: 3351901 - DNA, 25 bp, Homo sapien
aagacacctggtagtatagaagcca

SEQ ID NO: 3351902 - DNA, 25 bp, Homo sapien
catgggtgcaagacacctggtagta

SEQ ID NO: 3351903 - DNA, 25 bp, Homo sapien
ttcagacatcatgggtgcaagacac

SEQ ID NO: 3351904 - DNA, 25 bp, Homo sapien
ggtagtatagaagccaggtccatcc

SEQ ID NO: 3351905 - DNA, 25 bp, Homo sapien
tactagcaaagacgtagtgatctgg

SEQ ID NO: 3351906 - DNA, 25 bp, Homo sapien
gatgtgttactagcaaagacgtagt

SEQ ID NO: 3351907 - DNA, 25 bp, Homo sapien
tgcttgagaccgattgctacagttg

SEQ ID NO: 3351908 - DNA, 25 bp, Homo sapien
ccgattgctacagttgaagcactgg

SEQ ID NO: 3351909 - DNA, 25 bp, Homo sapien
cccagtcaagttgctgaagatggaa

SEQ ID NO: 3351910 - DNA, 25 bp, Homo sapien
gtctttcgccccttatccacggaga

SEQ ID NO: 3351911 - DNA, 25 bp, Homo sapien
tatagtctttcgccccttatccacg

SEQ ID NO: 3351912 - DNA, 25 bp, Homo sapien
cagtgagtgtggcatctttaagtat

SEQ ID NO: 3351913 - DNA, 25 bp, Homo sapien
taagtatagtctttcgccccttatc

SEQ ID NO: 3351914 - DNA, 25 bp, Homo sapien
catccttctgtggagctccagatgt

SEQ ID NO: 3351915 - DNA, 25 bp, Homo sapien
tgcaccaggaatagccagatgctta

SEQ ID NO: 3351916 - DNA, 25 bp, Homo sapien
tttggtcattgcaagctctccgaat

SEQ ID NO: 3351917 - DNA, 25 bp, Homo sapien
gagctccagatgtattcttcttgca

SEQ ID NO: 3351918 - DNA, 25 bp, Homo sapien
agattcagagagataaccagcatcg

SEQ ID NO: 3351919 - DNA, 25 bp, Homo sapien
cagaggtgtgggataaagggaaagc

SEQ ID NO: 3351920 - DNA, 25 bp, Homo sapien
ccttgctcaattccagtctttacca

SEQ ID NO: 3351921 - DNA, 25 bp, Homo sapien
tcagagagataaccagcatcgctcc

SEQ ID NO: 3351922 - DNA, 25 bp, Homo sapien
tttagtcctggtcgcagagattcca

SEQ ID NO: 3351923 - DNA, 25 bp, Homo sapien
ctctggaagttttagtcctggtcgc

SEQ ID NO: 3351924 - DNA, 25 bp, Homo sapien
tggcatacgctgttaatttttccac

SEQ ID NO: 3351925 - DNA, 25 bp, Homo sapien
catggcatacgctgttaatttttcc

SEQ ID NO: 3351926 - DNA, 25 bp, Homo sapien
gacttcaggagcaccgaatactgtt

SEQ ID NO: 3351927 - DNA, 25 bp, Homo sapien
ttcaggagcaccgaatactgttttt

SEQ ID NO: 3351928 - DNA, 25 bp, Homo sapien
tgccctgtctgcacggatgtttctg

SEQ ID NO: 3351929 - DNA, 25 bp, Homo sapien
caggagcaccgaatactgtttttct

SEQ ID NO: 3351930 - DNA, 25 bp, Homo sapien
ttatattggcataaaatggcaggat

SEQ ID NO: 3351931 - DNA, 25 bp, Homo sapien
ttttatattggcataaaatggcagg

SEQ ID NO: 3351932 - DNA, 25 bp, Homo sapien
tattggcataaaatggcaggatcca

SEQ ID NO: 3351933 - DNA, 25 bp, Homo sapien
tatattggcataaaatggcaggatc

SEQ ID NO: 3351934 - DNA, 25 bp, Homo sapien
gggtcttgcaagtggctaaaatgtt

SEQ ID NO: 3351935 - DNA, 25 bp, Homo sapien
tatcagcacctacaataaagcagcc

SEQ ID NO: 3351936 - DNA, 25 bp, Homo sapien
taaggatggcacttctgatttgatc

SEQ ID NO: 3351937 - DNA, 25 bp, Homo sapien
aagcagcctggctttggtgagataa

SEQ ID NO: 3351938 - DNA, 25 bp, Homo sapien
gactgttggtactagttgtcagcca

SEQ ID NO: 3351939 - DNA, 25 bp, Homo sapien
tgactgttggtactagttgtcagcc

SEQ ID NO: 3351940 - DNA, 25 bp, Homo sapien
tggtactagttgtcagccaggccat

SEQ ID NO: 3351941 - DNA, 25 bp, Homo sapien
tgttggtactagttgtcagccaggc

SEQ ID NO: 3351942 - DNA, 25 bp, Homo sapien
gtagataaagtttacttgggacaca

SEQ ID NO: 3351943 - DNA, 25 bp, Homo sapien
gaagggacaggtgaaatactaatac

SEQ ID NO: 3351944 - DNA, 25 bp, Homo sapien
tctgagttgttaagcagttagaaaa

SEQ ID NO: 3351945 - DNA, 25 bp, Homo sapien
gacaagatatctcaaaccatctgaa

SEQ ID NO: 3351946 - DNA, 25 bp, Homo sapien
atttaaatacattgggaatatgcat

SEQ ID NO: 3351947 - DNA, 25 bp, Homo sapien
gaggctgttggacgagaactgctca

SEQ ID NO: 3351948 - DNA, 25 bp, Homo sapien
taaatacattgggaatatgcatggg

SEQ ID NO: 3351949 - DNA, 25 bp, Homo sapien
aatacattgggaatatgcatgggaa

SEQ ID NO: 3351950 - DNA, 25 bp, Homo sapien
gccattaggcattgggactctgtcc

SEQ ID NO: 3351951 - DNA, 25 bp, Homo sapien
cacaccaatggcagttacctgaagg

SEQ ID NO: 3351952 - DNA, 25 bp, Homo sapien
catccaatttccagtagctaagctt

SEQ ID NO: 3351953 - DNA, 25 bp, Homo sapien
taaagcagccaataattgagcattc

SEQ ID NO: 3351954 - DNA, 25 bp, Homo sapien
gtgagcactctactgcaagacttaa

SEQ ID NO: 3351955 - DNA, 25 bp, Homo sapien
catcctaggcttaaatgcaatattc

SEQ ID NO: 3351956 - DNA, 25 bp, Homo sapien
tgtagagtggcccagaattgcattc

SEQ ID NO: 3351957 - DNA, 25 bp, Homo sapien
aaaggttaacagatacagctcggag

SEQ ID NO: 3351958 - DNA, 25 bp, Homo sapien
aaatcatggctttgagcttcaattt

SEQ ID NO: 3351959 - DNA, 25 bp, Homo sapien
gagtgatctcacaatagtctctatg

SEQ ID NO: 3351960 - DNA, 25 bp, Homo sapien
gtcaggtctgtacatggccagtcct

SEQ ID NO: 3351961 - DNA, 25 bp, Homo sapien
atttcaggatctctgagtgatctca

SEQ ID NO: 3351962 - DNA, 25 bp, Homo sapien
cttgatagagggcttcaaagctccc

SEQ ID NO: 3351963 - DNA, 25 bp, Homo sapien
ttgttaggtccacgtagtcttgtcc

SEQ ID NO: 3351964 - DNA, 25 bp, Homo sapien
tagagggcttcaaagctccctgtcc

SEQ ID NO: 3351965 - DNA, 25 bp, Homo sapien
ctattcgattgttggaaggaagttg

SEQ ID NO: 3351966 - DNA, 25 bp, Homo sapien
agaagaaataggcaacttatactga

SEQ ID NO: 3351967 - DNA, 25 bp, Homo sapien
tatgtagtattttagatttgtggct

SEQ ID NO: 3351968 - DNA, 25 bp, Homo sapien
agaaataggcaacttatactgaatg

SEQ ID NO: 3351969 - DNA, 25 bp, Homo sapien
aataggcaacttatactgaatgcct

SEQ ID NO: 3351970 - DNA, 25 bp, Homo sapien
tgagctgaaggttaaacagatctgg

SEQ ID NO: 3351971 - DNA, 25 bp, Homo sapien
aggctaaatttcagtggccccatca

SEQ ID NO: 3351972 - DNA, 25 bp, Homo sapien
gcagtcaaggatatgggagatacat

SEQ ID NO: 3351973 - DNA, 25 bp, Homo sapien
cagatctggattatgaacaagaggg

SEQ ID NO: 3351974 - DNA, 25 bp, Homo sapien
cgtgcccggtattgacatcccagat

SEQ ID NO: 3351975 - DNA, 25 bp, Homo sapien
tacttgagtgaatggatcgcgtgcc

SEQ ID NO: 3351976 - DNA, 25 bp, Homo sapien
gctggcatccgcataagctggatat

SEQ ID NO: 3351977 - DNA, 25 bp, Homo sapien
ggtaatttcagcacaaggctctcaa

SEQ ID NO: 3351978 - DNA, 25 bp, Homo sapien
tctgtacgtctttgcatgctctctc

SEQ ID NO: 3351979 - DNA, 25 bp, Homo sapien
tcccctgtctgtacgtctttgcatg

SEQ ID NO: 3351980 - DNA, 25 bp, Homo sapien
cctgtctgtacgtctttgcatgctc

SEQ ID NO: 3351981 - DNA, 25 bp, Homo sapien
gtctcccctgtctgtacgtctttgc

SEQ ID NO: 3351982 - DNA, 25 bp, Homo sapien
cccttttagctttgtagttgggctg

SEQ ID NO: 3351983 - DNA, 25 bp, Homo sapien
tccttgccgttggtgtcagaaagtc

SEQ ID NO: 3351984 - DNA, 25 bp, Homo sapien
tgtgggagattttgtgttgactttc

SEQ ID NO: 3351985 - DNA, 25 bp, Homo sapien
tcttgagtggacttggcagtctgaa

SEQ ID NO: 3351986 - DNA, 25 bp, Homo sapien
gtcctccaactttgcagtttggcta

SEQ ID NO: 3351987 - DNA, 25 bp, Homo sapien
tcctccaactttgcagtttggctaa

SEQ ID NO: 3351988 - DNA, 25 bp, Homo sapien
catgaagtccctgctgtttagcctg

SEQ ID NO: 3351989 - DNA, 25 bp, Homo sapien
aatatcaaacccagtgctgatattt

SEQ ID NO: 3351990 - DNA, 25 bp, Homo sapien
atatcaaacccagtgctgatatttg

SEQ ID NO: 3351991 - DNA, 25 bp, Homo sapien
tatgtttcttctgacaatccacacg

SEQ ID NO: 3351992 - DNA, 25 bp, Homo sapien
tctgacaatccacacgcaggttgtt

SEQ ID NO: 3351993 - DNA, 25 bp, Homo sapien
cacgcaggttgtttgttctggcatc

SEQ ID NO: 3351994 - DNA, 25 bp, Homo sapien
tcagagcctacttctacttgaagtc

SEQ ID NO: 3351995 - DNA, 25 bp, Homo sapien
gagggtcttcctcgtctccagaaac

SEQ ID NO: 3351996 - DNA, 25 bp, Homo sapien
cgagggtcttcctcgtctccagaaa

SEQ ID NO: 3351997 - DNA, 25 bp, Homo sapien
aacgagggtcttcctcgtctccaga

SEQ ID NO: 3351998 - DNA, 25 bp, Homo sapien
ggtcttcctcgtctccagaaacctg

SEQ ID NO: 3351999 - DNA, 25 bp, Homo sapien
tccttttcaccggcatattttgaag

SEQ ID NO: 3352000 - DNA, 25 bp, Homo sapien
tgttataatacgtttctttggacat

SEQ ID NO: 3352001 - DNA, 25 bp, Homo sapien
ccttttcaccggcatattttgaagt

SEQ ID NO: 3352002 - DNA, 25 bp, Homo sapien
acgtagcttttcagcttcctccctt

SEQ ID NO: 3352003 - DNA, 25 bp, Homo sapien
tcttttggtttatcatctatttttc

SEQ ID NO: 3352004 - DNA, 25 bp, Homo sapien
agcttttcagcttcctcccttttct

SEQ ID NO: 3352005 - DNA, 25 bp, Homo sapien
ttactttcttttggtttatcatcta

SEQ ID NO: 3352006 - DNA, 25 bp, Homo sapien
ggatcataatgtacgatgcccttaa

SEQ ID NO: 3352007 - DNA, 25 bp, Homo sapien
ttggatcataatgtacgatgccctt

SEQ ID NO: 3352008 - DNA, 25 bp, Homo sapien
ataatgtacgatgcccttaaatttc

SEQ ID NO: 3352009 - DNA, 25 bp, Homo sapien
tcataatgtacgatgcccttaaatt

SEQ ID NO: 3352010 - DNA, 25 bp, Homo sapien
ctagaaatcgagaattcatgcagaa

SEQ ID NO: 3352011 - DNA, 25 bp, Homo sapien
ttctagaaatcgagaattcatgcag

SEQ ID NO: 3352012 - DNA, 25 bp, Homo sapien
tctagaaatcgagaattcatgcaga

SEQ ID NO: 3352013 - DNA, 25 bp, Homo sapien
tcttcagaatcagattcctcatcat

SEQ ID NO: 3352014 - DNA, 25 bp, Homo sapien
tttaattttgaacctgttactgtca

SEQ ID NO: 3352015 - DNA, 25 bp, Homo sapien
taattttgaacctgttactgtcatc

SEQ ID NO: 3352016 - DNA, 25 bp, Homo sapien
tttgaacctgttactgtcatcttca

SEQ ID NO: 3352017 - DNA, 25 bp, Homo sapien
ctctgctcctgagtcgatatctcct

SEQ ID NO: 3352018 - DNA, 25 bp, Homo sapien
gctcctgagtcgatatctcctctgt

SEQ ID NO: 3352019 - DNA, 25 bp, Homo sapien
tgctcctgagtcgatatctcctctg

SEQ ID NO: 3352020 - DNA, 25 bp, Homo sapien
cctgagtcgatatctcctctgtttc

SEQ ID NO: 3352021 - DNA, 25 bp, Homo sapien
gcctcacttccaaggctaccaaatg

SEQ ID NO: 3352022 - DNA, 25 bp, Homo sapien
gaccatccaaacttgccagagcatt

SEQ ID NO: 3352023 - DNA, 25 bp, Homo sapien
tgtacgttagtttatcctctggatg

SEQ ID NO: 3352024 - DNA, 25 bp, Homo sapien
ggctaccaaatgcttctcatcgtct

SEQ ID NO: 3352025 - DNA, 25 bp, Homo sapien
cttagcactcagatctgacgaatta

SEQ ID NO: 3352026 - DNA, 25 bp, Homo sapien
tggtttctgtttgccacaggtgctc

SEQ ID NO: 3352027 - DNA, 25 bp, Homo sapien
ttggtttctgtttgccacaggtgct

SEQ ID NO: 3352028 - DNA, 25 bp, Homo sapien
tttctgtttgccacaggtgctctcc

SEQ ID NO: 3352029 - DNA, 25 bp, Homo sapien
ctgtttgccacaggtgctctcctct

SEQ ID NO: 3352030 - DNA, 25 bp, Homo sapien
gtgtctgcgtctgtggaggccagtg

SEQ ID NO: 3352031 - DNA, 25 bp, Homo sapien
cactctcagtatcttcattggaaac

SEQ ID NO: 3352032 - DNA, 25 bp, Homo sapien
ccacagtgtcgtcaggacaaataca

SEQ ID NO: 3352033 - DNA, 25 bp, Homo sapien
tggcccgtcactctcagtatcttca

SEQ ID NO: 3352034 - DNA, 25 bp, Homo sapien
ctttaatccatgaccgagggctgac

SEQ ID NO: 3352035 - DNA, 25 bp, Homo sapien
ccgagggctgactctacattgcttt

SEQ ID NO: 3352036 - DNA, 25 bp, Homo sapien
ttgcaattaagagcctttaatccat

SEQ ID NO: 3352037 - DNA, 25 bp, Homo sapien
gagggagatttgcaattaagagcct

SEQ ID NO: 3352038 - DNA, 25 bp, Homo sapien
tttaatacagtgatcagaagctcac

SEQ ID NO: 3352039 - DNA, 25 bp, Homo sapien
ttctgtactgtttttgaccttagca

SEQ ID NO: 3352040 - DNA, 25 bp, Homo sapien
gtactgtttttgaccttagcaacat

SEQ ID NO: 3352041 - DNA, 25 bp, Homo sapien
aattctgtactgtttttgaccttag

SEQ ID NO: 3352042 - DNA, 25 bp, Homo sapien
ctgtactgtttttgaccttagcaac

SEQ ID NO: 3352043 - DNA, 25 bp, Homo sapien
caacttcaaagggatcagtttcagg

SEQ ID NO: 3352044 - DNA, 25 bp, Homo sapien
tgtcatggcaagaggcactattttt

SEQ ID NO: 3352045 - DNA, 25 bp, Homo sapien
gaagaatgcaatttgtgaactcctg

SEQ ID NO: 3352046 - DNA, 25 bp, Homo sapien
tcctgatttgaagttatcccttaca

SEQ ID NO: 3352047 - DNA, 25 bp, Homo sapien
ggccagagacccagtggaactctca

SEQ ID NO: 3352048 - DNA, 25 bp, Homo sapien
tggccagagacccagtggaactctc

SEQ ID NO: 3352049 - DNA, 25 bp, Homo sapien
atggccagagacccagtggaactct

SEQ ID NO: 3352050 - DNA, 25 bp, Homo sapien
gccagagacccagtggaactctcat

SEQ ID NO: 3352051 - DNA, 25 bp, Homo sapien
ttcttactcatagggtcattccctc

SEQ ID NO: 3352052 - DNA, 25 bp, Homo sapien
tttcttactcatagggtcattccct

SEQ ID NO: 3352053 - DNA, 25 bp, Homo sapien
tcttactcatagggtcattccctcc

SEQ ID NO: 3352054 - DNA, 25 bp, Homo sapien
cttactcatagggtcattccctcct

SEQ ID NO: 3352055 - DNA, 25 bp, Homo sapien
gaccatccacataaaggggcttcat

SEQ ID NO: 3352056 - DNA, 25 bp, Homo sapien
tttcctggctaagaccatccacata

SEQ ID NO: 3352057 - DNA, 25 bp, Homo sapien
ttcctggctaagaccatccacataa

SEQ ID NO: 3352058 - DNA, 25 bp, Homo sapien
atttcctggctaagaccatccacat

SEQ ID NO: 3352059 - DNA, 25 bp, Homo sapien
gcagactgtacttgcctggtctgaa

SEQ ID NO: 3352060 - DNA, 25 bp, Homo sapien
tgtacttgcctggtctgaatggaag

SEQ ID NO: 3352061 - DNA, 25 bp, Homo sapien
tgaagtcgttccaaattagggctgc

SEQ ID NO: 3352062 - DNA, 25 bp, Homo sapien
tctacttgggtgaagtcgttccaaa

SEQ ID NO: 3352063 - DNA, 25 bp, Homo sapien
tgtttgtggtataggtggctagacc

SEQ ID NO: 3352064 - DNA, 25 bp, Homo sapien
ccaacaaagggtgtggttgtgtttg

SEQ ID NO: 3352065 - DNA, 25 bp, Homo sapien
atccaacaaagggtgtggttgtgtt

SEQ ID NO: 3352066 - DNA, 25 bp, Homo sapien
taggtggctagaccacaagcatcca

SEQ ID NO: 3352067 - DNA, 25 bp, Homo sapien
tgctgtgaatccttagacattcacg

SEQ ID NO: 3352068 - DNA, 25 bp, Homo sapien
ctattcaattccagttcctctaacg

SEQ ID NO: 3352069 - DNA, 25 bp, Homo sapien
tcacgagccctttgtcctgtacttt

SEQ ID NO: 3352070 - DNA, 25 bp, Homo sapien
ttcctctaacgaggctttgctgctt

SEQ ID NO: 3352071 - DNA, 25 bp, Homo sapien
ttggcagtgaccctcccttgaagca

SEQ ID NO: 3352072 - DNA, 25 bp, Homo sapien
cctttgggctttgtatgcagttgga

SEQ ID NO: 3352073 - DNA, 25 bp, Homo sapien
gttggtgaacacaaccgtcattgcc

SEQ ID NO: 3352074 - DNA, 25 bp, Homo sapien
gaattgctgaagacaaggcttggca

SEQ ID NO: 3352075 - DNA, 25 bp, Homo sapien
cacagctcttgttgaagacgtatgc

SEQ ID NO: 3352076 - DNA, 25 bp, Homo sapien
gttgaagacgtatgccagggctaca

SEQ ID NO: 3352077 - DNA, 25 bp, Homo sapien
gggcaccgcagcacaaagggcacac

SEQ ID NO: 3352078 - DNA, 25 bp, Homo sapien
ggctacaaggaaaagctccagaaag

SEQ ID NO: 3352079 - DNA, 25 bp, Homo sapien
aagtagacaagagttaagttaatgg

SEQ ID NO: 3352080 - DNA, 25 bp, Homo sapien
agtagacaagagttaagttaatggg

SEQ ID NO: 3352081 - DNA, 25 bp, Homo sapien
acctctaaggatcttctcagctctt

SEQ ID NO: 3352082 - DNA, 25 bp, Homo sapien
cattgctgtcagtgagaatcacctc

SEQ ID NO: 3352083 - DNA, 25 bp, Homo sapien
gaatcacctctaaggatcttctcag

SEQ ID NO: 3352084 - DNA, 25 bp, Homo sapien
agtttcacattgctgtcagtgagaa

SEQ ID NO: 3352085 - DNA, 25 bp, Homo sapien
tttgaaactcactactgttgagtcc

SEQ ID NO: 3352086 - DNA, 25 bp, Homo sapien
aatactctaattggctgcctattag

SEQ ID NO: 3352087 - DNA, 25 bp, Homo sapien
tattagaaggccaatactgattaga

SEQ ID NO: 3352088 - DNA, 25 bp, Homo sapien
tgagtccttcaatcagtattagaag

SEQ ID NO: 3352089 - DNA, 25 bp, Homo sapien
tcgttcttctgagcaacccatgacc

SEQ ID NO: 3352090 - DNA, 25 bp, Homo sapien
tacagctcgttcttctgagcaaccc

SEQ ID NO: 3352091 - DNA, 25 bp, Homo sapien
ttgcatttcctacagctcgttcttc

SEQ ID NO: 3352092 - DNA, 25 bp, Homo sapien
atttcctacagctcgttcttctgag

SEQ ID NO: 3352093 - DNA, 25 bp, Homo sapien
cttctggcaataggcaggttcagag

SEQ ID NO: 3352094 - DNA, 25 bp, Homo sapien
tcttgacccttattgggaatcctaa

SEQ ID NO: 3352095 - DNA, 25 bp, Homo sapien
taggcaggttcagagattcataaat

SEQ ID NO: 3352096 - DNA, 25 bp, Homo sapien
tgtttcttgacccttattgggaatc

SEQ ID NO: 3352097 - DNA, 25 bp, Homo sapien
tagcaaaaaatttgggcagacgaga

SEQ ID NO: 3352098 - DNA, 25 bp, Homo sapien
gtatgccaaaatctgccgatccgtt

SEQ ID NO: 3352099 - DNA, 25 bp, Homo sapien
gacaagtgaattctaagtcttccac

SEQ ID NO: 3352100 - DNA, 25 bp, Homo sapien
gcagacgagatggtagatccactaa

SEQ ID NO: 3352101 - DNA, 25 bp, Homo sapien
cattgctgagagtggcccaaaagta

SEQ ID NO: 3352102 - DNA, 25 bp, Homo sapien
acaatcattgctgagagtggcccaa

SEQ ID NO: 3352103 - DNA, 25 bp, Homo sapien
aatccgagaatcacaatcattgctg

SEQ ID NO: 3352104 - DNA, 25 bp, Homo sapien
cagagtaaattgttgagaatccgag

SEQ ID NO: 3352105 - DNA, 25 bp, Homo sapien
catgggatgcttcagaatataaatt

SEQ ID NO: 3352106 - DNA, 25 bp, Homo sapien
gggcatgggatgcttcagaatataa

SEQ ID NO: 3352107 - DNA, 25 bp, Homo sapien
gcatgggatgcttcagaatataaat

SEQ ID NO: 3352108 - DNA, 25 bp, Homo sapien
ggcatgggatgcttcagaatataaa

SEQ ID NO: 3352109 - DNA, 25 bp, Homo sapien
gacagttcacaattactcatgtgga

SEQ ID NO: 3352110 - DNA, 25 bp, Homo sapien
gccgccatattggatatcaccagta

SEQ ID NO: 3352111 - DNA, 25 bp, Homo sapien
tgaatacaagtagccatatgctgct

SEQ ID NO: 3352112 - DNA, 25 bp, Homo sapien
caccagtagatgattaggaaggatt

SEQ ID NO: 3352113 - DNA, 25 bp, Homo sapien
cattgcactatattgatggaggcca

SEQ ID NO: 3352114 - DNA, 25 bp, Homo sapien
tatattgatggaggccacattctgt

SEQ ID NO: 3352115 - DNA, 25 bp, Homo sapien
tccatgaggaaacctccagaaggac

SEQ ID NO: 3352116 - DNA, 25 bp, Homo sapien
tcatccatctttccatgaggaaacc

SEQ ID NO: 3352117 - DNA, 25 bp, Homo sapien
gatttctatccacaagaggctttgg

SEQ ID NO: 3352118 - DNA, 25 bp, Homo sapien
tgatttctatccacaagaggctttg

SEQ ID NO: 3352119 - DNA, 25 bp, Homo sapien
tttctatccacaagaggctttggtg

SEQ ID NO: 3352120 - DNA, 25 bp, Homo sapien
tctatccacaagaggctttggtgaa

SEQ ID NO: 3352121 - DNA, 25 bp, Homo sapien
gactagctcatccttttcctactga

SEQ ID NO: 3352122 - DNA, 25 bp, Homo sapien
cagagtcaaccttgcacagttagag

SEQ ID NO: 3352123 - DNA, 25 bp, Homo sapien
tcaaagctcatcgttgtcaggtcag

SEQ ID NO: 3352124 - DNA, 25 bp, Homo sapien
taccacgtggtgttaattactctga

SEQ ID NO: 3352125 - DNA, 25 bp, Homo sapien
taggtaatggcaaagctaaaactcc

SEQ ID NO: 3352126 - DNA, 25 bp, Homo sapien
gaacattccacttttgactgataca

SEQ ID NO: 3352127 - DNA, 25 bp, Homo sapien
ggacacgtgtgaagctggaagctca

SEQ ID NO: 3352128 - DNA, 25 bp, Homo sapien
tctagtttagaacacagcaactggc

SEQ ID NO: 3352129 - DNA, 25 bp, Homo sapien
tgcaaagtacaggattagagagtct

SEQ ID NO: 3352130 - DNA, 25 bp, Homo sapien
gatgaatggtctgggaaacatacag

SEQ ID NO: 3352131 - DNA, 25 bp, Homo sapien
tagtccagaataggaggtcaaatct

SEQ ID NO: 3352132 - DNA, 25 bp, Homo sapien
cagtaagaacgttgatgaacttgac

SEQ ID NO: 3352133 - DNA, 25 bp, Homo sapien
caaccttaagatggagaagctatcc

SEQ ID NO: 3352134 - DNA, 25 bp, Homo sapien
gctgtgcaaatactccataggactc

SEQ ID NO: 3352135 - DNA, 25 bp, Homo sapien
tatcctgggttatccaagcaggccc

SEQ ID NO: 3352136 - DNA, 25 bp, Homo sapien
ggtcagagttatgtggccatgagcc

SEQ ID NO: 3352137 - DNA, 25 bp, Homo sapien
aaagactcacaatcggccgggcgcg

SEQ ID NO: 3352138 - DNA, 25 bp, Homo sapien
aaaagactcacaatcggccgggcgc

SEQ ID NO: 3352139 - DNA, 25 bp, Homo sapien
taaaagactcacaatcggccgggcg

SEQ ID NO: 3352140 - DNA, 25 bp, Homo sapien
gaacaccttgttgagcaactctacg

SEQ ID NO: 3352141 - DNA, 25 bp, Homo sapien
tgtgctcagtatcaagaacaccttg

SEQ ID NO: 3352142 - DNA, 25 bp, Homo sapien
tttggatccccagaagcacatttct

SEQ ID NO: 3352143 - DNA, 25 bp, Homo sapien
tctacggaccccattcccattgtat

SEQ ID NO: 3352144 - DNA, 25 bp, Homo sapien
ctgtggcaaagcctgtggtgtaccc

SEQ ID NO: 3352145 - DNA, 25 bp, Homo sapien
tagaaagccatcagaactcagaagg

SEQ ID NO: 3352146 - DNA, 25 bp, Homo sapien
aagccatcagaactcagaagggccc

SEQ ID NO: 3352147 - DNA, 25 bp, Homo sapien
aagggccctcagtggatccagtcct

SEQ ID NO: 3352148 - DNA, 25 bp, Homo sapien
cctgtggaagtgttactgtatttct

SEQ ID NO: 3352149 - DNA, 25 bp, Homo sapien
actgtgcttgcactgagtcattaat

SEQ ID NO: 3352150 - DNA, 25 bp, Homo sapien
tttttgatgtaaatccaaactgtgc

SEQ ID NO: 3352151 - DNA, 25 bp, Homo sapien
atgactgcatgtaagtcagcactga

SEQ ID NO: 3352152 - DNA, 25 bp, Homo sapien
gactgcatgtaagtcagcactgacc

SEQ ID NO: 3352153 - DNA, 25 bp, Homo sapien
ctgggccttattcacctcgtcatct

SEQ ID NO: 3352154 - DNA, 25 bp, Homo sapien
cgtgtactaaattcttcctggttat

SEQ ID NO: 3352155 - DNA, 25 bp, Homo sapien
cctgtttagatcttatctcctgggc

SEQ ID NO: 3352156 - DNA, 25 bp, Homo sapien
tcacaaaggatttcgtgtactaaat

SEQ ID NO: 3352157 - DNA, 25 bp, Homo sapien
accccacaaatgtctgctgaggcag

SEQ ID NO: 3352158 - DNA, 25 bp, Homo sapien
tgagacaccccacaaatgtctgctg

SEQ ID NO: 3352159 - DNA, 25 bp, Homo sapien
gacaccccacaaatgtctgctgagg

SEQ ID NO: 3352160 - DNA, 25 bp, Homo sapien
cgtgagacaccccacaaatgtctgc

SEQ ID NO: 3352161 - DNA, 25 bp, Homo sapien
agttggttactctaaatcttatgga

SEQ ID NO: 3352162 - DNA, 25 bp, Homo sapien
aaaaccctgtggcatttctagttgg

SEQ ID NO: 3352163 - DNA, 25 bp, Homo sapien
gttttagtttcaggcatatattagg

SEQ ID NO: 3352164 - DNA, 25 bp, Homo sapien
tcttatggactatgtattaattata

SEQ ID NO: 3352165 - DNA, 25 bp, Homo sapien
gactgggaatgcctatcagcatctg

SEQ ID NO: 3352166 - DNA, 25 bp, Homo sapien
caggctagtgaataaggatgactta

SEQ ID NO: 3352167 - DNA, 25 bp, Homo sapien
tcagcatctgcagtaactgtgcgta

SEQ ID NO: 3352168 - DNA, 25 bp, Homo sapien
ggatgacttataaatccttcagact

SEQ ID NO: 3352169 - DNA, 25 bp, Homo sapien
tcagatctgagtgttgttccccagg

SEQ ID NO: 3352170 - DNA, 25 bp, Homo sapien
tgggtacatagagcccagtgttgtc

SEQ ID NO: 3352171 - DNA, 25 bp, Homo sapien
tgtcctgtgacatcatggtcttgtg

SEQ ID NO: 3352172 - DNA, 25 bp, Homo sapien
caatgattccggtgttgtgcccgta

SEQ ID NO: 3352173 - DNA, 25 bp, Homo sapien
ggcagactgcacagaccgtcatcat

SEQ ID NO: 3352174 - DNA, 25 bp, Homo sapien
cacagaccgtcatcatcatggcgca

SEQ ID NO: 3352175 - DNA, 25 bp, Homo sapien
tcatggcgcatctcgaggtctgcag

SEQ ID NO: 3352176 - DNA, 25 bp, Homo sapien
gcatctcgaggtctgcagtccattc

SEQ ID NO: 3352177 - DNA, 25 bp, Homo sapien
gatgagaatcgcttcaacccggaag

SEQ ID NO: 3352178 - DNA, 25 bp, Homo sapien
gggatgagaatcgcttcaacccgga

SEQ ID NO: 3352179 - DNA, 25 bp, Homo sapien
gagctgatactgctccactgcactc

SEQ ID NO: 3352180 - DNA, 25 bp, Homo sapien
tgcagtgagctgatactgctccact

SEQ ID NO: 3352181 - DNA, 25 bp, Homo sapien
acccaatttctcatacatctctcat

SEQ ID NO: 3352182 - DNA, 25 bp, Homo sapien
catctctcatccagttactaactag

SEQ ID NO: 3352183 - DNA, 25 bp, Homo sapien
tagacctgttcttaattaatttctg

SEQ ID NO: 3352184 - DNA, 25 bp, Homo sapien
tccagttactaactagacctgttct

SEQ ID NO: 3352185 - DNA, 25 bp, Homo sapien
taaagttccataaagacaacttcca

SEQ ID NO: 3352186 - DNA, 25 bp, Homo sapien
ccataaagacaacttccagtgattt

SEQ ID NO: 3352187 - DNA, 25 bp, Homo sapien
ttttcagattcataaagcctctatg

SEQ ID NO: 3352188 - DNA, 25 bp, Homo sapien
tgtggctggcgaagggttgcttctt

SEQ ID NO: 3352189 - DNA, 25 bp, Homo sapien
tctgactctccagttgtggaaaaca

SEQ ID NO: 3352190 - DNA, 25 bp, Homo sapien
cactatctgactctccagttgtgga

SEQ ID NO: 3352191 - DNA, 25 bp, Homo sapien
ccatgacactatctgactctccagt

SEQ ID NO: 3352192 - DNA, 25 bp, Homo sapien
aacccaggtcgtccatgtctggggc

SEQ ID NO: 3352193 - DNA, 25 bp, Homo sapien
ggtgataacaactacccaggacagg

SEQ ID NO: 3352194 - DNA, 25 bp, Homo sapien
cagactgtggctatgactatgtgga

SEQ ID NO: 3352195 - DNA, 25 bp, Homo sapien
gggctctcgacttgaattatccttc

SEQ ID NO: 3352196 - DNA, 25 bp, Homo sapien
gaatggctattagtatcagaacggg

SEQ ID NO: 3352197 - DNA, 25 bp, Homo sapien
ctcaaattaacacagatggactcca

SEQ ID NO: 3352198 - DNA, 25 bp, Homo sapien
tcaaattaacacagatggactccat

SEQ ID NO: 3352199 - DNA, 25 bp, Homo sapien
cagctcccattgaccattcgcctcc

SEQ ID NO: 3352200 - DNA, 25 bp, Homo sapien
ttgaccattcgcctcccagaacaga

SEQ ID NO: 3352201 - DNA, 25 bp, Homo sapien
attgaccattcgcctcccagaacag

SEQ ID NO: 3352202 - DNA, 25 bp, Homo sapien
ctcccattgaccattcgcctcccag

SEQ ID NO: 3352203 - DNA, 25 bp, Homo sapien
ctgacttaacagtttctattgctgc

SEQ ID NO: 3352204 - DNA, 25 bp, Homo sapien
gctatgttagagtggtcattttctc

SEQ ID NO: 3352205 - DNA, 25 bp, Homo sapien
tctgctgattgcctgacttaacagt

SEQ ID NO: 3352206 - DNA, 25 bp, Homo sapien
tgaatgaccttgagagctatgttag

SEQ ID NO: 3352207 - DNA, 25 bp, Homo sapien
tcatgccgcttggcaggtaggggag

SEQ ID NO: 3352208 - DNA, 25 bp, Homo sapien
atgccgcttggcaggtaggggaggg

SEQ ID NO: 3352209 - DNA, 25 bp, Homo sapien
catgccgcttggcaggtaggggagg

SEQ ID NO: 3352210 - DNA, 25 bp, Homo sapien
ctggtgttccttgctgagtgaacat

SEQ ID NO: 3352211 - DNA, 25 bp, Homo sapien
ctgagttgctggtgttccttgctga

SEQ ID NO: 3352212 - DNA, 25 bp, Homo sapien
tgctggtgttccttgctgagtgaac

SEQ ID NO: 3352213 - DNA, 25 bp, Homo sapien
gttgctggtgttccttgctgagtga

SEQ ID NO: 3352214 - DNA, 25 bp, Homo sapien
tcaagaatgaatttccgtttctttc

SEQ ID NO: 3352215 - DNA, 25 bp, Homo sapien
caagaatgaatttccgtttctttct

SEQ ID NO: 3352216 - DNA, 25 bp, Homo sapien
agtggagggctttccttgtcaactt

SEQ ID NO: 3352217 - DNA, 25 bp, Homo sapien
tcatctgcagtacctttagccatgt

SEQ ID NO: 3352218 - DNA, 25 bp, Homo sapien
catctgcagtacctttagccatgtg

SEQ ID NO: 3352219 - DNA, 25 bp, Homo sapien
taagatgggatcgtgtgaccaggtc

SEQ ID NO: 3352220 - DNA, 25 bp, Homo sapien
taccctttcctctcttgtggcttga

SEQ ID NO: 3352221 - DNA, 25 bp, Homo sapien
tgaccaggtccttgtcggttaagag

SEQ ID NO: 3352222 - DNA, 25 bp, Homo sapien
cagcctcccgttggttaagatggga

SEQ ID NO: 3352223 - DNA, 25 bp, Homo sapien
tagagatgcaatctggaccccagag

SEQ ID NO: 3352224 - DNA, 25 bp, Homo sapien
gagatgcaatctggaccccagagtg

SEQ ID NO: 3352225 - DNA, 25 bp, Homo sapien
gtagagatgcaatctggaccccaga

SEQ ID NO: 3352226 - DNA, 25 bp, Homo sapien
agatgcaatctggaccccagagtga

SEQ ID NO: 3352227 - DNA, 25 bp, Homo sapien
tgcagcagggtgtcttttttaatct

SEQ ID NO: 3352228 - DNA, 25 bp, Homo sapien
ccttctgaatgcagcagggtgtctt

SEQ ID NO: 3352229 - DNA, 25 bp, Homo sapien
taatctgttgctgtgccttacattt

SEQ ID NO: 3352230 - DNA, 25 bp, Homo sapien
ggtacagttgctccaatacatgctg

SEQ ID NO: 3352231 - DNA, 25 bp, Homo sapien
aagtgaaatagtaggagtggaagag

SEQ ID NO: 3352232 - DNA, 25 bp, Homo sapien
agtgaaatagtaggagtggaagagg

SEQ ID NO: 3352233 - DNA, 25 bp, Homo sapien
ccagttggttttggctgaataataa

SEQ ID NO: 3352234 - DNA, 25 bp, Homo sapien
taataatataaaacatgatctgcat

SEQ ID NO: 3352235 - DNA, 25 bp, Homo sapien
aaggattccagttggttttggctga

SEQ ID NO: 3352236 - DNA, 25 bp, Homo sapien
cttgcaaggattccagttggttttg

SEQ ID NO: 3352237 - DNA, 25 bp, Homo sapien
tgtcatttgataatagtcgctttgg

SEQ ID NO: 3352238 - DNA, 25 bp, Homo sapien
gctgtactgtcatttgataatagtc

SEQ ID NO: 3352239 - DNA, 25 bp, Homo sapien
cacatatgtcaagctgtactgtcat

SEQ ID NO: 3352240 - DNA, 25 bp, Homo sapien
gataatagtcgctttggagtttcat

SEQ ID NO: 3352241 - DNA, 25 bp, Homo sapien
tattgatacttgctgagatttcctt

SEQ ID NO: 3352242 - DNA, 25 bp, Homo sapien
caaactctgacctttaaaactgtat

SEQ ID NO: 3352243 - DNA, 25 bp, Homo sapien
ttattgatacttgctgagatttcct

SEQ ID NO: 3352244 - DNA, 25 bp, Homo sapien
tgcccggccaaactctgacctttaa

SEQ ID NO: 3352245 - DNA, 25 bp, Homo sapien
gttcgctgttgtcctctgttgccat

SEQ ID NO: 3352246 - DNA, 25 bp, Homo sapien
tgctgttcgctgttgtcctctgttg

SEQ ID NO: 3352247 - DNA, 25 bp, Homo sapien
ctgttcgctgttgtcctctgttgcc

SEQ ID NO: 3352248 - DNA, 25 bp, Homo sapien
tgctgctgttcgctgttgtcctctg

SEQ ID NO: 3352249 - DNA, 25 bp, Homo sapien
tgtttctatgtctttggaagggcat

SEQ ID NO: 3352250 - DNA, 25 bp, Homo sapien
gcatgatgttgttaaattggaagca

SEQ ID NO: 3352251 - DNA, 25 bp, Homo sapien
tctttggaagggcatgatgttgtta

SEQ ID NO: 3352252 - DNA, 25 bp, Homo sapien
tggttgtaactacccactgtttcta

SEQ ID NO: 3352253 - DNA, 25 bp, Homo sapien
ttccttagactcaacagcataaagc

SEQ ID NO: 3352254 - DNA, 25 bp, Homo sapien
ttctctttggcttatgggttcctta

SEQ ID NO: 3352255 - DNA, 25 bp, Homo sapien
tgggttccttagactcaacagcata

SEQ ID NO: 3352256 - DNA, 25 bp, Homo sapien
ttatgggttccttagactcaacagc

SEQ ID NO: 3352257 - DNA, 25 bp, Homo sapien
agctgctgaagggcatcaggatctg

SEQ ID NO: 3352258 - DNA, 25 bp, Homo sapien
gcatcaggatctgtgattgctccgc

SEQ ID NO: 3352259 - DNA, 25 bp, Homo sapien
tgattgtactgagctgctgaagggc

SEQ ID NO: 3352260 - DNA, 25 bp, Homo sapien
gattgctccgcatgccaaataaagg

SEQ ID NO: 3352261 - DNA, 25 bp, Homo sapien
ctttcccctgtgcatccgctaagtc

SEQ ID NO: 3352262 - DNA, 25 bp, Homo sapien
ctcctttcccctgtgcatccgctaa

SEQ ID NO: 3352263 - DNA, 25 bp, Homo sapien
agtgcccaacctgtttggtctcctt

SEQ ID NO: 3352264 - DNA, 25 bp, Homo sapien
tgcccaacctgtttggtctcctttc

SEQ ID NO: 3352265 - DNA, 25 bp, Homo sapien
gttcacatgtgctccagctagtttc

SEQ ID NO: 3352266 - DNA, 25 bp, Homo sapien
tctgttcacatgtgctccagctagt

SEQ ID NO: 3352267 - DNA, 25 bp, Homo sapien
tccagctagtttcccatcatccttc

SEQ ID NO: 3352268 - DNA, 25 bp, Homo sapien
atctgttcacatgtgctccagctag

SEQ ID NO: 3352269 - DNA, 25 bp, Homo sapien
cagcagtaacctctgcagactgaag

SEQ ID NO: 3352270 - DNA, 25 bp, Homo sapien
acagtgggcgcaggccagtgtgtgt

SEQ ID NO: 3352271 - DNA, 25 bp, Homo sapien
taacctctgcagactgaagtgtccc

SEQ ID NO: 3352272 - DNA, 25 bp, Homo sapien
gccagtgtgtgtgcgcaccgtgcgc

SEQ ID NO: 3352273 - DNA, 25 bp, Homo sapien
tataaatggactaaattctgcaatt

SEQ ID NO: 3352274 - DNA, 25 bp, Homo sapien
taaatataaatggactaaattctgc

SEQ ID NO: 3352275 - DNA, 25 bp, Homo sapien
aatataaatggactaaattctgcaa

SEQ ID NO: 3352276 - DNA, 25 bp, Homo sapien
ttaaatataaatggactaaattctg

SEQ ID NO: 3352277 - DNA, 25 bp, Homo sapien
gctaggcaacgtccaacttggtttg

SEQ ID NO: 3352278 - DNA, 25 bp, Homo sapien
acgtccaacttggtttgcatggcca

SEQ ID NO: 3352279 - DNA, 25 bp, Homo sapien
taaggctaggcaacgtccaacttgg

SEQ ID NO: 3352280 - DNA, 25 bp, Homo sapien
cttagtaaggctaggcaacgtccaa

SEQ ID NO: 3352281 - DNA, 25 bp, Homo sapien
gtctctttcatgctctacagacgag

SEQ ID NO: 3352282 - DNA, 25 bp, Homo sapien
gccgtaaattgcactattgtctctt

SEQ ID NO: 3352283 - DNA, 25 bp, Homo sapien
tctctttcatgctctacagacgagt

SEQ ID NO: 3352284 - DNA, 25 bp, Homo sapien
ctttccagccgtaaattgcactatt

SEQ ID NO: 3352285 - DNA, 25 bp, Homo sapien
tcaatttgctgtgattccgaatgtc

SEQ ID NO: 3352286 - DNA, 25 bp, Homo sapien
tgtgattccgaatgtcttgtagttt

SEQ ID NO: 3352287 - DNA, 25 bp, Homo sapien
tttgctgtgattccgaatgtcttgt

SEQ ID NO: 3352288 - DNA, 25 bp, Homo sapien
tcttgtagtttttgagttgcatgtg

SEQ ID NO: 3352289 - DNA, 25 bp, Homo sapien
caaggactcgattgagaaggcttca

SEQ ID NO: 3352290 - DNA, 25 bp, Homo sapien
taattgctttcttgggagtctcaga

SEQ ID NO: 3352291 - DNA, 25 bp, Homo sapien
tattcaagattccaagagcgctaat

SEQ ID NO: 3352292 - DNA, 25 bp, Homo sapien
gaaggcttcatgctactatgtgtac

SEQ ID NO: 3352293 - DNA, 25 bp, Homo sapien
tggaaataattaatcaattttgctt

SEQ ID NO: 3352294 - DNA, 25 bp, Homo sapien
tatactttattacgtaaagtcaaca

SEQ ID NO: 3352295 - DNA, 25 bp, Homo sapien
atactttattacgtaaagtcaacat

SEQ ID NO: 3352296 - DNA, 25 bp, Homo sapien
tatcctgactcaactaggtctagca

SEQ ID NO: 3352297 - DNA, 25 bp, Homo sapien
taacatgtacgatcccaagcactag

SEQ ID NO: 3352298 - DNA, 25 bp, Homo sapien
tagcaagatgctactttggaaatgc

SEQ ID NO: 3352299 - DNA, 25 bp, Homo sapien
tgcaaggcaccatacaataagttct

SEQ ID NO: 3352300 - DNA, 25 bp, Homo sapien
gcaaaatctccggagatctcaaaat

SEQ ID NO: 3352301 - DNA, 25 bp, Homo sapien
cagtccattcatgaaaatcgccact

SEQ ID NO: 3352302 - DNA, 25 bp, Homo sapien
aaatcgccactagcaaaatctccgg

SEQ ID NO: 3352303 - DNA, 25 bp, Homo sapien
tccattcatgaaaatcgccactagc

SEQ ID NO: 3352304 - DNA, 25 bp, Homo sapien
tcatctgaagacacgataaatagag

SEQ ID NO: 3352305 - DNA, 25 bp, Homo sapien
tctgaagacacgataaatagagttt

SEQ ID NO: 3352306 - DNA, 25 bp, Homo sapien
tagagtttattgacttgcagtagga

SEQ ID NO: 3352307 - DNA, 25 bp, Homo sapien
gatgaatgagaaaggtctgctttag

SEQ ID NO: 3352308 - DNA, 25 bp, Homo sapien
tccaccctagatattctacagtctt

SEQ ID NO: 3352309 - DNA, 25 bp, Homo sapien
aattctgtgcttagaaaattatgaa

SEQ ID NO: 3352310 - DNA, 25 bp, Homo sapien
gtctttgcatagagtaagtcctcat

SEQ ID NO: 3352311 - DNA, 25 bp, Homo sapien
actccctccaccctagatattctac

SEQ ID NO: 3352312 - DNA, 25 bp, Homo sapien
tcatcacacagggggatatactgtc

SEQ ID NO: 3352313 - DNA, 25 bp, Homo sapien
tgacattgtgttggcttgtagtaac

SEQ ID NO: 3352314 - DNA, 25 bp, Homo sapien
aatctgcaacaccatttattctgga

SEQ ID NO: 3352315 - DNA, 25 bp, Homo sapien
ccatgacattgtgttggcttgtagt

SEQ ID NO: 3352316 - DNA, 25 bp, Homo sapien
ccgcttctgaatattgctgagctca

SEQ ID NO: 3352317 - DNA, 25 bp, Homo sapien
ttgctgagctcagtctggcaaggtg

SEQ ID NO: 3352318 - DNA, 25 bp, Homo sapien
taggagcttctttaccccttgccgc

SEQ ID NO: 3352319 - DNA, 25 bp, Homo sapien
gaatattgctgagctcagtctggca

SEQ ID NO: 3352320 - DNA, 25 bp, Homo sapien
gtaaaatttgacatgcaggtcaact

SEQ ID NO: 3352321 - DNA, 25 bp, Homo sapien
tccaccgtatagtgataaaaaatcc

SEQ ID NO: 3352322 - DNA, 25 bp, Homo sapien
tacattgtgggcaaagcagatagca

SEQ ID NO: 3352323 - DNA, 25 bp, Homo sapien
tcaactatttgcgtctgtaagggtc

SEQ ID NO: 3352324 - DNA, 25 bp, Homo sapien
gaattgaagaatgccttggtacact

SEQ ID NO: 3352325 - DNA, 25 bp, Homo sapien
tgttaaacatccagccaagtgagtc

SEQ ID NO: 3352326 - DNA, 25 bp, Homo sapien
tgagctctgactggtccaatagcag

SEQ ID NO: 3352327 - DNA, 25 bp, Homo sapien
caaattggcaagatgctggtatcga

SEQ ID NO: 3352328 - DNA, 25 bp, Homo sapien
taaatataaatggactaaattctgc

SEQ ID NO: 3352329 - DNA, 25 bp, Homo sapien
tataaatggactaaattctgcaatt

SEQ ID NO: 3352330 - DNA, 25 bp, Homo sapien
aatataaatggactaaattctgcaa

SEQ ID NO: 3352331 - DNA, 25 bp, Homo sapien
ttaaatataaatggactaaattctg

SEQ ID NO: 3352332 - DNA, 25 bp, Homo sapien
cacaatttgaagtgtaagcaccctc

SEQ ID NO: 3352333 - DNA, 25 bp, Homo sapien
cacagtctgcttgtctgggaacaca

SEQ ID NO: 3352334 - DNA, 25 bp, Homo sapien
gggaacacatataaagctgtctgag

SEQ ID NO: 3352335 - DNA, 25 bp, Homo sapien
cagctgcctctgacgacttttagat

SEQ ID NO: 3352336 - DNA, 25 bp, Homo sapien
tctctcaggcctcagcaatgttttt

SEQ ID NO: 3352337 - DNA, 25 bp, Homo sapien
cagtcccgcaatctgtttgccactt

SEQ ID NO: 3352338 - DNA, 25 bp, Homo sapien
gaaccagtcccgcaatctgtttgcc

SEQ ID NO: 3352339 - DNA, 25 bp, Homo sapien
gccttgaaccagtcccgcaatctgt

SEQ ID NO: 3352340 - DNA, 25 bp, Homo sapien
caagtctttggcaaggcctcaataa

SEQ ID NO: 3352341 - DNA, 25 bp, Homo sapien
tcatgcgagatgtatttcaagaccc

SEQ ID NO: 3352342 - DNA, 25 bp, Homo sapien
tagtgtctcaaatacttcacatggc

SEQ ID NO: 3352343 - DNA, 25 bp, Homo sapien
tatttacaacactaactcaaggaag

SEQ ID NO: 3352344 - DNA, 25 bp, Homo sapien
tttttgattaaactcgtttctgcca

SEQ ID NO: 3352345 - DNA, 25 bp, Homo sapien
gattaaactcgtttctgccagttgc

SEQ ID NO: 3352346 - DNA, 25 bp, Homo sapien
attaaactcgtttctgccagttgct

SEQ ID NO: 3352347 - DNA, 25 bp, Homo sapien
tttgattaaactcgtttctgccagt

SEQ ID NO: 3352348 - DNA, 25 bp, Homo sapien
gtagtctcacagatgcctaaggatc

SEQ ID NO: 3352349 - DNA, 25 bp, Homo sapien
tttctgtcaaagactcaaatgacat

SEQ ID NO: 3352350 - DNA, 25 bp, Homo sapien
tatgctactgagtcaatccattgag

SEQ ID NO: 3352351 - DNA, 25 bp, Homo sapien
actctgtgttgcttagattgtataa

SEQ ID NO: 3352352 - DNA, 25 bp, Homo sapien
ccaaagcttcatgtctggcaatgac

SEQ ID NO: 3352353 - DNA, 25 bp, Homo sapien
cgatttgcactgtatcctccttgaa

SEQ ID NO: 3352354 - DNA, 25 bp, Homo sapien
caatgaccgatttgcactgtatcct

SEQ ID NO: 3352355 - DNA, 25 bp, Homo sapien
catgtctggcaatgaccgatttgca

SEQ ID NO: 3352356 - DNA, 25 bp, Homo sapien
gaaggacatgggcaatgtccttcac

SEQ ID NO: 3352357 - DNA, 25 bp, Homo sapien
tctgcttgtactggtgggcttatct

SEQ ID NO: 3352358 - DNA, 25 bp, Homo sapien
tgggcttatctgaaggacatgggca

SEQ ID NO: 3352359 - DNA, 25 bp, Homo sapien
tatctgaaggacatgggcaatgtcc

SEQ ID NO: 3352360 - DNA, 25 bp, Homo sapien
tgcaagggtaacactagagatgtga

SEQ ID NO: 3352361 - DNA, 25 bp, Homo sapien
cactagagatgtgagcataggtgct

SEQ ID NO: 3352362 - DNA, 25 bp, Homo sapien
tgctttcttaattcagtcagaggga

SEQ ID NO: 3352363 - DNA, 25 bp, Homo sapien
gagaggcaagccctttgcaagggta

SEQ ID NO: 3352364 - DNA, 25 bp, Homo sapien
caatggtggcatagcgaagaggaag

SEQ ID NO: 3352365 - DNA, 25 bp, Homo sapien
agaggaaggaactgttaatcagagc

SEQ ID NO: 3352366 - DNA, 25 bp, Homo sapien
gaaaatgtgtacatctgacaccagg

SEQ ID NO: 3352367 - DNA, 25 bp, Homo sapien
caagaaaatgtgtacatctgacacc

SEQ ID NO: 3352368 - DNA, 25 bp, Homo sapien
taggtatgaccatctgaaccacaaa

SEQ ID NO: 3352369 - DNA, 25 bp, Homo sapien
tgcctatggtctactcctgcttctt

SEQ ID NO: 3352370 - DNA, 25 bp, Homo sapien
gggcactgcttgcaggtggataata

SEQ ID NO: 3352371 - DNA, 25 bp, Homo sapien
tggataatatgggacccctccactg

SEQ ID NO: 3352372 - DNA, 25 bp, Homo sapien
gtcagcctcctatccaaatactaac

SEQ ID NO: 3352373 - DNA, 25 bp, Homo sapien
agtattctgtcagcctcctatccaa

SEQ ID NO: 3352374 - DNA, 25 bp, Homo sapien
tctgtcagcctcctatccaaatact

SEQ ID NO: 3352375 - DNA, 25 bp, Homo sapien
tattctgtcagcctcctatccaaat

SEQ ID NO: 3352376 - DNA, 25 bp, Homo sapien
ctttatggcgactacatttcatctt

SEQ ID NO: 3352377 - DNA, 25 bp, Homo sapien
gagaatcttgagcaatgcatacttt

SEQ ID NO: 3352378 - DNA, 25 bp, Homo sapien
cctccggtgactaatgcagactgca

SEQ ID NO: 3352379 - DNA, 25 bp, Homo sapien
tcatctttaagcatggatccttagc

SEQ ID NO: 3352380 - DNA, 25 bp, Homo sapien
aattaactgcaatctaatgaaccag

SEQ ID NO: 3352381 - DNA, 25 bp, Homo sapien
tgaaccagtagatgttaggctgccc

SEQ ID NO: 3352382 - DNA, 25 bp, Homo sapien
agaaggatgctgatctaagccacag

SEQ ID NO: 3352383 - DNA, 25 bp, Homo sapien
catccccaaaaacgtggaggagcag

SEQ ID NO: 3352384 - DNA, 25 bp, Homo sapien
catggtagagaacaagtagggacgc

SEQ ID NO: 3352385 - DNA, 25 bp, Homo sapien
tagggacgctccaagttcctttgga

SEQ ID NO: 3352386 - DNA, 25 bp, Homo sapien
gaccacaaacaaggcagatttaaca

SEQ ID NO: 3352387 - DNA, 25 bp, Homo sapien
gggtacctcagttcaagcagattct

SEQ ID NO: 3352388 - DNA, 25 bp, Homo sapien
ctgatcgaagggttttcctggactc

SEQ ID NO: 3352389 - DNA, 25 bp, Homo sapien
gactccaagtgcggaaataatcatc

SEQ ID NO: 3352390 - DNA, 25 bp, Homo sapien
ctggactccaagtgcggaaataatc

SEQ ID NO: 3352391 - DNA, 25 bp, Homo sapien
cctgatcgaagggttttcctggact

SEQ ID NO: 3352392 - DNA, 25 bp, Homo sapien
tagcacatagtgtttgcaacactga

SEQ ID NO: 3352393 - DNA, 25 bp, Homo sapien
ggtggaaaccgtgtagaactgacat

SEQ ID NO: 3352394 - DNA, 25 bp, Homo sapien
aagcagcatgtttcacatagcacat

SEQ ID NO: 3352395 - DNA, 25 bp, Homo sapien
cactgaagtcagatgatgtcaaagc

SEQ ID NO: 3352396 - DNA, 25 bp, Homo sapien
aatcagttgggaataggagatcttg

SEQ ID NO: 3352397 - DNA, 25 bp, Homo sapien
gatcttgatgcccaaaagctccata

SEQ ID NO: 3352398 - DNA, 25 bp, Homo sapien
tgggaataggagatcttgatgccca

SEQ ID NO: 3352399 - DNA, 25 bp, Homo sapien
gagtttgatacagaatcagttggga

SEQ ID NO: 3352400 - DNA, 25 bp, Homo sapien
agtaacagtgttacattcatagttc

SEQ ID NO: 3352401 - DNA, 25 bp, Homo sapien
taacagtgttacattcatagttcat

SEQ ID NO: 3352402 - DNA, 25 bp, Homo sapien
ctgtagtaacagtgttacattcata

SEQ ID NO: 3352403 - DNA, 25 bp, Homo sapien
gtagtaacagtgttacattcatagt

SEQ ID NO: 3352404 - DNA, 25 bp, Homo sapien
gaagagacaatttgccatcagtatt

SEQ ID NO: 3352405 - DNA, 25 bp, Homo sapien
tcagtattgtctgacttatgttctg

SEQ ID NO: 3352406 - DNA, 25 bp, Homo sapien
caggtgaagagacaatttgccatca

SEQ ID NO: 3352407 - DNA, 25 bp, Homo sapien
gagacaatttgccatcagtattgtc

SEQ ID NO: 3352408 - DNA, 25 bp, Homo sapien
gcaggaacagcaatttaacatctac

SEQ ID NO: 3352409 - DNA, 25 bp, Homo sapien
gggcagaccaacatggctaaataga

SEQ ID NO: 3352410 - DNA, 25 bp, Homo sapien
ggagatcagattgaaacctcaggta

SEQ ID NO: 3352411 - DNA, 25 bp, Homo sapien
taaagcacaaagatcaggcctcagt

SEQ ID NO: 3352412 - DNA, 25 bp, Homo sapien
aaggaacaaccaaaggcaggataca

SEQ ID NO: 3352413 - DNA, 25 bp, Homo sapien
ttttcagcaaaaaactatcccagct

SEQ ID NO: 3352414 - DNA, 25 bp, Homo sapien
gaataagaatgggtttcagtcagtg

SEQ ID NO: 3352415 - DNA, 25 bp, Homo sapien
aacaccatctaattatcagaatagg

SEQ ID NO: 3352416 - DNA, 25 bp, Homo sapien
gaggcagttgaagacaatattgcat

SEQ ID NO: 3352417 - DNA, 25 bp, Homo sapien
ccatcatctggtgaagcatgacaca

SEQ ID NO: 3352418 - DNA, 25 bp, Homo sapien
gacaatattgcatctgagcccatca

SEQ ID NO: 3352419 - DNA, 25 bp, Homo sapien
gcccatcatctggtgaagcatgaca

SEQ ID NO: 3352420 - DNA, 25 bp, Homo sapien
cagccaatgagccagactctctgct

SEQ ID NO: 3352421 - DNA, 25 bp, Homo sapien
agccaatgagccagactctctgctg

SEQ ID NO: 3352422 - DNA, 25 bp, Homo sapien
gcttgtcagctacttcatggagagg

SEQ ID NO: 3352423 - DNA, 25 bp, Homo sapien
tggcttgtcagctacttcatggaga

SEQ ID NO: 3352424 - DNA, 25 bp, Homo sapien
cctctgctagatttggcttgtcagc

SEQ ID NO: 3352425 - DNA, 25 bp, Homo sapien
tagatttggcttgtcagctacttca

SEQ ID NO: 3352426 - DNA, 25 bp, Homo sapien
tgtgaacctggtgagacctgaactc

SEQ ID NO: 3352427 - DNA, 25 bp, Homo sapien
aaagttgagaggttagagccagcac

SEQ ID NO: 3352428 - DNA, 25 bp, Homo sapien
acatctgctgtgtttaccagtgcca

SEQ ID NO: 3352429 - DNA, 25 bp, Homo sapien
gtagcgatacatcgcaaaggcacat

SEQ ID NO: 3352430 - DNA, 25 bp, Homo sapien
cgccgcggcagctgcgagagactga

SEQ ID NO: 3352431 - DNA, 25 bp, Homo sapien
catccagaaaattaccgccgtccga

SEQ ID NO: 3352432 - DNA, 25 bp, Homo sapien
tccgacttccttgtcatactgagag

SEQ ID NO: 3352433 - DNA, 25 bp, Homo sapien
gaatttgttccactgtccgacttcc

SEQ ID NO: 3352434 - DNA, 25 bp, Homo sapien
acagtacggctgacaccttgagcat

SEQ ID NO: 3352435 - DNA, 25 bp, Homo sapien
acacacacagtacggctgacacctt

SEQ ID NO: 3352436 - DNA, 25 bp, Homo sapien
ggcacaaaaccgcttcctggcacat

SEQ ID NO: 3352437 - DNA, 25 bp, Homo sapien
agcagcccgagcgggcacaaaaccg

SEQ ID NO: 3352438 - DNA, 25 bp, Homo sapien
cgagcgggcacaaaaccgcttcctg

SEQ ID NO: 3352439 - DNA, 25 bp, Homo sapien
agcccgagcgggcacaaaaccgctt

SEQ ID NO: 3352440 - DNA, 25 bp, Homo sapien
tctcgagccgtccactcagctccct

SEQ ID NO: 3352441 - DNA, 25 bp, Homo sapien
gcacgcgccgccgtctcgagccgtc

SEQ ID NO: 3352442 - DNA, 25 bp, Homo sapien
gcactgtgctcgcagctcctgctgg

SEQ ID NO: 3352443 - DNA, 25 bp, Homo sapien
cactgtgctcgcagctcctgctgga

SEQ ID NO: 3352444 - DNA, 25 bp, Homo sapien
agctacagttggctccggataggac

SEQ ID NO: 3352445 - DNA, 25 bp, Homo sapien
ctcgctggatcccagctacagttgg

SEQ ID NO: 3352446 - DNA, 25 bp, Homo sapien
cgctggatcccagctacagttggct

SEQ ID NO: 3352447 - DNA, 25 bp, Homo sapien
ttggctccggataggacgcttggct

SEQ ID NO: 3352448 - DNA, 25 bp, Homo sapien
tctaactggagatctataagacata

SEQ ID NO: 3352449 - DNA, 25 bp, Homo sapien
taagacatattttggccctggttca

SEQ ID NO: 3352450 - DNA, 25 bp, Homo sapien
gaaataagcctctaactggagatct

SEQ ID NO: 3352451 - DNA, 25 bp, Homo sapien
acttctacgcacagaaataagcctc

SEQ ID NO: 3352452 - DNA, 25 bp, Homo sapien
gccactaggaagagaagtttactat

SEQ ID NO: 3352453 - DNA, 25 bp, Homo sapien
aagccactaggaagagaagtttact

SEQ ID NO: 3352454 - DNA, 25 bp, Homo sapien
ttaagccactaggaagagaagttta

SEQ ID NO: 3352455 - DNA, 25 bp, Homo sapien
taagccactaggaagagaagtttac

SEQ ID NO: 3352456 - DNA, 25 bp, Homo sapien
ttattcaccaaaatgttcattgaga

SEQ ID NO: 3352457 - DNA, 25 bp, Homo sapien
tattcaccaaaatgttcattgagat

SEQ ID NO: 3352458 - DNA, 25 bp, Homo sapien
ttatctatgcaaacagctgctacag

SEQ ID NO: 3352459 - DNA, 25 bp, Homo sapien
gttatctatgcaaacagctgctaca

SEQ ID NO: 3352460 - DNA, 25 bp, Homo sapien
tgttatctatgcaaacagctgctac

SEQ ID NO: 3352461 - DNA, 25 bp, Homo sapien
tgtataacgagaatagtagcattca

SEQ ID NO: 3352462 - DNA, 25 bp, Homo sapien
tgcactccaactgtataacgagaat

SEQ ID NO: 3352463 - DNA, 25 bp, Homo sapien
taacagcatggcatttagcgaattc

SEQ ID NO: 3352464 - DNA, 25 bp, Homo sapien
gcatttagcgaattctgcactccaa

SEQ ID NO: 3352465 - DNA, 25 bp, Homo sapien
cagttagaatgcaggtctgtgaaca

SEQ ID NO: 3352466 - DNA, 25 bp, Homo sapien
cacatattctgagctcacccaacag

SEQ ID NO: 3352467 - DNA, 25 bp, Homo sapien
ctttaaccaatgacacatattctga

SEQ ID NO: 3352468 - DNA, 25 bp, Homo sapien
tgagctcacccaacagttagaatgc

SEQ ID NO: 3352469 - DNA, 25 bp, Homo sapien
ttttgtcgtttggtacacaaacaca

SEQ ID NO: 3352470 - DNA, 25 bp, Homo sapien
tttgtcgtttggtacacaaacacat

SEQ ID NO: 3352471 - DNA, 25 bp, Homo sapien
ttgtcgtttggtacacaaacacata

SEQ ID NO: 3352472 - DNA, 25 bp, Homo sapien
cgcattccctcttgtgagtgctcaa

SEQ ID NO: 3352473 - DNA, 25 bp, Homo sapien
gagcctggggatgctctctaagaaa

SEQ ID NO: 3352474 - DNA, 25 bp, Homo sapien
tctaagaaaggctgtcgcattccct

SEQ ID NO: 3352475 - DNA, 25 bp, Homo sapien
ggctgtcgcattccctcttgtgagt

SEQ ID NO: 3352476 - DNA, 25 bp, Homo sapien
cagagaaagcatacacacgtagtca

SEQ ID NO: 3352477 - DNA, 25 bp, Homo sapien
atgctggcaatgtcatttgaaggtt

SEQ ID NO: 3352478 - DNA, 25 bp, Homo sapien
caagatcaccaatgctggcaatgtc

SEQ ID NO: 3352479 - DNA, 25 bp, Homo sapien
cttggaggtatgagcgccaatgtgg

SEQ ID NO: 3352480 - DNA, 25 bp, Homo sapien
acttttttctcaacatttacattca

SEQ ID NO: 3352481 - DNA, 25 bp, Homo sapien
cacttgctgttttatcttgatttac

SEQ ID NO: 3352482 - DNA, 25 bp, Homo sapien
aaagaatgagcatttttcccacttg

SEQ ID NO: 3352483 - DNA, 25 bp, Homo sapien
cagtgcttaaagaatgagcattttt

SEQ ID NO: 3352484 - DNA, 25 bp, Homo sapien
tactttgttgctcatgttgcagtgc

SEQ ID NO: 3352485 - DNA, 25 bp, Homo sapien
ggacattatattgatgccaaggaca

SEQ ID NO: 3352486 - DNA, 25 bp, Homo sapien
cagtgtgcgaattttgacctagtct

SEQ ID NO: 3352487 - DNA, 25 bp, Homo sapien
ggctcaatcacactactgatcagtg

SEQ ID NO: 3352488 - DNA, 25 bp, Homo sapien
agaaaaatataacttcatcattcac

SEQ ID NO: 3352489 - DNA, 25 bp, Homo sapien
atcatctatttctaggaacaagaaa

SEQ ID NO: 3352490 - DNA, 25 bp, Homo sapien
cttcatcattcacatgaacaggtcc

SEQ ID NO: 3352491 - DNA, 25 bp, Homo sapien
ttcatcattcacatgaacaggtcca

SEQ ID NO: 3352492 - DNA, 25 bp, Homo sapien
catgttgtaccagacacttcttgta

SEQ ID NO: 3352493 - DNA, 25 bp, Homo sapien
gcagtcatgttgtaccagacacttc

SEQ ID NO: 3352494 - DNA, 25 bp, Homo sapien
taatcacagcagtcatgttgtacca

SEQ ID NO: 3352495 - DNA, 25 bp, Homo sapien
cacagcagtcatgttgtaccagaca

SEQ ID NO: 3352496 - DNA, 25 bp, Homo sapien
cgtctgactcatgaggcatcccatt

SEQ ID NO: 3352497 - DNA, 25 bp, Homo sapien
ctgactcatgaggcatcccattcca

SEQ ID NO: 3352498 - DNA, 25 bp, Homo sapien
atgaggcatcccattccaagtaacc

SEQ ID NO: 3352499 - DNA, 25 bp, Homo sapien
actcatgaggcatcccattccaagt

SEQ ID NO: 3352500 - DNA, 25 bp, Homo sapien
agaactgtctctgtagtgactgaat

SEQ ID NO: 3352501 - DNA, 25 bp, Homo sapien
cttttgcagaactgtctctgtagtg

SEQ ID NO: 3352502 - DNA, 25 bp, Homo sapien
gtctctgtagtgactgaataaccac

SEQ ID NO: 3352503 - DNA, 25 bp, Homo sapien
attatcacttttgcagaactgtctc

SEQ ID NO: 3352504 - DNA, 25 bp, Homo sapien
ttctctggattctttataccactca

SEQ ID NO: 3352505 - DNA, 25 bp, Homo sapien
cagtgtgttcctctggttcctcttc

SEQ ID NO: 3352506 - DNA, 25 bp, Homo sapien
tttcagtgtgttcctctggttcctc

SEQ ID NO: 3352507 - DNA, 25 bp, Homo sapien
tgtgttcctctggttcctcttcctt

SEQ ID NO: 3352508 - DNA, 25 bp, Homo sapien
gatacgagggtaagtaatactggcc

SEQ ID NO: 3352509 - DNA, 25 bp, Homo sapien
ggttgtatgtatctaagaatatgtc

SEQ ID NO: 3352510 - DNA, 25 bp, Homo sapien
tggatttcttgagattctatcttga

SEQ ID NO: 3352511 - DNA, 25 bp, Homo sapien
cactaacgccatcaggtgtctgggt

SEQ ID NO: 3352512 - DNA, 25 bp, Homo sapien
actcattactgctggcctctgaaaa

SEQ ID NO: 3352513 - DNA, 25 bp, Homo sapien
ccagaacaaggttgagttctgagag

SEQ ID NO: 3352514 - DNA, 25 bp, Homo sapien
cattgatggcaatggtgtctgctcc

SEQ ID NO: 3352515 - DNA, 25 bp, Homo sapien
ctcagaaggaatgtgcctacggcac

SEQ ID NO: 3352516 - DNA, 25 bp, Homo sapien
ctggggtagatgcagtactacccat

SEQ ID NO: 3352517 - DNA, 25 bp, Homo sapien
ggctgccctcttggttgatggggta

SEQ ID NO: 3352518 - DNA, 25 bp, Homo sapien
ccctcttggttgatggggtaactgg

SEQ ID NO: 3352519 - DNA, 25 bp, Homo sapien
tgccctcttggttgatggggtaact

SEQ ID NO: 3352520 - DNA, 25 bp, Homo sapien
gctgccctcttggttgatggggtaa

SEQ ID NO: 3352521 - DNA, 25 bp, Homo sapien
ctaaataccccacacatgcacaatc

SEQ ID NO: 3352522 - DNA, 25 bp, Homo sapien
ataccccacacatgcacaatcaggt

SEQ ID NO: 3352523 - DNA, 25 bp, Homo sapien
aaataccccacacatgcacaatcag

SEQ ID NO: 3352524 - DNA, 25 bp, Homo sapien
accccacacatgcacaatcaggtct

SEQ ID NO: 3352525 - DNA, 25 bp, Homo sapien
gacatatgagccaagctacagtgat

SEQ ID NO: 3352526 - DNA, 25 bp, Homo sapien
aagaacagacatatgagccaagcta

SEQ ID NO: 3352527 - DNA, 25 bp, Homo sapien
acagacatatgagccaagctacagt

SEQ ID NO: 3352528 - DNA, 25 bp, Homo sapien
gaacagacatatgagccaagctaca

SEQ ID NO: 3352529 - DNA, 25 bp, Homo sapien
gatatactggtcctagtgtacatgc

SEQ ID NO: 3352530 - DNA, 25 bp, Homo sapien
atactggtcctagtgtacatgcatg

SEQ ID NO: 3352531 - DNA, 25 bp, Homo sapien
cccgatatactggtcctagtgtaca

SEQ ID NO: 3352532 - DNA, 25 bp, Homo sapien
tatactggtcctagtgtacatgcat

SEQ ID NO: 3352533 - DNA, 25 bp, Homo sapien
tcttataggccatagaacgatgact

SEQ ID NO: 3352534 - DNA, 25 bp, Homo sapien
atcacaatcttataggccatagaac

SEQ ID NO: 3352535 - DNA, 25 bp, Homo sapien
taggccatagaacgatgacttttct

SEQ ID NO: 3352536 - DNA, 25 bp, Homo sapien
cacaatcttataggccatagaacga

SEQ ID NO: 3352537 - DNA, 25 bp, Homo sapien
tgtttggcagaaccatatacgccca

SEQ ID NO: 3352538 - DNA, 25 bp, Homo sapien
gaacttcctagttgagtggagccct

SEQ ID NO: 3352539 - DNA, 25 bp, Homo sapien
tatgccacgatagagaatagtgcct

SEQ ID NO: 3352540 - DNA, 25 bp, Homo sapien
gaaaatcggcctcttggcagctggc

SEQ ID NO: 3352541 - DNA, 25 bp, Homo sapien
tggataaagggtgataggtaataat

SEQ ID NO: 3352542 - DNA, 25 bp, Homo sapien
ggataaagggtgataggtaataatg

SEQ ID NO: 3352543 - DNA, 25 bp, Homo sapien
ctggataaagggtgataggtaataa

SEQ ID NO: 3352544 - DNA, 25 bp, Homo sapien
aaatgtctgctagcaaggtaggtga

SEQ ID NO: 3352545 - DNA, 25 bp, Homo sapien
tctgctagcaaggtaggtgaaatta

SEQ ID NO: 3352546 - DNA, 25 bp, Homo sapien
caaggtaggtgaaattagggcctct

SEQ ID NO: 3352547 - DNA, 25 bp, Homo sapien
ttcaaaaatgtctgctagcaaggta

SEQ ID NO: 3352548 - DNA, 25 bp, Homo sapien
tctaataggaccagaacagatgctc

SEQ ID NO: 3352549 - DNA, 25 bp, Homo sapien
ttcaggctagtgacacacgagtgta

SEQ ID NO: 3352550 - DNA, 25 bp, Homo sapien
tcctgaaacagatgtagtagagtcc

SEQ ID NO: 3352551 - DNA, 25 bp, Homo sapien
tattgctactaggagagcagccact

SEQ ID NO: 3352552 - DNA, 25 bp, Homo sapien
ctctcgttattgcagctgcgagtca

SEQ ID NO: 3352553 - DNA, 25 bp, Homo sapien
tcaactataagtcgctcttcagttt

SEQ ID NO: 3352554 - DNA, 25 bp, Homo sapien
actataagtcgctcttcagtttcca

SEQ ID NO: 3352555 - DNA, 25 bp, Homo sapien
ttttcaactataagtcgctcttcag

SEQ ID NO: 3352556 - DNA, 25 bp, Homo sapien
gaattttcaactataagtcgctctt

SEQ ID NO: 3352557 - DNA, 25 bp, Homo sapien
gtatataatatagtagggtgagaga

SEQ ID NO: 3352558 - DNA, 25 bp, Homo sapien
tgagagaatttagcttcatgagttc

SEQ ID NO: 3352559 - DNA, 25 bp, Homo sapien
catgagttctatgaaatgtggcagg

SEQ ID NO: 3352560 - DNA, 25 bp, Homo sapien
tcctcaattttacaagtatataata

SEQ ID NO: 3352561 - DNA, 25 bp, Homo sapien
tcagagtcctattattctccccagt

SEQ ID NO: 3352562 - DNA, 25 bp, Homo sapien
tattgcaaatcgtctccagaatgtc

SEQ ID NO: 3352563 - DNA, 25 bp, Homo sapien
ccagaatgtctatgtctgtgaactt

SEQ ID NO: 3352564 - DNA, 25 bp, Homo sapien
ttttctctagtctcgtatttagctc

SEQ ID NO: 3352565 - DNA, 25 bp, Homo sapien
accttgctgtgccaaaatattgcaa

SEQ ID NO: 3352566 - DNA, 25 bp, Homo sapien
aatatagagatcagaatgaggtggg

SEQ ID NO: 3352567 - DNA, 25 bp, Homo sapien
tcagaatgaggtggggatgttaact

SEQ ID NO: 3352568 - DNA, 25 bp, Homo sapien
atattaccctaacataaatatagag

SEQ ID NO: 3352569 - DNA, 25 bp, Homo sapien
ataaatatagagatcagaatgaggt

SEQ ID NO: 3352570 - DNA, 25 bp, Homo sapien
tctcaattaacaataggtactcata

SEQ ID NO: 3352571 - DNA, 25 bp, Homo sapien
tcaattaacaataggtactcatatc

SEQ ID NO: 3352572 - DNA, 25 bp, Homo sapien
aattaacaataggtactcatatctg

SEQ ID NO: 3352573 - DNA, 25 bp, Homo sapien
ttaacaataggtactcatatctgtc

SEQ ID NO: 3352574 - DNA, 25 bp, Homo sapien
gctgagagctatgttcgatgctgtc

SEQ ID NO: 3352575 - DNA, 25 bp, Homo sapien
ccccacagctgagagctatgttcga

SEQ ID NO: 3352576 - DNA, 25 bp, Homo sapien
tgagagctatgttcgatgctgtcaa

SEQ ID NO: 3352577 - DNA, 25 bp, Homo sapien
acagctgagagctatgttcgatgct

SEQ ID NO: 3352578 - DNA, 25 bp, Homo sapien
tacaattatggattttctgtccaat

SEQ ID NO: 3352579 - DNA, 25 bp, Homo sapien
caaaacttcctgatgctagccccat

SEQ ID NO: 3352580 - DNA, 25 bp, Homo sapien
actttatgtcgactgaagtacacaa

SEQ ID NO: 3352581 - DNA, 25 bp, Homo sapien
cacactgaactgtgccttccagttt

SEQ ID NO: 3352582 - DNA, 25 bp, Homo sapien
tcacaaataacttttgcatcacagc

SEQ ID NO: 3352583 - DNA, 25 bp, Homo sapien
cttcctgggcagtgcgagctttcac

SEQ ID NO: 3352584 - DNA, 25 bp, Homo sapien
ctttcactggatccccaactcttga

SEQ ID NO: 3352585 - DNA, 25 bp, Homo sapien
caactcttgaagcataacaaagatc

SEQ ID NO: 3352586 - DNA, 25 bp, Homo sapien
ctttgctgtatagttgggtttttgg

SEQ ID NO: 3352587 - DNA, 25 bp, Homo sapien
gagatttctttgctgtatagttggg

SEQ ID NO: 3352588 - DNA, 25 bp, Homo sapien
gatttaattccttctgctcagattg

SEQ ID NO: 3352589 - DNA, 25 bp, Homo sapien
ctcagattggttgagatttctttgc

SEQ ID NO: 3352590 - DNA, 25 bp, Homo sapien
tgctttgcgtttggcacataaaatc

SEQ ID NO: 3352591 - DNA, 25 bp, Homo sapien
agaaggcaatgatctttaagtcatc

SEQ ID NO: 3352592 - DNA, 25 bp, Homo sapien
tctctccagcgctcctgcttgatga

SEQ ID NO: 3352593 - DNA, 25 bp, Homo sapien
cttgatgacctttgagaaggcaatg

SEQ ID NO: 3352594 - DNA, 25 bp, Homo sapien
tcttgatatactggccagttcctcc

SEQ ID NO: 3352595 - DNA, 25 bp, Homo sapien
ggcttttcttgatatactggccagt

SEQ ID NO: 3352596 - DNA, 25 bp, Homo sapien
agttgtcttgaatctcagttcccca

SEQ ID NO: 3352597 - DNA, 25 bp, Homo sapien
aggtgctggagttgtcttgaatctc

SEQ ID NO: 3352598 - DNA, 25 bp, Homo sapien
gccagtgccaaccaggttctgggtg

SEQ ID NO: 3352599 - DNA, 25 bp, Homo sapien
caaccaggttctgggtgagtgcttg

SEQ ID NO: 3352600 - DNA, 25 bp, Homo sapien
cttgcaatgattgtctggttgtgca

SEQ ID NO: 3352601 - DNA, 25 bp, Homo sapien
ggtgagtgcttgcaatgattgtctg

SEQ ID NO: 3352602 - DNA, 25 bp, Homo sapien
ggagatggacccttggcatgagtaa

SEQ ID NO: 3352603 - DNA, 25 bp, Homo sapien
ggagccacgaaagagtcaacattag

SEQ ID NO: 3352604 - DNA, 25 bp, Homo sapien
gagtaaaggagccacgaaagagtca

SEQ ID NO: 3352605 - DNA, 25 bp, Homo sapien
ggacccttggcatgagtaaaggagc

SEQ ID NO: 3352606 - DNA, 25 bp, Homo sapien
tcccgcttttttcagctcatttaat

SEQ ID NO: 3352607 - DNA, 25 bp, Homo sapien
tctcttcccgcttttttcagctcat

SEQ ID NO: 3352608 - DNA, 25 bp, Homo sapien
aaagctgcttccatttggtaatttt

SEQ ID NO: 3352609 - DNA, 25 bp, Homo sapien
ccgcttttttcagctcatttaatct

SEQ ID NO: 3352610 - DNA, 25 bp, Homo sapien
catggtggtggcagctaggttacaa

SEQ ID NO: 3352611 - DNA, 25 bp, Homo sapien
ggacagtatctgagacaagacctct

SEQ ID NO: 3352612 - DNA, 25 bp, Homo sapien
caaccacccggtagaaagggcactg

SEQ ID NO: 3352613 - DNA, 25 bp, Homo sapien
taatggagagactataccacatgcc

SEQ ID NO: 3352614 - DNA, 25 bp, Homo sapien
gtctttatggtgcatttccgaaaca

SEQ ID NO: 3352615 - DNA, 25 bp, Homo sapien
gcttgtatagaattgagttcctgaa

SEQ ID NO: 3352616 - DNA, 25 bp, Homo sapien
tatggtgcatttccgaaacaagtga

SEQ ID NO: 3352617 - DNA, 25 bp, Homo sapien
caagtgaaatgcttgtatagaattg

SEQ ID NO: 3352618 - DNA, 25 bp, Homo sapien
aatgaagtccttgtgtaaagcctta

SEQ ID NO: 3352619 - DNA, 25 bp, Homo sapien
ttcttatattctggactagtttctg

SEQ ID NO: 3352620 - DNA, 25 bp, Homo sapien
gaagtccttgtgtaaagccttataa

SEQ ID NO: 3352621 - DNA, 25 bp, Homo sapien
tataataggcagccttcttatattc

SEQ ID NO: 3352622 - DNA, 25 bp, Homo sapien
agtttagcatgtgaggaagattaag

SEQ ID NO: 3352623 - DNA, 25 bp, Homo sapien
gaagattaagttgtggttcttgctc

SEQ ID NO: 3352624 - DNA, 25 bp, Homo sapien
tgctccccggtacctgttagtttca

SEQ ID NO: 3352625 - DNA, 25 bp, Homo sapien
gacactgtgctaagtttagcatgtg

SEQ ID NO: 3352626 - DNA, 25 bp, Homo sapien
taaacatcgccaggaccttcacact

SEQ ID NO: 3352627 - DNA, 25 bp, Homo sapien
gagaagctgggcctataaacatcgc

SEQ ID NO: 3352628 - DNA, 25 bp, Homo sapien
tgcaatttggaggtgacgcgtgtcc

SEQ ID NO: 3352629 - DNA, 25 bp, Homo sapien
ttatcgcacagatattggcgttgca

SEQ ID NO: 3352630 - DNA, 25 bp, Homo sapien
ttggcaaaagcccttgactgacacc

SEQ ID NO: 3352631 - DNA, 25 bp, Homo sapien
cacttggcaaaagcccttgactgac

SEQ ID NO: 3352632 - DNA, 25 bp, Homo sapien
gcaaaagcccttgactgacacccag

SEQ ID NO: 3352633 - DNA, 25 bp, Homo sapien
aagcacttggcaaaagcccttgact

SEQ ID NO: 3352634 - DNA, 25 bp, Homo sapien
tctcattttgcagttgaaagttacc

SEQ ID NO: 3352635 - DNA, 25 bp, Homo sapien
tgcagttgaaagttaccattattgt

SEQ ID NO: 3352636 - DNA, 25 bp, Homo sapien
ttttgcagttgaaagttaccattat

SEQ ID NO: 3352637 - DNA, 25 bp, Homo sapien
cattttgcagttgaaagttaccatt

SEQ ID NO: 3352638 - DNA, 25 bp, Homo sapien
gatcccccttgttcatacagtagca

SEQ ID NO: 3352639 - DNA, 25 bp, Homo sapien
ttgtcatcagctgatcccccttgtt

SEQ ID NO: 3352640 - DNA, 25 bp, Homo sapien
tttcttgtaaaaattgttcgctgat

SEQ ID NO: 3352641 - DNA, 25 bp, Homo sapien
aattgttcgctgattttgtcctgtt

SEQ ID NO: 3352642 - DNA, 25 bp, Homo sapien
tttcctgttgatgcaatggatgaca

SEQ ID NO: 3352643 - DNA, 25 bp, Homo sapien
aacatgtgtaattgctaggtcagcc

SEQ ID NO: 3352644 - DNA, 25 bp, Homo sapien
gagatcctggacaaccgaagtcatt

SEQ ID NO: 3352645 - DNA, 25 bp, Homo sapien
atgctcagtgctattcagagtggac

SEQ ID NO: 3352646 - DNA, 25 bp, Homo sapien
tttagtaatcacccttctgactggg

SEQ ID NO: 3352647 - DNA, 25 bp, Homo sapien
gactcactctggttattagaccttt

SEQ ID NO: 3352648 - DNA, 25 bp, Homo sapien
tcttagactcactctggttattaga

SEQ ID NO: 3352649 - DNA, 25 bp, Homo sapien
cttctgactggggtgaaacaatatc

SEQ ID NO: 3352650 - DNA, 25 bp, Homo sapien
gaaaaagctaatcctgtatactgca

SEQ ID NO: 3352651 - DNA, 25 bp, Homo sapien
cctaataggcataaaggtcttctcc

SEQ ID NO: 3352652 - DNA, 25 bp, Homo sapien
tgagtatttaaccttggaacagcac

SEQ ID NO: 3352653 - DNA, 25 bp, Homo sapien
aaccatgattcaggacccaagactc

SEQ ID NO: 3352654 - DNA, 25 bp, Homo sapien
gaatttgcctactatctaatcagca

SEQ ID NO: 3352655 - DNA, 25 bp, Homo sapien
ggtgatgctgaggactactaaaatg

SEQ ID NO: 3352656 - DNA, 25 bp, Homo sapien
actgcttgccatctgtgctggtgat

SEQ ID NO: 3352657 - DNA, 25 bp, Homo sapien
ggacttggagtactgtgcactcctc

SEQ ID NO: 3352658 - DNA, 25 bp, Homo sapien
tagacgtataagagatttgggtgta

SEQ ID NO: 3352659 - DNA, 25 bp, Homo sapien
gagatttgggtgtaaaaatactgtg

SEQ ID NO: 3352660 - DNA, 25 bp, Homo sapien
aaaatgcagccagatatatgcttgc

SEQ ID NO: 3352661 - DNA, 25 bp, Homo sapien
tatgcttgcctggattagacgtata

SEQ ID NO: 3352662 - DNA, 25 bp, Homo sapien
gagaatggtgagaaccagagaggcg

SEQ ID NO: 3352663 - DNA, 25 bp, Homo sapien
cacggtggtgggcgcgtatagtccc

SEQ ID NO: 3352664 - DNA, 25 bp, Homo sapien
aaccagagaggcggagcctagatca

SEQ ID NO: 3352665 - DNA, 25 bp, Homo sapien
cagagaggcggagcctagatcacac

SEQ ID NO: 3352666 - DNA, 25 bp, Homo sapien
gagctacacttattcctggaactga

SEQ ID NO: 3352667 - DNA, 25 bp, Homo sapien
aggcaccaaaccatcctgtgcctgt

SEQ ID NO: 3352668 - DNA, 25 bp, Homo sapien
aacagctggcagtagtcacaagacg

SEQ ID NO: 3352669 - DNA, 25 bp, Homo sapien
cacaagacgtgtggaatgagtcctc

SEQ ID NO: 3352670 - DNA, 25 bp, Homo sapien
ggttttcaggggcaataatacacat

SEQ ID NO: 3352671 - DNA, 25 bp, Homo sapien
cttcttctggaatagctcctgatga

SEQ ID NO: 3352672 - DNA, 25 bp, Homo sapien
tagctcctgatgaacctgcctgagg

SEQ ID NO: 3352673 - DNA, 25 bp, Homo sapien
aatatcactgtctttctccttcaca

SEQ ID NO: 3352674 - DNA, 25 bp, Homo sapien
tacaataaagcaaatcattctctat

SEQ ID NO: 3352675 - DNA, 25 bp, Homo sapien
ttccagtcacttatatacaattaca

SEQ ID NO: 3352676 - DNA, 25 bp, Homo sapien
agatcgaacccactttatttctttg

SEQ ID NO: 3352677 - DNA, 25 bp, Homo sapien
tctttgtgcttttccagtcacttat

SEQ ID NO: 3352678 - DNA, 25 bp, Homo sapien
tggcttcgcagagtaaaaattgtta

SEQ ID NO: 3352679 - DNA, 25 bp, Homo sapien
tctggcaagaagcataagaatcaaa

SEQ ID NO: 3352680 - DNA, 25 bp, Homo sapien
aacatggcaggtttgattgcaactc

SEQ ID NO: 3352681 - DNA, 25 bp, Homo sapien
aaacgtgacctgaaaaactactatg

SEQ ID NO: 3352682 - DNA, 25 bp, Homo sapien
ttcacatagctcacgcaaggaaaca

SEQ ID NO: 3352683 - DNA, 25 bp, Homo sapien
aaagttgtactcagttgttcaaagg

SEQ ID NO: 3352684 - DNA, 25 bp, Homo sapien
cattttcacatagctcacgcaagga

SEQ ID NO: 3352685 - DNA, 25 bp, Homo sapien
ggctaagacaacgttgtcgtcttca

SEQ ID NO: 3352686 - DNA, 25 bp, Homo sapien
tataaactagagaccggatggaacc

SEQ ID NO: 3352687 - DNA, 25 bp, Homo sapien
tgtgagtctacgaaccattgctggc

SEQ ID NO: 3352688 - DNA, 25 bp, Homo sapien
taaggagccctctgaaatatcgtgt

SEQ ID NO: 3352689 - DNA, 25 bp, Homo sapien
tgtatactgaaacccacaggcagct

SEQ ID NO: 3352690 - DNA, 25 bp, Homo sapien
tttaatggtgagtgcaaaatccttc

SEQ ID NO: 3352691 - DNA, 25 bp, Homo sapien
ggtgagtgcaaaatccttcaacaaa

SEQ ID NO: 3352692 - DNA, 25 bp, Homo sapien
ctgatagatttaatggtgagtgcaa

SEQ ID NO: 3352693 - DNA, 25 bp, Homo sapien
caacaaataataagcatctccttca

SEQ ID NO: 3352694 - DNA, 25 bp, Homo sapien
gttatcctggactaatcctatcaag

SEQ ID NO: 3352695 - DNA, 25 bp, Homo sapien
gcataggcattaagcgacattttcc

SEQ ID NO: 3352696 - DNA, 25 bp, Homo sapien
cctatcaaggaaccatgtttgtaga

SEQ ID NO: 3352697 - DNA, 25 bp, Homo sapien
gtagaaatccagtgcataggcatta

SEQ ID NO: 3352698 - DNA, 25 bp, Homo sapien
tgtgacaacagcactggagcctgag

SEQ ID NO: 3352699 - DNA, 25 bp, Homo sapien
gcctgagagcgattgacaccgattg

SEQ ID NO: 3352700 - DNA, 25 bp, Homo sapien
tgacaccgattgtgcctagagtaac

SEQ ID NO: 3352701 - DNA, 25 bp, Homo sapien
cactggagcctgagagcgattgaca

SEQ ID NO: 3352702 - DNA, 25 bp, Homo sapien
aatgagatacgagttgagagtcttc

SEQ ID NO: 3352703 - DNA, 25 bp, Homo sapien
ttggagtttctagtcgaagcaaatc

SEQ ID NO: 3352704 - DNA, 25 bp, Homo sapien
tcatcaaatgagatacgagttgaga

SEQ ID NO: 3352705 - DNA, 25 bp, Homo sapien
ctagtcgaagcaaatcatcatcaaa

SEQ ID NO: 3352706 - DNA, 25 bp, Homo sapien
taggaaagtggtaaagtcctccata

SEQ ID NO: 3352707 - DNA, 25 bp, Homo sapien
gatattcctgattcatatcagccag

SEQ ID NO: 3352708 - DNA, 25 bp, Homo sapien
ttttgacaatgggagttgatattcc

SEQ ID NO: 3352709 - DNA, 25 bp, Homo sapien
tatcagccagtttggaaacaattcg

SEQ ID NO: 3352710 - DNA, 25 bp, Homo sapien
ttcatctaaagcatcactaaaatcc

SEQ ID NO: 3352711 - DNA, 25 bp, Homo sapien
catctaaagcatcactaaaatcctc

SEQ ID NO: 3352712 - DNA, 25 bp, Homo sapien
taaagcatcactaaaatcctcaggg

SEQ ID NO: 3352713 - DNA, 25 bp, Homo sapien
tctaaagcatcactaaaatcctcag

SEQ ID NO: 3352714 - DNA, 25 bp, Homo sapien
tagtcaaatacgttgctataaagtc

SEQ ID NO: 3352715 - DNA, 25 bp, Homo sapien
cctttgctctttgcgatgtctaaaa

SEQ ID NO: 3352716 - DNA, 25 bp, Homo sapien
ggaatttgcccatttgtctaaatag

SEQ ID NO: 3352717 - DNA, 25 bp, Homo sapien
agaaccaacttagaggctttgttga

SEQ ID NO: 3352718 - DNA, 25 bp, Homo sapien
gatgtcacttaatggcagggatata

SEQ ID NO: 3352719 - DNA, 25 bp, Homo sapien
caaacctagatcacattacctaggc

SEQ ID NO: 3352720 - DNA, 25 bp, Homo sapien
taaatagcatatatagtctgatgtc

SEQ ID NO: 3352721 - DNA, 25 bp, Homo sapien
tagtctgatgtcacttaatggcagg

SEQ ID NO: 3352722 - DNA, 25 bp, Homo sapien
cattttaggtaagatctatttagtg

SEQ ID NO: 3352723 - DNA, 25 bp, Homo sapien
aaaattctacagctgctaagtcatt

SEQ ID NO: 3352724 - DNA, 25 bp, Homo sapien
tataaaacaaatgaactgccctttg

SEQ ID NO: 3352725 - DNA, 25 bp, Homo sapien
atttacagagggagacatcaattac

SEQ ID NO: 3352726 - DNA, 25 bp, Homo sapien
taatactagcttttccataacgtct

SEQ ID NO: 3352727 - DNA, 25 bp, Homo sapien
gagatgtgccaatactaatactagc

SEQ ID NO: 3352728 - DNA, 25 bp, Homo sapien
ttgattgataaaactcgaagtgtgc

SEQ ID NO: 3352729 - DNA, 25 bp, Homo sapien
gtgcatcttggaactttggtggaaa

SEQ ID NO: 3352730 - DNA, 25 bp, Homo sapien
gattaccttcttgatctaaatagcc

SEQ ID NO: 3352731 - DNA, 25 bp, Homo sapien
tagaaggttcatgataatgcaaatg

SEQ ID NO: 3352732 - DNA, 25 bp, Homo sapien
cagcaaaccccataggattaccttc

SEQ ID NO: 3352733 - DNA, 25 bp, Homo sapien
atgtgatacaagtccagcaaacccc

SEQ ID NO: 3352734 - DNA, 25 bp, Homo sapien
aaacaatttattagtttgactcaag

SEQ ID NO: 3352735 - DNA, 25 bp, Homo sapien
acaatttattagtttgactcaagtc

SEQ ID NO: 3352736 - DNA, 25 bp, Homo sapien
caatttattagtttgactcaagtca

SEQ ID NO: 3352737 - DNA, 25 bp, Homo sapien
aatttattagtttgactcaagtcac

SEQ ID NO: 3352738 - DNA, 25 bp, Homo sapien
actctgggttgcttgaaggacagca

SEQ ID NO: 3352739 - DNA, 25 bp, Homo sapien
tctgggttgcttgaaggacagcaat

SEQ ID NO: 3352740 - DNA, 25 bp, Homo sapien
ctctgggttgcttgaaggacagcaa

SEQ ID NO: 3352741 - DNA, 25 bp, Homo sapien
attggattttatgagttttcctatt

SEQ ID NO: 3352742 - DNA, 25 bp, Homo sapien
tcagctcaggaacattggattttat

SEQ ID NO: 3352743 - DNA, 25 bp, Homo sapien
tctcagctcaggaacattggatttt

SEQ ID NO: 3352744 - DNA, 25 bp, Homo sapien
ctcagctcaggaacattggatttta

SEQ ID NO: 3352745 - DNA, 25 bp, Homo sapien
cacagatttacaaggcatgttgaca

SEQ ID NO: 3352746 - DNA, 25 bp, Homo sapien
tagactgagttttgagcaaaaacca

SEQ ID NO: 3352747 - DNA, 25 bp, Homo sapien
tgttgacacctaaagcaagtgttcc

SEQ ID NO: 3352748 - DNA, 25 bp, Homo sapien
tgtctataattcaacgcatccagat

SEQ ID NO: 3352749 - DNA, 25 bp, Homo sapien
ttgaaactcatagcactgtgatgat

SEQ ID NO: 3352750 - DNA, 25 bp, Homo sapien
tgaaactcatagcactgtgatgata

SEQ ID NO: 3352751 - DNA, 25 bp, Homo sapien
attttactcgaccaaataccttctg

SEQ ID NO: 3352752 - DNA, 25 bp, Homo sapien
tatgtgcagtcctgtgggatttcca

SEQ ID NO: 3352753 - DNA, 25 bp, Homo sapien
cactgctttttgatcagcatatgtg

SEQ ID NO: 3352754 - DNA, 25 bp, Homo sapien
agtgtccactgctttttgatcagca

SEQ ID NO: 3352755 - DNA, 25 bp, Homo sapien
gatcagcatatgtgcagtcctgtgg

SEQ ID NO: 3352756 - DNA, 25 bp, Homo sapien
cactagattatcatgttcagcttca

SEQ ID NO: 3352757 - DNA, 25 bp, Homo sapien
gtattaggctttgatccacatttct

SEQ ID NO: 3352758 - DNA, 25 bp, Homo sapien
agcttcatgtattaggctttgatcc

SEQ ID NO: 3352759 - DNA, 25 bp, Homo sapien
cttcactagattatcatgttcagct

SEQ ID NO: 3352760 - DNA, 25 bp, Homo sapien
ccatgacatgggcttctttatcagc

SEQ ID NO: 3352761 - DNA, 25 bp, Homo sapien
ttctttaggaaagtgctcacacttt

SEQ ID NO: 3352762 - DNA, 25 bp, Homo sapien
cacactttcagctgcgttttctaca

SEQ ID NO: 3352763 - DNA, 25 bp, Homo sapien
ttttcgaagtttgttagccatgaca

SEQ ID NO: 3352764 - DNA, 25 bp, Homo sapien
caaatctgcttcaggactaagattc

SEQ ID NO: 3352765 - DNA, 25 bp, Homo sapien
caggactaagattctgaagtaccat

SEQ ID NO: 3352766 - DNA, 25 bp, Homo sapien
tctgcttcaggactaagattctgaa

SEQ ID NO: 3352767 - DNA, 25 bp, Homo sapien
gactcaaatctgcttcaggactaag

SEQ ID NO: 3352768 - DNA, 25 bp, Homo sapien
tgccatttttaatccaacttgttaa

SEQ ID NO: 3352769 - DNA, 25 bp, Homo sapien
taattctgcctttagactctcttca

SEQ ID NO: 3352770 - DNA, 25 bp, Homo sapien
ctgctctacgttgccatttttaatc

SEQ ID NO: 3352771 - DNA, 25 bp, Homo sapien
ccaacttgttaattctgcctttaga

SEQ ID NO: 3352772 - DNA, 25 bp, Homo sapien
gactaatttattgttaaaatgaatg

SEQ ID NO: 3352773 - DNA, 25 bp, Homo sapien
tgactaatttattgttaaaatgaat

SEQ ID NO: 3352774 - DNA, 25 bp, Homo sapien
taatgactaatttattgttaaaatg

SEQ ID NO: 3352775 - DNA, 25 bp, Homo sapien
aatttattgttaaaatgaatgaagt

SEQ ID NO: 3352776 - DNA, 25 bp, Homo sapien
cagctggatgctttctcgaggtgaa

SEQ ID NO: 3352777 - DNA, 25 bp, Homo sapien
tctcgaggtgaaagggtaagatcag

SEQ ID NO: 3352778 - DNA, 25 bp, Homo sapien
gatgctttctcgaggtgaaagggta

SEQ ID NO: 3352779 - DNA, 25 bp, Homo sapien
tttccaaatttgaaacatggcatca

SEQ ID NO: 3352780 - DNA, 25 bp, Homo sapien
aggcaaatcctctgggagatgatta

SEQ ID NO: 3352781 - DNA, 25 bp, Homo sapien
gaggcaaatcctctgggagatgatt

SEQ ID NO: 3352782 - DNA, 25 bp, Homo sapien
tggaggcaaatcctctgggagatga

SEQ ID NO: 3352783 - DNA, 25 bp, Homo sapien
ggaggcaaatcctctgggagatgat

SEQ ID NO: 3352784 - DNA, 25 bp, Homo sapien
tgtgtggcatgaaaattgggccaaa

SEQ ID NO: 3352785 - DNA, 25 bp, Homo sapien
tggattgaaggcgatccctcaccat

SEQ ID NO: 3352786 - DNA, 25 bp, Homo sapien
gaaacaagccatgtatggattgaag

SEQ ID NO: 3352787 - DNA, 25 bp, Homo sapien
ggggctgatagctctccaggagtca

SEQ ID NO: 3352788 - DNA, 25 bp, Homo sapien
acatgcttctctagatcattatacc

SEQ ID NO: 3352789 - DNA, 25 bp, Homo sapien
tgatctgttgttagtgcagcacatg

SEQ ID NO: 3352790 - DNA, 25 bp, Homo sapien
tagatcattatacctctctccatag

SEQ ID NO: 3352791 - DNA, 25 bp, Homo sapien
tgaatgtcaccatgttttattgaac

SEQ ID NO: 3352792 - DNA, 25 bp, Homo sapien
caagtctaactttatacgattgttt

SEQ ID NO: 3352793 - DNA, 25 bp, Homo sapien
ttttacttgcaagtagtctttggga

SEQ ID NO: 3352794 - DNA, 25 bp, Homo sapien
aaagccggcctgacgacccacatgt

SEQ ID NO: 3352795 - DNA, 25 bp, Homo sapien
agtaccattttaccgattgtagcca

SEQ ID NO: 3352796 - DNA, 25 bp, Homo sapien
gatcatgacaaggagatgttcccag

SEQ ID NO: 3352797 - DNA, 25 bp, Homo sapien
attacttatggtagctgaaagagcc

SEQ ID NO: 3352798 - DNA, 25 bp, Homo sapien
gccaaaaagggacatcggatcatga

SEQ ID NO: 3352799 - DNA, 25 bp, Homo sapien
tcggtgagatgttcaggattactta

SEQ ID NO: 3352800 - DNA, 25 bp, Homo sapien
tcacccagttttggcgatgaggagc

SEQ ID NO: 3352801 - DNA, 25 bp, Homo sapien
aaagcaggcaggcactgtaataagt

SEQ ID NO: 3352802 - DNA, 25 bp, Homo sapien
catcaaatataacatatctgatctt

SEQ ID NO: 3352803 - DNA, 25 bp, Homo sapien
aggagcaagcagcagaatttcaaag

SEQ ID NO: 3352804 - DNA, 25 bp, Homo sapien
gacgatactccctggtgaaaacacc

SEQ ID NO: 3352805 - DNA, 25 bp, Homo sapien
cgtaaaacgattctgaacagttgct

SEQ ID NO: 3352806 - DNA, 25 bp, Homo sapien
ctgacagtttaaggcatcatgacga

SEQ ID NO: 3352807 - DNA, 25 bp, Homo sapien
acagagaacttcaccacttggcaga

SEQ ID NO: 3352808 - DNA, 25 bp, Homo sapien
acgttggggcaacaatcactgctga

SEQ ID NO: 3352809 - DNA, 25 bp, Homo sapien
gaggacgttggggcaacaatcactg

SEQ ID NO: 3352810 - DNA, 25 bp, Homo sapien
cgttggggcaacaatcactgctgac

SEQ ID NO: 3352811 - DNA, 25 bp, Homo sapien
ggacgttggggcaacaatcactgct

SEQ ID NO: 3352812 - DNA, 25 bp, Homo sapien
ctcatctcgtatcaaataatggccc

SEQ ID NO: 3352813 - DNA, 25 bp, Homo sapien
agttggaaccgagctggcccaatgc

SEQ ID NO: 3352814 - DNA, 25 bp, Homo sapien
taatggcccatgtattgcagttgga

SEQ ID NO: 3352815 - DNA, 25 bp, Homo sapien
cttttctctcatctcgtatcaaata

SEQ ID NO: 3352816 - DNA, 25 bp, Homo sapien
tattccttttcttcacttttacatc

SEQ ID NO: 3352817 - DNA, 25 bp, Homo sapien
tcttcacttttacatcattttctgc

SEQ ID NO: 3352818 - DNA, 25 bp, Homo sapien
tcacttttacatcattttctgcatc

SEQ ID NO: 3352819 - DNA, 25 bp, Homo sapien
ccttttcttcacttttacatcattt

SEQ ID NO: 3352820 - DNA, 25 bp, Homo sapien
tgagttgccgatcatcttcttgtaa

SEQ ID NO: 3352821 - DNA, 25 bp, Homo sapien
tccatcaaggagtggatccttttca

SEQ ID NO: 3352822 - DNA, 25 bp, Homo sapien
taaggcatctggctatgagttgccg

SEQ ID NO: 3352823 - DNA, 25 bp, Homo sapien
ctgggctggatgtaaagaacttgcc

SEQ ID NO: 3352824 - DNA, 25 bp, Homo sapien
tattctctctagcaattatttcagc

SEQ ID NO: 3352825 - DNA, 25 bp, Homo sapien
tcttccaggctctttattccagagt

SEQ ID NO: 3352826 - DNA, 25 bp, Homo sapien
tattccagagtgtaaattttctttc

SEQ ID NO: 3352827 - DNA, 25 bp, Homo sapien
gcaagcagttaaccccaccatttca

SEQ ID NO: 3352828 - DNA, 25 bp, Homo sapien
aagagtagaaaaatgacatcccaag

SEQ ID NO: 3352829 - DNA, 25 bp, Homo sapien
tatttactccttgtattccatcccc

SEQ ID NO: 3352830 - DNA, 25 bp, Homo sapien
cttgtattccatccccagttacgtc

SEQ ID NO: 3352831 - DNA, 25 bp, Homo sapien
catccccagttacgtctcccaggaa

SEQ ID NO: 3352832 - DNA, 25 bp, Homo sapien
ctcttgggcccactaaaatccttct

SEQ ID NO: 3352833 - DNA, 25 bp, Homo sapien
tgcacagatctaagaacacgagggt

SEQ ID NO: 3352834 - DNA, 25 bp, Homo sapien
gtcacgatgattttcgaagagactg

SEQ ID NO: 3352835 - DNA, 25 bp, Homo sapien
ccataaaaccgttggaaaacatgat

SEQ ID NO: 3352836 - DNA, 25 bp, Homo sapien
cagtgcacaagttcatcaaattcct

SEQ ID NO: 3352837 - DNA, 25 bp, Homo sapien
cactcaggggtttatgagaatgcca

SEQ ID NO: 3352838 - DNA, 25 bp, Homo sapien
acctggacctgtcataatcatcact

SEQ ID NO: 3352839 - DNA, 25 bp, Homo sapien
cctggacctgtcataatcatcactc

SEQ ID NO: 3352840 - DNA, 25 bp, Homo sapien
cacaaaagatgacgttggaataaaa

SEQ ID NO: 3352841 - DNA, 25 bp, Homo sapien
accacaaaagatgacgttggaataa

SEQ ID NO: 3352842 - DNA, 25 bp, Homo sapien
ttgggcaccatttcattggagctgt

SEQ ID NO: 3352843 - DNA, 25 bp, Homo sapien
acccaaattgggcaccatttcattg

SEQ ID NO: 3352844 - DNA, 25 bp, Homo sapien
ggaaatggctgtccaacctcaaagt

SEQ ID NO: 3352845 - DNA, 25 bp, Homo sapien
tctttcataatggtatctcccaaat

SEQ ID NO: 3352846 - DNA, 25 bp, Homo sapien
aacttttgttgttctcagaggaaat

SEQ ID NO: 3352847 - DNA, 25 bp, Homo sapien
aagtctctgaccaactttgatacgg

SEQ ID NO: 3352848 - DNA, 25 bp, Homo sapien
catttaagtcagaaaggtgaattaa

SEQ ID NO: 3352849 - DNA, 25 bp, Homo sapien
catcatttaagtcagaaaggtgaat

SEQ ID NO: 3352850 - DNA, 25 bp, Homo sapien
atattcttcaacaaaagctcatcat

SEQ ID NO: 3352851 - DNA, 25 bp, Homo sapien
cctcagcccaatgggaagtgatgac

SEQ ID NO: 3352852 - DNA, 25 bp, Homo sapien
tctcctgcagggttaagcaattact

SEQ ID NO: 3352853 - DNA, 25 bp, Homo sapien
gcagtttacacaaatcttccatctc

SEQ ID NO: 3352854 - DNA, 25 bp, Homo sapien
catttgtaataaaggcttcatgtcc

SEQ ID NO: 3352855 - DNA, 25 bp, Homo sapien
tagaggcactgtttcaccatggcca

SEQ ID NO: 3352856 - DNA, 25 bp, Homo sapien
tttcctgaccagaggagggctctct

SEQ ID NO: 3352857 - DNA, 25 bp, Homo sapien
ctggccagacttgtgtaagcagaga

SEQ ID NO: 3352858 - DNA, 25 bp, Homo sapien
tcctaaaaagcgatggtacattctc

SEQ ID NO: 3352859 - DNA, 25 bp, Homo sapien
cacgccgaatgtcagatccttctgg

SEQ ID NO: 3352860 - DNA, 25 bp, Homo sapien
gttaagcagggttgtataagcatct

SEQ ID NO: 3352861 - DNA, 25 bp, Homo sapien
ggtgctaatgctgaaagcttaaatc

SEQ ID NO: 3352862 - DNA, 25 bp, Homo sapien
aaatctttccaactggttaagcagg

SEQ ID NO: 3352863 - DNA, 25 bp, Homo sapien
aaaagaggtgctaatgctgaaagct

SEQ ID NO: 3352864 - DNA, 25 bp, Homo sapien
aatctggtgtctgtacatgcttgga

SEQ ID NO: 3352865 - DNA, 25 bp, Homo sapien
agattcttgccctgaggaaagtaca

SEQ ID NO: 3352866 - DNA, 25 bp, Homo sapien
catgcttggaagaaggtatgcataa

SEQ ID NO: 3352867 - DNA, 25 bp, Homo sapien
gccctgaggaaagtacaacgttgac

SEQ ID NO: 3352868 - DNA, 25 bp, Homo sapien
caggccttcgtctgcaactatcagg

SEQ ID NO: 3352869 - DNA, 25 bp, Homo sapien
aaaagctgtgtttgtagatcgttca

SEQ ID NO: 3352870 - DNA, 25 bp, Homo sapien
gaagttgaaatacgcatactcggca

SEQ ID NO: 3352871 - DNA, 25 bp, Homo sapien
tgttgttcgaacatcaatggtggta

SEQ ID NO: 3352872 - DNA, 25 bp, Homo sapien
tagcgttcaaccagatagaagaaat

SEQ ID NO: 3352873 - DNA, 25 bp, Homo sapien
tgctaataagatccacaagatagcg

SEQ ID NO: 3352874 - DNA, 25 bp, Homo sapien
gaaaactatggtgaattgtcctcct

SEQ ID NO: 3352875 - DNA, 25 bp, Homo sapien
ccaggcttaaatgatatctcacaga

SEQ ID NO: 3352876 - DNA, 25 bp, Homo sapien
tcaaaattaactgggacatttcctg

SEQ ID NO: 3352877 - DNA, 25 bp, Homo sapien
caaaattaactgggacatttcctgt

SEQ ID NO: 3352878 - DNA, 25 bp, Homo sapien
tgggacatttcctgtgaaaatgttg

SEQ ID NO: 3352879 - DNA, 25 bp, Homo sapien
ggacatttcctgtgaaaatgttgta

SEQ ID NO: 3352880 - DNA, 25 bp, Homo sapien
ccaacctgaactggcaagtattaaa

SEQ ID NO: 3352881 - DNA, 25 bp, Homo sapien
tggcaagtattaaaggtagcaaata

SEQ ID NO: 3352882 - DNA, 25 bp, Homo sapien
gcctccaacctgaactggcaagtat

SEQ ID NO: 3352883 - DNA, 25 bp, Homo sapien
gcaagtattaaaggtagcaaatacc

SEQ ID NO: 3352884 - DNA, 25 bp, Homo sapien
attttggtacctctaagtggcagtt

SEQ ID NO: 3352885 - DNA, 25 bp, Homo sapien
ttttggtacctctaagtggcagttc

SEQ ID NO: 3352886 - DNA, 25 bp, Homo sapien
ttggtacctctaagtggcagttctt

SEQ ID NO: 3352887 - DNA, 25 bp, Homo sapien
ggtacctctaagtggcagttcttaa

SEQ ID NO: 3352888 - DNA, 25 bp, Homo sapien
tagaattctgcatctaaatagtgat

SEQ ID NO: 3352889 - DNA, 25 bp, Homo sapien
gatgtaattagacttctaagaagtc

SEQ ID NO: 3352890 - DNA, 25 bp, Homo sapien
atctaaatagtgattcaattcatgg

SEQ ID NO: 3352891 - DNA, 25 bp, Homo sapien
tagtgattcaattcatggaggaggc

SEQ ID NO: 3352892 - DNA, 25 bp, Homo sapien
tcaggaccggtggtgtccaaagacc

SEQ ID NO: 3352893 - DNA, 25 bp, Homo sapien
tggcctaggactcggcgctctgagc

SEQ ID NO: 3352894 - DNA, 25 bp, Homo sapien
cagacctggcctaggactcggcgct

SEQ ID NO: 3352895 - DNA, 25 bp, Homo sapien
gtgaaacagagacctagcgcagagc

SEQ ID NO: 3352896 - DNA, 25 bp, Homo sapien
gctttgtaagaaaattcaatgctac

SEQ ID NO: 3352897 - DNA, 25 bp, Homo sapien
aattcaatgctacttatttctccag

SEQ ID NO: 3352898 - DNA, 25 bp, Homo sapien
ctgacatgtggctttgtaagaaaat

SEQ ID NO: 3352899 - DNA, 25 bp, Homo sapien
ttatttctccagctacaataggttt

SEQ ID NO: 3352900 - DNA, 25 bp, Homo sapien
gcaagttggatatcccttttgacaa

SEQ ID NO: 3352901 - DNA, 25 bp, Homo sapien
gggagtgacagccacgtctttccac

SEQ ID NO: 3352902 - DNA, 25 bp, Homo sapien
agcagtccatagctgtccagcggtg

SEQ ID NO: 3352903 - DNA, 25 bp, Homo sapien
ctttgcttgcaagttggatatccct

SEQ ID NO: 3352904 - DNA, 25 bp, Homo sapien
ggttggatccgctgcctaaccagtc

SEQ ID NO: 3352905 - DNA, 25 bp, Homo sapien
aagccgccgaccaaagctgttccta

SEQ ID NO: 3352906 - DNA, 25 bp, Homo sapien
ggctgtaccgaaactcctgcactca

SEQ ID NO: 3352907 - DNA, 25 bp, Homo sapien
tggccgctcctcaagacaacatttt

SEQ ID NO: 3352908 - DNA, 25 bp, Homo sapien
gatttatcaaagttactgcctgggt

SEQ ID NO: 3352909 - DNA, 25 bp, Homo sapien
tatcaaagttactgcctgggtgcag

SEQ ID NO: 3352910 - DNA, 25 bp, Homo sapien
caaagttactgcctgggtgcagttc

SEQ ID NO: 3352911 - DNA, 25 bp, Homo sapien
aagttactgcctgggtgcagttcac

SEQ ID NO: 3352912 - DNA, 25 bp, Homo sapien
acatgagcttagttaccaaatatag

SEQ ID NO: 3352913 - DNA, 25 bp, Homo sapien
gaattcctgatcatggcagtctgct

SEQ ID NO: 3352914 - DNA, 25 bp, Homo sapien
aaacatgagcttagttaccaaatat

SEQ ID NO: 3352915 - DNA, 25 bp, Homo sapien
ctgatcatggcagtctgctgaaaca

SEQ ID NO: 3352916 - DNA, 25 bp, Homo sapien
agtgtgtgacagttccccttcactc

SEQ ID NO: 3352917 - DNA, 25 bp, Homo sapien
cacaaaatagtgcattctcatgata

SEQ ID NO: 3352918 - DNA, 25 bp, Homo sapien
gttcccacaaaatagtgcattctca

SEQ ID NO: 3352919 - DNA, 25 bp, Homo sapien
tcccacaaaatagtgcattctcatg

SEQ ID NO: 3352920 - DNA, 25 bp, Homo sapien
ggcactaattacatccaaggagctc

SEQ ID NO: 3352921 - DNA, 25 bp, Homo sapien
tctgatgggtgccaagtcacttact

SEQ ID NO: 3352922 - DNA, 25 bp, Homo sapien
tatcatccagtggtagtgagcagag

SEQ ID NO: 3352923 - DNA, 25 bp, Homo sapien
tccatattcgggttcacagggtata

SEQ ID NO: 3352924 - DNA, 25 bp, Homo sapien
ctatccatatatcttaggatagaag

SEQ ID NO: 3352925 - DNA, 25 bp, Homo sapien
gatagctgaattgtagagaacctgg

SEQ ID NO: 3352926 - DNA, 25 bp, Homo sapien
tagtgagaatatagcgaggcctgga

SEQ ID NO: 3352927 - DNA, 25 bp, Homo sapien
caaaaactggatgaccaatggagca

SEQ ID NO: 3352928 - DNA, 25 bp, Homo sapien
cctgggaggctcaatagtatcttca

SEQ ID NO: 3352929 - DNA, 25 bp, Homo sapien
ctttaaaagctgtcccatacgcatc

SEQ ID NO: 3352930 - DNA, 25 bp, Homo sapien
cactttaaaagctgtcccatacgca

SEQ ID NO: 3352931 - DNA, 25 bp, Homo sapien
actttaaaagctgtcccatacgcat

SEQ ID NO: 3352932 - DNA, 25 bp, Homo sapien
gcactcccagttaagcattctattg

SEQ ID NO: 3352933 - DNA, 25 bp, Homo sapien
actcaaactttaatagtggtctgtc

SEQ ID NO: 3352934 - DNA, 25 bp, Homo sapien
tgaaattgagaggcataggtaaaaa

SEQ ID NO: 3352935 - DNA, 25 bp, Homo sapien
tgtccatggcagttaatttatctgc

SEQ ID NO: 3352936 - DNA, 25 bp, Homo sapien
tatgcatttagtggcattctccttc

SEQ ID NO: 3352937 - DNA, 25 bp, Homo sapien
tttatagaaattgagcacatatgca

SEQ ID NO: 3352938 - DNA, 25 bp, Homo sapien
ttttttggtctaatcttgtcaagca

SEQ ID NO: 3352939 - DNA, 25 bp, Homo sapien
taacaccgactgtgcgcaggatgac

SEQ ID NO: 3352940 - DNA, 25 bp, Homo sapien
ctggttgatagtctctggtcgaagc

SEQ ID NO: 3352941 - DNA, 25 bp, Homo sapien
tgatagtctctggtcgaagcaaatc

SEQ ID NO: 3352942 - DNA, 25 bp, Homo sapien
gtctctggtcgaagcaaatcattat

SEQ ID NO: 3352943 - DNA, 25 bp, Homo sapien
tagtctctggtcgaagcaaatcatt

SEQ ID NO: 3352944 - DNA, 25 bp, Homo sapien
gtgagacacgagttgggagtcttca

SEQ ID NO: 3352945 - DNA, 25 bp, Homo sapien
gagttgggagtcttcacattcttta

SEQ ID NO: 3352946 - DNA, 25 bp, Homo sapien
caaacaaatggtgaaatggctactc

SEQ ID NO: 3352947 - DNA, 25 bp, Homo sapien
tcttgcagctcatcaagtgagacac

SEQ ID NO: 3352948 - DNA, 25 bp, Homo sapien
gctgccctgtaataagctcctttac

SEQ ID NO: 3352949 - DNA, 25 bp, Homo sapien
gtacagctgccctgtaataagctcc

SEQ ID NO: 3352950 - DNA, 25 bp, Homo sapien
tgggttagtacagctgccctgtaat

SEQ ID NO: 3352951 - DNA, 25 bp, Homo sapien
gataaaacacttgggttagtacagc

SEQ ID NO: 3352952 - DNA, 25 bp, Homo sapien
tgttccggaatggaactaaaatctg

SEQ ID NO: 3352953 - DNA, 25 bp, Homo sapien
caagattgtttactctttaaattgt

SEQ ID NO: 3352954 - DNA, 25 bp, Homo sapien
ccaagattgtttactctttaaattg

SEQ ID NO: 3352955 - DNA, 25 bp, Homo sapien
accgacttggaagcaatcagcagga

SEQ ID NO: 3352956 - DNA, 25 bp, Homo sapien
cattactgccaggttatactcatat

SEQ ID NO: 3352957 - DNA, 25 bp, Homo sapien
tttttcatgttcaccgacttggaag

SEQ ID NO: 3352958 - DNA, 25 bp, Homo sapien
cctccgggagttcggcaaggatcac

SEQ ID NO: 3352959 - DNA, 25 bp, Homo sapien
tgttgtttgccaccttctcgaatgt

SEQ ID NO: 3352960 - DNA, 25 bp, Homo sapien
gaatgtgtatgctatacagccccat

SEQ ID NO: 3352961 - DNA, 25 bp, Homo sapien
cttgtgttgtttgccaccttctcga

SEQ ID NO: 3352962 - DNA, 25 bp, Homo sapien
gccaccttctcgaatgtgtatgcta

SEQ ID NO: 3352963 - DNA, 25 bp, Homo sapien
tcccaggttctaatgcacattttct

SEQ ID NO: 3352964 - DNA, 25 bp, Homo sapien
tctctattcactagggttactggat

SEQ ID NO: 3352965 - DNA, 25 bp, Homo sapien
agaaacaagcttcttctacattccc

SEQ ID NO: 3352966 - DNA, 25 bp, Homo sapien
ttcactagggttactggatagaaac

SEQ ID NO: 3352967 - DNA, 25 bp, Homo sapien
tactaacacgagcttttccatcaca

SEQ ID NO: 3352968 - DNA, 25 bp, Homo sapien
tggaattttgctggaatatattttc

SEQ ID NO: 3352969 - DNA, 25 bp, Homo sapien
ccatcacatcttgggaaaattgttg

SEQ ID NO: 3352970 - DNA, 25 bp, Homo sapien
ccaaacaaatttgccaatactaaca

SEQ ID NO: 3352971 - DNA, 25 bp, Homo sapien
aaacaagatttgaaggttcatgacc

SEQ ID NO: 3352972 - DNA, 25 bp, Homo sapien
gatgcaagtcctgcaaatttctttg

SEQ ID NO: 3352973 - DNA, 25 bp, Homo sapien
tgaaggttcatgaccatgcaaatat

SEQ ID NO: 3352974 - DNA, 25 bp, Homo sapien
tatgatgcaagtcctgcaaatttct

SEQ ID NO: 3352975 - DNA, 25 bp, Homo sapien
agaacaaaaagccaaagcacgatga

SEQ ID NO: 3352976 - DNA, 25 bp, Homo sapien
agagaacaaaaagccaaagcacgat

SEQ ID NO: 3352977 - DNA, 25 bp, Homo sapien
gaacaaaaagccaaagcacgatgat

SEQ ID NO: 3352978 - DNA, 25 bp, Homo sapien
acaaaaagccaaagcacgatgatac

SEQ ID NO: 3352979 - DNA, 25 bp, Homo sapien
aaagacagcaatgaatgctttagca

SEQ ID NO: 3352980 - DNA, 25 bp, Homo sapien
gtctccatggctcttcgtctcttaa

SEQ ID NO: 3352981 - DNA, 25 bp, Homo sapien
agtaaagtttcaaagtctccatggc

SEQ ID NO: 3352982 - DNA, 25 bp, Homo sapien
gctcttcgtctcttaaaagacagca

SEQ ID NO: 3352983 - DNA, 25 bp, Homo sapien
tgttatacataacccagactggcaa

SEQ ID NO: 3352984 - DNA, 25 bp, Homo sapien
aatatttggatctgtgtcatcaccc

SEQ ID NO: 3352985 - DNA, 25 bp, Homo sapien
cagtggtgaccaatagtggcctgaa

SEQ ID NO: 3352986 - DNA, 25 bp, Homo sapien
gctccagccatgcatgtaacacacg

SEQ ID NO: 3352987 - DNA, 25 bp, Homo sapien
gagtgacacatttgagaatacattc

SEQ ID NO: 3352988 - DNA, 25 bp, Homo sapien
gacctgagactacaaacaataatag

SEQ ID NO: 3352989 - DNA, 25 bp, Homo sapien
cataacagaatttaaggtagaagca

SEQ ID NO: 3352990 - DNA, 25 bp, Homo sapien
ttttatctggaattaagagtgacac

SEQ ID NO: 3352991 - DNA, 25 bp, Homo sapien
ggcctgataattaaagggcactcac

SEQ ID NO: 3352992 - DNA, 25 bp, Homo sapien
gacatgactgctgtcacaccctgtc

SEQ ID NO: 3352993 - DNA, 25 bp, Homo sapien
tcatgtcagttagcctagagttcac

SEQ ID NO: 3352994 - DNA, 25 bp, Homo sapien
tagagttcacataggaagtggcttc

SEQ ID NO: 3352995 - DNA, 25 bp, Homo sapien
taaaagagcagcagacctgactaga

SEQ ID NO: 3352996 - DNA, 25 bp, Homo sapien
tacagaaccctaatacagtgggtgg

SEQ ID NO: 3352997 - DNA, 25 bp, Homo sapien
gtgagccctcacctctacacaaaaa

SEQ ID NO: 3352998 - DNA, 25 bp, Homo sapien
cccaggtgattaaggctgcagtaaa

SEQ ID NO: 3352999 - DNA, 25 bp, Homo sapien
ggttatgctgagagggaactgtcct

SEQ ID NO: 3353000 - DNA, 25 bp, Homo sapien
catttccaagcaggtcttgacctct

SEQ ID NO: 3353001 - DNA, 25 bp, Homo sapien
atacacatttccaagcaggtcttga

SEQ ID NO: 3353002 - DNA, 25 bp, Homo sapien
acactggatgcaaggagtcttttta

SEQ ID NO: 3353003 - DNA, 25 bp, Homo sapien
gaagattacgtggtagacaacccat

SEQ ID NO: 3353004 - DNA, 25 bp, Homo sapien
gaggtacagagtattgtcagcccca

SEQ ID NO: 3353005 - DNA, 25 bp, Homo sapien
tgagcgcagagaacctaagtaactt

SEQ ID NO: 3353006 - DNA, 25 bp, Homo sapien
gacaacccatgcgaaacaatgacag

SEQ ID NO: 3353007 - DNA, 25 bp, Homo sapien
taaagcatccagatagactgagtct

SEQ ID NO: 3353008 - DNA, 25 bp, Homo sapien
ctgagtcttgggcaaaaacaacaga

SEQ ID NO: 3353009 - DNA, 25 bp, Homo sapien
ccctaaggcaagtgtttcagtagct

SEQ ID NO: 3353010 - DNA, 25 bp, Homo sapien
gcatggcatgtggatccctaaggca

SEQ ID NO: 3353011 - DNA, 25 bp, Homo sapien
cttcagttctttgccgtgtcttgta

SEQ ID NO: 3353012 - DNA, 25 bp, Homo sapien
tgtcttgtaaatcgcactcgcggta

SEQ ID NO: 3353013 - DNA, 25 bp, Homo sapien
tacaaagagtatctcaacaaactct

SEQ ID NO: 3353014 - DNA, 25 bp, Homo sapien
ccctttgtgctaaagccttcagttc

SEQ ID NO: 3353015 - DNA, 25 bp, Homo sapien
acactgagcaaggaagagtcactta

SEQ ID NO: 3353016 - DNA, 25 bp, Homo sapien
gagtcacttatagaactttagcaca

SEQ ID NO: 3353017 - DNA, 25 bp, Homo sapien
taagaggctgacattcacactgagc

SEQ ID NO: 3353018 - DNA, 25 bp, Homo sapien
gaatcaggctataaactaatccagg

SEQ ID NO: 3353019 - DNA, 25 bp, Homo sapien
tcctggtaatttcagtgtgtagggc

SEQ ID NO: 3353020 - DNA, 25 bp, Homo sapien
ggctttgacatcagcatacgtgcag

SEQ ID NO: 3353021 - DNA, 25 bp, Homo sapien
atcagcatacgtgcagtcctcagaa

SEQ ID NO: 3353022 - DNA, 25 bp, Homo sapien
cagtgtgtagggctttgacatcagc

SEQ ID NO: 3353023 - DNA, 25 bp, Homo sapien
actgcaagaagcctaaggccccaca

SEQ ID NO: 3353024 - DNA, 25 bp, Homo sapien
cgttgacagtagctccatcaatcct

SEQ ID NO: 3353025 - DNA, 25 bp, Homo sapien
atgaaaactcatattcagttactgc

SEQ ID NO: 3353026 - DNA, 25 bp, Homo sapien
aggccccacagatttcccttggtca

SEQ ID NO: 3353027 - DNA, 25 bp, Homo sapien
gcctagtgcctattaggtatttctc

SEQ ID NO: 3353028 - DNA, 25 bp, Homo sapien
taggtaaacttaggtcatgagagtt

SEQ ID NO: 3353029 - DNA, 25 bp, Homo sapien
agtgaataagcgttctacagaccag

SEQ ID NO: 3353030 - DNA, 25 bp, Homo sapien
attcctttgggtagacgcccagcaa

SEQ ID NO: 3353031 - DNA, 25 bp, Homo sapien
ttttcaagtacttcatctattgcaa

SEQ ID NO: 3353032 - DNA, 25 bp, Homo sapien
catctattgcaaagacataactatg

SEQ ID NO: 3353033 - DNA, 25 bp, Homo sapien
atctattgcaaagacataactatga

SEQ ID NO: 3353034 - DNA, 25 bp, Homo sapien
cactatatataaatgagactaattg

SEQ ID NO: 3353035 - DNA, 25 bp, Homo sapien
cttctaaccactatatataaatgag

SEQ ID NO: 3353036 - DNA, 25 bp, Homo sapien
tgacctagaagactgacccatttct

SEQ ID NO: 3353037 - DNA, 25 bp, Homo sapien
ttttataaggattgacctagaagac

SEQ ID NO: 3353038 - DNA, 25 bp, Homo sapien
tttgaactagacaatgaatccggac

SEQ ID NO: 3353039 - DNA, 25 bp, Homo sapien
aatattgcaggcaacttatccattt

SEQ ID NO: 3353040 - DNA, 25 bp, Homo sapien
tcaccatatcttttgaactagacaa

SEQ ID NO: 3353041 - DNA, 25 bp, Homo sapien
taaggttcttcagtactcttttgac

SEQ ID NO: 3353042 - DNA, 25 bp, Homo sapien
caagtagtggtaaaagtcaacagag

SEQ ID NO: 3353043 - DNA, 25 bp, Homo sapien
gtcacagacatctctatactaaaga

SEQ ID NO: 3353044 - DNA, 25 bp, Homo sapien
taggtactacaaataagtcagtagg

SEQ ID NO: 3353045 - DNA, 25 bp, Homo sapien
aaggatgttcataaaatgttgctgt

SEQ ID NO: 3353046 - DNA, 25 bp, Homo sapien
caacttcttaatgactatcttattc

SEQ ID NO: 3353047 - DNA, 25 bp, Homo sapien
atccaacttcttaatgactatctta

SEQ ID NO: 3353048 - DNA, 25 bp, Homo sapien
tattttctagcatccaacttcttaa

SEQ ID NO: 3353049 - DNA, 25 bp, Homo sapien
tcatattttctagcatccaacttct

SEQ ID NO: 3353050 - DNA, 25 bp, Homo sapien
ttgagccatggtatcataaagctgg

SEQ ID NO: 3353051 - DNA, 25 bp, Homo sapien
tcccagacttgagccatggtatcat

SEQ ID NO: 3353052 - DNA, 25 bp, Homo sapien
gacttgagccatggtatcataaagc

SEQ ID NO: 3353053 - DNA, 25 bp, Homo sapien
ccagacttgagccatggtatcataa

SEQ ID NO: 3353054 - DNA, 25 bp, Homo sapien
ctgatggttaccctggttactgatc

SEQ ID NO: 3353055 - DNA, 25 bp, Homo sapien
taccctggttactgatcagcttccg

SEQ ID NO: 3353056 - DNA, 25 bp, Homo sapien
ctggttactgatcagcttccgtctg

SEQ ID NO: 3353057 - DNA, 25 bp, Homo sapien
ggttaccctggttactgatcagctt

SEQ ID NO: 3353058 - DNA, 25 bp, Homo sapien
tcggacatgaatgaggactgccaat

SEQ ID NO: 3353059 - DNA, 25 bp, Homo sapien
gacagaaatagatactaagaagccg

SEQ ID NO: 3353060 - DNA, 25 bp, Homo sapien
tgtggcagcactgttagtcacagag

SEQ ID NO: 3353061 - DNA, 25 bp, Homo sapien
tcatttggtaatgggaacttcggac

SEQ ID NO: 3353062 - DNA, 25 bp, Homo sapien
aatcattgtatctctctccatagag

SEQ ID NO: 3353063 - DNA, 25 bp, Homo sapien
ttagcgcagcacagggatgaaaatg

SEQ ID NO: 3353064 - DNA, 25 bp, Homo sapien
aatatctgtcgttagcgcagcacag

SEQ ID NO: 3353065 - DNA, 25 bp, Homo sapien
catatatgcttctctaaatcattgt

SEQ ID NO: 3353066 - DNA, 25 bp, Homo sapien
gtactgttttactgattgcagccac

SEQ ID NO: 3353067 - DNA, 25 bp, Homo sapien
gagaaagttgagacatttgtcagcc

SEQ ID NO: 3353068 - DNA, 25 bp, Homo sapien
tccagtactgttttactgattgcag

SEQ ID NO: 3353069 - DNA, 25 bp, Homo sapien
caagtctaacttcatatgattgatt

SEQ ID NO: 3353070 - DNA, 25 bp, Homo sapien
agtgctgctgttactgccatcgtcg

SEQ ID NO: 3353071 - DNA, 25 bp, Homo sapien
cagtgctgctgttactgccatcgtc

SEQ ID NO: 3353072 - DNA, 25 bp, Homo sapien
gaagatttgggttatttatggtagc

SEQ ID NO: 3353073 - DNA, 25 bp, Homo sapien
gaataatgacaaggaggagctccca

SEQ ID NO: 3353074 - DNA, 25 bp, Homo sapien
gggacatcgaataatgacaaggagg

SEQ ID NO: 3353075 - DNA, 25 bp, Homo sapien
ggtgagaagatttgggttatttatg

SEQ ID NO: 3353076 - DNA, 25 bp, Homo sapien
agcaagcaacaggatttcaaaacat

SEQ ID NO: 3353077 - DNA, 25 bp, Homo sapien
ttttggcgatgaggagcaagcaaca

SEQ ID NO: 3353078 - DNA, 25 bp, Homo sapien
gcaagcaacaggatttcaaaacatt

SEQ ID NO: 3353079 - DNA, 25 bp, Homo sapien
gagcaagcaacaggatttcaaaaca

SEQ ID NO: 3353080 - DNA, 25 bp, Homo sapien
gacagtttagtacattgtgacaata

SEQ ID NO: 3353081 - DNA, 25 bp, Homo sapien
cgcatagagttctgccggcaggcaa

SEQ ID NO: 3353082 - DNA, 25 bp, Homo sapien
gttgcagccacttgaccaacaaggg

SEQ ID NO: 3353083 - DNA, 25 bp, Homo sapien
tctcttgtaaaagcaccgcatagag

SEQ ID NO: 3353084 - DNA, 25 bp, Homo sapien
gaggacgttggggcaacaatcactg

SEQ ID NO: 3353085 - DNA, 25 bp, Homo sapien
cgttggggcaacaatcactgctgac

SEQ ID NO: 3353086 - DNA, 25 bp, Homo sapien
acgttggggcaacaatcactgctga

SEQ ID NO: 3353087 - DNA, 25 bp, Homo sapien
ggacgttggggcaacaatcactgct

SEQ ID NO: 3353088 - DNA, 25 bp, Homo sapien
agttgaaaccgagctggtccaatgt

SEQ ID NO: 3353089 - DNA, 25 bp, Homo sapien
gaaaccgagctggtccaatgtcaat

SEQ ID NO: 3353090 - DNA, 25 bp, Homo sapien
gctggtccaatgtcaatcgaatatt

SEQ ID NO: 3353091 - DNA, 25 bp, Homo sapien
ctggaccctgggatcccgatctttt

SEQ ID NO: 3353092 - DNA, 25 bp, Homo sapien
cagagttggatccaaagagtttgcc

SEQ ID NO: 3353093 - DNA, 25 bp, Homo sapien
tagctatatattgatgatgttctgc

SEQ ID NO: 3353094 - DNA, 25 bp, Homo sapien
tctgggtatctctccaggagtgaat

SEQ ID NO: 3353095 - DNA, 25 bp, Homo sapien
gatgttctgcttccaaaatttctgg

SEQ ID NO: 3353096 - DNA, 25 bp, Homo sapien
acagctatacttaaatctttcgaaa

SEQ ID NO: 3353097 - DNA, 25 bp, Homo sapien
gaacagctatacttaaatctttcga

SEQ ID NO: 3353098 - DNA, 25 bp, Homo sapien
cagctatacttaaatctttcgaaat

SEQ ID NO: 3353099 - DNA, 25 bp, Homo sapien
aagcaggcaattaatcctaacattt

SEQ ID NO: 3353100 - DNA, 25 bp, Homo sapien
agcaggcaattaatcctaacatttc

SEQ ID NO: 3353101 - DNA, 25 bp, Homo sapien
tgaattacttgcacatgatgtcaaa

SEQ ID NO: 3353102 - DNA, 25 bp, Homo sapien
tcactgaattacttgcacatgatgt

SEQ ID NO: 3353103 - DNA, 25 bp, Homo sapien
caatagaaaacagcagatcatcgtt

SEQ ID NO: 3353104 - DNA, 25 bp, Homo sapien
gcagatcatcgttttgctgagcttt

SEQ ID NO: 3353105 - DNA, 25 bp, Homo sapien
gatcatcgttttgctgagctttgtt

SEQ ID NO: 3353106 - DNA, 25 bp, Homo sapien
gaaaacagcagatcatcgttttgct

SEQ ID NO: 3353107 - DNA, 25 bp, Homo sapien
tcacaatgactttcgtagagattga

SEQ ID NO: 3353108 - DNA, 25 bp, Homo sapien
gccgagtagtttgagtcacaatgac

SEQ ID NO: 3353109 - DNA, 25 bp, Homo sapien
tggaatcctcctttggccgagtagt

SEQ ID NO: 3353110 - DNA, 25 bp, Homo sapien
tgtaatatttcaccactggcaccac

SEQ ID NO: 3353111 - DNA, 25 bp, Homo sapien
cgtcactaaggagtctttgagcatg

SEQ ID NO: 3353112 - DNA, 25 bp, Homo sapien
taaacagtgaaggaacaaccggatc

SEQ ID NO: 3353113 - DNA, 25 bp, Homo sapien
tgccagtgcaaaagttcatcagatg

SEQ ID NO: 3353114 - DNA, 25 bp, Homo sapien
tgatcctgtcatagtcgtcactaag

SEQ ID NO: 3353115 - DNA, 25 bp, Homo sapien
ggcactaaatcaggtacttcattaa

SEQ ID NO: 3353116 - DNA, 25 bp, Homo sapien
taaatcaggtacttcattaactctg

SEQ ID NO: 3353117 - DNA, 25 bp, Homo sapien
tcaagttgatggcactaaatcaggt

SEQ ID NO: 3353118 - DNA, 25 bp, Homo sapien
gatggcactaaatcaggtacttcat

SEQ ID NO: 3353119 - DNA, 25 bp, Homo sapien
catcatatctccaacaaactcatca

SEQ ID NO: 3353120 - DNA, 25 bp, Homo sapien
aggcaaatccttcatcatatctcca

SEQ ID NO: 3353121 - DNA, 25 bp, Homo sapien
agatgtcattggaataaagcccaca

SEQ ID NO: 3353122 - DNA, 25 bp, Homo sapien
agaataggcaaatccttcatcatat

SEQ ID NO: 3353123 - DNA, 25 bp, Homo sapien
tgtgacacaacattccacaggtctt

SEQ ID NO: 3353124 - DNA, 25 bp, Homo sapien
taatccctcctaatggaatctccca

SEQ ID NO: 3353125 - DNA, 25 bp, Homo sapien
aaattctttaaccaggtgtgacaca

SEQ ID NO: 3353126 - DNA, 25 bp, Homo sapien
cacaggtcttcataatccctcctaa

SEQ ID NO: 3353127 - DNA, 25 bp, Homo sapien
cagattccagcatccaaaaacgttt

SEQ ID NO: 3353128 - DNA, 25 bp, Homo sapien
caattgctcatcatacaagtcagaa

SEQ ID NO: 3353129 - DNA, 25 bp, Homo sapien
tcaaattcatagtagaaggctatat

SEQ ID NO: 3353130 - DNA, 25 bp, Homo sapien
gaaggctatattctttaacaattgc

SEQ ID NO: 3353131 - DNA, 25 bp, Homo sapien
ttttaagaaagaatcactgttccta

SEQ ID NO: 3353132 - DNA, 25 bp, Homo sapien
tttaagaaagaatcactgttcctaa

SEQ ID NO: 3353133 - DNA, 25 bp, Homo sapien
catttttaagaaagaatcactgttc

SEQ ID NO: 3353134 - DNA, 25 bp, Homo sapien
ttaagaaagaatcactgttcctaat

SEQ ID NO: 3353135 - DNA, 25 bp, Homo sapien
ccaagagcatgtgatgactcgagaa

SEQ ID NO: 3353136 - DNA, 25 bp, Homo sapien
gactcgagaacaagctctctgagaa

SEQ ID NO: 3353137 - DNA, 25 bp, Homo sapien
gaggcaacgcagtctgcagaaatct

SEQ ID NO: 3353138 - DNA, 25 bp, Homo sapien
taagtggagttgaaaagccacacag

SEQ ID NO: 3353139 - DNA, 25 bp, Homo sapien
tgcagggataggcaattactgtgca

SEQ ID NO: 3353140 - DNA, 25 bp, Homo sapien
ctgcagggataggcaattactgtgc

SEQ ID NO: 3353141 - DNA, 25 bp, Homo sapien
gcagggataggcaattactgtgcac

SEQ ID NO: 3353142 - DNA, 25 bp, Homo sapien
tgtggagccaaccatcctagtcaaa

SEQ ID NO: 3353143 - DNA, 25 bp, Homo sapien
taaagggccctataagctgaaaaca

SEQ ID NO: 3353144 - DNA, 25 bp, Homo sapien
gaaacacaccaatatctagactgca

SEQ ID NO: 3353145 - DNA, 25 bp, Homo sapien
tagtagagcggaaaatccatgttcc

SEQ ID NO: 3353146 - DNA, 25 bp, Homo sapien
aaccaagagtatgtccacagtggag

SEQ ID NO: 3353147 - DNA, 25 bp, Homo sapien
tggagaacctgatgccaccagtgaa

SEQ ID NO: 3353148 - DNA, 25 bp, Homo sapien
cctaatgaagaaaatggcggtcaga

SEQ ID NO: 3353149 - DNA, 25 bp, Homo sapien
gccaccagtgaagttataccagtta

SEQ ID NO: 3353150 - DNA, 25 bp, Homo sapien
tggcggctgtgttctttttacttac

SEQ ID NO: 3353151 - DNA, 25 bp, Homo sapien
gaatgacagctttctgcctggcggc

SEQ ID NO: 3353152 - DNA, 25 bp, Homo sapien
ctgatgaatgacagctttctgcctg

SEQ ID NO: 3353153 - DNA, 25 bp, Homo sapien
agctttctgcctggcggctgtgttc

SEQ ID NO: 3353154 - DNA, 25 bp, Homo sapien
aagacacgatggtacattctcaagg

SEQ ID NO: 3353155 - DNA, 25 bp, Homo sapien
agagaacacgctggatgtccgatcc

SEQ ID NO: 3353156 - DNA, 25 bp, Homo sapien
tctcaaggatagtgaacatgaagtg

SEQ ID NO: 3353157 - DNA, 25 bp, Homo sapien
tgtccgatccttctgaccataggtg

SEQ ID NO: 3353158 - DNA, 25 bp, Homo sapien
gaagcagaaatagagtctgatacgc

SEQ ID NO: 3353159 - DNA, 25 bp, Homo sapien
tgaagcagaaatagagtctgatacg

SEQ ID NO: 3353160 - DNA, 25 bp, Homo sapien
ctgaagcagaaatagagtctgatac

SEQ ID NO: 3353161 - DNA, 25 bp, Homo sapien
gagccctcctcaatttgaatactgg

SEQ ID NO: 3353162 - DNA, 25 bp, Homo sapien
ggcaccctttagtctggtctaagga

SEQ ID NO: 3353163 - DNA, 25 bp, Homo sapien
gaattcaaggtactctgagagcatg

SEQ ID NO: 3353164 - DNA, 25 bp, Homo sapien
gcaaatgatatcttagagccctcct

SEQ ID NO: 3353165 - DNA, 25 bp, Homo sapien
tgaactgtcttggtattatggagct

SEQ ID NO: 3353166 - DNA, 25 bp, Homo sapien
agtaaaatcaccctcatatgtcttt

SEQ ID NO: 3353167 - DNA, 25 bp, Homo sapien
gtgagacatttgaattctacatttg

SEQ ID NO: 3353168 - DNA, 25 bp, Homo sapien
gataaataactaatgcgtgcagggt

SEQ ID NO: 3353169 - DNA, 25 bp, Homo sapien
ggaacaagactagattcactcataa

SEQ ID NO: 3353170 - DNA, 25 bp, Homo sapien
tcaactataccaaaataatgagcct

SEQ ID NO: 3353171 - DNA, 25 bp, Homo sapien
ttgataaactatcgaatggcctgca

SEQ ID NO: 3353172 - DNA, 25 bp, Homo sapien
tgcctatatgcaacacaggaacctc

SEQ ID NO: 3353173 - DNA, 25 bp, Homo sapien
ccaatcttgtgataagcatccagaa

SEQ ID NO: 3353174 - DNA, 25 bp, Homo sapien
gaaaactccgtttgcacatcaatgt

SEQ ID NO: 3353175 - DNA, 25 bp, Homo sapien
gccctgatgaaagcacaacattgac

SEQ ID NO: 3353176 - DNA, 25 bp, Homo sapien
gaattaaagcggtcctcaatgaaag

SEQ ID NO: 3353177 - DNA, 25 bp, Homo sapien
gatggaacatagtagaaagcccaga

SEQ ID NO: 3353178 - DNA, 25 bp, Homo sapien
tgtttgcaactacacagggcaccag

SEQ ID NO: 3353179 - DNA, 25 bp, Homo sapien
ttagcaaaagatgtgcaacgcctcc

SEQ ID NO: 3353180 - DNA, 25 bp, Homo sapien
cgagcagatgcttcacaagtcatag

SEQ ID NO: 3353181 - DNA, 25 bp, Homo sapien
gattgcctcaggtcaggtgttcgac

SEQ ID NO: 3353182 - DNA, 25 bp, Homo sapien
caggaaagtgtccactcaacaagaa

SEQ ID NO: 3353183 - DNA, 25 bp, Homo sapien
ttgcatgtgaatgcacatagtagct

SEQ ID NO: 3353184 - DNA, 25 bp, Homo sapien
caaaccgtggcacatttctacaata

SEQ ID NO: 3353185 - DNA, 25 bp, Homo sapien
gcatgtgacaagcaaggaatctcca

SEQ ID NO: 3353186 - DNA, 25 bp, Homo sapien
tggagattctgtccccacttgaatg

SEQ ID NO: 3353187 - DNA, 25 bp, Homo sapien
cacttgaatgattttacacccaggc

SEQ ID NO: 3353188 - DNA, 25 bp, Homo sapien
gaattgtcctccgttactcagaaga

SEQ ID NO: 3353189 - DNA, 25 bp, Homo sapien
ccagcttttggcatttcattcaaaa

SEQ ID NO: 3353190 - DNA, 25 bp, Homo sapien
tggcatttcattcaaaattaactgt

SEQ ID NO: 3353191 - DNA, 25 bp, Homo sapien
tttcattcaaaattaactgtgtcat

SEQ ID NO: 3353192 - DNA, 25 bp, Homo sapien
catttcattcaaaattaactgtgtc

SEQ ID NO: 3353193 - DNA, 25 bp, Homo sapien
ccctgaaaaatactgcatgatcctt

SEQ ID NO: 3353194 - DNA, 25 bp, Homo sapien
ttccctgaaaaatactgcatgatcc

SEQ ID NO: 3353195 - DNA, 25 bp, Homo sapien
tgaaaaatactgcatgatcctttga

SEQ ID NO: 3353196 - DNA, 25 bp, Homo sapien
aaaaatactgcatgatcctttgacc

SEQ ID NO: 3353197 - DNA, 25 bp, Homo sapien
cagggtagaagagtagagctggaat

SEQ ID NO: 3353198 - DNA, 25 bp, Homo sapien
ggctgatttattttgacacctctaa

SEQ ID NO: 3353199 - DNA, 25 bp, Homo sapien
tggctacatttgatgtgaatggcac

SEQ ID NO: 3353200 - DNA, 25 bp, Homo sapien
ctgcttcttgggctacagggtagaa

SEQ ID NO: 3353201 - DNA, 25 bp, Homo sapien
tcaccagaaactcaatcagccagaa

SEQ ID NO: 3353202 - DNA, 25 bp, Homo sapien
ttaagccaccactctataatatttt

SEQ ID NO: 3353203 - DNA, 25 bp, Homo sapien
agaaactcaatcagccagaatcttg

SEQ ID NO: 3353204 - DNA, 25 bp, Homo sapien
taagccaccactctataatattttg

SEQ ID NO: 3353205 - DNA, 25 bp, Homo sapien
ctgccgcccgagcccagtgggcgcc

SEQ ID NO: 3353206 - DNA, 25 bp, Homo sapien
gccgcccgagcccagtgggcgcccc

SEQ ID NO: 3353207 - DNA, 25 bp, Homo sapien
cgcccgagcccagtgggcgccccag

SEQ ID NO: 3353208 - DNA, 25 bp, Homo sapien
cccgagcccagtgggcgccccagct

SEQ ID NO: 3353209 - DNA, 25 bp, Homo sapien
tctggaggtagaatataggtctgca

SEQ ID NO: 3353210 - DNA, 25 bp, Homo sapien
taggtctgcattggtttactctgag

SEQ ID NO: 3353211 - DNA, 25 bp, Homo sapien
ccgaacctgctaggtccaaagagct

SEQ ID NO: 3353212 - DNA, 25 bp, Homo sapien
tttctccaccgcgaggccttttcga

SEQ ID NO: 3353213 - DNA, 25 bp, Homo sapien
agggaaagaaagcagagaaatctgg

SEQ ID NO: 3353214 - DNA, 25 bp, Homo sapien
ggaaagaaagcagagaaatctggga

SEQ ID NO: 3353215 - DNA, 25 bp, Homo sapien
aaagaaagcagagaaatctgggact

SEQ ID NO: 3353216 - DNA, 25 bp, Homo sapien
gcatgtaattgtaaagggaaagaaa

SEQ ID NO: 3353217 - DNA, 25 bp, Homo sapien
gaaattgttctacagctgttagtag

SEQ ID NO: 3353218 - DNA, 25 bp, Homo sapien
atatcgctaagtatctccatgaggc

SEQ ID NO: 3353219 - DNA, 25 bp, Homo sapien
tgcaaggttgctgaatatcgctaag

SEQ ID NO: 3353220 - DNA, 25 bp, Homo sapien
gcagagaccactccatttgcaaggt

SEQ ID NO: 3353221 - DNA, 25 bp, Homo sapien
ataataactagtatacgatgtgttt

SEQ ID NO: 3353222 - DNA, 25 bp, Homo sapien
aataactagtatacgatgtgtttgt

SEQ ID NO: 3353223 - DNA, 25 bp, Homo sapien
taataactagtatacgatgtgtttg

SEQ ID NO: 3353224 - DNA, 25 bp, Homo sapien
tggaccattgggacaattctgcaag

SEQ ID NO: 3353225 - DNA, 25 bp, Homo sapien
tgtgacatgtacacaagccagatac

SEQ ID NO: 3353226 - DNA, 25 bp, Homo sapien
gaaagactggtcgtggcttgaaaga

SEQ ID NO: 3353227 - DNA, 25 bp, Homo sapien
ggcttgaaagacacttgttcccagg

SEQ ID NO: 3353228 - DNA, 25 bp, Homo sapien
agccttctcaattaccattttctca

SEQ ID NO: 3353229 - DNA, 25 bp, Homo sapien
ttagtgtgttccttgatcagccttc

SEQ ID NO: 3353230 - DNA, 25 bp, Homo sapien
gccttctcaattaccattttctcac

SEQ ID NO: 3353231 - DNA, 25 bp, Homo sapien
gtgtgttccttgatcagccttctca

SEQ ID NO: 3353232 - DNA, 25 bp, Homo sapien
tgctccgtgatccttgtttcctggt

SEQ ID NO: 3353233 - DNA, 25 bp, Homo sapien
atgctccgtgatccttgtttcctgg

SEQ ID NO: 3353234 - DNA, 25 bp, Homo sapien
ccttcagagcgccatgaggtgacat

SEQ ID NO: 3353235 - DNA, 25 bp, Homo sapien
gggagaatttcccttcagagcgcca

SEQ ID NO: 3353236 - DNA, 25 bp, Homo sapien
cagagcgccatgaggtgacatggca

SEQ ID NO: 3353237 - DNA, 25 bp, Homo sapien
gaatttcccttcagagcgccatgag

SEQ ID NO: 3353238 - DNA, 25 bp, Homo sapien
cacaccggcatagaattaccaagag

SEQ ID NO: 3353239 - DNA, 25 bp, Homo sapien
tttaatggcgttggtgtttacctca

SEQ ID NO: 3353240 - DNA, 25 bp, Homo sapien
tcctcttcactcattaacagcagta

SEQ ID NO: 3353241 - DNA, 25 bp, Homo sapien
cagcagtattagtgggtctttttag

SEQ ID NO: 3353242 - DNA, 25 bp, Homo sapien
gcatgtcaaactgggatcatctatc

SEQ ID NO: 3353243 - DNA, 25 bp, Homo sapien
gtcaaactgggatcatctatctctg

SEQ ID NO: 3353244 - DNA, 25 bp, Homo sapien
caaactgggatcatctatctctgta

SEQ ID NO: 3353245 - DNA, 25 bp, Homo sapien
atgtcaaactgggatcatctatctc

SEQ ID NO: 3353246 - DNA, 25 bp, Homo sapien
cacacttatgagctgaataaacttc

SEQ ID NO: 3353247 - DNA, 25 bp, Homo sapien
tgcattcagtggactcagatgtaaa

SEQ ID NO: 3353248 - DNA, 25 bp, Homo sapien
cattcagtggactcagatgtaaaac

SEQ ID NO: 3353249 - DNA, 25 bp, Homo sapien
aactgcactgtctctttgagttcac

SEQ ID NO: 3353250 - DNA, 25 bp, Homo sapien
gcaccatctgatacctagatattcc

SEQ ID NO: 3353251 - DNA, 25 bp, Homo sapien
caccatctgatacctagatattccc

SEQ ID NO: 3353252 - DNA, 25 bp, Homo sapien
ggcaccatctgatacctagatattc

SEQ ID NO: 3353253 - DNA, 25 bp, Homo sapien
tggcaccatctgatacctagatatt

SEQ ID NO: 3353254 - DNA, 25 bp, Homo sapien
ttatggcggaaggcaaagggaaagc

SEQ ID NO: 3353255 - DNA, 25 bp, Homo sapien
tatggcggaaggcaaagggaaagca

SEQ ID NO: 3353256 - DNA, 25 bp, Homo sapien
attatggcggaaggcaaagggaaag

SEQ ID NO: 3353257 - DNA, 25 bp, Homo sapien
actactaatgagactgtcaaggttt

SEQ ID NO: 3353258 - DNA, 25 bp, Homo sapien
gagactgtcaaggtttggctttatg

SEQ ID NO: 3353259 - DNA, 25 bp, Homo sapien
atgagactgtcaaggtttggcttta

SEQ ID NO: 3353260 - DNA, 25 bp, Homo sapien
ctaatgagactgtcaaggtttggct

SEQ ID NO: 3353261 - DNA, 25 bp, Homo sapien
gcaaaatttcgctggcagtcttgtg

SEQ ID NO: 3353262 - DNA, 25 bp, Homo sapien
actctccgaacatcttgagtctgca

SEQ ID NO: 3353263 - DNA, 25 bp, Homo sapien
cagataggcgtccaaaaactgtgat

SEQ ID NO: 3353264 - DNA, 25 bp, Homo sapien
gatgattgtccaaactctccgaaca

SEQ ID NO: 3353265 - DNA, 25 bp, Homo sapien
tgcttcaagtcctggctcaaagtca

SEQ ID NO: 3353266 - DNA, 25 bp, Homo sapien
tctgcttcaagtcctggctcaaagt

SEQ ID NO: 3353267 - DNA, 25 bp, Homo sapien
agtgtctgcttcaagtcctggctca

SEQ ID NO: 3353268 - DNA, 25 bp, Homo sapien
cttcaagtcctggctcaaagtcaga

SEQ ID NO: 3353269 - DNA, 25 bp, Homo sapien
ctatctgatggccttgttgcgtcat

SEQ ID NO: 3353270 - DNA, 25 bp, Homo sapien
ggtgggaatctttcacatccttaaa

SEQ ID NO: 3353271 - DNA, 25 bp, Homo sapien
cttgggtgggaatctttcacatcct

SEQ ID NO: 3353272 - DNA, 25 bp, Homo sapien
gtttgggcctatctgatggccttgt

SEQ ID NO: 3353273 - DNA, 25 bp, Homo sapien
gaagttcttcttgtccagtaacact

SEQ ID NO: 3353274 - DNA, 25 bp, Homo sapien
tgaagttcttcttgtccagtaacac

SEQ ID NO: 3353275 - DNA, 25 bp, Homo sapien
aagttcttcttgtccagtaacactg

SEQ ID NO: 3353276 - DNA, 25 bp, Homo sapien
aatgaagttcttcttgtccagtaac

SEQ ID NO: 3353277 - DNA, 25 bp, Homo sapien
gatcagaagtggcttacataaggca

SEQ ID NO: 3353278 - DNA, 25 bp, Homo sapien
gaggttggccctcattctaattgca

SEQ ID NO: 3353279 - DNA, 25 bp, Homo sapien
tgtacgtaagaatctggagctcggg

SEQ ID NO: 3353280 - DNA, 25 bp, Homo sapien
tgaccctgaaaagaatggagccgtg

SEQ ID NO: 3353281 - DNA, 25 bp, Homo sapien
ctcaggacagtatgaggagcagcct

SEQ ID NO: 3353282 - DNA, 25 bp, Homo sapien
cagcctgtcgttttcggagacacca

SEQ ID NO: 3353283 - DNA, 25 bp, Homo sapien
taattctgagcgctcaggacagtat

SEQ ID NO: 3353284 - DNA, 25 bp, Homo sapien
cagtatgaggagcagcctgtcgttt

SEQ ID NO: 3353285 - DNA, 25 bp, Homo sapien
tctttcgaatatcatgggctccagc

SEQ ID NO: 3353286 - DNA, 25 bp, Homo sapien
tcttggattctttcgaatatcatgg

SEQ ID NO: 3353287 - DNA, 25 bp, Homo sapien
aaactctcatctctcctactaagct

SEQ ID NO: 3353288 - DNA, 25 bp, Homo sapien
tctccattcttctaaactctcatct

SEQ ID NO: 3353289 - DNA, 25 bp, Homo sapien
gttagcttcattctttgatgcctca

SEQ ID NO: 3353290 - DNA, 25 bp, Homo sapien
ttagttagcttcattctttgatgcc

SEQ ID NO: 3353291 - DNA, 25 bp, Homo sapien
agttagcttcattctttgatgcctc

SEQ ID NO: 3353292 - DNA, 25 bp, Homo sapien
ttagcttcattctttgatgcctcac

SEQ ID NO: 3353293 - DNA, 25 bp, Homo sapien
actgtttggctaacttcctgagact

SEQ ID NO: 3353294 - DNA, 25 bp, Homo sapien
aactgtttggctaacttcctgagac

SEQ ID NO: 3353295 - DNA, 25 bp, Homo sapien
tgcaaaggtgttagcagagagagaa

SEQ ID NO: 3353296 - DNA, 25 bp, Homo sapien
caaaggtgttagcagagagagaaga

SEQ ID NO: 3353297 - DNA, 25 bp, Homo sapien
aaaggtgttagcagagagagaagaa

SEQ ID NO: 3353298 - DNA, 25 bp, Homo sapien
ctgcaaaggtgttagcagagagaga

SEQ ID NO: 3353299 - DNA, 25 bp, Homo sapien
aagctgtacccttgcctcctatctg

SEQ ID NO: 3353300 - DNA, 25 bp, Homo sapien
ttcacagccagtttagttacggaac

SEQ ID NO: 3353301 - DNA, 25 bp, Homo sapien
cagacagaggttagactttgggatc

SEQ ID NO: 3353302 - DNA, 25 bp, Homo sapien
agactttgggatcgttgaaatgaaa

SEQ ID NO: 3353303 - DNA, 25 bp, Homo sapien
tagtatccacagaactgcagaaaaa

SEQ ID NO: 3353304 - DNA, 25 bp, Homo sapien
aagtaagggactgttagtatccaca

SEQ ID NO: 3353305 - DNA, 25 bp, Homo sapien
tgttagtatccacagaactgcagaa

SEQ ID NO: 3353306 - DNA, 25 bp, Homo sapien
ggactgttagtatccacagaactgc

SEQ ID NO: 3353307 - DNA, 25 bp, Homo sapien
cttggtgcatctgcggaccagcggc

SEQ ID NO: 3353308 - DNA, 25 bp, Homo sapien
ggcttggtgcatctgcggaccagcg

SEQ ID NO: 3353309 - DNA, 25 bp, Homo sapien
tggtgcatctgcggaccagcggcta

SEQ ID NO: 3353310 - DNA, 25 bp, Homo sapien
gtgcatctgcggaccagcggctagc

SEQ ID NO: 3353311 - DNA, 25 bp, Homo sapien
ggcttgtattaacttatattcctat

SEQ ID NO: 3353312 - DNA, 25 bp, Homo sapien
ttcctataagtagtcctctttctct

SEQ ID NO: 3353313 - DNA, 25 bp, Homo sapien
cttatattcctataagtagtcctct

SEQ ID NO: 3353314 - DNA, 25 bp, Homo sapien
cttctgtaaggcttgtattaactta

SEQ ID NO: 3353315 - DNA, 25 bp, Homo sapien
ccagcagcctggtcatttctattct

SEQ ID NO: 3353316 - DNA, 25 bp, Homo sapien
agaattgacttcaggagtggcagcc

SEQ ID NO: 3353317 - DNA, 25 bp, Homo sapien
tcttttctccatgggtacagggtga

SEQ ID NO: 3353318 - DNA, 25 bp, Homo sapien
tctttgccacaactaataaaagctg

SEQ ID NO: 3353319 - DNA, 25 bp, Homo sapien
aacagttgaccagtgtgatgaatcc

SEQ ID NO: 3353320 - DNA, 25 bp, Homo sapien
gaccagtgtgatgaatcctggaagc

SEQ ID NO: 3353321 - DNA, 25 bp, Homo sapien
cagttgaccagtgtgatgaatcctg

SEQ ID NO: 3353322 - DNA, 25 bp, Homo sapien
gttgaccagtgtgatgaatcctgga

SEQ ID NO: 3353323 - DNA, 25 bp, Homo sapien
gacctaatatcagcaaacggagttg

SEQ ID NO: 3353324 - DNA, 25 bp, Homo sapien
gaaaattcagaccatcccaccagtt

SEQ ID NO: 3353325 - DNA, 25 bp, Homo sapien
gaggctctgactggacccttggtca

SEQ ID NO: 3353326 - DNA, 25 bp, Homo sapien
caccagtttgcggtgaagtctaagc

SEQ ID NO: 3353327 - DNA, 25 bp, Homo sapien
tcggaactaccaggctttcatcatc

SEQ ID NO: 3353328 - DNA, 25 bp, Homo sapien
ttcggaactaccaggctttcatcat

SEQ ID NO: 3353329 - DNA, 25 bp, Homo sapien
gattcggaactaccaggctttcatc

SEQ ID NO: 3353330 - DNA, 25 bp, Homo sapien
tggattcggaactaccaggctttca

SEQ ID NO: 3353331 - DNA, 25 bp, Homo sapien
ggatatgtgtcagcactctctgcaa

SEQ ID NO: 3353332 - DNA, 25 bp, Homo sapien
attaattgtgttgcatcctgtattc

SEQ ID NO: 3353333 - DNA, 25 bp, Homo sapien
gtattccagataacaatgccagaaa

SEQ ID NO: 3353334 - DNA, 25 bp, Homo sapien
tcatcttttggatatgtgtcagcac

SEQ ID NO: 3353335 - DNA, 25 bp, Homo sapien
tcaagtgggaggcaaatccctaagc

SEQ ID NO: 3353336 - DNA, 25 bp, Homo sapien
agtgggaggcaaatccctaagcatt

SEQ ID NO: 3353337 - DNA, 25 bp, Homo sapien
tttctcaagtgggaggcaaatccct

SEQ ID NO: 3353338 - DNA, 25 bp, Homo sapien
tctcaagtgggaggcaaatccctaa

SEQ ID NO: 3353339 - DNA, 25 bp, Homo sapien
aaggatgtggatgccgagccatgac

SEQ ID NO: 3353340 - DNA, 25 bp, Homo sapien
tgccgagccatgacgaggcctgctg

SEQ ID NO: 3353341 - DNA, 25 bp, Homo sapien
tggatgccgagccatgacgaggcct

SEQ ID NO: 3353342 - DNA, 25 bp, Homo sapien
cgagccatgacgaggcctgctggct

SEQ ID NO: 3353343 - DNA, 25 bp, Homo sapien
ctgtgaataggaacatgctcacgga

SEQ ID NO: 3353344 - DNA, 25 bp, Homo sapien
gaataggaacatgctcacggaggtc

SEQ ID NO: 3353345 - DNA, 25 bp, Homo sapien
aacatgctcacggaggtcacctttc

SEQ ID NO: 3353346 - DNA, 25 bp, Homo sapien
taggaacatgctcacggaggtcacc

SEQ ID NO: 3353347 - DNA, 25 bp, Homo sapien
ttgataagccgtaggaaagcagagt

SEQ ID NO: 3353348 - DNA, 25 bp, Homo sapien
ctttgataagccgtaggaaagcaga

SEQ ID NO: 3353349 - DNA, 25 bp, Homo sapien
tttgataagccgtaggaaagcagag

SEQ ID NO: 3353350 - DNA, 25 bp, Homo sapien
tctgccatctgtttattggggatac

SEQ ID NO: 3353351 - DNA, 25 bp, Homo sapien
gtctctgccatctgtttattgggga

SEQ ID NO: 3353352 - DNA, 25 bp, Homo sapien
tcagtctctgccatctgtttattgg

SEQ ID NO: 3353353 - DNA, 25 bp, Homo sapien
cagtctctgccatctgtttattggg

SEQ ID NO: 3353354 - DNA, 25 bp, Homo sapien
tgctctgccaaactcacagtactac

SEQ ID NO: 3353355 - DNA, 25 bp, Homo sapien
ctgctctgccaaactcacagtacta

SEQ ID NO: 3353356 - DNA, 25 bp, Homo sapien
tgtggaagggtacagaaggaacctc

SEQ ID NO: 3353357 - DNA, 25 bp, Homo sapien
aattcactactagctgcttcttgga

SEQ ID NO: 3353358 - DNA, 25 bp, Homo sapien
ggaacctcaagctggacgttgattt

SEQ ID NO: 3353359 - DNA, 25 bp, Homo sapien
aagaggtaacgcagatggagagtac

SEQ ID NO: 3353360 - DNA, 25 bp, Homo sapien
cgcccctcggcgagacgcggcgcat

SEQ ID NO: 3353361 - DNA, 25 bp, Homo sapien
ccagcagcccggcactccgacacac

SEQ ID NO: 3353362 - DNA, 25 bp, Homo sapien
ggcactccgacacactccgcgcaca

SEQ ID NO: 3353363 - DNA, 25 bp, Homo sapien
cacacgcgcccctcggcgagacgcg

SEQ ID NO: 3353364 - DNA, 25 bp, Homo sapien
tgcgccgccaggaggcttcccggga

SEQ ID NO: 3353365 - DNA, 25 bp, Homo sapien
cgagcctgagtcgtggccgctgcgc

SEQ ID NO: 3353366 - DNA, 25 bp, Homo sapien
gggccggccttttggcagcgcggct

SEQ ID NO: 3353367 - DNA, 25 bp, Homo sapien
cagcgcggctgccagttaattttct

SEQ ID NO: 3353368 - DNA, 25 bp, Homo sapien
cgagatcgcattcagagcccagaag

SEQ ID NO: 3353369 - DNA, 25 bp, Homo sapien
gcgttttgcgcccaactggtaagtg

SEQ ID NO: 3353370 - DNA, 25 bp, Homo sapien
gaagttgcaagctgggaataagcga

SEQ ID NO: 3353371 - DNA, 25 bp, Homo sapien
gaataagcgagatctgaaagacccc

SEQ ID NO: 3353372 - DNA, 25 bp, Homo sapien
gatacttccccataaggatcttgta

SEQ ID NO: 3353373 - DNA, 25 bp, Homo sapien
cagatacttccccataaggatcttg

SEQ ID NO: 3353374 - DNA, 25 bp, Homo sapien
tacttccccataaggatcttgtacc

SEQ ID NO: 3353375 - DNA, 25 bp, Homo sapien
agatacttccccataaggatcttgt

SEQ ID NO: 3353376 - DNA, 25 bp, Homo sapien
cagcttctgaaggtgatttgatgtg

SEQ ID NO: 3353377 - DNA, 25 bp, Homo sapien
ttgcaaacgtaaagcaaggctgcat

SEQ ID NO: 3353378 - DNA, 25 bp, Homo sapien
tccgtccactaaggtagttctctgg

SEQ ID NO: 3353379 - DNA, 25 bp, Homo sapien
ttatccaatttgcaaacgtaaagca

SEQ ID NO: 3353380 - DNA, 25 bp, Homo sapien
ttacccagcaatcccggaagcaatt

SEQ ID NO: 3353381 - DNA, 25 bp, Homo sapien
accagaggcagttcttacccagcaa

SEQ ID NO: 3353382 - DNA, 25 bp, Homo sapien
agttcttacccagcaatcccggaag

SEQ ID NO: 3353383 - DNA, 25 bp, Homo sapien
cagcaatcccggaagcaattttctt

SEQ ID NO: 3353384 - DNA, 25 bp, Homo sapien
cctggaggtttcaagcaaaggagct

SEQ ID NO: 3353385 - DNA, 25 bp, Homo sapien
tagatagaggttcataatggaatag

SEQ ID NO: 3353386 - DNA, 25 bp, Homo sapien
tgagcagtttgcagtagctactaga

SEQ ID NO: 3353387 - DNA, 25 bp, Homo sapien
gatagaggttcataatggaatagca

SEQ ID NO: 3353388 - DNA, 25 bp, Homo sapien
gagagtaagagaccggccagttagt

SEQ ID NO: 3353389 - DNA, 25 bp, Homo sapien
gagaccggccagttagtcctaataa

SEQ ID NO: 3353390 - DNA, 25 bp, Homo sapien
tttgtctggagagtaagagaccggc

SEQ ID NO: 3353391 - DNA, 25 bp, Homo sapien
taagagaccggccagttagtcctaa

SEQ ID NO: 3353392 - DNA, 25 bp, Homo sapien
caattccatagagtcgaagacacca

SEQ ID NO: 3353393 - DNA, 25 bp, Homo sapien
cattgtatttcagtggacaggttcc

SEQ ID NO: 3353394 - DNA, 25 bp, Homo sapien
aagacaccaataggagctgtggccc

SEQ ID NO: 3353395 - DNA, 25 bp, Homo sapien
gctgtggcccctttgcctagtttga

SEQ ID NO: 3353396 - DNA, 25 bp, Homo sapien
tatcatctcgatcttagtatatatg

SEQ ID NO: 3353397 - DNA, 25 bp, Homo sapien
catctcgatcttagtatatatgagc

SEQ ID NO: 3353398 - DNA, 25 bp, Homo sapien
tctcgatcttagtatatatgagctg

SEQ ID NO: 3353399 - DNA, 25 bp, Homo sapien
ctctgtatcatctcgatcttagtat

SEQ ID NO: 3353400 - DNA, 25 bp, Homo sapien
tttcgtgttgcatatttacctgcca

SEQ ID NO: 3353401 - DNA, 25 bp, Homo sapien
taaacatattcttagggaatcactt

SEQ ID NO: 3353402 - DNA, 25 bp, Homo sapien
tcaaacaacacagaggctattaaag

SEQ ID NO: 3353403 - DNA, 25 bp, Homo sapien
ttttattacaaaatcagtggatgct

SEQ ID NO: 3353404 - DNA, 25 bp, Homo sapien
caaaagcataaagtgtggaccagag

SEQ ID NO: 3353405 - DNA, 25 bp, Homo sapien
gaaaatagtcatccctactgggtag

SEQ ID NO: 3353406 - DNA, 25 bp, Homo sapien
gggtcctaattctgcagtacgtggc

SEQ ID NO: 3353407 - DNA, 25 bp, Homo sapien
tggctatgcgggtatgaactcttca

SEQ ID NO: 3353408 - DNA, 25 bp, Homo sapien
atatcatgtgtacaaagagtttccg

SEQ ID NO: 3353409 - DNA, 25 bp, Homo sapien
acttgtggcatatttcttgtcagtt

SEQ ID NO: 3353410 - DNA, 25 bp, Homo sapien
tatcatgtgtacaaagagtttccga

SEQ ID NO: 3353411 - DNA, 25 bp, Homo sapien
gtggcatatttcttgtcagttctct

SEQ ID NO: 3353412 - DNA, 25 bp, Homo sapien
aaggcacatccatgcatctcaggcg

SEQ ID NO: 3353413 - DNA, 25 bp, Homo sapien
gtgttccccacgttgcattcagaag

SEQ ID NO: 3353414 - DNA, 25 bp, Homo sapien
gaatcatgcaaacttggtgaaccat

SEQ ID NO: 3353415 - DNA, 25 bp, Homo sapien
ctcaggcgtgtaggttcttcagcat

SEQ ID NO: 3353416 - DNA, 25 bp, Homo sapien
tttgttggtattttagtctgcttgg

SEQ ID NO: 3353417 - DNA, 25 bp, Homo sapien
ctgtggatatgagtttgttggtatt

SEQ ID NO: 3353418 - DNA, 25 bp, Homo sapien
ggtattttagtctgcttggaaacag

SEQ ID NO: 3353419 - DNA, 25 bp, Homo sapien
ttggtattttagtctgcttggaaac

SEQ ID NO: 3353420 - DNA, 25 bp, Homo sapien
ctactctgagtgagttaagaacctc

SEQ ID NO: 3353421 - DNA, 25 bp, Homo sapien
caggaggtgggacaagctgacttct

SEQ ID NO: 3353422 - DNA, 25 bp, Homo sapien
agatgctgccctggtaccacagcag

SEQ ID NO: 3353423 - DNA, 25 bp, Homo sapien
ggtgggacaagctgacttctactct

SEQ ID NO: 3353424 - DNA, 25 bp, Homo sapien
gacagcatgaacaccagtgcatgga

SEQ ID NO: 3353425 - DNA, 25 bp, Homo sapien
acagcatgaacaccagtgcatggag

SEQ ID NO: 3353426 - DNA, 25 bp, Homo sapien
cagcatgaacaccagtgcatggagc

SEQ ID NO: 3353427 - DNA, 25 bp, Homo sapien
tttcatctctcccaaatgaggccat

SEQ ID NO: 3353428 - DNA, 25 bp, Homo sapien
ttcatctctcccaaatgaggccatg

SEQ ID NO: 3353429 - DNA, 25 bp, Homo sapien
caaatctactctttttacttgaagg

SEQ ID NO: 3353430 - DNA, 25 bp, Homo sapien
caagcacaggcagacatccaaatct

SEQ ID NO: 3353431 - DNA, 25 bp, Homo sapien
tacttgaagggaaacagtgctatct

SEQ ID NO: 3353432 - DNA, 25 bp, Homo sapien
aggcagacatccaaatctactcttt

SEQ ID NO: 3353433 - DNA, 25 bp, Homo sapien
tgattccctcaaggcgactctcctt

SEQ ID NO: 3353434 - DNA, 25 bp, Homo sapien
tgtccacaatccaggtataagtccc

SEQ ID NO: 3353435 - DNA, 25 bp, Homo sapien
cttggttgtagctttggggaccctg

SEQ ID NO: 3353436 - DNA, 25 bp, Homo sapien
ggaccctggatgtttgaaagtttca

SEQ ID NO: 3353437 - DNA, 25 bp, Homo sapien
aaaataacccactgagtgtcaggcc

SEQ ID NO: 3353438 - DNA, 25 bp, Homo sapien
tctgaacagatttccggcaggagct

SEQ ID NO: 3353439 - DNA, 25 bp, Homo sapien
caaaatcctggtgtctgaagaagtc

SEQ ID NO: 3353440 - DNA, 25 bp, Homo sapien
tcgtggcaagccctagaaatagtct

SEQ ID NO: 3353441 - DNA, 25 bp, Homo sapien
gcacttatttcaagagatccggata

SEQ ID NO: 3353442 - DNA, 25 bp, Homo sapien
tgtttagccctagatctctttgaga

SEQ ID NO: 3353443 - DNA, 25 bp, Homo sapien
aaacgtatggcactttttcagcact

SEQ ID NO: 3353444 - DNA, 25 bp, Homo sapien
cgttctttgaaagtgctcctggtac

SEQ ID NO: 3353445 - DNA, 25 bp, Homo sapien
tgagtgactgctacaggaaacctac

SEQ ID NO: 3353446 - DNA, 25 bp, Homo sapien
gcagagtcctgcacttactatgtgt

SEQ ID NO: 3353447 - DNA, 25 bp, Homo sapien
taagcttttcgtcctaattgtcaca

SEQ ID NO: 3353448 - DNA, 25 bp, Homo sapien
gctgtgatgttcctagttcccaaaa

SEQ ID NO: 3353449 - DNA, 25 bp, Homo sapien
aactttccttggcaaaccgatagca

SEQ ID NO: 3353450 - DNA, 25 bp, Homo sapien
gcaaaccgatagcatcagaggaaga

SEQ ID NO: 3353451 - DNA, 25 bp, Homo sapien
ggaacataaattagtcttagtatat

SEQ ID NO: 3353452 - DNA, 25 bp, Homo sapien
cacattccaactgggtgcaacagtt

SEQ ID NO: 3353453 - DNA, 25 bp, Homo sapien
ttctagaatgctctggccgacttag

SEQ ID NO: 3353454 - DNA, 25 bp, Homo sapien
gatgcgtttttaaggtgatttctag

SEQ ID NO: 3353455 - DNA, 25 bp, Homo sapien
taatgcgttccagacgtctgcacgc

SEQ ID NO: 3353456 - DNA, 25 bp, Homo sapien
ttgtcattgtataaactccagtagg

SEQ ID NO: 3353457 - DNA, 25 bp, Homo sapien
tcgactagactttgagaccctgaga

SEQ ID NO: 3353458 - DNA, 25 bp, Homo sapien
tccaaaccatgcttaatattcacgt

SEQ ID NO: 3353459 - DNA, 25 bp, Homo sapien
tggtagccagatttgacattagact

SEQ ID NO: 3353460 - DNA, 25 bp, Homo sapien
gaccctgagaaggttttcaatccaa

SEQ ID NO: 3353461 - DNA, 25 bp, Homo sapien
ttagcatgtgtctgcgaaccctagc

SEQ ID NO: 3353462 - DNA, 25 bp, Homo sapien
taatctggcccaagtgtgactgaga

SEQ ID NO: 3353463 - DNA, 25 bp, Homo sapien
cagtagtagctgagtattatacaaa

SEQ ID NO: 3353464 - DNA, 25 bp, Homo sapien
ctcctagttttagctcagtagtagc

SEQ ID NO: 3353465 - DNA, 25 bp, Homo sapien
tttctccatctccagaatatgtctc

SEQ ID NO: 3353466 - DNA, 25 bp, Homo sapien
ttctccatctccagaatatgtctct

SEQ ID NO: 3353467 - DNA, 25 bp, Homo sapien
tctccatctccagaatatgtctctc

SEQ ID NO: 3353468 - DNA, 25 bp, Homo sapien
ctccatctccagaatatgtctctcc

SEQ ID NO: 3353469 - DNA, 25 bp, Homo sapien
tgcggttctgacttgtgaaacagga

SEQ ID NO: 3353470 - DNA, 25 bp, Homo sapien
ggattccatgtggtttttgaaactg

SEQ ID NO: 3353471 - DNA, 25 bp, Homo sapien
aacaggatcagggatggtgccactg

SEQ ID NO: 3353472 - DNA, 25 bp, Homo sapien
gaagagaacagcgtgtgggagaagt

SEQ ID NO: 3353473 - DNA, 25 bp, Homo sapien
aagctgaagatgcaagaagagaaca

SEQ ID NO: 3353474 - DNA, 25 bp, Homo sapien
tgcagctgtgctgaggtctcaaaga

SEQ ID NO: 3353475 - DNA, 25 bp, Homo sapien
ggtctcaaagagcaagggttccagg

SEQ ID NO: 3353476 - DNA, 25 bp, Homo sapien
ccctgtgccgattttgtaggtggga

SEQ ID NO: 3353477 - DNA, 25 bp, Homo sapien
gctttgctctgttacatgactcggg

SEQ ID NO: 3353478 - DNA, 25 bp, Homo sapien
gggcttacctgcatttcacgtgaga

SEQ ID NO: 3353479 - DNA, 25 bp, Homo sapien
tccttcctcttgtcaacgtgttaca

SEQ ID NO: 3353480 - DNA, 25 bp, Homo sapien
taaaacctcagcgttataattggtc

SEQ ID NO: 3353481 - DNA, 25 bp, Homo sapien
catgactgatagttatccatgctca

SEQ ID NO: 3353482 - DNA, 25 bp, Homo sapien
cttcctccccatgactgatagttat

SEQ ID NO: 3353483 - DNA, 25 bp, Homo sapien
cctaaatctttggaggcgacagctt

SEQ ID NO: 3353484 - DNA, 25 bp, Homo sapien
tctttggaggcgacagcttcctccc

SEQ ID NO: 3353485 - DNA, 25 bp, Homo sapien
cctgtctatggaagcggagtcttct

SEQ ID NO: 3353486 - DNA, 25 bp, Homo sapien
tctatggaagcggagtcttctctca

SEQ ID NO: 3353487 - DNA, 25 bp, Homo sapien
ggaagcggagtcttctctcactgcc

SEQ ID NO: 3353488 - DNA, 25 bp, Homo sapien
atcctgtctatggaagcggagtctt

SEQ ID NO: 3353489 - DNA, 25 bp, Homo sapien
tagcaccgacggtgccccagacatg

SEQ ID NO: 3353490 - DNA, 25 bp, Homo sapien
ctgtcaatgggtagcaccgacggtg

SEQ ID NO: 3353491 - DNA, 25 bp, Homo sapien
cagacatgctgaccatgtgtggatg

SEQ ID NO: 3353492 - DNA, 25 bp, Homo sapien
ccccagacatgctgaccatgtgtgg

SEQ ID NO: 3353493 - DNA, 25 bp, Homo sapien
gaaatggagttgatatggtggagaa

SEQ ID NO: 3353494 - DNA, 25 bp, Homo sapien
gtggagaaggatctgttgacaccag

SEQ ID NO: 3353495 - DNA, 25 bp, Homo sapien
gagaaggatctgttgacaccagacc

SEQ ID NO: 3353496 - DNA, 25 bp, Homo sapien
gaaggatctgttgacaccagaccct

SEQ ID NO: 3353497 - DNA, 25 bp, Homo sapien
gactactgtactgattttcaggaac

SEQ ID NO: 3353498 - DNA, 25 bp, Homo sapien
gattgcgctctctcatatggtccct

SEQ ID NO: 3353499 - DNA, 25 bp, Homo sapien
aagccatttgtcagggtaaatctga

SEQ ID NO: 3353500 - DNA, 25 bp, Homo sapien
ggtcccttgccttcagccattttca

SEQ ID NO: 3353501 - DNA, 25 bp, Homo sapien
tttacgggtggccacaatcaagaga

SEQ ID NO: 3353502 - DNA, 25 bp, Homo sapien
agagatacgcttttctttacgggtg

SEQ ID NO: 3353503 - DNA, 25 bp, Homo sapien
tcctggtatgaactccttgtgcttc

SEQ ID NO: 3353504 - DNA, 25 bp, Homo sapien
cattaatcctgtcttattcaaaagg

SEQ ID NO: 3353505 - DNA, 25 bp, Homo sapien
gtgaagcaacctagttactactctg

SEQ ID NO: 3353506 - DNA, 25 bp, Homo sapien
ctaagagtgaagcaacctagttact

SEQ ID NO: 3353507 - DNA, 25 bp, Homo sapien
aacctagttactactctgggctctg

SEQ ID NO: 3353508 - DNA, 25 bp, Homo sapien
ttgagaggctaagagtgaagcaacc

SEQ ID NO: 3353509 - DNA, 25 bp, Homo sapien
ggatgagatgatcccggttccttcc

SEQ ID NO: 3353510 - DNA, 25 bp, Homo sapien
tactcagctggatgagatgatcccg

SEQ ID NO: 3353511 - DNA, 25 bp, Homo sapien
agatgatcccggttccttccatcca

SEQ ID NO: 3353512 - DNA, 25 bp, Homo sapien
cagctggatgagatgatcccggttc

SEQ ID NO: 3353513 - DNA, 25 bp, Homo sapien
ttcctgtgtatctcggcgcacagat

SEQ ID NO: 3353514 - DNA, 25 bp, Homo sapien
tccccaaggcacttctcttcaaggt

SEQ ID NO: 3353515 - DNA, 25 bp, Homo sapien
tctcttcaaggtaaacataaactta

SEQ ID NO: 3353516 - DNA, 25 bp, Homo sapien
aaatgggcactggtacaggctgcca

SEQ ID NO: 3353517 - DNA, 25 bp, Homo sapien
gcgtttttgactgataaccaaatca

SEQ ID NO: 3353518 - DNA, 25 bp, Homo sapien
tcaacccagcaagcataagctatga

SEQ ID NO: 3353519 - DNA, 25 bp, Homo sapien
cataagctatgatgggactgacaca

SEQ ID NO: 3353520 - DNA, 25 bp, Homo sapien
atgggactgacacaagggatggcac

SEQ ID NO: 3353521 - DNA, 25 bp, Homo sapien
cagcaagcataagctatgatgggac

SEQ ID NO: 3353522 - DNA, 25 bp, Homo sapien
caggcctgcctttgatgtgttacaa

SEQ ID NO: 3353523 - DNA, 25 bp, Homo sapien
ccggtttcagctgggattgagatca

SEQ ID NO: 3353524 - DNA, 25 bp, Homo sapien
caggtatccacacttgagagcttaa

SEQ ID NO: 3353525 - DNA, 25 bp, Homo sapien
caattctccgtgaaaagattaggga

SEQ ID NO: 3353526 - DNA, 25 bp, Homo sapien
ttcatagggcagtacatatttgtga

SEQ ID NO: 3353527 - DNA, 25 bp, Homo sapien
catagggcagtacatatttgtgatt

SEQ ID NO: 3353528 - DNA, 25 bp, Homo sapien
ttttcatagggcagtacatatttgt

SEQ ID NO: 3353529 - DNA, 25 bp, Homo sapien
ctctttttcatagggcagtacatat

SEQ ID NO: 3353530 - DNA, 25 bp, Homo sapien
aatcaggtaccatgttgctctggac

SEQ ID NO: 3353531 - DNA, 25 bp, Homo sapien
tgctctggacttcttagggtaacat

SEQ ID NO: 3353532 - DNA, 25 bp, Homo sapien
taacatacgaagaaagaatggctcg

SEQ ID NO: 3353533 - DNA, 25 bp, Homo sapien
tggctcgtcgactgctaggtgctga

SEQ ID NO: 3353534 - DNA, 25 bp, Homo sapien
aattttggctagactgtcagtccta

SEQ ID NO: 3353535 - DNA, 25 bp, Homo sapien
aggaaattgtaggatccaccgtaat

SEQ ID NO: 3353536 - DNA, 25 bp, Homo sapien
ggctagactgtcagtcctatttttt

SEQ ID NO: 3353537 - DNA, 25 bp, Homo sapien
aaattgtaggatccaccgtaatcac

SEQ ID NO: 3353538 - DNA, 25 bp, Homo sapien
cagggagagacgtgacactttgtca

SEQ ID NO: 3353539 - DNA, 25 bp, Homo sapien
gcctgtggaaaatggaatggcacca

SEQ ID NO: 3353540 - DNA, 25 bp, Homo sapien
caggaatacaaagtctccagctgtg

SEQ ID NO: 3353541 - DNA, 25 bp, Homo sapien
tgtggagagatgtaccaccctgcat

SEQ ID NO: 3353542 - DNA, 25 bp, Homo sapien
gatttaccctgttctcgtgcttgtg

SEQ ID NO: 3353543 - DNA, 25 bp, Homo sapien
tgttctagttgagccataggaagac

SEQ ID NO: 3353544 - DNA, 25 bp, Homo sapien
taaaggtctactttggcatatgcca

SEQ ID NO: 3353545 - DNA, 25 bp, Homo sapien
tcctcccttgacatgcttgttctag

SEQ ID NO: 3353546 - DNA, 25 bp, Homo sapien
gtaaaactgcaattgtgagtccgct

SEQ ID NO: 3353547 - DNA, 25 bp, Homo sapien
tacgtatttgccaacactgggaacc

SEQ ID NO: 3353548 - DNA, 25 bp, Homo sapien
gagtccgcttagtgtcttcctcaaa

SEQ ID NO: 3353549 - DNA, 25 bp, Homo sapien
gactcagtgctcatggccaatggca

SEQ ID NO: 3353550 - DNA, 25 bp, Homo sapien
tctaaaggatgcctcaaaactggtt

SEQ ID NO: 3353551 - DNA, 25 bp, Homo sapien
gcccggtgctttacaagtattaatg

SEQ ID NO: 3353552 - DNA, 25 bp, Homo sapien
aattatatccatagtgagtgctaca

SEQ ID NO: 3353553 - DNA, 25 bp, Homo sapien
ttggcttcatgcaaaacacaatgct

SEQ ID NO: 3353554 - DNA, 25 bp, Homo sapien
gctggtagatgaccatgaaaatgga

SEQ ID NO: 3353555 - DNA, 25 bp, Homo sapien
ggccagccactaacatttaattagt

SEQ ID NO: 3353556 - DNA, 25 bp, Homo sapien
agaattggctacagctggtagatga

SEQ ID NO: 3353557 - DNA, 25 bp, Homo sapien
gcccggccagccactaacatttaat

SEQ ID NO: 3353558 - DNA, 25 bp, Homo sapien
taacgttcatccatttctcaaagga

SEQ ID NO: 3353559 - DNA, 25 bp, Homo sapien
ccttgggtaggcaggcttcattagg

SEQ ID NO: 3353560 - DNA, 25 bp, Homo sapien
tacctacaaaattatgtgtgtaaga

SEQ ID NO: 3353561 - DNA, 25 bp, Homo sapien
tcattaggtgtttgaactctgaaat

SEQ ID NO: 3353562 - DNA, 25 bp, Homo sapien
caggtgccttgcatctatctagaca

SEQ ID NO: 3353563 - DNA, 25 bp, Homo sapien
tctaccatggatgtgttcaggtgcc

SEQ ID NO: 3353564 - DNA, 25 bp, Homo sapien
tagtgttaaagcatccacatccagc

SEQ ID NO: 3353565 - DNA, 25 bp, Homo sapien
caaaggattccctgtgctgcagtgt

SEQ ID NO: 3353566 - DNA, 25 bp, Homo sapien
taatgagggagttgtaccacaaaca

SEQ ID NO: 3353567 - DNA, 25 bp, Homo sapien
cagtgaaccaagtgcaatatgtaag

SEQ ID NO: 3353568 - DNA, 25 bp, Homo sapien
acaagatataggtgctgtgtagcct

SEQ ID NO: 3353569 - DNA, 25 bp, Homo sapien
ggaaatcaattgttcacaggtaact

SEQ ID NO: 3353570 - DNA, 25 bp, Homo sapien
ttcacaagtcaaggaacccagggcc

SEQ ID NO: 3353571 - DNA, 25 bp, Homo sapien
gagcacacatgctgtggagattgca

SEQ ID NO: 3353572 - DNA, 25 bp, Homo sapien
gagcacacatgctgtggagcacaca

SEQ ID NO: 3353573 - DNA, 25 bp, Homo sapien
tgtaaaggcatctcggtaaagactg

SEQ ID NO: 3353574 - DNA, 25 bp, Homo sapien
tcattttgtctaacataagaatagc

SEQ ID NO: 3353575 - DNA, 25 bp, Homo sapien
gcactgaccaactgaaaggcaagag

SEQ ID NO: 3353576 - DNA, 25 bp, Homo sapien
tgcggtggcatctatttcaacttag

SEQ ID NO: 3353577 - DNA, 25 bp, Homo sapien
tgatcacgtattacaagacggtggt

SEQ ID NO: 3353578 - DNA, 25 bp, Homo sapien
gggacagccaactttagagcctaga

SEQ ID NO: 3353579 - DNA, 25 bp, Homo sapien
ggggaggggagaacaagaggagagc

SEQ ID NO: 3353580 - DNA, 25 bp, Homo sapien
aggggagaacaagaggagagcacag

SEQ ID NO: 3353581 - DNA, 25 bp, Homo sapien
gaggggaggggagaacaagaggaga

SEQ ID NO: 3353582 - DNA, 25 bp, Homo sapien
ggaggggagaacaagaggagagcac

SEQ ID NO: 3353583 - DNA, 25 bp, Homo sapien
ggaaaatacacaaccatatattaca

SEQ ID NO: 3353584 - DNA, 25 bp, Homo sapien
taaaaattaggtaatctctgaaaga

SEQ ID NO: 3353585 - DNA, 25 bp, Homo sapien
taggtaatctctgaaagagtacagc

SEQ ID NO: 3353586 - DNA, 25 bp, Homo sapien
ttgaaagcgaaatattttatggaaa

SEQ ID NO: 3353587 - DNA, 25 bp, Homo sapien
gtcattcctaatgcctttgctccca

SEQ ID NO: 3353588 - DNA, 25 bp, Homo sapien
cctttgtgtatcatgtgaagaacca

SEQ ID NO: 3353589 - DNA, 25 bp, Homo sapien
tgttttatgtcctcatcaatccaca

SEQ ID NO: 3353590 - DNA, 25 bp, Homo sapien
tatgttctaccaagcattttatttt

SEQ ID NO: 3353591 - DNA, 25 bp, Homo sapien
cagcccactttatgataggattatt

SEQ ID NO: 3353592 - DNA, 25 bp, Homo sapien
ctcagcccactttatgataggatta

SEQ ID NO: 3353593 - DNA, 25 bp, Homo sapien
tcagcccactttatgataggattat

SEQ ID NO: 3353594 - DNA, 25 bp, Homo sapien
actcaggacctctagttagctaggg

SEQ ID NO: 3353595 - DNA, 25 bp, Homo sapien
ctgtagtggcttgagttcattggcc

SEQ ID NO: 3353596 - DNA, 25 bp, Homo sapien
gtgaagttgtcacaaggatagactc

SEQ ID NO: 3353597 - DNA, 25 bp, Homo sapien
gcaggtggtagaattacctgttgta

SEQ ID NO: 3353598 - DNA, 25 bp, Homo sapien
tattcccattcgcagtggctctgca

SEQ ID NO: 3353599 - DNA, 25 bp, Homo sapien
aaagagcctggttgcttcactggta

SEQ ID NO: 3353600 - DNA, 25 bp, Homo sapien
tcttcaccatgtagggcctctggct

SEQ ID NO: 3353601 - DNA, 25 bp, Homo sapien
tgccctatgaagaggctagtctgtc

SEQ ID NO: 3353602 - DNA, 25 bp, Homo sapien
tgctaagcacagaacccttatgggc

SEQ ID NO: 3353603 - DNA, 25 bp, Homo sapien
tatgggctcataggagtcagcaaac

SEQ ID NO: 3353604 - DNA, 25 bp, Homo sapien
aattctactaggtcagtgggagtgg

SEQ ID NO: 3353605 - DNA, 25 bp, Homo sapien
caactcttgaatatgcagcgtagtc

SEQ ID NO: 3353606 - DNA, 25 bp, Homo sapien
tcaagatctctccatatattccacc

SEQ ID NO: 3353607 - DNA, 25 bp, Homo sapien
caagatctctccatatattccacca

SEQ ID NO: 3353608 - DNA, 25 bp, Homo sapien
atatattccaccagtttgagatagg

SEQ ID NO: 3353609 - DNA, 25 bp, Homo sapien
tccatatattccaccagtttgagat

SEQ ID NO: 3353610 - DNA, 25 bp, Homo sapien
aatcagtagccaaagtgtgcccttg

SEQ ID NO: 3353611 - DNA, 25 bp, Homo sapien
tcaagaatgagtcaaatgcgccaca

SEQ ID NO: 3353612 - DNA, 25 bp, Homo sapien
tgtgcctagacttggtaatgcctga

SEQ ID NO: 3353613 - DNA, 25 bp, Homo sapien
gatttcagagcataaggtgtccaga

SEQ ID NO: 3353614 - DNA, 25 bp, Homo sapien
gtctttcgtcatatctgtgtgtaca

SEQ ID NO: 3353615 - DNA, 25 bp, Homo sapien
ttctaaaagaaacacaaccgcatgt

SEQ ID NO: 3353616 - DNA, 25 bp, Homo sapien
gccctgtaatatacggtgattctaa

SEQ ID NO: 3353617 - DNA, 25 bp, Homo sapien
cagaacatgccctgtaatatacggt

SEQ ID NO: 3353618 - DNA, 25 bp, Homo sapien
tacacactaagacatctgctgaatt

SEQ ID NO: 3353619 - DNA, 25 bp, Homo sapien
gtacacactaagacatctgctgaat

SEQ ID NO: 3353620 - DNA, 25 bp, Homo sapien
ctctggggcacaggtgatcctcttg

SEQ ID NO: 3353621 - DNA, 25 bp, Homo sapien
ttttgtagagttgggccaggctgat

SEQ ID NO: 3353622 - DNA, 25 bp, Homo sapien
gcagcctggacctctggggcacagg

SEQ ID NO: 3353623 - DNA, 25 bp, Homo sapien
tggacctctggggcacaggtgatcc

SEQ ID NO: 3353624 - DNA, 25 bp, Homo sapien
cactccagcctcagcgacaagagtg

SEQ ID NO: 3353625 - DNA, 25 bp, Homo sapien
ccagcctcagcgacaagagtgaaac

SEQ ID NO: 3353626 - DNA, 25 bp, Homo sapien
actccagcctcagcgacaagagtga

SEQ ID NO: 3353627 - DNA, 25 bp, Homo sapien
cagcctcagcgacaagagtgaaact

SEQ ID NO: 3353628 - DNA, 25 bp, Homo sapien
ttagaaaggccagtatttcccatat

SEQ ID NO: 3353629 - DNA, 25 bp, Homo sapien
gattttaaaatcttacggtcatatc

SEQ ID NO: 3353630 - DNA, 25 bp, Homo sapien
tagaaaggccagtatttcccatatc

SEQ ID NO: 3353631 - DNA, 25 bp, Homo sapien
aaatcttacggtcatatccaattct

SEQ ID NO: 3353632 - DNA, 25 bp, Homo sapien
caatgggtgttattcaggtgacaga

SEQ ID NO: 3353633 - DNA, 25 bp, Homo sapien
tgcacacagtactaccttcagatag

SEQ ID NO: 3353634 - DNA, 25 bp, Homo sapien
tcagatagtctgtaatgaaggcctg

SEQ ID NO: 3353635 - DNA, 25 bp, Homo sapien
tgaaggcctggaataacaaaactaa

SEQ ID NO: 3353636 - DNA, 25 bp, Homo sapien
gaatacttcccagtaactctcacaa

SEQ ID NO: 3353637 - DNA, 25 bp, Homo sapien
caaactgtcagcataaaaatcgatg

SEQ ID NO: 3353638 - DNA, 25 bp, Homo sapien
gcctcagagagtatcctaggaagaa

SEQ ID NO: 3353639 - DNA, 25 bp, Homo sapien
gaaaacctcatctcacacttgtaat

SEQ ID NO: 3353640 - DNA, 25 bp, Homo sapien
cacaaacaggtcacggtgctgcagg

SEQ ID NO: 3353641 - DNA, 25 bp, Homo sapien
acaaacaggtcacggtgctgcaggg

SEQ ID NO: 3353642 - DNA, 25 bp, Homo sapien
aaacaggtcacggtgctgcagggat

SEQ ID NO: 3353643 - DNA, 25 bp, Homo sapien
aacaggtcacggtgctgcagggatt

SEQ ID NO: 3353644 - DNA, 25 bp, Homo sapien
gacaacttgacttgaactttaggaa

SEQ ID NO: 3353645 - DNA, 25 bp, Homo sapien
gggccctcagttcttacattggtag

SEQ ID NO: 3353646 - DNA, 25 bp, Homo sapien
ttccaattcaagaagcactaacgct

SEQ ID NO: 3353647 - DNA, 25 bp, Homo sapien
tacatagaggttagaatacttccaa

SEQ ID NO: 3353648 - DNA, 25 bp, Homo sapien
tctagaataaggcatgagatactgg

SEQ ID NO: 3353649 - DNA, 25 bp, Homo sapien
tcggagacaaaaagtaaggccacaa

SEQ ID NO: 3353650 - DNA, 25 bp, Homo sapien
tgatatgtttgtcctttcggagaca

SEQ ID NO: 3353651 - DNA, 25 bp, Homo sapien
ccatgctgtgttgaaaggaactgat

SEQ ID NO: 3353652 - DNA, 25 bp, Homo sapien
gatttatttagggaaagcttgccac

SEQ ID NO: 3353653 - DNA, 25 bp, Homo sapien
catgaacatgtccaaagagcctctc

SEQ ID NO: 3353654 - DNA, 25 bp, Homo sapien
tacaaactaccagtaggtgccactg

SEQ ID NO: 3353655 - DNA, 25 bp, Homo sapien
tgtacaagagagagtggtgccctct

SEQ ID NO: 3353656 - DNA, 25 bp, Homo sapien
aagcctttgcagttccagtcccaag

SEQ ID NO: 3353657 - DNA, 25 bp, Homo sapien
agcctttgcagttccagtcccaaga

SEQ ID NO: 3353658 - DNA, 25 bp, Homo sapien
gcctttgcagttccagtcccaagat

SEQ ID NO: 3353659 - DNA, 25 bp, Homo sapien
cagtattaggcaatgaatcgcagcc

SEQ ID NO: 3353660 - DNA, 25 bp, Homo sapien
cagaaacatcaccaaggtatcttgt

SEQ ID NO: 3353661 - DNA, 25 bp, Homo sapien
agtgaagcagctctatatggaataa

SEQ ID NO: 3353662 - DNA, 25 bp, Homo sapien
taagtaactgaatgtccagaggaga

SEQ ID NO: 3353663 - DNA, 25 bp, Homo sapien
ggctaggacaaagattccatggcta

SEQ ID NO: 3353664 - DNA, 25 bp, Homo sapien
aacaccaactgtaaggtccaagctg

SEQ ID NO: 3353665 - DNA, 25 bp, Homo sapien
aagctggagccattagtgaccggaa

SEQ ID NO: 3353666 - DNA, 25 bp, Homo sapien
taattcttaagtacctacagtaggc

SEQ ID NO: 3353667 - DNA, 25 bp, Homo sapien
tggtgccctccacatggtaaataat

SEQ ID NO: 3353668 - DNA, 25 bp, Homo sapien
taagctcccattaggtggaaatcaa

SEQ ID NO: 3353669 - DNA, 25 bp, Homo sapien
cactgttagttcatgccagagctgg

SEQ ID NO: 3353670 - DNA, 25 bp, Homo sapien
gaattacctcagacagtcctttaga

SEQ ID NO: 3353671 - DNA, 25 bp, Homo sapien
tactggcactgtaaacggactggcc

SEQ ID NO: 3353672 - DNA, 25 bp, Homo sapien
cacgtgaaaatccaactaatcctcc

SEQ ID NO: 3353673 - DNA, 25 bp, Homo sapien
ggtgcaactacattcactctaattt

SEQ ID NO: 3353674 - DNA, 25 bp, Homo sapien
tcttgctacctctttagcaagagca

SEQ ID NO: 3353675 - DNA, 25 bp, Homo sapien
tcatggatcaagggataattctgac

SEQ ID NO: 3353676 - DNA, 25 bp, Homo sapien
tcaccgttctatatgccattcagaa

SEQ ID NO: 3353677 - DNA, 25 bp, Homo sapien
aacattttataagtctatagcagtc

SEQ ID NO: 3353678 - DNA, 25 bp, Homo sapien
tatagcagtcataaatagtaattcc

SEQ ID NO: 3353679 - DNA, 25 bp, Homo sapien
ttttatggagcagcatctcccttct

SEQ ID NO: 3353680 - DNA, 25 bp, Homo sapien
tttatggagcagcatctcccttctg

SEQ ID NO: 3353681 - DNA, 25 bp, Homo sapien
tggagcagcatctcccttctgtggc

SEQ ID NO: 3353682 - DNA, 25 bp, Homo sapien
tatggagcagcatctcccttctgtg

SEQ ID NO: 3353683 - DNA, 25 bp, Homo sapien
tgttgaatcatagtcctcatggcag

SEQ ID NO: 3353684 - DNA, 25 bp, Homo sapien
tacaggtcagcatggaacccaagag

SEQ ID NO: 3353685 - DNA, 25 bp, Homo sapien
cccaagaggttagtatgaagctgag

SEQ ID NO: 3353686 - DNA, 25 bp, Homo sapien
aatagaccctccctgttgttgaatc

SEQ ID NO: 3353687 - DNA, 25 bp, Homo sapien
caagaaatttactcgacctaaatgt

SEQ ID NO: 3353688 - DNA, 25 bp, Homo sapien
ccaagaaatttactcgacctaaatg

SEQ ID NO: 3353689 - DNA, 25 bp, Homo sapien
cctttgaaagcccaactaatggctt

SEQ ID NO: 3353690 - DNA, 25 bp, Homo sapien
gtgacacagtaagggtcaccactct

SEQ ID NO: 3353691 - DNA, 25 bp, Homo sapien
tggttttcacccgaagacttgtgtc

SEQ ID NO: 3353692 - DNA, 25 bp, Homo sapien
tcacccgaagacttgtgtccacaac

SEQ ID NO: 3353693 - DNA, 25 bp, Homo sapien
acagggaagctcctcagcgttagca

SEQ ID NO: 3353694 - DNA, 25 bp, Homo sapien
catcgagtaaccctagagccctaaa

SEQ ID NO: 3353695 - DNA, 25 bp, Homo sapien
tctacccttggaacgggagagcgcc

SEQ ID NO: 3353696 - DNA, 25 bp, Homo sapien
gaagggagccgttggtacctgcact

SEQ ID NO: 3353697 - DNA, 25 bp, Homo sapien
tttccgggccattaactgggccaca

SEQ ID NO: 3353698 - DNA, 25 bp, Homo sapien
agctctgccaatgcctcgggagcct

SEQ ID NO: 3353699 - DNA, 25 bp, Homo sapien
atgaccgccagtcggtagcctttcc

SEQ ID NO: 3353700 - DNA, 25 bp, Homo sapien
ggcaatgaccgccagtcggtagcct

SEQ ID NO: 3353701 - DNA, 25 bp, Homo sapien
ctcggaggaaagagggtagggagtg

SEQ ID NO: 3353702 - DNA, 25 bp, Homo sapien
ccctctccaggttccctcaggcttt

SEQ ID NO: 3353703 - DNA, 25 bp, Homo sapien
tagggagtgggagcccctctccagg

SEQ ID NO: 3353704 - DNA, 25 bp, Homo sapien
tctccaggttccctcaggcttttaa

SEQ ID NO: 3353705 - DNA, 25 bp, Homo sapien
tcctgcagccgcacaatagtaatgc

SEQ ID NO: 3353706 - DNA, 25 bp, Homo sapien
tgcaagacgccgtgaaaaggaggaa

SEQ ID NO: 3353707 - DNA, 25 bp, Homo sapien
cgcacaatagtaatgcaagacgccg

SEQ ID NO: 3353708 - DNA, 25 bp, Homo sapien
tagtaatgcaagacgccgtgaaaag

SEQ ID NO: 3353709 - DNA, 25 bp, Homo sapien
ccgccggcggaagaatggcctggag

SEQ ID NO: 3353710 - DNA, 25 bp, Homo sapien
aacaaatacgccgacgagagctccc

SEQ ID NO: 3353711 - DNA, 25 bp, Homo sapien
cctcgatgcttgctgggacctgtag

SEQ ID NO: 3353712 - DNA, 25 bp, Homo sapien
tcttccgcgccacacctaacaaata

SEQ ID NO: 3353713 - DNA, 25 bp, Homo sapien
ctaggagggatcataactaggggca

SEQ ID NO: 3353714 - DNA, 25 bp, Homo sapien
taactaggggcattgatccaatatg

SEQ ID NO: 3353715 - DNA, 25 bp, Homo sapien
gagggatcataactaggggcattga

SEQ ID NO: 3353716 - DNA, 25 bp, Homo sapien
cataactaggggcattgatccaata

SEQ ID NO: 3353717 - DNA, 25 bp, Homo sapien
tgaatctactgcgagctcaggaaca

SEQ ID NO: 3353718 - DNA, 25 bp, Homo sapien
catccccagtatcagatgtaaagct

SEQ ID NO: 3353719 - DNA, 25 bp, Homo sapien
caatatgaatctactgcgagctcag

SEQ ID NO: 3353720 - DNA, 25 bp, Homo sapien
aacatccccagtatcagatgtaaag

SEQ ID NO: 3353721 - DNA, 25 bp, Homo sapien
ttggcaaggaatgcagccccaactg

SEQ ID NO: 3353722 - DNA, 25 bp, Homo sapien
tccatggtgacaaccagaggaccag

SEQ ID NO: 3353723 - DNA, 25 bp, Homo sapien
acagagcatgacaaagagtgcccaa

SEQ ID NO: 3353724 - DNA, 25 bp, Homo sapien
tcatgaaacgcatggcacagagcat

SEQ ID NO: 3353725 - DNA, 25 bp, Homo sapien
ttccagccatgaggggatctgaggc

SEQ ID NO: 3353726 - DNA, 25 bp, Homo sapien
tgaggcagtgttctgggcaacatga

SEQ ID NO: 3353727 - DNA, 25 bp, Homo sapien
tgttgttccagccatgaggggatct

SEQ ID NO: 3353728 - DNA, 25 bp, Homo sapien
gcaacatgaccaaaacagaacacta

SEQ ID NO: 3353729 - DNA, 25 bp, Homo sapien
gaggaatgtgaacatgattcctgaa

SEQ ID NO: 3353730 - DNA, 25 bp, Homo sapien
agcagccatcatctttaagcctccg

SEQ ID NO: 3353731 - DNA, 25 bp, Homo sapien
cgcagtcgctgatttctgcatctct

SEQ ID NO: 3353732 - DNA, 25 bp, Homo sapien
tttaagcctccgcagtcgctgattt

SEQ ID NO: 3353733 - DNA, 25 bp, Homo sapien
gagttttctaacacttgaagccact

SEQ ID NO: 3353734 - DNA, 25 bp, Homo sapien
ctaacacttgaagccactgctgatt

SEQ ID NO: 3353735 - DNA, 25 bp, Homo sapien
tttctaacacttgaagccactgctg

SEQ ID NO: 3353736 - DNA, 25 bp, Homo sapien
ttaaatggctgtagttgagttttct

SEQ ID NO: 3353737 - DNA, 25 bp, Homo sapien
aagttattaccgtcctcattttcat

SEQ ID NO: 3353738 - DNA, 25 bp, Homo sapien
ctttgaaagttattaccgtcctcat

SEQ ID NO: 3353739 - DNA, 25 bp, Homo sapien
aaagcacctaggaatgtgcgagctt

SEQ ID NO: 3353740 - DNA, 25 bp, Homo sapien
gcttggccgcggctgtgcttgttcc

SEQ ID NO: 3353741 - DNA, 25 bp, Homo sapien
agcacctaggaatgtgcgagcttgg

SEQ ID NO: 3353742 - DNA, 25 bp, Homo sapien
acctaggaatgtgcgagcttggccg

SEQ ID NO: 3353743 - DNA, 25 bp, Homo sapien
gctgttgaggagatttaaagtgtgc

SEQ ID NO: 3353744 - DNA, 25 bp, Homo sapien
atttctgccacgctgttgaggagat

SEQ ID NO: 3353745 - DNA, 25 bp, Homo sapien
tgtacttgtacttccctgatcaggt

SEQ ID NO: 3353746 - DNA, 25 bp, Homo sapien
ttcccttgaatcttgtcagtcagga

SEQ ID NO: 3353747 - DNA, 25 bp, Homo sapien
tgtgctggcgtgaaaatatgcatcc

SEQ ID NO: 3353748 - DNA, 25 bp, Homo sapien
ctgtgctggcgtgaaaatatgcatc

SEQ ID NO: 3353749 - DNA, 25 bp, Homo sapien
gagaggcaatttccccaaagatggc

SEQ ID NO: 3353750 - DNA, 25 bp, Homo sapien
agaggcaatttccccaaagatggct

SEQ ID NO: 3353751 - DNA, 25 bp, Homo sapien
tccttaggaggaattttcacagcag

SEQ ID NO: 3353752 - DNA, 25 bp, Homo sapien
tctctggatcctgacactcaagatc

SEQ ID NO: 3353753 - DNA, 25 bp, Homo sapien
gatcctgacactcaagatccttaat

SEQ ID NO: 3353754 - DNA, 25 bp, Homo sapien
tgcctcctacacgagatatctcttt

SEQ ID NO: 3353755 - DNA, 25 bp, Homo sapien
ctgcctcctacacgagatatctctt

SEQ ID NO: 3353756 - DNA, 25 bp, Homo sapien
gctcaagctgatccataatcaaggg

SEQ ID NO: 3353757 - DNA, 25 bp, Homo sapien
gaaggctattcacctgcttacttgg

SEQ ID NO: 3353758 - DNA, 25 bp, Homo sapien
caaggctattgcaatggctcaacaa

SEQ ID NO: 3353759 - DNA, 25 bp, Homo sapien
tggtgcctgagtagattcaaatgtc

SEQ ID NO: 3353760 - DNA, 25 bp, Homo sapien
gaaaactctcagattcctggtagtt

SEQ ID NO: 3353761 - DNA, 25 bp, Homo sapien
cagattcctggtagttgacaaatcc

SEQ ID NO: 3353762 - DNA, 25 bp, Homo sapien
ctttgacttggagtcattaaaagga

SEQ ID NO: 3353763 - DNA, 25 bp, Homo sapien
caccccagtaggattagaaaactct

SEQ ID NO: 3353764 - DNA, 25 bp, Homo sapien
tgccctttctcaagaatgtggggtg

SEQ ID NO: 3353765 - DNA, 25 bp, Homo sapien
aatgtggggtggaatcgtattcatt

SEQ ID NO: 3353766 - DNA, 25 bp, Homo sapien
gctgccctttctcaagaatgtgggg

SEQ ID NO: 3353767 - DNA, 25 bp, Homo sapien
atttggcatttatgtgttcgtgcat

SEQ ID NO: 3353768 - DNA, 25 bp, Homo sapien
accgcacctgatcccagtggtcttt

SEQ ID NO: 3353769 - DNA, 25 bp, Homo sapien
ccattatctgaagactgaaaggaag

SEQ ID NO: 3353770 - DNA, 25 bp, Homo sapien
tgttggcaatctttctgttggggca

SEQ ID NO: 3353771 - DNA, 25 bp, Homo sapien
tgggcgggtattaaccttgtggaca

SEQ ID NO: 3353772 - DNA, 25 bp, Homo sapien
agcactgtagaaggctgaggcgggc

SEQ ID NO: 3353773 - DNA, 25 bp, Homo sapien
gcactgtagaaggctgaggcgggcg

SEQ ID NO: 3353774 - DNA, 25 bp, Homo sapien
gatcacgagatcaagagatcgagac

SEQ ID NO: 3353775 - DNA, 25 bp, Homo sapien
gatcgagaccatcctggccaacatg

SEQ ID NO: 3353776 - DNA, 25 bp, Homo sapien
acaccaacgacatggtaggccaggg

SEQ ID NO: 3353777 - DNA, 25 bp, Homo sapien
ttcagtctaaacataccagtcatcc

SEQ ID NO: 3353778 - DNA, 25 bp, Homo sapien
gggtgatagcaatcttccagtaaat

SEQ ID NO: 3353779 - DNA, 25 bp, Homo sapien
cattcaggcctaagctggaaacacc

SEQ ID NO: 3353780 - DNA, 25 bp, Homo sapien
gaagcgtccttgaatagcccctgat

SEQ ID NO: 3353781 - DNA, 25 bp, Homo sapien
aagcgtccttgaatagcccctgatg

SEQ ID NO: 3353782 - DNA, 25 bp, Homo sapien
tcagagaagcgtccttgaatagccc

SEQ ID NO: 3353783 - DNA, 25 bp, Homo sapien
gagaagcgtccttgaatagcccctg

SEQ ID NO: 3353784 - DNA, 25 bp, Homo sapien
gaaagagcagttccacaatcagttc

SEQ ID NO: 3353785 - DNA, 25 bp, Homo sapien
cctctgaatcgcagggagaaagagc

SEQ ID NO: 3353786 - DNA, 25 bp, Homo sapien
tatcataacggccttggtggttaaa

SEQ ID NO: 3353787 - DNA, 25 bp, Homo sapien
gagatgtgttcttaagcaagaggcc

SEQ ID NO: 3353788 - DNA, 25 bp, Homo sapien
aagagaatgactctgttacataaga

SEQ ID NO: 3353789 - DNA, 25 bp, Homo sapien
ataagacagtcactgttgaaccagg

SEQ ID NO: 3353790 - DNA, 25 bp, Homo sapien
agacagtcactgttgaaccaggatc

SEQ ID NO: 3353791 - DNA, 25 bp, Homo sapien
ctaaggtggtcataaagagaatgac

SEQ ID NO: 3353792 - DNA, 25 bp, Homo sapien
tgaaaatgggcctccaagaaccgcc

SEQ ID NO: 3353793 - DNA, 25 bp, Homo sapien
aaatcaggggaagagcccgtagcgc

SEQ ID NO: 3353794 - DNA, 25 bp, Homo sapien
ctggactgaaaatgggcctccaaga

SEQ ID NO: 3353795 - DNA, 25 bp, Homo sapien
cacctgagtctcccctacttccttc

SEQ ID NO: 3353796 - DNA, 25 bp, Homo sapien
ttgtgtgcatcccaagcaatctttg

SEQ ID NO: 3353797 - DNA, 25 bp, Homo sapien
tcccaagcaatctttgtcagcatcc

SEQ ID NO: 3353798 - DNA, 25 bp, Homo sapien
tggcagcacccctcaggcttcgccg

SEQ ID NO: 3353799 - DNA, 25 bp, Homo sapien
ctgccttgtgtgcatcccaagcaat

SEQ ID NO: 3353800 - DNA, 25 bp, Homo sapien
gcatagacgggctgctgaacgagtc

SEQ ID NO: 3353801 - DNA, 25 bp, Homo sapien
tcgggcttaccctgagcatagacgg

SEQ ID NO: 3353802 - DNA, 25 bp, Homo sapien
acttcgctgacgtgctcgggcttac

SEQ ID NO: 3353803 - DNA, 25 bp, Homo sapien
tgatgcctcttagcttcccggatgc

SEQ ID NO: 3353804 - DNA, 25 bp, Homo sapien
cccttggccactaggtgagttctgg

SEQ ID NO: 3353805 - DNA, 25 bp, Homo sapien
aggacatgacttgctgacaccaggc

SEQ ID NO: 3353806 - DNA, 25 bp, Homo sapien
tgctgagaccaacttccgtaggagt

SEQ ID NO: 3353807 - DNA, 25 bp, Homo sapien
cagttagaccggaagagatggcagc

SEQ ID NO: 3353808 - DNA, 25 bp, Homo sapien
ttcaaagtctccaccattgccacag

SEQ ID NO: 3353809 - DNA, 25 bp, Homo sapien
tttcaaagtctccaccattgccaca

SEQ ID NO: 3353810 - DNA, 25 bp, Homo sapien
cctttcaaagtctccaccattgcca

SEQ ID NO: 3353811 - DNA, 25 bp, Homo sapien
ccctttcaaagtctccaccattgcc

SEQ ID NO: 3353812 - DNA, 25 bp, Homo sapien
gcaccctgggggcccatataataca

SEQ ID NO: 3353813 - DNA, 25 bp, Homo sapien
gaattgtgtccttgcaggttgctat

SEQ ID NO: 3353814 - DNA, 25 bp, Homo sapien
ggctgcttgagcaccctgggggccc

SEQ ID NO: 3353815 - DNA, 25 bp, Homo sapien
ttgtgtccttgcaggttgctatttt

SEQ ID NO: 3353816 - DNA, 25 bp, Homo sapien
atgggcctttcatttcatgggaaat

SEQ ID NO: 3353817 - DNA, 25 bp, Homo sapien
ggcctttcatttcatgggaaattaa

SEQ ID NO: 3353818 - DNA, 25 bp, Homo sapien
tcatttcatgggaaattaaaaccat

SEQ ID NO: 3353819 - DNA, 25 bp, Homo sapien
ttcatttcatgggaaattaaaacca

SEQ ID NO: 3353820 - DNA, 25 bp, Homo sapien
aagcaaaattttaaggactgacaca

SEQ ID NO: 3353821 - DNA, 25 bp, Homo sapien
attttaaggactgacacaagggaca

SEQ ID NO: 3353822 - DNA, 25 bp, Homo sapien
taaggactgacacaagggacataca

SEQ ID NO: 3353823 - DNA, 25 bp, Homo sapien
tttaaggactgacacaagggacata

SEQ ID NO: 3353824 - DNA, 25 bp, Homo sapien
tctggatcctgccacaattgtaagg

SEQ ID NO: 3353825 - DNA, 25 bp, Homo sapien
tacccagatccatgactgcgtggca

SEQ ID NO: 3353826 - DNA, 25 bp, Homo sapien
tctgctgggaggacataaaagacca

SEQ ID NO: 3353827 - DNA, 25 bp, Homo sapien
ggagcgagtgcactgaagagacctt

SEQ ID NO: 3353828 - DNA, 25 bp, Homo sapien
tgctctcaacaggagataatccagc

SEQ ID NO: 3353829 - DNA, 25 bp, Homo sapien
gaggactaggtcttcagggtgattc

SEQ ID NO: 3353830 - DNA, 25 bp, Homo sapien
tagcctttgacttaacacgagtgca

SEQ ID NO: 3353831 - DNA, 25 bp, Homo sapien
aaatgttttacttgtgtcctgggca

SEQ ID NO: 3353832 - DNA, 25 bp, Homo sapien
caaagcttcctgggaaaaggccagt

SEQ ID NO: 3353833 - DNA, 25 bp, Homo sapien
cacaaagcttcctgggaaaaggcca

SEQ ID NO: 3353834 - DNA, 25 bp, Homo sapien
atatgttttccacaaagcttcctgg

SEQ ID NO: 3353835 - DNA, 25 bp, Homo sapien
tcatatgttttccacaaagcttcct

SEQ ID NO: 3353836 - DNA, 25 bp, Homo sapien
ccatcctctcgttttttatgaacaa

SEQ ID NO: 3353837 - DNA, 25 bp, Homo sapien
gccatcctctcgttttttatgaaca

SEQ ID NO: 3353838 - DNA, 25 bp, Homo sapien
atatctccttctttaagttcaagtt

SEQ ID NO: 3353839 - DNA, 25 bp, Homo sapien
atgaacaaacacaatatctccttct

SEQ ID NO: 3353840 - DNA, 25 bp, Homo sapien
taagccactgacttttgggcgtaac

SEQ ID NO: 3353841 - DNA, 25 bp, Homo sapien
gagtgtatagcctcgtgggacccac

SEQ ID NO: 3353842 - DNA, 25 bp, Homo sapien
tggatcggtcactcaggaaaactgg

SEQ ID NO: 3353843 - DNA, 25 bp, Homo sapien
gctcaggctgatgtcttgactacaa

SEQ ID NO: 3353844 - DNA, 25 bp, Homo sapien
tggagcgatgggaactgcggagtcc

SEQ ID NO: 3353845 - DNA, 25 bp, Homo sapien
cggagtccagggaacttgccttcct

SEQ ID NO: 3353846 - DNA, 25 bp, Homo sapien
tggagaggaagctctgcactgccca

SEQ ID NO: 3353847 - DNA, 25 bp, Homo sapien
gcttccgtttagtggaggcgccaga

SEQ ID NO: 3353848 - DNA, 25 bp, Homo sapien
tgctgaactgttcccacaagctgat

SEQ ID NO: 3353849 - DNA, 25 bp, Homo sapien
cactggctcgactgatactgatggc

SEQ ID NO: 3353850 - DNA, 25 bp, Homo sapien
cattctgtacctggatgggtgtcac

SEQ ID NO: 3353851 - DNA, 25 bp, Homo sapien
agtccagggagaacggtcactatcc

SEQ ID NO: 3353852 - DNA, 25 bp, Homo sapien
gcattgcgggcctggttgactgtca

SEQ ID NO: 3353853 - DNA, 25 bp, Homo sapien
tgtgcaacaagaccttagcctgagg

SEQ ID NO: 3353854 - DNA, 25 bp, Homo sapien
catagggactttagcttgggaagca

SEQ ID NO: 3353855 - DNA, 25 bp, Homo sapien
gtcatttgccccgtcatgtgcaaca

SEQ ID NO: 3353856 - DNA, 25 bp, Homo sapien
taaaaccttggctatgtaacaggca

SEQ ID NO: 3353857 - DNA, 25 bp, Homo sapien
ggtgttgttgaaccttctcccatta

SEQ ID NO: 3353858 - DNA, 25 bp, Homo sapien
tctggataggctgaaaaccatggaa

SEQ ID NO: 3353859 - DNA, 25 bp, Homo sapien
gcctggcatatagtacgcattatat

SEQ ID NO: 3353860 - DNA, 25 bp, Homo sapien
ccgaggagtgtatggatatatagca

SEQ ID NO: 3353861 - DNA, 25 bp, Homo sapien
tcctggcagcgctcaaacactaaaa

SEQ ID NO: 3353862 - DNA, 25 bp, Homo sapien
cccctatcttgctggtatgcatgga

SEQ ID NO: 3353863 - DNA, 25 bp, Homo sapien
cacataattgccagggaaaacccct

SEQ ID NO: 3353864 - DNA, 25 bp, Homo sapien
gagtctgcggccgtaaatgtgcaat

SEQ ID NO: 3353865 - DNA, 25 bp, Homo sapien
actggggcgagtctgcggccgtaaa

SEQ ID NO: 3353866 - DNA, 25 bp, Homo sapien
acactggggcgagtctgcggccgta

SEQ ID NO: 3353867 - DNA, 25 bp, Homo sapien
gggcgagtctgcggccgtaaatgtg

SEQ ID NO: 3353868 - DNA, 25 bp, Homo sapien
tgccatgggcctcggtcccattcca

SEQ ID NO: 3353869 - DNA, 25 bp, Homo sapien
cctgccatgggcctcggtcccattc

SEQ ID NO: 3353870 - DNA, 25 bp, Homo sapien
atgggcctcggtcccattccagcag

SEQ ID NO: 3353871 - DNA, 25 bp, Homo sapien
ccatgggcctcggtcccattccagc

SEQ ID NO: 3353872 - DNA, 25 bp, Homo sapien
tgtggaggcaaggacagtggcagcc

SEQ ID NO: 3353873 - DNA, 25 bp, Homo sapien
gtggtggaagaggaggattcaaagt

SEQ ID NO: 3353874 - DNA, 25 bp, Homo sapien
gcagccaggagagggggtggtggaa

SEQ ID NO: 3353875 - DNA, 25 bp, Homo sapien
tggtggtgtggaggcaaggacagtg

SEQ ID NO: 3353876 - DNA, 25 bp, Homo sapien
tgccttttgaaaatcaatggagcaa

SEQ ID NO: 3353877 - DNA, 25 bp, Homo sapien
tttgaaaatcaatggagcaattgtt

SEQ ID NO: 3353878 - DNA, 25 bp, Homo sapien
ccttttgaaaatcaatggagcaatt

SEQ ID NO: 3353879 - DNA, 25 bp, Homo sapien
tgaaaatcaatggagcaattgttac

SEQ ID NO: 3353880 - DNA, 25 bp, Homo sapien
aagactgcctgaaccgctacctcgt

SEQ ID NO: 3353881 - DNA, 25 bp, Homo sapien
cttctgatctataaacccagataat

SEQ ID NO: 3353882 - DNA, 25 bp, Homo sapien
gtctgtatactgaaactcttgggaa

SEQ ID NO: 3353883 - DNA, 25 bp, Homo sapien
aaaacaggcacacaaagactgcctg

SEQ ID NO: 3353884 - DNA, 25 bp, Homo sapien
catcatcaggacacaccaatggcat

SEQ ID NO: 3353885 - DNA, 25 bp, Homo sapien
cacaacttacgactgtgggcaggca

SEQ ID NO: 3353886 - DNA, 25 bp, Homo sapien
tcaaccgagcccaaaaaggagatca

SEQ ID NO: 3353887 - DNA, 25 bp, Homo sapien
aagaggcagagtaccttttccatgg

SEQ ID NO: 3353888 - DNA, 25 bp, Homo sapien
caattaacccggtggtacttatatg

SEQ ID NO: 3353889 - DNA, 25 bp, Homo sapien
gctgcttgggggcggggtcacaatt

SEQ ID NO: 3353890 - DNA, 25 bp, Homo sapien
cagcttggtagggaacatctgatgg

SEQ ID NO: 3353891 - DNA, 25 bp, Homo sapien
taaacgaggggccagttgtcactgg

SEQ ID NO: 3353892 - DNA, 25 bp, Homo sapien
gagctgtcactattcttggcagaag

SEQ ID NO: 3353893 - DNA, 25 bp, Homo sapien
aaatacatgttgagtgctttctgca

SEQ ID NO: 3353894 - DNA, 25 bp, Homo sapien
cattttctgttagtgagtggccatc

SEQ ID NO: 3353895 - DNA, 25 bp, Homo sapien
gcaaatgttgctaggtcccaagata

SEQ ID NO: 3353896 - DNA, 25 bp, Homo sapien
gacagctcgctgatccgtgcagcag

SEQ ID NO: 3353897 - DNA, 25 bp, Homo sapien
ggctgctgccgaggaacattctcca

SEQ ID NO: 3353898 - DNA, 25 bp, Homo sapien
ggcacaggaggcttatcccattcta

SEQ ID NO: 3353899 - DNA, 25 bp, Homo sapien
tgcctgggaggacttgttggccata

SEQ ID NO: 3353900 - DNA, 25 bp, Homo sapien
tactgcatcactaagtccaatgttc

SEQ ID NO: 3353901 - DNA, 25 bp, Homo sapien
cgtctgtgaaccatatgcccatctg

SEQ ID NO: 3353902 - DNA, 25 bp, Homo sapien
aataaggtcgggaaagcatttagca

SEQ ID NO: 3353903 - DNA, 25 bp, Homo sapien
tttccacatgactcagcagttgtcc

SEQ ID NO: 3353904 - DNA, 25 bp, Homo sapien
tctcagaatccacaagaagaccttg

SEQ ID NO: 3353905 - DNA, 25 bp, Homo sapien
taagaatagtgtacttaacccagca

SEQ ID NO: 3353906 - DNA, 25 bp, Homo sapien
tccaaccaacgacccagaaatgaaa

SEQ ID NO: 3353907 - DNA, 25 bp, Homo sapien
gcaaagtcacgaaatcaacctgagt

SEQ ID NO: 3353908 - DNA, 25 bp, Homo sapien
agtggtagatgttattgagaggaca

SEQ ID NO: 3353909 - DNA, 25 bp, Homo sapien
gaatagtggtagatgttattgagag

SEQ ID NO: 3353910 - DNA, 25 bp, Homo sapien
tggtagatgttattgagaggacaaa

SEQ ID NO: 3353911 - DNA, 25 bp, Homo sapien
tagtggtagatgttattgagaggac

SEQ ID NO: 3353912 - DNA, 25 bp, Homo sapien
tcttcggatcacagtcagaacatca

SEQ ID NO: 3353913 - DNA, 25 bp, Homo sapien
tttcatccactcttcggatcacagt

SEQ ID NO: 3353914 - DNA, 25 bp, Homo sapien
ttcggatcacagtcagaacatcatc

SEQ ID NO: 3353915 - DNA, 25 bp, Homo sapien
tccactcttcggatcacagtcagaa

SEQ ID NO: 3353916 - DNA, 25 bp, Homo sapien
gaggtaacggtttaataatctgcac

SEQ ID NO: 3353917 - DNA, 25 bp, Homo sapien
tttgctgaatttaaggtctccaggc

SEQ ID NO: 3353918 - DNA, 25 bp, Homo sapien
tgtcttcgcaaaatgatgatgtcac

SEQ ID NO: 3353919 - DNA, 25 bp, Homo sapien
aaagccatggattccattgacttcc

SEQ ID NO: 3353920 - DNA, 25 bp, Homo sapien
agctctgtttggcccactctgtcca

SEQ ID NO: 3353921 - DNA, 25 bp, Homo sapien
tttggcccactctgtccaaatccat

SEQ ID NO: 3353922 - DNA, 25 bp, Homo sapien
ctcaattagctctgtttggcccact

SEQ ID NO: 3353923 - DNA, 25 bp, Homo sapien
tgtttggcccactctgtccaaatcc

SEQ ID NO: 3353924 - DNA, 25 bp, Homo sapien
cagatttagcactcttagaaaccat

SEQ ID NO: 3353925 - DNA, 25 bp, Homo sapien
gccagccaaacccatgcaccaagat

SEQ ID NO: 3353926 - DNA, 25 bp, Homo sapien
cagccaaacccatgcaccaagatac

SEQ ID NO: 3353927 - DNA, 25 bp, Homo sapien
ccagccaaacccatgcaccaagata

SEQ ID NO: 3353928 - DNA, 25 bp, Homo sapien
gctcacgctcatctgtgggctccac

SEQ ID NO: 3353929 - DNA, 25 bp, Homo sapien
cagcctttgggcttttttagcgctt

SEQ ID NO: 3353930 - DNA, 25 bp, Homo sapien
gcttttttagcgcttggtggctcct

SEQ ID NO: 3353931 - DNA, 25 bp, Homo sapien
ctttgggcttttttagcgcttggtg

SEQ ID NO: 3353932 - DNA, 25 bp, Homo sapien
aaggctttctatcatctggtcccgg

SEQ ID NO: 3353933 - DNA, 25 bp, Homo sapien
taatgcatcagcaagtctgccagct

SEQ ID NO: 3353934 - DNA, 25 bp, Homo sapien
ttgcttgggccaaaagactgggctt

SEQ ID NO: 3353935 - DNA, 25 bp, Homo sapien
gaaatacaaactccttcctgtggct

SEQ ID NO: 3353936 - DNA, 25 bp, Homo sapien
catgatgatgatacctgagtgtgta

SEQ ID NO: 3353937 - DNA, 25 bp, Homo sapien
tgagtgtgtaaaaatcctcccaaca

SEQ ID NO: 3353938 - DNA, 25 bp, Homo sapien
tcttctaagattatgatgccagaga

SEQ ID NO: 3353939 - DNA, 25 bp, Homo sapien
caggtccccaaaatctgaggcatca

SEQ ID NO: 3353940 - DNA, 25 bp, Homo sapien
aagtcttgaagttggatggtgtgag

SEQ ID NO: 3353941 - DNA, 25 bp, Homo sapien
gaagttggatggtgtgagtcctctt

SEQ ID NO: 3353942 - DNA, 25 bp, Homo sapien
tgaagttggatggtgtgagtcctct

SEQ ID NO: 3353943 - DNA, 25 bp, Homo sapien
tcttgaagttggatggtgtgagtcc

SEQ ID NO: 3353944 - DNA, 25 bp, Homo sapien
tagtccgagaactatgggaagctga

SEQ ID NO: 3353945 - DNA, 25 bp, Homo sapien
gaaatgctttctccgccaggaatgg

SEQ ID NO: 3353946 - DNA, 25 bp, Homo sapien
tatgcatttactaccatggagcaca

SEQ ID NO: 3353947 - DNA, 25 bp, Homo sapien
ggttgctcacctctatagtccgaga

SEQ ID NO: 3353948 - DNA, 25 bp, Homo sapien
cctggacaactaacgcctctttcta

SEQ ID NO: 3353949 - DNA, 25 bp, Homo sapien
ggatatataagtatcaggtcctgtc

SEQ ID NO: 3353950 - DNA, 25 bp, Homo sapien
gattagtttttgctcaaagctgcta

SEQ ID NO: 3353951 - DNA, 25 bp, Homo sapien
ggtactgtttgacattagacattca

SEQ ID NO: 3353952 - DNA, 25 bp, Homo sapien
tttggtcacatcctatcccagagca

SEQ ID NO: 3353953 - DNA, 25 bp, Homo sapien
ccataactctgtgtggcgtgacaac

SEQ ID NO: 3353954 - DNA, 25 bp, Homo sapien
cagcagtttggctgcagcaaatgaa

SEQ ID NO: 3353955 - DNA, 25 bp, Homo sapien
tctggctgtaagagcatggaacatt

SEQ ID NO: 3353956 - DNA, 25 bp, Homo sapien
tccatcatccatggaagtaaaggcc

SEQ ID NO: 3353957 - DNA, 25 bp, Homo sapien
agtccatagctaacatcagcactcc

SEQ ID NO: 3353958 - DNA, 25 bp, Homo sapien
taattttgtaggagctctgtttgca

SEQ ID NO: 3353959 - DNA, 25 bp, Homo sapien
tggatgtgctttggcgcagtccata

SEQ ID NO: 3353960 - DNA, 25 bp, Homo sapien
aataccacttatgcagcgacccatg

SEQ ID NO: 3353961 - DNA, 25 bp, Homo sapien
tggaggccctaagtctgttaccaga

SEQ ID NO: 3353962 - DNA, 25 bp, Homo sapien
tcaaattctgtggatctgaggtggg

SEQ ID NO: 3353963 - DNA, 25 bp, Homo sapien
gaaatgaaaatttctgggtcccagc

SEQ ID NO: 3353964 - DNA, 25 bp, Homo sapien
gaagaggtcatgcttaatggccaaa

SEQ ID NO: 3353965 - DNA, 25 bp, Homo sapien
gaggtcatgcttaatggccaaaaaa

SEQ ID NO: 3353966 - DNA, 25 bp, Homo sapien
tgcaaccccgctcatctgtattctg

SEQ ID NO: 3353967 - DNA, 25 bp, Homo sapien
tcaaactgagctaggagtatgtgca

SEQ ID NO: 3353968 - DNA, 25 bp, Homo sapien
taaaaattaggactgcactacaaag

SEQ ID NO: 3353969 - DNA, 25 bp, Homo sapien
cggaaagtcttaggagtctaagtct

SEQ ID NO: 3353970 - DNA, 25 bp, Homo sapien
agcacatctagtttcccttacggaa

SEQ ID NO: 3353971 - DNA, 25 bp, Homo sapien
ccttccgcctgagccatccaaagtt

SEQ ID NO: 3353972 - DNA, 25 bp, Homo sapien
gggagggagggagtatagataatgt

SEQ ID NO: 3353973 - DNA, 25 bp, Homo sapien
gggagtatagataatgttgctctcc

SEQ ID NO: 3353974 - DNA, 25 bp, Homo sapien
ttccccaatcacagggaaggaggca

SEQ ID NO: 3353975 - DNA, 25 bp, Homo sapien
ggagggagtatagataatgttgctc

SEQ ID NO: 3353976 - DNA, 25 bp, Homo sapien
gtcgtaaaaccagaactatcttatg

SEQ ID NO: 3353977 - DNA, 25 bp, Homo sapien
tcactaatttatgaacagcttgggt

SEQ ID NO: 3353978 - DNA, 25 bp, Homo sapien
ccagtgtcacactatagtcgtaaaa

SEQ ID NO: 3353979 - DNA, 25 bp, Homo sapien
gctgactgactcaaccagtgtcaca

SEQ ID NO: 3353980 - DNA, 25 bp, Homo sapien
cacacagataacaaggaacagagga

SEQ ID NO: 3353981 - DNA, 25 bp, Homo sapien
gagccaatccacttgccccagagtt

SEQ ID NO: 3353982 - DNA, 25 bp, Homo sapien
gcagctcttcatcattctacaaatg

SEQ ID NO: 3353983 - DNA, 25 bp, Homo sapien
tcctgcttttcctattaccagacac

SEQ ID NO: 3353984 - DNA, 25 bp, Homo sapien
catgcacttaatccaaggaccacga

SEQ ID NO: 3353985 - DNA, 25 bp, Homo sapien
gggagcatgtcccaaccactctggt

SEQ ID NO: 3353986 - DNA, 25 bp, Homo sapien
ggtattctttgaccatgcacttaat

SEQ ID NO: 3353987 - DNA, 25 bp, Homo sapien
ttgtagtgaaccttacacgccaggg

SEQ ID NO: 3353988 - DNA, 25 bp, Homo sapien
cctggccagcttaagagaatattaa

SEQ ID NO: 3353989 - DNA, 25 bp, Homo sapien
cacacctggccagcttaagagaata

SEQ ID NO: 3353990 - DNA, 25 bp, Homo sapien
ggccagcttaagagaatattaaaga

SEQ ID NO: 3353991 - DNA, 25 bp, Homo sapien
cacctggccagcttaagagaatatt

SEQ ID NO: 3353992 - DNA, 25 bp, Homo sapien
tcccagttataaggctcaagtttag

SEQ ID NO: 3353993 - DNA, 25 bp, Homo sapien
ttcttggcaagtaatttttctcatg

SEQ ID NO: 3353994 - DNA, 25 bp, Homo sapien
gtttcttggcaagtaatttttctca

SEQ ID NO: 3353995 - DNA, 25 bp, Homo sapien
acctcaactattttatcccagttat

SEQ ID NO: 3353996 - DNA, 25 bp, Homo sapien
cacatctgcgaattatgggaactaa

SEQ ID NO: 3353997 - DNA, 25 bp, Homo sapien
ggtatccacatctgcgaattatggg

SEQ ID NO: 3353998 - DNA, 25 bp, Homo sapien
cgaattatgggaactaatgctatcc

SEQ ID NO: 3353999 - DNA, 25 bp, Homo sapien
gaactaatgctatcccaatgggcag

SEQ ID NO: 3354000 - DNA, 25 bp, Homo sapien
tgtggacattaccacctttattcac

SEQ ID NO: 3354001 - DNA, 25 bp, Homo sapien
tcgaaaacaccaagctaaagaataa

SEQ ID NO: 3354002 - DNA, 25 bp, Homo sapien
tatctgttccagtatgtatggtttc

SEQ ID NO: 3354003 - DNA, 25 bp, Homo sapien
ggtttcctaagcaatgagttgactt

SEQ ID NO: 3354004 - DNA, 25 bp, Homo sapien
gattgcacccgaggctgctgtccgc

SEQ ID NO: 3354005 - DNA, 25 bp, Homo sapien
aggattgcacccgaggctgctgtcc

SEQ ID NO: 3354006 - DNA, 25 bp, Homo sapien
ctccaggattgcacccgaggctgct

SEQ ID NO: 3354007 - DNA, 25 bp, Homo sapien
tggggggctccaggattgcacccga

SEQ ID NO: 3354008 - DNA, 25 bp, Homo sapien
catcgcttgcaaaacgtatgctggc

SEQ ID NO: 3354009 - DNA, 25 bp, Homo sapien
caagatgttactgggaagctcctcg

SEQ ID NO: 3354010 - DNA, 25 bp, Homo sapien
tttgatgccatccagaagtctgacc

SEQ ID NO: 3354011 - DNA, 25 bp, Homo sapien
tcgcagaagcatcaaggcgctctag

SEQ ID NO: 3354012 - DNA, 25 bp, Homo sapien
cagaaatgttcatagttgtgtgcat

SEQ ID NO: 3354013 - DNA, 25 bp, Homo sapien
gtgtgcatcccttaaaatgactcat

SEQ ID NO: 3354014 - DNA, 25 bp, Homo sapien
tcatagttgtgtgcatcccttaaaa

SEQ ID NO: 3354015 - DNA, 25 bp, Homo sapien
aaatgttcatagttgtgtgcatccc

SEQ ID NO: 3354016 - DNA, 25 bp, Homo sapien
gcgctcgccgctcgcagtgtctctg

SEQ ID NO: 3354017 - DNA, 25 bp, Homo sapien
cagtgtctctgacgccgcggcggca

SEQ ID NO: 3354018 - DNA, 25 bp, Homo sapien
ggcaccgggagactcctctctgctg

SEQ ID NO: 3354019 - DNA, 25 bp, Homo sapien
ctcctctttgttcgcggccccgcag

SEQ ID NO: 3354020 - DNA, 25 bp, Homo sapien
ttctccctgaggagaacgcgcctga

SEQ ID NO: 3354021 - DNA, 25 bp, Homo sapien
atggagccaccggacgggaaggcgg

SEQ ID NO: 3354022 - DNA, 25 bp, Homo sapien
aggagaacgcgcctgaaaaatggag

SEQ ID NO: 3354023 - DNA, 25 bp, Homo sapien
gggacggacgccttctccctgagga

SEQ ID NO: 3354024 - DNA, 25 bp, Homo sapien
tctggttgcccaccccggacactta

SEQ ID NO: 3354025 - DNA, 25 bp, Homo sapien
tcccgctgcgctttgcgtctggttg

SEQ ID NO: 3354026 - DNA, 25 bp, Homo sapien
cgatcccgctgcgctttgcgtctgg

SEQ ID NO: 3354027 - DNA, 25 bp, Homo sapien
tttgcgtctggttgcccaccccgga

SEQ ID NO: 3354028 - DNA, 25 bp, Homo sapien
ccaggacccaaaccggagcaagcct

SEQ ID NO: 3354029 - DNA, 25 bp, Homo sapien
gacccaaaccggagcaagcctggag

SEQ ID NO: 3354030 - DNA, 25 bp, Homo sapien
aggacccaaaccggagcaagcctgg

SEQ ID NO: 3354031 - DNA, 25 bp, Homo sapien
ctggaggaccgctgaccccaaagcc

SEQ ID NO: 3354032 - DNA, 25 bp, Homo sapien
gggctggcaccgcaaagcacgctga

SEQ ID NO: 3354033 - DNA, 25 bp, Homo sapien
gcaaagcacgctgagaggcgcctct

SEQ ID NO: 3354034 - DNA, 25 bp, Homo sapien
aggtgggctggcaccgcaaagcacg

SEQ ID NO: 3354035 - DNA, 25 bp, Homo sapien
gcaccgcaaagcacgctgagaggcg

SEQ ID NO: 3354036 - DNA, 25 bp, Homo sapien
tgttttggttgccccaagcacacac

SEQ ID NO: 3354037 - DNA, 25 bp, Homo sapien
gaagctcctcaattgcactaattac

SEQ ID NO: 3354038 - DNA, 25 bp, Homo sapien
tggcaaccgccatttctggatgctc

SEQ ID NO: 3354039 - DNA, 25 bp, Homo sapien
tgttcaagttgccatgccctttttc

SEQ ID NO: 3354040 - DNA, 25 bp, Homo sapien
catgttcttgagttccagtttaacg

SEQ ID NO: 3354041 - DNA, 25 bp, Homo sapien
ttattcacctggggccaggtcttca

SEQ ID NO: 3354042 - DNA, 25 bp, Homo sapien
tatctcttgagtacaggaggctcca

SEQ ID NO: 3354043 - DNA, 25 bp, Homo sapien
ttgagtacaggaggctccatggtct

SEQ ID NO: 3354044 - DNA, 25 bp, Homo sapien
agcagctatctcttgagtacaggag

SEQ ID NO: 3354045 - DNA, 25 bp, Homo sapien
cacttgaccagcaaaactccgatct

SEQ ID NO: 3354046 - DNA, 25 bp, Homo sapien
ttaatcgtttatgccctgctccaca

SEQ ID NO: 3354047 - DNA, 25 bp, Homo sapien
gcaaaactccgatctaaccttccta

SEQ ID NO: 3354048 - DNA, 25 bp, Homo sapien
tctaaccttcctatttgtgaaagct

SEQ ID NO: 3354049 - DNA, 25 bp, Homo sapien
gaatctccgttttagcaaagcccag

SEQ ID NO: 3354050 - DNA, 25 bp, Homo sapien
tccccagaatcagcggactcgcatt

SEQ ID NO: 3354051 - DNA, 25 bp, Homo sapien
cagcaaactgttctctccccagaat

SEQ ID NO: 3354052 - DNA, 25 bp, Homo sapien
tccttaaagactgttgcagagacag

SEQ ID NO: 3354053 - DNA, 25 bp, Homo sapien
agaagccagacatagccccagggag

SEQ ID NO: 3354054 - DNA, 25 bp, Homo sapien
catccccagcttgggacccagcaca

SEQ ID NO: 3354055 - DNA, 25 bp, Homo sapien
ccatgcaggcaattgctgcactgct

SEQ ID NO: 3354056 - DNA, 25 bp, Homo sapien
ggcacagggaccagacgaataaaag

SEQ ID NO: 3354057 - DNA, 25 bp, Homo sapien
gctccaaaatccaccggcactttcc

SEQ ID NO: 3354058 - DNA, 25 bp, Homo sapien
aaagtgcaaatggtttctgcagctc

SEQ ID NO: 3354059 - DNA, 25 bp, Homo sapien
ctttcccggcagtccaaagtgcaaa

SEQ ID NO: 3354060 - DNA, 25 bp, Homo sapien
cggcactttcccggcagtccaaagt

SEQ ID NO: 3354061 - DNA, 25 bp, Homo sapien
tcctttggatgtgttcttcagttga

SEQ ID NO: 3354062 - DNA, 25 bp, Homo sapien
taaatccagtgaattcctttggatg

SEQ ID NO: 3354063 - DNA, 25 bp, Homo sapien
tagttgggttaaatccagtgaattc

SEQ ID NO: 3354064 - DNA, 25 bp, Homo sapien
gaattcctttggatgtgttcttcag

SEQ ID NO: 3354065 - DNA, 25 bp, Homo sapien
gattagcgcattttcccagcagcca

SEQ ID NO: 3354066 - DNA, 25 bp, Homo sapien
tctggcatacgctgtccacattcat

SEQ ID NO: 3354067 - DNA, 25 bp, Homo sapien
tgagctccagtctggcatacgctgt

SEQ ID NO: 3354068 - DNA, 25 bp, Homo sapien
ctagattagcgcattttcccagcag

SEQ ID NO: 3354069 - DNA, 25 bp, Homo sapien
cctgtattgttgtttcagttgattc

SEQ ID NO: 3354070 - DNA, 25 bp, Homo sapien
tattcttttctgaactatcatggtc

SEQ ID NO: 3354071 - DNA, 25 bp, Homo sapien
tgaactatcatggtccctgtattgt

SEQ ID NO: 3354072 - DNA, 25 bp, Homo sapien
ttcagggccatgctctttattcttt

SEQ ID NO: 3354073 - DNA, 25 bp, Homo sapien
cgttctttgttagatctggctggga

SEQ ID NO: 3354074 - DNA, 25 bp, Homo sapien
gttgggcctgcataaacctttgccg

SEQ ID NO: 3354075 - DNA, 25 bp, Homo sapien
tagcttcactgccttatcagagttg

SEQ ID NO: 3354076 - DNA, 25 bp, Homo sapien
cctttgccgttctttgttagatctg

SEQ ID NO: 3354077 - DNA, 25 bp, Homo sapien
tttgttctgggcgatgattgagtga

SEQ ID NO: 3354078 - DNA, 25 bp, Homo sapien
tgttctgggcgatgattgagtgata

SEQ ID NO: 3354079 - DNA, 25 bp, Homo sapien
tgtttgttctgggcgatgattgagt

SEQ ID NO: 3354080 - DNA, 25 bp, Homo sapien
gttctgggcgatgattgagtgatac

SEQ ID NO: 3354081 - DNA, 25 bp, Homo sapien
ctatttttgtcttccgctagtcctc

SEQ ID NO: 3354082 - DNA, 25 bp, Homo sapien
tatttttgtcttccgctagtcctct

SEQ ID NO: 3354083 - DNA, 25 bp, Homo sapien
ttttgtcttccgctagtcctctgcc

SEQ ID NO: 3354084 - DNA, 25 bp, Homo sapien
tgtcttccgctagtcctctgcccat

SEQ ID NO: 3354085 - DNA, 25 bp, Homo sapien
tatcaaagtgtgaggtattggacat

SEQ ID NO: 3354086 - DNA, 25 bp, Homo sapien
cccatgagcccactatatcaaagtg

SEQ ID NO: 3354087 - DNA, 25 bp, Homo sapien
ctttttgccccatgagcccactata

SEQ ID NO: 3354088 - DNA, 25 bp, Homo sapien
tatatcaaagtgtgaggtattggac

SEQ ID NO: 3354089 - DNA, 25 bp, Homo sapien
aaatcaagtatttagtttcggatat

SEQ ID NO: 3354090 - DNA, 25 bp, Homo sapien
tcaagtatttagtttcggatattag

SEQ ID NO: 3354091 - DNA, 25 bp, Homo sapien
tatttagtttcggatattagaaata

SEQ ID NO: 3354092 - DNA, 25 bp, Homo sapien
caagtatttagtttcggatattaga

SEQ ID NO: 3354093 - DNA, 25 bp, Homo sapien
gatatagtattcctggttctggtcc

SEQ ID NO: 3354094 - DNA, 25 bp, Homo sapien
aaatgtatagatgtaaacagagccc

SEQ ID NO: 3354095 - DNA, 25 bp, Homo sapien
tacatattatgccaaccagcctgct

SEQ ID NO: 3354096 - DNA, 25 bp, Homo sapien
gaagaacatctggactgtagacacc

SEQ ID NO: 3354097 - DNA, 25 bp, Homo sapien
tatcttccacattctagcaaaagtg

SEQ ID NO: 3354098 - DNA, 25 bp, Homo sapien
aaaatggaatccacgctccttaacg

SEQ ID NO: 3354099 - DNA, 25 bp, Homo sapien
caagggtcatgtcaaatcactgcac

SEQ ID NO: 3354100 - DNA, 25 bp, Homo sapien
aaaacatttgttagctccctgctgc

SEQ ID NO: 3354101 - DNA, 25 bp, Homo sapien
ttattaggaatactatcaaatcgct

SEQ ID NO: 3354102 - DNA, 25 bp, Homo sapien
caaatcgcttacacattttattagc

SEQ ID NO: 3354103 - DNA, 25 bp, Homo sapien
tatactcctctccttgtggaagaat

SEQ ID NO: 3354104 - DNA, 25 bp, Homo sapien
cacagctgttatactcctctccttg

SEQ ID NO: 3354105 - DNA, 25 bp, Homo sapien
atttgacttctgactctggatagta

SEQ ID NO: 3354106 - DNA, 25 bp, Homo sapien
ttgacttctgactctggatagtatc

SEQ ID NO: 3354107 - DNA, 25 bp, Homo sapien
tttgacttctgactctggatagtat

SEQ ID NO: 3354108 - DNA, 25 bp, Homo sapien
tgacttctgactctggatagtatct

SEQ ID NO: 3354109 - DNA, 25 bp, Homo sapien
ggtaggctccatctgccatgactaa

SEQ ID NO: 3354110 - DNA, 25 bp, Homo sapien
cttcttggtaggctccatctgccat

SEQ ID NO: 3354111 - DNA, 25 bp, Homo sapien
ccatctgccatgactaaatgaagaa

SEQ ID NO: 3354112 - DNA, 25 bp, Homo sapien
gaagaatcttggcataaagatgctg

SEQ ID NO: 3354113 - DNA, 25 bp, Homo sapien
tctcataaacctcaaagaatttttc

SEQ ID NO: 3354114 - DNA, 25 bp, Homo sapien
agtctcagttcctctaaatggttaa

SEQ ID NO: 3354115 - DNA, 25 bp, Homo sapien
aagacactatcgcattcacattcac

SEQ ID NO: 3354116 - DNA, 25 bp, Homo sapien
aatggttaaagacactatcgcattc

SEQ ID NO: 3354117 - DNA, 25 bp, Homo sapien
tcttcaccaggttgttccctaagta

SEQ ID NO: 3354118 - DNA, 25 bp, Homo sapien
agtaactgttccatcgaggcctgca

SEQ ID NO: 3354119 - DNA, 25 bp, Homo sapien
gcctgcagctcttgtaaatctgtgt

SEQ ID NO: 3354120 - DNA, 25 bp, Homo sapien
ccattcttcgttcagggcactttca

SEQ ID NO: 3354121 - DNA, 25 bp, Homo sapien
tcaagattgtcttgacgaacatctc

SEQ ID NO: 3354122 - DNA, 25 bp, Homo sapien
ctacggtgggaacatccataagggt

SEQ ID NO: 3354123 - DNA, 25 bp, Homo sapien
cggtgggaacatccataagggttct

SEQ ID NO: 3354124 - DNA, 25 bp, Homo sapien
taagggttctgaacagctttgagag

SEQ ID NO: 3354125 - DNA, 25 bp, Homo sapien
gaacatccataagggttctgaacag

SEQ ID NO: 3354126 - DNA, 25 bp, Homo sapien
catttgttccgctttcacggtgttt

SEQ ID NO: 3354127 - DNA, 25 bp, Homo sapien
acccatttgttccgctttcacggtg

SEQ ID NO: 3354128 - DNA, 25 bp, Homo sapien
tgttccgctttcacggtgtttctgc

SEQ ID NO: 3354129 - DNA, 25 bp, Homo sapien
ccatttgttccgctttcacggtgtt

SEQ ID NO: 3354130 - DNA, 25 bp, Homo sapien
tgcatgagggtatataaagggactt

SEQ ID NO: 3354131 - DNA, 25 bp, Homo sapien
ttacagcggaaaggcatgacaatag

SEQ ID NO: 3354132 - DNA, 25 bp, Homo sapien
gcaagtgagaaaaagaggtccgaaa

SEQ ID NO: 3354133 - DNA, 25 bp, Homo sapien
caaattaggcaatatagcacctctg

SEQ ID NO: 3354134 - DNA, 25 bp, Homo sapien
attgcaatttatttgctcagaagat

SEQ ID NO: 3354135 - DNA, 25 bp, Homo sapien
caatttatttgctcagaagatggag

SEQ ID NO: 3354136 - DNA, 25 bp, Homo sapien
cagaagatggaggtttttgttggat

SEQ ID NO: 3354137 - DNA, 25 bp, Homo sapien
ctcaatattatggtttataaaagaa

SEQ ID NO: 3354138 - DNA, 25 bp, Homo sapien
ttatcgaatggataatattttccac

SEQ ID NO: 3354139 - DNA, 25 bp, Homo sapien
tagagtgctgagaatcattggttcc

SEQ ID NO: 3354140 - DNA, 25 bp, Homo sapien
gattcttctggtgaacactgaactg

SEQ ID NO: 3354141 - DNA, 25 bp, Homo sapien
ccagttgaaagtccaatcagcaagg

SEQ ID NO: 3354142 - DNA, 25 bp, Homo sapien
taaatgcgagtgagatcgaaatgca

SEQ ID NO: 3354143 - DNA, 25 bp, Homo sapien
ctatatgaatgtcactaagttggtc

SEQ ID NO: 3354144 - DNA, 25 bp, Homo sapien
tggtccacagtactcgagactccat

SEQ ID NO: 3354145 - DNA, 25 bp, Homo sapien
ctgaatggtgatcctatctgccgac

SEQ ID NO: 3354146 - DNA, 25 bp, Homo sapien
tttcctgaatggtgatcctatctgc

SEQ ID NO: 3354147 - DNA, 25 bp, Homo sapien
agtaatagtgcatggcaagctctca

SEQ ID NO: 3354148 - DNA, 25 bp, Homo sapien
cagtaatagtgcatggcaagctctc

SEQ ID NO: 3354149 - DNA, 25 bp, Homo sapien
ctttgtttgttccacttggctcttg

SEQ ID NO: 3354150 - DNA, 25 bp, Homo sapien
taatagtgcatggcaagctctcatc

SEQ ID NO: 3354151 - DNA, 25 bp, Homo sapien
gtggagatgcctcactgaactcggg

SEQ ID NO: 3354152 - DNA, 25 bp, Homo sapien
tttttgtctcaacaggagaatcaac

SEQ ID NO: 3354153 - DNA, 25 bp, Homo sapien
gaatcaacaatagctgatgggttta

SEQ ID NO: 3354154 - DNA, 25 bp, Homo sapien
gaactcgggactttttgtctcaaca

SEQ ID NO: 3354155 - DNA, 25 bp, Homo sapien
agtatctttagaacagaatctgtcg

SEQ ID NO: 3354156 - DNA, 25 bp, Homo sapien
cttggagatccattaggacctaatt

SEQ ID NO: 3354157 - DNA, 25 bp, Homo sapien
tctgaagttgtagttcagcttctcc

SEQ ID NO: 3354158 - DNA, 25 bp, Homo sapien
gaacagaatctgtcggacttttccc

SEQ ID NO: 3354159 - DNA, 25 bp, Homo sapien
gaaggatgtatctagtgttaactca

SEQ ID NO: 3354160 - DNA, 25 bp, Homo sapien
tcatccagaggaatcacaagttgac

SEQ ID NO: 3354161 - DNA, 25 bp, Homo sapien
tcagttgtagagaaggatgtatcta

SEQ ID NO: 3354162 - DNA, 25 bp, Homo sapien
tatctagtgttaactcatccagagg

SEQ ID NO: 3354163 - DNA, 25 bp, Homo sapien
tcttgcgatcagatgaaactgattt

SEQ ID NO: 3354164 - DNA, 25 bp, Homo sapien
tttcatttaatctacgaagtatttc

SEQ ID NO: 3354165 - DNA, 25 bp, Homo sapien
tttaatctacgaagtatttctcgct

SEQ ID NO: 3354166 - DNA, 25 bp, Homo sapien
tgcctcccacttcttgcgatcagat

SEQ ID NO: 3354167 - DNA, 25 bp, Homo sapien
cttttgcatctcttctgaagtttcc

SEQ ID NO: 3354168 - DNA, 25 bp, Homo sapien
cttctgaagtttcccgggtatcagt

SEQ ID NO: 3354169 - DNA, 25 bp, Homo sapien
tgcatctcttctgaagtttcccggg

SEQ ID NO: 3354170 - DNA, 25 bp, Homo sapien
ctcttctgaagtttcccgggtatca

SEQ ID NO: 3354171 - DNA, 25 bp, Homo sapien
gatctcatctgttgctttgatggag

SEQ ID NO: 3354172 - DNA, 25 bp, Homo sapien
aaataacagatctcatctgttgctt

SEQ ID NO: 3354173 - DNA, 25 bp, Homo sapien
gaaataacagatctcatctgttgct

SEQ ID NO: 3354174 - DNA, 25 bp, Homo sapien
cagatctcatctgttgctttgatgg

SEQ ID NO: 3354175 - DNA, 25 bp, Homo sapien
tctgtggtgcctcagaacaattaca

SEQ ID NO: 3354176 - DNA, 25 bp, Homo sapien
gggaactaccagtcagtggagcaat

SEQ ID NO: 3354177 - DNA, 25 bp, Homo sapien
tcacaacttggataactggcgcaag

SEQ ID NO: 3354178 - DNA, 25 bp, Homo sapien
cactgtaagtcattaagtggcctaa

SEQ ID NO: 3354179 - DNA, 25 bp, Homo sapien
ttcttttagtacagcagcacgtgca

SEQ ID NO: 3354180 - DNA, 25 bp, Homo sapien
cttttagtacagcagcacgtgcatt

SEQ ID NO: 3354181 - DNA, 25 bp, Homo sapien
ctagttgttcttttagtacagcagc

SEQ ID NO: 3354182 - DNA, 25 bp, Homo sapien
gttgttcttttagtacagcagcacg

SEQ ID NO: 3354183 - DNA, 25 bp, Homo sapien
cagtgattcgatttttttgcgcctc

SEQ ID NO: 3354184 - DNA, 25 bp, Homo sapien
ttcgatttttttgcgcctcatgtca

SEQ ID NO: 3354185 - DNA, 25 bp, Homo sapien
tgattcgatttttttgcgcctcatg

SEQ ID NO: 3354186 - DNA, 25 bp, Homo sapien
cttcagtgattcgatttttttgcgc

SEQ ID NO: 3354187 - DNA, 25 bp, Homo sapien
tgtagtcttatttgcctcagtcttg

SEQ ID NO: 3354188 - DNA, 25 bp, Homo sapien
tttgcctcagtcttgccagataaac

SEQ ID NO: 3354189 - DNA, 25 bp, Homo sapien
tggcgctcattgaaattctgtagtc

SEQ ID NO: 3354190 - DNA, 25 bp, Homo sapien
ggctttaatctgttggcgctcattg

SEQ ID NO: 3354191 - DNA, 25 bp, Homo sapien
ccatacatagctgccaggttttgca

SEQ ID NO: 3354192 - DNA, 25 bp, Homo sapien
tgggcctgcctccatacatagctgc

SEQ ID NO: 3354193 - DNA, 25 bp, Homo sapien
aagagctgggcctgcctccatacat

SEQ ID NO: 3354194 - DNA, 25 bp, Homo sapien
ctgcctccatacatagctgccaggt

SEQ ID NO: 3354195 - DNA, 25 bp, Homo sapien
ttctacagctagctgccctttttgc

SEQ ID NO: 3354196 - DNA, 25 bp, Homo sapien
tcgctgcaggaactcttctacttgt

SEQ ID NO: 3354197 - DNA, 25 bp, Homo sapien
ccttcggctcgagctttattctgca

SEQ ID NO: 3354198 - DNA, 25 bp, Homo sapien
catagcttcccgttttcgctgcagg

SEQ ID NO: 3354199 - DNA, 25 bp, Homo sapien
cataggttaaacagcggttgcacaa

SEQ ID NO: 3354200 - DNA, 25 bp, Homo sapien
aattggcataggttaaacagcggtt

SEQ ID NO: 3354201 - DNA, 25 bp, Homo sapien
taaacagcggttgcacaaaattgtt

SEQ ID NO: 3354202 - DNA, 25 bp, Homo sapien
aattgtttactaagaacctggtcat

SEQ ID NO: 3354203 - DNA, 25 bp, Homo sapien
cagtaaaacactgaccccgattaag

SEQ ID NO: 3354204 - DNA, 25 bp, Homo sapien
tctcaaggataaagttgaagacaac

SEQ ID NO: 3354205 - DNA, 25 bp, Homo sapien
tgtaacaggataagggacatcaaac

SEQ ID NO: 3354206 - DNA, 25 bp, Homo sapien
tgggaactgcatgcctcacatccat

SEQ ID NO: 3354207 - DNA, 25 bp, Homo sapien
tgtgggatcaatggcgataccccct

SEQ ID NO: 3354208 - DNA, 25 bp, Homo sapien
gggatcaatggcgatacccccttta

SEQ ID NO: 3354209 - DNA, 25 bp, Homo sapien
tcaatggcgataccccctttatcat

SEQ ID NO: 3354210 - DNA, 25 bp, Homo sapien
gatcaatggcgataccccctttatc

SEQ ID NO: 3354211 - DNA, 25 bp, Homo sapien
ctaaattagagaggaacttccacaa

SEQ ID NO: 3354212 - DNA, 25 bp, Homo sapien
acttgaagctttccggccaacatca

SEQ ID NO: 3354213 - DNA, 25 bp, Homo sapien
caaggtatacagactgggaaggaag

SEQ ID NO: 3354214 - DNA, 25 bp, Homo sapien
aatacagctgtttcaacatctgaag

SEQ ID NO: 3354215 - DNA, 25 bp, Homo sapien
aactatgaagatatacggaggcacc

SEQ ID NO: 3354216 - DNA, 25 bp, Homo sapien
tagtacatccattctggctgggcat

SEQ ID NO: 3354217 - DNA, 25 bp, Homo sapien
tgctgtgaaccccaaatcgctctaa

SEQ ID NO: 3354218 - DNA, 25 bp, Homo sapien
tattagtaagtgagaaaagccagtg

SEQ ID NO: 3354219 - DNA, 25 bp, Homo sapien
caagggccaaatttgcacctcagaa

SEQ ID NO: 3354220 - DNA, 25 bp, Homo sapien
ccacaaagtgtaggtactaagctat

SEQ ID NO: 3354221 - DNA, 25 bp, Homo sapien
acctcagaaaattattgtacccaag

SEQ ID NO: 3354222 - DNA, 25 bp, Homo sapien
tgctttcagagtaatcaagggccaa

SEQ ID NO: 3354223 - DNA, 25 bp, Homo sapien
ggcttgtttagacaccgccttcaat

SEQ ID NO: 3354224 - DNA, 25 bp, Homo sapien
tctaatatcatcagcatcaggaaaa

SEQ ID NO: 3354225 - DNA, 25 bp, Homo sapien
tggacgaactccaggcagaattcct

SEQ ID NO: 3354226 - DNA, 25 bp, Homo sapien
gacctgcagccccataaggaaatcc

SEQ ID NO: 3354227 - DNA, 25 bp, Homo sapien
tactgtcctcgagaagaaaaagatg

SEQ ID NO: 3354228 - DNA, 25 bp, Homo sapien
aaaaagatgatggagctatagtccc

SEQ ID NO: 3354229 - DNA, 25 bp, Homo sapien
catttggtcaaaaatggcatggtaa

SEQ ID NO: 3354230 - DNA, 25 bp, Homo sapien
ctttctggaagacctcgaccatata

SEQ ID NO: 3354231 - DNA, 25 bp, Homo sapien
tacagaacgattttaggctgcagtg

SEQ ID NO: 3354232 - DNA, 25 bp, Homo sapien
ttggagagacaacagggatcagatt

SEQ ID NO: 3354233 - DNA, 25 bp, Homo sapien
caaagacaaagagatttggcaaacc

SEQ ID NO: 3354234 - DNA, 25 bp, Homo sapien
tgcccaaggttaaatagggtggatc

SEQ ID NO: 3354235 - DNA, 25 bp, Homo sapien
agtacatgcattttatagaacaagg

SEQ ID NO: 3354236 - DNA, 25 bp, Homo sapien
aaccatattggtataaaatgcctac

SEQ ID NO: 3354237 - DNA, 25 bp, Homo sapien
cagcaacacaagttacatatcagat

SEQ ID NO: 3354238 - DNA, 25 bp, Homo sapien
tcagatacatgcaggaaagctaagt

SEQ ID NO: 3354239 - DNA, 25 bp, Homo sapien
cacttagcacatttctccatccttg

SEQ ID NO: 3354240 - DNA, 25 bp, Homo sapien
tccctggccctatttattctttcca

SEQ ID NO: 3354241 - DNA, 25 bp, Homo sapien
atccttgttccctggccctatttat

SEQ ID NO: 3354242 - DNA, 25 bp, Homo sapien
accagcacttagcacatttctccat

SEQ ID NO: 3354243 - DNA, 25 bp, Homo sapien
gccttttcatttgttcagccttcat

SEQ ID NO: 3354244 - DNA, 25 bp, Homo sapien
cttgccttttcatttgttcagcctt

SEQ ID NO: 3354245 - DNA, 25 bp, Homo sapien
gttcagccttcattaaactaataat

SEQ ID NO: 3354246 - DNA, 25 bp, Homo sapien
catttgttcagccttcattaaacta

SEQ ID NO: 3354247 - DNA, 25 bp, Homo sapien
ccagccttctctttcttgctgcttc

SEQ ID NO: 3354248 - DNA, 25 bp, Homo sapien
tccagccttctctttcttgctgctt

SEQ ID NO: 3354249 - DNA, 25 bp, Homo sapien
ttttcaataaattccagccttctct

SEQ ID NO: 3354250 - DNA, 25 bp, Homo sapien
tctttttcaataaattccagccttc

SEQ ID NO: 3354251 - DNA, 25 bp, Homo sapien
ttctccagtattcactctcttctct

SEQ ID NO: 3354252 - DNA, 25 bp, Homo sapien
tctccagtattcactctcttctctg

SEQ ID NO: 3354253 - DNA, 25 bp, Homo sapien
cttctccagtattcactctcttctc

SEQ ID NO: 3354254 - DNA, 25 bp, Homo sapien
cactgaaaagtttcaagcaggagag

SEQ ID NO: 3354255 - DNA, 25 bp, Homo sapien
tattataaccctggtggaaagtgag

SEQ ID NO: 3354256 - DNA, 25 bp, Homo sapien
agatcaaggtcacaaggcccacctc

SEQ ID NO: 3354257 - DNA, 25 bp, Homo sapien
caggagagtgtaacgatctgacttc

SEQ ID NO: 3354258 - DNA, 25 bp, Homo sapien
gtaaaacacagaaggaggacattcc

SEQ ID NO: 3354259 - DNA, 25 bp, Homo sapien
gactttttatgactcctgtaaggct

SEQ ID NO: 3354260 - DNA, 25 bp, Homo sapien
aatggctctgcttaggttgctcaaa

SEQ ID NO: 3354261 - DNA, 25 bp, Homo sapien
taacacatggtatgtaacatgatca

SEQ ID NO: 3354262 - DNA, 25 bp, Homo sapien
aggtattccatatttagcggcaggc

SEQ ID NO: 3354263 - DNA, 25 bp, Homo sapien
tattccatatttagcggcaggcttt

SEQ ID NO: 3354264 - DNA, 25 bp, Homo sapien
atttcttatatgctaaaggtattcc

SEQ ID NO: 3354265 - DNA, 25 bp, Homo sapien
tcttatatgctaaaggtattccata

SEQ ID NO: 3354266 - DNA, 25 bp, Homo sapien
gcataacagaaatcgagttttgtcc

SEQ ID NO: 3354267 - DNA, 25 bp, Homo sapien
ctgagcaggcataacagaaatcgag

SEQ ID NO: 3354268 - DNA, 25 bp, Homo sapien
aatcgagttttgtcctgaagctggt

SEQ ID NO: 3354269 - DNA, 25 bp, Homo sapien
cagaaatcgagttttgtcctgaagc

SEQ ID NO: 3354270 - DNA, 25 bp, Homo sapien
tataggctgtgatccaaacttcgaa

SEQ ID NO: 3354271 - DNA, 25 bp, Homo sapien
gctgtgatccaaacttcgaaaatgt

SEQ ID NO: 3354272 - DNA, 25 bp, Homo sapien
ctggtataggctgtgatccaaactt

SEQ ID NO: 3354273 - DNA, 25 bp, Homo sapien
taggctgtgatccaaacttcgaaaa

SEQ ID NO: 3354274 - DNA, 25 bp, Homo sapien
cgttatgttttccaatagagtagcc

SEQ ID NO: 3354275 - DNA, 25 bp, Homo sapien
gcatatagaatccaagaagatcctg

SEQ ID NO: 3354276 - DNA, 25 bp, Homo sapien
aactaggccctatcaaccacggttg

SEQ ID NO: 3354277 - DNA, 25 bp, Homo sapien
catcacagagcattccactggacag

SEQ ID NO: 3354278 - DNA, 25 bp, Homo sapien
ctttaaacaacaagcgatatatagt

SEQ ID NO: 3354279 - DNA, 25 bp, Homo sapien
atctttaaacaacaagcgatatata

SEQ ID NO: 3354280 - DNA, 25 bp, Homo sapien
tctttaaacaacaagcgatatatag

SEQ ID NO: 3354281 - DNA, 25 bp, Homo sapien
tttaaacaacaagcgatatatagta

SEQ ID NO: 3354282 - DNA, 25 bp, Homo sapien
agtgtcctcgcaaacgttatttata

SEQ ID NO: 3354283 - DNA, 25 bp, Homo sapien
gaagctgctgctatgacctatacaa

SEQ ID NO: 3354284 - DNA, 25 bp, Homo sapien
acttcagccttgagacagtatgtcc

SEQ ID NO: 3354285 - DNA, 25 bp, Homo sapien
tgtttattctctagtggctgccaaa

SEQ ID NO: 3354286 - DNA, 25 bp, Homo sapien
atgcatgttctgttaagtcagaagg

SEQ ID NO: 3354287 - DNA, 25 bp, Homo sapien
ttctgaagagtatttggtcacatgc

SEQ ID NO: 3354288 - DNA, 25 bp, Homo sapien
gaagagtatttggtcacatgcatgt

SEQ ID NO: 3354289 - DNA, 25 bp, Homo sapien
tgcatgttctgttaagtcagaagga

SEQ ID NO: 3354290 - DNA, 25 bp, Homo sapien
taattgatttgatatagattgcttc

SEQ ID NO: 3354291 - DNA, 25 bp, Homo sapien
ggagaaatcatgagtcagtaatcta

SEQ ID NO: 3354292 - DNA, 25 bp, Homo sapien
catgtgtgcactaaaggagaaatca

SEQ ID NO: 3354293 - DNA, 25 bp, Homo sapien
taacaaagacctcactaaaccagaa

SEQ ID NO: 3354294 - DNA, 25 bp, Homo sapien
ttaataatccctttgctcacaggtg

SEQ ID NO: 3354295 - DNA, 25 bp, Homo sapien
catgctagacattaagcactttatg

SEQ ID NO: 3354296 - DNA, 25 bp, Homo sapien
ggtgaggagagtgaagcacagaaat

SEQ ID NO: 3354297 - DNA, 25 bp, Homo sapien
cattgatatgtaggtgatatttaag

SEQ ID NO: 3354298 - DNA, 25 bp, Homo sapien
ctcctcaacactggaggccatgtct

SEQ ID NO: 3354299 - DNA, 25 bp, Homo sapien
gaaaaaggcacaccattcctccaag

SEQ ID NO: 3354300 - DNA, 25 bp, Homo sapien
tagctaagcaacataaccctactgt

SEQ ID NO: 3354301 - DNA, 25 bp, Homo sapien
ggccatgtcttagctaagcaacata

SEQ ID NO: 3354302 - DNA, 25 bp, Homo sapien
tcataggaataatgcaaagacacag

SEQ ID NO: 3354303 - DNA, 25 bp, Homo sapien
cagatattatcttcagtaccaggtt

SEQ ID NO: 3354304 - DNA, 25 bp, Homo sapien
gagttgactgatggtctatccctag

SEQ ID NO: 3354305 - DNA, 25 bp, Homo sapien
caccaaactgcggagatcataggaa

SEQ ID NO: 3354306 - DNA, 25 bp, Homo sapien
agcatgtttaagtgtacacagctca

SEQ ID NO: 3354307 - DNA, 25 bp, Homo sapien
gcatgtttaagtgtacacagctcat

SEQ ID NO: 3354308 - DNA, 25 bp, Homo sapien
acagatttcaggtgacaagtagtat

SEQ ID NO: 3354309 - DNA, 25 bp, Homo sapien
tatggggtccctatgcaagttcgag

SEQ ID NO: 3354310 - DNA, 25 bp, Homo sapien
gcaagttcgagccagctctacagta

SEQ ID NO: 3354311 - DNA, 25 bp, Homo sapien
gatttcaggtgacaagtagtatggg

SEQ ID NO: 3354312 - DNA, 25 bp, Homo sapien
atcacctagtgacacggtgactgac

SEQ ID NO: 3354313 - DNA, 25 bp, Homo sapien
gtcatgtgccacattaatgttgttt

SEQ ID NO: 3354314 - DNA, 25 bp, Homo sapien
tggtctacagcagatcgcatatatg

SEQ ID NO: 3354315 - DNA, 25 bp, Homo sapien
tggagaagttaaagacacagtcatg

SEQ ID NO: 3354316 - DNA, 25 bp, Homo sapien
ctattaagaactctagcaattccaa

SEQ ID NO: 3354317 - DNA, 25 bp, Homo sapien
gaactctagcaattccaaaatctcc

SEQ ID NO: 3354318 - DNA, 25 bp, Homo sapien
aatctccaagttgtactgttccatc

SEQ ID NO: 3354319 - DNA, 25 bp, Homo sapien
ccaagttgtactgttccatctttag

SEQ ID NO: 3354320 - DNA, 25 bp, Homo sapien
ttaatgtctcgatgaagaatttttc

SEQ ID NO: 3354321 - DNA, 25 bp, Homo sapien
tctatcatgtacatgtttcagggcc

SEQ ID NO: 3354322 - DNA, 25 bp, Homo sapien
catatctgtacaaaccagtccaaaa

SEQ ID NO: 3354323 - DNA, 25 bp, Homo sapien
ctgagatttaatgtctcgatgaaga

SEQ ID NO: 3354324 - DNA, 25 bp, Homo sapien
cacaggtcttcctgttccccactta

SEQ ID NO: 3354325 - DNA, 25 bp, Homo sapien
tcacaggtcttcctgttccccactt

SEQ ID NO: 3354326 - DNA, 25 bp, Homo sapien
caggtcttcctgttccccacttaca

SEQ ID NO: 3354327 - DNA, 25 bp, Homo sapien
aggtcttcctgttccccacttacat

SEQ ID NO: 3354328 - DNA, 25 bp, Homo sapien
cattactatgtagagagagccattt

SEQ ID NO: 3354329 - DNA, 25 bp, Homo sapien
cctcttgaaacaaaacgcctttctg

SEQ ID NO: 3354330 - DNA, 25 bp, Homo sapien
tccctcacagtaatccattactatg

SEQ ID NO: 3354331 - DNA, 25 bp, Homo sapien
ttattcgcttaaacagatcccctcc

SEQ ID NO: 3354332 - DNA, 25 bp, Homo sapien
ccacctttatgtctcggtccacaaa

SEQ ID NO: 3354333 - DNA, 25 bp, Homo sapien
tttatgtctcggtccacaaagaaag

SEQ ID NO: 3354334 - DNA, 25 bp, Homo sapien
tccacaaagaaaggtacttctgtgc

SEQ ID NO: 3354335 - DNA, 25 bp, Homo sapien
tgtctcggtccacaaagaaaggtac

SEQ ID NO: 3354336 - DNA, 25 bp, Homo sapien
tcttaagtaaggaagagtggccaat

SEQ ID NO: 3354337 - DNA, 25 bp, Homo sapien
gacattcttgtcactcgtggtgcac

SEQ ID NO: 3354338 - DNA, 25 bp, Homo sapien
tataatagtgaggtacagaggagca

SEQ ID NO: 3354339 - DNA, 25 bp, Homo sapien
tgtgccactgggataagaatctata

SEQ ID NO: 3354340 - DNA, 25 bp, Homo sapien
tgtttgccaatactgcaacttctct

SEQ ID NO: 3354341 - DNA, 25 bp, Homo sapien
gtttgccaatactgcaacttctctc

SEQ ID NO: 3354342 - DNA, 25 bp, Homo sapien
catgtttgccaatactgcaacttct

SEQ ID NO: 3354343 - DNA, 25 bp, Homo sapien
atgtttgccaatactgcaacttctc

SEQ ID NO: 3354344 - DNA, 25 bp, Homo sapien
catactgtctgccatcttctgtaga

SEQ ID NO: 3354345 - DNA, 25 bp, Homo sapien
tttccttgataacatactgtctgcc

SEQ ID NO: 3354346 - DNA, 25 bp, Homo sapien
tctgtagatttaacaagaatggctt

SEQ ID NO: 3354347 - DNA, 25 bp, Homo sapien
ttctgtagtctaacatacttctcca

SEQ ID NO: 3354348 - DNA, 25 bp, Homo sapien
ggcatctttacagatatgctagaca

SEQ ID NO: 3354349 - DNA, 25 bp, Homo sapien
tctttacagatatgctagacattta

SEQ ID NO: 3354350 - DNA, 25 bp, Homo sapien
taaggcatctttacagatatgctag

SEQ ID NO: 3354351 - DNA, 25 bp, Homo sapien
tttctaaggcatctttacagatatg

SEQ ID NO: 3354352 - DNA, 25 bp, Homo sapien
tttttctcttttgaactattcatcc

SEQ ID NO: 3354353 - DNA, 25 bp, Homo sapien
catgagcggccacatttattgaaca

SEQ ID NO: 3354354 - DNA, 25 bp, Homo sapien
caccatgagcggccacatttattga

SEQ ID NO: 3354355 - DNA, 25 bp, Homo sapien
gagccaccatgagcggccacattta

SEQ ID NO: 3354356 - DNA, 25 bp, Homo sapien
gtagatatgggttcgccaggtcagc

SEQ ID NO: 3354357 - DNA, 25 bp, Homo sapien
tggtagatatgggttcgccaggtca

SEQ ID NO: 3354358 - DNA, 25 bp, Homo sapien
tagatatgggttcgccaggtcagcc

SEQ ID NO: 3354359 - DNA, 25 bp, Homo sapien
tttggtagatatgggttcgccaggt

SEQ ID NO: 3354360 - DNA, 25 bp, Homo sapien
catgttcatgacttagactagaagg

SEQ ID NO: 3354361 - DNA, 25 bp, Homo sapien
tgtactattcacacgacctcaaaag

SEQ ID NO: 3354362 - DNA, 25 bp, Homo sapien
tctgtggtcaagtccgacgaccttt

SEQ ID NO: 3354363 - DNA, 25 bp, Homo sapien
cattcgtgaaaaggtgtcatgttca

SEQ ID NO: 3354364 - DNA, 25 bp, Homo sapien
taataagcatcagtctaggtgtggc

SEQ ID NO: 3354365 - DNA, 25 bp, Homo sapien
cgttagtaggaataacggtgatgac

SEQ ID NO: 3354366 - DNA, 25 bp, Homo sapien
ctcagtgacacaggacgttagtagg

SEQ ID NO: 3354367 - DNA, 25 bp, Homo sapien
taaagcagaggtaccatcccgcatt

SEQ ID NO: 3354368 - DNA, 25 bp, Homo sapien
accaagactgtctaaccagcagcag

SEQ ID NO: 3354369 - DNA, 25 bp, Homo sapien
agaaaccaagactgtctaaccagca

SEQ ID NO: 3354370 - DNA, 25 bp, Homo sapien
actgaaagggggcactgagactctc

SEQ ID NO: 3354371 - DNA, 25 bp, Homo sapien
tcacagtccagactgaaagggggca

SEQ ID NO: 3354372 - DNA, 25 bp, Homo sapien
gggaagctacttgactgccacgtgc

SEQ ID NO: 3354373 - DNA, 25 bp, Homo sapien
gacgcccgtaagacaggtcgacact

SEQ ID NO: 3354374 - DNA, 25 bp, Homo sapien
cacagaggtcgttgctagtggccac

SEQ ID NO: 3354375 - DNA, 25 bp, Homo sapien
aaaccctggagcgaatgcggactaa

SEQ ID NO: 3354376 - DNA, 25 bp, Homo sapien
tccagggagcaagatagaagaaact

SEQ ID NO: 3354377 - DNA, 25 bp, Homo sapien
tcctggcaagatcaaagttcttttt

SEQ ID NO: 3354378 - DNA, 25 bp, Homo sapien
gaaactgagatatgattcccagtgc

SEQ ID NO: 3354379 - DNA, 25 bp, Homo sapien
agagtaactttactggtccagggag

SEQ ID NO: 3354380 - DNA, 25 bp, Homo sapien
tgaggcacaagatatacaacacgca

SEQ ID NO: 3354381 - DNA, 25 bp, Homo sapien
tgaacccaattcagaccgtgtagaa

SEQ ID NO: 3354382 - DNA, 25 bp, Homo sapien
tattagcatgctactgctgtggcca

SEQ ID NO: 3354383 - DNA, 25 bp, Homo sapien
caaccggcgatgacatacaaggcga

SEQ ID NO: 3354384 - DNA, 25 bp, Homo sapien
tggtagcagacatgataatggaaac

SEQ ID NO: 3354385 - DNA, 25 bp, Homo sapien
tgtactataaatgaaaggccaatac

SEQ ID NO: 3354386 - DNA, 25 bp, Homo sapien
ctgcttaataatggccatccccaca

SEQ ID NO: 3354387 - DNA, 25 bp, Homo sapien
tctgggtatctctgatgtaatcaca

SEQ ID NO: 3354388 - DNA, 25 bp, Homo sapien
caagaccccgcttcaataatgttca

SEQ ID NO: 3354389 - DNA, 25 bp, Homo sapien
tgttcaactgaatctcacagatgag

SEQ ID NO: 3354390 - DNA, 25 bp, Homo sapien
aaaagatatcctccggcatatggcc

SEQ ID NO: 3354391 - DNA, 25 bp, Homo sapien
tagcacaactctttaacctgaggga

SEQ ID NO: 3354392 - DNA, 25 bp, Homo sapien
agtgtagcgccttgtttgaataccc

SEQ ID NO: 3354393 - DNA, 25 bp, Homo sapien
tgcttcagagactgacatttcaggg

SEQ ID NO: 3354394 - DNA, 25 bp, Homo sapien
tagcttcgtaaaacttcacatggag

SEQ ID NO: 3354395 - DNA, 25 bp, Homo sapien
gcctgtgtgcaacgtattgctagac

SEQ ID NO: 3354396 - DNA, 25 bp, Homo sapien
ggcgccaggcgctattctatgttct

SEQ ID NO: 3354397 - DNA, 25 bp, Homo sapien
acaaaaagtgaaggtgtgtgcaccc

SEQ ID NO: 3354398 - DNA, 25 bp, Homo sapien
tttactgagcaattactgggcgcca

SEQ ID NO: 3354399 - DNA, 25 bp, Homo sapien
gctaatagaactgccaaaagagggt

SEQ ID NO: 3354400 - DNA, 25 bp, Homo sapien
tacatgcccttaagaagcttgcagc

SEQ ID NO: 3354401 - DNA, 25 bp, Homo sapien
tcctgcacagttatgaaagggaagc

SEQ ID NO: 3354402 - DNA, 25 bp, Homo sapien
cagggcctggagctacttacctaac

SEQ ID NO: 3354403 - DNA, 25 bp, Homo sapien
taatagttcagatggttccagggcc

SEQ ID NO: 3354404 - DNA, 25 bp, Homo sapien
gaaatactgtacaccaatcaaagcc

SEQ ID NO: 3354405 - DNA, 25 bp, Homo sapien
tgaaatactgtacaccaatcaaagc

SEQ ID NO: 3354406 - DNA, 25 bp, Homo sapien
ttgaaatactgtacaccaatcaaag

SEQ ID NO: 3354407 - DNA, 25 bp, Homo sapien
caacagattatatgcaagaggtaaa

SEQ ID NO: 3354408 - DNA, 25 bp, Homo sapien
tcttcaacagattatatgcaagagg

SEQ ID NO: 3354409 - DNA, 25 bp, Homo sapien
cagattcctcttcaacagattatat

SEQ ID NO: 3354410 - DNA, 25 bp, Homo sapien
tcctcttcaacagattatatgcaag

SEQ ID NO: 3354411 - DNA, 25 bp, Homo sapien
aaatataacattaagcagagaatat

SEQ ID NO: 3354412 - DNA, 25 bp, Homo sapien
aaaatataacattaagcagagaata

SEQ ID NO: 3354413 - DNA, 25 bp, Homo sapien
aaaatatatcaacaaagcacttgtt

SEQ ID NO: 3354414 - DNA, 25 bp, Homo sapien
aatatatcaacaaagcacttgttta

SEQ ID NO: 3354415 - DNA, 25 bp, Homo sapien
tttagtctctcctcatcacttgcag

SEQ ID NO: 3354416 - DNA, 25 bp, Homo sapien
atcacttgcagcctcaactattgtc

SEQ ID NO: 3354417 - DNA, 25 bp, Homo sapien
atgtgagccatagcaaaagagatcc

SEQ ID NO: 3354418 - DNA, 25 bp, Homo sapien
atccattcccaattcaagccccatg

SEQ ID NO: 3354419 - DNA, 25 bp, Homo sapien
ttcctcctaagactttgtactaata

SEQ ID NO: 3354420 - DNA, 25 bp, Homo sapien
taaaagattatctacatagttagaa

SEQ ID NO: 3354421 - DNA, 25 bp, Homo sapien
aatgaatcagtcttcaaaagtaaga

SEQ ID NO: 3354422 - DNA, 25 bp, Homo sapien
gactttgtactaatacaacttgtgc

SEQ ID NO: 3354423 - DNA, 25 bp, Homo sapien
cctttgtgaacatgggaataagacc

SEQ ID NO: 3354424 - DNA, 25 bp, Homo sapien
cagagcccttactgactaatgctaa

SEQ ID NO: 3354425 - DNA, 25 bp, Homo sapien
tgctaagcaccgtgagtctatttcc

SEQ ID NO: 3354426 - DNA, 25 bp, Homo sapien
gtaaaaatcaggcaactaggcaggc

SEQ ID NO: 3354427 - DNA, 25 bp, Homo sapien
tttttatctactggaacaaccaagc

SEQ ID NO: 3354428 - DNA, 25 bp, Homo sapien
agcctgcaccatgaaaggtctttgt

SEQ ID NO: 3354429 - DNA, 25 bp, Homo sapien
tcagggagctctcggtacccaacat

SEQ ID NO: 3354430 - DNA, 25 bp, Homo sapien
ggagctctcggtacccaacatcatt

SEQ ID NO: 3354431 - DNA, 25 bp, Homo sapien
ggtagaaagcacagaggaacctggt

SEQ ID NO: 3354432 - DNA, 25 bp, Homo sapien
tctggtagaaagcacagaggaacct

SEQ ID NO: 3354433 - DNA, 25 bp, Homo sapien
gtagaaagcacagaggaacctggtt

SEQ ID NO: 3354434 - DNA, 25 bp, Homo sapien
cttctggtagaaagcacagaggaac

SEQ ID NO: 3354435 - DNA, 25 bp, Homo sapien
gcaattcaatcagtgtaccaaccca

SEQ ID NO: 3354436 - DNA, 25 bp, Homo sapien
tgtaccaacccaaaggagccatctg

SEQ ID NO: 3354437 - DNA, 25 bp, Homo sapien
tcagtgtaccaacccaaaggagcca

SEQ ID NO: 3354438 - DNA, 25 bp, Homo sapien
cagttgcgcaattcaatcagtgtac

SEQ ID NO: 3354439 - DNA, 25 bp, Homo sapien
acagcatccagttcttaagatagga

SEQ ID NO: 3354440 - DNA, 25 bp, Homo sapien
agtgccatcctctttcagtgccatc

SEQ ID NO: 3354441 - DNA, 25 bp, Homo sapien
gggacagcatccagttcttaagata

SEQ ID NO: 3354442 - DNA, 25 bp, Homo sapien
gtgccatcctcctaacatccctaag

SEQ ID NO: 3354443 - DNA, 25 bp, Homo sapien
atcttcacggttctctgttcaagcg

SEQ ID NO: 3354444 - DNA, 25 bp, Homo sapien
ttctctgttcaagcgagtaccccaa

SEQ ID NO: 3354445 - DNA, 25 bp, Homo sapien
cgagtaccccaattctctggctgct

SEQ ID NO: 3354446 - DNA, 25 bp, Homo sapien
ttcaagcgagtaccccaattctctg

SEQ ID NO: 3354447 - DNA, 25 bp, Homo sapien
tccgcattatgtggcaggccactgt

SEQ ID NO: 3354448 - DNA, 25 bp, Homo sapien
taaaagtccgcattatgtggcaggc

SEQ ID NO: 3354449 - DNA, 25 bp, Homo sapien
aagtccgcattatgtggcaggccac

SEQ ID NO: 3354450 - DNA, 25 bp, Homo sapien
agaagtaaaagtccgcattatgtgg

SEQ ID NO: 3354451 - DNA, 25 bp, Homo sapien
tattaccagctgtatgtctagaggg

SEQ ID NO: 3354452 - DNA, 25 bp, Homo sapien
tatagccattcaagtaccctgtgcc

SEQ ID NO: 3354453 - DNA, 25 bp, Homo sapien
tcaacactctggcacggcaatatag

SEQ ID NO: 3354454 - DNA, 25 bp, Homo sapien
aaaaaagctattgcgctcacagtgg

SEQ ID NO: 3354455 - DNA, 25 bp, Homo sapien
aattcttccactctacacaacaaag

SEQ ID NO: 3354456 - DNA, 25 bp, Homo sapien
caactaccatgggtgagaggatctt

SEQ ID NO: 3354457 - DNA, 25 bp, Homo sapien
tgttgccaagataacctgaaagacc

SEQ ID NO: 3354458 - DNA, 25 bp, Homo sapien
caacaaagtacaaacacaatgtcat

SEQ ID NO: 3354459 - DNA, 25 bp, Homo sapien
ttagaaactggaaatgggtgagctt

SEQ ID NO: 3354460 - DNA, 25 bp, Homo sapien
tgccactgaactgactcttagaaac

SEQ ID NO: 3354461 - DNA, 25 bp, Homo sapien
ctctgccactgaactgactcttaga

SEQ ID NO: 3354462 - DNA, 25 bp, Homo sapien
actcttagaaactggaaatgggtga

SEQ ID NO: 3354463 - DNA, 25 bp, Homo sapien
gatgaactcaatggtagacatctaa

SEQ ID NO: 3354464 - DNA, 25 bp, Homo sapien
catgtatactccaacactgacattt

SEQ ID NO: 3354465 - DNA, 25 bp, Homo sapien
tcttgctatgtcgtttaggatgaac

SEQ ID NO: 3354466 - DNA, 25 bp, Homo sapien
caatggtagacatctaatacatgta

SEQ ID NO: 3354467 - DNA, 25 bp, Homo sapien
ggctgatatagcacagactggctca

SEQ ID NO: 3354468 - DNA, 25 bp, Homo sapien
gataatctacttgtatttgaagtga

SEQ ID NO: 3354469 - DNA, 25 bp, Homo sapien
tacaatgcaaactacacagctgctg

SEQ ID NO: 3354470 - DNA, 25 bp, Homo sapien
tcttcattacaatgcaaactacaca

SEQ ID NO: 3354471 - DNA, 25 bp, Homo sapien
gacctatcttcttccaagcagctgc

SEQ ID NO: 3354472 - DNA, 25 bp, Homo sapien
catactactctttagctcaggctcc

SEQ ID NO: 3354473 - DNA, 25 bp, Homo sapien
tcaggctccacatgggacctatctt

SEQ ID NO: 3354474 - DNA, 25 bp, Homo sapien
gaaagttcactgcatttcccatact

SEQ ID NO: 3354475 - DNA, 25 bp, Homo sapien
ggctgtgcttccacgatctccatca

SEQ ID NO: 3354476 - DNA, 25 bp, Homo sapien
agctgtagctgagatcccagcacct

SEQ ID NO: 3354477 - DNA, 25 bp, Homo sapien
agcagctgtagctgagatcccagca

SEQ ID NO: 3354478 - DNA, 25 bp, Homo sapien
gaggctgtgcttccacgatctccat

SEQ ID NO: 3354479 - DNA, 25 bp, Homo sapien
ggcagcagttctcgaattcccagct

SEQ ID NO: 3354480 - DNA, 25 bp, Homo sapien
catccatttacctggcccagattat

SEQ ID NO: 3354481 - DNA, 25 bp, Homo sapien
tgagccacacaactgtcattcctgg

SEQ ID NO: 3354482 - DNA, 25 bp, Homo sapien
attataccaaagataatgtggtcct

SEQ ID NO: 3354483 - DNA, 25 bp, Homo sapien
caacatatacaggaaattcatcagg

SEQ ID NO: 3354484 - DNA, 25 bp, Homo sapien
tataccaacatatacaggaaattca

SEQ ID NO: 3354485 - DNA, 25 bp, Homo sapien
taccaacatatacaggaaattcatc

SEQ ID NO: 3354486 - DNA, 25 bp, Homo sapien
catatacaggaaattcatcaggaga

SEQ ID NO: 3354487 - DNA, 25 bp, Homo sapien
gaaagcaacaacgtagatgtaaaaa

SEQ ID NO: 3354488 - DNA, 25 bp, Homo sapien
tcattttagaaagcaacaacgtaga

SEQ ID NO: 3354489 - DNA, 25 bp, Homo sapien
cataaaagatggcattcacattcat

SEQ ID NO: 3354490 - DNA, 25 bp, Homo sapien
aaggcaagttgcagtcataaaagat

SEQ ID NO: 3354491 - DNA, 25 bp, Homo sapien
cagtgaaggttaaaattcaggcctg

SEQ ID NO: 3354492 - DNA, 25 bp, Homo sapien
tccagtgaaggttaaaattcaggcc

SEQ ID NO: 3354493 - DNA, 25 bp, Homo sapien
ccagtgaaggttaaaattcaggcct

SEQ ID NO: 3354494 - DNA, 25 bp, Homo sapien
agtgaaggttaaaattcaggcctgt

SEQ ID NO: 3354495 - DNA, 25 bp, Homo sapien
tcttcacagaacttccagaagtgat

SEQ ID NO: 3354496 - DNA, 25 bp, Homo sapien
ttcacagaacttccagaagtgatag

SEQ ID NO: 3354497 - DNA, 25 bp, Homo sapien
tcacagaacttccagaagtgataga

SEQ ID NO: 3354498 - DNA, 25 bp, Homo sapien
cttcacagaacttccagaagtgata

SEQ ID NO: 3354499 - DNA, 25 bp, Homo sapien
tacttttcttcacatcagttgtttt

SEQ ID NO: 3354500 - DNA, 25 bp, Homo sapien
acagaatttacttttcttcacatca

SEQ ID NO: 3354501 - DNA, 25 bp, Homo sapien
tttcttcacatcagttgttttttca

SEQ ID NO: 3354502 - DNA, 25 bp, Homo sapien
tggagacatcagcttcacagaattt

SEQ ID NO: 3354503 - DNA, 25 bp, Homo sapien
ttagttctccaaatttcagtaactc

SEQ ID NO: 3354504 - DNA, 25 bp, Homo sapien
tagttctccaaatttcagtaactct

SEQ ID NO: 3354505 - DNA, 25 bp, Homo sapien
tactgatttccaaccttaggcaagt

SEQ ID NO: 3354506 - DNA, 25 bp, Homo sapien
tacacagaacggtcctagcacataa

SEQ ID NO: 3354507 - DNA, 25 bp, Homo sapien
tcaggtttaaatctgggtccacagc

SEQ ID NO: 3354508 - DNA, 25 bp, Homo sapien
tagttaggttgcctgggttgactcc

SEQ ID NO: 3354509 - DNA, 25 bp, Homo sapien
tggctgggcgaatgaaccattggtt

SEQ ID NO: 3354510 - DNA, 25 bp, Homo sapien
cagaggagctactttcctggtccaa

SEQ ID NO: 3354511 - DNA, 25 bp, Homo sapien
gtagaatgcatatttgcttgtgccc

SEQ ID NO: 3354512 - DNA, 25 bp, Homo sapien
aatgtcaggtatgtaatcggttccc

SEQ ID NO: 3354513 - DNA, 25 bp, Homo sapien
ctgtcacccaaagcgccccgcgtag

SEQ ID NO: 3354514 - DNA, 25 bp, Homo sapien
acacagcaagcttaatagtcactgg

SEQ ID NO: 3354515 - DNA, 25 bp, Homo sapien
tgcagagcgcgaaacagcggccctg

SEQ ID NO: 3354516 - DNA, 25 bp, Homo sapien
agcccgcacagcctttccggcagta

SEQ ID NO: 3354517 - DNA, 25 bp, Homo sapien
cctctccgccgggcctgcgcttccc

SEQ ID NO: 3354518 - DNA, 25 bp, Homo sapien
tccgccgggcctgcgcttcccgcca

SEQ ID NO: 3354519 - DNA, 25 bp, Homo sapien
ctgcggcccctctccgccgggcctg

SEQ ID NO: 3354520 - DNA, 25 bp, Homo sapien
ggcccctctccgccgggcctgcgct

SEQ ID NO: 3354521 - DNA, 25 bp, Homo sapien
ttccgagcgccgccaaccgcttccg

SEQ ID NO: 3354522 - DNA, 25 bp, Homo sapien
gcgccgccaaccgcttccgggttca

SEQ ID NO: 3354523 - DNA, 25 bp, Homo sapien
caagccgaatttcagcgccgcccgg

SEQ ID NO: 3354524 - DNA, 25 bp, Homo sapien
ccaagccgaatttcagcgccgcccg

SEQ ID NO: 3354525 - DNA, 25 bp, Homo sapien
ctccaagccgaatttcagcgccgcc

SEQ ID NO: 3354526 - DNA, 25 bp, Homo sapien
tccaagccgaatttcagcgccgccc

SEQ ID NO: 3354527 - DNA, 25 bp, Homo sapien
cctggctgcattcctgcggtcacga

SEQ ID NO: 3354528 - DNA, 25 bp, Homo sapien
gctgttggaaatgcgggtggccgtg

SEQ ID NO: 3354529 - DNA, 25 bp, Homo sapien
gcttgccgggctcctggatccacgt

SEQ ID NO: 3354530 - DNA, 25 bp, Homo sapien
tgcattcctgcggtcacgatcaggg

SEQ ID NO: 3354531 - DNA, 25 bp, Homo sapien
tgtgaatgcgtcgagatctcggcgc

SEQ ID NO: 3354532 - DNA, 25 bp, Homo sapien
tctcttgcaccgtggtgtgaatgcg

SEQ ID NO: 3354533 - DNA, 25 bp, Homo sapien
gcgtcgagatctcggcgctgcagca

SEQ ID NO: 3354534 - DNA, 25 bp, Homo sapien
cgtggtgtgaatgcgtcgagatctc

SEQ ID NO: 3354535 - DNA, 25 bp, Homo sapien
tatcacgtcagtatctatgttatga

SEQ ID NO: 3354536 - DNA, 25 bp, Homo sapien
cctatcacgtcagtatctatgttat

SEQ ID NO: 3354537 - DNA, 25 bp, Homo sapien
cacgtcagtatctatgttatgaaga

SEQ ID NO: 3354538 - DNA, 25 bp, Homo sapien
cgtcagtatctatgttatgaagaaa

SEQ ID NO: 3354539 - DNA, 25 bp, Homo sapien
tcatgcataaggttattgccttagc

SEQ ID NO: 3354540 - DNA, 25 bp, Homo sapien
cataaggttattgccttagctgact

SEQ ID NO: 3354541 - DNA, 25 bp, Homo sapien
tgttcatgcataaggttattgcctt

SEQ ID NO: 3354542 - DNA, 25 bp, Homo sapien
tgcataaggttattgccttagctga

SEQ ID NO: 3354543 - DNA, 25 bp, Homo sapien
aagattcagtgaagacacagtccct

SEQ ID NO: 3354544 - DNA, 25 bp, Homo sapien
ctgctctccggtggggactccgcgt

SEQ ID NO: 3354545 - DNA, 25 bp, Homo sapien
tcaacacaagattcagtgaagacac

SEQ ID NO: 3354546 - DNA, 25 bp, Homo sapien
gcgttttctccctggtcgccgctgc

SEQ ID NO: 3354547 - DNA, 25 bp, Homo sapien
aaaataaactttggaagatgcctgt

SEQ ID NO: 3354548 - DNA, 25 bp, Homo sapien
gaagagagtcgtttctgtgcacatg

SEQ ID NO: 3354549 - DNA, 25 bp, Homo sapien
cagtacaccaagaaatttattctta

SEQ ID NO: 3354550 - DNA, 25 bp, Homo sapien
tattcttactgggtatttgactgga

SEQ ID NO: 3354551 - DNA, 25 bp, Homo sapien
gatgagatttcaacgtccttaaaac

SEQ ID NO: 3354552 - DNA, 25 bp, Homo sapien
atgagatttcaacgtccttaaaacg

SEQ ID NO: 3354553 - DNA, 25 bp, Homo sapien
agatgagatttcaacgtccttaaaa

SEQ ID NO: 3354554 - DNA, 25 bp, Homo sapien
tgtatttccattgcatagttcctca

SEQ ID NO: 3354555 - DNA, 25 bp, Homo sapien
gtatttccattgcatagttcctcat

SEQ ID NO: 3354556 - DNA, 25 bp, Homo sapien
gattgccattggtcgaaaccctgtc

SEQ ID NO: 3354557 - DNA, 25 bp, Homo sapien
cctgattgccattggtcgaaaccct

SEQ ID NO: 3354558 - DNA, 25 bp, Homo sapien
atattcagactgcttctgttctctt

SEQ ID NO: 3354559 - DNA, 25 bp, Homo sapien
ctgcctgattgccattggtcgaaac

SEQ ID NO: 3354560 - DNA, 25 bp, Homo sapien
ggctgttttcataagagtggttgtg

SEQ ID NO: 3354561 - DNA, 25 bp, Homo sapien
acatggagattgaggtttgtggctt

SEQ ID NO: 3354562 - DNA, 25 bp, Homo sapien
atttttaccaaggtgggtcactgtg

SEQ ID NO: 3354563 - DNA, 25 bp, Homo sapien
gatcctgtacttggtgcaaaacgca

SEQ ID NO: 3354564 - DNA, 25 bp, Homo sapien
ttcagtgtctgaaacgtaacacaga

SEQ ID NO: 3354565 - DNA, 25 bp, Homo sapien
cagtgtctgaaacgtaacacagata

SEQ ID NO: 3354566 - DNA, 25 bp, Homo sapien
tcagtgtctgaaacgtaacacagat

SEQ ID NO: 3354567 - DNA, 25 bp, Homo sapien
tcaacttctacaggacaagactggt

SEQ ID NO: 3354568 - DNA, 25 bp, Homo sapien
caagactggtcaatgcgaggctcac

SEQ ID NO: 3354569 - DNA, 25 bp, Homo sapien
gcaggtatcatgctctttggagggt

SEQ ID NO: 3354570 - DNA, 25 bp, Homo sapien
cctcacctgcaggtatcatgctctt

SEQ ID NO: 3354571 - DNA, 25 bp, Homo sapien
agctgaagtgttgtggtttccgttt

SEQ ID NO: 3354572 - DNA, 25 bp, Homo sapien
tagctgaagtgttgtggtttccgtt

SEQ ID NO: 3354573 - DNA, 25 bp, Homo sapien
ttagctgaagtgttgtggtttccgt

SEQ ID NO: 3354574 - DNA, 25 bp, Homo sapien
catttggttggtccccgtggagtcg

SEQ ID NO: 3354575 - DNA, 25 bp, Homo sapien
tggcctcatttggttggtccccgtg

SEQ ID NO: 3354576 - DNA, 25 bp, Homo sapien
gttggtccccgtggagtcgagcaat

SEQ ID NO: 3354577 - DNA, 25 bp, Homo sapien
tccccgtggagtcgagcaatttctg

SEQ ID NO: 3354578 - DNA, 25 bp, Homo sapien
ctctgcgaattctgccagggtaata

SEQ ID NO: 3354579 - DNA, 25 bp, Homo sapien
ccagggctgttgtctctgcgaattc

SEQ ID NO: 3354580 - DNA, 25 bp, Homo sapien
gactctggtagtctggtccagggct

SEQ ID NO: 3354581 - DNA, 25 bp, Homo sapien
cagcgcagactctggtagtctggtc

SEQ ID NO: 3354582 - DNA, 25 bp, Homo sapien
gaagaacacaagttttccagtccat

SEQ ID NO: 3354583 - DNA, 25 bp, Homo sapien
cgcgcagccgcctcatcataagagg

SEQ ID NO: 3354584 - DNA, 25 bp, Homo sapien
ctcttccgggtaccactctgtctcc

SEQ ID NO: 3354585 - DNA, 25 bp, Homo sapien
cacttgcggaggttgatggtgaggg

SEQ ID NO: 3354586 - DNA, 25 bp, Homo sapien
tttcggtgctaatcactgtccctgc

SEQ ID NO: 3354587 - DNA, 25 bp, Homo sapien
ttagtacttgattcaaacttggcca

SEQ ID NO: 3354588 - DNA, 25 bp, Homo sapien
ttgtaattcctctttcggtgctaat

SEQ ID NO: 3354589 - DNA, 25 bp, Homo sapien
tggttatctctgtttagtacttgat

SEQ ID NO: 3354590 - DNA, 25 bp, Homo sapien
atgaccaacagatatgatgcagaag

SEQ ID NO: 3354591 - DNA, 25 bp, Homo sapien
tgaaagtcggccatccattagagtg

SEQ ID NO: 3354592 - DNA, 25 bp, Homo sapien
aattgtccggatgccttattaacgg

SEQ ID NO: 3354593 - DNA, 25 bp, Homo sapien
taacggttggtgaaaatatcctgaa

SEQ ID NO: 3354594 - DNA, 25 bp, Homo sapien
cactttcttcactttccaacaccct

SEQ ID NO: 3354595 - DNA, 25 bp, Homo sapien
cttcctctaggctccaagtcacttt

SEQ ID NO: 3354596 - DNA, 25 bp, Homo sapien
ctctaggctccaagtcactttcttc

SEQ ID NO: 3354597 - DNA, 25 bp, Homo sapien
tcctctaggctccaagtcactttct

SEQ ID NO: 3354598 - DNA, 25 bp, Homo sapien
gcctgccaacccacacatctggact

SEQ ID NO: 3354599 - DNA, 25 bp, Homo sapien
gccaacccacacatctggacttcct

SEQ ID NO: 3354600 - DNA, 25 bp, Homo sapien
cactgctacacagattccatatatg

SEQ ID NO: 3354601 - DNA, 25 bp, Homo sapien
catctgagccactggtacatcagtg

SEQ ID NO: 3354602 - DNA, 25 bp, Homo sapien
caaaactcttcccaggtaaatgcgc

SEQ ID NO: 3354603 - DNA, 25 bp, Homo sapien
ctctgagggatgctggatctatgat

SEQ ID NO: 3354604 - DNA, 25 bp, Homo sapien
caggtaaatgcgcttggaacataca

SEQ ID NO: 3354605 - DNA, 25 bp, Homo sapien
ggatctatgatacactttgtccttc

SEQ ID NO: 3354606 - DNA, 25 bp, Homo sapien
taattctaattctcccggaggcagg

SEQ ID NO: 3354607 - DNA, 25 bp, Homo sapien
tgtattagttagcaagatggccgtc

SEQ ID NO: 3354608 - DNA, 25 bp, Homo sapien
tttcagagatgatccggcccagctc

SEQ ID NO: 3354609 - DNA, 25 bp, Homo sapien
taagcacggagcctatgatgggtac

SEQ ID NO: 3354610 - DNA, 25 bp, Homo sapien
tgaagtccagaatgtatgtgtatat

SEQ ID NO: 3354611 - DNA, 25 bp, Homo sapien
gagagaacagttaggcagtacatct

SEQ ID NO: 3354612 - DNA, 25 bp, Homo sapien
tcagggagagaacagttaggcagta

SEQ ID NO: 3354613 - DNA, 25 bp, Homo sapien
agaacagttaggcagtacatctctt

SEQ ID NO: 3354614 - DNA, 25 bp, Homo sapien
caatttcaacctcgaattcatttga

SEQ ID NO: 3354615 - DNA, 25 bp, Homo sapien
caaaagggaaggcaatgctgaaatt

SEQ ID NO: 3354616 - DNA, 25 bp, Homo sapien
agggaaggcaatgctgaaattcacc

SEQ ID NO: 3354617 - DNA, 25 bp, Homo sapien
ttagaccaatttcaacctcgaattc

SEQ ID NO: 3354618 - DNA, 25 bp, Homo sapien
tgcttgactcaactgaactatttca

SEQ ID NO: 3354619 - DNA, 25 bp, Homo sapien
gatattgttggttggtacatgcttg

SEQ ID NO: 3354620 - DNA, 25 bp, Homo sapien
aggggcttccggcatccaagcctgc

SEQ ID NO: 3354621 - DNA, 25 bp, Homo sapien
cagagagtctgggagttttcagagc

SEQ ID NO: 3354622 - DNA, 25 bp, Homo sapien
tgggtgccagcgcacctgtacagtg

SEQ ID NO: 3354623 - DNA, 25 bp, Homo sapien
taaactcacaagtcatgcagaatgc

SEQ ID NO: 3354624 - DNA, 25 bp, Homo sapien
caagtggagttatatgtgtgcactc

SEQ ID NO: 3354625 - DNA, 25 bp, Homo sapien
tactggcttagagcaaggcatggcc

SEQ ID NO: 3354626 - DNA, 25 bp, Homo sapien
tcaaacatgcacttagcccctagaa

SEQ ID NO: 3354627 - DNA, 25 bp, Homo sapien
caaacatgcacttagcccctagaac

SEQ ID NO: 3354628 - DNA, 25 bp, Homo sapien
ctgtgctcattagctctcttacagc

SEQ ID NO: 3354629 - DNA, 25 bp, Homo sapien
tcttacagctttcactcaaacatgc

SEQ ID NO: 3354630 - DNA, 25 bp, Homo sapien
gaaaagggctctcgtctagaccttc

SEQ ID NO: 3354631 - DNA, 25 bp, Homo sapien
aatgcgaccccacaggatcctagga

SEQ ID NO: 3354632 - DNA, 25 bp, Homo sapien
ccatgaggtaaacgtgagaaacttc

SEQ ID NO: 3354633 - DNA, 25 bp, Homo sapien
ggtggttttcccctgctaatgcgac

SEQ ID NO: 3354634 - DNA, 25 bp, Homo sapien
tgaaagttcccgtgtcacataatac

SEQ ID NO: 3354635 - DNA, 25 bp, Homo sapien
aaatccacagatgactgtccatgaa

SEQ ID NO: 3354636 - DNA, 25 bp, Homo sapien
ccatgaaaatccacagatctcctgt

SEQ ID NO: 3354637 - DNA, 25 bp, Homo sapien
gatctcctgttcctttgggtcttca

SEQ ID NO: 3354638 - DNA, 25 bp, Homo sapien
ttcctctggccacaatggcagttga

SEQ ID NO: 3354639 - DNA, 25 bp, Homo sapien
acaatggcagttgaaaagcagggag

SEQ ID NO: 3354640 - DNA, 25 bp, Homo sapien
ttctctgtcctgactttcctctggc

SEQ ID NO: 3354641 - DNA, 25 bp, Homo sapien
agaaagtgcctcagaggaagggaat

SEQ ID NO: 3354642 - DNA, 25 bp, Homo sapien
gagctctcttggacatctagcccag

SEQ ID NO: 3354643 - DNA, 25 bp, Homo sapien
gagaggccccagtcacattgagagg

SEQ ID NO: 3354644 - DNA, 25 bp, Homo sapien
gacggcaacttcagagagaacccag

SEQ ID NO: 3354645 - DNA, 25 bp, Homo sapien
tggttccctctgacaagccagttgc

SEQ ID NO: 3354646 - DNA, 25 bp, Homo sapien
cagagttaactggagatttgctgaa

SEQ ID NO: 3354647 - DNA, 25 bp, Homo sapien
attgcccatcaccatctgcctgaaa

SEQ ID NO: 3354648 - DNA, 25 bp, Homo sapien
ctttgatcttgcttaataagttatc

SEQ ID NO: 3354649 - DNA, 25 bp, Homo sapien
gagtccaattgcccatcaccatctg

SEQ ID NO: 3354650 - DNA, 25 bp, Homo sapien
tcctgggccttggatgactcccttg

SEQ ID NO: 3354651 - DNA, 25 bp, Homo sapien
ggatgactcccttgcaagaatacat

SEQ ID NO: 3354652 - DNA, 25 bp, Homo sapien
ctgtccgcaggtctggtcctcaggc

SEQ ID NO: 3354653 - DNA, 25 bp, Homo sapien
gctgtccgcaggtctggtcctcagg

SEQ ID NO: 3354654 - DNA, 25 bp, Homo sapien
gaatagtactccgctgagtatattc

SEQ ID NO: 3354655 - DNA, 25 bp, Homo sapien
aataaggcacttttacttctatggg

SEQ ID NO: 3354656 - DNA, 25 bp, Homo sapien
gaggcagttgtctcttccatatact

SEQ ID NO: 3354657 - DNA, 25 bp, Homo sapien
acataaatagttaataaggcacttt

SEQ ID NO: 3354658 - DNA, 25 bp, Homo sapien
gcaagtataaatggaacatcacagg

SEQ ID NO: 3354659 - DNA, 25 bp, Homo sapien
gttcactgttcccaggaactgcctt

SEQ ID NO: 3354660 - DNA, 25 bp, Homo sapien
cttcaggctgtagaagctgcatttc

SEQ ID NO: 3354661 - DNA, 25 bp, Homo sapien
tgttctaaaccacaccatcacgatc

SEQ ID NO: 3354662 - DNA, 25 bp, Homo sapien
tgccagtttggcagcgtaaggagga

SEQ ID NO: 3354663 - DNA, 25 bp, Homo sapien
tttggcagcgtaaggaggatttgct

SEQ ID NO: 3354664 - DNA, 25 bp, Homo sapien
cagtttggcagcgtaaggaggattt

SEQ ID NO: 3354665 - DNA, 25 bp, Homo sapien
cagcgtaaggaggatttgctcttac

SEQ ID NO: 3354666 - DNA, 25 bp, Homo sapien
agctctctggtgacttagaattccc

SEQ ID NO: 3354667 - DNA, 25 bp, Homo sapien
ttagctctctggtgacttagaattc

SEQ ID NO: 3354668 - DNA, 25 bp, Homo sapien
tagctctctggtgacttagaattcc

SEQ ID NO: 3354669 - DNA, 25 bp, Homo sapien
actttgtgccaatcagtcctcgttt

SEQ ID NO: 3354670 - DNA, 25 bp, Homo sapien
agagcccaggaactttgtgccaatc

SEQ ID NO: 3354671 - DNA, 25 bp, Homo sapien
ggaactttgtgccaatcagtcctcg

SEQ ID NO: 3354672 - DNA, 25 bp, Homo sapien
gcccaggaactttgtgccaatcagt

SEQ ID NO: 3354673 - DNA, 25 bp, Homo sapien
tccacactgtccgagtggtagggcc

SEQ ID NO: 3354674 - DNA, 25 bp, Homo sapien
acactgtccgagtggtagggccaga

SEQ ID NO: 3354675 - DNA, 25 bp, Homo sapien
agtccacactgtccgagtggtaggg

SEQ ID NO: 3354676 - DNA, 25 bp, Homo sapien
gtgagtccacactgtccgagtggta

SEQ ID NO: 3354677 - DNA, 25 bp, Homo sapien
tgataaagaggccacgaggcactca

SEQ ID NO: 3354678 - DNA, 25 bp, Homo sapien
ttccttcaacaggtggtgataaaga

SEQ ID NO: 3354679 - DNA, 25 bp, Homo sapien
tcaacaggtggtgataaagaggcca

SEQ ID NO: 3354680 - DNA, 25 bp, Homo sapien
aagaggccacgaggcactcagagaa

SEQ ID NO: 3354681 - DNA, 25 bp, Homo sapien
tgcacacatgaacacgtgcaggtgt

SEQ ID NO: 3354682 - DNA, 25 bp, Homo sapien
cacatgaacacgtgcaggtgtggtg

SEQ ID NO: 3354683 - DNA, 25 bp, Homo sapien
acgtgcacacatgaacacgtgcagg

SEQ ID NO: 3354684 - DNA, 25 bp, Homo sapien
aagggggcacatgggtgtgtaagca

SEQ ID NO: 3354685 - DNA, 25 bp, Homo sapien
tgaatcctcttaaagctctgggact

SEQ ID NO: 3354686 - DNA, 25 bp, Homo sapien
tgtaaaaactttcgtggtttgcaga

SEQ ID NO: 3354687 - DNA, 25 bp, Homo sapien
tgtgtaaaaactttcgtggtttgca

SEQ ID NO: 3354688 - DNA, 25 bp, Homo sapien
gaatcctcttaaagctctgggactt

SEQ ID NO: 3354689 - DNA, 25 bp, Homo sapien
gataaatgctcagtcctttggaaaa

SEQ ID NO: 3354690 - DNA, 25 bp, Homo sapien
tacagttcacagaatcaccagattg

SEQ ID NO: 3354691 - DNA, 25 bp, Homo sapien
caaacgaaatctaagtgcaagcatc

SEQ ID NO: 3354692 - DNA, 25 bp, Homo sapien
tagcagctctatggtgtctgagata

SEQ ID NO: 3354693 - DNA, 25 bp, Homo sapien
tacatacgacccaaaggacgaggct

SEQ ID NO: 3354694 - DNA, 25 bp, Homo sapien
ccaggcagctggttattggcacagt

SEQ ID NO: 3354695 - DNA, 25 bp, Homo sapien
tgctagagatatgaccaggatgact

SEQ ID NO: 3354696 - DNA, 25 bp, Homo sapien
ggatcctgtagaccctcgagtacta

SEQ ID NO: 3354697 - DNA, 25 bp, Homo sapien
catctgtattacaaggagcagcccc

SEQ ID NO: 3354698 - DNA, 25 bp, Homo sapien
aaaggctcactcaatcagacaggta

SEQ ID NO: 3354699 - DNA, 25 bp, Homo sapien
tgtgacttgtagatatcagccctgg

SEQ ID NO: 3354700 - DNA, 25 bp, Homo sapien
agtggcatcactcctacctaaggga

SEQ ID NO: 3354701 - DNA, 25 bp, Homo sapien
cagatgttagctcggtggacgtgac

SEQ ID NO: 3354702 - DNA, 25 bp, Homo sapien
acgtgacatcggtagaaggttctgc

SEQ ID NO: 3354703 - DNA, 25 bp, Homo sapien
tatctggtacctcaacaggtgttgg

SEQ ID NO: 3354704 - DNA, 25 bp, Homo sapien
gctcttttttggactgcgggtgaac

SEQ ID NO: 3354705 - DNA, 25 bp, Homo sapien
gagagttggggattgtgtagacctc

SEQ ID NO: 3354706 - DNA, 25 bp, Homo sapien
agagagttggggattgtgtagacct

SEQ ID NO: 3354707 - DNA, 25 bp, Homo sapien
gagttggggattgtgtagacctcat

SEQ ID NO: 3354708 - DNA, 25 bp, Homo sapien
agagttggggattgtgtagacctca

SEQ ID NO: 3354709 - DNA, 25 bp, Homo sapien
tctggagtatgcctcacaaaattct

SEQ ID NO: 3354710 - DNA, 25 bp, Homo sapien
ctctggagtatgcctcacaaaattc

SEQ ID NO: 3354711 - DNA, 25 bp, Homo sapien
cctcacaaaattctgcccctgctcc

SEQ ID NO: 3354712 - DNA, 25 bp, Homo sapien
ctcacaaaattctgcccctgctcct

SEQ ID NO: 3354713 - DNA, 25 bp, Homo sapien
taccttggtgatgttcaggaggccg

SEQ ID NO: 3354714 - DNA, 25 bp, Homo sapien
caagctcttcgatgtagcgggcgaa

SEQ ID NO: 3354715 - DNA, 25 bp, Homo sapien
cacaggcgggtgatattgaggacca

SEQ ID NO: 3354716 - DNA, 25 bp, Homo sapien
tcacggtgccgtagatgttagaagc

SEQ ID NO: 3354717 - DNA, 25 bp, Homo sapien
agggagagaagagaattcaaccaag

SEQ ID NO: 3354718 - DNA, 25 bp, Homo sapien
gagaagagaattcaaccaaggacac

SEQ ID NO: 3354719 - DNA, 25 bp, Homo sapien
ttcaaccaaggacacagagctccca

SEQ ID NO: 3354720 - DNA, 25 bp, Homo sapien
gagaattcaaccaaggacacagagc

SEQ ID NO: 3354721 - DNA, 25 bp, Homo sapien
aaatataaggataaagtagtctgaa

SEQ ID NO: 3354722 - DNA, 25 bp, Homo sapien
aatataaggataaagtagtctgaac

SEQ ID NO: 3354723 - DNA, 25 bp, Homo sapien
aaaatgtcagtagcagatgccaggt

SEQ ID NO: 3354724 - DNA, 25 bp, Homo sapien
tgggtatgtcaagcttatgcactga

SEQ ID NO: 3354725 - DNA, 25 bp, Homo sapien
gatgccaggtcagttctacatgcaa

SEQ ID NO: 3354726 - DNA, 25 bp, Homo sapien
cagtgcagtccccatgtattttaaa

SEQ ID NO: 3354727 - DNA, 25 bp, Homo sapien
tcttcccagggacatagttcagagc

SEQ ID NO: 3354728 - DNA, 25 bp, Homo sapien
gaatgtagggtaagggacactccca

SEQ ID NO: 3354729 - DNA, 25 bp, Homo sapien
ttctctgggagaagccataactgtg

SEQ ID NO: 3354730 - DNA, 25 bp, Homo sapien
cataactgtggtgggttccacaccg

SEQ ID NO: 3354731 - DNA, 25 bp, Homo sapien
taagactaaagctatctgggctcac

SEQ ID NO: 3354732 - DNA, 25 bp, Homo sapien
caaatggcggttaccaggttggcat

SEQ ID NO: 3354733 - DNA, 25 bp, Homo sapien
tatgggatctactttggaacgattc

SEQ ID NO: 3354734 - DNA, 25 bp, Homo sapien
gagtagctacaggtggtcctccaaa

SEQ ID NO: 3354735 - DNA, 25 bp, Homo sapien
tatcggtagtgaggatgccttttcc

SEQ ID NO: 3354736 - DNA, 25 bp, Homo sapien
taacactgtctgaccttgctatcgg

SEQ ID NO: 3354737 - DNA, 25 bp, Homo sapien
aatggcagtgtgctccttgagtgac

SEQ ID NO: 3354738 - DNA, 25 bp, Homo sapien
gactcaccgatgatttttgaacgcc

SEQ ID NO: 3354739 - DNA, 25 bp, Homo sapien
gttccctagcgatagctcagccctg

SEQ ID NO: 3354740 - DNA, 25 bp, Homo sapien
ggtccatgtaaaagggagatccagg

SEQ ID NO: 3354741 - DNA, 25 bp, Homo sapien
attcagtcaccgtgggttccctagc

SEQ ID NO: 3354742 - DNA, 25 bp, Homo sapien
ttagggtccatgtaaaagggagatc

SEQ ID NO: 3354743 - DNA, 25 bp, Homo sapien
aacatcacgggtgctggctccaaag

SEQ ID NO: 3354744 - DNA, 25 bp, Homo sapien
gcctcagcctagaaactgcagccag

SEQ ID NO: 3354745 - DNA, 25 bp, Homo sapien
tatattgtttattccagccatctcc

SEQ ID NO: 3354746 - DNA, 25 bp, Homo sapien
aatccacggccaatgaattaaatgg

SEQ ID NO: 3354747 - DNA, 25 bp, Homo sapien
ttttattatgacatttgatacaact

SEQ ID NO: 3354748 - DNA, 25 bp, Homo sapien
tatattttattatgacatttgatac

SEQ ID NO: 3354749 - DNA, 25 bp, Homo sapien
tcctgtttatattttattatgacat

SEQ ID NO: 3354750 - DNA, 25 bp, Homo sapien
cctgtttatattttattatgacatt

SEQ ID NO: 3354751 - DNA, 25 bp, Homo sapien
ctgttagtcacactcttagcggtgg

SEQ ID NO: 3354752 - DNA, 25 bp, Homo sapien
cagttctggcaatgattacgggcac

SEQ ID NO: 3354753 - DNA, 25 bp, Homo sapien
gagcccaagaccacgttagtgccat

SEQ ID NO: 3354754 - DNA, 25 bp, Homo sapien
gcagcttgccaatggaattatacca

SEQ ID NO: 3354755 - DNA, 25 bp, Homo sapien
ctagagtggatactaggattaaaaa

SEQ ID NO: 3354756 - DNA, 25 bp, Homo sapien
cacagaaggtagaaagcacacagtc

SEQ ID NO: 3354757 - DNA, 25 bp, Homo sapien
gatactaggattaaaaagggcacag

SEQ ID NO: 3354758 - DNA, 25 bp, Homo sapien
tcagatggctcttcaatcgatccat

SEQ ID NO: 3354759 - DNA, 25 bp, Homo sapien
aggcaatagagagatggtttgccaa

SEQ ID NO: 3354760 - DNA, 25 bp, Homo sapien
gatggtttgccaaccgaatcttcta

SEQ ID NO: 3354761 - DNA, 25 bp, Homo sapien
ttgccaaccgaatcttctatcagac

SEQ ID NO: 3354762 - DNA, 25 bp, Homo sapien
gagagatggtttgccaaccgaatct

SEQ ID NO: 3354763 - DNA, 25 bp, Homo sapien
cctgggtccatagagttggtacttg

SEQ ID NO: 3354764 - DNA, 25 bp, Homo sapien
ctgtcctgggtccatagagttggta

SEQ ID NO: 3354765 - DNA, 25 bp, Homo sapien
ggtccatagagttggtacttgagca

SEQ ID NO: 3354766 - DNA, 25 bp, Homo sapien
ccatagagttggtacttgagcaaga

SEQ ID NO: 3354767 - DNA, 25 bp, Homo sapien
catgacaagctctctttcctccaca

SEQ ID NO: 3354768 - DNA, 25 bp, Homo sapien
tgacaagctctctttcctccacatt

SEQ ID NO: 3354769 - DNA, 25 bp, Homo sapien
gacaagctctctttcctccacatta

SEQ ID NO: 3354770 - DNA, 25 bp, Homo sapien
acaagctctctttcctccacattac

SEQ ID NO: 3354771 - DNA, 25 bp, Homo sapien
tgcgtcactggtcacagcttgggct

SEQ ID NO: 3354772 - DNA, 25 bp, Homo sapien
gaggacctaattgttcacctgggtg

SEQ ID NO: 3354773 - DNA, 25 bp, Homo sapien
tctctcccagtaaacgggacttcca

SEQ ID NO: 3354774 - DNA, 25 bp, Homo sapien
cagtaaacgggacttccagtctgcg

SEQ ID NO: 3354775 - DNA, 25 bp, Homo sapien
ttacttacgggctccaggtcactca

SEQ ID NO: 3354776 - DNA, 25 bp, Homo sapien
gtcactcatgtacaccctggtttca

SEQ ID NO: 3354777 - DNA, 25 bp, Homo sapien
gaacatcaccagacattacggttgg

SEQ ID NO: 3354778 - DNA, 25 bp, Homo sapien
tacggttggcggcacttctatgtcc

SEQ ID NO: 3354779 - DNA, 25 bp, Homo sapien
tctggagctagaaggaaaaggacct

SEQ ID NO: 3354780 - DNA, 25 bp, Homo sapien
gggtattgccccaactactctgatg

SEQ ID NO: 3354781 - DNA, 25 bp, Homo sapien
cacagggttatactcatgaagcatg

SEQ ID NO: 3354782 - DNA, 25 bp, Homo sapien
gatgccacaggcacataagctacct

SEQ ID NO: 3354783 - DNA, 25 bp, Homo sapien
tgagctgttcatgtcatcagaaagg

SEQ ID NO: 3354784 - DNA, 25 bp, Homo sapien
gcatgggtctgaaccactcagtcca

SEQ ID NO: 3354785 - DNA, 25 bp, Homo sapien
tccccttagtgaacggcaaatatat

SEQ ID NO: 3354786 - DNA, 25 bp, Homo sapien
gatggcgaggctgaagacatttacg

SEQ ID NO: 3354787 - DNA, 25 bp, Homo sapien
tactaaaaaccaatggctggcactg

SEQ ID NO: 3354788 - DNA, 25 bp, Homo sapien
tagtacaagacctcctgaccagtgg

SEQ ID NO: 3354789 - DNA, 25 bp, Homo sapien
catatggctgcgatgtagacctggc

SEQ ID NO: 3354790 - DNA, 25 bp, Homo sapien
gaccggatagtatgcaacgccaagg

SEQ ID NO: 3354791 - DNA, 25 bp, Homo sapien
tgaagaattcactgcaggtctcctg

SEQ ID NO: 3354792 - DNA, 25 bp, Homo sapien
acacatcgagtgttcttagcaacag

SEQ ID NO: 3354793 - DNA, 25 bp, Homo sapien
tacagcaaatggataggatcaggtg

SEQ ID NO: 3354794 - DNA, 25 bp, Homo sapien
gtattaatagtacccaactgagaca

SEQ ID NO: 3354795 - DNA, 25 bp, Homo sapien
actgctggttgtgtaaatccgagct

SEQ ID NO: 3354796 - DNA, 25 bp, Homo sapien
ggtctgaccaaggcccgtgtctttg

SEQ ID NO: 3354797 - DNA, 25 bp, Homo sapien
tgtgtaaatccgagctgttccacag

SEQ ID NO: 3354798 - DNA, 25 bp, Homo sapien
tgaccaaggcccgtgtctttgggcc

SEQ ID NO: 3354799 - DNA, 25 bp, Homo sapien
tatggagcccatcgcaaacattggt

SEQ ID NO: 3354800 - DNA, 25 bp, Homo sapien
tattgaggccttgtacataagagag

SEQ ID NO: 3354801 - DNA, 25 bp, Homo sapien
tggcactttcccagctgaaccagta

SEQ ID NO: 3354802 - DNA, 25 bp, Homo sapien
caacaccaacgtcaaatatggagcc

SEQ ID NO: 3354803 - DNA, 25 bp, Homo sapien
gtggccgccgtgcacccctcgccat

SEQ ID NO: 3354804 - DNA, 25 bp, Homo sapien
gccgcgccactcaggtggccgccgt

SEQ ID NO: 3354805 - DNA, 25 bp, Homo sapien
ctgacaccgccgcgccactcaggtg

SEQ ID NO: 3354806 - DNA, 25 bp, Homo sapien
gcgccactcaggtggccgccgtgca

SEQ ID NO: 3354807 - DNA, 25 bp, Homo sapien
cggagcttcccacctacaggagcct

SEQ ID NO: 3354808 - DNA, 25 bp, Homo sapien
ggtagcgcctactgcgggcgagccg

SEQ ID NO: 3354809 - DNA, 25 bp, Homo sapien
cggcgcctcacagcgttgcgagctg

SEQ ID NO: 3354810 - DNA, 25 bp, Homo sapien
ggacgcccggtagcgcctactgcgg

SEQ ID NO: 3354811 - DNA, 25 bp, Homo sapien
tgggcgtcgcatcgcacgcgtgttc

SEQ ID NO: 3354812 - DNA, 25 bp, Homo sapien
caccgcaacttctgtgggcgtcgca

SEQ ID NO: 3354813 - DNA, 25 bp, Homo sapien
catcgcacgcgtgttcaaggacacc

SEQ ID NO: 3354814 - DNA, 25 bp, Homo sapien
cacgcgtgttcaaggacacccagga

SEQ ID NO: 3354815 - DNA, 25 bp, Homo sapien
cagcgggccgttccctggtgacttt

SEQ ID NO: 3354816 - DNA, 25 bp, Homo sapien
tattaagtacctacagaagtttcgc

SEQ ID NO: 3354817 - DNA, 25 bp, Homo sapien
cgggcgactgcgctgtaagtcttaa

SEQ ID NO: 3354818 - DNA, 25 bp, Homo sapien
gaagtttcgctacacgatcctgcaa

SEQ ID NO: 3354819 - DNA, 25 bp, Homo sapien
gctttttagtgcccgccctcttggc

SEQ ID NO: 3354820 - DNA, 25 bp, Homo sapien
cggctttttagtgcccgccctcttg

SEQ ID NO: 3354821 - DNA, 25 bp, Homo sapien
cctcttcccggtgggttgctgcgaa

SEQ ID NO: 3354822 - DNA, 25 bp, Homo sapien
cgccctcttcccggtgggttgctgc

SEQ ID NO: 3354823 - DNA, 25 bp, Homo sapien
tcttcccggtgggttgctgcgaaaa

SEQ ID NO: 3354824 - DNA, 25 bp, Homo sapien
ggactttccacattgacgctcccgg

SEQ ID NO: 3354825 - DNA, 25 bp, Homo sapien
caaggttgatgtagccgcggtctct

SEQ ID NO: 3354826 - DNA, 25 bp, Homo sapien
gctctagagaggcacgattgcatcg

SEQ ID NO: 3354827 - DNA, 25 bp, Homo sapien
gattgcatcgacacgtgggcaggtc

SEQ ID NO: 3354828 - DNA, 25 bp, Homo sapien
cgacatcgaagctcgggaaacggat

SEQ ID NO: 3354829 - DNA, 25 bp, Homo sapien
actttcccactatacaatggaggat

SEQ ID NO: 3354830 - DNA, 25 bp, Homo sapien
gattctggaaaagtcgtgacttgta

SEQ ID NO: 3354831 - DNA, 25 bp, Homo sapien
ctttcccactatacaatggaggatg

SEQ ID NO: 3354832 - DNA, 25 bp, Homo sapien
tggaaaagtcgtgacttgtatttag

SEQ ID NO: 3354833 - DNA, 25 bp, Homo sapien
tctggcagcatcattgtgatctcag

SEQ ID NO: 3354834 - DNA, 25 bp, Homo sapien
tattgcatgatgagaaatccaaatg

SEQ ID NO: 3354835 - DNA, 25 bp, Homo sapien
tccaaatgaagctcatgaagtcgac

SEQ ID NO: 3354836 - DNA, 25 bp, Homo sapien
tcatggctctccttttttgagtagt

SEQ ID NO: 3354837 - DNA, 25 bp, Homo sapien
atggagccagctacccaaagcctgg

SEQ ID NO: 3354838 - DNA, 25 bp, Homo sapien
gcaagctggctttcatttggtaaga

SEQ ID NO: 3354839 - DNA, 25 bp, Homo sapien
tttgaaggaccctggaaggctaagc

SEQ ID NO: 3354840 - DNA, 25 bp, Homo sapien
cactgctaagtgaggctttgctaga

SEQ ID NO: 3354841 - DNA, 25 bp, Homo sapien
ctggctcaggcataggtttgcttta

SEQ ID NO: 3354842 - DNA, 25 bp, Homo sapien
ttgattatttcctataagacgctgg

SEQ ID NO: 3354843 - DNA, 25 bp, Homo sapien
gatgtaagccacgttgtagcctcca

SEQ ID NO: 3354844 - DNA, 25 bp, Homo sapien
ggctacaggcataaatggttgatta

SEQ ID NO: 3354845 - DNA, 25 bp, Homo sapien
catggcagttttcggattcaattcc

SEQ ID NO: 3354846 - DNA, 25 bp, Homo sapien
gctagagcttcgtgctttagccatc

SEQ ID NO: 3354847 - DNA, 25 bp, Homo sapien
ggttttatctgatgtgaaaggagac

SEQ ID NO: 3354848 - DNA, 25 bp, Homo sapien
aattccatcctttcgcagttgctag

SEQ ID NO: 3354849 - DNA, 25 bp, Homo sapien
tatgtaaaaagtaatgtcatggcag

SEQ ID NO: 3354850 - DNA, 25 bp, Homo sapien
aagtaatgtcatggcagataaaact

SEQ ID NO: 3354851 - DNA, 25 bp, Homo sapien
taaaaagtaatgtcatggcagataa

SEQ ID NO: 3354852 - DNA, 25 bp, Homo sapien
tgtaaaaagtaatgtcatggcagat

SEQ ID NO: 3354853 - DNA, 25 bp, Homo sapien
tccatgaaagcagacttgatagaat

SEQ ID NO: 3354854 - DNA, 25 bp, Homo sapien
taactaccctgtccgtttcaggcca

SEQ ID NO: 3354855 - DNA, 25 bp, Homo sapien
ccgtttcaggccacgtggttgataa

SEQ ID NO: 3354856 - DNA, 25 bp, Homo sapien
cttgatagaatgtgtaactaccctg

SEQ ID NO: 3354857 - DNA, 25 bp, Homo sapien
acagggatgccaatgaaataagtac

SEQ ID NO: 3354858 - DNA, 25 bp, Homo sapien
cataggtttgaggatcagtatcagg

SEQ ID NO: 3354859 - DNA, 25 bp, Homo sapien
agagtcataggtttgaggatcagta

SEQ ID NO: 3354860 - DNA, 25 bp, Homo sapien
taaacaaggatatatggacagtttt

SEQ ID NO: 3354861 - DNA, 25 bp, Homo sapien
tacagggaaagcatcttatgtgcag

SEQ ID NO: 3354862 - DNA, 25 bp, Homo sapien
acagggaaagcatcttatgtgcagg

SEQ ID NO: 3354863 - DNA, 25 bp, Homo sapien
agcatcttatgtgcaggggaggaaa

SEQ ID NO: 3354864 - DNA, 25 bp, Homo sapien
ttacagggaaagcatcttatgtgca

SEQ ID NO: 3354865 - DNA, 25 bp, Homo sapien
tcctattgcttggtagtagcccctt

SEQ ID NO: 3354866 - DNA, 25 bp, Homo sapien
ttaccatcgcctttaggaatctctg

SEQ ID NO: 3354867 - DNA, 25 bp, Homo sapien
tcaggcccacactgacggtgactgc

SEQ ID NO: 3354868 - DNA, 25 bp, Homo sapien
tgcacggatgtgactttcaatgtga

SEQ ID NO: 3354869 - DNA, 25 bp, Homo sapien
aatccaggcatctgaatgacagcca

SEQ ID NO: 3354870 - DNA, 25 bp, Homo sapien
tgacagccatatctgacactgtaac

SEQ ID NO: 3354871 - DNA, 25 bp, Homo sapien
cagccatatctgacactgtaactgc

SEQ ID NO: 3354872 - DNA, 25 bp, Homo sapien
ttgctgccctcttaactcacccctg

SEQ ID NO: 3354873 - DNA, 25 bp, Homo sapien
aggccctgcgtctcttcaatcagtc

SEQ ID NO: 3354874 - DNA, 25 bp, Homo sapien
gtcctacataattaccactggttgc

SEQ ID NO: 3354875 - DNA, 25 bp, Homo sapien
aattgtcaggttcctcatcttggtc

SEQ ID NO: 3354876 - DNA, 25 bp, Homo sapien
ccacagtgaagagaattgtcaggtt

SEQ ID NO: 3354877 - DNA, 25 bp, Homo sapien
agtttttcaaaatgcctaagtggat

SEQ ID NO: 3354878 - DNA, 25 bp, Homo sapien
gaatttctgtggcataacataaggt

SEQ ID NO: 3354879 - DNA, 25 bp, Homo sapien
tctttaagtctaataccagtgttca

SEQ ID NO: 3354880 - DNA, 25 bp, Homo sapien
tactacagataggacatgtttgagg

SEQ ID NO: 3354881 - DNA, 25 bp, Homo sapien
ccatgagcagcatgattagtttgat

SEQ ID NO: 3354882 - DNA, 25 bp, Homo sapien
tgagcagcatgattagtttgatttc

SEQ ID NO: 3354883 - DNA, 25 bp, Homo sapien
catgagcagcatgattagtttgatt

SEQ ID NO: 3354884 - DNA, 25 bp, Homo sapien
gagcagcatgattagtttgatttct

SEQ ID NO: 3354885 - DNA, 25 bp, Homo sapien
agattcttttataagttgtgctaat

SEQ ID NO: 3354886 - DNA, 25 bp, Homo sapien
gattcttttataagttgtgctaata

SEQ ID NO: 3354887 - DNA, 25 bp, Homo sapien
attcttttataagttgtgctaatac

SEQ ID NO: 3354888 - DNA, 25 bp, Homo sapien
aagattcttttataagttgtgctaa

SEQ ID NO: 3354889 - DNA, 25 bp, Homo sapien
tctcgtggccttcaagatcattttc

SEQ ID NO: 3354890 - DNA, 25 bp, Homo sapien
cataacatggattattttagatttt

SEQ ID NO: 3354891 - DNA, 25 bp, Homo sapien
gtggccttcaagatcattttccatt

SEQ ID NO: 3354892 - DNA, 25 bp, Homo sapien
tcgtggccttcaagatcattttcca

SEQ ID NO: 3354893 - DNA, 25 bp, Homo sapien
tcaagtaagggctaggagctgagct

SEQ ID NO: 3354894 - DNA, 25 bp, Homo sapien
gctatcgacgtagaaagcatttcca

SEQ ID NO: 3354895 - DNA, 25 bp, Homo sapien
taggagctgagctatcgacgtagaa

SEQ ID NO: 3354896 - DNA, 25 bp, Homo sapien
cgacgtagaaagcatttccagggag

SEQ ID NO: 3354897 - DNA, 25 bp, Homo sapien
caggaatacacgaaaactgagaaca

SEQ ID NO: 3354898 - DNA, 25 bp, Homo sapien
tacacagagtaaaggccctgagatg

SEQ ID NO: 3354899 - DNA, 25 bp, Homo sapien
tattaaataagcgtgtcaagatggg

SEQ ID NO: 3354900 - DNA, 25 bp, Homo sapien
gtttgtggaagataagtaatgtacc

SEQ ID NO: 3354901 - DNA, 25 bp, Homo sapien
agttcttttacatcattaatgcctt

SEQ ID NO: 3354902 - DNA, 25 bp, Homo sapien
catcttaacggccttttcttcaatc

SEQ ID NO: 3354903 - DNA, 25 bp, Homo sapien
tttacatcattaatgcctttaactt

SEQ ID NO: 3354904 - DNA, 25 bp, Homo sapien
ccatcttaacggccttttcttcaat

SEQ ID NO: 3354905 - DNA, 25 bp, Homo sapien
tggattcttccagcattacaacaaa

SEQ ID NO: 3354906 - DNA, 25 bp, Homo sapien
gaaccatacctagacaaacatggct

SEQ ID NO: 3354907 - DNA, 25 bp, Homo sapien
gatgtccagtggattagcgttttta

SEQ ID NO: 3354908 - DNA, 25 bp, Homo sapien
tgtgggctttacgtttcattgagta

SEQ ID NO: 3354909 - DNA, 25 bp, Homo sapien
gtctgcagctgccagtattgcatcc

SEQ ID NO: 3354910 - DNA, 25 bp, Homo sapien
ccttctggttactatagaaatcaat

SEQ ID NO: 3354911 - DNA, 25 bp, Homo sapien
ctggttactatagaaatcaataacc

SEQ ID NO: 3354912 - DNA, 25 bp, Homo sapien
tctggttactatagaaatcaataac

SEQ ID NO: 3354913 - DNA, 25 bp, Homo sapien
cccattcgtgtagaagctgtgatat

SEQ ID NO: 3354914 - DNA, 25 bp, Homo sapien
ccttcttctccccattcgtgtagaa

SEQ ID NO: 3354915 - DNA, 25 bp, Homo sapien
tctccccattcgtgtagaagctgtg

SEQ ID NO: 3354916 - DNA, 25 bp, Homo sapien
tcttctccccattcgtgtagaagct

SEQ ID NO: 3354917 - DNA, 25 bp, Homo sapien
ggtgcaatgttgaaacttgtatgtg

SEQ ID NO: 3354918 - DNA, 25 bp, Homo sapien
gttaaaagtgctggggtgcaatgtt

SEQ ID NO: 3354919 - DNA, 25 bp, Homo sapien
ataactctctctattaagggttttg

SEQ ID NO: 3354920 - DNA, 25 bp, Homo sapien
tctctctattaagggttttggacca

SEQ ID NO: 3354921 - DNA, 25 bp, Homo sapien
tgaaaaagagtcagctctgatgaca

SEQ ID NO: 3354922 - DNA, 25 bp, Homo sapien
tgatgacacgtccatcaacatccat

SEQ ID NO: 3354923 - DNA, 25 bp, Homo sapien
tttttgaaaaagagtcagctctgat

SEQ ID NO: 3354924 - DNA, 25 bp, Homo sapien
cagctctgatgacacgtccatcaac

SEQ ID NO: 3354925 - DNA, 25 bp, Homo sapien
taacatggaataacaaacaaagatg

SEQ ID NO: 3354926 - DNA, 25 bp, Homo sapien
atactgttggtctgaaagctctgtt

SEQ ID NO: 3354927 - DNA, 25 bp, Homo sapien
cactgtacgattattttgaatagag

SEQ ID NO: 3354928 - DNA, 25 bp, Homo sapien
gaaagctctgttagtcactgtacga

SEQ ID NO: 3354929 - DNA, 25 bp, Homo sapien
tgaaatccaggattaacagacttac

SEQ ID NO: 3354930 - DNA, 25 bp, Homo sapien
cttattatttgctccagatgccatt

SEQ ID NO: 3354931 - DNA, 25 bp, Homo sapien
tctttgccccagaggttgaaatcca

SEQ ID NO: 3354932 - DNA, 25 bp, Homo sapien
gccattattatgaacttaaggaaac

SEQ ID NO: 3354933 - DNA, 25 bp, Homo sapien
caagaccataatgaggatggccagc

SEQ ID NO: 3354934 - DNA, 25 bp, Homo sapien
ccagcagcactgaagggtgttcaga

SEQ ID NO: 3354935 - DNA, 25 bp, Homo sapien
cagcactgaagggtgttcagagaga

SEQ ID NO: 3354936 - DNA, 25 bp, Homo sapien
gaccataatgaggatggccagcagc

SEQ ID NO: 3354937 - DNA, 25 bp, Homo sapien
aatgaagatgagaaattagtcaaca

SEQ ID NO: 3354938 - DNA, 25 bp, Homo sapien
aaaggaaatttgctggcatgctgat

SEQ ID NO: 3354939 - DNA, 25 bp, Homo sapien
gaaatttgctggcatgctgatggtg

SEQ ID NO: 3354940 - DNA, 25 bp, Homo sapien
tgagaaattagtcaacatgaaagac

SEQ ID NO: 3354941 - DNA, 25 bp, Homo sapien
aacaacttatcttctaatagtgaag

SEQ ID NO: 3354942 - DNA, 25 bp, Homo sapien
aacacagtgcagtaacttaaaacaa

SEQ ID NO: 3354943 - DNA, 25 bp, Homo sapien
tagtgaagtaagttcacataatcac

SEQ ID NO: 3354944 - DNA, 25 bp, Homo sapien
gactcagcagtcagcctaataccca

SEQ ID NO: 3354945 - DNA, 25 bp, Homo sapien
taaggatcatcttctattatgagga

SEQ ID NO: 3354946 - DNA, 25 bp, Homo sapien
agtaaggatcatcttctattatgag

SEQ ID NO: 3354947 - DNA, 25 bp, Homo sapien
gatcatcttctattatgaggaaatc

SEQ ID NO: 3354948 - DNA, 25 bp, Homo sapien
catcttctattatgaggaaatcata

SEQ ID NO: 3354949 - DNA, 25 bp, Homo sapien
tcctttttgcgttcactggttaatg

SEQ ID NO: 3354950 - DNA, 25 bp, Homo sapien
tccagtagggttgttgccatttgga

SEQ ID NO: 3354951 - DNA, 25 bp, Homo sapien
gcgttcactggttaatgagtttcca

SEQ ID NO: 3354952 - DNA, 25 bp, Homo sapien
atgagtttccagtagggttgttgcc

SEQ ID NO: 3354953 - DNA, 25 bp, Homo sapien
tctcttagggaatctggaacaatcc

SEQ ID NO: 3354954 - DNA, 25 bp, Homo sapien
ggaatctggaacaatcccactttca

SEQ ID NO: 3354955 - DNA, 25 bp, Homo sapien
ccatctggaaagtatgtctcttagg

SEQ ID NO: 3354956 - DNA, 25 bp, Homo sapien
gaaagtatgtctcttagggaatctg

SEQ ID NO: 3354957 - DNA, 25 bp, Homo sapien
ttattgtggtaaaattgttgccatt

SEQ ID NO: 3354958 - DNA, 25 bp, Homo sapien
caatccttacacctcagtcttctgc

SEQ ID NO: 3354959 - DNA, 25 bp, Homo sapien
ccctgtaacaccatgctcctgggct

SEQ ID NO: 3354960 - DNA, 25 bp, Homo sapien
ttatggctccctgtaacaccatgct

SEQ ID NO: 3354961 - DNA, 25 bp, Homo sapien
attatctccaggattaatgatcatt

SEQ ID NO: 3354962 - DNA, 25 bp, Homo sapien
cattatctccaggattaatgatcat

SEQ ID NO: 3354963 - DNA, 25 bp, Homo sapien
tctgcctctatagtgaaaaagtagc

SEQ ID NO: 3354964 - DNA, 25 bp, Homo sapien
tccagagaaaggtgaacagaggttt

SEQ ID NO: 3354965 - DNA, 25 bp, Homo sapien
cagtaaacactttgcgggtcatagt

SEQ ID NO: 3354966 - DNA, 25 bp, Homo sapien
tagtactgtttccatgctcagaagc

SEQ ID NO: 3354967 - DNA, 25 bp, Homo sapien
gacaaacagtatcctcctccgaaaa

SEQ ID NO: 3354968 - DNA, 25 bp, Homo sapien
acaaacagtatcctcctccgaaaag

SEQ ID NO: 3354969 - DNA, 25 bp, Homo sapien
ctaattgacttaagctttacaagac

SEQ ID NO: 3354970 - DNA, 25 bp, Homo sapien
tctaattgacttaagctttacaaga

SEQ ID NO: 3354971 - DNA, 25 bp, Homo sapien
gctgccagatgtgacacatagatcc

SEQ ID NO: 3354972 - DNA, 25 bp, Homo sapien
cttacaaagaccttgttggctgcca

SEQ ID NO: 3354973 - DNA, 25 bp, Homo sapien
gacacatagatccatttgtccttga

SEQ ID NO: 3354974 - DNA, 25 bp, Homo sapien
agatgtgacacatagatccatttgt

SEQ ID NO: 3354975 - DNA, 25 bp, Homo sapien
ggatggtaggaggattatgcaattt

SEQ ID NO: 3354976 - DNA, 25 bp, Homo sapien
ctgttttagccaggacaaaagctct

SEQ ID NO: 3354977 - DNA, 25 bp, Homo sapien
tagccaggacaaaagctctggaatt

SEQ ID NO: 3354978 - DNA, 25 bp, Homo sapien
taatggatggtaggaggattatgca

SEQ ID NO: 3354979 - DNA, 25 bp, Homo sapien
ccagcactcggagaatactgaagtg

SEQ ID NO: 3354980 - DNA, 25 bp, Homo sapien
attttctacagtgattacggcagtc

SEQ ID NO: 3354981 - DNA, 25 bp, Homo sapien
ttctccaaattggatggtctttcca

SEQ ID NO: 3354982 - DNA, 25 bp, Homo sapien
tgattacggcagtcttaaaaggaaa

SEQ ID NO: 3354983 - DNA, 25 bp, Homo sapien
tggatttggtaagccaccagccaag

SEQ ID NO: 3354984 - DNA, 25 bp, Homo sapien
caccagccaaggagatcatcgattt

SEQ ID NO: 3354985 - DNA, 25 bp, Homo sapien
cgattttggtcctctgctcaatatg

SEQ ID NO: 3354986 - DNA, 25 bp, Homo sapien
ggagatcatcgattttggtcctctg

SEQ ID NO: 3354987 - DNA, 25 bp, Homo sapien
tccactgtacacccatctgcacgct

SEQ ID NO: 3354988 - DNA, 25 bp, Homo sapien
tgtacacccatctgcacgctgtgca

SEQ ID NO: 3354989 - DNA, 25 bp, Homo sapien
cactgtacacccatctgcacgctgt

SEQ ID NO: 3354990 - DNA, 25 bp, Homo sapien
ctgtacacccatctgcacgctgtgc

SEQ ID NO: 3354991 - DNA, 25 bp, Homo sapien
tttctggctgcgctcgctgccgtga

SEQ ID NO: 3354992 - DNA, 25 bp, Homo sapien
gcgctcgctgccgtgatgaaccgtg

SEQ ID NO: 3354993 - DNA, 25 bp, Homo sapien
gctgccgtgatgaaccgtgcgtaat

SEQ ID NO: 3354994 - DNA, 25 bp, Homo sapien
ccgtgatgaaccgtgcgtaattcat

SEQ ID NO: 3354995 - DNA, 25 bp, Homo sapien
gacagccaagcatcaagcttcttct

SEQ ID NO: 3354996 - DNA, 25 bp, Homo sapien
tcttctgacagccaagcatcaagct

SEQ ID NO: 3354997 - DNA, 25 bp, Homo sapien
tctgacagccaagcatcaagcttct

SEQ ID NO: 3354998 - DNA, 25 bp, Homo sapien
cagccaagcatcaagcttcttcttc

SEQ ID NO: 3354999 - DNA, 25 bp, Homo sapien
agcctcgtcaagtcctgcctgctaa

SEQ ID NO: 3355000 - DNA, 25 bp, Homo sapien
aaagagcctcgtcaagtcctgcctg

SEQ ID NO: 3355001 - DNA, 25 bp, Homo sapien
accaaagagcctcgtcaagtcctgc

SEQ ID NO: 3355002 - DNA, 25 bp, Homo sapien
aaaccaaagagcctcgtcaagtcct

SEQ ID NO: 3355003 - DNA, 25 bp, Homo sapien
ttcccgcgcgcggtgcccggagaac

SEQ ID NO: 3355004 - DNA, 25 bp, Homo sapien
gctgcgttcggtctcccggtcctaa

SEQ ID NO: 3355005 - DNA, 25 bp, Homo sapien
gaaactccccggctggacgctgcgt

SEQ ID NO: 3355006 - DNA, 25 bp, Homo sapien
ctggcaacgccaccgcgagatgtgt

SEQ ID NO: 3355007 - DNA, 25 bp, Homo sapien
cagccccaggccaatgactcttgac

SEQ ID NO: 3355008 - DNA, 25 bp, Homo sapien
tgtgtggcgagcccggcaaagtcca

SEQ ID NO: 3355009 - DNA, 25 bp, Homo sapien
cggatcatcgccctcagagcgcagg

SEQ ID NO: 3355010 - DNA, 25 bp, Homo sapien
ccgcgccgtggcctatggccgcccg

SEQ ID NO: 3355011 - DNA, 25 bp, Homo sapien
cggcgtccgcgttggccggcctagg

SEQ ID NO: 3355012 - DNA, 25 bp, Homo sapien
tcgggaaccatctggcggcgacttg

SEQ ID NO: 3355013 - DNA, 25 bp, Homo sapien
cgtgatcctaatcctcgggaaccat

SEQ ID NO: 3355014 - DNA, 25 bp, Homo sapien
ccggaagtgcccgtgatcctaatcc

SEQ ID NO: 3355015 - DNA, 25 bp, Homo sapien
tgagcttgcgcatcttcactgcctg

SEQ ID NO: 3355016 - DNA, 25 bp, Homo sapien
gttcctgagggagaatagacacatg

SEQ ID NO: 3355017 - DNA, 25 bp, Homo sapien
agcttgcgcatcttcactgcctgca

SEQ ID NO: 3355018 - DNA, 25 bp, Homo sapien
gaatagacacatgagcttgcgcatc

SEQ ID NO: 3355019 - DNA, 25 bp, Homo sapien
cactttttgagattccgtggtctgc

SEQ ID NO: 3355020 - DNA, 25 bp, Homo sapien
gaaacccatacagtattacagccat

SEQ ID NO: 3355021 - DNA, 25 bp, Homo sapien
tagtgcatgaacatgccatggtcag

SEQ ID NO: 3355022 - DNA, 25 bp, Homo sapien
ctgtccaccttgcagtgtgcctctg

SEQ ID NO: 3355023 - DNA, 25 bp, Homo sapien
caccaggccttttgctcctggaaca

SEQ ID NO: 3355024 - DNA, 25 bp, Homo sapien
catcccatgtttttaacttcgctga

SEQ ID NO: 3355025 - DNA, 25 bp, Homo sapien
atctgcttgcaccaggccttttgct

SEQ ID NO: 3355026 - DNA, 25 bp, Homo sapien
tttgctcctggaacatcccatgttt

SEQ ID NO: 3355027 - DNA, 25 bp, Homo sapien
tcctctgtgggaacagaatgaatac

SEQ ID NO: 3355028 - DNA, 25 bp, Homo sapien
ttcctctgtgggaacagaatgaata

SEQ ID NO: 3355029 - DNA, 25 bp, Homo sapien
ccaaaaccagcatcagaatcagcat

SEQ ID NO: 3355030 - DNA, 25 bp, Homo sapien
agccccgatgaccagcaccaaaacc

SEQ ID NO: 3355031 - DNA, 25 bp, Homo sapien
cagccccgatgaccagcaccaaaac

SEQ ID NO: 3355032 - DNA, 25 bp, Homo sapien
gcaccaaaaccagcatcagaatcag

SEQ ID NO: 3355033 - DNA, 25 bp, Homo sapien
cagctgggagagcagctgagctgct

SEQ ID NO: 3355034 - DNA, 25 bp, Homo sapien
gcagctgagctgctcctgtggccat

SEQ ID NO: 3355035 - DNA, 25 bp, Homo sapien
ctgggagagcagctgagctgctcct

SEQ ID NO: 3355036 - DNA, 25 bp, Homo sapien
agcagctgagctgctcctgtggcca

SEQ ID NO: 3355037 - DNA, 25 bp, Homo sapien
cagtaaacgctgtggggtccttggt

SEQ ID NO: 3355038 - DNA, 25 bp, Homo sapien
ttccttgttaagcaagcttccaggg

SEQ ID NO: 3355039 - DNA, 25 bp, Homo sapien
cactggtgaaagttgctggtgttcc

SEQ ID NO: 3355040 - DNA, 25 bp, Homo sapien
tctgcaacagtaaacgctgtggggt

SEQ ID NO: 3355041 - DNA, 25 bp, Homo sapien
ctattatgttgtcatagacccattt

SEQ ID NO: 3355042 - DNA, 25 bp, Homo sapien
gttgtcatagacccatttccagttg

SEQ ID NO: 3355043 - DNA, 25 bp, Homo sapien
tgtcatagacccatttccagttgtt

SEQ ID NO: 3355044 - DNA, 25 bp, Homo sapien
atctattatgttgtcatagacccat

SEQ ID NO: 3355045 - DNA, 25 bp, Homo sapien
ttgtattgctgaggggtaagctggg

SEQ ID NO: 3355046 - DNA, 25 bp, Homo sapien
aaggcttggagattgtattgctgag

SEQ ID NO: 3355047 - DNA, 25 bp, Homo sapien
ggtaagctgggtagaaatcagggga

SEQ ID NO: 3355048 - DNA, 25 bp, Homo sapien
gccaaggagccaaggcttggagatt

SEQ ID NO: 3355049 - DNA, 25 bp, Homo sapien
agctagaggtgaaatcttggatttt

SEQ ID NO: 3355050 - DNA, 25 bp, Homo sapien
gaggtgaaatcttggattttagggc

SEQ ID NO: 3355051 - DNA, 25 bp, Homo sapien
tagaggtgaaatcttggattttagg

SEQ ID NO: 3355052 - DNA, 25 bp, Homo sapien
tgagagtcctggaggggaaatggga

SEQ ID NO: 3355053 - DNA, 25 bp, Homo sapien
ttaagcactcttgattttcgtctcc

SEQ ID NO: 3355054 - DNA, 25 bp, Homo sapien
cagatccattggtctgttcactaaa

SEQ ID NO: 3355055 - DNA, 25 bp, Homo sapien
ggtctgttcactaaatccctatctt

SEQ ID NO: 3355056 - DNA, 25 bp, Homo sapien
ttgattttcgtctcctccaacctta

SEQ ID NO: 3355057 - DNA, 25 bp, Homo sapien
tgaaaggatcttggttgtagttcag

SEQ ID NO: 3355058 - DNA, 25 bp, Homo sapien
ggttgtagttcagcagttataattt

SEQ ID NO: 3355059 - DNA, 25 bp, Homo sapien
tcttggttgtagttcagcagttata

SEQ ID NO: 3355060 - DNA, 25 bp, Homo sapien
ctttgaaaggatcttggttgtagtt

SEQ ID NO: 3355061 - DNA, 25 bp, Homo sapien
tgaacttgttgcaggtggtcgacag

SEQ ID NO: 3355062 - DNA, 25 bp, Homo sapien
gctggacttgtggattatgaacttg

SEQ ID NO: 3355063 - DNA, 25 bp, Homo sapien
ttgttgcaggtggtcgacaggaact

SEQ ID NO: 3355064 - DNA, 25 bp, Homo sapien
ctcagggtcggtgagctggacttgt

SEQ ID NO: 3355065 - DNA, 25 bp, Homo sapien
gttgtcagggggcatcaaacaatgt

SEQ ID NO: 3355066 - DNA, 25 bp, Homo sapien
tttgggttgtcagggggcatcaaac

SEQ ID NO: 3355067 - DNA, 25 bp, Homo sapien
ctgtggtttgggttgtcagggggca

SEQ ID NO: 3355068 - DNA, 25 bp, Homo sapien
gtggtttgggttgtcagggggcatc

SEQ ID NO: 3355069 - DNA, 25 bp, Homo sapien
ctgtcacattctcttctatctatga

SEQ ID NO: 3355070 - DNA, 25 bp, Homo sapien
ttagccagggctgtcacattctctt

SEQ ID NO: 3355071 - DNA, 25 bp, Homo sapien
gtcacattctcttctatctatgacc

SEQ ID NO: 3355072 - DNA, 25 bp, Homo sapien
cacattctcttctatctatgaccac

SEQ ID NO: 3355073 - DNA, 25 bp, Homo sapien
tctgcatgagtagggaaggtgccgt

SEQ ID NO: 3355074 - DNA, 25 bp, Homo sapien
gggaaggtgccgtgcttgtgggagc

SEQ ID NO: 3355075 - DNA, 25 bp, Homo sapien
gcttgtgggagccatattcagtgaa

SEQ ID NO: 3355076 - DNA, 25 bp, Homo sapien
ttgtgggagccatattcagtgaagc

SEQ ID NO: 3355077 - DNA, 25 bp, Homo sapien
gaacgctgtcccttgtcggtctttg

SEQ ID NO: 3355078 - DNA, 25 bp, Homo sapien
gctgtcccttgtcggtctttgtcat

SEQ ID NO: 3355079 - DNA, 25 bp, Homo sapien
aacgctgtcccttgtcggtctttgt

SEQ ID NO: 3355080 - DNA, 25 bp, Homo sapien
agatgccagcagaacgctgtccctt

SEQ ID NO: 3355081 - DNA, 25 bp, Homo sapien
ttgatgatataagagtaaggttcct

SEQ ID NO: 3355082 - DNA, 25 bp, Homo sapien
tccttatgtaaagggacatgacttt

SEQ ID NO: 3355083 - DNA, 25 bp, Homo sapien
gcgcctttattgtgggacaaactaa

SEQ ID NO: 3355084 - DNA, 25 bp, Homo sapien
tctcaggtccaaagggaaagttgat

SEQ ID NO: 3355085 - DNA, 25 bp, Homo sapien
gacggcttggttgtctgttctatcg

SEQ ID NO: 3355086 - DNA, 25 bp, Homo sapien
aatttaggtgctacattttgacggc

SEQ ID NO: 3355087 - DNA, 25 bp, Homo sapien
ctacaaatgtctcctactagggact

SEQ ID NO: 3355088 - DNA, 25 bp, Homo sapien
gaagcctgagggttcaaggattaaa

SEQ ID NO: 3355089 - DNA, 25 bp, Homo sapien
tacagacattgtaataataccccag

SEQ ID NO: 3355090 - DNA, 25 bp, Homo sapien
aaaaattgactaaatatggccaggc

SEQ ID NO: 3355091 - DNA, 25 bp, Homo sapien
tttttacatacaagcaggagagcaa

SEQ ID NO: 3355092 - DNA, 25 bp, Homo sapien
gcatgttcttttcaggagcacggac

SEQ ID NO: 3355093 - DNA, 25 bp, Homo sapien
tcttttattccacatcatatttatg

SEQ ID NO: 3355094 - DNA, 25 bp, Homo sapien
gagaagaactataggagtaattttc

SEQ ID NO: 3355095 - DNA, 25 bp, Homo sapien
ttgagaagaactataggagtaattt

SEQ ID NO: 3355096 - DNA, 25 bp, Homo sapien
tatgagctatatctgcattgagaag

SEQ ID NO: 3355097 - DNA, 25 bp, Homo sapien
gggagcacgtacacttttgactaag

SEQ ID NO: 3355098 - DNA, 25 bp, Homo sapien
tagcctggcttcctagctgaggtgt

SEQ ID NO: 3355099 - DNA, 25 bp, Homo sapien
tagctatgccccagccagattggtc

SEQ ID NO: 3355100 - DNA, 25 bp, Homo sapien
cacgtgaatttgtctgggatccagt

SEQ ID NO: 3355101 - DNA, 25 bp, Homo sapien
gctctcttgggcaatatccttcgaa

SEQ ID NO: 3355102 - DNA, 25 bp, Homo sapien
gaccattctagctgatcatgcaaag

SEQ ID NO: 3355103 - DNA, 25 bp, Homo sapien
gtgatatatcccacacggccccttt

SEQ ID NO: 3355104 - DNA, 25 bp, Homo sapien
aatgcactctttgaccgcttctgac

SEQ ID NO: 3355105 - DNA, 25 bp, Homo sapien
cacacagatttcagagaggatgttt

SEQ ID NO: 3355106 - DNA, 25 bp, Homo sapien
gacatttgacaacttttgtccacac

SEQ ID NO: 3355107 - DNA, 25 bp, Homo sapien
acagatttcagagaggatgtttctt

SEQ ID NO: 3355108 - DNA, 25 bp, Homo sapien
cacagatttcagagaggatgtttct

SEQ ID NO: 3355109 - DNA, 25 bp, Homo sapien
ttaactaacagtcactcgaatcgtg

SEQ ID NO: 3355110 - DNA, 25 bp, Homo sapien
taacagtcactcgaatcgtgagtcc

SEQ ID NO: 3355111 - DNA, 25 bp, Homo sapien
cagtcactcgaatcgtgagtccact

SEQ ID NO: 3355112 - DNA, 25 bp, Homo sapien
cactcgaatcgtgagtccactgaag

SEQ ID NO: 3355113 - DNA, 25 bp, Homo sapien
ggaagtgtacagtctttaggaggcc

SEQ ID NO: 3355114 - DNA, 25 bp, Homo sapien
ccaaaattgagggaagtgtacagtc

SEQ ID NO: 3355115 - DNA, 25 bp, Homo sapien
gccggtggcaatttctgtttccagc

SEQ ID NO: 3355116 - DNA, 25 bp, Homo sapien
tcctgattcttttgccggtggcaat

SEQ ID NO: 3355117 - DNA, 25 bp, Homo sapien
tcttaatagcccctttgttggcatt

SEQ ID NO: 3355118 - DNA, 25 bp, Homo sapien
tgcttgaactgtcttaatagcccct

SEQ ID NO: 3355119 - DNA, 25 bp, Homo sapien
ttaatagcccctttgttggcattct

SEQ ID NO: 3355120 - DNA, 25 bp, Homo sapien
cttgaactgtcttaatagccccttt

SEQ ID NO: 3355121 - DNA, 25 bp, Homo sapien
tggcctgagagctggttctagccat

SEQ ID NO: 3355122 - DNA, 25 bp, Homo sapien
acacttaagagtaagtgcccatttg

SEQ ID NO: 3355123 - DNA, 25 bp, Homo sapien
tgctcttcccaggttctttattctc

SEQ ID NO: 3355124 - DNA, 25 bp, Homo sapien
ccatttgctcttcccaggttcttta

SEQ ID NO: 3355125 - DNA, 25 bp, Homo sapien
agagtaagtgcccatttgctcttcc

SEQ ID NO: 3355126 - DNA, 25 bp, Homo sapien
cttgcagctggatgcaataatctga

SEQ ID NO: 3355127 - DNA, 25 bp, Homo sapien
tactcaacctctgaatgccttcaca

SEQ ID NO: 3355128 - DNA, 25 bp, Homo sapien
ctgatttcctgacactcagagaaaa

SEQ ID NO: 3355129 - DNA, 25 bp, Homo sapien
cagtttgctggcaattttactcaac

SEQ ID NO: 3355130 - DNA, 25 bp, Homo sapien
aaaagcagtgcaaaaggtgacccaa

SEQ ID NO: 3355131 - DNA, 25 bp, Homo sapien
tgtgctggtggaaaagcagtgcaaa

SEQ ID NO: 3355132 - DNA, 25 bp, Homo sapien
ctggtggaaaagcagtgcaaaaggt

SEQ ID NO: 3355133 - DNA, 25 bp, Homo sapien
tggaaaagcagtgcaaaaggtgacc

SEQ ID NO: 3355134 - DNA, 25 bp, Homo sapien
tgaagccgtctggtgtcaggattgt

SEQ ID NO: 3355135 - DNA, 25 bp, Homo sapien
aaaagcaatggtgaagccgtctggt

SEQ ID NO: 3355136 - DNA, 25 bp, Homo sapien
tgtcaggattgttctcagaggtctc

SEQ ID NO: 3355137 - DNA, 25 bp, Homo sapien
ccgtctggtgtcaggattgttctca

SEQ ID NO: 3355138 - DNA, 25 bp, Homo sapien
tgagctcatcatttggactccctct

SEQ ID NO: 3355139 - DNA, 25 bp, Homo sapien
ctcctagtctaaagtaccagcccat

SEQ ID NO: 3355140 - DNA, 25 bp, Homo sapien
gctctcttcggctttagatttcagt

SEQ ID NO: 3355141 - DNA, 25 bp, Homo sapien
agcttgccagcctcctagtctaaag

SEQ ID NO: 3355142 - DNA, 25 bp, Homo sapien
tttagccactgataccgcaaaaaca

SEQ ID NO: 3355143 - DNA, 25 bp, Homo sapien
ccttcttggtctgcttgtagtcctg

SEQ ID NO: 3355144 - DNA, 25 bp, Homo sapien
tcagcatccagtagtttgacagtcc

SEQ ID NO: 3355145 - DNA, 25 bp, Homo sapien
tccagtagtttgacagtcctgttcc

SEQ ID NO: 3355146 - DNA, 25 bp, Homo sapien
aagaggaaactccagccttggtcat

SEQ ID NO: 3355147 - DNA, 25 bp, Homo sapien
aaagaggaaactccagccttggtca

SEQ ID NO: 3355148 - DNA, 25 bp, Homo sapien
ttactttagtctgacatttaagaaa

SEQ ID NO: 3355149 - DNA, 25 bp, Homo sapien
tttactttagtctgacatttaagaa

SEQ ID NO: 3355150 - DNA, 25 bp, Homo sapien
tactttagtctgacatttaagaaat

SEQ ID NO: 3355151 - DNA, 25 bp, Homo sapien
atttactttagtctgacatttaaga

SEQ ID NO: 3355152 - DNA, 25 bp, Homo sapien
tgcaaagggcataatggagccagcg

SEQ ID NO: 3355153 - DNA, 25 bp, Homo sapien
gggcataatggagccagcgtgctca

SEQ ID NO: 3355154 - DNA, 25 bp, Homo sapien
tgctcagggacggttgggatgactc

SEQ ID NO: 3355155 - DNA, 25 bp, Homo sapien
ataatggagccagcgtgctcaggga

SEQ ID NO: 3355156 - DNA, 25 bp, Homo sapien
agtgtgcttcgccattgtagaaacc

SEQ ID NO: 3355157 - DNA, 25 bp, Homo sapien
ccagtgtgcttcgccattgtagaaa

SEQ ID NO: 3355158 - DNA, 25 bp, Homo sapien
tgcttcgccattgtagaaaccgtac

SEQ ID NO: 3355159 - DNA, 25 bp, Homo sapien
tgtgcttcgccattgtagaaaccgt

SEQ ID NO: 3355160 - DNA, 25 bp, Homo sapien
gcaccagggaatggacataatcctt

SEQ ID NO: 3355161 - DNA, 25 bp, Homo sapien
aatggacataatccttcaggtcaga

SEQ ID NO: 3355162 - DNA, 25 bp, Homo sapien
aggtcagaggctgtgcatatgcccc

SEQ ID NO: 3355163 - DNA, 25 bp, Homo sapien
gggcaaagcaaggagttccatgcct

SEQ ID NO: 3355164 - DNA, 25 bp, Homo sapien
ggcttcttgattttaccaagagtgg

SEQ ID NO: 3355165 - DNA, 25 bp, Homo sapien
tgaaggagtggcttcttgattttac

SEQ ID NO: 3355166 - DNA, 25 bp, Homo sapien
ttgattttaccaagagtggtgccat

SEQ ID NO: 3355167 - DNA, 25 bp, Homo sapien
gagtggcttcttgattttaccaaga

SEQ ID NO: 3355168 - DNA, 25 bp, Homo sapien
gctggagtcaaacatcgtcacttca

SEQ ID NO: 3355169 - DNA, 25 bp, Homo sapien
tgaggcttcagtaaacgacccctgc

SEQ ID NO: 3355170 - DNA, 25 bp, Homo sapien
gattggtgattaggtctacaaccca

SEQ ID NO: 3355171 - DNA, 25 bp, Homo sapien
cccatactcagtgtagtgtagtgct

SEQ ID NO: 3355172 - DNA, 25 bp, Homo sapien
gaaagtcgatcgcatattaatgcac

SEQ ID NO: 3355173 - DNA, 25 bp, Homo sapien
taacatgatcttgtgtatagaatac

SEQ ID NO: 3355174 - DNA, 25 bp, Homo sapien
tctccgcagtatcaggaatatttca

SEQ ID NO: 3355175 - DNA, 25 bp, Homo sapien
ggatgcaagatcaagacacgaaagt

SEQ ID NO: 3355176 - DNA, 25 bp, Homo sapien
ctgatctccaggcacggcacggaag

SEQ ID NO: 3355177 - DNA, 25 bp, Homo sapien
acgtggagaagggatgaggctgatc

SEQ ID NO: 3355178 - DNA, 25 bp, Homo sapien
gtggtggacatcctctgcttacgtt

SEQ ID NO: 3355179 - DNA, 25 bp, Homo sapien
gaggagatctcttcagtggtggaca

SEQ ID NO: 3355180 - DNA, 25 bp, Homo sapien
ctgaagtagggttgttgacacatcg

SEQ ID NO: 3355181 - DNA, 25 bp, Homo sapien
aatcacattgcatgccagctttctg

SEQ ID NO: 3355182 - DNA, 25 bp, Homo sapien
acacatcggcattgggatgaaaggg

SEQ ID NO: 3355183 - DNA, 25 bp, Homo sapien
tctttaatcacattgcatgccagct

SEQ ID NO: 3355184 - DNA, 25 bp, Homo sapien
aggggctctcctttagtcttctcac

SEQ ID NO: 3355185 - DNA, 25 bp, Homo sapien
aggaagaggggctctcctttagtct

SEQ ID NO: 3355186 - DNA, 25 bp, Homo sapien
gaagaggggctctcctttagtcttc

SEQ ID NO: 3355187 - DNA, 25 bp, Homo sapien
agaggggctctcctttagtcttctc

SEQ ID NO: 3355188 - DNA, 25 bp, Homo sapien
tgggcatggacattctccacgggct

SEQ ID NO: 3355189 - DNA, 25 bp, Homo sapien
tatcccatttggtccttgggcatgg

SEQ ID NO: 3355190 - DNA, 25 bp, Homo sapien
cacgggctttaactggggcttctgt

SEQ ID NO: 3355191 - DNA, 25 bp, Homo sapien
tctagcaggtattctatcccatttg

SEQ ID NO: 3355192 - DNA, 25 bp, Homo sapien
aattcatccaagctgacaaattcag

SEQ ID NO: 3355193 - DNA, 25 bp, Homo sapien
attcagtcaacttcaactggctttc

SEQ ID NO: 3355194 - DNA, 25 bp, Homo sapien
cagtaataattcatccaagctgaca

SEQ ID NO: 3355195 - DNA, 25 bp, Homo sapien
ttcagtcaacttcaactggctttct

SEQ ID NO: 3355196 - DNA, 25 bp, Homo sapien
ggcatagaatctccttagtgtttga

SEQ ID NO: 3355197 - DNA, 25 bp, Homo sapien
cctccactctgataataccttctat

SEQ ID NO: 3355198 - DNA, 25 bp, Homo sapien
gaatctccttagtgtttgactcaaa

SEQ ID NO: 3355199 - DNA, 25 bp, Homo sapien
tcttaaggcatagaatctccttagt

SEQ ID NO: 3355200 - DNA, 25 bp, Homo sapien
gagttggaaggtggaattggatgcc

SEQ ID NO: 3355201 - DNA, 25 bp, Homo sapien
tcagtagttgccagagttggaaggt

SEQ ID NO: 3355202 - DNA, 25 bp, Homo sapien
agagttggaaggtggaattggatgc

SEQ ID NO: 3355203 - DNA, 25 bp, Homo sapien
tcagcaaaccctggttaaaaggcaa

SEQ ID NO: 3355204 - DNA, 25 bp, Homo sapien
cagtcagcaaaccctggttaaaagg

SEQ ID NO: 3355205 - DNA, 25 bp, Homo sapien
gtcagcaaaccctggttaaaaggca

SEQ ID NO: 3355206 - DNA, 25 bp, Homo sapien
gcagtcagcaaaccctggttaaaag

SEQ ID NO: 3355207 - DNA, 25 bp, Homo sapien
caatgcactaatctcattggaaagc

SEQ ID NO: 3355208 - DNA, 25 bp, Homo sapien
tgaaattgccctaaaagttctcctc

SEQ ID NO: 3355209 - DNA, 25 bp, Homo sapien
tcattggaaagctctgtagaccctg

SEQ ID NO: 3355210 - DNA, 25 bp, Homo sapien
gccatttctgtactcaatgcactaa

SEQ ID NO: 3355211 - DNA, 25 bp, Homo sapien
ctattgttaatgtatcagcagtcgg

SEQ ID NO: 3355212 - DNA, 25 bp, Homo sapien
agtagtaaggaatgttctgatgtga

SEQ ID NO: 3355213 - DNA, 25 bp, Homo sapien
gaatgttctgatgtgaatctattgt

SEQ ID NO: 3355214 - DNA, 25 bp, Homo sapien
ctgtgcttgtggtcaatattttgct

SEQ ID NO: 3355215 - DNA, 25 bp, Homo sapien
catttctagttttccttattctggt

SEQ ID NO: 3355216 - DNA, 25 bp, Homo sapien
ttctagttttccttattctggtgca

SEQ ID NO: 3355217 - DNA, 25 bp, Homo sapien
ttctggtgcagtagtccttgagaga

SEQ ID NO: 3355218 - DNA, 25 bp, Homo sapien
tggtgcagtagtccttgagagaaac

SEQ ID NO: 3355219 - DNA, 25 bp, Homo sapien
tccaagctttatgttttcagagaac

SEQ ID NO: 3355220 - DNA, 25 bp, Homo sapien
tttgagagtcttcatgtattccaag

SEQ ID NO: 3355221 - DNA, 25 bp, Homo sapien
gagaactgctcatagaacttcttgt

SEQ ID NO: 3355222 - DNA, 25 bp, Homo sapien
gaggcagatgtgtagtaccttaaca

SEQ ID NO: 3355223 - DNA, 25 bp, Homo sapien
tagagggagatcctccgagtctacc

SEQ ID NO: 3355224 - DNA, 25 bp, Homo sapien
agagggagatcctccgagtctacca

SEQ ID NO: 3355225 - DNA, 25 bp, Homo sapien
tgcatacatacaatttgatattgtt

SEQ ID NO: 3355226 - DNA, 25 bp, Homo sapien
gcatacatacaatttgatattgttc

SEQ ID NO: 3355227 - DNA, 25 bp, Homo sapien
catacatacaatttgatattgttct

SEQ ID NO: 3355228 - DNA, 25 bp, Homo sapien
ctgcatacatacaatttgatattgt

SEQ ID NO: 3355229 - DNA, 25 bp, Homo sapien
aaaggagcacatcatgggaaaatag

SEQ ID NO: 3355230 - DNA, 25 bp, Homo sapien
aaaaggagcacatcatgggaaaata

SEQ ID NO: 3355231 - DNA, 25 bp, Homo sapien
gaattctctgtactcctcattagta

SEQ ID NO: 3355232 - DNA, 25 bp, Homo sapien
ccagtcattagtcaagctcttgtag

SEQ ID NO: 3355233 - DNA, 25 bp, Homo sapien
tctggatttctggtccagatgggct

SEQ ID NO: 3355234 - DNA, 25 bp, Homo sapien
tcattagtaatatcatctggatttc

SEQ ID NO: 3355235 - DNA, 25 bp, Homo sapien
acatcttcaatttcaggtttgtctt

SEQ ID NO: 3355236 - DNA, 25 bp, Homo sapien
gatattttattaaacaattgagaat

SEQ ID NO: 3355237 - DNA, 25 bp, Homo sapien
attttattaaacaattgagaatgtt

SEQ ID NO: 3355238 - DNA, 25 bp, Homo sapien
gaataacttgatattttattaaaca

SEQ ID NO: 3355239 - DNA, 25 bp, Homo sapien
ttattaaacaattgagaatgtttac

SEQ ID NO: 3355240 - DNA, 25 bp, Homo sapien
tttcagatatgcagtgctgactttt

SEQ ID NO: 3355241 - DNA, 25 bp, Homo sapien
ttcagatatgcagtgctgacttttc

SEQ ID NO: 3355242 - DNA, 25 bp, Homo sapien
cactgaggggtgttaaggcctttgg

SEQ ID NO: 3355243 - DNA, 25 bp, Homo sapien
caggcctgaagcatgggcacatgta

SEQ ID NO: 3355244 - DNA, 25 bp, Homo sapien
cagacaaccctaatgttgagtcgat

SEQ ID NO: 3355245 - DNA, 25 bp, Homo sapien
gatgtgtccatggagtagccacgga

SEQ ID NO: 3355246 - DNA, 25 bp, Homo sapien
gcagtatttactctggtgtcctgag

SEQ ID NO: 3355247 - DNA, 25 bp, Homo sapien
atatttaactgattatacccaggca

SEQ ID NO: 3355248 - DNA, 25 bp, Homo sapien
aatatttaactgattatacccaggc

SEQ ID NO: 3355249 - DNA, 25 bp, Homo sapien
tatttaactgattatacccaggcat

SEQ ID NO: 3355250 - DNA, 25 bp, Homo sapien
actgtgtataatgttgctgttctca

SEQ ID NO: 3355251 - DNA, 25 bp, Homo sapien
tgattcacagggagataagagtact

SEQ ID NO: 3355252 - DNA, 25 bp, Homo sapien
tcacagggagataagagtactattt

SEQ ID NO: 3355253 - DNA, 25 bp, Homo sapien
cagggagataagagtactattttct

SEQ ID NO: 3355254 - DNA, 25 bp, Homo sapien
gatgaaagcggtaaaccttcaggga

SEQ ID NO: 3355255 - DNA, 25 bp, Homo sapien
gaaatattttcagaatgtgtttctt

SEQ ID NO: 3355256 - DNA, 25 bp, Homo sapien
aagctgagctattgtgaagagatga

SEQ ID NO: 3355257 - DNA, 25 bp, Homo sapien
taacaagtttattttgtgaccatat

SEQ ID NO: 3355258 - DNA, 25 bp, Homo sapien
ttctagcagcatctagttttaatat

SEQ ID NO: 3355259 - DNA, 25 bp, Homo sapien
gagatggcctatatgggcaaatccc

SEQ ID NO: 3355260 - DNA, 25 bp, Homo sapien
gtaaaagctgatattcattgagtgc

SEQ ID NO: 3355261 - DNA, 25 bp, Homo sapien
tggtaaacccctttcacagccacag

SEQ ID NO: 3355262 - DNA, 25 bp, Homo sapien
gaagtgtaaatctgcatgtaaaagc

SEQ ID NO: 3355263 - DNA, 25 bp, Homo sapien
tctttttctttctctctagtgggca

SEQ ID NO: 3355264 - DNA, 25 bp, Homo sapien
ctttttctttctctctagtgggcat

SEQ ID NO: 3355265 - DNA, 25 bp, Homo sapien
ccctctggagaatatcctgtttcca

SEQ ID NO: 3355266 - DNA, 25 bp, Homo sapien
tgccctctggagaatatcctgtttc

SEQ ID NO: 3355267 - DNA, 25 bp, Homo sapien
ttgccctctggagaatatcctgttt

SEQ ID NO: 3355268 - DNA, 25 bp, Homo sapien
ctccattctagaattcctatatctc

SEQ ID NO: 3355269 - DNA, 25 bp, Homo sapien
ctgtggcatctccttaattgcaaaa

SEQ ID NO: 3355270 - DNA, 25 bp, Homo sapien
gttgggcaattatcagaattgagtc

SEQ ID NO: 3355271 - DNA, 25 bp, Homo sapien
tgcacacctccatggttgggcaatt

SEQ ID NO: 3355272 - DNA, 25 bp, Homo sapien
tgagtcttaagatgatcagtgtcct

SEQ ID NO: 3355273 - DNA, 25 bp, Homo sapien
tgtggatagcaacataggccaaatc

SEQ ID NO: 3355274 - DNA, 25 bp, Homo sapien
agattaaagttatgtccacaggcct

SEQ ID NO: 3355275 - DNA, 25 bp, Homo sapien
tccaaagggacaaagatttctgtac

SEQ ID NO: 3355276 - DNA, 25 bp, Homo sapien
cacaggcctcgtgtggatagcaaca

SEQ ID NO: 3355277 - DNA, 25 bp, Homo sapien
ctccattacacatttctgagtgtaa

SEQ ID NO: 3355278 - DNA, 25 bp, Homo sapien
tctgagtgtaagttgctagatattt

SEQ ID NO: 3355279 - DNA, 25 bp, Homo sapien
gtttgttattcgtgtcctgtgctat

SEQ ID NO: 3355280 - DNA, 25 bp, Homo sapien
cgtgtcctgtgctatctccattaca

SEQ ID NO: 3355281 - DNA, 25 bp, Homo sapien
attttttcagccttaagttcctctg

SEQ ID NO: 3355282 - DNA, 25 bp, Homo sapien
caagggccataagggcaactctact

SEQ ID NO: 3355283 - DNA, 25 bp, Homo sapien
tatggcaagggccataagggcaact

SEQ ID NO: 3355284 - DNA, 25 bp, Homo sapien
gccataagggcaactctacttataa

SEQ ID NO: 3355285 - DNA, 25 bp, Homo sapien
gatcagggagatatcacttcgctca

SEQ ID NO: 3355286 - DNA, 25 bp, Homo sapien
catcaccggtagtattgaagtcagg

SEQ ID NO: 3355287 - DNA, 25 bp, Homo sapien
tgagccttagaagcacaagtcctag

SEQ ID NO: 3355288 - DNA, 25 bp, Homo sapien
tcatccagtgaagaagtgctagtgc

SEQ ID NO: 3355289 - DNA, 25 bp, Homo sapien
tgtttccggggtgttgcattccttc

SEQ ID NO: 3355290 - DNA, 25 bp, Homo sapien
tttccggggtgttgcattccttctc

SEQ ID NO: 3355291 - DNA, 25 bp, Homo sapien
catgtttccggggtgttgcattcct

SEQ ID NO: 3355292 - DNA, 25 bp, Homo sapien
ttggcatgtttccggggtgttgcat

SEQ ID NO: 3355293 - DNA, 25 bp, Homo sapien
ttcttccttcgaatgtcaatgtgat

SEQ ID NO: 3355294 - DNA, 25 bp, Homo sapien
gccaaggaagctttgagaaactttc

SEQ ID NO: 3355295 - DNA, 25 bp, Homo sapien
tcgtaaaagagaggtgagtccagtc

SEQ ID NO: 3355296 - DNA, 25 bp, Homo sapien
ttgccaccggaagtgaccatttgac

SEQ ID NO: 3355297 - DNA, 25 bp, Homo sapien
tgtgcaagctgaaggctgtccacct

SEQ ID NO: 3355298 - DNA, 25 bp, Homo sapien
ctcactattttctgcgaccggggtg

SEQ ID NO: 3355299 - DNA, 25 bp, Homo sapien
gaagtgaacttcttatgggcaatgt

SEQ ID NO: 3355300 - DNA, 25 bp, Homo sapien
cattatatcgatgggctttctcctc

SEQ ID NO: 3355301 - DNA, 25 bp, Homo sapien
gaagttgctgaaaagggcaaacctc

SEQ ID NO: 3355302 - DNA, 25 bp, Homo sapien
tttctgtcatagagaagttgctgaa

SEQ ID NO: 3355303 - DNA, 25 bp, Homo sapien
tgaaaagggcaaacctctgtcctaa

SEQ ID NO: 3355304 - DNA, 25 bp, Homo sapien
caaacctctgtcctaaaagatgtca

SEQ ID NO: 3355305 - DNA, 25 bp, Homo sapien
catcagaccagaaaaagtggttagg

SEQ ID NO: 3355306 - DNA, 25 bp, Homo sapien
ctacatcagaccagaaaaagtggtt

SEQ ID NO: 3355307 - DNA, 25 bp, Homo sapien
atcagaccagaaaaagtggttaggg

SEQ ID NO: 3355308 - DNA, 25 bp, Homo sapien
tacatcagaccagaaaaagtggtta

SEQ ID NO: 3355309 - DNA, 25 bp, Homo sapien
ggatttgggttgaggagataggagg

SEQ ID NO: 3355310 - DNA, 25 bp, Homo sapien
gagggatttgggttgaggagatagg

SEQ ID NO: 3355311 - DNA, 25 bp, Homo sapien
gataggaggtgtttggagccagtgg

SEQ ID NO: 3355312 - DNA, 25 bp, Homo sapien
agcaggcctaatggggccaaagtgg

SEQ ID NO: 3355313 - DNA, 25 bp, Homo sapien
cccactagggccctgctgacagcca

SEQ ID NO: 3355314 - DNA, 25 bp, Homo sapien
ttccccactagggccctgctgacag

SEQ ID NO: 3355315 - DNA, 25 bp, Homo sapien
tgtttaactgtcaacttccccacta

SEQ ID NO: 3355316 - DNA, 25 bp, Homo sapien
ccactagggccctgctgacagccat

SEQ ID NO: 3355317 - DNA, 25 bp, Homo sapien
gtttaagtatctgctcccgaaatgt

SEQ ID NO: 3355318 - DNA, 25 bp, Homo sapien
cgtggataattaactcgcacttaaa

SEQ ID NO: 3355319 - DNA, 25 bp, Homo sapien
ccaaacatatctattacgtggataa

SEQ ID NO: 3355320 - DNA, 25 bp, Homo sapien
tgctcccgaaatgtagtaatagtct

SEQ ID NO: 3355321 - DNA, 25 bp, Homo sapien
tgtttcctccatttgaatcttgtcc

SEQ ID NO: 3355322 - DNA, 25 bp, Homo sapien
tccggacacaataagtctctctgtt

SEQ ID NO: 3355323 - DNA, 25 bp, Homo sapien
caaaacttccggacacaataagtct

SEQ ID NO: 3355324 - DNA, 25 bp, Homo sapien
ttgtccttgatacccctccttactg

SEQ ID NO: 3355325 - DNA, 25 bp, Homo sapien
tgttagcttctcagtactgtggaga

SEQ ID NO: 3355326 - DNA, 25 bp, Homo sapien
gaatggcccatctgccactaatgta

SEQ ID NO: 3355327 - DNA, 25 bp, Homo sapien
tttagcctggctttgaccctttctg

SEQ ID NO: 3355328 - DNA, 25 bp, Homo sapien
taatgtactattaggactattccgt

SEQ ID NO: 3355329 - DNA, 25 bp, Homo sapien
tactcataggtttcgcaagaaccat

SEQ ID NO: 3355330 - DNA, 25 bp, Homo sapien
tgtctaacagcagtttactcatagg

SEQ ID NO: 3355331 - DNA, 25 bp, Homo sapien
gtttcgcaagaaccattatccattg

SEQ ID NO: 3355332 - DNA, 25 bp, Homo sapien
atttttccagtgtctaacagcagtt

SEQ ID NO: 3355333 - DNA, 25 bp, Homo sapien
ttgtctccgtgaaggagtcaaggtg

SEQ ID NO: 3355334 - DNA, 25 bp, Homo sapien
aaggagtcaaggtggtctctcatca

SEQ ID NO: 3355335 - DNA, 25 bp, Homo sapien
ctttgtctccgtgaaggagtcaagg

SEQ ID NO: 3355336 - DNA, 25 bp, Homo sapien
caaggtggtctctcatcagcaaaat

SEQ ID NO: 3355337 - DNA, 25 bp, Homo sapien
gaggaacagtccatgtagcccattt

SEQ ID NO: 3355338 - DNA, 25 bp, Homo sapien
tgtagcccatttctcgggacaatag

SEQ ID NO: 3355339 - DNA, 25 bp, Homo sapien
aactggaaggacactagaggaacag

SEQ ID NO: 3355340 - DNA, 25 bp, Homo sapien
ttctcgggacaatagatgagagtca

SEQ ID NO: 3355341 - DNA, 25 bp, Homo sapien
cctgagctgagcagaccctgtcata

SEQ ID NO: 3355342 - DNA, 25 bp, Homo sapien
gaatgaaaattgtgcttgactgtcc

SEQ ID NO: 3355343 - DNA, 25 bp, Homo sapien
tgaagaatacgtctggttgatccag

SEQ ID NO: 3355344 - DNA, 25 bp, Homo sapien
tccacagactggatcgggtcttgga

SEQ ID NO: 3355345 - DNA, 25 bp, Homo sapien
cagagtacccctctatgtgaaagct

SEQ ID NO: 3355346 - DNA, 25 bp, Homo sapien
gctctcctgaaatttcttgggctct

SEQ ID NO: 3355347 - DNA, 25 bp, Homo sapien
tgacatcctacaacagagtacccct

SEQ ID NO: 3355348 - DNA, 25 bp, Homo sapien
caggctgatcattctctggcagccc

SEQ ID NO: 3355349 - DNA, 25 bp, Homo sapien
catccacttgtaaactaccagatct

SEQ ID NO: 3355350 - DNA, 25 bp, Homo sapien
taattagctcatggtgctttcagac

SEQ ID NO: 3355351 - DNA, 25 bp, Homo sapien
tctgctccacttttgggaaggcatc

SEQ ID NO: 3355352 - DNA, 25 bp, Homo sapien
catggtgctttcagactatacagga

SEQ ID NO: 3355353 - DNA, 25 bp, Homo sapien
tcagcagaattgttaaagctcaaag

SEQ ID NO: 3355354 - DNA, 25 bp, Homo sapien
caaagtaaggtgacagctgccaaac

SEQ ID NO: 3355355 - DNA, 25 bp, Homo sapien
ccaaacttgcgaagttgagatttca

SEQ ID NO: 3355356 - DNA, 25 bp, Homo sapien
agtgtgggtgacatgtatatcagca

SEQ ID NO: 3355357 - DNA, 25 bp, Homo sapien
ggcaagtctaactgtcaatactgga

SEQ ID NO: 3355358 - DNA, 25 bp, Homo sapien
catttgcaatcacgaaagaccagtg

SEQ ID NO: 3355359 - DNA, 25 bp, Homo sapien
cactgtgataggacacaaggctgga

SEQ ID NO: 3355360 - DNA, 25 bp, Homo sapien
tccatggatatgaaagctgactaca

SEQ ID NO: 3355361 - DNA, 25 bp, Homo sapien
gataaagtcccatcttttaactcat

SEQ ID NO: 3355362 - DNA, 25 bp, Homo sapien
actcattaagtttggctctgagaag

SEQ ID NO: 3355363 - DNA, 25 bp, Homo sapien
ctatgtggtaaaagcggcactaact

SEQ ID NO: 3355364 - DNA, 25 bp, Homo sapien
caagatgtgcccatgggtttactgc

SEQ ID NO: 3355365 - DNA, 25 bp, Homo sapien
gaatctgggcattaacatcccacct

SEQ ID NO: 3355366 - DNA, 25 bp, Homo sapien
agcgtgcaagttaaagggaagtgcc

SEQ ID NO: 3355367 - DNA, 25 bp, Homo sapien
tgctgacaaccacatgaatctgggc

SEQ ID NO: 3355368 - DNA, 25 bp, Homo sapien
cacttcccaccatatgagcatctgg

SEQ ID NO: 3355369 - DNA, 25 bp, Homo sapien
catgcggctgccagagcaaattaga

SEQ ID NO: 3355370 - DNA, 25 bp, Homo sapien
aagtggtaacctgctgtcatgcggc

SEQ ID NO: 3355371 - DNA, 25 bp, Homo sapien
gattcctgtgtagtgccccaattac

SEQ ID NO: 3355372 - DNA, 25 bp, Homo sapien
ccaattacaagtaaggagggcactt

SEQ ID NO: 3355373 - DNA, 25 bp, Homo sapien
ttgcaagcatgtacatgagcagttc

SEQ ID NO: 3355374 - DNA, 25 bp, Homo sapien
ttgttatgccactaggattgacatt

SEQ ID NO: 3355375 - DNA, 25 bp, Homo sapien
gcatgtacatgagcagttcaaaata

SEQ ID NO: 3355376 - DNA, 25 bp, Homo sapien
ggattgacattaaactttgcaagca

SEQ ID NO: 3355377 - DNA, 25 bp, Homo sapien
tgttcaagttgtgaccaggtgctcc

SEQ ID NO: 3355378 - DNA, 25 bp, Homo sapien
caagtggtcctgagtagcaaaaaca

SEQ ID NO: 3355379 - DNA, 25 bp, Homo sapien
tatatgtggctcctgcaaattcgaa

SEQ ID NO: 3355380 - DNA, 25 bp, Homo sapien
caaattcgaaaagcaaggtgcctgt

SEQ ID NO: 3355381 - DNA, 25 bp, Homo sapien
ttattcttccatggcagctttggga

SEQ ID NO: 3355382 - DNA, 25 bp, Homo sapien
attcttccatggcagctttgggaag

SEQ ID NO: 3355383 - DNA, 25 bp, Homo sapien
tcttccatggcagctttgggaagtc

SEQ ID NO: 3355384 - DNA, 25 bp, Homo sapien
ttcttccatggcagctttgggaagt

SEQ ID NO: 3355385 - DNA, 25 bp, Homo sapien
acacatcatagtgacagcgtgctgg

SEQ ID NO: 3355386 - DNA, 25 bp, Homo sapien
ctgtaagcctattctctttcagttg

SEQ ID NO: 3355387 - DNA, 25 bp, Homo sapien
tgtaagcctattctctttcagttgg

SEQ ID NO: 3355388 - DNA, 25 bp, Homo sapien
tcaagatcccctagcatcaggaacc

SEQ ID NO: 3355389 - DNA, 25 bp, Homo sapien
atgttttcaagatcccctagcatca

SEQ ID NO: 3355390 - DNA, 25 bp, Homo sapien
tatgtttatttccaacattcttggc

SEQ ID NO: 3355391 - DNA, 25 bp, Homo sapien
cattcttggcatccaaatcaaaagt

SEQ ID NO: 3355392 - DNA, 25 bp, Homo sapien
tcatcggatatgtttatttccaaca

SEQ ID NO: 3355393 - DNA, 25 bp, Homo sapien
ttatttccaacattcttggcatcca

SEQ ID NO: 3355394 - DNA, 25 bp, Homo sapien
ccttcttcttatcgacgacattcaa

SEQ ID NO: 3355395 - DNA, 25 bp, Homo sapien
tgccttcttcttatcgacgacattc

SEQ ID NO: 3355396 - DNA, 25 bp, Homo sapien
tcttcttatcgacgacattcaacat

SEQ ID NO: 3355397 - DNA, 25 bp, Homo sapien
ttcttcttatcgacgacattcaaca

SEQ ID NO: 3355398 - DNA, 25 bp, Homo sapien
taagacattgccactttccgcctct

SEQ ID NO: 3355399 - DNA, 25 bp, Homo sapien
aagacattgccactttccgcctctt

SEQ ID NO: 3355400 - DNA, 25 bp, Homo sapien
agagttggtatgctgttggatgaac

SEQ ID NO: 3355401 - DNA, 25 bp, Homo sapien
agcacaggagagttggtatgctgtt

SEQ ID NO: 3355402 - DNA, 25 bp, Homo sapien
aaaagcacaggagagttggtatgct

SEQ ID NO: 3355403 - DNA, 25 bp, Homo sapien
ttggtatgctgttggatgaacagtc

SEQ ID NO: 3355404 - DNA, 25 bp, Homo sapien
tggctgaaaagaaggtaaccattgc

SEQ ID NO: 3355405 - DNA, 25 bp, Homo sapien
tgcgaatactactttccaagaaaat

SEQ ID NO: 3355406 - DNA, 25 bp, Homo sapien
tctgaattgctgcactggagaatgt

SEQ ID NO: 3355407 - DNA, 25 bp, Homo sapien
catagtaatgcgaatatctgcgaat

SEQ ID NO: 3355408 - DNA, 25 bp, Homo sapien
taacttgacgatcctctgactttcc

SEQ ID NO: 3355409 - DNA, 25 bp, Homo sapien
gaaagctgccatacatgcattcttt

SEQ ID NO: 3355410 - DNA, 25 bp, Homo sapien
tttcccagaaagctgccatacatgc

SEQ ID NO: 3355411 - DNA, 25 bp, Homo sapien
tttcaccttccttaacttgacgatc

SEQ ID NO: 3355412 - DNA, 25 bp, Homo sapien
tttcacagagttttgaaattggcat

SEQ ID NO: 3355413 - DNA, 25 bp, Homo sapien
ccaaattggatttctcactatcata

SEQ ID NO: 3355414 - DNA, 25 bp, Homo sapien
ttggatttctcactatcataaatcc

SEQ ID NO: 3355415 - DNA, 25 bp, Homo sapien
gatttctcactatcataaatccagc

SEQ ID NO: 3355416 - DNA, 25 bp, Homo sapien
aattggatttctcactatcataaat

SEQ ID NO: 3355417 - DNA, 25 bp, Homo sapien
ccaaggattcagacatatcaccaag

SEQ ID NO: 3355418 - DNA, 25 bp, Homo sapien
ttgatttacatctaggcctgactcc

SEQ ID NO: 3355419 - DNA, 25 bp, Homo sapien
gatttacatctaggcctgactccaa

SEQ ID NO: 3355420 - DNA, 25 bp, Homo sapien
aggattcagacatatcaccaagcat

SEQ ID NO: 3355421 - DNA, 25 bp, Homo sapien
gaatggtgtcacttctgcttgagtt

SEQ ID NO: 3355422 - DNA, 25 bp, Homo sapien
ctttgcactctagttggaataagaa

SEQ ID NO: 3355423 - DNA, 25 bp, Homo sapien
cattatagacagtggatagggctcc

SEQ ID NO: 3355424 - DNA, 25 bp, Homo sapien
ctctgtcagcggcagccattctggc

SEQ ID NO: 3355425 - DNA, 25 bp, Homo sapien
tcctggcactcatatgtcattacac

SEQ ID NO: 3355426 - DNA, 25 bp, Homo sapien
gcaataaacattagatcctggcact

SEQ ID NO: 3355427 - DNA, 25 bp, Homo sapien
cagaacgcttattgtctgaaaagca

SEQ ID NO: 3355428 - DNA, 25 bp, Homo sapien
catagccaaggcttacagaacgctt

SEQ ID NO: 3355429 - DNA, 25 bp, Homo sapien
ctttgtattgtgtccagtcttgcag

SEQ ID NO: 3355430 - DNA, 25 bp, Homo sapien
tgcagaccagaatagagtgagggaa

SEQ ID NO: 3355431 - DNA, 25 bp, Homo sapien
agatggcatagcctgccatacaccg

SEQ ID NO: 3355432 - DNA, 25 bp, Homo sapien
cacccattgacttagacgtgagtta

SEQ ID NO: 3355433 - DNA, 25 bp, Homo sapien
tactagaaatgcatgtaagcagaac

SEQ ID NO: 3355434 - DNA, 25 bp, Homo sapien
taaccatgtgaggaagaatgatgaa

SEQ ID NO: 3355435 - DNA, 25 bp, Homo sapien
tatatgccactccacatagatatgg

SEQ ID NO: 3355436 - DNA, 25 bp, Homo sapien
tagataataagatagcatgttgcca

SEQ ID NO: 3355437 - DNA, 25 bp, Homo sapien
ttatcttgaaatctccccacttttc

SEQ ID NO: 3355438 - DNA, 25 bp, Homo sapien
atcttgaaatctccccacttttctt

SEQ ID NO: 3355439 - DNA, 25 bp, Homo sapien
tatcttgaaatctccccacttttct

SEQ ID NO: 3355440 - DNA, 25 bp, Homo sapien
gagtcagaaggtatcttccagggat

SEQ ID NO: 3355441 - DNA, 25 bp, Homo sapien
ctgagtcagaaggtatcttccaggg

SEQ ID NO: 3355442 - DNA, 25 bp, Homo sapien
tgagtcagaaggtatcttccaggga

SEQ ID NO: 3355443 - DNA, 25 bp, Homo sapien
tcagttgtctcacttttacaatggg

SEQ ID NO: 3355444 - DNA, 25 bp, Homo sapien
tttatggtttcaagccagtgtgcca

SEQ ID NO: 3355445 - DNA, 25 bp, Homo sapien
acaacatctgatgggttataatata

SEQ ID NO: 3355446 - DNA, 25 bp, Homo sapien
taaacaaaatgggtctcatgcctgt

SEQ ID NO: 3355447 - DNA, 25 bp, Homo sapien
tcctcgaagagtgtgatgactggca

SEQ ID NO: 3355448 - DNA, 25 bp, Homo sapien
gaagagtgtgatgactggcatcagc

SEQ ID NO: 3355449 - DNA, 25 bp, Homo sapien
ctcgaagagtgtgatgactggcatc

SEQ ID NO: 3355450 - DNA, 25 bp, Homo sapien
cagtcctcgaagagtgtgatgactg

SEQ ID NO: 3355451 - DNA, 25 bp, Homo sapien
taaattatcttggaaaatatcaact

SEQ ID NO: 3355452 - DNA, 25 bp, Homo sapien
aaattatcttggaaaatatcaactt

SEQ ID NO: 3355453 - DNA, 25 bp, Homo sapien
ttttaaattatcttggaaaatatca

SEQ ID NO: 3355454 - DNA, 25 bp, Homo sapien
ttaaattatcttggaaaatatcaac

SEQ ID NO: 3355455 - DNA, 25 bp, Homo sapien
tagcgggtaccagtagtaagaaggc

SEQ ID NO: 3355456 - DNA, 25 bp, Homo sapien
aacttgagggcttggatgagcagcc

SEQ ID NO: 3355457 - DNA, 25 bp, Homo sapien
gaggagacagagcatatcagtgcca

SEQ ID NO: 3355458 - DNA, 25 bp, Homo sapien
ccttctagtataagcccctgctctg

SEQ ID NO: 3355459 - DNA, 25 bp, Homo sapien
cccactattatatccattagcagca

SEQ ID NO: 3355460 - DNA, 25 bp, Homo sapien
accccactattatatccattagcag

SEQ ID NO: 3355461 - DNA, 25 bp, Homo sapien
aaccccactattatatccattagca

SEQ ID NO: 3355462 - DNA, 25 bp, Homo sapien
cactattatatccattagcagcagg

SEQ ID NO: 3355463 - DNA, 25 bp, Homo sapien
gagaggacctaatgatgtctgagtt

SEQ ID NO: 3355464 - DNA, 25 bp, Homo sapien
ccagagaggacctaatgatgtctga

SEQ ID NO: 3355465 - DNA, 25 bp, Homo sapien
gaggacctaatgatgtctgagttca

SEQ ID NO: 3355466 - DNA, 25 bp, Homo sapien
cggccagagaggacctaatgatgtc

SEQ ID NO: 3355467 - DNA, 25 bp, Homo sapien
aacattgttcgtccagtgcctgaga

SEQ ID NO: 3355468 - DNA, 25 bp, Homo sapien
tgttcgtccagtgcctgagatgtct

SEQ ID NO: 3355469 - DNA, 25 bp, Homo sapien
gtgagtaaaacattgttcgtccagt

SEQ ID NO: 3355470 - DNA, 25 bp, Homo sapien
taaaacattgttcgtccagtgcctg

SEQ ID NO: 3355471 - DNA, 25 bp, Homo sapien
ggtagcaggacagaagcaagttatc

SEQ ID NO: 3355472 - DNA, 25 bp, Homo sapien
taaggtatcaaacaacagctgagcc

SEQ ID NO: 3355473 - DNA, 25 bp, Homo sapien
gctgagcctcacctaggtagcagga

SEQ ID NO: 3355474 - DNA, 25 bp, Homo sapien
cctcagtgactgaagttggcaagaa

SEQ ID NO: 3355475 - DNA, 25 bp, Homo sapien
tttattgagggtatttgaattgatg

SEQ ID NO: 3355476 - DNA, 25 bp, Homo sapien
attttattgagggtatttgaattga

SEQ ID NO: 3355477 - DNA, 25 bp, Homo sapien
tattgagggtatttgaattgatgtc

SEQ ID NO: 3355478 - DNA, 25 bp, Homo sapien
ttattgagggtatttgaattgatgt

SEQ ID NO: 3355479 - DNA, 25 bp, Homo sapien
ccaggtggaatcttcacttgaaata

SEQ ID NO: 3355480 - DNA, 25 bp, Homo sapien
gcagccaggtggaatcttcacttga

SEQ ID NO: 3355481 - DNA, 25 bp, Homo sapien
gaacttagcctgcttaggatgtgca

SEQ ID NO: 3355482 - DNA, 25 bp, Homo sapien
gatgtgcattaaggcttggtcacag

SEQ ID NO: 3355483 - DNA, 25 bp, Homo sapien
tcctctgttcctgacttgagactcc

SEQ ID NO: 3355484 - DNA, 25 bp, Homo sapien
gacaagacgccctatttgatggcta

SEQ ID NO: 3355485 - DNA, 25 bp, Homo sapien
gcttgagatttataggtgagattct

SEQ ID NO: 3355486 - DNA, 25 bp, Homo sapien
gaataatactgacaagacgccctat

SEQ ID NO: 3355487 - DNA, 25 bp, Homo sapien
agtacttttgacagtactgagtttg

SEQ ID NO: 3355488 - DNA, 25 bp, Homo sapien
tttcaacgtcaggaaaacttcagag

SEQ ID NO: 3355489 - DNA, 25 bp, Homo sapien
ctgagtttgttgtggtatatttcaa

SEQ ID NO: 3355490 - DNA, 25 bp, Homo sapien
tgtgctctgtatttaagaaccagta

SEQ ID NO: 3355491 - DNA, 25 bp, Homo sapien
ttagaatctcaacggcccatcaaga

SEQ ID NO: 3355492 - DNA, 25 bp, Homo sapien
tgctaaaatgtgtttataccagatc

SEQ ID NO: 3355493 - DNA, 25 bp, Homo sapien
ccagatcccattagaatctcaacgg

SEQ ID NO: 3355494 - DNA, 25 bp, Homo sapien
tgtgtttataccagatcccattaga

SEQ ID NO: 3355495 - DNA, 25 bp, Homo sapien
agcaacctgggcagcacaacgagac

SEQ ID NO: 3355496 - DNA, 25 bp, Homo sapien
tcagtagtttaagagcaacctgggc

SEQ ID NO: 3355497 - DNA, 25 bp, Homo sapien
cttgagatcagtagtttaagagcaa

SEQ ID NO: 3355498 - DNA, 25 bp, Homo sapien
gatcagtagtttaagagcaacctgg

SEQ ID NO: 3355499 - DNA, 25 bp, Homo sapien
acagtgagatagtgctgtctcttcc

SEQ ID NO: 3355500 - DNA, 25 bp, Homo sapien
tgctgtctcttccaaactttggtat

SEQ ID NO: 3355501 - DNA, 25 bp, Homo sapien
tttggtatccattaactctcttttg

SEQ ID NO: 3355502 - DNA, 25 bp, Homo sapien
ccaagttacagtgagatagtgctgt

SEQ ID NO: 3355503 - DNA, 25 bp, Homo sapien
caccagggttgagtaaaaataactg

SEQ ID NO: 3355504 - DNA, 25 bp, Homo sapien
tgggaaaccggcaagaataggctct

SEQ ID NO: 3355505 - DNA, 25 bp, Homo sapien
tcacacaggtgggaaaccggcaaga

SEQ ID NO: 3355506 - DNA, 25 bp, Homo sapien
cacaggtgggaaaccggcaagaata

SEQ ID NO: 3355507 - DNA, 25 bp, Homo sapien
cccaaggggataaggatactcctca

SEQ ID NO: 3355508 - DNA, 25 bp, Homo sapien
taaggatactcctcaggatgtacca

SEQ ID NO: 3355509 - DNA, 25 bp, Homo sapien
gccacccaaggggataaggatactc

SEQ ID NO: 3355510 - DNA, 25 bp, Homo sapien
tactcctcaggatgtaccatcacca

SEQ ID NO: 3355511 - DNA, 25 bp, Homo sapien
tgcagataaccacgcgatcagcagc

SEQ ID NO: 3355512 - DNA, 25 bp, Homo sapien
gatgcagataaccacgcgatcagca

SEQ ID NO: 3355513 - DNA, 25 bp, Homo sapien
accatcttgatgattgatgcagata

SEQ ID NO: 3355514 - DNA, 25 bp, Homo sapien
gattgatgcagataaccacgcgatc

SEQ ID NO: 3355515 - DNA, 25 bp, Homo sapien
aatgccacttccgaagaaaatactt

SEQ ID NO: 3355516 - DNA, 25 bp, Homo sapien
ttctcccacaccttgcatttaggct

SEQ ID NO: 3355517 - DNA, 25 bp, Homo sapien
ccacaccttgcatttaggctggagc

SEQ ID NO: 3355518 - DNA, 25 bp, Homo sapien
tgcatttaggctggagctaattggc

SEQ ID NO: 3355519 - DNA, 25 bp, Homo sapien
aatttctggaagcaagtgcaccctt

SEQ ID NO: 3355520 - DNA, 25 bp, Homo sapien
tgctcctgactcagatcaggtcttc

SEQ ID NO: 3355521 - DNA, 25 bp, Homo sapien
gctcctgactcagatcaggtcttcc

SEQ ID NO: 3355522 - DNA, 25 bp, Homo sapien
cgttttctggccatcgcggaggagt

SEQ ID NO: 3355523 - DNA, 25 bp, Homo sapien
tttatatagcgtctggaggccggga

SEQ ID NO: 3355524 - DNA, 25 bp, Homo sapien
acaggtagccctcgcagtgacaagg

SEQ ID NO: 3355525 - DNA, 25 bp, Homo sapien
cagattacccggaaaagccctggca

SEQ ID NO: 3355526 - DNA, 25 bp, Homo sapien
tagtcaatgaaacgaccatatttac

SEQ ID NO: 3355527 - DNA, 25 bp, Homo sapien
gtcaatgaaacgaccatatttactc

SEQ ID NO: 3355528 - DNA, 25 bp, Homo sapien
tcaatgaaacgaccatatttactct

SEQ ID NO: 3355529 - DNA, 25 bp, Homo sapien
ctttagtcaatgaaacgaccatatt

SEQ ID NO: 3355530 - DNA, 25 bp, Homo sapien
tttgttctgagcgaaaatctgacag

SEQ ID NO: 3355531 - DNA, 25 bp, Homo sapien
caaagttgaccgtaggaatatgagt

SEQ ID NO: 3355532 - DNA, 25 bp, Homo sapien
tcaaagctgatacttcttaactgtt

SEQ ID NO: 3355533 - DNA, 25 bp, Homo sapien
gattggataattgcatctggaggac

SEQ ID NO: 3355534 - DNA, 25 bp, Homo sapien
ctgcctagcacagggaagcgggcag

SEQ ID NO: 3355535 - DNA, 25 bp, Homo sapien
tcatgtccttcccagataccagtgt

SEQ ID NO: 3355536 - DNA, 25 bp, Homo sapien
tagcacagggaagcgggcagtgttc

SEQ ID NO: 3355537 - DNA, 25 bp, Homo sapien
gcctagcacagggaagcgggcagtg

SEQ ID NO: 3355538 - DNA, 25 bp, Homo sapien
ggacagccaaccttgctgctgacat

SEQ ID NO: 3355539 - DNA, 25 bp, Homo sapien
ttatggacagccaaccttgctgctg

SEQ ID NO: 3355540 - DNA, 25 bp, Homo sapien
tatggacagccaaccttgctgctga

SEQ ID NO: 3355541 - DNA, 25 bp, Homo sapien
tggacagccaaccttgctgctgaca

SEQ ID NO: 3355542 - DNA, 25 bp, Homo sapien
tctattcctgtaacaggtgctatca

SEQ ID NO: 3355543 - DNA, 25 bp, Homo sapien
ttcagtatccacataacctgactga

SEQ ID NO: 3355544 - DNA, 25 bp, Homo sapien
tagtttgctctattcctgtaacagg

SEQ ID NO: 3355545 - DNA, 25 bp, Homo sapien
tatcatatccgttgtgctccagaaa

SEQ ID NO: 3355546 - DNA, 25 bp, Homo sapien
gcttcaacccctcctaacaactgct

SEQ ID NO: 3355547 - DNA, 25 bp, Homo sapien
cttcaacccctcctaacaactgctg

SEQ ID NO: 3355548 - DNA, 25 bp, Homo sapien
ggaaaacatatttgaacttgcatgc

SEQ ID NO: 3355549 - DNA, 25 bp, Homo sapien
tgttgacctggatcaagactcccag

SEQ ID NO: 3355550 - DNA, 25 bp, Homo sapien
gagtttgcaacctggtagagcaaac

SEQ ID NO: 3355551 - DNA, 25 bp, Homo sapien
catgtaagtgtgctctttggaaaac

SEQ ID NO: 3355552 - DNA, 25 bp, Homo sapien
gttcttaggatttacatatcgtttg

SEQ ID NO: 3355553 - DNA, 25 bp, Homo sapien
gtacttcttctctcctatattgtca

SEQ ID NO: 3355554 - DNA, 25 bp, Homo sapien
ggcttccagcagcttttgtgttgtt

SEQ ID NO: 3355555 - DNA, 25 bp, Homo sapien
taagaagaggtggtattgtacttct

SEQ ID NO: 3355556 - DNA, 25 bp, Homo sapien
tctaaaatggttacatatgtcttgg

SEQ ID NO: 3355557 - DNA, 25 bp, Homo sapien
tgtcttggttaatgtcctcagtcat

SEQ ID NO: 3355558 - DNA, 25 bp, Homo sapien
catatgtcttggttaatgtcctcag

SEQ ID NO: 3355559 - DNA, 25 bp, Homo sapien
gttacatatgtcttggttaatgtcc

SEQ ID NO: 3355560 - DNA, 25 bp, Homo sapien
tctacagaggacacgattgaaatgc

SEQ ID NO: 3355561 - DNA, 25 bp, Homo sapien
tacagaggacacgattgaaatgcat

SEQ ID NO: 3355562 - DNA, 25 bp, Homo sapien
tttaacaacagcatgtctacgagtc

SEQ ID NO: 3355563 - DNA, 25 bp, Homo sapien
tctacgagtcatgctattatctttc

SEQ ID NO: 3355564 - DNA, 25 bp, Homo sapien
acctcttagagctgtggctctgcca

SEQ ID NO: 3355565 - DNA, 25 bp, Homo sapien
ctgcactattttagggcagttaggc

SEQ ID NO: 3355566 - DNA, 25 bp, Homo sapien
tcttagagctgtggctctgccatgg

SEQ ID NO: 3355567 - DNA, 25 bp, Homo sapien
actgtggaagcctgcactattttag

SEQ ID NO: 3355568 - DNA, 25 bp, Homo sapien
agactcctcctagtttttccatcta

SEQ ID NO: 3355569 - DNA, 25 bp, Homo sapien
ccagccttcaggcacgaatgggaat

SEQ ID NO: 3355570 - DNA, 25 bp, Homo sapien
tttccatctatcccttcaccagttt

SEQ ID NO: 3355571 - DNA, 25 bp, Homo sapien
ttcaggctttagactcctcctagtt

SEQ ID NO: 3355572 - DNA, 25 bp, Homo sapien
ccaaagcccaccgtagggacttgct

SEQ ID NO: 3355573 - DNA, 25 bp, Homo sapien
attcctaagctgtaaaactgccacg

SEQ ID NO: 3355574 - DNA, 25 bp, Homo sapien
aagcccaccgtagggacttgctcct

SEQ ID NO: 3355575 - DNA, 25 bp, Homo sapien
tgccacgcatttagggccataaagg

SEQ ID NO: 3355576 - DNA, 25 bp, Homo sapien
ggctgtgtaccaactcagacacttt

SEQ ID NO: 3355577 - DNA, 25 bp, Homo sapien
gccctctactgtctgggctgtgtac

SEQ ID NO: 3355578 - DNA, 25 bp, Homo sapien
gggctgtgtaccaactcagacactt

SEQ ID NO: 3355579 - DNA, 25 bp, Homo sapien
tctgtagcgccctctactgtctggg

SEQ ID NO: 3355580 - DNA, 25 bp, Homo sapien
gacccaattgctgccactttggcct

SEQ ID NO: 3355581 - DNA, 25 bp, Homo sapien
gttttcctttgaaacttgcgctcac

SEQ ID NO: 3355582 - DNA, 25 bp, Homo sapien
gacgctccccgcagctctgtattga

SEQ ID NO: 3355583 - DNA, 25 bp, Homo sapien
gaaacttgcgctcacttcctttaat

SEQ ID NO: 3355584 - DNA, 25 bp, Homo sapien
tgaattttgccgtgctttcctcttc

SEQ ID NO: 3355585 - DNA, 25 bp, Homo sapien
tgtgtcaaaatgatgcattagttga

SEQ ID NO: 3355586 - DNA, 25 bp, Homo sapien
cattagttgaattttgccgtgcttt

SEQ ID NO: 3355587 - DNA, 25 bp, Homo sapien
aatgatgcattagttgaattttgcc

SEQ ID NO: 3355588 - DNA, 25 bp, Homo sapien
agtagagcctcaaggcagagaggat

SEQ ID NO: 3355589 - DNA, 25 bp, Homo sapien
cagtagagcctcaaggcagagagga

SEQ ID NO: 3355590 - DNA, 25 bp, Homo sapien
ccagggaagagctcgggtatattgt

SEQ ID NO: 3355591 - DNA, 25 bp, Homo sapien
gaacacgcccttgaagacctatgca

SEQ ID NO: 3355592 - DNA, 25 bp, Homo sapien
ttatttagagatgggcttgaacacg

SEQ ID NO: 3355593 - DNA, 25 bp, Homo sapien
gaagagctcgggtatattgtgagct

SEQ ID NO: 3355594 - DNA, 25 bp, Homo sapien
cacggagtgcatgagctggtttacc

SEQ ID NO: 3355595 - DNA, 25 bp, Homo sapien
tcaccagccagatgagagccaagtt

SEQ ID NO: 3355596 - DNA, 25 bp, Homo sapien
gctgcagtgcagaccaagacaagat

SEQ ID NO: 3355597 - DNA, 25 bp, Homo sapien
tggccaccagaggaatccaagcatt

SEQ ID NO: 3355598 - DNA, 25 bp, Homo sapien
gatgcttcactgtctagtcctccag

SEQ ID NO: 3355599 - DNA, 25 bp, Homo sapien
gctcagcagccctagtcatatattg

SEQ ID NO: 3355600 - DNA, 25 bp, Homo sapien
tagttcatgttgtattgagctcagc

SEQ ID NO: 3355601 - DNA, 25 bp, Homo sapien
tagatacatagagccatcattagga

SEQ ID NO: 3355602 - DNA, 25 bp, Homo sapien
tagtgccttccacccttggaaagct

SEQ ID NO: 3355603 - DNA, 25 bp, Homo sapien
ttagtgccttccacccttggaaagc

SEQ ID NO: 3355604 - DNA, 25 bp, Homo sapien
tctcctgcaggattatttcattttc

SEQ ID NO: 3355605 - DNA, 25 bp, Homo sapien
tgtctctccaaataaagttactcct

SEQ ID NO: 3355606 - DNA, 25 bp, Homo sapien
taaatgagtggcccactatccaaat

SEQ ID NO: 3355607 - DNA, 25 bp, Homo sapien
tattcctgatccaagcctatcccag

SEQ ID NO: 3355608 - DNA, 25 bp, Homo sapien
tgtcacacttctgagacgtgggagg

SEQ ID NO: 3355609 - DNA, 25 bp, Homo sapien
cacacttctgagacgtgggaggcag

SEQ ID NO: 3355610 - DNA, 25 bp, Homo sapien
cttgtgtcacacttctgagacgtgg

SEQ ID NO: 3355611 - DNA, 25 bp, Homo sapien
tgtgtcacacttctgagacgtggga

SEQ ID NO: 3355612 - DNA, 25 bp, Homo sapien
cctcatcaacattggataccagcat

SEQ ID NO: 3355613 - DNA, 25 bp, Homo sapien
gctgagcctcatcaacattggatac

SEQ ID NO: 3355614 - DNA, 25 bp, Homo sapien
ctcagctgagcctcatcaacattgg

SEQ ID NO: 3355615 - DNA, 25 bp, Homo sapien
gagcctcatcaacattggataccag

SEQ ID NO: 3355616 - DNA, 25 bp, Homo sapien
gattcagagataacagcagggtagg

SEQ ID NO: 3355617 - DNA, 25 bp, Homo sapien
tgctcgagagagacaggtgattcag

SEQ ID NO: 3355618 - DNA, 25 bp, Homo sapien
aaatcagggtagtaatcaagtggcg

SEQ ID NO: 3355619 - DNA, 25 bp, Homo sapien
ccgtctgagggatagtaaatgcttt

SEQ ID NO: 3355620 - DNA, 25 bp, Homo sapien
tgtgagaagattccaggttgcaggc

SEQ ID NO: 3355621 - DNA, 25 bp, Homo sapien
gaagatcatgcctgatgacgtatca

SEQ ID NO: 3355622 - DNA, 25 bp, Homo sapien
catgggagcatgaaacctatcgtga

SEQ ID NO: 3355623 - DNA, 25 bp, Homo sapien
gaatttagcttgcactctccttgtg

SEQ ID NO: 3355624 - DNA, 25 bp, Homo sapien
aaatgctgtcatcagaagggtataa

SEQ ID NO: 3355625 - DNA, 25 bp, Homo sapien
tctgaaccatgccagcaggtatata

SEQ ID NO: 3355626 - DNA, 25 bp, Homo sapien
gaagggtataagtcattcgttcctc

SEQ ID NO: 3355627 - DNA, 25 bp, Homo sapien
tctacttgccttaatttatctgaac

SEQ ID NO: 3355628 - DNA, 25 bp, Homo sapien
tatgttcaaagctgcagaagcatgg

SEQ ID NO: 3355629 - DNA, 25 bp, Homo sapien
aagctgcagaagcatggaaaggcat

SEQ ID NO: 3355630 - DNA, 25 bp, Homo sapien
gttcaaagctgcagaagcatggaaa

SEQ ID NO: 3355631 - DNA, 25 bp, Homo sapien
aaagctgcagaagcatggaaaggca

SEQ ID NO: 3355632 - DNA, 25 bp, Homo sapien
gtttaagatgtcatcgatgaagagg

SEQ ID NO: 3355633 - DNA, 25 bp, Homo sapien
taagatgtcatcgatgaagaggtac

SEQ ID NO: 3355634 - DNA, 25 bp, Homo sapien
aagatgtcatcgatgaagaggtaca

SEQ ID NO: 3355635 - DNA, 25 bp, Homo sapien
ttaagatgtcatcgatgaagaggta

SEQ ID NO: 3355636 - DNA, 25 bp, Homo sapien
ttcaatccttccaactcttcctcca

SEQ ID NO: 3355637 - DNA, 25 bp, Homo sapien
tcattcaatccttccaactcttcct

SEQ ID NO: 3355638 - DNA, 25 bp, Homo sapien
caatccttccaactcttcctccatt

SEQ ID NO: 3355639 - DNA, 25 bp, Homo sapien
cattcaatccttccaactcttcctc

SEQ ID NO: 3355640 - DNA, 25 bp, Homo sapien
catccttttgttccataatcccttc

SEQ ID NO: 3355641 - DNA, 25 bp, Homo sapien
tcatccttttgttccataatccctt

SEQ ID NO: 3355642 - DNA, 25 bp, Homo sapien
cagtgttatcagagaagctactgcg

SEQ ID NO: 3355643 - DNA, 25 bp, Homo sapien
tactgcgatgtttgttctttgcctg

SEQ ID NO: 3355644 - DNA, 25 bp, Homo sapien
cactctgaagagcataggcagtgtt

SEQ ID NO: 3355645 - DNA, 25 bp, Homo sapien
gtcccattcttacatgcagaagttc

SEQ ID NO: 3355646 - DNA, 25 bp, Homo sapien
tctttgttccggagatctcatcaca

SEQ ID NO: 3355647 - DNA, 25 bp, Homo sapien
gaaatctttgttccggagatctcat

SEQ ID NO: 3355648 - DNA, 25 bp, Homo sapien
gttctatgccttgttgttttggcat

SEQ ID NO: 3355649 - DNA, 25 bp, Homo sapien
ttggaaatctttgttccggagatct

SEQ ID NO: 3355650 - DNA, 25 bp, Homo sapien
catcattgggatctggtttaatgag

SEQ ID NO: 3355651 - DNA, 25 bp, Homo sapien
tcattgggatctggtttaatgaggg

SEQ ID NO: 3355652 - DNA, 25 bp, Homo sapien
tgcatcattgggatctggtttaatg

SEQ ID NO: 3355653 - DNA, 25 bp, Homo sapien
tgggatctggtttaatgaggggcat

SEQ ID NO: 3355654 - DNA, 25 bp, Homo sapien
ggtataatcaacttccattaagatc

SEQ ID NO: 3355655 - DNA, 25 bp, Homo sapien
gacatccggtataatcaacttccat

SEQ ID NO: 3355656 - DNA, 25 bp, Homo sapien
tttagacatccggtataatcaactt

SEQ ID NO: 3355657 - DNA, 25 bp, Homo sapien
tccggtataatcaacttccattaag

SEQ ID NO: 3355658 - DNA, 25 bp, Homo sapien
tgcgtgtgaaagcaacacttggcag

SEQ ID NO: 3355659 - DNA, 25 bp, Homo sapien
taaataagtccttgttgcgtgtgaa

SEQ ID NO: 3355660 - DNA, 25 bp, Homo sapien
gatattctgatacagagttctaata

SEQ ID NO: 3355661 - DNA, 25 bp, Homo sapien
ttggcagttccagagcctgagtaga

SEQ ID NO: 3355662 - DNA, 25 bp, Homo sapien
tggcttgggcttcgttggtgtttcc

SEQ ID NO: 3355663 - DNA, 25 bp, Homo sapien
cgttggtgtttccactgctcctctg

SEQ ID NO: 3355664 - DNA, 25 bp, Homo sapien
tgctcctctgcatcatttgctaatg

SEQ ID NO: 3355665 - DNA, 25 bp, Homo sapien
gggcttcgttggtgtttccactgct

SEQ ID NO: 3355666 - DNA, 25 bp, Homo sapien
cagaactgtgcggatctgcagggct

SEQ ID NO: 3355667 - DNA, 25 bp, Homo sapien
gatccgtagcagaactgtgcggatc

SEQ ID NO: 3355668 - DNA, 25 bp, Homo sapien
aactgtgcggatctgcagggctggg

SEQ ID NO: 3355669 - DNA, 25 bp, Homo sapien
ctggatccgtagcagaactgtgcgg

SEQ ID NO: 3355670 - DNA, 25 bp, Homo sapien
taacgtattctccccaacttgtcta

SEQ ID NO: 3355671 - DNA, 25 bp, Homo sapien
attaggatgacaaattttggtcata

SEQ ID NO: 3355672 - DNA, 25 bp, Homo sapien
ggatgacaaattttggtcataaaac

SEQ ID NO: 3355673 - DNA, 25 bp, Homo sapien
gacaaattttggtcataaaacgcac

SEQ ID NO: 3355674 - DNA, 25 bp, Homo sapien
atgacaaattttggtcataaaacgc

SEQ ID NO: 3355675 - DNA, 25 bp, Homo sapien
gggtattcttctggaagaaatagtc

SEQ ID NO: 3355676 - DNA, 25 bp, Homo sapien
tttaggggctgccattgggtattct

SEQ ID NO: 3355677 - DNA, 25 bp, Homo sapien
tctggaagaaatagtccaagtttaa

SEQ ID NO: 3355678 - DNA, 25 bp, Homo sapien
ggctgccattgggtattcttctgga

SEQ ID NO: 3355679 - DNA, 25 bp, Homo sapien
aaataatggatgttgctctcatatg

SEQ ID NO: 3355680 - DNA, 25 bp, Homo sapien
gaatcccagggactggcaatgacca

SEQ ID NO: 3355681 - DNA, 25 bp, Homo sapien
aatggatgttgctctcatatggttc

SEQ ID NO: 3355682 - DNA, 25 bp, Homo sapien
ccagggactggcaatgaccacatga

SEQ ID NO: 3355683 - DNA, 25 bp, Homo sapien
tgaaagactttacacgaacttgtga

SEQ ID NO: 3355684 - DNA, 25 bp, Homo sapien
tgtgatcccttcttgaaggtgccat

SEQ ID NO: 3355685 - DNA, 25 bp, Homo sapien
tcatgtttagaaggtgatgcgtgtg

SEQ ID NO: 3355686 - DNA, 25 bp, Homo sapien
gactttacacgaacttgtgatccct

SEQ ID NO: 3355687 - DNA, 25 bp, Homo sapien
gagatttgcgaagatgatcatcttt

SEQ ID NO: 3355688 - DNA, 25 bp, Homo sapien
cagagatttgcgaagatgatcatct

SEQ ID NO: 3355689 - DNA, 25 bp, Homo sapien
tgcgaagatgatcatctttcccatt

SEQ ID NO: 3355690 - DNA, 25 bp, Homo sapien
gatttgcgaagatgatcatctttcc

SEQ ID NO: 3355691 - DNA, 25 bp, Homo sapien
agcacctagatgactggcttgggtg

SEQ ID NO: 3355692 - DNA, 25 bp, Homo sapien
catgctcaaaactctttggtagttc

SEQ ID NO: 3355693 - DNA, 25 bp, Homo sapien
actctttggtagttctctgttgccc

SEQ ID NO: 3355694 - DNA, 25 bp, Homo sapien
aagcacctagatgactggcttgggt

SEQ ID NO: 3355695 - DNA, 25 bp, Homo sapien
tgcactgtggttctccccaggagac

SEQ ID NO: 3355696 - DNA, 25 bp, Homo sapien
ttgcactgtggttctccccaggaga

SEQ ID NO: 3355697 - DNA, 25 bp, Homo sapien
gaaacaggtaagtcccgacatccta

SEQ ID NO: 3355698 - DNA, 25 bp, Homo sapien
catcctacttcagccacagcaactc

SEQ ID NO: 3355699 - DNA, 25 bp, Homo sapien
ggagagaaacaggtaagtcccgaca

SEQ ID NO: 3355700 - DNA, 25 bp, Homo sapien
ggtaagtcccgacatcctacttcag

SEQ ID NO: 3355701 - DNA, 25 bp, Homo sapien
tttgaagtatttcaggagttgttgt

SEQ ID NO: 3355702 - DNA, 25 bp, Homo sapien
ttccactttgaagtatttcaggagt

SEQ ID NO: 3355703 - DNA, 25 bp, Homo sapien
gaagtatttcaggagttgttgtcat

SEQ ID NO: 3355704 - DNA, 25 bp, Homo sapien
tctctcctcttgacagctttctgtt

SEQ ID NO: 3355705 - DNA, 25 bp, Homo sapien
taaaggtactatcttcaatactacc

SEQ ID NO: 3355706 - DNA, 25 bp, Homo sapien
ccatctatttcactaaaggtactat

SEQ ID NO: 3355707 - DNA, 25 bp, Homo sapien
tattgtccatcagtcagtgacatat

SEQ ID NO: 3355708 - DNA, 25 bp, Homo sapien
gatatccaaacagtaatattgtcca

SEQ ID NO: 3355709 - DNA, 25 bp, Homo sapien
gctagaaatggagtcataggcctca

SEQ ID NO: 3355710 - DNA, 25 bp, Homo sapien
tggagagcagcaacactcatagcct

SEQ ID NO: 3355711 - DNA, 25 bp, Homo sapien
catatgatgaaaacgatagagcttc

SEQ ID NO: 3355712 - DNA, 25 bp, Homo sapien
taggcctcatggacctcaccatatg

SEQ ID NO: 3355713 - DNA, 25 bp, Homo sapien
gcaactgtggatgatatactctgtg

SEQ ID NO: 3355714 - DNA, 25 bp, Homo sapien
ccccttgagagaaggataaatccca

SEQ ID NO: 3355715 - DNA, 25 bp, Homo sapien
tgactcctggatggttaatatctcc

SEQ ID NO: 3355716 - DNA, 25 bp, Homo sapien
gttttgcaactgtggatgatatact

SEQ ID NO: 3355717 - DNA, 25 bp, Homo sapien
tttcgtaggatcttcaccgaaggaa

SEQ ID NO: 3355718 - DNA, 25 bp, Homo sapien
gagatgtgtatttcgtaggatcttc

SEQ ID NO: 3355719 - DNA, 25 bp, Homo sapien
tgtgtatttcgtaggatcttcaccg

SEQ ID NO: 3355720 - DNA, 25 bp, Homo sapien
tatttcgtaggatcttcaccgaagg

SEQ ID NO: 3355721 - DNA, 25 bp, Homo sapien
tcattctcaagtggccttgcttctg

SEQ ID NO: 3355722 - DNA, 25 bp, Homo sapien
ccagaagctaatctgtcattctcaa

SEQ ID NO: 3355723 - DNA, 25 bp, Homo sapien
tgctaagtcaaccttcccagaagct

SEQ ID NO: 3355724 - DNA, 25 bp, Homo sapien
gaatctatatttctgctctgcctct

SEQ ID NO: 3355725 - DNA, 25 bp, Homo sapien
gaataattcagcacctactagcctt

SEQ ID NO: 3355726 - DNA, 25 bp, Homo sapien
gaagaggacataatctcatgtttcc

SEQ ID NO: 3355727 - DNA, 25 bp, Homo sapien
tttagttctgtaagtgtgcacacca

SEQ ID NO: 3355728 - DNA, 25 bp, Homo sapien
caagtgtgcatctggtttttagttc

SEQ ID NO: 3355729 - DNA, 25 bp, Homo sapien
tgtgcatgcatactaagtccattct

SEQ ID NO: 3355730 - DNA, 25 bp, Homo sapien
catgcatactaagtccattctgcct

SEQ ID NO: 3355731 - DNA, 25 bp, Homo sapien
cccatccagagtgtgcatgcatact

SEQ ID NO: 3355732 - DNA, 25 bp, Homo sapien
cagagtgtgcatgcatactaagtcc

SEQ ID NO: 3355733 - DNA, 25 bp, Homo sapien
attgcttataatggattcccccact

SEQ ID NO: 3355734 - DNA, 25 bp, Homo sapien
cccactctcatccagattgccagct

SEQ ID NO: 3355735 - DNA, 25 bp, Homo sapien
ccccactctcatccagattgccagc

SEQ ID NO: 3355736 - DNA, 25 bp, Homo sapien
gcttataatggattcccccactctc

SEQ ID NO: 3355737 - DNA, 25 bp, Homo sapien
tctgtgttatccagggtcccactcc

SEQ ID NO: 3355738 - DNA, 25 bp, Homo sapien
tcatgggaccgaggtttctgtgtta

SEQ ID NO: 3355739 - DNA, 25 bp, Homo sapien
tatgctgcccaacgtcaagctcttc

SEQ ID NO: 3355740 - DNA, 25 bp, Homo sapien
cctggtcctcacactagggtcatgg

SEQ ID NO: 3355741 - DNA, 25 bp, Homo sapien
aagattatgatgctgggaaatcctc

SEQ ID NO: 3355742 - DNA, 25 bp, Homo sapien
catcttatctttatgtaacacatga

SEQ ID NO: 3355743 - DNA, 25 bp, Homo sapien
acatgatttctgtagttaactagag

SEQ ID NO: 3355744 - DNA, 25 bp, Homo sapien
aatcctcctgagacaatttttttca

SEQ ID NO: 3355745 - DNA, 25 bp, Homo sapien
ctttcattactgtcagtcttctgca

SEQ ID NO: 3355746 - DNA, 25 bp, Homo sapien
ttactgtcagtcttctgcaggtttt

SEQ ID NO: 3355747 - DNA, 25 bp, Homo sapien
tcaagccactttcattactgtcagt

SEQ ID NO: 3355748 - DNA, 25 bp, Homo sapien
tcattactgtcagtcttctgcaggt

SEQ ID NO: 3355749 - DNA, 25 bp, Homo sapien
cggcaagctgataatgcacctgcat

SEQ ID NO: 3355750 - DNA, 25 bp, Homo sapien
aattatctccatcagtcgctccagg

SEQ ID NO: 3355751 - DNA, 25 bp, Homo sapien
gtcgctccagggcagtatcggcaag

SEQ ID NO: 3355752 - DNA, 25 bp, Homo sapien
tagaaatcgtaattatctccatcag

SEQ ID NO: 3355753 - DNA, 25 bp, Homo sapien
ctggccagtaattttttgatgtttg

SEQ ID NO: 3355754 - DNA, 25 bp, Homo sapien
ccgtggcaatagttggctggagcta

SEQ ID NO: 3355755 - DNA, 25 bp, Homo sapien
tcttatttcttagcctgggtcccta

SEQ ID NO: 3355756 - DNA, 25 bp, Homo sapien
tatgtactccttggtctagcccagt

SEQ ID NO: 3355757 - DNA, 25 bp, Homo sapien
tagaacatgtggttgcactgtcccc

SEQ ID NO: 3355758 - DNA, 25 bp, Homo sapien
gatcttcagatcagaggattcctct

SEQ ID NO: 3355759 - DNA, 25 bp, Homo sapien
ctctacattacttgggcaggcccgg

SEQ ID NO: 3355760 - DNA, 25 bp, Homo sapien
tagtagactgaatactggtgtccca

SEQ ID NO: 3355761 - DNA, 25 bp, Homo sapien
tcatggtatagagtccctaaggacc

SEQ ID NO: 3355762 - DNA, 25 bp, Homo sapien
catggtatagaaagaggcccaatcc

SEQ ID NO: 3355763 - DNA, 25 bp, Homo sapien
gaaagcttatggtagaaatatcccc

SEQ ID NO: 3355764 - DNA, 25 bp, Homo sapien
ttattaagcatcctaggtacagagg

SEQ ID NO: 3355765 - DNA, 25 bp, Homo sapien
cagaggtattcagcagaagaaagct

SEQ ID NO: 3355766 - DNA, 25 bp, Homo sapien
aaaatgtgcttttccaccagatcca

SEQ ID NO: 3355767 - DNA, 25 bp, Homo sapien
gctcatcaaagatcaaaatgtgctt

SEQ ID NO: 3355768 - DNA, 25 bp, Homo sapien
gcttttccaccagatccagtggctt

SEQ ID NO: 3355769 - DNA, 25 bp, Homo sapien
ctgctcatcaaagatcaaaatgtgc

SEQ ID NO: 3355770 - DNA, 25 bp, Homo sapien
tttactgcccatacacgatcattag

SEQ ID NO: 3355771 - DNA, 25 bp, Homo sapien
tgtcacctgaggagcatatctcaag

SEQ ID NO: 3355772 - DNA, 25 bp, Homo sapien
ggagggaatactctgtcctcactga

SEQ ID NO: 3355773 - DNA, 25 bp, Homo sapien
tgaggaagttcagattgcccttgcc

SEQ ID NO: 3355774 - DNA, 25 bp, Homo sapien
aatgttcccgtattaaattgcagtt

SEQ ID NO: 3355775 - DNA, 25 bp, Homo sapien
gaatgttcccgtattaaattgcagt

SEQ ID NO: 3355776 - DNA, 25 bp, Homo sapien
gagaatgttcccgtattaaattgca

SEQ ID NO: 3355777 - DNA, 25 bp, Homo sapien
acagagaatgttcccgtattaaatt

SEQ ID NO: 3355778 - DNA, 25 bp, Homo sapien
ccctgctacttctctcgaagctgtc

SEQ ID NO: 3355779 - DNA, 25 bp, Homo sapien
tgctacttctctcgaagctgtctcc

SEQ ID NO: 3355780 - DNA, 25 bp, Homo sapien
cctgctacttctctcgaagctgtct

SEQ ID NO: 3355781 - DNA, 25 bp, Homo sapien
ctacttctctcgaagctgtctccac

SEQ ID NO: 3355782 - DNA, 25 bp, Homo sapien
aataattgtgctaaacttttcttga

SEQ ID NO: 3355783 - DNA, 25 bp, Homo sapien
tttgtggacatagaaaaagctctcc

SEQ ID NO: 3355784 - DNA, 25 bp, Homo sapien
ttgaaagcagccattagcataaata

SEQ ID NO: 3355785 - DNA, 25 bp, Homo sapien
catacattgaaagcagccattagca

SEQ ID NO: 3355786 - DNA, 25 bp, Homo sapien
gaaagcttaggggaattcatcacgc

SEQ ID NO: 3355787 - DNA, 25 bp, Homo sapien
gccttgtgctctcatggtcccactg

SEQ ID NO: 3355788 - DNA, 25 bp, Homo sapien
tccctctgggatcccatcctctatc

SEQ ID NO: 3355789 - DNA, 25 bp, Homo sapien
tctcccctgtaaagatccctctggg

SEQ ID NO: 3355790 - DNA, 25 bp, Homo sapien
tagttttggctcctcccatagcctc

SEQ ID NO: 3355791 - DNA, 25 bp, Homo sapien
ggcaatatcagtattccaactagtt

SEQ ID NO: 3355792 - DNA, 25 bp, Homo sapien
cactcagtctcttggacaggatcca

SEQ ID NO: 3355793 - DNA, 25 bp, Homo sapien
catagcctctgagcattaggccacg

SEQ ID NO: 3355794 - DNA, 25 bp, Homo sapien
ggtgtatgaggtccctattctctct

SEQ ID NO: 3355795 - DNA, 25 bp, Homo sapien
gtgtatgaggtccctattctctctc

SEQ ID NO: 3355796 - DNA, 25 bp, Homo sapien
ctggtgtatgaggtccctattctct

SEQ ID NO: 3355797 - DNA, 25 bp, Homo sapien
tggtgtatgaggtccctattctctc

SEQ ID NO: 3355798 - DNA, 25 bp, Homo sapien
tgaagctgcttaagaagccggaagc

SEQ ID NO: 3355799 - DNA, 25 bp, Homo sapien
acctggtgctttgggtatctctgaa

SEQ ID NO: 3355800 - DNA, 25 bp, Homo sapien
gctggaaccaattgctgttggggca

SEQ ID NO: 3355801 - DNA, 25 bp, Homo sapien
ccaattgctgttggggcattgtcat

SEQ ID NO: 3355802 - DNA, 25 bp, Homo sapien
atttttcaccttgggattatacctg

SEQ ID NO: 3355803 - DNA, 25 bp, Homo sapien
tcaccttgggattatacctgaattt

SEQ ID NO: 3355804 - DNA, 25 bp, Homo sapien
aatgtaggcacaagccttggatgaa

SEQ ID NO: 3355805 - DNA, 25 bp, Homo sapien
ttcccattaagtctgtttgtttgat

SEQ ID NO: 3355806 - DNA, 25 bp, Homo sapien
gtccagacacgcagtgtgtccacag

SEQ ID NO: 3355807 - DNA, 25 bp, Homo sapien
agggtggagtcaagagcccagcaac

SEQ ID NO: 3355808 - DNA, 25 bp, Homo sapien
gcccagcaacgtggcaggaagtgtc

SEQ ID NO: 3355809 - DNA, 25 bp, Homo sapien
tggcagaggagtcttgcccatgact

SEQ ID NO: 3355810 - DNA, 25 bp, Homo sapien
agtccccagttttgatatttgagag

SEQ ID NO: 3355811 - DNA, 25 bp, Homo sapien
caaaccctggaaagcgttgcttcag

SEQ ID NO: 3355812 - DNA, 25 bp, Homo sapien
ggcctctcatgatcgacccctaatg

SEQ ID NO: 3355813 - DNA, 25 bp, Homo sapien
tttgagagtggcttcggtaatggct

SEQ ID NO: 3355814 - DNA, 25 bp, Homo sapien
ttagaacttcctggacatggtttgc

SEQ ID NO: 3355815 - DNA, 25 bp, Homo sapien
caggctttcgtactgattcttgcaa

SEQ ID NO: 3355816 - DNA, 25 bp, Homo sapien
tctgagctctcaggatagcacctca

SEQ ID NO: 3355817 - DNA, 25 bp, Homo sapien
ttgggtgtcccaggctttcgtactg

SEQ ID NO: 3355818 - DNA, 25 bp, Homo sapien
caaagatggtcatgaatatctgagc

SEQ ID NO: 3355819 - DNA, 25 bp, Homo sapien
gttgacaccttcccatccactttgg

SEQ ID NO: 3355820 - DNA, 25 bp, Homo sapien
caagaggaagactcccctcctcgtt

SEQ ID NO: 3355821 - DNA, 25 bp, Homo sapien
ctcgttgacaccttcccatccactt

SEQ ID NO: 3355822 - DNA, 25 bp, Homo sapien
ctttcttcaagccaagaggaagact

SEQ ID NO: 3355823 - DNA, 25 bp, Homo sapien
ttcccgaggccacgggctcctgttg

SEQ ID NO: 3355824 - DNA, 25 bp, Homo sapien
tcctgttgcaccctggagcttgagt

SEQ ID NO: 3355825 - DNA, 25 bp, Homo sapien
tctgtgttgttgctaaagtgcctct

SEQ ID NO: 3355826 - DNA, 25 bp, Homo sapien
gtaacatttcgtttttgcacagctg

SEQ ID NO: 3355827 - DNA, 25 bp, Homo sapien
ctgtggtgcaatcgacataggtcaa

SEQ ID NO: 3355828 - DNA, 25 bp, Homo sapien
ggtgcaatcgacataggtcaacttg

SEQ ID NO: 3355829 - DNA, 25 bp, Homo sapien
tcaacttgtttcgaggctgggtctc

SEQ ID NO: 3355830 - DNA, 25 bp, Homo sapien
gacataggtcaacttgtttcgaggc

SEQ ID NO: 3355831 - DNA, 25 bp, Homo sapien
aagctctcgggctttcattttccgc

SEQ ID NO: 3355832 - DNA, 25 bp, Homo sapien
gctctcgggctttcattttccgctt

SEQ ID NO: 3355833 - DNA, 25 bp, Homo sapien
ttcattttccgcttcaccaccagag

SEQ ID NO: 3355834 - DNA, 25 bp, Homo sapien
tcattttccgcttcaccaccagaga

SEQ ID NO: 3355835 - DNA, 25 bp, Homo sapien
cactgggacacggttgtggtgtctt

SEQ ID NO: 3355836 - DNA, 25 bp, Homo sapien
tgtcttgccacaaggaacaagcagc

SEQ ID NO: 3355837 - DNA, 25 bp, Homo sapien
gatgctcatgtctagagttgcaggg

SEQ ID NO: 3355838 - DNA, 25 bp, Homo sapien
cagctcggggcctattgtcagcaca

SEQ ID NO: 3355839 - DNA, 25 bp, Homo sapien
caggaacaatcaaagccactggatc

SEQ ID NO: 3355840 - DNA, 25 bp, Homo sapien
aggaacaatcaaagccactggatct

SEQ ID NO: 3355841 - DNA, 25 bp, Homo sapien
tcaggaacaatcaaagccactggat

SEQ ID NO: 3355842 - DNA, 25 bp, Homo sapien
ggaacaatcaaagccactggatctg

SEQ ID NO: 3355843 - DNA, 25 bp, Homo sapien
acttggcccatgagagtttccttgg

SEQ ID NO: 3355844 - DNA, 25 bp, Homo sapien
cctcgccaatacaagacaaggttag

SEQ ID NO: 3355845 - DNA, 25 bp, Homo sapien
cagtggtcttcatgggaacaacttg

SEQ ID NO: 3355846 - DNA, 25 bp, Homo sapien
cagctgattatcacacagcagtggt

SEQ ID NO: 3355847 - DNA, 25 bp, Homo sapien
ggcatcccctgcactggggatgaat

SEQ ID NO: 3355848 - DNA, 25 bp, Homo sapien
ggggcatcccctgcactggggatga

SEQ ID NO: 3355849 - DNA, 25 bp, Homo sapien
catcccctgcactggggatgaattt

SEQ ID NO: 3355850 - DNA, 25 bp, Homo sapien
cttggggcatcccctgcactgggga

SEQ ID NO: 3355851 - DNA, 25 bp, Homo sapien
tgcaccgccccggatttgcttcttt

SEQ ID NO: 3355852 - DNA, 25 bp, Homo sapien
ccatgaagctgtaggtgaaggcaca

SEQ ID NO: 3355853 - DNA, 25 bp, Homo sapien
caaccactagctcacaatgctgagt

SEQ ID NO: 3355854 - DNA, 25 bp, Homo sapien
tgtttctgctttcgcttgcctctgt

SEQ ID NO: 3355855 - DNA, 25 bp, Homo sapien
cagtcgggtctgtggtccatttgat

SEQ ID NO: 3355856 - DNA, 25 bp, Homo sapien
tctttggaaagctcggccagaaagg

SEQ ID NO: 3355857 - DNA, 25 bp, Homo sapien
tctcaggtaactgattctcatgaac

SEQ ID NO: 3355858 - DNA, 25 bp, Homo sapien
tccatttgatagttaaacaagttac

SEQ ID NO: 3355859 - DNA, 25 bp, Homo sapien
ccttgataaagtagccagtgtctcc

SEQ ID NO: 3355860 - DNA, 25 bp, Homo sapien
gcaaagcattcaaggtctgccctgg

SEQ ID NO: 3355861 - DNA, 25 bp, Homo sapien
tacagggtcctcaaactggagcact

SEQ ID NO: 3355862 - DNA, 25 bp, Homo sapien
taaaagggccccagataggtctcag

SEQ ID NO: 3355863 - DNA, 25 bp, Homo sapien
cactcattgaatctagcatgattca

SEQ ID NO: 3355864 - DNA, 25 bp, Homo sapien
atatcacagtccgaccaaaccccaa

SEQ ID NO: 3355865 - DNA, 25 bp, Homo sapien
cccaacccgttcattgtcagaacta

SEQ ID NO: 3355866 - DNA, 25 bp, Homo sapien
gaactatccactcattgaatctagc

SEQ ID NO: 3355867 - DNA, 25 bp, Homo sapien
tgacgcaggttcaagtggagcacag

SEQ ID NO: 3355868 - DNA, 25 bp, Homo sapien
aatatgatgaccagccacgtccagc

SEQ ID NO: 3355869 - DNA, 25 bp, Homo sapien
ttgaggtttcttcccacaatctggg

SEQ ID NO: 3355870 - DNA, 25 bp, Homo sapien
ggagcacaggaactgctattcccgt

SEQ ID NO: 3355871 - DNA, 25 bp, Homo sapien
agtctcacggtgaagttttctatca

SEQ ID NO: 3355872 - DNA, 25 bp, Homo sapien
ctctgcagatattcttgaagtctca

SEQ ID NO: 3355873 - DNA, 25 bp, Homo sapien
tattcttgaagtctcacggtgaagt

SEQ ID NO: 3355874 - DNA, 25 bp, Homo sapien
ctcacggtgaagttttctatcagat

SEQ ID NO: 3355875 - DNA, 25 bp, Homo sapien
ctcttgtgcacccttaatttactta

SEQ ID NO: 3355876 - DNA, 25 bp, Homo sapien
ctgagttttgtaaattgtagggaga

SEQ ID NO: 3355877 - DNA, 25 bp, Homo sapien
agtaaacttgttcatctcctaagtt

SEQ ID NO: 3355878 - DNA, 25 bp, Homo sapien
cttgttcatctcctaagttacttct

SEQ ID NO: 3355879 - DNA, 25 bp, Homo sapien
caatttggtgtcgaatagctggtct

SEQ ID NO: 3355880 - DNA, 25 bp, Homo sapien
tacttataggcaggacactatgcca

SEQ ID NO: 3355881 - DNA, 25 bp, Homo sapien
gatttttagaactagggatgctccc

SEQ ID NO: 3355882 - DNA, 25 bp, Homo sapien
ctcagaccagatggttggtacattc

SEQ ID NO: 3355883 - DNA, 25 bp, Homo sapien
tataagatttaggagagggacttcc

SEQ ID NO: 3355884 - DNA, 25 bp, Homo sapien
tacataatgaaatggacatccagtg

SEQ ID NO: 3355885 - DNA, 25 bp, Homo sapien
tgctatcaagttactccaaagaaag

SEQ ID NO: 3355886 - DNA, 25 bp, Homo sapien
attcagtgcccttctatgaatccag

SEQ ID NO: 3355887 - DNA, 25 bp, Homo sapien
tagcctttgcttgcagaactgggag

SEQ ID NO: 3355888 - DNA, 25 bp, Homo sapien
cactgccgacattggaagattgctc

SEQ ID NO: 3355889 - DNA, 25 bp, Homo sapien
tggccgaggacactgaagcgtgaca

SEQ ID NO: 3355890 - DNA, 25 bp, Homo sapien
tctccatgtgtgaaacggtggccga

SEQ ID NO: 3355891 - DNA, 25 bp, Homo sapien
tgtttgatgcttcacttcagagaaa

SEQ ID NO: 3355892 - DNA, 25 bp, Homo sapien
gctcatttcaacgtggttctccaac

SEQ ID NO: 3355893 - DNA, 25 bp, Homo sapien
ttctttgctcatttcaacgtggttc

SEQ ID NO: 3355894 - DNA, 25 bp, Homo sapien
catttcaacgtggttctccaactga

SEQ ID NO: 3355895 - DNA, 25 bp, Homo sapien
cgcagtaagactccaagctgacctt

SEQ ID NO: 3355896 - DNA, 25 bp, Homo sapien
agtaagactccaagctgaccttctt

SEQ ID NO: 3355897 - DNA, 25 bp, Homo sapien
gtaagactccaagctgaccttcttt

SEQ ID NO: 3355898 - DNA, 25 bp, Homo sapien
ttcgcagtaagactccaagctgacc

SEQ ID NO: 3355899 - DNA, 25 bp, Homo sapien
ctcttagccatctgagactctcggt

SEQ ID NO: 3355900 - DNA, 25 bp, Homo sapien
gagactctcggtctgcactgatgtg

SEQ ID NO: 3355901 - DNA, 25 bp, Homo sapien
agactctcggtctgcactgatgtga

SEQ ID NO: 3355902 - DNA, 25 bp, Homo sapien
agccatctgagactctcggtctgca

SEQ ID NO: 3355903 - DNA, 25 bp, Homo sapien
tcagaatgtaggacgagctgtgttt

SEQ ID NO: 3355904 - DNA, 25 bp, Homo sapien
atcttcagaatgtaggacgagctgt

SEQ ID NO: 3355905 - DNA, 25 bp, Homo sapien
tgataaatgtgccccatcttcagaa

SEQ ID NO: 3355906 - DNA, 25 bp, Homo sapien
atgtaggacgagctgtgtttgttca

SEQ ID NO: 3355907 - DNA, 25 bp, Homo sapien
gctctgtacaacacactgataaaaa

SEQ ID NO: 3355908 - DNA, 25 bp, Homo sapien
tccgaggccattcgctctgtacaac

SEQ ID NO: 3355909 - DNA, 25 bp, Homo sapien
aagagataagggtcagttcttccct

SEQ ID NO: 3355910 - DNA, 25 bp, Homo sapien
gcacagccattgaaggtccgaggcc

SEQ ID NO: 3355911 - DNA, 25 bp, Homo sapien
gagggatctaaaatatgcagtttct

SEQ ID NO: 3355912 - DNA, 25 bp, Homo sapien
aggatattcgaatgttagagctgaa

SEQ ID NO: 3355913 - DNA, 25 bp, Homo sapien
taattaattctccagagggatctaa

SEQ ID NO: 3355914 - DNA, 25 bp, Homo sapien
aactcaaactaaatgcccctaaatg

SEQ ID NO: 3355915 - DNA, 25 bp, Homo sapien
catgacggtaactggggaagacaat

SEQ ID NO: 3355916 - DNA, 25 bp, Homo sapien
ttttcatgacggtaactggggaaga

SEQ ID NO: 3355917 - DNA, 25 bp, Homo sapien
ttcatgacggtaactggggaagaca

SEQ ID NO: 3355918 - DNA, 25 bp, Homo sapien
attaattttcatgacggtaactggg

SEQ ID NO: 3355919 - DNA, 25 bp, Homo sapien
cagttcgaatctcccagcagctttg

SEQ ID NO: 3355920 - DNA, 25 bp, Homo sapien
gcggctttgccacactgtagtgggt

SEQ ID NO: 3355921 - DNA, 25 bp, Homo sapien
gacccttatcagagcttgaatgctg

SEQ ID NO: 3355922 - DNA, 25 bp, Homo sapien
tgtagtgggttctgaccagttcgaa

SEQ ID NO: 3355923 - DNA, 25 bp, Homo sapien
attccaggataatgaggaatctctc

SEQ ID NO: 3355924 - DNA, 25 bp, Homo sapien
ccaggataatgaggaatctctctct

SEQ ID NO: 3355925 - DNA, 25 bp, Homo sapien
tccaggataatgaggaatctctctc

SEQ ID NO: 3355926 - DNA, 25 bp, Homo sapien
ttccaggataatgaggaatctctct

SEQ ID NO: 3355927 - DNA, 25 bp, Homo sapien
agggtgaataacagccaccagccac

SEQ ID NO: 3355928 - DNA, 25 bp, Homo sapien
tgtgctttattgttctatgatgtgt

SEQ ID NO: 3355929 - DNA, 25 bp, Homo sapien
agaagggtgaataacagccaccagc

SEQ ID NO: 3355930 - DNA, 25 bp, Homo sapien
cagtgtgctttattgttctatgatg

SEQ ID NO: 3355931 - DNA, 25 bp, Homo sapien
tctacagtgaccttattccaaagac

SEQ ID NO: 3355932 - DNA, 25 bp, Homo sapien
aagaatagctcccttgacagtgctc

SEQ ID NO: 3355933 - DNA, 25 bp, Homo sapien
tccaaagactatctgagccttcagg

SEQ ID NO: 3355934 - DNA, 25 bp, Homo sapien
ttctcccaagtaaaccaagagacag

SEQ ID NO: 3355935 - DNA, 25 bp, Homo sapien
gtcagagagctctaaagaactagca

SEQ ID NO: 3355936 - DNA, 25 bp, Homo sapien
taggactaggttgaggtgcccttgc

SEQ ID NO: 3355937 - DNA, 25 bp, Homo sapien
gttgttttaacacagcactctctgc

SEQ ID NO: 3355938 - DNA, 25 bp, Homo sapien
tcacaacggttgctatttcaatgcc

SEQ ID NO: 3355939 - DNA, 25 bp, Homo sapien
tcaccaattgcctttggttctttcc

SEQ ID NO: 3355940 - DNA, 25 bp, Homo sapien
gttggtttctgatgataggtctctt

SEQ ID NO: 3355941 - DNA, 25 bp, Homo sapien
gattcacgtaagaactctgtagtcc

SEQ ID NO: 3355942 - DNA, 25 bp, Homo sapien
gcagattcacgtaagaactctgtag

SEQ ID NO: 3355943 - DNA, 25 bp, Homo sapien
gaactctgtagtcctttgtagtagc

SEQ ID NO: 3355944 - DNA, 25 bp, Homo sapien
cacgtaagaactctgtagtcctttg

SEQ ID NO: 3355945 - DNA, 25 bp, Homo sapien
ggccaatcagaatccactgtatact

SEQ ID NO: 3355946 - DNA, 25 bp, Homo sapien
caatcagaatccactgtatacttgg

SEQ ID NO: 3355947 - DNA, 25 bp, Homo sapien
tcagaatccactgtatacttggcct

SEQ ID NO: 3355948 - DNA, 25 bp, Homo sapien
gtctggccaatcagaatccactgta

SEQ ID NO: 3355949 - DNA, 25 bp, Homo sapien
cactttagcaggagcggcctgtccg

SEQ ID NO: 3355950 - DNA, 25 bp, Homo sapien
cgttccgtcaatggcacactgggca

SEQ ID NO: 3355951 - DNA, 25 bp, Homo sapien
cagctgtgagatcaaggtaccttca

SEQ ID NO: 3355952 - DNA, 25 bp, Homo sapien
tgagtcagtgtagaaccacagtccc

SEQ ID NO: 3355953 - DNA, 25 bp, Homo sapien
tctgtccaggacaaaagtgtgcttc

SEQ ID NO: 3355954 - DNA, 25 bp, Homo sapien
ttcagactcctcacaggactggagg

SEQ ID NO: 3355955 - DNA, 25 bp, Homo sapien
cagcagtgatgttacctggctctac

SEQ ID NO: 3355956 - DNA, 25 bp, Homo sapien
agtgtgcttcctagaaaacccttga

SEQ ID NO: 3355957 - DNA, 25 bp, Homo sapien
gaagacaggtgtacatatagaagcc

SEQ ID NO: 3355958 - DNA, 25 bp, Homo sapien
tagaggtgctggattaattgtggcc

SEQ ID NO: 3355959 - DNA, 25 bp, Homo sapien
aactccctaagaagtagtcatgtgc

SEQ ID NO: 3355960 - DNA, 25 bp, Homo sapien
caaagtgccttacattagaggtgct

SEQ ID NO: 3355961 - DNA, 25 bp, Homo sapien
agcaggcacgattttgtagtattca

SEQ ID NO: 3355962 - DNA, 25 bp, Homo sapien
ccagtgtgtattgtaatatgcaaca

SEQ ID NO: 3355963 - DNA, 25 bp, Homo sapien
taaatgcagaaggacgcacaatagg

SEQ ID NO: 3355964 - DNA, 25 bp, Homo sapien
catctgtcctacttgagcaggcacg

SEQ ID NO: 3355965 - DNA, 25 bp, Homo sapien
tccgagtcattctagttgaggaaaa

SEQ ID NO: 3355966 - DNA, 25 bp, Homo sapien
ttctaagccctgctgtggccgtctc

SEQ ID NO: 3355967 - DNA, 25 bp, Homo sapien
taccactgtggtcaagattaagaca

SEQ ID NO: 3355968 - DNA, 25 bp, Homo sapien
tcacaaccaggctttggatagaggg

SEQ ID NO: 3355969 - DNA, 25 bp, Homo sapien
tatatgttacagtccctctcaggaa

SEQ ID NO: 3355970 - DNA, 25 bp, Homo sapien
ttccccacagcaaatgatccaagag

SEQ ID NO: 3355971 - DNA, 25 bp, Homo sapien
aaagagtgtgactgcctacgatgga

SEQ ID NO: 3355972 - DNA, 25 bp, Homo sapien
tgcagctgttgtctcgactgaaggc

SEQ ID NO: 3355973 - DNA, 25 bp, Homo sapien
ggaagggacttcacaagcatgtgga

SEQ ID NO: 3355974 - DNA, 25 bp, Homo sapien
aacaacataccatatgacatatcat

SEQ ID NO: 3355975 - DNA, 25 bp, Homo sapien
tcagttctactgctcgcatagacca

SEQ ID NO: 3355976 - DNA, 25 bp, Homo sapien
catagaccaaccctggcacaaagtg

SEQ ID NO: 3355977 - DNA, 25 bp, Homo sapien
cagtgtagttggctgggtctgcctc

SEQ ID NO: 3355978 - DNA, 25 bp, Homo sapien
cacaatggggctgaaaaggccaaca

SEQ ID NO: 3355979 - DNA, 25 bp, Homo sapien
tgcctctttgcctcgctcggatgca

SEQ ID NO: 3355980 - DNA, 25 bp, Homo sapien
gaaaaactgctgtccgcacaatggg

SEQ ID NO: 3355981 - DNA, 25 bp, Homo sapien
gaactccaggcattataccttggcg

SEQ ID NO: 3355982 - DNA, 25 bp, Homo sapien
gatcactgcagctctgtaaggtaga

SEQ ID NO: 3355983 - DNA, 25 bp, Homo sapien
taccttggcgtcaaaacaatggaaa

SEQ ID NO: 3355984 - DNA, 25 bp, Homo sapien
catttaaagtccaacgagctcagtc

SEQ ID NO: 3355985 - DNA, 25 bp, Homo sapien
agtctgtgctccacaagaatgctaa

SEQ ID NO: 3355986 - DNA, 25 bp, Homo sapien
tgttgttttacaagattctgcatgg

SEQ ID NO: 3355987 - DNA, 25 bp, Homo sapien
gaagggcttattccaaaagtctgtg

SEQ ID NO: 3355988 - DNA, 25 bp, Homo sapien
gctaatgttcgtttatcagctgttg

SEQ ID NO: 3355989 - DNA, 25 bp, Homo sapien
aggacaaggtcctctaataggtaat

SEQ ID NO: 3355990 - DNA, 25 bp, Homo sapien
acattaggaatattaccagcaatcc

SEQ ID NO: 3355991 - DNA, 25 bp, Homo sapien
tacacttaattaccctattcaatgg

SEQ ID NO: 3355992 - DNA, 25 bp, Homo sapien
ttattaagcgtctactaggaggaca

SEQ ID NO: 3355993 - DNA, 25 bp, Homo sapien
gaatatacttgatttcacttactac

SEQ ID NO: 3355994 - DNA, 25 bp, Homo sapien
gagtaggttgccatgtacatcacct

SEQ ID NO: 3355995 - DNA, 25 bp, Homo sapien
tctatctagtggtctccccgctgag

SEQ ID NO: 3355996 - DNA, 25 bp, Homo sapien
ccacttctcaaatccaaggtaggag

SEQ ID NO: 3355997 - DNA, 25 bp, Homo sapien
ggttttggcagacctatctgctttt

SEQ ID NO: 3355998 - DNA, 25 bp, Homo sapien
ttttggcagacctatctgcttttcc

SEQ ID NO: 3355999 - DNA, 25 bp, Homo sapien
gttttggcagacctatctgcttttc

SEQ ID NO: 3356000 - DNA, 25 bp, Homo sapien
tttggcagacctatctgcttttcca

SEQ ID NO: 3356001 - DNA, 25 bp, Homo sapien
ggaattaacagatctctagtccctg

SEQ ID NO: 3356002 - DNA, 25 bp, Homo sapien
ggatcatttgggagaatctctcgca

SEQ ID NO: 3356003 - DNA, 25 bp, Homo sapien
tagaacaatgaatagcacgtgacac

SEQ ID NO: 3356004 - DNA, 25 bp, Homo sapien
aacgttcagaagatagtcaagcaca

SEQ ID NO: 3356005 - DNA, 25 bp, Homo sapien
catcggcatcataggaaaatctcag

SEQ ID NO: 3356006 - DNA, 25 bp, Homo sapien
aattagtctcaatcacacatcggca

SEQ ID NO: 3356007 - DNA, 25 bp, Homo sapien
gatagaaatagtaccccatgtcaga

SEQ ID NO: 3356008 - DNA, 25 bp, Homo sapien
ttatacaagactgtggattctgcct

SEQ ID NO: 3356009 - DNA, 25 bp, Homo sapien
cagacacggataacaataacgaact

SEQ ID NO: 3356010 - DNA, 25 bp, Homo sapien
caataacgaactagatagacaaggc

SEQ ID NO: 3356011 - DNA, 25 bp, Homo sapien
ggataacaataacgaactagataga

SEQ ID NO: 3356012 - DNA, 25 bp, Homo sapien
cacggataacaataacgaactagat

SEQ ID NO: 3356013 - DNA, 25 bp, Homo sapien
ccagtaatacccacaacaggttgtg

SEQ ID NO: 3356014 - DNA, 25 bp, Homo sapien
tgaatcccagcttgagaccagtaat

SEQ ID NO: 3356015 - DNA, 25 bp, Homo sapien
cagtggaagtacctagcaggatacc

SEQ ID NO: 3356016 - DNA, 25 bp, Homo sapien
gatgcagaaggctaatcagtctggc

SEQ ID NO: 3356017 - DNA, 25 bp, Homo sapien
ctggactctgagctgaggacaccat

SEQ ID NO: 3356018 - DNA, 25 bp, Homo sapien
cagaggacgatgcttttcttggcca

SEQ ID NO: 3356019 - DNA, 25 bp, Homo sapien
tgagctgaggacaccatgtcaccat

SEQ ID NO: 3356020 - DNA, 25 bp, Homo sapien
gactctgagctgaggacaccatgtc

SEQ ID NO: 3356021 - DNA, 25 bp, Homo sapien
gtccatctcattcagttctagtctc

SEQ ID NO: 3356022 - DNA, 25 bp, Homo sapien
gtctctaccctcttctttagaggaa

SEQ ID NO: 3356023 - DNA, 25 bp, Homo sapien
tctcattcagttctagtctctaccc

SEQ ID NO: 3356024 - DNA, 25 bp, Homo sapien
tcattcagttctagtctctaccctc

SEQ ID NO: 3356025 - DNA, 25 bp, Homo sapien
attctcttatgatcacaggatgcct

SEQ ID NO: 3356026 - DNA, 25 bp, Homo sapien
tgtctcctatgaaaaggagtccggg

SEQ ID NO: 3356027 - DNA, 25 bp, Homo sapien
caggaccagataatagaccccgtct

SEQ ID NO: 3356028 - DNA, 25 bp, Homo sapien
cccagtctctgcctagggaactgtc

SEQ ID NO: 3356029 - DNA, 25 bp, Homo sapien
ccagccttgacaacaggaccagata

SEQ ID NO: 3356030 - DNA, 25 bp, Homo sapien
cctgggtcccaacgctgacctgaat

SEQ ID NO: 3356031 - DNA, 25 bp, Homo sapien
gacctgaatcatcaccaagaaatgg

SEQ ID NO: 3356032 - DNA, 25 bp, Homo sapien
tcaccagggtactgattaacaggag

SEQ ID NO: 3356033 - DNA, 25 bp, Homo sapien
ttacccagcagattcatacttcgtg

SEQ ID NO: 3356034 - DNA, 25 bp, Homo sapien
ctttattgggagatatgggcagaaa

SEQ ID NO: 3356035 - DNA, 25 bp, Homo sapien
ggctaaacacttgccaatatccttt

SEQ ID NO: 3356036 - DNA, 25 bp, Homo sapien
tatcagatctgagggacgcaatgag

SEQ ID NO: 3356037 - DNA, 25 bp, Homo sapien
gcagaaatcaagtggcaaatatcag

SEQ ID NO: 3356038 - DNA, 25 bp, Homo sapien
caggaggaatactggctttccaagt

SEQ ID NO: 3356039 - DNA, 25 bp, Homo sapien
ttccaagtgagctcctccaatccag

SEQ ID NO: 3356040 - DNA, 25 bp, Homo sapien
cagcccgtgaacaaggttggtattg

SEQ ID NO: 3356041 - DNA, 25 bp, Homo sapien
tgcttttggcataagacgacagcct

SEQ ID NO: 3356042 - DNA, 25 bp, Homo sapien
aagcaagaacaatcaataagaagga

SEQ ID NO: 3356043 - DNA, 25 bp, Homo sapien
ttaaggagccgtgtgaaaaagcaag

SEQ ID NO: 3356044 - DNA, 25 bp, Homo sapien
cttaaggagccgtgtgaaaaagcaa

SEQ ID NO: 3356045 - DNA, 25 bp, Homo sapien
agcagcagcggtagtcccacttcct

SEQ ID NO: 3356046 - DNA, 25 bp, Homo sapien
tgaaagctttaaggagctgagctgc

SEQ ID NO: 3356047 - DNA, 25 bp, Homo sapien
tcctgaaagcctctcgacaaggggc

SEQ ID NO: 3356048 - DNA, 25 bp, Homo sapien
gcacaggcgttaaggacggagttat

SEQ ID NO: 3356049 - DNA, 25 bp, Homo sapien
gtgaagggggctcgcgtggagagca

SEQ ID NO: 3356050 - DNA, 25 bp, Homo sapien
gaagggggctcgcgtggagagcagg

SEQ ID NO: 3356051 - DNA, 25 bp, Homo sapien
tgaagggggctcgcgtggagagcag

SEQ ID NO: 3356052 - DNA, 25 bp, Homo sapien
ctgtgaagggggctcgcgtggagag

SEQ ID NO: 3356053 - DNA, 25 bp, Homo sapien
gaagggggcaggtagagaggaaggc

SEQ ID NO: 3356054 - DNA, 25 bp, Homo sapien
ctggaagggggcaggtagagaggaa

SEQ ID NO: 3356055 - DNA, 25 bp, Homo sapien
tggaagggggcaggtagagaggaag

SEQ ID NO: 3356056 - DNA, 25 bp, Homo sapien
gggggcaggtagagaggaaggcagc

SEQ ID NO: 3356057 - DNA, 25 bp, Homo sapien
gacccaagcccgctgagcaggatga

SEQ ID NO: 3356058 - DNA, 25 bp, Homo sapien
ggctagtggtcctctggtcttccct

SEQ ID NO: 3356059 - DNA, 25 bp, Homo sapien
gcttcctggggctagtggtcctctg

SEQ ID NO: 3356060 - DNA, 25 bp, Homo sapien
agtttgctggtggtgggaagcttcc

SEQ ID NO: 3356061 - DNA, 25 bp, Homo sapien
cttgttttgtttgcccgcgtgtgga

SEQ ID NO: 3356062 - DNA, 25 bp, Homo sapien
ggcggcagcgaccggcaacttgttt

SEQ ID NO: 3356063 - DNA, 25 bp, Homo sapien
cggcaacttgttttgtttgcccgcg

SEQ ID NO: 3356064 - DNA, 25 bp, Homo sapien
cagcgaccggcaacttgttttgttt

SEQ ID NO: 3356065 - DNA, 25 bp, Homo sapien
cctgtggcgcgtgcaggcctgaagg

SEQ ID NO: 3356066 - DNA, 25 bp, Homo sapien
gcctccggctcttacggagagcgcg

SEQ ID NO: 3356067 - DNA, 25 bp, Homo sapien
aggcgagatgccgatgccgccaccg

SEQ ID NO: 3356068 - DNA, 25 bp, Homo sapien
agtgggagggcgatggcgccccgcc

SEQ ID NO: 3356069 - DNA, 25 bp, Homo sapien
gcggcgcggagctcgcggcggctcc

SEQ ID NO: 3356070 - DNA, 25 bp, Homo sapien
gcggcggctccgctgggacgcattt

SEQ ID NO: 3356071 - DNA, 25 bp, Homo sapien
tcgcggcggctccgctgggacgcat

SEQ ID NO: 3356072 - DNA, 25 bp, Homo sapien
ggcggctccgctgggacgcatttgt

SEQ ID NO: 3356073 - DNA, 25 bp, Homo sapien
gcttccccccggatgaaccgttgca

SEQ ID NO: 3356074 - DNA, 25 bp, Homo sapien
tgcttccccccggatgaaccgttgc

SEQ ID NO: 3356075 - DNA, 25 bp, Homo sapien
tccccccggatgaaccgttgcacca

SEQ ID NO: 3356076 - DNA, 25 bp, Homo sapien
ctgcttccccccggatgaaccgttg

SEQ ID NO: 3356077 - DNA, 25 bp, Homo sapien
gagtcgctctctctgttgtaaagtg

SEQ ID NO: 3356078 - DNA, 25 bp, Homo sapien
ctgcaggaggagtcgagtcgctctc

SEQ ID NO: 3356079 - DNA, 25 bp, Homo sapien
ggacagccaactgggccggctgcca

SEQ ID NO: 3356080 - DNA, 25 bp, Homo sapien
ctccccgctgggacagccaactggg

SEQ ID NO: 3356081 - DNA, 25 bp, Homo sapien
gttgggcaaaaaggcttgtggcgtc

SEQ ID NO: 3356082 - DNA, 25 bp, Homo sapien
tagcatcaagaagttgggcaaaaag

SEQ ID NO: 3356083 - DNA, 25 bp, Homo sapien
tggaaagttagcatcaagaagttgg

SEQ ID NO: 3356084 - DNA, 25 bp, Homo sapien
agttagcatcaagaagttgggcaaa

SEQ ID NO: 3356085 - DNA, 25 bp, Homo sapien
gacgatattgcctaaccgtgagcaa

SEQ ID NO: 3356086 - DNA, 25 bp, Homo sapien
tagaatgaaagctgaaacgagtggc

SEQ ID NO: 3356087 - DNA, 25 bp, Homo sapien
tctagagagggactacagcagcatc

SEQ ID NO: 3356088 - DNA, 25 bp, Homo sapien
tattgtggcccagaaaaactggttc

SEQ ID NO: 3356089 - DNA, 25 bp, Homo sapien
cccttccattcagaagacctgtaaa

SEQ ID NO: 3356090 - DNA, 25 bp, Homo sapien
cagttctcggagtctaatgcccttc

SEQ ID NO: 3356091 - DNA, 25 bp, Homo sapien
ttctctaaagaaaacctgactgtgt

SEQ ID NO: 3356092 - DNA, 25 bp, Homo sapien
gaagtgcaattcacgtttgaaacag

SEQ ID NO: 3356093 - DNA, 25 bp, Homo sapien
tgggtagtagatacctaattccatg

SEQ ID NO: 3356094 - DNA, 25 bp, Homo sapien
gatacctaattccatgaatgccttc

SEQ ID NO: 3356095 - DNA, 25 bp, Homo sapien
aatagtgacgctctgcaggatttct

SEQ ID NO: 3356096 - DNA, 25 bp, Homo sapien
cttaagcaaaatagtgacgctctgc

SEQ ID NO: 3356097 - DNA, 25 bp, Homo sapien
tgttggagactttctgtgtgccaca

SEQ ID NO: 3356098 - DNA, 25 bp, Homo sapien
ttcagtaaatgttggagactttctg

SEQ ID NO: 3356099 - DNA, 25 bp, Homo sapien
tagtatgataacctattggcatcaa

SEQ ID NO: 3356100 - DNA, 25 bp, Homo sapien
tatttagtatgataacctattggca

SEQ ID NO: 3356101 - DNA, 25 bp, Homo sapien
ggcagacttactactggagcccttg

SEQ ID NO: 3356102 - DNA, 25 bp, Homo sapien
taaggacttattccagactttgcat

SEQ ID NO: 3356103 - DNA, 25 bp, Homo sapien
gggaagcctttcaccagtcagctca

SEQ ID NO: 3356104 - DNA, 25 bp, Homo sapien
gagcaggtcatctggtgtggtcctc

SEQ ID NO: 3356105 - DNA, 25 bp, Homo sapien
gcctttgtgcaaaagggcactttgc

SEQ ID NO: 3356106 - DNA, 25 bp, Homo sapien
accagggcctttgtgcaaaagggca

SEQ ID NO: 3356107 - DNA, 25 bp, Homo sapien
tgccaggcctttggaaactgctgct

SEQ ID NO: 3356108 - DNA, 25 bp, Homo sapien
tgctgcttttgccaccagggccttt

SEQ ID NO: 3356109 - DNA, 25 bp, Homo sapien
tggcctataccttcagactttgtca

SEQ ID NO: 3356110 - DNA, 25 bp, Homo sapien
gatccatcctctagctgggtaggag

SEQ ID NO: 3356111 - DNA, 25 bp, Homo sapien
tagaaagcagtatgacagatccatc

SEQ ID NO: 3356112 - DNA, 25 bp, Homo sapien
ccgttgtctatcagagagctggcga

SEQ ID NO: 3356113 - DNA, 25 bp, Homo sapien
tactagtaccttccatgatgctaaa

SEQ ID NO: 3356114 - DNA, 25 bp, Homo sapien
tccatgatgctaaagccttcatttc

SEQ ID NO: 3356115 - DNA, 25 bp, Homo sapien
tcctcttgcttctactagtaccttc

SEQ ID NO: 3356116 - DNA, 25 bp, Homo sapien
gcttctactagtaccttccatgatg

SEQ ID NO: 3356117 - DNA, 25 bp, Homo sapien
gtcctccttgcaccccgcagtttcc

SEQ ID NO: 3356118 - DNA, 25 bp, Homo sapien
ccttgcatagccagttctgtcccgt

SEQ ID NO: 3356119 - DNA, 25 bp, Homo sapien
cagttctgtcccgtgttctttcctc

SEQ ID NO: 3356120 - DNA, 25 bp, Homo sapien
gcttgttcgttcttgcggctgttgt

SEQ ID NO: 3356121 - DNA, 25 bp, Homo sapien
gcggctgttgtgtagtctttgtaga

SEQ ID NO: 3356122 - DNA, 25 bp, Homo sapien
actgtggttagcttgttcgttcttg

SEQ ID NO: 3356123 - DNA, 25 bp, Homo sapien
ccagctgtgacatctgacactgtgg

SEQ ID NO: 3356124 - DNA, 25 bp, Homo sapien
tgccgctatatttagctgtctgaag

SEQ ID NO: 3356125 - DNA, 25 bp, Homo sapien
tgtagttgccgctatatttagctgt

SEQ ID NO: 3356126 - DNA, 25 bp, Homo sapien
gaagaagctgcacgtgcatccaaag

SEQ ID NO: 3356127 - DNA, 25 bp, Homo sapien
tgtctgaagaagctgcacgtgcatc

SEQ ID NO: 3356128 - DNA, 25 bp, Homo sapien
gaaggaaactgattgatgaagaagg

SEQ ID NO: 3356129 - DNA, 25 bp, Homo sapien
gagaaggaaactgattgatgaagaa

SEQ ID NO: 3356130 - DNA, 25 bp, Homo sapien
aaggaaactgattgatgaagaaggc

SEQ ID NO: 3356131 - DNA, 25 bp, Homo sapien
ctgagaaggaaactgattgatgaag

SEQ ID NO: 3356132 - DNA, 25 bp, Homo sapien
ctctggaatatctggtaaaaggacc

SEQ ID NO: 3356133 - DNA, 25 bp, Homo sapien
aaagtagttgaaccaggctagaggc

SEQ ID NO: 3356134 - DNA, 25 bp, Homo sapien
tgacttcaactccttgatctatagg

SEQ ID NO: 3356135 - DNA, 25 bp, Homo sapien
aggaatcatttgtgacagtttcccc

SEQ ID NO: 3356136 - DNA, 25 bp, Homo sapien
cagagcttacagagcaccctttaac

SEQ ID NO: 3356137 - DNA, 25 bp, Homo sapien
aacaaaacaaggttgaatgaggcaa

SEQ ID NO: 3356138 - DNA, 25 bp, Homo sapien
cagagcaccctttaacgtgcttaaa

SEQ ID NO: 3356139 - DNA, 25 bp, Homo sapien
tattcaaggacctgcactacactta

SEQ ID NO: 3356140 - DNA, 25 bp, Homo sapien
ttttgtggtattgcctcttcctgca

SEQ ID NO: 3356141 - DNA, 25 bp, Homo sapien
taaaaaagctgaatagaaccagcca

SEQ ID NO: 3356142 - DNA, 25 bp, Homo sapien
tggtgtgcagctgttatcactcgag

SEQ ID NO: 3356143 - DNA, 25 bp, Homo sapien
tcactcgagcctgaactttgtggca

SEQ ID NO: 3356144 - DNA, 25 bp, Homo sapien
gtggacacccataggcagattacca

SEQ ID NO: 3356145 - DNA, 25 bp, Homo sapien
aatgcctgtcaaactgaaggatggc

SEQ ID NO: 3356146 - DNA, 25 bp, Homo sapien
tgtacttgagggtttgtggacaccc

SEQ ID NO: 3356147 - DNA, 25 bp, Homo sapien
ctgaatgctagggagatacactgaa

SEQ ID NO: 3356148 - DNA, 25 bp, Homo sapien
tcatgcaggaaaaggaatgcttctt

SEQ ID NO: 3356149 - DNA, 25 bp, Homo sapien
tagaccacggccataaagtccaatt

SEQ ID NO: 3356150 - DNA, 25 bp, Homo sapien
aaatatacaacaaactccgatagac

SEQ ID NO: 3356151 - DNA, 25 bp, Homo sapien
tcttacttcaatcttggtctcaaag

SEQ ID NO: 3356152 - DNA, 25 bp, Homo sapien
ggagcgagagatgagtaacttccac

SEQ ID NO: 3356153 - DNA, 25 bp, Homo sapien
tatattgagtgcagggactcgcagc

SEQ ID NO: 3356154 - DNA, 25 bp, Homo sapien
gaaacaacctttaagaggagcgaga

SEQ ID NO: 3356155 - DNA, 25 bp, Homo sapien
gactcgcagcctcaaaatgttacgt

SEQ ID NO: 3356156 - DNA, 25 bp, Homo sapien
gctttgttgaactaggaccctgcca

SEQ ID NO: 3356157 - DNA, 25 bp, Homo sapien
taagttgttccgtattgagggccat

SEQ ID NO: 3356158 - DNA, 25 bp, Homo sapien
gatgggagggaatcaggtaaaccac

SEQ ID NO: 3356159 - DNA, 25 bp, Homo sapien
gaggcttcgaaactgcttactgcat

SEQ ID NO: 3356160 - DNA, 25 bp, Homo sapien
ggtattttaaagacgcagcactgaa

SEQ ID NO: 3356161 - DNA, 25 bp, Homo sapien
gggtcagtgagaacaatattagcaa

SEQ ID NO: 3356162 - DNA, 25 bp, Homo sapien
gagggctaacacaccagaaactaca

SEQ ID NO: 3356163 - DNA, 25 bp, Homo sapien
ctaaagcacgctattatataatggc

SEQ ID NO: 3356164 - DNA, 25 bp, Homo sapien
tactgtttacaagactgcttttacc

SEQ ID NO: 3356165 - DNA, 25 bp, Homo sapien
tattagacagagttaaagcatgttg

SEQ ID NO: 3356166 - DNA, 25 bp, Homo sapien
gtcttctttgggattacactcaggg

SEQ ID NO: 3356167 - DNA, 25 bp, Homo sapien
aaaggttggagtagccagactttca

SEQ ID NO: 3356168 - DNA, 25 bp, Homo sapien
tctaggattgcaaaggagtcttcca

SEQ ID NO: 3356169 - DNA, 25 bp, Homo sapien
acaatatggaacatcccaaggctgt

SEQ ID NO: 3356170 - DNA, 25 bp, Homo sapien
ccaaggctgtcccatagggttggaa

SEQ ID NO: 3356171 - DNA, 25 bp, Homo sapien
cacaggttattagccaaggtggcct

SEQ ID NO: 3356172 - DNA, 25 bp, Homo sapien
ggtaatatcactatgcatttctaca

SEQ ID NO: 3356173 - DNA, 25 bp, Homo sapien
gagaaacttacgtatatcttaattc

SEQ ID NO: 3356174 - DNA, 25 bp, Homo sapien
tgatttatgcagattttgatacact

SEQ ID NO: 3356175 - DNA, 25 bp, Homo sapien
tattaggataaatttgagaaactta

SEQ ID NO: 3356176 - DNA, 25 bp, Homo sapien
ccatggtgcaaggaatgcggctcag

SEQ ID NO: 3356177 - DNA, 25 bp, Homo sapien
ttgcaatagcgaaaaccctggaagc

SEQ ID NO: 3356178 - DNA, 25 bp, Homo sapien
ggaggacattcccaaccatggtgca

SEQ ID NO: 3356179 - DNA, 25 bp, Homo sapien
tatttggtgccaggaaaaactctcc

SEQ ID NO: 3356180 - DNA, 25 bp, Homo sapien
tatcggcatatatacttttagctaa

SEQ ID NO: 3356181 - DNA, 25 bp, Homo sapien
ctgcagtgagctagaactttatcta

SEQ ID NO: 3356182 - DNA, 25 bp, Homo sapien
ccatcgtagtatctgtattaaccca

SEQ ID NO: 3356183 - DNA, 25 bp, Homo sapien
atcgagcatttactatttcttgcca

SEQ ID NO: 3356184 - DNA, 25 bp, Homo sapien
ggtaacacctaggatgaggatcacc

SEQ ID NO: 3356185 - DNA, 25 bp, Homo sapien
tagatgtggtaacacctaggatgag

SEQ ID NO: 3356186 - DNA, 25 bp, Homo sapien
ttctatagatgtggtaacacctagg

SEQ ID NO: 3356187 - DNA, 25 bp, Homo sapien
agaagtctgcactgttaactcttga

SEQ ID NO: 3356188 - DNA, 25 bp, Homo sapien
gctgcagggtaagttgagtttccaa

SEQ ID NO: 3356189 - DNA, 25 bp, Homo sapien
taaaaacaatggttagctgtaaggc

SEQ ID NO: 3356190 - DNA, 25 bp, Homo sapien
tgagctaaacagtggctatcccctt

SEQ ID NO: 3356191 - DNA, 25 bp, Homo sapien
aaactggtgacctttgggcagaatc

SEQ ID NO: 3356192 - DNA, 25 bp, Homo sapien
taacaaagactaagaagtttgagaa

SEQ ID NO: 3356193 - DNA, 25 bp, Homo sapien
tagaaaacattttatctatatcaga

SEQ ID NO: 3356194 - DNA, 25 bp, Homo sapien
aagtttgagaactattatgttgctg

SEQ ID NO: 3356195 - DNA, 25 bp, Homo sapien
cattttatctatatcagaataacaa

SEQ ID NO: 3356196 - DNA, 25 bp, Homo sapien
taaacaatatactgggacaggcgtg

SEQ ID NO: 3356197 - DNA, 25 bp, Homo sapien
tcttatgataagtgaaagccccaag

SEQ ID NO: 3356198 - DNA, 25 bp, Homo sapien
tattaagtcatctaccaccaggaaa

SEQ ID NO: 3356199 - DNA, 25 bp, Homo sapien
tataagcacatagccaaccagatgg

SEQ ID NO: 3356200 - DNA, 25 bp, Homo sapien
cttagcatattaagacaaagacaat

SEQ ID NO: 3356201 - DNA, 25 bp, Homo sapien
gcagaaataccgaaaaaaatcaaca

SEQ ID NO: 3356202 - DNA, 25 bp, Homo sapien
taggtcaactgtgtctaagaactac

SEQ ID NO: 3356203 - DNA, 25 bp, Homo sapien
taaagtgaaaattaacttagcatat

SEQ ID NO: 3356204 - DNA, 25 bp, Homo sapien
taaaatctaactgtatgagtagccc

SEQ ID NO: 3356205 - DNA, 25 bp, Homo sapien
tactgaagctagtattgagctgcac

SEQ ID NO: 3356206 - DNA, 25 bp, Homo sapien
gaacattcaacatcagaagctgtaa

SEQ ID NO: 3356207 - DNA, 25 bp, Homo sapien
tacaagtttgctgtgctaccataca

SEQ ID NO: 3356208 - DNA, 25 bp, Homo sapien
cacacgcatcattaaaggatagcca

SEQ ID NO: 3356209 - DNA, 25 bp, Homo sapien
cattccacacgcatcattaaaggat

SEQ ID NO: 3356210 - DNA, 25 bp, Homo sapien
tccacacgcatcattaaaggatagc

SEQ ID NO: 3356211 - DNA, 25 bp, Homo sapien
cacacattccacacgcatcattaaa

SEQ ID NO: 3356212 - DNA, 25 bp, Homo sapien
ttattcttcatcttcatcctcttcc

SEQ ID NO: 3356213 - DNA, 25 bp, Homo sapien
atcctcttcctcctcatcttcatct

SEQ ID NO: 3356214 - DNA, 25 bp, Homo sapien
cctcttcctcctcatcttcatcttc

SEQ ID NO: 3356215 - DNA, 25 bp, Homo sapien
tcatcctcttcctcctcatcttcat

SEQ ID NO: 3356216 - DNA, 25 bp, Homo sapien
tttgagcctgttggcctgccagggc

SEQ ID NO: 3356217 - DNA, 25 bp, Homo sapien
cttctggttcgttcttcttctttga

SEQ ID NO: 3356218 - DNA, 25 bp, Homo sapien
gagcctgttggcctgccagggccct

SEQ ID NO: 3356219 - DNA, 25 bp, Homo sapien
agcctgttggcctgccagggccctt

SEQ ID NO: 3356220 - DNA, 25 bp, Homo sapien
gcccttggcacgatatgcagcaata

SEQ ID NO: 3356221 - DNA, 25 bp, Homo sapien
ttttgcccttggcacgatatgcagc

SEQ ID NO: 3356222 - DNA, 25 bp, Homo sapien
ccttggcacgatatgcagcaatatc

SEQ ID NO: 3356223 - DNA, 25 bp, Homo sapien
tttgcccttggcacgatatgcagca

SEQ ID NO: 3356224 - DNA, 25 bp, Homo sapien
agcatccggtatcattactcaactg

SEQ ID NO: 3356225 - DNA, 25 bp, Homo sapien
tcaactgtgaaaaaccacttagttg

SEQ ID NO: 3356226 - DNA, 25 bp, Homo sapien
tgtaaacaatctaagatgattgacc

SEQ ID NO: 3356227 - DNA, 25 bp, Homo sapien
gattgaccaataaccctaataactg

SEQ ID NO: 3356228 - DNA, 25 bp, Homo sapien
cccactaggctttaacaagttaatg

SEQ ID NO: 3356229 - DNA, 25 bp, Homo sapien
ttttagagcacttatcccactaggc

SEQ ID NO: 3356230 - DNA, 25 bp, Homo sapien
caagttaatgacgtaaaatgacaag

SEQ ID NO: 3356231 - DNA, 25 bp, Homo sapien
caagggttgcgatacagcagtatca

SEQ ID NO: 3356232 - DNA, 25 bp, Homo sapien
tacctagtcttatccacggctttaa

SEQ ID NO: 3356233 - DNA, 25 bp, Homo sapien
gaaggtttcaattaccttgtgttga

SEQ ID NO: 3356234 - DNA, 25 bp, Homo sapien
caaacactggtttcagtcaaaagga

SEQ ID NO: 3356235 - DNA, 25 bp, Homo sapien
tctgtctgcaggaatatactagtgc

SEQ ID NO: 3356236 - DNA, 25 bp, Homo sapien
ttctcctttagcttagctgctttct

SEQ ID NO: 3356237 - DNA, 25 bp, Homo sapien
atttctttgcagtatccccaatgga

SEQ ID NO: 3356238 - DNA, 25 bp, Homo sapien
ttagcttagctgctttctgttcata

SEQ ID NO: 3356239 - DNA, 25 bp, Homo sapien
tgcagtatccccaatggataggcca

SEQ ID NO: 3356240 - DNA, 25 bp, Homo sapien
ctgaaaggaagcaacagagtttaat

SEQ ID NO: 3356241 - DNA, 25 bp, Homo sapien
aggaaaaatccaaggagcaatttgg

SEQ ID NO: 3356242 - DNA, 25 bp, Homo sapien
atccaaggagcaatttgggttattt

SEQ ID NO: 3356243 - DNA, 25 bp, Homo sapien
gaagcaacagagtttaataaactga

SEQ ID NO: 3356244 - DNA, 25 bp, Homo sapien
tggccttttaggagcattggggtcc

SEQ ID NO: 3356245 - DNA, 25 bp, Homo sapien
gtggccttttaggagcattggggtc

SEQ ID NO: 3356246 - DNA, 25 bp, Homo sapien
tgggaggaacgtaatttttcatctc

SEQ ID NO: 3356247 - DNA, 25 bp, Homo sapien
ccccctgagctccgtccctctcctg

SEQ ID NO: 3356248 - DNA, 25 bp, Homo sapien
gcaccccctgagctccgtccctctc

SEQ ID NO: 3356249 - DNA, 25 bp, Homo sapien
tgcaccccctgagctccgtccctct

SEQ ID NO: 3356250 - DNA, 25 bp, Homo sapien
accccctgagctccgtccctctcct

SEQ ID NO: 3356251 - DNA, 25 bp, Homo sapien
ccatctctccgaacacttcttggag

SEQ ID NO: 3356252 - DNA, 25 bp, Homo sapien
ggagaattccgcgaaattgacggaa

SEQ ID NO: 3356253 - DNA, 25 bp, Homo sapien
tccgaacacttcttggagaattccg

SEQ ID NO: 3356254 - DNA, 25 bp, Homo sapien
ccgcgaaattgacggaagagtccgg

SEQ ID NO: 3356255 - DNA, 25 bp, Homo sapien
gaggacattttgccccgcggcttgt

SEQ ID NO: 3356256 - DNA, 25 bp, Homo sapien
ggacattttgccccgcggcttgttg

SEQ ID NO: 3356257 - DNA, 25 bp, Homo sapien
acattttgccccgcggcttgttggg

SEQ ID NO: 3356258 - DNA, 25 bp, Homo sapien
ttgccccgcggcttgttggggtctc

SEQ ID NO: 3356259 - DNA, 25 bp, Homo sapien
gctccgcttcccgcccaaatccgct

SEQ ID NO: 3356260 - DNA, 25 bp, Homo sapien
ggaagccggagggtcggcgcggagc

SEQ ID NO: 3356261 - DNA, 25 bp, Homo sapien
gcttcccgcccaaatccgctcccgc

SEQ ID NO: 3356262 - DNA, 25 bp, Homo sapien
tccgcttcccgcccaaatccgctcc

SEQ ID NO: 3356263 - DNA, 25 bp, Homo sapien
tcaccgagtccggtgactccgcaag

SEQ ID NO: 3356264 - DNA, 25 bp, Homo sapien
tttcctgacagaaatgtcccccagc

SEQ ID NO: 3356265 - DNA, 25 bp, Homo sapien
aagcgccctcaaaacgcctttcctg

SEQ ID NO: 3356266 - DNA, 25 bp, Homo sapien
gcgagcctcacttaaccgctaagca

SEQ ID NO: 3356267 - DNA, 25 bp, Homo sapien
gtgaccgacattgaaaactcccaga

SEQ ID NO: 3356268 - DNA, 25 bp, Homo sapien
cggcccgcaccccaaatgccgctcg

SEQ ID NO: 3356269 - DNA, 25 bp, Homo sapien
gctcgccgggtcagaccccgagagc

SEQ ID NO: 3356270 - DNA, 25 bp, Homo sapien
ctcgtgaccgacattgaaaactccc

SEQ ID NO: 3356271 - DNA, 25 bp, Homo sapien
gaatggggaaaggcaggtccacgaa

SEQ ID NO: 3356272 - DNA, 25 bp, Homo sapien
gagggaatggggaaaggcaggtcca

SEQ ID NO: 3356273 - DNA, 25 bp, Homo sapien
ggaatggggaaaggcaggtccacga

SEQ ID NO: 3356274 - DNA, 25 bp, Homo sapien
ctgagggaatggggaaaggcaggtc

SEQ ID NO: 3356275 - DNA, 25 bp, Homo sapien
cgagggtattggagggtattcttgc

SEQ ID NO: 3356276 - DNA, 25 bp, Homo sapien
ccgagggtattggagggtattcttg

SEQ ID NO: 3356277 - DNA, 25 bp, Homo sapien
cacggcaacttgacgagctaggcca

SEQ ID NO: 3356278 - DNA, 25 bp, Homo sapien
tactgctcgatcctgattggcggcg

SEQ ID NO: 3356279 - DNA, 25 bp, Homo sapien
cgttagaaccggtcaggagaggaat

SEQ ID NO: 3356280 - DNA, 25 bp, Homo sapien
ttattcaaacccagatagtccccgc

SEQ ID NO: 3356281 - DNA, 25 bp, Homo sapien
ctcgggaaggaaagccccgccagat

SEQ ID NO: 3356282 - DNA, 25 bp, Homo sapien
gctcggtttgctggcgctaaggtaa

SEQ ID NO: 3356283 - DNA, 25 bp, Homo sapien
tgtaaacggtgggagtggttggctc

SEQ ID NO: 3356284 - DNA, 25 bp, Homo sapien
aacagaagaggtctgccttgccctt

SEQ ID NO: 3356285 - DNA, 25 bp, Homo sapien
tcgctgaggttgtcgtagaactcgg

SEQ ID NO: 3356286 - DNA, 25 bp, Homo sapien
cgtgcgccgcccagagaataataaa

SEQ ID NO: 3356287 - DNA, 25 bp, Homo sapien
gtttgccctgcaaaaccgattgccc

SEQ ID NO: 3356288 - DNA, 25 bp, Homo sapien
agctgtagtcgctctgctctgttgc

SEQ ID NO: 3356289 - DNA, 25 bp, Homo sapien
cctggagtcagggtagtagagcaca

SEQ ID NO: 3356290 - DNA, 25 bp, Homo sapien
tcagggtagtagagcacagcattgc

SEQ ID NO: 3356291 - DNA, 25 bp, Homo sapien
tagagcacagcattgcagaggccgg

SEQ ID NO: 3356292 - DNA, 25 bp, Homo sapien
gaggccggagccagaagaaaagcaa

SEQ ID NO: 3356293 - DNA, 25 bp, Homo sapien
cagttatactgatggcagacttctc

SEQ ID NO: 3356294 - DNA, 25 bp, Homo sapien
agaaaagaaagctcacctacaaagg

SEQ ID NO: 3356295 - DNA, 25 bp, Homo sapien
tgaactgcaagactatgagcaggcc

SEQ ID NO: 3356296 - DNA, 25 bp, Homo sapien
tatcaacatactagccctaaaggga

SEQ ID NO: 3356297 - DNA, 25 bp, Homo sapien
tagcagggttgctggatataaaaat

SEQ ID NO: 3356298 - DNA, 25 bp, Homo sapien
caatgttgaagaagtcgctcgtctc

SEQ ID NO: 3356299 - DNA, 25 bp, Homo sapien
agatcagtgaaacttctgcatagca

SEQ ID NO: 3356300 - DNA, 25 bp, Homo sapien
gctcgtctctcaggttaatgtatgg

SEQ ID NO: 3356301 - DNA, 25 bp, Homo sapien
tccaacaattgaatcgagcatcagg

SEQ ID NO: 3356302 - DNA, 25 bp, Homo sapien
cacatatggctagaggacagcctac

SEQ ID NO: 3356303 - DNA, 25 bp, Homo sapien
cagcacagcttaaggaggtacacaa

SEQ ID NO: 3356304 - DNA, 25 bp, Homo sapien
cagtgttatctaatgcaacaggtac

SEQ ID NO: 3356305 - DNA, 25 bp, Homo sapien
tttgtcatatcctagaactcaaacg

SEQ ID NO: 3356306 - DNA, 25 bp, Homo sapien
cctagaactcaaacgcacagataca

SEQ ID NO: 3356307 - DNA, 25 bp, Homo sapien
catatcctagaactcaaacgcacag

SEQ ID NO: 3356308 - DNA, 25 bp, Homo sapien
tcaaacgcacagatacaatggatac

SEQ ID NO: 3356309 - DNA, 25 bp, Homo sapien
ttctgcgtcgatggcattttgcatt

SEQ ID NO: 3356310 - DNA, 25 bp, Homo sapien
gattttctgcgtcgatggcattttg

SEQ ID NO: 3356311 - DNA, 25 bp, Homo sapien
ttgattttctgcgtcgatggcattt

SEQ ID NO: 3356312 - DNA, 25 bp, Homo sapien
ttttctgcgtcgatggcattttgca

SEQ ID NO: 3356313 - DNA, 25 bp, Homo sapien
tcttttgataaataatgacgcatgg

SEQ ID NO: 3356314 - DNA, 25 bp, Homo sapien
taatgacgcatggtagctaactagt

SEQ ID NO: 3356315 - DNA, 25 bp, Homo sapien
tactcaccaaaagaacttgcaaaaa

SEQ ID NO: 3356316 - DNA, 25 bp, Homo sapien
gctaactagtaaagatgcagctttc

SEQ ID NO: 3356317 - DNA, 25 bp, Homo sapien
tgtctccacaaatgcgaaacgggct

SEQ ID NO: 3356318 - DNA, 25 bp, Homo sapien
cgggatgttagctgcggaacctcca

SEQ ID NO: 3356319 - DNA, 25 bp, Homo sapien
caggatgggcgttttcctcccagga

SEQ ID NO: 3356320 - DNA, 25 bp, Homo sapien
taatttgcggcctcgatagttggtc

SEQ ID NO: 3356321 - DNA, 25 bp, Homo sapien
cagcagctaaacacagcccgaattc

SEQ ID NO: 3356322 - DNA, 25 bp, Homo sapien
ttctctgaaaaccaattctacgata

SEQ ID NO: 3356323 - DNA, 25 bp, Homo sapien
tccctttatgtttcgcctcaggagt

SEQ ID NO: 3356324 - DNA, 25 bp, Homo sapien
ttatgtttcgcctcaggagtcgagg

SEQ ID NO: 3356325 - DNA, 25 bp, Homo sapien
ctagaaacagagagagcgagagaaa

SEQ ID NO: 3356326 - DNA, 25 bp, Homo sapien
caactgctgaagtccccatgtgaca

SEQ ID NO: 3356327 - DNA, 25 bp, Homo sapien
cactgtttcggtgccagcagagacc

SEQ ID NO: 3356328 - DNA, 25 bp, Homo sapien
gagacgctcgagtctgcgtcccggc

SEQ ID NO: 3356329 - DNA, 25 bp, Homo sapien
ggtgtttggccgtgccgctgtctaa

SEQ ID NO: 3356330 - DNA, 25 bp, Homo sapien
ggcgcgggggcggtctcagcggctg

SEQ ID NO: 3356331 - DNA, 25 bp, Homo sapien
cggcaggcaacgccagcttcagcaa

SEQ ID NO: 3356332 - DNA, 25 bp, Homo sapien
gcgggggcggtctcagcggctgggc

SEQ ID NO: 3356333 - DNA, 25 bp, Homo sapien
ccgggccccgggcaactgtgctgcc

SEQ ID NO: 3356334 - DNA, 25 bp, Homo sapien
gaactatctgcacaaccgagaggtt

SEQ ID NO: 3356335 - DNA, 25 bp, Homo sapien
ggacttaataaagcacaacttgttg

SEQ ID NO: 3356336 - DNA, 25 bp, Homo sapien
gctaccaaccagaccaggacttaat

SEQ ID NO: 3356337 - DNA, 25 bp, Homo sapien
tacacttaggagatacaaaagacac

SEQ ID NO: 3356338 - DNA, 25 bp, Homo sapien
taggagtttgagtcaccatgggcaa

SEQ ID NO: 3356339 - DNA, 25 bp, Homo sapien
aaatttttacttgcagctactgagg

SEQ ID NO: 3356340 - DNA, 25 bp, Homo sapien
tatgttttcaggatataatagaacc

SEQ ID NO: 3356341 - DNA, 25 bp, Homo sapien
ctttgcatggatttagtagttaccc

SEQ ID NO: 3356342 - DNA, 25 bp, Homo sapien
ctgactctaataattagttggaaac

SEQ ID NO: 3356343 - DNA, 25 bp, Homo sapien
agttggaaactcatataaaatgagc

SEQ ID NO: 3356344 - DNA, 25 bp, Homo sapien
cactaggagacgtggaattgagact

SEQ ID NO: 3356345 - DNA, 25 bp, Homo sapien
gactaataacttggatgttaacact

SEQ ID NO: 3356346 - DNA, 25 bp, Homo sapien
ccaaagaagacttaatgtgccagca

SEQ ID NO: 3356347 - DNA, 25 bp, Homo sapien
ggaaagtgaggcattaaggtctcca

SEQ ID NO: 3356348 - DNA, 25 bp, Homo sapien
tatcctgaagaatgtcccatgtgta

SEQ ID NO: 3356349 - DNA, 25 bp, Homo sapien
ggaatgttctgtacgtgtctctggg

SEQ ID NO: 3356350 - DNA, 25 bp, Homo sapien
tattttctggctgtcatatggtgca

SEQ ID NO: 3356351 - DNA, 25 bp, Homo sapien
aatctattggaaaaactcatgcctg

SEQ ID NO: 3356352 - DNA, 25 bp, Homo sapien
tgtcctatccatgtaaaagtttgcc

SEQ ID NO: 3356353 - DNA, 25 bp, Homo sapien
caactttgtgctcagtaacgtggga

SEQ ID NO: 3356354 - DNA, 25 bp, Homo sapien
tctagatgctagtgtaagactggcc

SEQ ID NO: 3356355 - DNA, 25 bp, Homo sapien
agcccagtaacacttatttacacag

SEQ ID NO: 3356356 - DNA, 25 bp, Homo sapien
tcaaaattgtttggtccagcccagt

SEQ ID NO: 3356357 - DNA, 25 bp, Homo sapien
tgaattgtgactacctcaaaattgt

SEQ ID NO: 3356358 - DNA, 25 bp, Homo sapien
tagataccagacactgttttgggtg

SEQ ID NO: 3356359 - DNA, 25 bp, Homo sapien
acacagatttacttgtcttagacaa

SEQ ID NO: 3356360 - DNA, 25 bp, Homo sapien
tattgcactatatagaaactagaaa

SEQ ID NO: 3356361 - DNA, 25 bp, Homo sapien
aatcaggaatggtgttctccagaat

SEQ ID NO: 3356362 - DNA, 25 bp, Homo sapien
tatagaatctatgctctattgcact

SEQ ID NO: 3356363 - DNA, 25 bp, Homo sapien
atcacgaaagagatctttggtccaa

SEQ ID NO: 3356364 - DNA, 25 bp, Homo sapien
tcacgaaagagatctttggtccaaa

SEQ ID NO: 3356365 - DNA, 25 bp, Homo sapien
tgttgcaaggaatcacgaaagagat

SEQ ID NO: 3356366 - DNA, 25 bp, Homo sapien
ttgattgttgcaaggaatcacgaaa

SEQ ID NO: 3356367 - DNA, 25 bp, Homo sapien
tccaggatttcagttatgattattc

SEQ ID NO: 3356368 - DNA, 25 bp, Homo sapien
ggaggacttgccacagaagcaacaa

SEQ ID NO: 3356369 - DNA, 25 bp, Homo sapien
caccttaaggctaagatattagtta

SEQ ID NO: 3356370 - DNA, 25 bp, Homo sapien
ctaaaatgtaaagagatgagtggga

SEQ ID NO: 3356371 - DNA, 25 bp, Homo sapien
aaactcagctaaattccatttgaac

SEQ ID NO: 3356372 - DNA, 25 bp, Homo sapien
agctgggattggaacaggattttac

SEQ ID NO: 3356373 - DNA, 25 bp, Homo sapien
tccaggcaatacactttgtgatacc

SEQ ID NO: 3356374 - DNA, 25 bp, Homo sapien
gcaaacctattatgaagatgtagct

SEQ ID NO: 3356375 - DNA, 25 bp, Homo sapien
gtaacagatcatctcacatcccttc

SEQ ID NO: 3356376 - DNA, 25 bp, Homo sapien
ggcagcagagcaattcgctgaagtt

SEQ ID NO: 3356377 - DNA, 25 bp, Homo sapien
agttgcagtaacagatcatctcaca

SEQ ID NO: 3356378 - DNA, 25 bp, Homo sapien
tttgggcagcagagcaattcgctga

SEQ ID NO: 3356379 - DNA, 25 bp, Homo sapien
tcaatctgtgtcaggtcagctactc

SEQ ID NO: 3356380 - DNA, 25 bp, Homo sapien
gtgacagttgtgatcttttagtatc

SEQ ID NO: 3356381 - DNA, 25 bp, Homo sapien
gacatcaatctgtgtcaggtcagct

SEQ ID NO: 3356382 - DNA, 25 bp, Homo sapien
tggacattgacatcaatctgtgtca

SEQ ID NO: 3356383 - DNA, 25 bp, Homo sapien
ctgtagcaagagaggcgatttgcag

SEQ ID NO: 3356384 - DNA, 25 bp, Homo sapien
tgtagcaagagaggcgatttgcagg

SEQ ID NO: 3356385 - DNA, 25 bp, Homo sapien
aagttagcccaatggtgaaaacaag

SEQ ID NO: 3356386 - DNA, 25 bp, Homo sapien
ttagcccaatggtgaaaacaagtac

SEQ ID NO: 3356387 - DNA, 25 bp, Homo sapien
ttgaactcctagcagcaaagttagc

SEQ ID NO: 3356388 - DNA, 25 bp, Homo sapien
ctcctagcagcaaagttagcccaat

SEQ ID NO: 3356389 - DNA, 25 bp, Homo sapien
aggatgcttcttaaatgctcacact

SEQ ID NO: 3356390 - DNA, 25 bp, Homo sapien
tcttggcagaggatgcttcttaaat

SEQ ID NO: 3356391 - DNA, 25 bp, Homo sapien
cagaggatgcttcttaaatgctcac

SEQ ID NO: 3356392 - DNA, 25 bp, Homo sapien
ggcagaggatgcttcttaaatgctc

SEQ ID NO: 3356393 - DNA, 25 bp, Homo sapien
tctggcctgggatcgacagactcgc

SEQ ID NO: 3356394 - DNA, 25 bp, Homo sapien
tgtctctggcctgggatcgacagac

SEQ ID NO: 3356395 - DNA, 25 bp, Homo sapien
tctctggcctgggatcgacagactc

SEQ ID NO: 3356396 - DNA, 25 bp, Homo sapien
ggtgagtttgggcaaaaggagaaga

SEQ ID NO: 3356397 - DNA, 25 bp, Homo sapien
ggaggcagactctggtagcaataaa

SEQ ID NO: 3356398 - DNA, 25 bp, Homo sapien
ccaggcgagaacgaatagaacagct

SEQ ID NO: 3356399 - DNA, 25 bp, Homo sapien
ctagtctatacaagaacctcaggga

SEQ ID NO: 3356400 - DNA, 25 bp, Homo sapien
gcttctttacagagggaaataacta

SEQ ID NO: 3356401 - DNA, 25 bp, Homo sapien
tttgctgtagtccagaagggaagat

SEQ ID NO: 3356402 - DNA, 25 bp, Homo sapien
gcttttgctgtagtccagaagggaa

SEQ ID NO: 3356403 - DNA, 25 bp, Homo sapien
cggcttttgctgtagtccagaaggg

SEQ ID NO: 3356404 - DNA, 25 bp, Homo sapien
ctgtagtccagaagggaagatagga

SEQ ID NO: 3356405 - DNA, 25 bp, Homo sapien
ctgatgaccacttaagtgtttatgt

SEQ ID NO: 3356406 - DNA, 25 bp, Homo sapien
tatgtttagcatagagataggaaat

SEQ ID NO: 3356407 - DNA, 25 bp, Homo sapien
aaggcttgggcctttggacgatgat

SEQ ID NO: 3356408 - DNA, 25 bp, Homo sapien
cctttggacgatgatactgttaatc

SEQ ID NO: 3356409 - DNA, 25 bp, Homo sapien
tggtttcggccttcacagctcacat

SEQ ID NO: 3356410 - DNA, 25 bp, Homo sapien
gctggtttcggccttcacagctcac

SEQ ID NO: 3356411 - DNA, 25 bp, Homo sapien
cagcagctggtttcggccttcacag

SEQ ID NO: 3356412 - DNA, 25 bp, Homo sapien
gagaagcagcagctggtttcggcct

SEQ ID NO: 3356413 - DNA, 25 bp, Homo sapien
ggaatcgtcagtaaggcccttgaag

SEQ ID NO: 3356414 - DNA, 25 bp, Homo sapien
ttgtgtaagagggtgaactgatgcc

SEQ ID NO: 3356415 - DNA, 25 bp, Homo sapien
aacaggttctactgaggaatcgtca

SEQ ID NO: 3356416 - DNA, 25 bp, Homo sapien
aacttagctttatgttgctgaagtg

SEQ ID NO: 3356417 - DNA, 25 bp, Homo sapien
gataagtagtggagcacaaactgga

SEQ ID NO: 3356418 - DNA, 25 bp, Homo sapien
agtagtggagcacaaactggaaacc

SEQ ID NO: 3356419 - DNA, 25 bp, Homo sapien
tagtggagcacaaactggaaaccaa

SEQ ID NO: 3356420 - DNA, 25 bp, Homo sapien
gtggagcacaaactggaaaccaaga

SEQ ID NO: 3356421 - DNA, 25 bp, Homo sapien
cagttcttaactggacagtcagaaa

SEQ ID NO: 3356422 - DNA, 25 bp, Homo sapien
gttcatatttggcttgaaacagttc

SEQ ID NO: 3356423 - DNA, 25 bp, Homo sapien
acagtcagaaacttaaagcagctga

SEQ ID NO: 3356424 - DNA, 25 bp, Homo sapien
tcttttactgtgtttcctccgtcca

SEQ ID NO: 3356425 - DNA, 25 bp, Homo sapien
ggagtacagtgtttatatacggtgt

SEQ ID NO: 3356426 - DNA, 25 bp, Homo sapien
tacagtgtttatatacggtgtcttt

SEQ ID NO: 3356427 - DNA, 25 bp, Homo sapien
agtacagtgtttatatacggtgtct

SEQ ID NO: 3356428 - DNA, 25 bp, Homo sapien
cagtgtttatatacggtgtctttta

SEQ ID NO: 3356429 - DNA, 25 bp, Homo sapien
cctccaggaggaaagggatgaagac

SEQ ID NO: 3356430 - DNA, 25 bp, Homo sapien
tcctccaggaggaaagggatgaaga

SEQ ID NO: 3356431 - DNA, 25 bp, Homo sapien
agatcctccaggaggaaagggatga

SEQ ID NO: 3356432 - DNA, 25 bp, Homo sapien
cgagtgctaaagatcctccaggagg

SEQ ID NO: 3356433 - DNA, 25 bp, Homo sapien
ttccagtttctacctgcagtaacat

SEQ ID NO: 3356434 - DNA, 25 bp, Homo sapien
atttccagtttctacctgcagtaac

SEQ ID NO: 3356435 - DNA, 25 bp, Homo sapien
tttccagtttctacctgcagtaaca

SEQ ID NO: 3356436 - DNA, 25 bp, Homo sapien
tccagtttctacctgcagtaacatc

SEQ ID NO: 3356437 - DNA, 25 bp, Homo sapien
tcttctgagtagttccgcaaatctc

SEQ ID NO: 3356438 - DNA, 25 bp, Homo sapien
gtagttccgcaaatctcaaggccat

SEQ ID NO: 3356439 - DNA, 25 bp, Homo sapien
tgagtagttccgcaaatctcaaggc

SEQ ID NO: 3356440 - DNA, 25 bp, Homo sapien
gccccgtctcttctgagtagttccg

SEQ ID NO: 3356441 - DNA, 25 bp, Homo sapien
ccaagattgagggaacaagtttgga

SEQ ID NO: 3356442 - DNA, 25 bp, Homo sapien
ggcagaatgtgtccaagattgaggg

SEQ ID NO: 3356443 - DNA, 25 bp, Homo sapien
tccaagattgagggaacaagtttgg

SEQ ID NO: 3356444 - DNA, 25 bp, Homo sapien
caagattgagggaacaagtttggag

SEQ ID NO: 3356445 - DNA, 25 bp, Homo sapien
cttcttctattaagtagcgcaggtc

SEQ ID NO: 3356446 - DNA, 25 bp, Homo sapien
cttctattaagtagcgcaggtcatc

SEQ ID NO: 3356447 - DNA, 25 bp, Homo sapien
caggtcatctgcaaacttctggccc

SEQ ID NO: 3356448 - DNA, 25 bp, Homo sapien
taagtagcgcaggtcatctgcaaac

SEQ ID NO: 3356449 - DNA, 25 bp, Homo sapien
ttgctactgtgagggttagacaaac

SEQ ID NO: 3356450 - DNA, 25 bp, Homo sapien
gtttgctactgtgagggttagacaa

SEQ ID NO: 3356451 - DNA, 25 bp, Homo sapien
caaggaatcgtttgctactgtgagg

SEQ ID NO: 3356452 - DNA, 25 bp, Homo sapien
aggaatcgtttgctactgtgagggt

SEQ ID NO: 3356453 - DNA, 25 bp, Homo sapien
cttcggggcaccaaacactttattg

SEQ ID NO: 3356454 - DNA, 25 bp, Homo sapien
cacagctcccttcggggcaccaaac

SEQ ID NO: 3356455 - DNA, 25 bp, Homo sapien
tcggggcaccaaacactttattgcc

SEQ ID NO: 3356456 - DNA, 25 bp, Homo sapien
agctcccttcggggcaccaaacact

SEQ ID NO: 3356457 - DNA, 25 bp, Homo sapien
ctgcgaccaaatagcaggtaaaggc

SEQ ID NO: 3356458 - DNA, 25 bp, Homo sapien
gcgaccaaatagcaggtaaaggcac

SEQ ID NO: 3356459 - DNA, 25 bp, Homo sapien
tgcgaccaaatagcaggtaaaggca

SEQ ID NO: 3356460 - DNA, 25 bp, Homo sapien
tgaccatcaatgctttccacattgt

SEQ ID NO: 3356461 - DNA, 25 bp, Homo sapien
gctttccacattgtattcattgcca

SEQ ID NO: 3356462 - DNA, 25 bp, Homo sapien
aatgctttccacattgtattcattg

SEQ ID NO: 3356463 - DNA, 25 bp, Homo sapien
ccacattgtattcattgccagtcac

SEQ ID NO: 3356464 - DNA, 25 bp, Homo sapien
ccacttggccttcatagatcttgtc

SEQ ID NO: 3356465 - DNA, 25 bp, Homo sapien
cacttggccttcatagatcttgtcc

SEQ ID NO: 3356466 - DNA, 25 bp, Homo sapien
ctccacttggccttcatagatcttg

SEQ ID NO: 3356467 - DNA, 25 bp, Homo sapien
cttggccttcatagatcttgtccat

SEQ ID NO: 3356468 - DNA, 25 bp, Homo sapien
caccatattttgtgcagactatcat

SEQ ID NO: 3356469 - DNA, 25 bp, Homo sapien
gccccctctatacgggcataagcaa

SEQ ID NO: 3356470 - DNA, 25 bp, Homo sapien
agccccctctatacgggcataagca

SEQ ID NO: 3356471 - DNA, 25 bp, Homo sapien
ccccctctatacgggcataagcaac

SEQ ID NO: 3356472 - DNA, 25 bp, Homo sapien
ttatactgtatcaccaagcatttct

SEQ ID NO: 3356473 - DNA, 25 bp, Homo sapien
aatcagttttaccctttcatcatct

SEQ ID NO: 3356474 - DNA, 25 bp, Homo sapien
atactgtatcaccaagcatttctga

SEQ ID NO: 3356475 - DNA, 25 bp, Homo sapien
tcagttttaccctttcatcatcttc

SEQ ID NO: 3356476 - DNA, 25 bp, Homo sapien
ctttaatgtggtacaaatgccatgt

SEQ ID NO: 3356477 - DNA, 25 bp, Homo sapien
tgccatgttcaaggcaaagtaagtg

SEQ ID NO: 3356478 - DNA, 25 bp, Homo sapien
aagcttgccaaactttaatgtggta

SEQ ID NO: 3356479 - DNA, 25 bp, Homo sapien
aagtaagtggactgttacaggatct

SEQ ID NO: 3356480 - DNA, 25 bp, Homo sapien
tacagcagcatttagaacagtttgc

SEQ ID NO: 3356481 - DNA, 25 bp, Homo sapien
tttaatgctttgcagatattctgtt

SEQ ID NO: 3356482 - DNA, 25 bp, Homo sapien
caaaccaacaaaagcagtttggact

SEQ ID NO: 3356483 - DNA, 25 bp, Homo sapien
tcctagctttagaagcaaaccaaca

SEQ ID NO: 3356484 - DNA, 25 bp, Homo sapien
tctttgtgcagggggcctgcttgtc

SEQ ID NO: 3356485 - DNA, 25 bp, Homo sapien
atagaactctgcacaaatttgcata

SEQ ID NO: 3356486 - DNA, 25 bp, Homo sapien
tagaactctgcacaaatttgcatat

SEQ ID NO: 3356487 - DNA, 25 bp, Homo sapien
gcttgtctgcgtcattccaatttta

SEQ ID NO: 3356488 - DNA, 25 bp, Homo sapien
gtacatgcatacaatagcctccttg

SEQ ID NO: 3356489 - DNA, 25 bp, Homo sapien
taacttggcagatagtattaaacca

SEQ ID NO: 3356490 - DNA, 25 bp, Homo sapien
gatcgctagttgtgccaggcatctt

SEQ ID NO: 3356491 - DNA, 25 bp, Homo sapien
gcagctgatgatttatggatcgcta

SEQ ID NO: 3356492 - DNA, 25 bp, Homo sapien
caactaagagtagttccacgcataa

SEQ ID NO: 3356493 - DNA, 25 bp, Homo sapien
gtagttccacgcataacaaagctgt

SEQ ID NO: 3356494 - DNA, 25 bp, Homo sapien
gcgatttaacctttgagtaaattgc

SEQ ID NO: 3356495 - DNA, 25 bp, Homo sapien
tcagctcttctttgagaagaccctc

SEQ ID NO: 3356496 - DNA, 25 bp, Homo sapien
agggcatccacgagcagcaaaggga

SEQ ID NO: 3356497 - DNA, 25 bp, Homo sapien
tggtgtccaagaaagaacacccaac

SEQ ID NO: 3356498 - DNA, 25 bp, Homo sapien
ggatacttggtgtccaagaaagaac

SEQ ID NO: 3356499 - DNA, 25 bp, Homo sapien
gagcagcaaagggatacttggtgtc

SEQ ID NO: 3356500 - DNA, 25 bp, Homo sapien
tccaaggaatgtctctgaatcagct

SEQ ID NO: 3356501 - DNA, 25 bp, Homo sapien
tgtccacatcacaattttgcctctc

SEQ ID NO: 3356502 - DNA, 25 bp, Homo sapien
ctctttggtttgaggttatccagta

SEQ ID NO: 3356503 - DNA, 25 bp, Homo sapien
tccagtatagtcctatctgacataa

SEQ ID NO: 3356504 - DNA, 25 bp, Homo sapien
tgacccatggcgcttaacaaaacat

SEQ ID NO: 3356505 - DNA, 25 bp, Homo sapien
ttcatgacccatggcgcttaacaaa

SEQ ID NO: 3356506 - DNA, 25 bp, Homo sapien
catgacccatggcgcttaacaaaac

SEQ ID NO: 3356507 - DNA, 25 bp, Homo sapien
tcatgacccatggcgcttaacaaaa

SEQ ID NO: 3356508 - DNA, 25 bp, Homo sapien
ctgcagaggaaagtgtaccagggca

SEQ ID NO: 3356509 - DNA, 25 bp, Homo sapien
atgccctgcacaaccactgaggaat

SEQ ID NO: 3356510 - DNA, 25 bp, Homo sapien
gaagtatttaggaatcttgtgggaa

SEQ ID NO: 3356511 - DNA, 25 bp, Homo sapien
gacttttccacaaagcacggtcatg

SEQ ID NO: 3356512 - DNA, 25 bp, Homo sapien
tgcacatcgggcaagtggttcgtct

SEQ ID NO: 3356513 - DNA, 25 bp, Homo sapien
ctttgtgcacatcgggcaagtggtt

SEQ ID NO: 3356514 - DNA, 25 bp, Homo sapien
cccaggtatgaagggagtgtcattt

SEQ ID NO: 3356515 - DNA, 25 bp, Homo sapien
caagtggttcgtcttcccaggtatg

SEQ ID NO: 3356516 - DNA, 25 bp, Homo sapien
cagagaggataattaccagcaataa

SEQ ID NO: 3356517 - DNA, 25 bp, Homo sapien
gcaataaaggatacttggcacaaat

SEQ ID NO: 3356518 - DNA, 25 bp, Homo sapien
ctttcaaacagagaggataattacc

SEQ ID NO: 3356519 - DNA, 25 bp, Homo sapien
taaaggatacttggcacaaatttgg

SEQ ID NO: 3356520 - DNA, 25 bp, Homo sapien
aaataaatttggctatcaactaatt

SEQ ID NO: 3356521 - DNA, 25 bp, Homo sapien
ttctgaatgttattagttatgagtt

SEQ ID NO: 3356522 - DNA, 25 bp, Homo sapien
taaatttggctatcaactaatttct

SEQ ID NO: 3356523 - DNA, 25 bp, Homo sapien
tggctatcaactaatttctctagtt

SEQ ID NO: 3356524 - DNA, 25 bp, Homo sapien
aatttacgccggcatcagggcaggc

SEQ ID NO: 3356525 - DNA, 25 bp, Homo sapien
taccacggaccacggctttgtagct

SEQ ID NO: 3356526 - DNA, 25 bp, Homo sapien
gaaagaaattttgcaccatggagag

SEQ ID NO: 3356527 - DNA, 25 bp, Homo sapien
tccacctttgtacttgcggcaccgt

SEQ ID NO: 3356528 - DNA, 25 bp, Homo sapien
ctgttgtgctaaagagcttgaatac

SEQ ID NO: 3356529 - DNA, 25 bp, Homo sapien
gctaaagagcttgaatacatcccga

SEQ ID NO: 3356530 - DNA, 25 bp, Homo sapien
ccgatggcggttatatgacacagtg

SEQ ID NO: 3356531 - DNA, 25 bp, Homo sapien
gcttgaatacatcccgatggcggtt

SEQ ID NO: 3356532 - DNA, 25 bp, Homo sapien
ttactggtgtgttttcattcatgtc

SEQ ID NO: 3356533 - DNA, 25 bp, Homo sapien
ctggtgtgttttcattcatgtcttt

SEQ ID NO: 3356534 - DNA, 25 bp, Homo sapien
catgtttggttactggtgtgttttc

SEQ ID NO: 3356535 - DNA, 25 bp, Homo sapien
atgtttggttactggtgtgttttca

SEQ ID NO: 3356536 - DNA, 25 bp, Homo sapien
tggtggttgagtgatcattataaaa

SEQ ID NO: 3356537 - DNA, 25 bp, Homo sapien
ttatcttgatttggtggttgagtga

SEQ ID NO: 3356538 - DNA, 25 bp, Homo sapien
tcattataaaattgctggaattcat

SEQ ID NO: 3356539 - DNA, 25 bp, Homo sapien
tgagtgatcattataaaattgctgg

SEQ ID NO: 3356540 - DNA, 25 bp, Homo sapien
cacagagtgggaatgtgtactcctc

SEQ ID NO: 3356541 - DNA, 25 bp, Homo sapien
gcgtaaactagaacaaggctgggtg

SEQ ID NO: 3356542 - DNA, 25 bp, Homo sapien
agaggagatgtgcaatgcccaccca

SEQ ID NO: 3356543 - DNA, 25 bp, Homo sapien
gctgagtgccagtcatatggtcaca

SEQ ID NO: 3356544 - DNA, 25 bp, Homo sapien
tcagtcacggttcaatacaggaaac

SEQ ID NO: 3356545 - DNA, 25 bp, Homo sapien
gattgttgacgacctctcctggatt

SEQ ID NO: 3356546 - DNA, 25 bp, Homo sapien
gacagccatctaaacacctgcagag

SEQ ID NO: 3356547 - DNA, 25 bp, Homo sapien
gaggcagcatgagagccatccagaa

SEQ ID NO: 3356548 - DNA, 25 bp, Homo sapien
tacttggttacttaggaacaggcca

SEQ ID NO: 3356549 - DNA, 25 bp, Homo sapien
aagccgcccttttacaactggagag

SEQ ID NO: 3356550 - DNA, 25 bp, Homo sapien
gctgtgagaacctcaaagccgccct

SEQ ID NO: 3356551 - DNA, 25 bp, Homo sapien
tagaatagattcctaccctcagctg

SEQ ID NO: 3356552 - DNA, 25 bp, Homo sapien
ttcaagatgcggtagattggcacct

SEQ ID NO: 3356553 - DNA, 25 bp, Homo sapien
cagtcagattcaagatgcggtagat

SEQ ID NO: 3356554 - DNA, 25 bp, Homo sapien
ggccccacagttcgtctgcaacagt

SEQ ID NO: 3356555 - DNA, 25 bp, Homo sapien
ttggctcttcttcccccgaatcaaa

SEQ ID NO: 3356556 - DNA, 25 bp, Homo sapien
caccgcgaagaaccaggaaacttca

SEQ ID NO: 3356557 - DNA, 25 bp, Homo sapien
tgtaaacaccgcgaagaaccaggaa

SEQ ID NO: 3356558 - DNA, 25 bp, Homo sapien
tggcacacaggacattccgttttcc

SEQ ID NO: 3356559 - DNA, 25 bp, Homo sapien
tgtggcacacaggacattccgtttt

SEQ ID NO: 3356560 - DNA, 25 bp, Homo sapien
ccatgtggcacacaggacattccgt

SEQ ID NO: 3356561 - DNA, 25 bp, Homo sapien
gcacacaggacattccgttttcctt

SEQ ID NO: 3356562 - DNA, 25 bp, Homo sapien
ctttacgctccactcggagcaagca

SEQ ID NO: 3356563 - DNA, 25 bp, Homo sapien
actcggagcaagcaaggaaatcctc

SEQ ID NO: 3356564 - DNA, 25 bp, Homo sapien
gctccactcggagcaagcaaggaaa

SEQ ID NO: 3356565 - DNA, 25 bp, Homo sapien
gttgagggttagcgccacctggctt

SEQ ID NO: 3356566 - DNA, 25 bp, Homo sapien
gtcccaatggcccttaagagctcca

SEQ ID NO: 3356567 - DNA, 25 bp, Homo sapien
taatggtgagtaattcctactagct

SEQ ID NO: 3356568 - DNA, 25 bp, Homo sapien
tgcctctctgttaagtttgcctaga

SEQ ID NO: 3356569 - DNA, 25 bp, Homo sapien
tgtgtgaagggaaagtatcagttga

SEQ ID NO: 3356570 - DNA, 25 bp, Homo sapien
gtcgggattggctacaccagggccc

SEQ ID NO: 3356571 - DNA, 25 bp, Homo sapien
ttatcacaaatggtgaaggagattg

SEQ ID NO: 3356572 - DNA, 25 bp, Homo sapien
cgataatgacgtcgggattggctac

SEQ ID NO: 3356573 - DNA, 25 bp, Homo sapien
ggaacagtaacaaccgtggccgata

SEQ ID NO: 3356574 - DNA, 25 bp, Homo sapien
tttgctctcggccgccccaaagatg

SEQ ID NO: 3356575 - DNA, 25 bp, Homo sapien
tcttgatgcggcttgagatgccctg

SEQ ID NO: 3356576 - DNA, 25 bp, Homo sapien
cagccttcccagtgcgcctgtggtt

SEQ ID NO: 3356577 - DNA, 25 bp, Homo sapien
tgcgcctgtggttgcgggcaatggg

SEQ ID NO: 3356578 - DNA, 25 bp, Homo sapien
aggcctctgcggaggtctctttcag

SEQ ID NO: 3356579 - DNA, 25 bp, Homo sapien
cagggtcgtttggggtgtctggatt

SEQ ID NO: 3356580 - DNA, 25 bp, Homo sapien
ggtcgtttggggtgtctggattcag

SEQ ID NO: 3356581 - DNA, 25 bp, Homo sapien
gaagaacggcctttctgcgctcagg

SEQ ID NO: 3356582 - DNA, 25 bp, Homo sapien
ttttggcagctgttagataacttcc

SEQ ID NO: 3356583 - DNA, 25 bp, Homo sapien
tgaatggtggcctaatgtgggccct

SEQ ID NO: 3356584 - DNA, 25 bp, Homo sapien
gcaataaagttcatgtgacggagag

SEQ ID NO: 3356585 - DNA, 25 bp, Homo sapien
gatgtttccgctctccgttgcctgg

SEQ ID NO: 3356586 - DNA, 25 bp, Homo sapien
gcaacagcctagtttctggaccatg

SEQ ID NO: 3356587 - DNA, 25 bp, Homo sapien
gtgcactctggctgcaacagcctag

SEQ ID NO: 3356588 - DNA, 25 bp, Homo sapien
ccatgatcaggcataattagggtct

SEQ ID NO: 3356589 - DNA, 25 bp, Homo sapien
gtaaagttccaagcgtcttccacag

SEQ ID NO: 3356590 - DNA, 25 bp, Homo sapien
ctgggtacgtcccagggctctggca

SEQ ID NO: 3356591 - DNA, 25 bp, Homo sapien
gagcaggtgtccacctctcggttta

SEQ ID NO: 3356592 - DNA, 25 bp, Homo sapien
acctctcggtttaggccagcttgac

SEQ ID NO: 3356593 - DNA, 25 bp, Homo sapien
agcttgaccctgtgtcgttcccact

SEQ ID NO: 3356594 - DNA, 25 bp, Homo sapien
gagaaggtggtgttccagctacatc

SEQ ID NO: 3356595 - DNA, 25 bp, Homo sapien
ggtggtgttccagctacatcttgga

SEQ ID NO: 3356596 - DNA, 25 bp, Homo sapien
gaaggtggtgttccagctacatctt

SEQ ID NO: 3356597 - DNA, 25 bp, Homo sapien
aggtggtgttccagctacatcttgg

SEQ ID NO: 3356598 - DNA, 25 bp, Homo sapien
ttgcaagggtaaacagctggcctag

SEQ ID NO: 3356599 - DNA, 25 bp, Homo sapien
tgcaagggtaaacagctggcctagg

SEQ ID NO: 3356600 - DNA, 25 bp, Homo sapien
aaggacgtgaagttcccagagtcca

SEQ ID NO: 3356601 - DNA, 25 bp, Homo sapien
tatgagtggtggatctgcccaaact

SEQ ID NO: 3356602 - DNA, 25 bp, Homo sapien
gagacttacaataaacctcctgcag

SEQ ID NO: 3356603 - DNA, 25 bp, Homo sapien
gcgatgtccctaattctatgagtgg

SEQ ID NO: 3356604 - DNA, 25 bp, Homo sapien
caacccagatgtgcctgactctgaa

SEQ ID NO: 3356605 - DNA, 25 bp, Homo sapien
tagtctaattgtttccagtaattgc

SEQ ID NO: 3356606 - DNA, 25 bp, Homo sapien
tcagtggatgcctaagaggcgactg

SEQ ID NO: 3356607 - DNA, 25 bp, Homo sapien
cagtaattgcattccagtcctgcac

SEQ ID NO: 3356608 - DNA, 25 bp, Homo sapien
gaccatgttcgctggtgcagtcccc

SEQ ID NO: 3356609 - DNA, 25 bp, Homo sapien
ttccctgcatgcagcgcaaacggcg

SEQ ID NO: 3356610 - DNA, 25 bp, Homo sapien
taactgtaataagatcactctggcc

SEQ ID NO: 3356611 - DNA, 25 bp, Homo sapien
taataactgtaataagatcactctg

SEQ ID NO: 3356612 - DNA, 25 bp, Homo sapien
ggtcattaataactgtaataagatc

SEQ ID NO: 3356613 - DNA, 25 bp, Homo sapien
gtagttgccagaccactggagtccc

SEQ ID NO: 3356614 - DNA, 25 bp, Homo sapien
tagttgccagaccactggagtccct

SEQ ID NO: 3356615 - DNA, 25 bp, Homo sapien
ccagaccactggagtccctgccagg

SEQ ID NO: 3356616 - DNA, 25 bp, Homo sapien
acatcccttgctcggccatcagtat

SEQ ID NO: 3356617 - DNA, 25 bp, Homo sapien
ccctgtagagctgatggcccaaaag

SEQ ID NO: 3356618 - DNA, 25 bp, Homo sapien
tcagtgccctgtagagctgatggcc

SEQ ID NO: 3356619 - DNA, 25 bp, Homo sapien
tgggacatcagtacaagattcttgt

SEQ ID NO: 3356620 - DNA, 25 bp, Homo sapien
agcaagcagtcatcagacaacctct

SEQ ID NO: 3356621 - DNA, 25 bp, Homo sapien
tctagagtgtaagcaagcagtcatc

SEQ ID NO: 3356622 - DNA, 25 bp, Homo sapien
ttctctctagagtgtaagcaagcag

SEQ ID NO: 3356623 - DNA, 25 bp, Homo sapien
taaagcattctctctagagtgtaag

SEQ ID NO: 3356624 - DNA, 25 bp, Homo sapien
tccgacctccatcggtctgggagcg

SEQ ID NO: 3356625 - DNA, 25 bp, Homo sapien
gacggcggtgtctagtccagtccag

SEQ ID NO: 3356626 - DNA, 25 bp, Homo sapien
ttcagatgctgggaaccgtcgcttc

SEQ ID NO: 3356627 - DNA, 25 bp, Homo sapien
tccagtccagggtaactgggctctc

SEQ ID NO: 3356628 - DNA, 25 bp, Homo sapien
accaccatcaactctggaggccgat

SEQ ID NO: 3356629 - DNA, 25 bp, Homo sapien
aaccaccatcaactctggaggccga

SEQ ID NO: 3356630 - DNA, 25 bp, Homo sapien
tgttaagacctcctccacacctgag

SEQ ID NO: 3356631 - DNA, 25 bp, Homo sapien
ggtgttaagacctcctccacacctg

SEQ ID NO: 3356632 - DNA, 25 bp, Homo sapien
tccccgggagcacgacggatagaat

SEQ ID NO: 3356633 - DNA, 25 bp, Homo sapien
tgaataaagccctcgcgcgctctga

SEQ ID NO: 3356634 - DNA, 25 bp, Homo sapien
tggaggcctgaacctcgcgagtaga

SEQ ID NO: 3356635 - DNA, 25 bp, Homo sapien
gcgagtagagcctggcgcttttcct

SEQ ID NO: 3356636 - DNA, 25 bp, Homo sapien
gtgtcgggcggtgtccgcgcccctc

SEQ ID NO: 3356637 - DNA, 25 bp, Homo sapien
ttctcgggggagatatccaggagct

SEQ ID NO: 3356638 - DNA, 25 bp, Homo sapien
ccggaacccgctcctgggccgcgcg

SEQ ID NO: 3356639 - DNA, 25 bp, Homo sapien
gcgccgctcccttccgtcggccgga

SEQ ID NO: 3356640 - DNA, 25 bp, Homo sapien
ttgcaagaaaactgagcgccggctg

SEQ ID NO: 3356641 - DNA, 25 bp, Homo sapien
caagaaaactgagcgccggctggaa

SEQ ID NO: 3356642 - DNA, 25 bp, Homo sapien
ggcggccggggagattcacccacat

SEQ ID NO: 3356643 - DNA, 25 bp, Homo sapien
gaggaaaccgactcttttgcaagaa

SEQ ID NO: 3356644 - DNA, 25 bp, Homo sapien
taattagctggtaatgcttctctca

SEQ ID NO: 3356645 - DNA, 25 bp, Homo sapien
gggcccaaaagtgattattactagc

SEQ ID NO: 3356646 - DNA, 25 bp, Homo sapien
tcctaatggcgtttcagggcccaaa

SEQ ID NO: 3356647 - DNA, 25 bp, Homo sapien
caggatctggctccatttattcaaa

SEQ ID NO: 3356648 - DNA, 25 bp, Homo sapien
taaattaacgcaaaacagagccact

SEQ ID NO: 3356649 - DNA, 25 bp, Homo sapien
gcaacttcaaccccactaggaccca

SEQ ID NO: 3356650 - DNA, 25 bp, Homo sapien
ttaacgcaaaacagagccactttgg

SEQ ID NO: 3356651 - DNA, 25 bp, Homo sapien
tataaattaacgcaaaacagagcca

SEQ ID NO: 3356652 - DNA, 25 bp, Homo sapien
tctacagctcagtgacgtagcgcgc

SEQ ID NO: 3356653 - DNA, 25 bp, Homo sapien
tgggctggcgtagacaaagaataac

SEQ ID NO: 3356654 - DNA, 25 bp, Homo sapien
cacaagcgcttttgatgagagctgc

SEQ ID NO: 3356655 - DNA, 25 bp, Homo sapien
cagaagccccgtttcgagctacgaa

SEQ ID NO: 3356656 - DNA, 25 bp, Homo sapien
agcaactaggctaaaacctagcagt

SEQ ID NO: 3356657 - DNA, 25 bp, Homo sapien
aaacctagcagtgggtccctaagag

SEQ ID NO: 3356658 - DNA, 25 bp, Homo sapien
actaggctaaaacctagcagtgggt

SEQ ID NO: 3356659 - DNA, 25 bp, Homo sapien
gctaaaacctagcagtgggtcccta

SEQ ID NO: 3356660 - DNA, 25 bp, Homo sapien
gataaaactggagcaacctgcatta

SEQ ID NO: 3356661 - DNA, 25 bp, Homo sapien
ctctccccctatcagtggaacagat

SEQ ID NO: 3356662 - DNA, 25 bp, Homo sapien
gcccaaattgtatttggtgtgaggc

SEQ ID NO: 3356663 - DNA, 25 bp, Homo sapien
caaattgtatttggtgtgaggctct

SEQ ID NO: 3356664 - DNA, 25 bp, Homo sapien
cgtgggttccactgaggctcctaat

SEQ ID NO: 3356665 - DNA, 25 bp, Homo sapien
cagccagggactacgacttcaggtg

SEQ ID NO: 3356666 - DNA, 25 bp, Homo sapien
tacgacttcaggtggccctctgtgc

SEQ ID NO: 3356667 - DNA, 25 bp, Homo sapien
gctcctaattgctccaaatccaggc

SEQ ID NO: 3356668 - DNA, 25 bp, Homo sapien
gcgctgacgttacgcagaggcgcac

SEQ ID NO: 3356669 - DNA, 25 bp, Homo sapien
cgcgcgctgacgttacgcagaggcg

SEQ ID NO: 3356670 - DNA, 25 bp, Homo sapien
cgcgctgacgttacgcagaggcgca

SEQ ID NO: 3356671 - DNA, 25 bp, Homo sapien
cccgcgcgctgacgttacgcagagg

SEQ ID NO: 3356672 - DNA, 25 bp, Homo sapien
gcatagttcgacaaagccctacttt

SEQ ID NO: 3356673 - DNA, 25 bp, Homo sapien
ttcgacaaagccctactttgcttcc

SEQ ID NO: 3356674 - DNA, 25 bp, Homo sapien
gttccgactccaccgcggcgccgag

SEQ ID NO: 3356675 - DNA, 25 bp, Homo sapien
agttcttccccgcatagttcgacaa

SEQ ID NO: 3356676 - DNA, 25 bp, Homo sapien
gagagggctgaaataaggggttcac

SEQ ID NO: 3356677 - DNA, 25 bp, Homo sapien
tgagaagaatccttgcgtgaccgga

SEQ ID NO: 3356678 - DNA, 25 bp, Homo sapien
gaaagcatcaaaagagtggcatctg

SEQ ID NO: 3356679 - DNA, 25 bp, Homo sapien
ccaggactgcaagtaactgcgtaca

SEQ ID NO: 3356680 - DNA, 25 bp, Homo sapien
gcgcattacaccaacctgagaagaa

SEQ ID NO: 3356681 - DNA, 25 bp, Homo sapien
tactaagagtaacaggcgtagccac

SEQ ID NO: 3356682 - DNA, 25 bp, Homo sapien
cctcggaatgcaaaaggcgaaagct

SEQ ID NO: 3356683 - DNA, 25 bp, Homo sapien
cacaaaagagcctggtctggtcgca

SEQ ID NO: 3356684 - DNA, 25 bp, Homo sapien
aggcaaaactagtgtgggcccttag

SEQ ID NO: 3356685 - DNA, 25 bp, Homo sapien
tcggaggtatttttagctcctctct

SEQ ID NO: 3356686 - DNA, 25 bp, Homo sapien
gacctcgggcctagcttcggaggta

SEQ ID NO: 3356687 - DNA, 25 bp, Homo sapien
gagctcctcccggacctcgggccta

SEQ ID NO: 3356688 - DNA, 25 bp, Homo sapien
tagcttcggaggtatttttagctcc

SEQ ID NO: 3356689 - DNA, 25 bp, Homo sapien
aaacaatattcgctctctctaggct

SEQ ID NO: 3356690 - DNA, 25 bp, Homo sapien
ttcgcccgcaggaacactccaagtt

SEQ ID NO: 3356691 - DNA, 25 bp, Homo sapien
caagttccacagttaaagaggaccg

SEQ ID NO: 3356692 - DNA, 25 bp, Homo sapien
tcagctccgaaactgggtgcggcac

SEQ ID NO: 3356693 - DNA, 25 bp, Homo sapien
ctgctccacgggagccagtcttgga

SEQ ID NO: 3356694 - DNA, 25 bp, Homo sapien
gcctctctcccggccactgctgctc

SEQ ID NO: 3356695 - DNA, 25 bp, Homo sapien
ctgctgctccacgggagccagtctt

SEQ ID NO: 3356696 - DNA, 25 bp, Homo sapien
ctctctcccggccactgctgctcca

SEQ ID NO: 3356697 - DNA, 25 bp, Homo sapien
agaggcctcagtacagccttcgggc

SEQ ID NO: 3356698 - DNA, 25 bp, Homo sapien
cctcagtacagccttcgggcttggg

SEQ ID NO: 3356699 - DNA, 25 bp, Homo sapien
cagtacagccttcgggcttgggccg

SEQ ID NO: 3356700 - DNA, 25 bp, Homo sapien
cttggagaggcctcagtacagcctt

SEQ ID NO: 3356701 - DNA, 25 bp, Homo sapien
tgccgagcccctgctgcatctggga

SEQ ID NO: 3356702 - DNA, 25 bp, Homo sapien
tccagaacctgccgagcccctgctg

SEQ ID NO: 3356703 - DNA, 25 bp, Homo sapien
agaacctgccgagcccctgctgcat

SEQ ID NO: 3356704 - DNA, 25 bp, Homo sapien
ctgccgagcccctgctgcatctggg

SEQ ID NO: 3356705 - DNA, 25 bp, Homo sapien
ctttgccgttcgaaaatgcctaggt

SEQ ID NO: 3356706 - DNA, 25 bp, Homo sapien
ctccactttgccgttcgaaaatgcc

SEQ ID NO: 3356707 - DNA, 25 bp, Homo sapien
ccgttcgaaaatgcctaggttggtg

SEQ ID NO: 3356708 - DNA, 25 bp, Homo sapien
ccaatcccagcggttagcccctgcg

SEQ ID NO: 3356709 - DNA, 25 bp, Homo sapien
cggtgctgtgtagtcggcgtggcgc

SEQ ID NO: 3356710 - DNA, 25 bp, Homo sapien
cgctgtgagctaggcgaacaggaac

SEQ ID NO: 3356711 - DNA, 25 bp, Homo sapien
ccttcggggcccttcggtgctgtgt

SEQ ID NO: 3356712 - DNA, 25 bp, Homo sapien
acgtctacgctattagcagccaggt

SEQ ID NO: 3356713 - DNA, 25 bp, Homo sapien
cacgaagagacttggagtatctgga

SEQ ID NO: 3356714 - DNA, 25 bp, Homo sapien
cgaagagacttggagtatctggaga

SEQ ID NO: 3356715 - DNA, 25 bp, Homo sapien
aagagacttggagtatctggagaag

SEQ ID NO: 3356716 - DNA, 25 bp, Homo sapien
tgaagacgtttaggagggagggtga

SEQ ID NO: 3356717 - DNA, 25 bp, Homo sapien
taccaactgaggttgcgttttcagg

SEQ ID NO: 3356718 - DNA, 25 bp, Homo sapien
gctccagggaacgacattaacaacc

SEQ ID NO: 3356719 - DNA, 25 bp, Homo sapien
ttctctcattaaaaccgcaccggct

SEQ ID NO: 3356720 - DNA, 25 bp, Homo sapien
ccagatttgcaaagcgaaggcgatg

SEQ ID NO: 3356721 - DNA, 25 bp, Homo sapien
aaaactgtactttgtgcagacattg

SEQ ID NO: 3356722 - DNA, 25 bp, Homo sapien
ctgtactttgtgcagacattgcctg

SEQ ID NO: 3356723 - DNA, 25 bp, Homo sapien
cagacattgcctgatcctccccttt

SEQ ID NO: 3356724 - DNA, 25 bp, Homo sapien
aactgtactttgtgcagacattgcc

SEQ ID NO: 3356725 - DNA, 25 bp, Homo sapien
ctgaagactctgcttgccctttgta

SEQ ID NO: 3356726 - DNA, 25 bp, Homo sapien
gcttgccctttgtagcccgtgcagg

SEQ ID NO: 3356727 - DNA, 25 bp, Homo sapien
tagttacattcactctagcttctga

SEQ ID NO: 3356728 - DNA, 25 bp, Homo sapien
tacattcactctagcttctgactga

SEQ ID NO: 3356729 - DNA, 25 bp, Homo sapien
gtgtcagtgtttgcgccagggacaa

SEQ ID NO: 3356730 - DNA, 25 bp, Homo sapien
gtcctcgtccttgcgaggtgtcagt

SEQ ID NO: 3356731 - DNA, 25 bp, Homo sapien
tgcgccagggacaactccctggagg

SEQ ID NO: 3356732 - DNA, 25 bp, Homo sapien
gtagtaggggacaaagctgccgcca

SEQ ID NO: 3356733 - DNA, 25 bp, Homo sapien
gccgcagttgttgcctcagggaagc

SEQ ID NO: 3356734 - DNA, 25 bp, Homo sapien
gcagggatagagcaaagaagcgacc

SEQ ID NO: 3356735 - DNA, 25 bp, Homo sapien
tttccaggcggaatgctccagccgt

SEQ ID NO: 3356736 - DNA, 25 bp, Homo sapien
agtagagatgttaactggcccctcc

SEQ ID NO: 3356737 - DNA, 25 bp, Homo sapien
ctaaaaatacatatttatgaagtcc

SEQ ID NO: 3356738 - DNA, 25 bp, Homo sapien
tagcggagataaagacggacagagc

SEQ ID NO: 3356739 - DNA, 25 bp, Homo sapien
gcgcgggtgcggcactaatcactcc

SEQ ID NO: 3356740 - DNA, 25 bp, Homo sapien
cactcccagatgtccctaatagcgg

SEQ ID NO: 3356741 - DNA, 25 bp, Homo sapien
cagagcggccgggaataaatttgta

SEQ ID NO: 3356742 - DNA, 25 bp, Homo sapien
tgcacttcgcgatgggaactggctt

SEQ ID NO: 3356743 - DNA, 25 bp, Homo sapien
ctgatcatcaaagcggcccaaatgc

SEQ ID NO: 3356744 - DNA, 25 bp, Homo sapien
cccaaatgccgggagaatttgaagg

SEQ ID NO: 3356745 - DNA, 25 bp, Homo sapien
gaactggcttcggtagggtagagca

SEQ ID NO: 3356746 - DNA, 25 bp, Homo sapien
cacgtaagtcggatactcggtgctc

SEQ ID NO: 3356747 - DNA, 25 bp, Homo sapien
ctgtaagttcggtgcacgtaagtcg

SEQ ID NO: 3356748 - DNA, 25 bp, Homo sapien
aagtcggatactcggtgctctttaa

SEQ ID NO: 3356749 - DNA, 25 bp, Homo sapien
ttcggtgcacgtaagtcggatactc

SEQ ID NO: 3356750 - DNA, 25 bp, Homo sapien
tgtgcgggaagcacgcgttgcgcag

SEQ ID NO: 3356751 - DNA, 25 bp, Homo sapien
cgaagccgtttagcggttccaggct

SEQ ID NO: 3356752 - DNA, 25 bp, Homo sapien
ctgattggagctgcgcagttgctgt

SEQ ID NO: 3356753 - DNA, 25 bp, Homo sapien
ttagcggttccaggctgattggagc

SEQ ID NO: 3356754 - DNA, 25 bp, Homo sapien
taaggcggcgcgatgagaactgtcc

SEQ ID NO: 3356755 - DNA, 25 bp, Homo sapien
tggtaaggcggcgcgatgagaactg

SEQ ID NO: 3356756 - DNA, 25 bp, Homo sapien
tgggtggtaaggcggcgcgatgaga

SEQ ID NO: 3356757 - DNA, 25 bp, Homo sapien
cggcgcgatgagaactgtccggccc

SEQ ID NO: 3356758 - DNA, 25 bp, Homo sapien
gcccatgccacaagcctccctcaag

SEQ ID NO: 3356759 - DNA, 25 bp, Homo sapien
ccagggtccagattcggccctctac

SEQ ID NO: 3356760 - DNA, 25 bp, Homo sapien
tgccacaagcctccctcaagaccat

SEQ ID NO: 3356761 - DNA, 25 bp, Homo sapien
attcggccctctacggcgcccatgc

SEQ ID NO: 3356762 - DNA, 25 bp, Homo sapien
caggcagctgggcattctgccgtct

SEQ ID NO: 3356763 - DNA, 25 bp, Homo sapien
ggtgacagataatctggggtgtcct

SEQ ID NO: 3356764 - DNA, 25 bp, Homo sapien
ctgggacttgacaacctggggcggg

SEQ ID NO: 3356765 - DNA, 25 bp, Homo sapien
ggttcagccgcctgcagtgtcaggc

SEQ ID NO: 3356766 - DNA, 25 bp, Homo sapien
gcatggtgaagataactcctctccg

SEQ ID NO: 3356767 - DNA, 25 bp, Homo sapien
tggcggagaccagctacacaaggtg

SEQ ID NO: 3356768 - DNA, 25 bp, Homo sapien
tcttccacgtctaggacctgatggc

SEQ ID NO: 3356769 - DNA, 25 bp, Homo sapien
aatctgcagaagtgccttaaggccc

SEQ ID NO: 3356770 - DNA, 25 bp, Homo sapien
aagttcagatcgctttggccgagtt

SEQ ID NO: 3356771 - DNA, 25 bp, Homo sapien
agcgccggctgacccaaggggagaa

SEQ ID NO: 3356772 - DNA, 25 bp, Homo sapien
atcgctttggccgagttgttctaac

SEQ ID NO: 3356773 - DNA, 25 bp, Homo sapien
tcagatcgctttggccgagttgttc

SEQ ID NO: 3356774 - DNA, 25 bp, Homo sapien
ctgaattcgcccacgccgggtctga

SEQ ID NO: 3356775 - DNA, 25 bp, Homo sapien
agagcctctagcttgtctctccctg

SEQ ID NO: 3356776 - DNA, 25 bp, Homo sapien
cctcgcgttgtcagccgcccgcaga

SEQ ID NO: 3356777 - DNA, 25 bp, Homo sapien
cgcccgcagaagtccgcagagcctc

SEQ ID NO: 3356778 - DNA, 25 bp, Homo sapien
tctagagactactcagcgttctcca

SEQ ID NO: 3356779 - DNA, 25 bp, Homo sapien
cccagactagttcccgttgcagcaa

SEQ ID NO: 3356780 - DNA, 25 bp, Homo sapien
tttacaccttctgagcgaactgccg

SEQ ID NO: 3356781 - DNA, 25 bp, Homo sapien
tgacggcctcaagaaatggcttctg

SEQ ID NO: 3356782 - DNA, 25 bp, Homo sapien
gacacttctctttaagagcacctcc

SEQ ID NO: 3356783 - DNA, 25 bp, Homo sapien
tcctcctgcgtaggccgcaggtcag

SEQ ID NO: 3356784 - DNA, 25 bp, Homo sapien
cgacaaaccccagaccatttgcagg

SEQ ID NO: 3356785 - DNA, 25 bp, Homo sapien
gggtgactggttggaaccactgagt

SEQ ID NO: 3356786 - DNA, 25 bp, Homo sapien
tacgaaaacaagtataacagctttg

SEQ ID NO: 3356787 - DNA, 25 bp, Homo sapien
ggcaatcatgataatttagtttact

SEQ ID NO: 3356788 - DNA, 25 bp, Homo sapien
actcttttgaggtatcagccattaa

SEQ ID NO: 3356789 - DNA, 25 bp, Homo sapien
aaagttagaggcaatcatgataatt

SEQ ID NO: 3356790 - DNA, 25 bp, Homo sapien
tagttttagaggacggaagtgcaca

SEQ ID NO: 3356791 - DNA, 25 bp, Homo sapien
ccaacggaaatgttagcggccctgt

SEQ ID NO: 3356792 - DNA, 25 bp, Homo sapien
catcttcaaagagggaacgaccaca

SEQ ID NO: 3356793 - DNA, 25 bp, Homo sapien
gaatctatgagacgacgggatccct

SEQ ID NO: 3356794 - DNA, 25 bp, Homo sapien
tgggtctgcatctggcgccttggcc

SEQ ID NO: 3356795 - DNA, 25 bp, Homo sapien
cacgggagtgtcctcttcgtattaa

SEQ ID NO: 3356796 - DNA, 25 bp, Homo sapien
atgcaaggagtcctcagagcggagc

SEQ ID NO: 3356797 - DNA, 25 bp, Homo sapien
taaaccggatgattccaaatgcaag

SEQ ID NO: 3356798 - DNA, 25 bp, Homo sapien
tttggttttcttgtcgttgctgctc

SEQ ID NO: 3356799 - DNA, 25 bp, Homo sapien
ctgcggccagcccgtccggcctttg

SEQ ID NO: 3356800 - DNA, 25 bp, Homo sapien
tggttttcttgtcgttgctgctcac

SEQ ID NO: 3356801 - DNA, 25 bp, Homo sapien
tgcggccagcccgtccggcctttgg

SEQ ID NO: 3356802 - DNA, 25 bp, Homo sapien
aggcgagggcgagaaaagtggaaag

SEQ ID NO: 3356803 - DNA, 25 bp, Homo sapien
gaaaggatacgatgggggagtccca

SEQ ID NO: 3356804 - DNA, 25 bp, Homo sapien
cagagaggatacctggttccacacc

SEQ ID NO: 3356805 - DNA, 25 bp, Homo sapien
tggttccacaccaacccggagcttc

SEQ ID NO: 3356806 - DNA, 25 bp, Homo sapien
gaaaaatagggcgaaggagcctctg

SEQ ID NO: 3356807 - DNA, 25 bp, Homo sapien
ttttcgagtcgtttatggaggagcg

SEQ ID NO: 3356808 - DNA, 25 bp, Homo sapien
tggagtcggcgctaagtctggtttc

SEQ ID NO: 3356809 - DNA, 25 bp, Homo sapien
gctcaacaaccggatccacaagttt

SEQ ID NO: 3356810 - DNA, 25 bp, Homo sapien
ggtaagatcaccagcgcaaagcatc

SEQ ID NO: 3356811 - DNA, 25 bp, Homo sapien
gatcgatcgcgacccagagttttca

SEQ ID NO: 3356812 - DNA, 25 bp, Homo sapien
gagcagcgataacccggaggtaaga

SEQ ID NO: 3356813 - DNA, 25 bp, Homo sapien
ccagaccagtgcgatcgcgatcgat

SEQ ID NO: 3356814 - DNA, 25 bp, Homo sapien
ctctctgcttatgccggaagccatc

SEQ ID NO: 3356815 - DNA, 25 bp, Homo sapien
cctcaactctctgcttatgccggaa

SEQ ID NO: 3356816 - DNA, 25 bp, Homo sapien
ccggaagccatccttacacaacctg

SEQ ID NO: 3356817 - DNA, 25 bp, Homo sapien
aactctctgcttatgccggaagcca

SEQ ID NO: 3356818 - DNA, 25 bp, Homo sapien
gatgcactcgcgcagttcggcgaag

SEQ ID NO: 3356819 - DNA, 25 bp, Homo sapien
attctggtcgtccttggccagcagg

SEQ ID NO: 3356820 - DNA, 25 bp, Homo sapien
tcctctttcacgtcggtcttcttga

SEQ ID NO: 3356821 - DNA, 25 bp, Homo sapien
tcggcgaaggcgctgttgatgctct

SEQ ID NO: 3356822 - DNA, 25 bp, Homo sapien
acatctcggggtggccgatgagcca

SEQ ID NO: 3356823 - DNA, 25 bp, Homo sapien
cccgtaatgggagtggtccaggccg

SEQ ID NO: 3356824 - DNA, 25 bp, Homo sapien
ggcggcgccgctggcatactcgggg

SEQ ID NO: 3356825 - DNA, 25 bp, Homo sapien
ggccatgctgtagtcggggggcgac

SEQ ID NO: 3356826 - DNA, 25 bp, Homo sapien
aacgggtagccctcgtggtgcacca

SEQ ID NO: 3356827 - DNA, 25 bp, Homo sapien
cggcggcaaacgggtagccctcgtg

SEQ ID NO: 3356828 - DNA, 25 bp, Homo sapien
tcgtggtgcaccaccgggtggtggg

SEQ ID NO: 3356829 - DNA, 25 bp, Homo sapien
gcaaacgggtagccctcgtggtgca

SEQ ID NO: 3356830 - DNA, 25 bp, Homo sapien
tctcgtgctcatacaaaggtgccgg

SEQ ID NO: 3356831 - DNA, 25 bp, Homo sapien
gcaccgaagctaacccggaatccag

SEQ ID NO: 3356832 - DNA, 25 bp, Homo sapien
gaggagccggtccagctgtgccggg

SEQ ID NO: 3356833 - DNA, 25 bp, Homo sapien
ctgctgcgcggaggcagaatcctct

SEQ ID NO: 3356834 - DNA, 25 bp, Homo sapien
ggagcaagcggattttcccagcaag

SEQ ID NO: 3356835 - DNA, 25 bp, Homo sapien
gattttagctgcgagtaacgtgtcc

SEQ ID NO: 3356836 - DNA, 25 bp, Homo sapien
tgagccttggagctcgaagaccgcg

SEQ ID NO: 3356837 - DNA, 25 bp, Homo sapien
ccgatctgggttcttgggcgcttat

SEQ ID NO: 3356838 - DNA, 25 bp, Homo sapien
tcggtgtggaaaacggtgtcaacag

SEQ ID NO: 3356839 - DNA, 25 bp, Homo sapien
aaacggtgtcaacaggagcccgcgg

SEQ ID NO: 3356840 - DNA, 25 bp, Homo sapien
ttcggtgtggaaaacggtgtcaaca

SEQ ID NO: 3356841 - DNA, 25 bp, Homo sapien
tggaaaacggtgtcaacaggagccc

SEQ ID NO: 3356842 - DNA, 25 bp, Homo sapien
taatcagcctttgggtcattcggtc

SEQ ID NO: 3356843 - DNA, 25 bp, Homo sapien
taaggatccggcagactgaggtctc

SEQ ID NO: 3356844 - DNA, 25 bp, Homo sapien
aaatcttgtgtgaactacgtcctcg

SEQ ID NO: 3356845 - DNA, 25 bp, Homo sapien
tacgtcctcggttgcaatgccatga

SEQ ID NO: 3356846 - DNA, 25 bp, Homo sapien
gatttaggtcgccagctttccagtc

SEQ ID NO: 3356847 - DNA, 25 bp, Homo sapien
tttccagtcactgcgatggccactg

SEQ ID NO: 3356848 - DNA, 25 bp, Homo sapien
gagcgggtcgcactgttagttcctg

SEQ ID NO: 3356849 - DNA, 25 bp, Homo sapien
tccgttccgttctagctgcctgaag

SEQ ID NO: 3356850 - DNA, 25 bp, Homo sapien
cacaaacagattggcggcaaaagcg

SEQ ID NO: 3356851 - DNA, 25 bp, Homo sapien
tagatcttgtcacgattgagaccaa

SEQ ID NO: 3356852 - DNA, 25 bp, Homo sapien
caattacgggttggcttgtggctac

SEQ ID NO: 3356853 - DNA, 25 bp, Homo sapien
gggcaaatctgcagccgctcgcttt

SEQ ID NO: 3356854 - DNA, 25 bp, Homo sapien
ctactgatcttcaggaagttcagtt

SEQ ID NO: 3356855 - DNA, 25 bp, Homo sapien
cttcaggaagttcagttccctgttt

SEQ ID NO: 3356856 - DNA, 25 bp, Homo sapien
tgatcttcaggaagttcagttccct

SEQ ID NO: 3356857 - DNA, 25 bp, Homo sapien
tcaggaagttcagttccctgttttc

SEQ ID NO: 3356858 - DNA, 25 bp, Homo sapien
gaggcgatatactttttatgagaac

SEQ ID NO: 3356859 - DNA, 25 bp, Homo sapien
tataaacttattggtaatgaggcga

SEQ ID NO: 3356860 - DNA, 25 bp, Homo sapien
tatgagaacatatcaaaccatagac

SEQ ID NO: 3356861 - DNA, 25 bp, Homo sapien
aaaccatagacattgagatccagca

SEQ ID NO: 3356862 - DNA, 25 bp, Homo sapien
gagcttctgggctgaacttaatctc

SEQ ID NO: 3356863 - DNA, 25 bp, Homo sapien
gattctcttgtaggtcattcctgac

SEQ ID NO: 3356864 - DNA, 25 bp, Homo sapien
cagagggtccattccaatgagtgag

SEQ ID NO: 3356865 - DNA, 25 bp, Homo sapien
aatgttgtgcctggagatgtgaccc

SEQ ID NO: 3356866 - DNA, 25 bp, Homo sapien
ccgcagcataactgtggaaaggatc

SEQ ID NO: 3356867 - DNA, 25 bp, Homo sapien
agctttgccgcagcataactgtgga

SEQ ID NO: 3356868 - DNA, 25 bp, Homo sapien
tttgccgcagcataactgtggaaag

SEQ ID NO: 3356869 - DNA, 25 bp, Homo sapien
ggaaaggatcttgatgaatttggac

SEQ ID NO: 3356870 - DNA, 25 bp, Homo sapien
aatatggccccacaacatgtattta

SEQ ID NO: 3356871 - DNA, 25 bp, Homo sapien
taattgtcaatatggccccacaaca

SEQ ID NO: 3356872 - DNA, 25 bp, Homo sapien
tctcattaattgtcaatatggcccc

SEQ ID NO: 3356873 - DNA, 25 bp, Homo sapien
atttatgtgattgtttattagtgtc

SEQ ID NO: 3356874 - DNA, 25 bp, Homo sapien
gctattaaaccaaggcctccaactg

SEQ ID NO: 3356875 - DNA, 25 bp, Homo sapien
tgtactattacccttggcccagtgc

SEQ ID NO: 3356876 - DNA, 25 bp, Homo sapien
tttaaataacagttcaggtctgcta

SEQ ID NO: 3356877 - DNA, 25 bp, Homo sapien
gcccttgtgtactattacccttggc

SEQ ID NO: 3356878 - DNA, 25 bp, Homo sapien
cagctgcttagttggagtggctgac

SEQ ID NO: 3356879 - DNA, 25 bp, Homo sapien
agctgcttagttggagtggctgaca

SEQ ID NO: 3356880 - DNA, 25 bp, Homo sapien
attgagaaagatgacagacttccaa

SEQ ID NO: 3356881 - DNA, 25 bp, Homo sapien
gagtattatatgagaagaatcagct

SEQ ID NO: 3356882 - DNA, 25 bp, Homo sapien
ctgagactgtgcctaatatgtgaac

SEQ ID NO: 3356883 - DNA, 25 bp, Homo sapien
cagcaaaaacaattacactggtgat

SEQ ID NO: 3356884 - DNA, 25 bp, Homo sapien
cagaaaagtagctacacaatgcatt

SEQ ID NO: 3356885 - DNA, 25 bp, Homo sapien
catctatcatgttaaaacgtgcatt

SEQ ID NO: 3356886 - DNA, 25 bp, Homo sapien
aaaagtagctacacaatgcattgca

SEQ ID NO: 3356887 - DNA, 25 bp, Homo sapien
cacaatgcattgcatctatcatgtt

SEQ ID NO: 3356888 - DNA, 25 bp, Homo sapien
tgtacaagagatagactaagaacaa

SEQ ID NO: 3356889 - DNA, 25 bp, Homo sapien
aaaacaaacatcaattgttatacac

SEQ ID NO: 3356890 - DNA, 25 bp, Homo sapien
tttgtacaagagatagactaagaac

SEQ ID NO: 3356891 - DNA, 25 bp, Homo sapien
aacaaacatcaattgttatacacta

SEQ ID NO: 3356892 - DNA, 25 bp, Homo sapien
ttgagtaataaagcaaggctcttct

SEQ ID NO: 3356893 - DNA, 25 bp, Homo sapien
ttaggaaatcgtgaagataattgag

SEQ ID NO: 3356894 - DNA, 25 bp, Homo sapien
gagccacttcataatcgctggcact

SEQ ID NO: 3356895 - DNA, 25 bp, Homo sapien
agataattgagtaataaagcaaggc

SEQ ID NO: 3356896 - DNA, 25 bp, Homo sapien
tcaggagatgtggcactccatacac

SEQ ID NO: 3356897 - DNA, 25 bp, Homo sapien
tgctccaatttgtacagataatctc

SEQ ID NO: 3356898 - DNA, 25 bp, Homo sapien
tttgtacagataatctcaggagatg

SEQ ID NO: 3356899 - DNA, 25 bp, Homo sapien
caatttgtacagataatctcaggag

SEQ ID NO: 3356900 - DNA, 25 bp, Homo sapien
caatctgcaagaatttcggcatact

SEQ ID NO: 3356901 - DNA, 25 bp, Homo sapien
ggacatgggtgcatcgggacaatct

SEQ ID NO: 3356902 - DNA, 25 bp, Homo sapien
caaatttgttgagtagctgggtgcc

SEQ ID NO: 3356903 - DNA, 25 bp, Homo sapien
ggtgcatcgggacaatctgcaagaa

SEQ ID NO: 3356904 - DNA, 25 bp, Homo sapien
ctcggcaggaagatagaagagctgt

SEQ ID NO: 3356905 - DNA, 25 bp, Homo sapien
gctgtttttgcctggtaattaagtc

SEQ ID NO: 3356906 - DNA, 25 bp, Homo sapien
agagctgtttttgcctggtaattaa

SEQ ID NO: 3356907 - DNA, 25 bp, Homo sapien
cggcaggaagatagaagagctgttt

SEQ ID NO: 3356908 - DNA, 25 bp, Homo sapien
tcattttcaacagtaggatctacct

SEQ ID NO: 3356909 - DNA, 25 bp, Homo sapien
cttttctttcgaggaggctggggag

SEQ ID NO: 3356910 - DNA, 25 bp, Homo sapien
ggttttagctcttcaggaatcttta

SEQ ID NO: 3356911 - DNA, 25 bp, Homo sapien
cagtaggatctacctgggccctttt

SEQ ID NO: 3356912 - DNA, 25 bp, Homo sapien
aagttctcgctgtttctgcaaattg

SEQ ID NO: 3356913 - DNA, 25 bp, Homo sapien
tgaagttctcgctgtttctgcaaat

SEQ ID NO: 3356914 - DNA, 25 bp, Homo sapien
ctttacacactttgcatcataaagc

SEQ ID NO: 3356915 - DNA, 25 bp, Homo sapien
tttaggcttcgggtcctgcttcagc

SEQ ID NO: 3356916 - DNA, 25 bp, Homo sapien
taggcttcgggtcctgcttcagcac

SEQ ID NO: 3356917 - DNA, 25 bp, Homo sapien
acactttgcatcataaagcagaggc

SEQ ID NO: 3356918 - DNA, 25 bp, Homo sapien
gtccatgacaacctccggtggggag

SEQ ID NO: 3356919 - DNA, 25 bp, Homo sapien
ggacaactgcctataaaactaagac

SEQ ID NO: 3356920 - DNA, 25 bp, Homo sapien
aaactaagacttctgacactgggct

SEQ ID NO: 3356921 - DNA, 25 bp, Homo sapien
aagtcagggtctccaatgggctacc

SEQ ID NO: 3356922 - DNA, 25 bp, Homo sapien
ttgccacacaacacgatggagatgt

SEQ ID NO: 3356923 - DNA, 25 bp, Homo sapien
tggagatgttttcacacgctctcac

SEQ ID NO: 3356924 - DNA, 25 bp, Homo sapien
tgttgccacacaacacgatggagat

SEQ ID NO: 3356925 - DNA, 25 bp, Homo sapien
aacacgatggagatgttttcacacg

SEQ ID NO: 3356926 - DNA, 25 bp, Homo sapien
gccagataggcacatgtaagtaact

SEQ ID NO: 3356927 - DNA, 25 bp, Homo sapien
ctctatgccagataggcacatgtaa

SEQ ID NO: 3356928 - DNA, 25 bp, Homo sapien
atgccagataggcacatgtaagtaa

SEQ ID NO: 3356929 - DNA, 25 bp, Homo sapien
ctatgccagataggcacatgtaagt

SEQ ID NO: 3356930 - DNA, 25 bp, Homo sapien
agtctaccgaatttctccctgctgg

SEQ ID NO: 3356931 - DNA, 25 bp, Homo sapien
gtctaccgaatttctccctgctggc

SEQ ID NO: 3356932 - DNA, 25 bp, Homo sapien
cagtctaccgaatttctccctgctg

SEQ ID NO: 3356933 - DNA, 25 bp, Homo sapien
ctcagtctaccgaatttctccctgc

SEQ ID NO: 3356934 - DNA, 25 bp, Homo sapien
tatagtgtgacctaccacatgctgc

SEQ ID NO: 3356935 - DNA, 25 bp, Homo sapien
tgtgtatagtgtgacctaccacatg

SEQ ID NO: 3356936 - DNA, 25 bp, Homo sapien
ttgtgtatagtgtgacctaccacat

SEQ ID NO: 3356937 - DNA, 25 bp, Homo sapien
tgtatagtgtgacctaccacatgct

SEQ ID NO: 3356938 - DNA, 25 bp, Homo sapien
cttctgtgctgctttactgcagact

SEQ ID NO: 3356939 - DNA, 25 bp, Homo sapien
tataatgttgtcagacttctgtgct

SEQ ID NO: 3356940 - DNA, 25 bp, Homo sapien
ctgcagactaggtttatctgaaaac

SEQ ID NO: 3356941 - DNA, 25 bp, Homo sapien
aatataatgttgtcagacttctgtg

SEQ ID NO: 3356942 - DNA, 25 bp, Homo sapien
ccccaaactgttgcgctttcccaga

SEQ ID NO: 3356943 - DNA, 25 bp, Homo sapien
cccccaaactgttgcgctttcccag

SEQ ID NO: 3356944 - DNA, 25 bp, Homo sapien
gcacccccaaactgttgcgctttcc

SEQ ID NO: 3356945 - DNA, 25 bp, Homo sapien
tcgccgtgaagtggacatgcatgtg

SEQ ID NO: 3356946 - DNA, 25 bp, Homo sapien
tagtacatgggatacaagcttcatc

SEQ ID NO: 3356947 - DNA, 25 bp, Homo sapien
tgttcagaacagctgctcgccgtga

SEQ ID NO: 3356948 - DNA, 25 bp, Homo sapien
catgcatgtgctagaacatctttcc

SEQ ID NO: 3356949 - DNA, 25 bp, Homo sapien
tcgtcccatgaccacctctctgctg

SEQ ID NO: 3356950 - DNA, 25 bp, Homo sapien
gctgctgagacaatcggttctcgtc

SEQ ID NO: 3356951 - DNA, 25 bp, Homo sapien
gctgtctcagagactatatctcttt

SEQ ID NO: 3356952 - DNA, 25 bp, Homo sapien
gacaatcggttctcgtcccatgacc

SEQ ID NO: 3356953 - DNA, 25 bp, Homo sapien
aatgattctgagtccgtggcattgc

SEQ ID NO: 3356954 - DNA, 25 bp, Homo sapien
ctaacaaccagttagcagagctgaa

SEQ ID NO: 3356955 - DNA, 25 bp, Homo sapien
taacaaccagttagcagagctgaat

SEQ ID NO: 3356956 - DNA, 25 bp, Homo sapien
ttctgagtccgtggcattgcataaa

SEQ ID NO: 3356957 - DNA, 25 bp, Homo sapien
gtgctgaatgaagactgttttggcc

SEQ ID NO: 3356958 - DNA, 25 bp, Homo sapien
tttgtttggcagaaaccactctagt

SEQ ID NO: 3356959 - DNA, 25 bp, Homo sapien
tggcagaaaccactctagtgctgaa

SEQ ID NO: 3356960 - DNA, 25 bp, Homo sapien
aatgaagactgttttggccgatcca

SEQ ID NO: 3356961 - DNA, 25 bp, Homo sapien
ttcaaataaagcacgaatctgatgg

SEQ ID NO: 3356962 - DNA, 25 bp, Homo sapien
catattgcaagttgccctgcaggtc

SEQ ID NO: 3356963 - DNA, 25 bp, Homo sapien
cacgaatctgatggtcatattgcaa

SEQ ID NO: 3356964 - DNA, 25 bp, Homo sapien
tctgatggtcatattgcaagttgcc

SEQ ID NO: 3356965 - DNA, 25 bp, Homo sapien
acactgaaaatagaacctcgaagca

SEQ ID NO: 3356966 - DNA, 25 bp, Homo sapien
atagaacctcgaagcaaagggacgg

SEQ ID NO: 3356967 - DNA, 25 bp, Homo sapien
ctgaaaatagaacctcgaagcaaag

SEQ ID NO: 3356968 - DNA, 25 bp, Homo sapien
ctggcttcactgtgaatctctttta

SEQ ID NO: 3356969 - DNA, 25 bp, Homo sapien
gcagggtttctgctcgctgcccttg

SEQ ID NO: 3356970 - DNA, 25 bp, Homo sapien
tggctttgaaattacccagcagggt

SEQ ID NO: 3356971 - DNA, 25 bp, Homo sapien
gaaatcatactgtagggctagcagc

SEQ ID NO: 3356972 - DNA, 25 bp, Homo sapien
taccttctactggtgcccttggcag

SEQ ID NO: 3356973 - DNA, 25 bp, Homo sapien
tttgaaagtccatgtaggctttgcc

SEQ ID NO: 3356974 - DNA, 25 bp, Homo sapien
gcatatgcccttttgaaagtccatg

SEQ ID NO: 3356975 - DNA, 25 bp, Homo sapien
ttgaaagtccatgtaggctttgcca

SEQ ID NO: 3356976 - DNA, 25 bp, Homo sapien
gccttcctgaagcatatgccctttt

SEQ ID NO: 3356977 - DNA, 25 bp, Homo sapien
ggagaatcaggcaatatgagccact

SEQ ID NO: 3356978 - DNA, 25 bp, Homo sapien
tatgtccaggaataggttgaagagg

SEQ ID NO: 3356979 - DNA, 25 bp, Homo sapien
aaagtgatgggatcaggcagtcgtt

SEQ ID NO: 3356980 - DNA, 25 bp, Homo sapien
caggcagtcgtttaggaactttagt

SEQ ID NO: 3356981 - DNA, 25 bp, Homo sapien
tctttcagagcctgggatgttaaaa

SEQ ID NO: 3356982 - DNA, 25 bp, Homo sapien
ttcagagcctgggatgttaaaatac

SEQ ID NO: 3356983 - DNA, 25 bp, Homo sapien
ctctttcagagcctgggatgttaaa

SEQ ID NO: 3356984 - DNA, 25 bp, Homo sapien
ctttcagagcctgggatgttaaaat

SEQ ID NO: 3356985 - DNA, 25 bp, Homo sapien
tattttcacctcataaaagtacttc

SEQ ID NO: 3356986 - DNA, 25 bp, Homo sapien
cacctcataaaagtacttctgcatg

SEQ ID NO: 3356987 - DNA, 25 bp, Homo sapien
cataaaagtacttctgcatgttcac

SEQ ID NO: 3356988 - DNA, 25 bp, Homo sapien
tttcacctcataaaagtacttctgc

SEQ ID NO: 3356989 - DNA, 25 bp, Homo sapien
aaccaaattaacatagctgtatcct

SEQ ID NO: 3356990 - DNA, 25 bp, Homo sapien
aaaccaaattaacatagctgtatcc

SEQ ID NO: 3356991 - DNA, 25 bp, Homo sapien
taattgctccttcaaccaagatcat

SEQ ID NO: 3356992 - DNA, 25 bp, Homo sapien
aaggctccttaattctaattgctcc

SEQ ID NO: 3356993 - DNA, 25 bp, Homo sapien
tgtaattgttggataaggctcctta

SEQ ID NO: 3356994 - DNA, 25 bp, Homo sapien
ctattataattgcaataagtgctgt

SEQ ID NO: 3356995 - DNA, 25 bp, Homo sapien
gacaaagcaaagatctctttcgacc

SEQ ID NO: 3356996 - DNA, 25 bp, Homo sapien
aagcaaagatctctttcgacctcag

SEQ ID NO: 3356997 - DNA, 25 bp, Homo sapien
agatatgacaaagcaaagatctctt

SEQ ID NO: 3356998 - DNA, 25 bp, Homo sapien
caaagatctctttcgacctcagttt

SEQ ID NO: 3356999 - DNA, 25 bp, Homo sapien
ttatacgtgtacactggttctgctc

SEQ ID NO: 3357000 - DNA, 25 bp, Homo sapien
tatacgtgtacactggttctgctcc

SEQ ID NO: 3357001 - DNA, 25 bp, Homo sapien
cttatacgtgtacactggttctgct

SEQ ID NO: 3357002 - DNA, 25 bp, Homo sapien
atacgtgtacactggttctgctcca

SEQ ID NO: 3357003 - DNA, 25 bp, Homo sapien
ttggaccctgctgctgactgctgat

SEQ ID NO: 3357004 - DNA, 25 bp, Homo sapien
ggagactgtgcatagctccacgcca

SEQ ID NO: 3357005 - DNA, 25 bp, Homo sapien
ctgttctagtcttggagactgtgca

SEQ ID NO: 3357006 - DNA, 25 bp, Homo sapien
cacgccagcactcgactgaagtcat

SEQ ID NO: 3357007 - DNA, 25 bp, Homo sapien
tcagctagactggagggatcatgtc

SEQ ID NO: 3357008 - DNA, 25 bp, Homo sapien
agtttcaacctgctgtacgtcatca

SEQ ID NO: 3357009 - DNA, 25 bp, Homo sapien
cccacacaccagagaaaggccagtt

SEQ ID NO: 3357010 - DNA, 25 bp, Homo sapien
gactcctgtgagtgttgaggcccac

SEQ ID NO: 3357011 - DNA, 25 bp, Homo sapien
tcaaacaggtgcccccagcccgtac

SEQ ID NO: 3357012 - DNA, 25 bp, Homo sapien
ctggtgcaccgaactttccccaagt

SEQ ID NO: 3357013 - DNA, 25 bp, Homo sapien
tccccaagtacataatagcatccca

SEQ ID NO: 3357014 - DNA, 25 bp, Homo sapien
ttccccaagtacataatagcatccc

SEQ ID NO: 3357015 - DNA, 25 bp, Homo sapien
tttgcgtttttgtactagagtgttc

SEQ ID NO: 3357016 - DNA, 25 bp, Homo sapien
ttcatatctagtttggtcagctttg

SEQ ID NO: 3357017 - DNA, 25 bp, Homo sapien
tagagtgttcatatctagtttggtc

SEQ ID NO: 3357018 - DNA, 25 bp, Homo sapien
gcgtttttgtactagagtgttcata

SEQ ID NO: 3357019 - DNA, 25 bp, Homo sapien
cagttatacatgtaaaacagatata

SEQ ID NO: 3357020 - DNA, 25 bp, Homo sapien
tcagttatacatgtaaaacagatat

SEQ ID NO: 3357021 - DNA, 25 bp, Homo sapien
gttatacatgtaaaacagatataca

SEQ ID NO: 3357022 - DNA, 25 bp, Homo sapien
aatcagttatacatgtaaaacagat

SEQ ID NO: 3357023 - DNA, 25 bp, Homo sapien
tagatctctgtagggcagagggaaa

SEQ ID NO: 3357024 - DNA, 25 bp, Homo sapien
agggtatacgacaatttccacacag

SEQ ID NO: 3357025 - DNA, 25 bp, Homo sapien
gttttccaatgatcatggaaggacc

SEQ ID NO: 3357026 - DNA, 25 bp, Homo sapien
catttttcctagaacagggtatacg

SEQ ID NO: 3357027 - DNA, 25 bp, Homo sapien
tcctgtctcagaacctgttgtctgg

SEQ ID NO: 3357028 - DNA, 25 bp, Homo sapien
tacagcgtatgtgattcctgttcct

SEQ ID NO: 3357029 - DNA, 25 bp, Homo sapien
agatccccacggtgtggtgtttaca

SEQ ID NO: 3357030 - DNA, 25 bp, Homo sapien
agttcttgtcgcattgttcctgcag

SEQ ID NO: 3357031 - DNA, 25 bp, Homo sapien
agatcagggattgaagagtggctta

SEQ ID NO: 3357032 - DNA, 25 bp, Homo sapien
agtggcttagaagtgtactgagaga

SEQ ID NO: 3357033 - DNA, 25 bp, Homo sapien
tttggataatttagatcagggattg

SEQ ID NO: 3357034 - DNA, 25 bp, Homo sapien
ggctcggaatgttttgatggttttc

SEQ ID NO: 3357035 - DNA, 25 bp, Homo sapien
agtttgcaaatttgtgatgtcttag

SEQ ID NO: 3357036 - DNA, 25 bp, Homo sapien
gatctatgtctcaggtgtgaaggct

SEQ ID NO: 3357037 - DNA, 25 bp, Homo sapien
cttcattaaatttagtagtttgcaa

SEQ ID NO: 3357038 - DNA, 25 bp, Homo sapien
tgtcttagatctatgtctcaggtgt

SEQ ID NO: 3357039 - DNA, 25 bp, Homo sapien
gactgataatttcaccaaggatgat

SEQ ID NO: 3357040 - DNA, 25 bp, Homo sapien
gatttccaatgcctagtaccagtaa

SEQ ID NO: 3357041 - DNA, 25 bp, Homo sapien
tatatttgggaaacacgcactgaca

SEQ ID NO: 3357042 - DNA, 25 bp, Homo sapien
aatattttgcaccatcatattgtta

SEQ ID NO: 3357043 - DNA, 25 bp, Homo sapien
gacttgtcttatcaaagtcagtggg

SEQ ID NO: 3357044 - DNA, 25 bp, Homo sapien
gacacgcagggctagctttcttggc

SEQ ID NO: 3357045 - DNA, 25 bp, Homo sapien
tcccacgtgcattcagacacgcagg

SEQ ID NO: 3357046 - DNA, 25 bp, Homo sapien
gagtagagattgtgaatcccctccc

SEQ ID NO: 3357047 - DNA, 25 bp, Homo sapien
tttcttcctgcggaaatgtaattgc

SEQ ID NO: 3357048 - DNA, 25 bp, Homo sapien
tcctgcggaaatgtaattgcagaag

SEQ ID NO: 3357049 - DNA, 25 bp, Homo sapien
tcttcctgcggaaatgtaattgcag

SEQ ID NO: 3357050 - DNA, 25 bp, Homo sapien
cttcctgcggaaatgtaattgcaga

SEQ ID NO: 3357051 - DNA, 25 bp, Homo sapien
tgacaggaaacccatggccttccaa

SEQ ID NO: 3357052 - DNA, 25 bp, Homo sapien
tttaatgacaggaaacccatggcct

SEQ ID NO: 3357053 - DNA, 25 bp, Homo sapien
gaaacccatggccttccaaatgaat

SEQ ID NO: 3357054 - DNA, 25 bp, Homo sapien
caggaaacccatggccttccaaatg

SEQ ID NO: 3357055 - DNA, 25 bp, Homo sapien
cagtcaaacttagcatctctcaagc

SEQ ID NO: 3357056 - DNA, 25 bp, Homo sapien
tcctgagatctccattacagtcaaa

SEQ ID NO: 3357057 - DNA, 25 bp, Homo sapien
tccattacagtcaaacttagcatct

SEQ ID NO: 3357058 - DNA, 25 bp, Homo sapien
ttccaacgtcttttcctgagatctc

SEQ ID NO: 3357059 - DNA, 25 bp, Homo sapien
cagtacagtctttctcgatgtgctc

SEQ ID NO: 3357060 - DNA, 25 bp, Homo sapien
cactgctgcatatttcttggatcta

SEQ ID NO: 3357061 - DNA, 25 bp, Homo sapien
ggtctgggtcctcataagttctatc

SEQ ID NO: 3357062 - DNA, 25 bp, Homo sapien
ctatacaaggccgttgatccccact

SEQ ID NO: 3357063 - DNA, 25 bp, Homo sapien
atagggtgcttccagggtaaggcat

SEQ ID NO: 3357064 - DNA, 25 bp, Homo sapien
gggtgcttccagggtaaggcataaa

SEQ ID NO: 3357065 - DNA, 25 bp, Homo sapien
agggtgcttccagggtaaggcataa

SEQ ID NO: 3357066 - DNA, 25 bp, Homo sapien
tagggtgcttccagggtaaggcata

SEQ ID NO: 3357067 - DNA, 25 bp, Homo sapien
tctgccaacaaagggttctgtgggt

SEQ ID NO: 3357068 - DNA, 25 bp, Homo sapien
catgtgttccactatcaatttttgc

SEQ ID NO: 3357069 - DNA, 25 bp, Homo sapien
ctttcttgttcacgaaagaataata

SEQ ID NO: 3357070 - DNA, 25 bp, Homo sapien
tcttcatggacggatcttgtggaac

SEQ ID NO: 3357071 - DNA, 25 bp, Homo sapien
taaatctcttgttcccagccaagcc

SEQ ID NO: 3357072 - DNA, 25 bp, Homo sapien
ttgcagcagtcttattaggaaaacc

SEQ ID NO: 3357073 - DNA, 25 bp, Homo sapien
gcagcagtcttattaggaaaaccta

SEQ ID NO: 3357074 - DNA, 25 bp, Homo sapien
atttgcagcagtcttattaggaaaa

SEQ ID NO: 3357075 - DNA, 25 bp, Homo sapien
gacatggactacttgattcagagac

SEQ ID NO: 3357076 - DNA, 25 bp, Homo sapien
tatgtcaccataagctttagggagg

SEQ ID NO: 3357077 - DNA, 25 bp, Homo sapien
tgactaacacttctcataagggctg

SEQ ID NO: 3357078 - DNA, 25 bp, Homo sapien
tatcgaaaaatctacctttgggcca

SEQ ID NO: 3357079 - DNA, 25 bp, Homo sapien
agcagagatggccaaatcctgactt

SEQ ID NO: 3357080 - DNA, 25 bp, Homo sapien
tcgtgagaggtggaatggcaagagc

SEQ ID NO: 3357081 - DNA, 25 bp, Homo sapien
ggccaaatcctgacttgatatttgg

SEQ ID NO: 3357082 - DNA, 25 bp, Homo sapien
tttgaggatagagtcgtgagaggtg

SEQ ID NO: 3357083 - DNA, 25 bp, Homo sapien
gcttttacctctgggctgttgtacc

SEQ ID NO: 3357084 - DNA, 25 bp, Homo sapien
taagcataaacatcgataacactga

SEQ ID NO: 3357085 - DNA, 25 bp, Homo sapien
tgtccctgagtacaagaggctaaat

SEQ ID NO: 3357086 - DNA, 25 bp, Homo sapien
cactgacatgtctgttagcttttac

SEQ ID NO: 3357087 - DNA, 25 bp, Homo sapien
tatatctacaagacaaatggactcc

SEQ ID NO: 3357088 - DNA, 25 bp, Homo sapien
tgagagcagcacaagtcactaaggt

SEQ ID NO: 3357089 - DNA, 25 bp, Homo sapien
taaggtacacacaactccttgggcc

SEQ ID NO: 3357090 - DNA, 25 bp, Homo sapien
tgtagagataagatgaagggtaact

SEQ ID NO: 3357091 - DNA, 25 bp, Homo sapien
cctatgaaaccctagagaacctgca

SEQ ID NO: 3357092 - DNA, 25 bp, Homo sapien
acagctaagggtcataaggcggcac

SEQ ID NO: 3357093 - DNA, 25 bp, Homo sapien
tctggccttcgaggaccatgccaaa

SEQ ID NO: 3357094 - DNA, 25 bp, Homo sapien
tcaaaagctgtaggatgcaacccac

SEQ ID NO: 3357095 - DNA, 25 bp, Homo sapien
ggttccgatgaaaactctttctgaa

SEQ ID NO: 3357096 - DNA, 25 bp, Homo sapien
agggttccgatgaaaactctttctg

SEQ ID NO: 3357097 - DNA, 25 bp, Homo sapien
gacttgaaccaagggttccgatgaa

SEQ ID NO: 3357098 - DNA, 25 bp, Homo sapien
aggacttgaaccaagggttccgatg

SEQ ID NO: 3357099 - DNA, 25 bp, Homo sapien
gaaaggattgattgaggctgggaga

SEQ ID NO: 3357100 - DNA, 25 bp, Homo sapien
ggtgaaaggattgattgaggctggg

SEQ ID NO: 3357101 - DNA, 25 bp, Homo sapien
gattgattgaggctgggagatcgag

SEQ ID NO: 3357102 - DNA, 25 bp, Homo sapien
gactgggtgacagaatgcgatccta

SEQ ID NO: 3357103 - DNA, 25 bp, Homo sapien
aatgcagatgtgattcctatggatg

SEQ ID NO: 3357104 - DNA, 25 bp, Homo sapien
tttctccttatgcagttacaggaat

SEQ ID NO: 3357105 - DNA, 25 bp, Homo sapien
gatgtgattcctatggatgagggta

SEQ ID NO: 3357106 - DNA, 25 bp, Homo sapien
accttctttctccttatgcagttac

SEQ ID NO: 3357107 - DNA, 25 bp, Homo sapien
tcctgacacacaatatggtgatttg

SEQ ID NO: 3357108 - DNA, 25 bp, Homo sapien
tttgtaggtgcgttgtttttgtgtg

SEQ ID NO: 3357109 - DNA, 25 bp, Homo sapien
gtgtgtcctccatttgatctcaagt

SEQ ID NO: 3357110 - DNA, 25 bp, Homo sapien
tattcattgaagtatcttgtatctt

SEQ ID NO: 3357111 - DNA, 25 bp, Homo sapien
aaagtcttgactgtgttatgaggcc

SEQ ID NO: 3357112 - DNA, 25 bp, Homo sapien
tggaacacttgctctagacacctgg

SEQ ID NO: 3357113 - DNA, 25 bp, Homo sapien
gagaggccaacgtgaaaaggaacca

SEQ ID NO: 3357114 - DNA, 25 bp, Homo sapien
aaaggacacacggtttctggcctgt

SEQ ID NO: 3357115 - DNA, 25 bp, Homo sapien
agcaggtgctggtaccatgcttctt

SEQ ID NO: 3357116 - DNA, 25 bp, Homo sapien
gtgctggtaccatgcttcttgtaca

SEQ ID NO: 3357117 - DNA, 25 bp, Homo sapien
caggtgctggtaccatgcttcttgt

SEQ ID NO: 3357118 - DNA, 25 bp, Homo sapien
gctggtaccatgcttcttgtacaac

SEQ ID NO: 3357119 - DNA, 25 bp, Homo sapien
tagtcagtgctccatgacggggaca

SEQ ID NO: 3357120 - DNA, 25 bp, Homo sapien
catgacggggacagatctgcctccc

SEQ ID NO: 3357121 - DNA, 25 bp, Homo sapien
ttcttcctcacgtaagagttcaggg

SEQ ID NO: 3357122 - DNA, 25 bp, Homo sapien
tcctcacgtaagagttcagggaaga

SEQ ID NO: 3357123 - DNA, 25 bp, Homo sapien
gcagaacccgagcttaggtatttta

SEQ ID NO: 3357124 - DNA, 25 bp, Homo sapien
gctcataagggcactactaccagga

SEQ ID NO: 3357125 - DNA, 25 bp, Homo sapien
cttcaagttcatagggttaaacagg

SEQ ID NO: 3357126 - DNA, 25 bp, Homo sapien
taccaggagtcgctgaaggcagaac

SEQ ID NO: 3357127 - DNA, 25 bp, Homo sapien
tcatactgaactggactgctgcgtt

SEQ ID NO: 3357128 - DNA, 25 bp, Homo sapien
tttcatactgaactggactgctgcg

SEQ ID NO: 3357129 - DNA, 25 bp, Homo sapien
tctttcatactgaactggactgctg

SEQ ID NO: 3357130 - DNA, 25 bp, Homo sapien
aactctttcatactgaactggactg

SEQ ID NO: 3357131 - DNA, 25 bp, Homo sapien
gaggggctaccaaatggaactccaa

SEQ ID NO: 3357132 - DNA, 25 bp, Homo sapien
ttgccagaacgggcaagggccacag

SEQ ID NO: 3357133 - DNA, 25 bp, Homo sapien
ctgtgttgccagaacgggcaagggc

SEQ ID NO: 3357134 - DNA, 25 bp, Homo sapien
agccatggaagaggggctaccaaat

SEQ ID NO: 3357135 - DNA, 25 bp, Homo sapien
ctgctgatcactcgccttggcattg

SEQ ID NO: 3357136 - DNA, 25 bp, Homo sapien
cactggctgctgatcactcgccttg

SEQ ID NO: 3357137 - DNA, 25 bp, Homo sapien
gcattgattggcctagagcatgcat

SEQ ID NO: 3357138 - DNA, 25 bp, Homo sapien
tggctgctgatcactcgccttggca

SEQ ID NO: 3357139 - DNA, 25 bp, Homo sapien
taaagttggcattgaccacagggtg

SEQ ID NO: 3357140 - DNA, 25 bp, Homo sapien
gagggctttgagacaatcactctgg

SEQ ID NO: 3357141 - DNA, 25 bp, Homo sapien
aatggcgttcaaactgcagtggacc

SEQ ID NO: 3357142 - DNA, 25 bp, Homo sapien
aatgttgtaagcttcccagaaggga

SEQ ID NO: 3357143 - DNA, 25 bp, Homo sapien
gagcaatcctcccacgttagccttc

SEQ ID NO: 3357144 - DNA, 25 bp, Homo sapien
ctacagtcatgcacccccacgccta

SEQ ID NO: 3357145 - DNA, 25 bp, Homo sapien
gtatgttttgtagaaacaggctctc

SEQ ID NO: 3357146 - DNA, 25 bp, Homo sapien
tttgtatgttttgtagaaacaggct

SEQ ID NO: 3357147 - DNA, 25 bp, Homo sapien
ggtggccagcgagttggaaacctga

SEQ ID NO: 3357148 - DNA, 25 bp, Homo sapien
ttaggtggccagcgagttggaaacc

SEQ ID NO: 3357149 - DNA, 25 bp, Homo sapien
taggtggccagcgagttggaaacct

SEQ ID NO: 3357150 - DNA, 25 bp, Homo sapien
gtggccagcgagttggaaacctgag

SEQ ID NO: 3357151 - DNA, 25 bp, Homo sapien
gagctggcacacctgaactttggca

SEQ ID NO: 3357152 - DNA, 25 bp, Homo sapien
aattagactcggtatttctgaacaa

SEQ ID NO: 3357153 - DNA, 25 bp, Homo sapien
aataaaatacatcaggatcctttga

SEQ ID NO: 3357154 - DNA, 25 bp, Homo sapien
actttggcacagtcaaataaatcca

SEQ ID NO: 3357155 - DNA, 25 bp, Homo sapien
ctacacattgtaattcttgcccttt

SEQ ID NO: 3357156 - DNA, 25 bp, Homo sapien
ttctcattggctagaactgtgtcac

SEQ ID NO: 3357157 - DNA, 25 bp, Homo sapien
catctgtcatagcaagagaggcctg

SEQ ID NO: 3357158 - DNA, 25 bp, Homo sapien
aactgtgtcacatggcatctgtcat

SEQ ID NO: 3357159 - DNA, 25 bp, Homo sapien
gtgttctggttacttctcattggct

SEQ ID NO: 3357160 - DNA, 25 bp, Homo sapien
aaagcaaatctctaggggatgggat

SEQ ID NO: 3357161 - DNA, 25 bp, Homo sapien
agcaaatctctaggggatgggatga

SEQ ID NO: 3357162 - DNA, 25 bp, Homo sapien
tccttccaatggagaatgatgatgt

SEQ ID NO: 3357163 - DNA, 25 bp, Homo sapien
tccaatggagaatgatgatgtagaa

SEQ ID NO: 3357164 - DNA, 25 bp, Homo sapien
tccagttttgacacatttcacacag

SEQ ID NO: 3357165 - DNA, 25 bp, Homo sapien
acaagtttatgtgcttcagacaaac

SEQ ID NO: 3357166 - DNA, 25 bp, Homo sapien
cacacagttatcacacccactgtcc

SEQ ID NO: 3357167 - DNA, 25 bp, Homo sapien
aagtttatgtgcttcagacaaacca

SEQ ID NO: 3357168 - DNA, 25 bp, Homo sapien
gtaaatgtcttatgtccccatccag

SEQ ID NO: 3357169 - DNA, 25 bp, Homo sapien
tcttctgaacaggtgcttttctgct

SEQ ID NO: 3357170 - DNA, 25 bp, Homo sapien
tctgcttattatacgatgctcgaca

SEQ ID NO: 3357171 - DNA, 25 bp, Homo sapien
tcactggcaacctgtacttaaagcg

SEQ ID NO: 3357172 - DNA, 25 bp, Homo sapien
cacttccttcctgaactggaatgct

SEQ ID NO: 3357173 - DNA, 25 bp, Homo sapien
cttccttcctgaactggaatgctta

SEQ ID NO: 3357174 - DNA, 25 bp, Homo sapien
tcacttccttcctgaactggaatgc

SEQ ID NO: 3357175 - DNA, 25 bp, Homo sapien
ttccttcctgaactggaatgcttac

SEQ ID NO: 3357176 - DNA, 25 bp, Homo sapien
gcaagaagccaccattccccatgac

SEQ ID NO: 3357177 - DNA, 25 bp, Homo sapien
gatttcaacattcagcaagaagcca

SEQ ID NO: 3357178 - DNA, 25 bp, Homo sapien
agaagccaccattccccatgacaat

SEQ ID NO: 3357179 - DNA, 25 bp, Homo sapien
gtgatttcaacattcagcaagaagc

SEQ ID NO: 3357180 - DNA, 25 bp, Homo sapien
tctcagctgactccttatccaaaaa

SEQ ID NO: 3357181 - DNA, 25 bp, Homo sapien
tcagctgactccttatccaaaaagc

SEQ ID NO: 3357182 - DNA, 25 bp, Homo sapien
ctgactccttatccaaaaagctgtg

SEQ ID NO: 3357183 - DNA, 25 bp, Homo sapien
actccttatccaaaaagctgtgcat

SEQ ID NO: 3357184 - DNA, 25 bp, Homo sapien
taaatgtaatgccttaggatgggtg

SEQ ID NO: 3357185 - DNA, 25 bp, Homo sapien
aatgtaatgccttaggatgggtggg

SEQ ID NO: 3357186 - DNA, 25 bp, Homo sapien
tgtaatgccttaggatgggtgggat

SEQ ID NO: 3357187 - DNA, 25 bp, Homo sapien
gtaatgccttaggatgggtgggatt

SEQ ID NO: 3357188 - DNA, 25 bp, Homo sapien
taataagcgaccatagcaaagtcac

SEQ ID NO: 3357189 - DNA, 25 bp, Homo sapien
aaagagattagcttgagtcccggag

SEQ ID NO: 3357190 - DNA, 25 bp, Homo sapien
gagtcatgattacgccaccacactt

SEQ ID NO: 3357191 - DNA, 25 bp, Homo sapien
catgacagtcttggtagaaaatcct

SEQ ID NO: 3357192 - DNA, 25 bp, Homo sapien
caagagtggcctgtgaaactgtttc

SEQ ID NO: 3357193 - DNA, 25 bp, Homo sapien
tctcaggtcatgatgcttcttaggt

SEQ ID NO: 3357194 - DNA, 25 bp, Homo sapien
ttctcaggtcatgatgcttcttagg

SEQ ID NO: 3357195 - DNA, 25 bp, Homo sapien
tgtgaaactgtttctcaggtcatga

SEQ ID NO: 3357196 - DNA, 25 bp, Homo sapien
gcatctccatccccgcactgcactc

SEQ ID NO: 3357197 - DNA, 25 bp, Homo sapien
tctccctttcatactctagtaaaat

SEQ ID NO: 3357198 - DNA, 25 bp, Homo sapien
gctgcatctccatccccgcactgca

SEQ ID NO: 3357199 - DNA, 25 bp, Homo sapien
cttagctgtttatttgttgcctgag

SEQ ID NO: 3357200 - DNA, 25 bp, Homo sapien
acacgtacagccgtgaactggagaa

SEQ ID NO: 3357201 - DNA, 25 bp, Homo sapien
atcatccacacgtacagccgtgaac

SEQ ID NO: 3357202 - DNA, 25 bp, Homo sapien
tccacacgtacagccgtgaactgga

SEQ ID NO: 3357203 - DNA, 25 bp, Homo sapien
acgtacagccgtgaactggagaatt

SEQ ID NO: 3357204 - DNA, 25 bp, Homo sapien
ttagacagatttacagaacccagct

SEQ ID NO: 3357205 - DNA, 25 bp, Homo sapien
ggtttgacggtactgcatcaggtga

SEQ ID NO: 3357206 - DNA, 25 bp, Homo sapien
tgagtgtgatctgacgtgagcttgc

SEQ ID NO: 3357207 - DNA, 25 bp, Homo sapien
gggaaagcgcctggagaatagcaat

SEQ ID NO: 3357208 - DNA, 25 bp, Homo sapien
tgtatactcacacttgagaaaagct

SEQ ID NO: 3357209 - DNA, 25 bp, Homo sapien
gaaggtgacaatcccattcatccag

SEQ ID NO: 3357210 - DNA, 25 bp, Homo sapien
gagtactagtggttgcattttcata

SEQ ID NO: 3357211 - DNA, 25 bp, Homo sapien
ttgcatgctccaagcctctagcagg

SEQ ID NO: 3357212 - DNA, 25 bp, Homo sapien
ggcagttgaaacgatgtgacagctc

SEQ ID NO: 3357213 - DNA, 25 bp, Homo sapien
tgggcagttgaaacgatgtgacagc

SEQ ID NO: 3357214 - DNA, 25 bp, Homo sapien
cagttgaaacgatgtgacagctcca

SEQ ID NO: 3357215 - DNA, 25 bp, Homo sapien
ctgggcagttgaaacgatgtgacag

SEQ ID NO: 3357216 - DNA, 25 bp, Homo sapien
gagtctcggaaagatgctaagcaaa

SEQ ID NO: 3357217 - DNA, 25 bp, Homo sapien
aaatcctccttgtgtgagtctcgga

SEQ ID NO: 3357218 - DNA, 25 bp, Homo sapien
tcatgacttggcacacttaaggtgg

SEQ ID NO: 3357219 - DNA, 25 bp, Homo sapien
gacttatacgcttctgcccatcgga

SEQ ID NO: 3357220 - DNA, 25 bp, Homo sapien
ggtctagtaaaagtcaagtgccaaa

SEQ ID NO: 3357221 - DNA, 25 bp, Homo sapien
agaaacgggcatgcaagggttccca

SEQ ID NO: 3357222 - DNA, 25 bp, Homo sapien
tgcaaactgtttcgtaccccaataa

SEQ ID NO: 3357223 - DNA, 25 bp, Homo sapien
cacagcctcgcattagagcaaaggt

SEQ ID NO: 3357224 - DNA, 25 bp, Homo sapien
agaaaacttgaaaaccatgccactt

SEQ ID NO: 3357225 - DNA, 25 bp, Homo sapien
cttagtaatatggagttgaaaatta

SEQ ID NO: 3357226 - DNA, 25 bp, Homo sapien
aagggtatattctgtaagtcctgca

SEQ ID NO: 3357227 - DNA, 25 bp, Homo sapien
cctattaagtaatacagaggatgga

SEQ ID NO: 3357228 - DNA, 25 bp, Homo sapien
tacacagacactcctaatcactgac

SEQ ID NO: 3357229 - DNA, 25 bp, Homo sapien
accacactcagtaattgcctgttgc

SEQ ID NO: 3357230 - DNA, 25 bp, Homo sapien
ctcagatactgaagcttctaacaga

SEQ ID NO: 3357231 - DNA, 25 bp, Homo sapien
agaagactctgggaagtaggtgagg

SEQ ID NO: 3357232 - DNA, 25 bp, Homo sapien
tccaaagcatcgttaataattacct

SEQ ID NO: 3357233 - DNA, 25 bp, Homo sapien
gaataagttgctacataagaatcaa

SEQ ID NO: 3357234 - DNA, 25 bp, Homo sapien
gaatagttagctagggaattatcca

SEQ ID NO: 3357235 - DNA, 25 bp, Homo sapien
aattcgcttctatagctactgaatg

SEQ ID NO: 3357236 - DNA, 25 bp, Homo sapien
gattcctcaattggattgtccacag

SEQ ID NO: 3357237 - DNA, 25 bp, Homo sapien
ttaggttgcttgtggatgcattgct

SEQ ID NO: 3357238 - DNA, 25 bp, Homo sapien
gttgcttgtggatgcattgctttgt

SEQ ID NO: 3357239 - DNA, 25 bp, Homo sapien
tgattcctcaattggattgtccaca

SEQ ID NO: 3357240 - DNA, 25 bp, Homo sapien
agccgagagatcagagagccagcac

SEQ ID NO: 3357241 - DNA, 25 bp, Homo sapien
tattggaagacccatggcaattggg

SEQ ID NO: 3357242 - DNA, 25 bp, Homo sapien
gggctgttctggttccatcaggagc

SEQ ID NO: 3357243 - DNA, 25 bp, Homo sapien
gacccatggcaattggggctgttct

SEQ ID NO: 3357244 - DNA, 25 bp, Homo sapien
caactgcggaggtgatcctttctac

SEQ ID NO: 3357245 - DNA, 25 bp, Homo sapien
tgctgatctctgaggagccccacaa

SEQ ID NO: 3357246 - DNA, 25 bp, Homo sapien
gaaaggtgtctcagtgcctagggcc

SEQ ID NO: 3357247 - DNA, 25 bp, Homo sapien
ttcccaaacctcagagaacacgctg

SEQ ID NO: 3357248 - DNA, 25 bp, Homo sapien
ttgggaaattttggtgctttgttca

SEQ ID NO: 3357249 - DNA, 25 bp, Homo sapien
taggctgctgcttggggaacaggag

SEQ ID NO: 3357250 - DNA, 25 bp, Homo sapien
tcattaggctgctgcttggggaaca

SEQ ID NO: 3357251 - DNA, 25 bp, Homo sapien
aaattttggtgctttgttcattagg

SEQ ID NO: 3357252 - DNA, 25 bp, Homo sapien
gacacaatgacttcagggctaaaac

SEQ ID NO: 3357253 - DNA, 25 bp, Homo sapien
tattagtctattccacaaatcggga

SEQ ID NO: 3357254 - DNA, 25 bp, Homo sapien
gctttcaacaacttaagaggtacca

SEQ ID NO: 3357255 - DNA, 25 bp, Homo sapien
cagaattgcaattactgtcaggcat

SEQ ID NO: 3357256 - DNA, 25 bp, Homo sapien
tgcagggtacatgttcactcgcggc

SEQ ID NO: 3357257 - DNA, 25 bp, Homo sapien
aataaataatgccatgatgccgagg

SEQ ID NO: 3357258 - DNA, 25 bp, Homo sapien
gctcgagaaaccgaacactgatttg

SEQ ID NO: 3357259 - DNA, 25 bp, Homo sapien
cactcgcggctctcatgatgaataa

SEQ ID NO: 3357260 - DNA, 25 bp, Homo sapien
tgttttggtctcatgacagctgtaa

SEQ ID NO: 3357261 - DNA, 25 bp, Homo sapien
tggtctcatgacagctgtaaccctc

SEQ ID NO: 3357262 - DNA, 25 bp, Homo sapien
ctttgttttggtctcatgacagctg

SEQ ID NO: 3357263 - DNA, 25 bp, Homo sapien
tttggtctcatgacagctgtaaccc

SEQ ID NO: 3357264 - DNA, 25 bp, Homo sapien
taatttggcgtaattccagagctga

SEQ ID NO: 3357265 - DNA, 25 bp, Homo sapien
aaattggcactaccaagaagtggac

SEQ ID NO: 3357266 - DNA, 25 bp, Homo sapien
gaatcactggagattgtaaactgaa

SEQ ID NO: 3357267 - DNA, 25 bp, Homo sapien
ttctccaagacaggatatccaagca

SEQ ID NO: 3357268 - DNA, 25 bp, Homo sapien
agatagagcaaaacagttccatttg

SEQ ID NO: 3357269 - DNA, 25 bp, Homo sapien
gatagagcaaaacagttccatttgt

SEQ ID NO: 3357270 - DNA, 25 bp, Homo sapien
ggagactgaagctctggtttagatg

SEQ ID NO: 3357271 - DNA, 25 bp, Homo sapien
agactgaagctctggtttagatgag

SEQ ID NO: 3357272 - DNA, 25 bp, Homo sapien
tgggagactgaagctctggtttaga

SEQ ID NO: 3357273 - DNA, 25 bp, Homo sapien
ctgggagactgaagctctggtttag

SEQ ID NO: 3357274 - DNA, 25 bp, Homo sapien
cagaaaggcatcatcttgccaggaa

SEQ ID NO: 3357275 - DNA, 25 bp, Homo sapien
gactttaggaactgcgtctctggca

SEQ ID NO: 3357276 - DNA, 25 bp, Homo sapien
gttggccagtcactctaaccataga

SEQ ID NO: 3357277 - DNA, 25 bp, Homo sapien
caggattccttctagagatcaggag

SEQ ID NO: 3357278 - DNA, 25 bp, Homo sapien
aatacaaacacggttcaatttagag

SEQ ID NO: 3357279 - DNA, 25 bp, Homo sapien
acaaacacggttcaatttagagatg

SEQ ID NO: 3357280 - DNA, 25 bp, Homo sapien
atgacagtatactcattttcaccgg

SEQ ID NO: 3357281 - DNA, 25 bp, Homo sapien
tcattttcaccggtgtaaatacaaa

SEQ ID NO: 3357282 - DNA, 25 bp, Homo sapien
gttataagtttgattatatccagag

SEQ ID NO: 3357283 - DNA, 25 bp, Homo sapien
ttttctttgaacatgggaatggctt

SEQ ID NO: 3357284 - DNA, 25 bp, Homo sapien
tcttctaagaagtcaaatgaggagc

SEQ ID NO: 3357285 - DNA, 25 bp, Homo sapien
ggaagatttatcaaccaagtcagca

SEQ ID NO: 3357286 - DNA, 25 bp, Homo sapien
gtagctgtgaatgaggccccacggt

SEQ ID NO: 3357287 - DNA, 25 bp, Homo sapien
agagagtagctgtgaatgaggcccc

SEQ ID NO: 3357288 - DNA, 25 bp, Homo sapien
aatgaggccccacggtcatcagaca

SEQ ID NO: 3357289 - DNA, 25 bp, Homo sapien
accccagagttggcaacttgtgctt

SEQ ID NO: 3357290 - DNA, 25 bp, Homo sapien
cctggcattgaaggtgcagtctata

SEQ ID NO: 3357291 - DNA, 25 bp, Homo sapien
gagttgacctggcattgaaggtgca

SEQ ID NO: 3357292 - DNA, 25 bp, Homo sapien
tgccttgagttgacctggcattgaa

SEQ ID NO: 3357293 - DNA, 25 bp, Homo sapien
acaccactgccttgagttgacctgg

SEQ ID NO: 3357294 - DNA, 25 bp, Homo sapien
ttttagaactctcccatccctgcag

SEQ ID NO: 3357295 - DNA, 25 bp, Homo sapien
catacgctgatacaaagattagcaa

SEQ ID NO: 3357296 - DNA, 25 bp, Homo sapien
aatatgttccagatacaagcacaca

SEQ ID NO: 3357297 - DNA, 25 bp, Homo sapien
cctttggttctgatacatacgctga

SEQ ID NO: 3357298 - DNA, 25 bp, Homo sapien
cactgttaaggtaggttggaagcac

SEQ ID NO: 3357299 - DNA, 25 bp, Homo sapien
gagactgtggtagtacttgtgaaac

SEQ ID NO: 3357300 - DNA, 25 bp, Homo sapien
tgtagcatagccaatgagactgtgg

SEQ ID NO: 3357301 - DNA, 25 bp, Homo sapien
ggcatgatatatagctagggaagca

SEQ ID NO: 3357302 - DNA, 25 bp, Homo sapien
aggaagtaattaaagacgcacagat

SEQ ID NO: 3357303 - DNA, 25 bp, Homo sapien
agtaattaaagacgcacagattctc

SEQ ID NO: 3357304 - DNA, 25 bp, Homo sapien
taattaaagacgcacagattctctt

SEQ ID NO: 3357305 - DNA, 25 bp, Homo sapien
gaagtaattaaagacgcacagattc

SEQ ID NO: 3357306 - DNA, 25 bp, Homo sapien
ccataggcaaactttctagttaaca

SEQ ID NO: 3357307 - DNA, 25 bp, Homo sapien
catagagattatgaagagagacaag

SEQ ID NO: 3357308 - DNA, 25 bp, Homo sapien
cagcccgtcacattttcaactaaga

SEQ ID NO: 3357309 - DNA, 25 bp, Homo sapien
gaagaatgacagagaagcctgaaca

SEQ ID NO: 3357310 - DNA, 25 bp, Homo sapien
aggtccccaattgtttttgcagctg

SEQ ID NO: 3357311 - DNA, 25 bp, Homo sapien
ttgcagctgttatcagtgcagcctg

SEQ ID NO: 3357312 - DNA, 25 bp, Homo sapien
tttgattttatgaataaggtcccca

SEQ ID NO: 3357313 - DNA, 25 bp, Homo sapien
ggttggttgccatctggcagtttac

SEQ ID NO: 3357314 - DNA, 25 bp, Homo sapien
ctatttcgaatggggataacagaaa

SEQ ID NO: 3357315 - DNA, 25 bp, Homo sapien
actacgctctcagctccgcaagtcg

SEQ ID NO: 3357316 - DNA, 25 bp, Homo sapien
caagtcgctggacagtcaatagcgc

SEQ ID NO: 3357317 - DNA, 25 bp, Homo sapien
gaagtgaccaccactacgctctcag

SEQ ID NO: 3357318 - DNA, 25 bp, Homo sapien
ctctcagggaagtgaccaccactac

SEQ ID NO: 3357319 - DNA, 25 bp, Homo sapien
tgtctaccggatctggcacggtcaa

SEQ ID NO: 3357320 - DNA, 25 bp, Homo sapien
aagacacaggaacagccgtactttc

SEQ ID NO: 3357321 - DNA, 25 bp, Homo sapien
gatctggcacggtcaagacacagga

SEQ ID NO: 3357322 - DNA, 25 bp, Homo sapien
tcacacggtgtctaccggatctggc

SEQ ID NO: 3357323 - DNA, 25 bp, Homo sapien
catcacgtgcagaagaagccactcc

SEQ ID NO: 3357324 - DNA, 25 bp, Homo sapien
gaagccactccgaagtgcaaacacc

SEQ ID NO: 3357325 - DNA, 25 bp, Homo sapien
ttttcttttgtgcatcacgtgcaga

SEQ ID NO: 3357326 - DNA, 25 bp, Homo sapien
cgtgcagaagaagccactccgaagt

SEQ ID NO: 3357327 - DNA, 25 bp, Homo sapien
tgatgaagaaccaatcaacgttttg

SEQ ID NO: 3357328 - DNA, 25 bp, Homo sapien
ttctctctgtatcagccatggacac

SEQ ID NO: 3357329 - DNA, 25 bp, Homo sapien
caagagtggcccgtgtagttaagaa

SEQ ID NO: 3357330 - DNA, 25 bp, Homo sapien
aaacagctcgcggtggccgctttgc

SEQ ID NO: 3357331 - DNA, 25 bp, Homo sapien
cgacatcttcgcctactctttataa

SEQ ID NO: 3357332 - DNA, 25 bp, Homo sapien
gcgttgccgcagagagtgcttctga

SEQ ID NO: 3357333 - DNA, 25 bp, Homo sapien
tcacaggtaaataagatgggggcgt

SEQ ID NO: 3357334 - DNA, 25 bp, Homo sapien
gcttctgagggtccttctctgggat

SEQ ID NO: 3357335 - DNA, 25 bp, Homo sapien
cagttactgacggaagccatgtgca

SEQ ID NO: 3357336 - DNA, 25 bp, Homo sapien
caggactagacattggactcccaca

SEQ ID NO: 3357337 - DNA, 25 bp, Homo sapien
tttggcagatcctccgcgttttccg

SEQ ID NO: 3357338 - DNA, 25 bp, Homo sapien
taatgtgtataaaagaatctctccc

SEQ ID NO: 3357339 - DNA, 25 bp, Homo sapien
tgcgctctcgataaaggagccagaa

SEQ ID NO: 3357340 - DNA, 25 bp, Homo sapien
aaaggagccagaatggttccatctg

SEQ ID NO: 3357341 - DNA, 25 bp, Homo sapien
caggcaagcggccaagctgcgctct

SEQ ID NO: 3357342 - DNA, 25 bp, Homo sapien
ggttccatctggttacaaacatatc

SEQ ID NO: 3357343 - DNA, 25 bp, Homo sapien
ttgcggtttaccgctctccgcaggc

SEQ ID NO: 3357344 - DNA, 25 bp, Homo sapien
tcagatcctgaagcgcttcccttgc

SEQ ID NO: 3357345 - DNA, 25 bp, Homo sapien
agccagcggtggtagcgcccactcg

SEQ ID NO: 3357346 - DNA, 25 bp, Homo sapien
ccgcaggctgcttctccgaagccag

SEQ ID NO: 3357347 - DNA, 25 bp, Homo sapien
ctcctccactcccggtggccagggg

SEQ ID NO: 3357348 - DNA, 25 bp, Homo sapien
ctgggaatcaggagatgataatgag

SEQ ID NO: 3357349 - DNA, 25 bp, Homo sapien
tgggaatcaggagatgataatgaga

SEQ ID NO: 3357350 - DNA, 25 bp, Homo sapien
gctcctccactcccggtggccaggg

SEQ ID NO: 3357351 - DNA, 25 bp, Homo sapien
taaggtttgatttgtgctagtcgcg

SEQ ID NO: 3357352 - DNA, 25 bp, Homo sapien
taagataactacatacaaagtgctc

SEQ ID NO: 3357353 - DNA, 25 bp, Homo sapien
gcgtgccaggacactgaaggtgaaa

SEQ ID NO: 3357354 - DNA, 25 bp, Homo sapien
ttagtcgtttgtacaattgatggcc

SEQ ID NO: 3357355 - DNA, 25 bp, Homo sapien
tgttgtcgtttacagtacagagatc

SEQ ID NO: 3357356 - DNA, 25 bp, Homo sapien
tacagagatctgtactgtattgcct

SEQ ID NO: 3357357 - DNA, 25 bp, Homo sapien
actgaaattgtgactggtccttgtt

SEQ ID NO: 3357358 - DNA, 25 bp, Homo sapien
ctgaaggagtcttatcaatgtaaca

SEQ ID NO: 3357359 - DNA, 25 bp, Homo sapien
ttggtaaagaattgtgttctttctc

SEQ ID NO: 3357360 - DNA, 25 bp, Homo sapien
tcaatgaaattggatctttatgcat

SEQ ID NO: 3357361 - DNA, 25 bp, Homo sapien
taaagaattgtgttctttctctcaa

SEQ ID NO: 3357362 - DNA, 25 bp, Homo sapien
ttctttctctcaatgaaattggatc

SEQ ID NO: 3357363 - DNA, 25 bp, Homo sapien
attaatcagtagatccaggactcgc

SEQ ID NO: 3357364 - DNA, 25 bp, Homo sapien
caaagcccttagcacaataaatgta

SEQ ID NO: 3357365 - DNA, 25 bp, Homo sapien
tacattttatggtgcatggaccaat

SEQ ID NO: 3357366 - DNA, 25 bp, Homo sapien
gactcgctagcctgtgacctctata

SEQ ID NO: 3357367 - DNA, 25 bp, Homo sapien
caatttgagtttagctaatgtcatc

SEQ ID NO: 3357368 - DNA, 25 bp, Homo sapien
tattccatttgccacctagtaacta

SEQ ID NO: 3357369 - DNA, 25 bp, Homo sapien
cctagtaactaggtatattcagcaa

SEQ ID NO: 3357370 - DNA, 25 bp, Homo sapien
tgtacaatactaaatacaatatcag

SEQ ID NO: 3357371 - DNA, 25 bp, Homo sapien
ggtaaattagggacattgttcatat

SEQ ID NO: 3357372 - DNA, 25 bp, Homo sapien
agcctactaggtaaattagggacat

SEQ ID NO: 3357373 - DNA, 25 bp, Homo sapien
tctgaagggaaagcctactaggtaa

SEQ ID NO: 3357374 - DNA, 25 bp, Homo sapien
cattctgaagggaaagcctactagg

SEQ ID NO: 3357375 - DNA, 25 bp, Homo sapien
agtccttgggtagctttagtctgaa

SEQ ID NO: 3357376 - DNA, 25 bp, Homo sapien
gacttaccgagacttgattaaccca

SEQ ID NO: 3357377 - DNA, 25 bp, Homo sapien
caatgaccagcactgatgtaacccc

SEQ ID NO: 3357378 - DNA, 25 bp, Homo sapien
taacagctgtgttagacagtggctc

SEQ ID NO: 3357379 - DNA, 25 bp, Homo sapien
cttcactaatattttgagcagcgcg

SEQ ID NO: 3357380 - DNA, 25 bp, Homo sapien
cataaagatgccctacaaaatcttc

SEQ ID NO: 3357381 - DNA, 25 bp, Homo sapien
gatgccctacaaaatcttcactaat

SEQ ID NO: 3357382 - DNA, 25 bp, Homo sapien
cagcgcgacgggtatttcgaataaa

SEQ ID NO: 3357383 - DNA, 25 bp, Homo sapien
ctagtgaggtcaatggaaagtagaa

SEQ ID NO: 3357384 - DNA, 25 bp, Homo sapien
tagtgaggtcaatggaaagtagaat

SEQ ID NO: 3357385 - DNA, 25 bp, Homo sapien
gagtttcaagatactctccacgctc

SEQ ID NO: 3357386 - DNA, 25 bp, Homo sapien
gcatggatatgacgaaaaaattctc

SEQ ID NO: 3357387 - DNA, 25 bp, Homo sapien
gccaagttctcgcattaaatcaggg

SEQ ID NO: 3357388 - DNA, 25 bp, Homo sapien
taaatcagggttgcaagcacagaat

SEQ ID NO: 3357389 - DNA, 25 bp, Homo sapien
atttcctttggcgaatcatccagga

SEQ ID NO: 3357390 - DNA, 25 bp, Homo sapien
ccaggatacccttggacataaagta

SEQ ID NO: 3357391 - DNA, 25 bp, Homo sapien
tcatcaagatagattctcagttttt

SEQ ID NO: 3357392 - DNA, 25 bp, Homo sapien
ccttggacataaagtagttcactcc

SEQ ID NO: 3357393 - DNA, 25 bp, Homo sapien
acaaactgtgcagatgttctccccc

SEQ ID NO: 3357394 - DNA, 25 bp, Homo sapien
aaactgtgcagatgttctcccccac

SEQ ID NO: 3357395 - DNA, 25 bp, Homo sapien
cacaaactgtgcagatgttctcccc

SEQ ID NO: 3357396 - DNA, 25 bp, Homo sapien
caaactgtgcagatgttctccccca

SEQ ID NO: 3357397 - DNA, 25 bp, Homo sapien
tggagcttggttacccatatccgtg

SEQ ID NO: 3357398 - DNA, 25 bp, Homo sapien
tatccgtgacatgaacggtgtcctt

SEQ ID NO: 3357399 - DNA, 25 bp, Homo sapien
tggttacccatatccgtgacatgaa

SEQ ID NO: 3357400 - DNA, 25 bp, Homo sapien
ggtgtcctttggagaatcttgttcc

SEQ ID NO: 3357401 - DNA, 25 bp, Homo sapien
aatgcacccaaaagtagtagttctg

SEQ ID NO: 3357402 - DNA, 25 bp, Homo sapien
tagaacaatgtcctcaatgattatc

SEQ ID NO: 3357403 - DNA, 25 bp, Homo sapien
gataaaatctgatgaacacactctg

SEQ ID NO: 3357404 - DNA, 25 bp, Homo sapien
taaatagttcctatgtcaacatgga

SEQ ID NO: 3357405 - DNA, 25 bp, Homo sapien
ctaaaggtgggttcttattgtatat

SEQ ID NO: 3357406 - DNA, 25 bp, Homo sapien
ggcattaaaggtgaggctgccttca

SEQ ID NO: 3357407 - DNA, 25 bp, Homo sapien
tatggaacagtgaccccaagtggat

SEQ ID NO: 3357408 - DNA, 25 bp, Homo sapien
gtgaccccaagtggatttgcacaac

SEQ ID NO: 3357409 - DNA, 25 bp, Homo sapien
agagaagttcatcattcgcaaggtc

SEQ ID NO: 3357410 - DNA, 25 bp, Homo sapien
cagagaagttcatcattcgcaaggt

SEQ ID NO: 3357411 - DNA, 25 bp, Homo sapien
gaagccaagcaaaggtcagttgcat

SEQ ID NO: 3357412 - DNA, 25 bp, Homo sapien
ctgccaaacacatgaagccaagcaa

SEQ ID NO: 3357413 - DNA, 25 bp, Homo sapien
atgaagccaagcaaaggtcagttgc

SEQ ID NO: 3357414 - DNA, 25 bp, Homo sapien
gccaaacacatgaagccaagcaaag

SEQ ID NO: 3357415 - DNA, 25 bp, Homo sapien
gtaaagcttagctcaggaggcaaca

SEQ ID NO: 3357416 - DNA, 25 bp, Homo sapien
gatggtaaagcttagctcaggaggc

SEQ ID NO: 3357417 - DNA, 25 bp, Homo sapien
ccttcctgttctttcgatttccttg

SEQ ID NO: 3357418 - DNA, 25 bp, Homo sapien
taggacaagatggtaaagcttagct

SEQ ID NO: 3357419 - DNA, 25 bp, Homo sapien
aaatgttgctcgcagccattctcct

SEQ ID NO: 3357420 - DNA, 25 bp, Homo sapien
ggtgttagaaatgttgctcgcagcc

SEQ ID NO: 3357421 - DNA, 25 bp, Homo sapien
atatgtcaatgcctccttggacttg

SEQ ID NO: 3357422 - DNA, 25 bp, Homo sapien
cttggacttgtttacgatgattggt

SEQ ID NO: 3357423 - DNA, 25 bp, Homo sapien
tgaccactctccacaacccttgacc

SEQ ID NO: 3357424 - DNA, 25 bp, Homo sapien
ccactctccacaacccttgacccat

SEQ ID NO: 3357425 - DNA, 25 bp, Homo sapien
accactctccacaacccttgaccca

SEQ ID NO: 3357426 - DNA, 25 bp, Homo sapien
ctgaccactctccacaacccttgac

SEQ ID NO: 3357427 - DNA, 25 bp, Homo sapien
taaactaatattgggataagtataa

SEQ ID NO: 3357428 - DNA, 25 bp, Homo sapien
ctaatattgggataagtataaatgg

SEQ ID NO: 3357429 - DNA, 25 bp, Homo sapien
cctcggcttctcaggaataggtttt

SEQ ID NO: 3357430 - DNA, 25 bp, Homo sapien
ggatggtctacgaactcctcacctc

SEQ ID NO: 3357431 - DNA, 25 bp, Homo sapien
gtcataatcctggtcctgaatttca

SEQ ID NO: 3357432 - DNA, 25 bp, Homo sapien
gagtagtcataatcctggtcctgaa

SEQ ID NO: 3357433 - DNA, 25 bp, Homo sapien
aatcctggtcctgaatttcattaat

SEQ ID NO: 3357434 - DNA, 25 bp, Homo sapien
ctgagtagtcataatcctggtcctg

SEQ ID NO: 3357435 - DNA, 25 bp, Homo sapien
agagatgccatttacatagcaaggc

SEQ ID NO: 3357436 - DNA, 25 bp, Homo sapien
gatgccatttacatagcaaggccat

SEQ ID NO: 3357437 - DNA, 25 bp, Homo sapien
tgaaatttggagagatgccatttac

SEQ ID NO: 3357438 - DNA, 25 bp, Homo sapien
gtgaaatttggagagatgccattta

SEQ ID NO: 3357439 - DNA, 25 bp, Homo sapien
gctggtcggccagtttcggccaact

SEQ ID NO: 3357440 - DNA, 25 bp, Homo sapien
tggtcggccagtttcggccaactgg

SEQ ID NO: 3357441 - DNA, 25 bp, Homo sapien
gcactgtcattggtcgcaaactctt

SEQ ID NO: 3357442 - DNA, 25 bp, Homo sapien
tcactcaagatgcttcgcactgtca

SEQ ID NO: 3357443 - DNA, 25 bp, Homo sapien
caccgccgccgcgacgaattggcct

SEQ ID NO: 3357444 - DNA, 25 bp, Homo sapien
cgccgcgacgaattggcctctgggc

SEQ ID NO: 3357445 - DNA, 25 bp, Homo sapien
cgccgccgcgacgaattggcctctg

SEQ ID NO: 3357446 - DNA, 25 bp, Homo sapien
tgagcgacctgcgatctccaccgcc

SEQ ID NO: 3357447 - DNA, 25 bp, Homo sapien
ctggtgcccaggccatggagaagct

SEQ ID NO: 3357448 - DNA, 25 bp, Homo sapien
caggccatggagaagctgattcaaa

SEQ ID NO: 3357449 - DNA, 25 bp, Homo sapien
ggccatggagaagctgattcaaact

SEQ ID NO: 3357450 - DNA, 25 bp, Homo sapien
cccaggccatggagaagctgattca

SEQ ID NO: 3357451 - DNA, 25 bp, Homo sapien
ttgtccacaccggtagaggtgaccg

SEQ ID NO: 3357452 - DNA, 25 bp, Homo sapien
ccctcagaactcagggtacctccag

SEQ ID NO: 3357453 - DNA, 25 bp, Homo sapien
agaaacagcactacgaccctcagaa

SEQ ID NO: 3357454 - DNA, 25 bp, Homo sapien
gaggtgaccgcgatgagaataccag

SEQ ID NO: 3357455 - DNA, 25 bp, Homo sapien
gccagaactgccgactatcccaatt

SEQ ID NO: 3357456 - DNA, 25 bp, Homo sapien
tccgactcttaacggagacgcattt

SEQ ID NO: 3357457 - DNA, 25 bp, Homo sapien
gaagtgacgttaggctccgactctt

SEQ ID NO: 3357458 - DNA, 25 bp, Homo sapien
attttgacgtttcctattgttgccg

SEQ ID NO: 3357459 - DNA, 25 bp, Homo sapien
ttctcacttcgtagcacgagccact

SEQ ID NO: 3357460 - DNA, 25 bp, Homo sapien
cttgtttctcacttcgtagcacgag

SEQ ID NO: 3357461 - DNA, 25 bp, Homo sapien
gtttctcacttcgtagcacgagcca

SEQ ID NO: 3357462 - DNA, 25 bp, Homo sapien
tgtttctcacttcgtagcacgagcc

SEQ ID NO: 3357463 - DNA, 25 bp, Homo sapien
acttctcagctgcaagttagaagtg

SEQ ID NO: 3357464 - DNA, 25 bp, Homo sapien
tgcaagttagaagtggactggccat

SEQ ID NO: 3357465 - DNA, 25 bp, Homo sapien
gactggccattgaggaggctctcag

SEQ ID NO: 3357466 - DNA, 25 bp, Homo sapien
tcttgaacgcggtgtggaatcggca

SEQ ID NO: 3357467 - DNA, 25 bp, Homo sapien
caattccaaatacaaacggtcggcg

SEQ ID NO: 3357468 - DNA, 25 bp, Homo sapien
actctggtgactgtgtatggttgca

SEQ ID NO: 3357469 - DNA, 25 bp, Homo sapien
tgctgggcctttgaaaccggcttct

SEQ ID NO: 3357470 - DNA, 25 bp, Homo sapien
gacgaatgaccagatccgccttttc

SEQ ID NO: 3357471 - DNA, 25 bp, Homo sapien
caatggtggtggcttattaaagtga

SEQ ID NO: 3357472 - DNA, 25 bp, Homo sapien
cttgactgacaatggtggtggctta

SEQ ID NO: 3357473 - DNA, 25 bp, Homo sapien
ccgatgacagtgcaaaacatcttga

SEQ ID NO: 3357474 - DNA, 25 bp, Homo sapien
gacagctggctaaccagcaggagtt

SEQ ID NO: 3357475 - DNA, 25 bp, Homo sapien
ccggatgaccagtacattatagaca

SEQ ID NO: 3357476 - DNA, 25 bp, Homo sapien
ccctcgtgatcagacaaaatgttta

SEQ ID NO: 3357477 - DNA, 25 bp, Homo sapien
tccatgtctactgagagcccttaat

SEQ ID NO: 3357478 - DNA, 25 bp, Homo sapien
tgtctgatatagatagccaccctgc

SEQ ID NO: 3357479 - DNA, 25 bp, Homo sapien
tacctggttcctatttaaatctgcc

SEQ ID NO: 3357480 - DNA, 25 bp, Homo sapien
actgtgtagggtaagctataatatc

SEQ ID NO: 3357481 - DNA, 25 bp, Homo sapien
ggtgctccgcttgctaaattatcct

SEQ ID NO: 3357482 - DNA, 25 bp, Homo sapien
gaagattgcgcttaagctctcccat

SEQ ID NO: 3357483 - DNA, 25 bp, Homo sapien
tcagtaccagcatggaattatagca

SEQ ID NO: 3357484 - DNA, 25 bp, Homo sapien
aactcgtgagctaaagctactcgcc

SEQ ID NO: 3357485 - DNA, 25 bp, Homo sapien
caccaccttgtggttaacatgccag

SEQ ID NO: 3357486 - DNA, 25 bp, Homo sapien
tgctagattccatgggtgagtcacc

SEQ ID NO: 3357487 - DNA, 25 bp, Homo sapien
ggtttgaggccattacactgcataa

SEQ ID NO: 3357488 - DNA, 25 bp, Homo sapien
tactagtagctttgactgtgcaaac

SEQ ID NO: 3357489 - DNA, 25 bp, Homo sapien
catcaagtctcttggacaaggaagg

SEQ ID NO: 3357490 - DNA, 25 bp, Homo sapien
gcaaaatctaatgggtctagaccag

SEQ ID NO: 3357491 - DNA, 25 bp, Homo sapien
caaaccccttggcaacaactattct

SEQ ID NO: 3357492 - DNA, 25 bp, Homo sapien
ggaaggtacagagttatctcatcta

SEQ ID NO: 3357493 - DNA, 25 bp, Homo sapien
tgatacattatcgtcactcagagtc

SEQ ID NO: 3357494 - DNA, 25 bp, Homo sapien
tcaaagtcctccaccaaagtggtac

SEQ ID NO: 3357495 - DNA, 25 bp, Homo sapien
agcatgagatcttgtgttatcttta

SEQ ID NO: 3357496 - DNA, 25 bp, Homo sapien
gcatgagatcttgtgttatctttac

SEQ ID NO: 3357497 - DNA, 25 bp, Homo sapien
acagtcttatttctccgtcctccag

SEQ ID NO: 3357498 - DNA, 25 bp, Homo sapien
tcaaacagtcttatttctccgtcct

SEQ ID NO: 3357499 - DNA, 25 bp, Homo sapien
aagcagcaccagaacagatgaattc

SEQ ID NO: 3357500 - DNA, 25 bp, Homo sapien
gcagcaccagaacagatgaattcag

SEQ ID NO: 3357501 - DNA, 25 bp, Homo sapien
tccaagcagcaccagaacagatgaa

SEQ ID NO: 3357502 - DNA, 25 bp, Homo sapien
attcagttttctgtgcatgtattct

SEQ ID NO: 3357503 - DNA, 25 bp, Homo sapien
acttttgtagcagctggaaagtaca

SEQ ID NO: 3357504 - DNA, 25 bp, Homo sapien
tttacttttgtagcagctggaaagt

SEQ ID NO: 3357505 - DNA, 25 bp, Homo sapien
tacttttgtagcagctggaaagtac

SEQ ID NO: 3357506 - DNA, 25 bp, Homo sapien
cttttgtagcagctggaaagtacat

SEQ ID NO: 3357507 - DNA, 25 bp, Homo sapien
cacttcaaaagtggaatccttgagt

SEQ ID NO: 3357508 - DNA, 25 bp, Homo sapien
tgtatgacacttcaaaagtggaatc

SEQ ID NO: 3357509 - DNA, 25 bp, Homo sapien
agcaaggaaaagttgtgtatgacac

SEQ ID NO: 3357510 - DNA, 25 bp, Homo sapien
tcttcatagcaaggaaaagttgtgt

SEQ ID NO: 3357511 - DNA, 25 bp, Homo sapien
gactagagcttggaatggtgcatgc

SEQ ID NO: 3357512 - DNA, 25 bp, Homo sapien
tgcatgctctgtcccggatcccttt

SEQ ID NO: 3357513 - DNA, 25 bp, Homo sapien
atggtgcatgctctgtcccggatcc

SEQ ID NO: 3357514 - DNA, 25 bp, Homo sapien
tctgcttttatgtcgtgactagagc

SEQ ID NO: 3357515 - DNA, 25 bp, Homo sapien
ctgtatgctcagcgtatcctctacg

SEQ ID NO: 3357516 - DNA, 25 bp, Homo sapien
cctgtatgctcagcgtatcctctac

SEQ ID NO: 3357517 - DNA, 25 bp, Homo sapien
taccctgtatgctcagcgtatcctc

SEQ ID NO: 3357518 - DNA, 25 bp, Homo sapien
ccctgtatgctcagcgtatcctcta

SEQ ID NO: 3357519 - DNA, 25 bp, Homo sapien
aaatattctgtgatgtctgtgtgca

SEQ ID NO: 3357520 - DNA, 25 bp, Homo sapien
aatattctgtgatgtctgtgtgcat

SEQ ID NO: 3357521 - DNA, 25 bp, Homo sapien
tctttatgaaatattctgtgatgtc

SEQ ID NO: 3357522 - DNA, 25 bp, Homo sapien
tatgaaatattctgtgatgtctgtg

SEQ ID NO: 3357523 - DNA, 25 bp, Homo sapien
catcaaaagtagtgggacagtctca

SEQ ID NO: 3357524 - DNA, 25 bp, Homo sapien
ttggtccacatcaaaagtagtggga

SEQ ID NO: 3357525 - DNA, 25 bp, Homo sapien
agtctcattgactgaacttgggtca

SEQ ID NO: 3357526 - DNA, 25 bp, Homo sapien
gaacttgggtcatgtgttttctgcc

SEQ ID NO: 3357527 - DNA, 25 bp, Homo sapien
ctggggaatgtagttagaatccaca

SEQ ID NO: 3357528 - DNA, 25 bp, Homo sapien
gtggctgctgggtgtgcaaaaagag

SEQ ID NO: 3357529 - DNA, 25 bp, Homo sapien
gactctaaggcctttaggcacatga

SEQ ID NO: 3357530 - DNA, 25 bp, Homo sapien
attcagagctcaatccttcgctggg

SEQ ID NO: 3357531 - DNA, 25 bp, Homo sapien
cttgaactccataatgggagcacac

SEQ ID NO: 3357532 - DNA, 25 bp, Homo sapien
actccataatgggagcacactgggt

SEQ ID NO: 3357533 - DNA, 25 bp, Homo sapien
tccataatgggagcacactgggtca

SEQ ID NO: 3357534 - DNA, 25 bp, Homo sapien
gaactccataatgggagcacactgg

SEQ ID NO: 3357535 - DNA, 25 bp, Homo sapien
tgctttagccttgtcccaacaagtt

SEQ ID NO: 3357536 - DNA, 25 bp, Homo sapien
aaattcttatctgtacgtttatctc

SEQ ID NO: 3357537 - DNA, 25 bp, Homo sapien
cgtttatctcttatttgctttagcc

SEQ ID NO: 3357538 - DNA, 25 bp, Homo sapien
tttagggtccttaatacagcttaca

SEQ ID NO: 3357539 - DNA, 25 bp, Homo sapien
gctatctctctgaccacaaggactg

SEQ ID NO: 3357540 - DNA, 25 bp, Homo sapien
tcagtagtgggcatataacctaggc

SEQ ID NO: 3357541 - DNA, 25 bp, Homo sapien
gaatcaggcctgtagatccgggaag

SEQ ID NO: 3357542 - DNA, 25 bp, Homo sapien
taggactcatgtcaatgccctgccc

SEQ ID NO: 3357543 - DNA, 25 bp, Homo sapien
acgtatttctagtgttgctgttctg

SEQ ID NO: 3357544 - DNA, 25 bp, Homo sapien
atgtctacgtatttctagtgttgct

SEQ ID NO: 3357545 - DNA, 25 bp, Homo sapien
tacgtatttctagtgttgctgttct

SEQ ID NO: 3357546 - DNA, 25 bp, Homo sapien
ttttctcaatcagtatacaccagag

SEQ ID NO: 3357547 - DNA, 25 bp, Homo sapien
tttctcaatcagtatacaccagaga

SEQ ID NO: 3357548 - DNA, 25 bp, Homo sapien
tcagtttaattattttctcaatcag

SEQ ID NO: 3357549 - DNA, 25 bp, Homo sapien
ttattttctcaatcagtatacacca

SEQ ID NO: 3357550 - DNA, 25 bp, Homo sapien
gagttagcagacaggatgagtcact

SEQ ID NO: 3357551 - DNA, 25 bp, Homo sapien
gataagtgatactgggcaaaccgac

SEQ ID NO: 3357552 - DNA, 25 bp, Homo sapien
agagttttacccaaagcaggtgtat

SEQ ID NO: 3357553 - DNA, 25 bp, Homo sapien
catttactgattagtcactgccaga

SEQ ID NO: 3357554 - DNA, 25 bp, Homo sapien
cttgatagctatacatagaagacta

SEQ ID NO: 3357555 - DNA, 25 bp, Homo sapien
tagctatacatagaagactaagtaa

SEQ ID NO: 3357556 - DNA, 25 bp, Homo sapien
tccttgatagctatacatagaagac

SEQ ID NO: 3357557 - DNA, 25 bp, Homo sapien
tgatagctatacatagaagactaag

SEQ ID NO: 3357558 - DNA, 25 bp, Homo sapien
caagattacaacctagcctttggtc

SEQ ID NO: 3357559 - DNA, 25 bp, Homo sapien
cagataggaggctgaactgtgaatc

SEQ ID NO: 3357560 - DNA, 25 bp, Homo sapien
tagaaaacgtttatcaccaagtgca

SEQ ID NO: 3357561 - DNA, 25 bp, Homo sapien
tatactactctaagaagctcttgga

SEQ ID NO: 3357562 - DNA, 25 bp, Homo sapien
aatgagtgttatcaatccattggca

SEQ ID NO: 3357563 - DNA, 25 bp, Homo sapien
cttgaaatggagttgtatcatagtc

SEQ ID NO: 3357564 - DNA, 25 bp, Homo sapien
taatagcaccatttaaagcatcatc

SEQ ID NO: 3357565 - DNA, 25 bp, Homo sapien
tgaaaatgaattcccttagaagttg

SEQ ID NO: 3357566 - DNA, 25 bp, Homo sapien
tattttgaaacgaaagaatgaggca

SEQ ID NO: 3357567 - DNA, 25 bp, Homo sapien
cattaaactattgctacttccaatt

SEQ ID NO: 3357568 - DNA, 25 bp, Homo sapien
gaggcatattaccacttcattttaa

SEQ ID NO: 3357569 - DNA, 25 bp, Homo sapien
taagttgaacatgttatagggaaat

SEQ ID NO: 3357570 - DNA, 25 bp, Homo sapien
ttttcaattgattcaaggatggctg

SEQ ID NO: 3357571 - DNA, 25 bp, Homo sapien
ccttgatatgatccttatattctat

SEQ ID NO: 3357572 - DNA, 25 bp, Homo sapien
cagtctcacaccactgttcataaga

SEQ ID NO: 3357573 - DNA, 25 bp, Homo sapien
caaagcctggacaaatggcattcag

SEQ ID NO: 3357574 - DNA, 25 bp, Homo sapien
aaaccggctgctgtgcaacgggcat

SEQ ID NO: 3357575 - DNA, 25 bp, Homo sapien
tgctttgaagcacaataaaccggct

SEQ ID NO: 3357576 - DNA, 25 bp, Homo sapien
gaagcacaataaaccggctgctgtg

SEQ ID NO: 3357577 - DNA, 25 bp, Homo sapien
acaataaaccggctgctgtgcaacg

SEQ ID NO: 3357578 - DNA, 25 bp, Homo sapien
tgcagaccataaccactccctgggt

SEQ ID NO: 3357579 - DNA, 25 bp, Homo sapien
agtgtgtccacccaatgatttcaaa

SEQ ID NO: 3357580 - DNA, 25 bp, Homo sapien
tccacaggctacataggtatactag

SEQ ID NO: 3357581 - DNA, 25 bp, Homo sapien
tagctcagctctccgaaaagacaca

SEQ ID NO: 3357582 - DNA, 25 bp, Homo sapien
tgtaggcccacaacaccaacataga

SEQ ID NO: 3357583 - DNA, 25 bp, Homo sapien
tagcttcaggattggttaaccacgc

SEQ ID NO: 3357584 - DNA, 25 bp, Homo sapien
caaacagatcttatggaggctgcca

SEQ ID NO: 3357585 - DNA, 25 bp, Homo sapien
tgcacggtatgactctggagacaca

SEQ ID NO: 3357586 - DNA, 25 bp, Homo sapien
ctttgaactcctaggctgaagaaat

SEQ ID NO: 3357587 - DNA, 25 bp, Homo sapien
taaaaatttttatacagatgaggtc

SEQ ID NO: 3357588 - DNA, 25 bp, Homo sapien
agctttgaactcctaggctgaagaa

SEQ ID NO: 3357589 - DNA, 25 bp, Homo sapien
ttttatacagatgaggtctcattct

SEQ ID NO: 3357590 - DNA, 25 bp, Homo sapien
gaccctcatggtatctctcacaaaa

SEQ ID NO: 3357591 - DNA, 25 bp, Homo sapien
tatagcacaagcagatatgccactg

SEQ ID NO: 3357592 - DNA, 25 bp, Homo sapien
tctggagactccaatgttttgactt

SEQ ID NO: 3357593 - DNA, 25 bp, Homo sapien
tatgccactgggttgttacttaaga

SEQ ID NO: 3357594 - DNA, 25 bp, Homo sapien
cgctagagatcatgaggataggccc

SEQ ID NO: 3357595 - DNA, 25 bp, Homo sapien
gaaggactccactgtatccacgcta

SEQ ID NO: 3357596 - DNA, 25 bp, Homo sapien
gccagtggcaacgaggaaacagtat

SEQ ID NO: 3357597 - DNA, 25 bp, Homo sapien
tataaacacaagaggtgcggaggct

SEQ ID NO: 3357598 - DNA, 25 bp, Homo sapien
ggtaaagaatttctcccagatcgtc

SEQ ID NO: 3357599 - DNA, 25 bp, Homo sapien
tggtaaagaatttctcccagatcgt

SEQ ID NO: 3357600 - DNA, 25 bp, Homo sapien
ttatggtaaagaatttctcccagat

SEQ ID NO: 3357601 - DNA, 25 bp, Homo sapien
tatggtaaagaatttctcccagatc

SEQ ID NO: 3357602 - DNA, 25 bp, Homo sapien
tagaatattcatggtactccaagct

SEQ ID NO: 3357603 - DNA, 25 bp, Homo sapien
ctccttgtagaatattcatggtact

SEQ ID NO: 3357604 - DNA, 25 bp, Homo sapien
tattcatggtactccaagctttgct

SEQ ID NO: 3357605 - DNA, 25 bp, Homo sapien
tgtagaatattcatggtactccaag

SEQ ID NO: 3357606 - DNA, 25 bp, Homo sapien
gagaattatcaatcttgatcacagc

SEQ ID NO: 3357607 - DNA, 25 bp, Homo sapien
gaattatcaatcttgatcacagccc

SEQ ID NO: 3357608 - DNA, 25 bp, Homo sapien
tacagagaattatcaatcttgatca

SEQ ID NO: 3357609 - DNA, 25 bp, Homo sapien
gaatacagagaattatcaatcttga

SEQ ID NO: 3357610 - DNA, 25 bp, Homo sapien
ctttcaaatattgcccgtgcgctca

SEQ ID NO: 3357611 - DNA, 25 bp, Homo sapien
gactttaagcgacccagaaaatgag

SEQ ID NO: 3357612 - DNA, 25 bp, Homo sapien
cagacagaggttcaatcacaggtac

SEQ ID NO: 3357613 - DNA, 25 bp, Homo sapien
ttcctagagggatgagacaaatgct

SEQ ID NO: 3357614 - DNA, 25 bp, Homo sapien
gaaaagatgattagctgccctctga

SEQ ID NO: 3357615 - DNA, 25 bp, Homo sapien
cagaaggtctgccattactgggctg

SEQ ID NO: 3357616 - DNA, 25 bp, Homo sapien
cagttctaaagtaaccctgggagct

SEQ ID NO: 3357617 - DNA, 25 bp, Homo sapien
ttcttaaaagagtagccatgcctcc

SEQ ID NO: 3357618 - DNA, 25 bp, Homo sapien
ccaaaccaagataggttccactgat

SEQ ID NO: 3357619 - DNA, 25 bp, Homo sapien
tattgataatgatgccgccttcacc

SEQ ID NO: 3357620 - DNA, 25 bp, Homo sapien
gcttactcatgtaatccaaaccaag

SEQ ID NO: 3357621 - DNA, 25 bp, Homo sapien
gatgacatattgataatgatgccgc

SEQ ID NO: 3357622 - DNA, 25 bp, Homo sapien
tacaataggtaatgcgtctgaaacg

SEQ ID NO: 3357623 - DNA, 25 bp, Homo sapien
aatttctgttcatgcgtattggcac

SEQ ID NO: 3357624 - DNA, 25 bp, Homo sapien
gaaggcttcagcatgtctgaacaga

SEQ ID NO: 3357625 - DNA, 25 bp, Homo sapien
tctgaaacggaggttacacatgtac

SEQ ID NO: 3357626 - DNA, 25 bp, Homo sapien
tctagattatatacgcatgtgcacg

SEQ ID NO: 3357627 - DNA, 25 bp, Homo sapien
tagagatagggagtttaccttcctc

SEQ ID NO: 3357628 - DNA, 25 bp, Homo sapien
taagcgtaacagtccttagagatag

SEQ ID NO: 3357629 - DNA, 25 bp, Homo sapien
tacaagacagggtctaatgctttgg

SEQ ID NO: 3357630 - DNA, 25 bp, Homo sapien
tcacaataaaccatcagcaacaaca

SEQ ID NO: 3357631 - DNA, 25 bp, Homo sapien
gctatataatgcatttagggaagga

SEQ ID NO: 3357632 - DNA, 25 bp, Homo sapien
cagattagaggattctaagatctca

SEQ ID NO: 3357633 - DNA, 25 bp, Homo sapien
aaaaaatcatcagacagcaaatcag

SEQ ID NO: 3357634 - DNA, 25 bp, Homo sapien
tttctcattattcactccagcatta

SEQ ID NO: 3357635 - DNA, 25 bp, Homo sapien
gacatcccattgaattccaggctca

SEQ ID NO: 3357636 - DNA, 25 bp, Homo sapien
tatgtatgtctaattgccgctttaa

SEQ ID NO: 3357637 - DNA, 25 bp, Homo sapien
tattccttatactctgcccttacca

SEQ ID NO: 3357638 - DNA, 25 bp, Homo sapien
gcccttaccaatgtatagtatacca

SEQ ID NO: 3357639 - DNA, 25 bp, Homo sapien
tcatgaccaacatgccttcccgggt

SEQ ID NO: 3357640 - DNA, 25 bp, Homo sapien
caagcaaatgctcatgtccagacaa

SEQ ID NO: 3357641 - DNA, 25 bp, Homo sapien
gagatctgacctggctctatccttg

SEQ ID NO: 3357642 - DNA, 25 bp, Homo sapien
cccgggtcacttatgtgtctgagta

SEQ ID NO: 3357643 - DNA, 25 bp, Homo sapien
cctgtaagtttattggggcactctc

SEQ ID NO: 3357644 - DNA, 25 bp, Homo sapien
tttattggggcactctcaagttctc

SEQ ID NO: 3357645 - DNA, 25 bp, Homo sapien
agtttattggggcactctcaagttc

SEQ ID NO: 3357646 - DNA, 25 bp, Homo sapien
tgtaagtttattggggcactctcaa

SEQ ID NO: 3357647 - DNA, 25 bp, Homo sapien
catttgattgtcattggactccagc

SEQ ID NO: 3357648 - DNA, 25 bp, Homo sapien
aaaagccggagaaaacatatggtca

SEQ ID NO: 3357649 - DNA, 25 bp, Homo sapien
tttaagtgagtagccggaaacagga

SEQ ID NO: 3357650 - DNA, 25 bp, Homo sapien
gcacttctgtgatgatgctccttga

SEQ ID NO: 3357651 - DNA, 25 bp, Homo sapien
tgttgagagcacgttcccagttgac

SEQ ID NO: 3357652 - DNA, 25 bp, Homo sapien
tgggctgtcagaaggaaacgtatca

SEQ ID NO: 3357653 - DNA, 25 bp, Homo sapien
gcttcaaggtagctgctctcgagga

SEQ ID NO: 3357654 - DNA, 25 bp, Homo sapien
tctttcggttttacagctattgggc

SEQ ID NO: 3357655 - DNA, 25 bp, Homo sapien
tttacactgtacacctgcttcaaga

SEQ ID NO: 3357656 - DNA, 25 bp, Homo sapien
ctctcagttgttgctggtcagccac

SEQ ID NO: 3357657 - DNA, 25 bp, Homo sapien
tcaagattccaatccaccagcgcta

SEQ ID NO: 3357658 - DNA, 25 bp, Homo sapien
gccacatcgcactggatgaacagag

SEQ ID NO: 3357659 - DNA, 25 bp, Homo sapien
cctgcgcagctcacgaaatagacgg

SEQ ID NO: 3357660 - DNA, 25 bp, Homo sapien
gaaatagacggacaaacaataaaca

SEQ ID NO: 3357661 - DNA, 25 bp, Homo sapien
tatagacaagaggagaggaatcgcg

SEQ ID NO: 3357662 - DNA, 25 bp, Homo sapien
ccctcctggacctgaaatttggcaa

SEQ ID NO: 3357663 - DNA, 25 bp, Homo sapien
tgtgtgggcagagaaatttccgcgg

SEQ ID NO: 3357664 - DNA, 25 bp, Homo sapien
agagaaatttccgcggctgggcgcc

SEQ ID NO: 3357665 - DNA, 25 bp, Homo sapien
tgtgggcagagaaatttccgcggct

SEQ ID NO: 3357666 - DNA, 25 bp, Homo sapien
tcgggcggcggggcgagtctcggag

SEQ ID NO: 3357667 - DNA, 25 bp, Homo sapien
gcgccactttgccgttcacgtgcat

SEQ ID NO: 3357668 - DNA, 25 bp, Homo sapien
ccagcgccactttgccgttcacgtg

SEQ ID NO: 3357669 - DNA, 25 bp, Homo sapien
agcgccactttgccgttcacgtgca

SEQ ID NO: 3357670 - DNA, 25 bp, Homo sapien
caccagcgccactttgccgttcacg

SEQ ID NO: 3357671 - DNA, 25 bp, Homo sapien
gatctttgccttccggactcgcaga

SEQ ID NO: 3357672 - DNA, 25 bp, Homo sapien
cctctggctccgtgattggcaggca

SEQ ID NO: 3357673 - DNA, 25 bp, Homo sapien
agtgccctaaagaccaactggatag

SEQ ID NO: 3357674 - DNA, 25 bp, Homo sapien
tgagcgttctggagcgccaagcttc

SEQ ID NO: 3357675 - DNA, 25 bp, Homo sapien
tcttgtcgcgttgttggtaagccgc

SEQ ID NO: 3357676 - DNA, 25 bp, Homo sapien
aaatggcaacatgctgggagaacac

SEQ ID NO: 3357677 - DNA, 25 bp, Homo sapien
tcagctcctctaatggcatgcacag

SEQ ID NO: 3357678 - DNA, 25 bp, Homo sapien
ggcacaaggacgtcagcactggatt

SEQ ID NO: 3357679 - DNA, 25 bp, Homo sapien
aaaaatgtggtattcgccgggtgca

SEQ ID NO: 3357680 - DNA, 25 bp, Homo sapien
tgtggtattcgccgggtgcagcggc

SEQ ID NO: 3357681 - DNA, 25 bp, Homo sapien
aaatgtggtattcgccgggtgcagc

SEQ ID NO: 3357682 - DNA, 25 bp, Homo sapien
ccaaaaatgtggtattcgccgggtg

SEQ ID NO: 3357683 - DNA, 25 bp, Homo sapien
tctcagaagtcattaaaggtcggct

SEQ ID NO: 3357684 - DNA, 25 bp, Homo sapien
cacaagtgtactatttctgcccaga

SEQ ID NO: 3357685 - DNA, 25 bp, Homo sapien
taactaaggatggagctctggctaa

SEQ ID NO: 3357686 - DNA, 25 bp, Homo sapien
taggcaaagttctctgcatcacggg

SEQ ID NO: 3357687 - DNA, 25 bp, Homo sapien
gtgccagatgttcctttggtcaagg

SEQ ID NO: 3357688 - DNA, 25 bp, Homo sapien
attgtaattgcttgagcttctagcc

SEQ ID NO: 3357689 - DNA, 25 bp, Homo sapien
tggtcaaggtggctggttctctctg

SEQ ID NO: 3357690 - DNA, 25 bp, Homo sapien
tatcaaacctttcgtcaccatgaag

SEQ ID NO: 3357691 - DNA, 25 bp, Homo sapien
cagaccttgcagtaccatgctcacg

SEQ ID NO: 3357692 - DNA, 25 bp, Homo sapien
tataatcagtaactccctttttagc

SEQ ID NO: 3357693 - DNA, 25 bp, Homo sapien
taggaacttcataactatactttca

SEQ ID NO: 3357694 - DNA, 25 bp, Homo sapien
agcttttcttaggaacttcataact

SEQ ID NO: 3357695 - DNA, 25 bp, Homo sapien
gtgaagtataatcagtaactccctt

SEQ ID NO: 3357696 - DNA, 25 bp, Homo sapien
tctcttgtcccgtgtttcctgggca

SEQ ID NO: 3357697 - DNA, 25 bp, Homo sapien
tcttctgctggatagctcctgatta

SEQ ID NO: 3357698 - DNA, 25 bp, Homo sapien
ttcctgggcatttgtgcatttactg

SEQ ID NO: 3357699 - DNA, 25 bp, Homo sapien
ctggatagctcctgattactctgaa

SEQ ID NO: 3357700 - DNA, 25 bp, Homo sapien
cagataaattaacaacgcagggaaa

SEQ ID NO: 3357701 - DNA, 25 bp, Homo sapien
ctttgtgtaaattatcagattaaga

SEQ ID NO: 3357702 - DNA, 25 bp, Homo sapien
tcttagctagcatggcaaaagaaaa

SEQ ID NO: 3357703 - DNA, 25 bp, Homo sapien
gaagtgttatcatttacactcagat

SEQ ID NO: 3357704 - DNA, 25 bp, Homo sapien
taatggccctaccaacatacatttc

SEQ ID NO: 3357705 - DNA, 25 bp, Homo sapien
cttttccataatggccctaccaaca

SEQ ID NO: 3357706 - DNA, 25 bp, Homo sapien
ctttgattggtatgagcaccttttc

SEQ ID NO: 3357707 - DNA, 25 bp, Homo sapien
ttccctttgattggtatgagcacct

SEQ ID NO: 3357708 - DNA, 25 bp, Homo sapien
taaatatagtaccttcctgtgcctt

SEQ ID NO: 3357709 - DNA, 25 bp, Homo sapien
aaagttacctttgacatgtgcagag

SEQ ID NO: 3357710 - DNA, 25 bp, Homo sapien
cctttaagttagcagtattttgcag

SEQ ID NO: 3357711 - DNA, 25 bp, Homo sapien
tgcccttcatataaagttacctttg

SEQ ID NO: 3357712 - DNA, 25 bp, Homo sapien
tctgatagagagtctgttagttgca

SEQ ID NO: 3357713 - DNA, 25 bp, Homo sapien
tactgttcacaggttaatgactctg

SEQ ID NO: 3357714 - DNA, 25 bp, Homo sapien
tagcaatacttcttttggtagtcct

SEQ ID NO: 3357715 - DNA, 25 bp, Homo sapien
tgtagaatgtcagggtacttcactc

SEQ ID NO: 3357716 - DNA, 25 bp, Homo sapien
gggttgcccaaaggcgccattgcta

SEQ ID NO: 3357717 - DNA, 25 bp, Homo sapien
tgccatttaagtcacagctccctag

SEQ ID NO: 3357718 - DNA, 25 bp, Homo sapien
tctgacattgggaggaaagctgaat

SEQ ID NO: 3357719 - DNA, 25 bp, Homo sapien
tacctgttgctatctgggtgctcga

SEQ ID NO: 3357720 - DNA, 25 bp, Homo sapien
catagccagggttcaaaatcacttt

SEQ ID NO: 3357721 - DNA, 25 bp, Homo sapien
tgccaggcacacataaggtactcaa

SEQ ID NO: 3357722 - DNA, 25 bp, Homo sapien
gaataagcttgtgtaagttcacacg

SEQ ID NO: 3357723 - DNA, 25 bp, Homo sapien
taatcttctatgttggacaccaagc

SEQ ID NO: 3357724 - DNA, 25 bp, Homo sapien
ccttccatgagatcctgggtattca

SEQ ID NO: 3357725 - DNA, 25 bp, Homo sapien
gattccctaatatagccactgagag

SEQ ID NO: 3357726 - DNA, 25 bp, Homo sapien
taagatgagcagtccggatgattcc

SEQ ID NO: 3357727 - DNA, 25 bp, Homo sapien
tggagaagttttaaacaccctcagc

SEQ ID NO: 3357728 - DNA, 25 bp, Homo sapien
catataaacacattggcagtaaagc

SEQ ID NO: 3357729 - DNA, 25 bp, Homo sapien
gcagtaaagcttccacttacatggt

SEQ ID NO: 3357730 - DNA, 25 bp, Homo sapien
aaattattcacatcttgcgaatggc

SEQ ID NO: 3357731 - DNA, 25 bp, Homo sapien
caagggtgctggcttgaattgttca

SEQ ID NO: 3357732 - DNA, 25 bp, Homo sapien
gcccggtcgataaagaccttcctca

SEQ ID NO: 3357733 - DNA, 25 bp, Homo sapien
caggctcgggagatggtatcaatct

SEQ ID NO: 3357734 - DNA, 25 bp, Homo sapien
aagaattttatagataacccagtag

SEQ ID NO: 3357735 - DNA, 25 bp, Homo sapien
tgctgctgatgaatatcctcatgcc

SEQ ID NO: 3357736 - DNA, 25 bp, Homo sapien
aagctgaatcggctttcccttacct

SEQ ID NO: 3357737 - DNA, 25 bp, Homo sapien
gctgaatcggctttcccttacctca

SEQ ID NO: 3357738 - DNA, 25 bp, Homo sapien
gggccctttggagtcatgccatcct

SEQ ID NO: 3357739 - DNA, 25 bp, Homo sapien
tgaagctgaatcggctttcccttac

SEQ ID NO: 3357740 - DNA, 25 bp, Homo sapien
ttattggaacatggatcgcacaggt

SEQ ID NO: 3357741 - DNA, 25 bp, Homo sapien
ggtttatcccctgttgaattggcag

SEQ ID NO: 3357742 - DNA, 25 bp, Homo sapien
gatcgcacaggtttatcccctgttg

SEQ ID NO: 3357743 - DNA, 25 bp, Homo sapien
tatcccctgttgaattggcagatgg

SEQ ID NO: 3357744 - DNA, 25 bp, Homo sapien
tatgtggtaatatgctggggaacag

SEQ ID NO: 3357745 - DNA, 25 bp, Homo sapien
aaggaggcaaaggatcagctatagt

SEQ ID NO: 3357746 - DNA, 25 bp, Homo sapien
gaacaggaaagcaatataaagagtc

SEQ ID NO: 3357747 - DNA, 25 bp, Homo sapien
caaaggatcagctatagtagcaggt

SEQ ID NO: 3357748 - DNA, 25 bp, Homo sapien
tctgagaaacggtaaaacttctcca

SEQ ID NO: 3357749 - DNA, 25 bp, Homo sapien
ctgagaaacggtaaaacttctccag

SEQ ID NO: 3357750 - DNA, 25 bp, Homo sapien
tatctgagaaacggtaaaacttctc

SEQ ID NO: 3357751 - DNA, 25 bp, Homo sapien
aaaacttctccagtgcaaaagcttc

SEQ ID NO: 3357752 - DNA, 25 bp, Homo sapien
ttctctttcgtcgaaatctcagaag

SEQ ID NO: 3357753 - DNA, 25 bp, Homo sapien
gttgtcttgatacaaaatttacagc

SEQ ID NO: 3357754 - DNA, 25 bp, Homo sapien
tctttgtgttgtcttgatacaaaat

SEQ ID NO: 3357755 - DNA, 25 bp, Homo sapien
tctttctctttcgtcgaaatctcag

SEQ ID NO: 3357756 - DNA, 25 bp, Homo sapien
aaaaggaggcatactgccatccaaa

SEQ ID NO: 3357757 - DNA, 25 bp, Homo sapien
tatcaatagctttgacatatgaaac

SEQ ID NO: 3357758 - DNA, 25 bp, Homo sapien
aggaggcatactgccatccaaatat

SEQ ID NO: 3357759 - DNA, 25 bp, Homo sapien
acaaaaaggaggcatactgccatcc

SEQ ID NO: 3357760 - DNA, 25 bp, Homo sapien
tctttgctccccctcctgtatgtct

SEQ ID NO: 3357761 - DNA, 25 bp, Homo sapien
tgcctcctcggtataactctgtgaa

SEQ ID NO: 3357762 - DNA, 25 bp, Homo sapien
tatcattccaatcttgaccaccttc

SEQ ID NO: 3357763 - DNA, 25 bp, Homo sapien
agaatgcctcctcggtataactctg

SEQ ID NO: 3357764 - DNA, 25 bp, Homo sapien
aactatcttcaaatgcccaggccag

SEQ ID NO: 3357765 - DNA, 25 bp, Homo sapien
gtggtagatcctgtaagatgtctgc

SEQ ID NO: 3357766 - DNA, 25 bp, Homo sapien
caggccagaataacgcatctcagca

SEQ ID NO: 3357767 - DNA, 25 bp, Homo sapien
tgctggctagcaccacttgaatgcc

SEQ ID NO: 3357768 - DNA, 25 bp, Homo sapien
ttgctagctttgatcctaaaatctg

SEQ ID NO: 3357769 - DNA, 25 bp, Homo sapien
tagctttgatcctaaaatctgacag

SEQ ID NO: 3357770 - DNA, 25 bp, Homo sapien
gctagctttgatcctaaaatctgac

SEQ ID NO: 3357771 - DNA, 25 bp, Homo sapien
tgtaagatcctccatatttgctagc

SEQ ID NO: 3357772 - DNA, 25 bp, Homo sapien
aaacacagaatcaagtcactttggc

SEQ ID NO: 3357773 - DNA, 25 bp, Homo sapien
gaaatagagaaagcctgcctcttgc

SEQ ID NO: 3357774 - DNA, 25 bp, Homo sapien
tcatgttcagggagcttgcctaacc

SEQ ID NO: 3357775 - DNA, 25 bp, Homo sapien
gcctcttgcatctcaaataagaata

SEQ ID NO: 3357776 - DNA, 25 bp, Homo sapien
gtagctctcctgaccccattacatt

SEQ ID NO: 3357777 - DNA, 25 bp, Homo sapien
tattagctagtatgatccatgaaca

SEQ ID NO: 3357778 - DNA, 25 bp, Homo sapien
cacttggatcatgtttgtactgaac

SEQ ID NO: 3357779 - DNA, 25 bp, Homo sapien
gaaaacctgattactatgtagctct

SEQ ID NO: 3357780 - DNA, 25 bp, Homo sapien
ttagcacagtggttatccccagagc

SEQ ID NO: 3357781 - DNA, 25 bp, Homo sapien
ttttggcaaggaagctcgtgatcct

SEQ ID NO: 3357782 - DNA, 25 bp, Homo sapien
tggttatccccagagctaccctggc

SEQ ID NO: 3357783 - DNA, 25 bp, Homo sapien
cgtgatcctgaactctgtgtagtca

SEQ ID NO: 3357784 - DNA, 25 bp, Homo sapien
ctggatcagatagtatcccatttgt

SEQ ID NO: 3357785 - DNA, 25 bp, Homo sapien
gaatgaaacccaggatagaataaca

SEQ ID NO: 3357786 - DNA, 25 bp, Homo sapien
ttgtcgctccagatggaatcgcact

SEQ ID NO: 3357787 - DNA, 25 bp, Homo sapien
tagaataacaatcaggagactggga

SEQ ID NO: 3357788 - DNA, 25 bp, Homo sapien
aatggtagtgactttttgatccgat

SEQ ID NO: 3357789 - DNA, 25 bp, Homo sapien
gataagagagactagggactttgaa

SEQ ID NO: 3357790 - DNA, 25 bp, Homo sapien
tgactttttgatccgatattgtgaa

SEQ ID NO: 3357791 - DNA, 25 bp, Homo sapien
gaaaatgctgagtccacgatgaatc

SEQ ID NO: 3357792 - DNA, 25 bp, Homo sapien
aagcattactttcgtctcatacaga

SEQ ID NO: 3357793 - DNA, 25 bp, Homo sapien
tacagtgtttactgcccaagaatgg

SEQ ID NO: 3357794 - DNA, 25 bp, Homo sapien
tgtaaagaacactactcaaccccta

SEQ ID NO: 3357795 - DNA, 25 bp, Homo sapien
gaaaaacattgatctatgaacagtt

SEQ ID NO: 3357796 - DNA, 25 bp, Homo sapien
tagtgcagtatcgtaaatctttttc

SEQ ID NO: 3357797 - DNA, 25 bp, Homo sapien
cacttgtacgggtgcctcatcttgc

SEQ ID NO: 3357798 - DNA, 25 bp, Homo sapien
tgtaatgtttagtgcagtatcgtaa

SEQ ID NO: 3357799 - DNA, 25 bp, Homo sapien
gagtccttctgccacttgtacgggt

SEQ ID NO: 3357800 - DNA, 25 bp, Homo sapien
ctaggcaaaacataataaaaatatg

SEQ ID NO: 3357801 - DNA, 25 bp, Homo sapien
caaaacataataaaaatatgaatag

SEQ ID NO: 3357802 - DNA, 25 bp, Homo sapien
taggcaaaacataataaaaatatga

SEQ ID NO: 3357803 - DNA, 25 bp, Homo sapien
ggcaaaacataataaaaatatgaat

SEQ ID NO: 3357804 - DNA, 25 bp, Homo sapien
agtaaatttcattgacctgacaagg

SEQ ID NO: 3357805 - DNA, 25 bp, Homo sapien
tcttggcacatgctgactattgcta

SEQ ID NO: 3357806 - DNA, 25 bp, Homo sapien
tcattgacctgacaaggaacaactg

SEQ ID NO: 3357807 - DNA, 25 bp, Homo sapien
ggagaaatattgctcaagtaaattt

SEQ ID NO: 3357808 - DNA, 25 bp, Homo sapien
tcatttgacatcaaacatctttgta

SEQ ID NO: 3357809 - DNA, 25 bp, Homo sapien
tcacaaagagttccttattgtcttt

SEQ ID NO: 3357810 - DNA, 25 bp, Homo sapien
tttcattgattttcatgtctgcatg

SEQ ID NO: 3357811 - DNA, 25 bp, Homo sapien
ctctaactaggaattttgtatcatc

SEQ ID NO: 3357812 - DNA, 25 bp, Homo sapien
tcctctaactaggaattttgtatca

SEQ ID NO: 3357813 - DNA, 25 bp, Homo sapien
tctaactaggaattttgtatcatcc

SEQ ID NO: 3357814 - DNA, 25 bp, Homo sapien
cctctaactaggaattttgtatcat

SEQ ID NO: 3357815 - DNA, 25 bp, Homo sapien
cgatttacaatcttttatcttgtca

SEQ ID NO: 3357816 - DNA, 25 bp, Homo sapien
tatgtagatttgtatgtatgagtat

SEQ ID NO: 3357817 - DNA, 25 bp, Homo sapien
tatcttgtcattttaaaccactatt

SEQ ID NO: 3357818 - DNA, 25 bp, Homo sapien
ccagtgggttccaccgatttacaat

SEQ ID NO: 3357819 - DNA, 25 bp, Homo sapien
gaaccactctgtatatggcttttaa

SEQ ID NO: 3357820 - DNA, 25 bp, Homo sapien
cagtcctttctctttcgaggttgaa

SEQ ID NO: 3357821 - DNA, 25 bp, Homo sapien
aatgtaggcatttcttaagcgtctg

SEQ ID NO: 3357822 - DNA, 25 bp, Homo sapien
gattttgttacacagaactccttca

SEQ ID NO: 3357823 - DNA, 25 bp, Homo sapien
attatacatgtttgtacatccatgg

SEQ ID NO: 3357824 - DNA, 25 bp, Homo sapien
ccagttgcattatacatgtttgtac

SEQ ID NO: 3357825 - DNA, 25 bp, Homo sapien
ccatgggaaaattcttgagatccat

SEQ ID NO: 3357826 - DNA, 25 bp, Homo sapien
tggacaggaaagtgttaatgttaat

SEQ ID NO: 3357827 - DNA, 25 bp, Homo sapien
tgtataccagtattccgctcattgg

SEQ ID NO: 3357828 - DNA, 25 bp, Homo sapien
tcagggtcaggaaatagccctctag

SEQ ID NO: 3357829 - DNA, 25 bp, Homo sapien
ggataacctagatgctgtataccag

SEQ ID NO: 3357830 - DNA, 25 bp, Homo sapien
cccggtgtgggataagggaatcatc

SEQ ID NO: 3357831 - DNA, 25 bp, Homo sapien
ggaaagccagatctctcatgaaaca

SEQ ID NO: 3357832 - DNA, 25 bp, Homo sapien
tctaggagccgagagaccatctgtt

SEQ ID NO: 3357833 - DNA, 25 bp, Homo sapien
taagttttggattgtgcaagccagg

SEQ ID NO: 3357834 - DNA, 25 bp, Homo sapien
tcaattagtcgtctttgcaaggacc

SEQ ID NO: 3357835 - DNA, 25 bp, Homo sapien
aggatattcactgtacgcgaggcgg

SEQ ID NO: 3357836 - DNA, 25 bp, Homo sapien
cgaggcggggatcattccatttctg

SEQ ID NO: 3357837 - DNA, 25 bp, Homo sapien
gtcgaggtctaaagagtcgtcagga

SEQ ID NO: 3357838 - DNA, 25 bp, Homo sapien
gtagtgacttcatgaaagttggcac

SEQ ID NO: 3357839 - DNA, 25 bp, Homo sapien
gaagctcagacttcttaccaatgtc

SEQ ID NO: 3357840 - DNA, 25 bp, Homo sapien
acttaaggcaaataccactggattc

SEQ ID NO: 3357841 - DNA, 25 bp, Homo sapien
aaatcctaatcagagatcttggcaa

SEQ ID NO: 3357842 - DNA, 25 bp, Homo sapien
tattaccagttttcgaagacatctc

SEQ ID NO: 3357843 - DNA, 25 bp, Homo sapien
cacagaataccgacacccaatggtg

SEQ ID NO: 3357844 - DNA, 25 bp, Homo sapien
tgattctgcagtaatggcccattgg

SEQ ID NO: 3357845 - DNA, 25 bp, Homo sapien
cccgccacagggagagttgtcgtct

SEQ ID NO: 3357846 - DNA, 25 bp, Homo sapien
acaatataggttcccatgcgtcagg

SEQ ID NO: 3357847 - DNA, 25 bp, Homo sapien
tggccacctgaattgaagtacatga

SEQ ID NO: 3357848 - DNA, 25 bp, Homo sapien
caaaccaagtattgaaagccatagc

SEQ ID NO: 3357849 - DNA, 25 bp, Homo sapien
ggccacctgaattgaagtacatgat

SEQ ID NO: 3357850 - DNA, 25 bp, Homo sapien
ccaagtattgaaagccatagcaaag

SEQ ID NO: 3357851 - DNA, 25 bp, Homo sapien
taggtaggggcataatcatgaatcc

SEQ ID NO: 3357852 - DNA, 25 bp, Homo sapien
tatgacagcattgctgttacgtagc

SEQ ID NO: 3357853 - DNA, 25 bp, Homo sapien
gacagcattgctgttacgtagccca

SEQ ID NO: 3357854 - DNA, 25 bp, Homo sapien
tgaatcccttcctcgtcagaatacc

SEQ ID NO: 3357855 - DNA, 25 bp, Homo sapien
aaagtcttgtgccagttccgaggct

SEQ ID NO: 3357856 - DNA, 25 bp, Homo sapien
tagaaagtcttgtgccagttccgag

SEQ ID NO: 3357857 - DNA, 25 bp, Homo sapien
ctggtagaaagtcttgtgccagttc

SEQ ID NO: 3357858 - DNA, 25 bp, Homo sapien
tgtgccagttccgaggcttcctgag

SEQ ID NO: 3357859 - DNA, 25 bp, Homo sapien
gaacaggatctgtagacagtccctt

SEQ ID NO: 3357860 - DNA, 25 bp, Homo sapien
tgtgaacaggatctgtagacagtcc

SEQ ID NO: 3357861 - DNA, 25 bp, Homo sapien
caggatctgtagacagtccctttct

SEQ ID NO: 3357862 - DNA, 25 bp, Homo sapien
ctttgtgaacaggatctgtagacag

SEQ ID NO: 3357863 - DNA, 25 bp, Homo sapien
acttggtggatgaattcattaagca

SEQ ID NO: 3357864 - DNA, 25 bp, Homo sapien
gcagagatttattcatatgcctcat

SEQ ID NO: 3357865 - DNA, 25 bp, Homo sapien
ttataaggatgacttggtggatgaa

SEQ ID NO: 3357866 - DNA, 25 bp, Homo sapien
gatgattataaggatgacttggtgg

SEQ ID NO: 3357867 - DNA, 25 bp, Homo sapien
gggtcaccaaagtgtataacattca

SEQ ID NO: 3357868 - DNA, 25 bp, Homo sapien
ggggtcaccaaagtgtataacattc

SEQ ID NO: 3357869 - DNA, 25 bp, Homo sapien
ggtcaccaaagtgtataacattcat

SEQ ID NO: 3357870 - DNA, 25 bp, Homo sapien
ttgcatgtgacattaactggagggc

SEQ ID NO: 3357871 - DNA, 25 bp, Homo sapien
tatgttgcatgtgacattaactgga

SEQ ID NO: 3357872 - DNA, 25 bp, Homo sapien
gtctctgcgatagagccaaagctgt

SEQ ID NO: 3357873 - DNA, 25 bp, Homo sapien
catggtcgtctctgcgatagagcca

SEQ ID NO: 3357874 - DNA, 25 bp, Homo sapien
tgaaaacataagggctgtttagaga

SEQ ID NO: 3357875 - DNA, 25 bp, Homo sapien
gaaaacataagggctgtttagagac

SEQ ID NO: 3357876 - DNA, 25 bp, Homo sapien
aaaacataagggctgtttagagact

SEQ ID NO: 3357877 - DNA, 25 bp, Homo sapien
atgaaaacataagggctgtttagag

SEQ ID NO: 3357878 - DNA, 25 bp, Homo sapien
ttggagcacttcgagatcttgcact

SEQ ID NO: 3357879 - DNA, 25 bp, Homo sapien
gatgtcctgcccattaatttatcca

SEQ ID NO: 3357880 - DNA, 25 bp, Homo sapien
gtctgtttcctttgtggcaaccaaa

SEQ ID NO: 3357881 - DNA, 25 bp, Homo sapien
gcacttcgagatcttgcactgtctg

SEQ ID NO: 3357882 - DNA, 25 bp, Homo sapien
ctgactttctggaactgatgtgttc

SEQ ID NO: 3357883 - DNA, 25 bp, Homo sapien
agctggggcctgcttgttaagatca

SEQ ID NO: 3357884 - DNA, 25 bp, Homo sapien
actgactttctggaactgatgtgtt

SEQ ID NO: 3357885 - DNA, 25 bp, Homo sapien
aagctggggcctgcttgttaagatc

SEQ ID NO: 3357886 - DNA, 25 bp, Homo sapien
gcactgtgctacaaacagtaaagta

SEQ ID NO: 3357887 - DNA, 25 bp, Homo sapien
taaagtgttcacagttcagtcgatt

SEQ ID NO: 3357888 - DNA, 25 bp, Homo sapien
aatttgttcgatgcaaagcactgtg

SEQ ID NO: 3357889 - DNA, 25 bp, Homo sapien
gtgtggtctccttatgaagtgagca

SEQ ID NO: 3357890 - DNA, 25 bp, Homo sapien
ttgaaaatgtacaatgtgtcgagca

SEQ ID NO: 3357891 - DNA, 25 bp, Homo sapien
ggtctgagctccacaaggcagaatg

SEQ ID NO: 3357892 - DNA, 25 bp, Homo sapien
cagtgaaggtctgagctccacaagg

SEQ ID NO: 3357893 - DNA, 25 bp, Homo sapien
tttgcttcagtgaaggtctgagctc

SEQ ID NO: 3357894 - DNA, 25 bp, Homo sapien
gctccacaaggcagaatgcatctgg

SEQ ID NO: 3357895 - DNA, 25 bp, Homo sapien
cagaagtaaaatcccgaaactaatg

SEQ ID NO: 3357896 - DNA, 25 bp, Homo sapien
gaaactaatgtccgaaagtgtctca

SEQ ID NO: 3357897 - DNA, 25 bp, Homo sapien
atcccgaaactaatgtccgaaagtg

SEQ ID NO: 3357898 - DNA, 25 bp, Homo sapien
tgcttcccagaagtaaaatcccgaa

SEQ ID NO: 3357899 - DNA, 25 bp, Homo sapien
gaaaatagtcttatccaaggcatgg

SEQ ID NO: 3357900 - DNA, 25 bp, Homo sapien
cccgcatggtgttggtgtagactga

SEQ ID NO: 3357901 - DNA, 25 bp, Homo sapien
gaaatgtctgaagtgcctaggtgct

SEQ ID NO: 3357902 - DNA, 25 bp, Homo sapien
aaatgtacaatctaaccccgcatgg

SEQ ID NO: 3357903 - DNA, 25 bp, Homo sapien
gtgtagacttagcaccaaggtcagc

SEQ ID NO: 3357904 - DNA, 25 bp, Homo sapien
tcagacatttgaatctgcggcagct

SEQ ID NO: 3357905 - DNA, 25 bp, Homo sapien
tggtgtagacttagcaccaaggtca

SEQ ID NO: 3357906 - DNA, 25 bp, Homo sapien
ctcagggtcagacatttgaatctgc

SEQ ID NO: 3357907 - DNA, 25 bp, Homo sapien
ggttgacatttggaggaaggatatt

SEQ ID NO: 3357908 - DNA, 25 bp, Homo sapien
atggttgacatttggaggaaggata

SEQ ID NO: 3357909 - DNA, 25 bp, Homo sapien
tggttgacatttggaggaaggatat

SEQ ID NO: 3357910 - DNA, 25 bp, Homo sapien
ttgacatttggaggaaggatattta

SEQ ID NO: 3357911 - DNA, 25 bp, Homo sapien
tctctgacagccctctgcataacag

SEQ ID NO: 3357912 - DNA, 25 bp, Homo sapien
gacagccctctgcataacaggaaaa

SEQ ID NO: 3357913 - DNA, 25 bp, Homo sapien
agcccacaatgaaaagagttgtttc

SEQ ID NO: 3357914 - DNA, 25 bp, Homo sapien
tggatggaagcccacaatgaaaaga

SEQ ID NO: 3357915 - DNA, 25 bp, Homo sapien
tgaagtagggtttatttgctaccat

SEQ ID NO: 3357916 - DNA, 25 bp, Homo sapien
tgggcagaatggtcaaataaccaac

SEQ ID NO: 3357917 - DNA, 25 bp, Homo sapien
ccaacagctagctgacgggtagtat

SEQ ID NO: 3357918 - DNA, 25 bp, Homo sapien
tgtaagtaaggacctggaccaccaa

SEQ ID NO: 3357919 - DNA, 25 bp, Homo sapien
gagagccaggttgaactatgcatca

SEQ ID NO: 3357920 - DNA, 25 bp, Homo sapien
tcatcaaaacctgtggcctgagggc

SEQ ID NO: 3357921 - DNA, 25 bp, Homo sapien
catcttcggcctagtctcatcttct

SEQ ID NO: 3357922 - DNA, 25 bp, Homo sapien
tgaaaacaagccctcacaggcaaag

SEQ ID NO: 3357923 - DNA, 25 bp, Homo sapien
gcctgagggcacatatggaaatccc

SEQ ID NO: 3357924 - DNA, 25 bp, Homo sapien
ttttattatgttgtctttatcgact

SEQ ID NO: 3357925 - DNA, 25 bp, Homo sapien
attttattatgttgtctttatcgac

SEQ ID NO: 3357926 - DNA, 25 bp, Homo sapien
ttataggaaccgtatctctgctaaa

SEQ ID NO: 3357927 - DNA, 25 bp, Homo sapien
gtatctctgctaaaccagacctcat

SEQ ID NO: 3357928 - DNA, 25 bp, Homo sapien
gaaccgtatctctgctaaaccagac

SEQ ID NO: 3357929 - DNA, 25 bp, Homo sapien
taggaaccgtatctctgctaaacca

SEQ ID NO: 3357930 - DNA, 25 bp, Homo sapien
gcaaagaaagcccatccgagttcca

SEQ ID NO: 3357931 - DNA, 25 bp, Homo sapien
ggttccgcaataggccatctacagg

SEQ ID NO: 3357932 - DNA, 25 bp, Homo sapien
caataacaaggttccgcaataggcc

SEQ ID NO: 3357933 - DNA, 25 bp, Homo sapien
catctacaggttgtggagcaaagaa

SEQ ID NO: 3357934 - DNA, 25 bp, Homo sapien
gagcctccgagtgtcttggtccgtt

SEQ ID NO: 3357935 - DNA, 25 bp, Homo sapien
taaactacttactcgatctcctagc

SEQ ID NO: 3357936 - DNA, 25 bp, Homo sapien
acttcttgcagaatttaggatccgc

SEQ ID NO: 3357937 - DNA, 25 bp, Homo sapien
ccgtttgtgacaggcttagggattg

SEQ ID NO: 3357938 - DNA, 25 bp, Homo sapien
atctgtgaccaggtaatagtatgag

SEQ ID NO: 3357939 - DNA, 25 bp, Homo sapien
gtattccattatatggttcaatttt

SEQ ID NO: 3357940 - DNA, 25 bp, Homo sapien
ttccattatatggttcaattttgag

SEQ ID NO: 3357941 - DNA, 25 bp, Homo sapien
tccattatatggttcaattttgagg

SEQ ID NO: 3357942 - DNA, 25 bp, Homo sapien
tcaaagatttcttctactgatgtgg

SEQ ID NO: 3357943 - DNA, 25 bp, Homo sapien
tattaacacattccattgagggagg

SEQ ID NO: 3357944 - DNA, 25 bp, Homo sapien
tgtgttagccctccctcggttttgc

SEQ ID NO: 3357945 - DNA, 25 bp, Homo sapien
cagctaatgggaagaaacgtggtta

SEQ ID NO: 3357946 - DNA, 25 bp, Homo sapien
tggttaagaatttccccttgtgcca

SEQ ID NO: 3357947 - DNA, 25 bp, Homo sapien
ctccaacactgtgagaactatcctg

SEQ ID NO: 3357948 - DNA, 25 bp, Homo sapien
cctgagatgcttcaaattgtgtcct

SEQ ID NO: 3357949 - DNA, 25 bp, Homo sapien
cacaatctatgctggactactcgta

SEQ ID NO: 3357950 - DNA, 25 bp, Homo sapien
gaatcacagcccacaatctatgctg

SEQ ID NO: 3357951 - DNA, 25 bp, Homo sapien
gctagatggataggcttctcgaacc

SEQ ID NO: 3357952 - DNA, 25 bp, Homo sapien
tctcgaaccctttcaaactgtcaaa

SEQ ID NO: 3357953 - DNA, 25 bp, Homo sapien
gataggcttctcgaaccctttcaaa

SEQ ID NO: 3357954 - DNA, 25 bp, Homo sapien
ctctgctagatggataggcttctcg

SEQ ID NO: 3357955 - DNA, 25 bp, Homo sapien
gtctctacccatggacgtttgctgg

SEQ ID NO: 3357956 - DNA, 25 bp, Homo sapien
caaaagtattggcttctgatgtacc

SEQ ID NO: 3357957 - DNA, 25 bp, Homo sapien
ttgaggctacttccatgatagatgc

SEQ ID NO: 3357958 - DNA, 25 bp, Homo sapien
tacatgaatgcatttcggagctgaa

SEQ ID NO: 3357959 - DNA, 25 bp, Homo sapien
cctggtatgatttcaatttggtaag

SEQ ID NO: 3357960 - DNA, 25 bp, Homo sapien
gattttttgtttgactcaatggttg

SEQ ID NO: 3357961 - DNA, 25 bp, Homo sapien
ccatttgtgaattctctagttttcc

SEQ ID NO: 3357962 - DNA, 25 bp, Homo sapien
attgtggctagaaaagatacctggt

SEQ ID NO: 3357963 - DNA, 25 bp, Homo sapien
tacacgatggtacatctaaaagaac

SEQ ID NO: 3357964 - DNA, 25 bp, Homo sapien
cagtgcaccaaaggctctacacgat

SEQ ID NO: 3357965 - DNA, 25 bp, Homo sapien
caaaggctctacacgatggtacatc

SEQ ID NO: 3357966 - DNA, 25 bp, Homo sapien
ttattctccatgtttcagtgcacca

SEQ ID NO: 3357967 - DNA, 25 bp, Homo sapien
ggagtgggcaccagtcctcatgtgc

SEQ ID NO: 3357968 - DNA, 25 bp, Homo sapien
cctcatgtgcaggaaacgtatttca

SEQ ID NO: 3357969 - DNA, 25 bp, Homo sapien
tgggcaagaagatagtcccgacccc

SEQ ID NO: 3357970 - DNA, 25 bp, Homo sapien
ctgtgtcttcatcagatatggagtg

SEQ ID NO: 3357971 - DNA, 25 bp, Homo sapien
agctgagctcaccaaggatactgct

SEQ ID NO: 3357972 - DNA, 25 bp, Homo sapien
ttctgtcccatgtcacctcatctat

SEQ ID NO: 3357973 - DNA, 25 bp, Homo sapien
gctcaccaaggatactgcttctgcc

SEQ ID NO: 3357974 - DNA, 25 bp, Homo sapien
catctattcttagtggccacaagcc

SEQ ID NO: 3357975 - DNA, 25 bp, Homo sapien
tgcagggcctgagtaacacttggct

SEQ ID NO: 3357976 - DNA, 25 bp, Homo sapien
tcactaggaccacagacctttgcgt

SEQ ID NO: 3357977 - DNA, 25 bp, Homo sapien
tctgttgggctcacacagcatttct

SEQ ID NO: 3357978 - DNA, 25 bp, Homo sapien
cctcctgttacaaggaccatgtact

SEQ ID NO: 3357979 - DNA, 25 bp, Homo sapien
gcttgccaaaaagatgctactcaag

SEQ ID NO: 3357980 - DNA, 25 bp, Homo sapien
caaaaagatgctactcaagaaacca

SEQ ID NO: 3357981 - DNA, 25 bp, Homo sapien
tgccaaaaagatgctactcaagaaa

SEQ ID NO: 3357982 - DNA, 25 bp, Homo sapien
tatggtttccactaataaaggtctg

SEQ ID NO: 3357983 - DNA, 25 bp, Homo sapien
atttagaatcatagtcagaggacat

SEQ ID NO: 3357984 - DNA, 25 bp, Homo sapien
attccaaatggcatgatttcagaaa

SEQ ID NO: 3357985 - DNA, 25 bp, Homo sapien
gattccaaatggcatgatttcagaa

SEQ ID NO: 3357986 - DNA, 25 bp, Homo sapien
tctcaagctcccaagacagaatatc

SEQ ID NO: 3357987 - DNA, 25 bp, Homo sapien
taggctactagaacagtgctactgg

SEQ ID NO: 3357988 - DNA, 25 bp, Homo sapien
gccactagtggaagtctgtcaccga

SEQ ID NO: 3357989 - DNA, 25 bp, Homo sapien
tagaagtcttgatagttctcctcag

SEQ ID NO: 3357990 - DNA, 25 bp, Homo sapien
gccaagatagcgccattgctttcca

SEQ ID NO: 3357991 - DNA, 25 bp, Homo sapien
agaggaatcaattgaacccaggaga

SEQ ID NO: 3357992 - DNA, 25 bp, Homo sapien
aagatagcgccattgctttccagcc

SEQ ID NO: 3357993 - DNA, 25 bp, Homo sapien
gaggaatcaattgaacccaggagac

SEQ ID NO: 3357994 - DNA, 25 bp, Homo sapien
cctgttcaagtccattagaagcttc

SEQ ID NO: 3357995 - DNA, 25 bp, Homo sapien
tgaagtgactctcaagtaacctgtt

SEQ ID NO: 3357996 - DNA, 25 bp, Homo sapien
tccccaggtgttcattattacatta

SEQ ID NO: 3357997 - DNA, 25 bp, Homo sapien
ccaggtgttcattattacattacca

SEQ ID NO: 3357998 - DNA, 25 bp, Homo sapien
agctggttgatctaagcaggtggcc

SEQ ID NO: 3357999 - DNA, 25 bp, Homo sapien
tcctcctattcctcaggtagctact

SEQ ID NO: 3358000 - DNA, 25 bp, Homo sapien
caggtggccacgggaactccccatt

SEQ ID NO: 3358001 - DNA, 25 bp, Homo sapien
gtagctactgccatataccagccct

SEQ ID NO: 3358002 - DNA, 25 bp, Homo sapien
gactctcagtcctgatttcctctga

SEQ ID NO: 3358003 - DNA, 25 bp, Homo sapien
tggactttattcgaatcatccctcc

SEQ ID NO: 3358004 - DNA, 25 bp, Homo sapien
cctcaaatttgagcattggccatga

SEQ ID NO: 3358005 - DNA, 25 bp, Homo sapien
tcctcgccttggagcattcatggat

SEQ ID NO: 3358006 - DNA, 25 bp, Homo sapien
agaaatgcttctaggagtctccaga

SEQ ID NO: 3358007 - DNA, 25 bp, Homo sapien
gaagaagctacggacaattctgaca

SEQ ID NO: 3358008 - DNA, 25 bp, Homo sapien
cagtggctacagcagtactctcatt

SEQ ID NO: 3358009 - DNA, 25 bp, Homo sapien
caggcagaggctactgttggaataa

SEQ ID NO: 3358010 - DNA, 25 bp, Homo sapien
tcaatgagccgagatcatcccactg

SEQ ID NO: 3358011 - DNA, 25 bp, Homo sapien
tgggcatcgtggtgcacacttgtag

SEQ ID NO: 3358012 - DNA, 25 bp, Homo sapien
tttcaatgagccgagatcatcccac

SEQ ID NO: 3358013 - DNA, 25 bp, Homo sapien
ggtttcaatgagccgagatcatccc

SEQ ID NO: 3358014 - DNA, 25 bp, Homo sapien
tctttccacgcatatagcacctgat

SEQ ID NO: 3358015 - DNA, 25 bp, Homo sapien
aagagtatgaaattcgccttcctca

SEQ ID NO: 3358016 - DNA, 25 bp, Homo sapien
tctccaactcttatccagtcaagag

SEQ ID NO: 3358017 - DNA, 25 bp, Homo sapien
ctcactttcacaactatccattggc

SEQ ID NO: 3358018 - DNA, 25 bp, Homo sapien
taaggaaagcatctatgtatgtctt

SEQ ID NO: 3358019 - DNA, 25 bp, Homo sapien
tactatgaagttatgttatcttgca

SEQ ID NO: 3358020 - DNA, 25 bp, Homo sapien
ttatcttgcattcgttctgttcagc

SEQ ID NO: 3358021 - DNA, 25 bp, Homo sapien
catgtgaggcactaaccagtttgta

SEQ ID NO: 3358022 - DNA, 25 bp, Homo sapien
tggtctagggggcttccgaggcgat

SEQ ID NO: 3358023 - DNA, 25 bp, Homo sapien
cagcgtcagtcttcagtcgctaagc

SEQ ID NO: 3358024 - DNA, 25 bp, Homo sapien
ttccgaggcgatccgcagcgtcagt

SEQ ID NO: 3358025 - DNA, 25 bp, Homo sapien
gctcggcgtccgtgatggtctaggg

SEQ ID NO: 3358026 - DNA, 25 bp, Homo sapien
tgagctggttggtctgaggacctgt

SEQ ID NO: 3358027 - DNA, 25 bp, Homo sapien
tttctcacggagcaaagaacaggag

SEQ ID NO: 3358028 - DNA, 25 bp, Homo sapien
tggtctgaggacctgtggtcatagg

SEQ ID NO: 3358029 - DNA, 25 bp, Homo sapien
tggtcataggtggatctttctcacg

SEQ ID NO: 3358030 - DNA, 25 bp, Homo sapien
gcaatgtcattaaatccccgatctg

SEQ ID NO: 3358031 - DNA, 25 bp, Homo sapien
cattaaatccccgatctgggagttt

SEQ ID NO: 3358032 - DNA, 25 bp, Homo sapien
ttctgcctatgttgtccattcatca

SEQ ID NO: 3358033 - DNA, 25 bp, Homo sapien
ctgcctatgttgtccattcatcatc

SEQ ID NO: 3358034 - DNA, 25 bp, Homo sapien
tgtttgtcgtctgtggaatttggct

SEQ ID NO: 3358035 - DNA, 25 bp, Homo sapien
gtgtttgtcgtctgtggaatttggc

SEQ ID NO: 3358036 - DNA, 25 bp, Homo sapien
gcaattgattagcaccttactccgg

SEQ ID NO: 3358037 - DNA, 25 bp, Homo sapien
cagaaagcctttgggaattatggta

SEQ ID NO: 3358038 - DNA, 25 bp, Homo sapien
ctattttcagagagagctatgtgca

SEQ ID NO: 3358039 - DNA, 25 bp, Homo sapien
catattcaaggtcagtctagttacc

SEQ ID NO: 3358040 - DNA, 25 bp, Homo sapien
ctgtaatccctgtgccaatagtgtt

SEQ ID NO: 3358041 - DNA, 25 bp, Homo sapien
taagtttcaccaaactgtggtattg

SEQ ID NO: 3358042 - DNA, 25 bp, Homo sapien
ctattcacagaggctattctgattt

SEQ ID NO: 3358043 - DNA, 25 bp, Homo sapien
tcttttattatcaacccagaaatct

SEQ ID NO: 3358044 - DNA, 25 bp, Homo sapien
tctcgaggagtggaaatcatgaagg

SEQ ID NO: 3358045 - DNA, 25 bp, Homo sapien
catatctgggtctgcggaagttaaa

SEQ ID NO: 3358046 - DNA, 25 bp, Homo sapien
gcttactgagacaacagcaggtctg

SEQ ID NO: 3358047 - DNA, 25 bp, Homo sapien
gactgtagaaggtgcagcttactga

SEQ ID NO: 3358048 - DNA, 25 bp, Homo sapien
gataactgtagtagggtctcaaaat

SEQ ID NO: 3358049 - DNA, 25 bp, Homo sapien
aaatgaacgagaactaagcactgga

SEQ ID NO: 3358050 - DNA, 25 bp, Homo sapien
tgcatcagaatacaaactacactag

SEQ ID NO: 3358051 - DNA, 25 bp, Homo sapien
ccatggagtattgagtacaggagct

SEQ ID NO: 3358052 - DNA, 25 bp, Homo sapien
gatttcagtggctagggtgggatgg

SEQ ID NO: 3358053 - DNA, 25 bp, Homo sapien
tgtgagtttttaggatttcagtggc

SEQ ID NO: 3358054 - DNA, 25 bp, Homo sapien
gggtcaaaaccattggaggagaaga

SEQ ID NO: 3358055 - DNA, 25 bp, Homo sapien
aaaaattagattatgcatggtttgc

SEQ ID NO: 3358056 - DNA, 25 bp, Homo sapien
tacggaatgcataatcatgccacag

SEQ ID NO: 3358057 - DNA, 25 bp, Homo sapien
aaaaacgccaccatcaagctgttgg

SEQ ID NO: 3358058 - DNA, 25 bp, Homo sapien
aattactgatgatgcatgactagtc

SEQ ID NO: 3358059 - DNA, 25 bp, Homo sapien
caaactgttaagacacggaactgaa

SEQ ID NO: 3358060 - DNA, 25 bp, Homo sapien
gatgaaaacatgaaccagggcctac

SEQ ID NO: 3358061 - DNA, 25 bp, Homo sapien
taatatggccactgatcttcagaca

SEQ ID NO: 3358062 - DNA, 25 bp, Homo sapien
tggatggcccttagttaaacaccaa

SEQ ID NO: 3358063 - DNA, 25 bp, Homo sapien
ctggtgtcacaatcttaaaaaggca

SEQ ID NO: 3358064 - DNA, 25 bp, Homo sapien
tcttgctcttccttcgacttgatgt

SEQ ID NO: 3358065 - DNA, 25 bp, Homo sapien
tggcagacagaaccataaggtagtg

SEQ ID NO: 3358066 - DNA, 25 bp, Homo sapien
tcacataggcccagttggcagacag

SEQ ID NO: 3358067 - DNA, 25 bp, Homo sapien
tatgtgtatgcattgagccgctctt

SEQ ID NO: 3358068 - DNA, 25 bp, Homo sapien
tgccacaataaacaagtggaaggtc

SEQ ID NO: 3358069 - DNA, 25 bp, Homo sapien
catagcaatgactgctgccccagct

SEQ ID NO: 3358070 - DNA, 25 bp, Homo sapien
cccagctccagcaagtgccacaata

SEQ ID NO: 3358071 - DNA, 25 bp, Homo sapien
cagctccagcaagtgccacaataaa

SEQ ID NO: 3358072 - DNA, 25 bp, Homo sapien
ctcagtagattcgcacatcctcaag

SEQ ID NO: 3358073 - DNA, 25 bp, Homo sapien
ttctcagagacagtacaaattttct

SEQ ID NO: 3358074 - DNA, 25 bp, Homo sapien
attctcagagacagtacaaattttc

SEQ ID NO: 3358075 - DNA, 25 bp, Homo sapien
agtagattcgcacatcctcaagaaa

SEQ ID NO: 3358076 - DNA, 25 bp, Homo sapien
tttgttaactatgccccagactgtg

SEQ ID NO: 3358077 - DNA, 25 bp, Homo sapien
catttttaaaacgagcacagaggca

SEQ ID NO: 3358078 - DNA, 25 bp, Homo sapien
tctaaaagcatactgcccaaaggag

SEQ ID NO: 3358079 - DNA, 25 bp, Homo sapien
cacagaggcaattcactggcacgcc

SEQ ID NO: 3358080 - DNA, 25 bp, Homo sapien
ttccggcagatggtccacagattga

SEQ ID NO: 3358081 - DNA, 25 bp, Homo sapien
tccactaatgtggtgttccggcaga

SEQ ID NO: 3358082 - DNA, 25 bp, Homo sapien
caaactgacgaaggtccaagcagag

SEQ ID NO: 3358083 - DNA, 25 bp, Homo sapien
gattgaagtacatgtaaactggcag

SEQ ID NO: 3358084 - DNA, 25 bp, Homo sapien
tggagagagaaaatgtaatctacca

SEQ ID NO: 3358085 - DNA, 25 bp, Homo sapien
gagagaaaatgtaatctaccaaaaa

SEQ ID NO: 3358086 - DNA, 25 bp, Homo sapien
gagagagaaaatgtaatctaccaaa

SEQ ID NO: 3358087 - DNA, 25 bp, Homo sapien
atggagagagaaaatgtaatctacc

SEQ ID NO: 3358088 - DNA, 25 bp, Homo sapien
tcctgtataatataggacatttaac

SEQ ID NO: 3358089 - DNA, 25 bp, Homo sapien
cctgtataatataggacatttaaca

SEQ ID NO: 3358090 - DNA, 25 bp, Homo sapien
tgtataatataggacatttaacaat

SEQ ID NO: 3358091 - DNA, 25 bp, Homo sapien
tgtcctgtataatataggacattta

SEQ ID NO: 3358092 - DNA, 25 bp, Homo sapien
tgggttttgatacattaactgataa

SEQ ID NO: 3358093 - DNA, 25 bp, Homo sapien
gggctgacaccctgctgcattgcct

SEQ ID NO: 3358094 - DNA, 25 bp, Homo sapien
tctgcagaacgcagaagaatgcagc

SEQ ID NO: 3358095 - DNA, 25 bp, Homo sapien
tgctctgctcattccggggtgtcag

SEQ ID NO: 3358096 - DNA, 25 bp, Homo sapien
tcagggaggtgttacaggagtgggc

SEQ ID NO: 3358097 - DNA, 25 bp, Homo sapien
ttaattcttgggagatgaatgcaaa

SEQ ID NO: 3358098 - DNA, 25 bp, Homo sapien
taattcttgggagatgaatgcaaac

SEQ ID NO: 3358099 - DNA, 25 bp, Homo sapien
gctgcgatgccgtagatcacatact

SEQ ID NO: 3358100 - DNA, 25 bp, Homo sapien
aaagaacgcagctgcgatgccgtag

SEQ ID NO: 3358101 - DNA, 25 bp, Homo sapien
gatcacatacttaaagatgtcaatc

SEQ ID NO: 3358102 - DNA, 25 bp, Homo sapien
cgcagctgcgatgccgtagatcaca

SEQ ID NO: 3358103 - DNA, 25 bp, Homo sapien
caacacccgcatagagcaggatggt

SEQ ID NO: 3358104 - DNA, 25 bp, Homo sapien
gaatgttgacagttccagaaagcgc

SEQ ID NO: 3358105 - DNA, 25 bp, Homo sapien
agaaagcgcttcatgaccgcagcca

SEQ ID NO: 3358106 - DNA, 25 bp, Homo sapien
tggcaatcagagaggcatagggaat

SEQ ID NO: 3358107 - DNA, 25 bp, Homo sapien
agccaccccacccctcagatacaca

SEQ ID NO: 3358108 - DNA, 25 bp, Homo sapien
ctctagccaccccacccctcagata

SEQ ID NO: 3358109 - DNA, 25 bp, Homo sapien
caccccacccctcagatacacacac

SEQ ID NO: 3358110 - DNA, 25 bp, Homo sapien
ccccacccctcagatacacacacat

SEQ ID NO: 3358111 - DNA, 25 bp, Homo sapien
gcccccagtaccacgttttcactga

SEQ ID NO: 3358112 - DNA, 25 bp, Homo sapien
gctgcggatcttgctgcccccagta

SEQ ID NO: 3358113 - DNA, 25 bp, Homo sapien
tttaaggctgcggatcttgctgccc

SEQ ID NO: 3358114 - DNA, 25 bp, Homo sapien
tgcccccagtaccacgttttcactg

SEQ ID NO: 3358115 - DNA, 25 bp, Homo sapien
tttgagtgaattccacaagttctga

SEQ ID NO: 3358116 - DNA, 25 bp, Homo sapien
gagctggcttgtggtaccaaattct

SEQ ID NO: 3358117 - DNA, 25 bp, Homo sapien
gaaagatggatgctgagctcattgc

SEQ ID NO: 3358118 - DNA, 25 bp, Homo sapien
tagggaatatggtctataggatgcc

SEQ ID NO: 3358119 - DNA, 25 bp, Homo sapien
gacacccaatgtgaagcccaaggag

SEQ ID NO: 3358120 - DNA, 25 bp, Homo sapien
caaggagaccaggaatatgaaaacg

SEQ ID NO: 3358121 - DNA, 25 bp, Homo sapien
tgcttagctccctgaacttctcctt

SEQ ID NO: 3358122 - DNA, 25 bp, Homo sapien
atatgaaaacgacccaggccctgct

SEQ ID NO: 3358123 - DNA, 25 bp, Homo sapien
taaacaacttagaagatcagacaag

SEQ ID NO: 3358124 - DNA, 25 bp, Homo sapien
tcctagagttaagggcatgagtctg

SEQ ID NO: 3358125 - DNA, 25 bp, Homo sapien
ggaagaacaaccaccacaattgaat

SEQ ID NO: 3358126 - DNA, 25 bp, Homo sapien
gagtctgtagattggtagcactcac

SEQ ID NO: 3358127 - DNA, 25 bp, Homo sapien
gtggagacacgtttctgatgtagaa

SEQ ID NO: 3358128 - DNA, 25 bp, Homo sapien
gtagaaccatactcttctgactgtg

SEQ ID NO: 3358129 - DNA, 25 bp, Homo sapien
tgactgtgatacataagcccctagg

SEQ ID NO: 3358130 - DNA, 25 bp, Homo sapien
taagggaacagtcaggtggagacac

SEQ ID NO: 3358131 - DNA, 25 bp, Homo sapien
aaacttaggctgaaagctgttggtg

SEQ ID NO: 3358132 - DNA, 25 bp, Homo sapien
taggctgaaagctgttggtgccctc

SEQ ID NO: 3358133 - DNA, 25 bp, Homo sapien
gctgaaagctgttggtgccctctcc

SEQ ID NO: 3358134 - DNA, 25 bp, Homo sapien
tctgaaacttaggctgaaagctgtt

SEQ ID NO: 3358135 - DNA, 25 bp, Homo sapien
tacgtcaaatattgaagccataggg

SEQ ID NO: 3358136 - DNA, 25 bp, Homo sapien
gactagcactaacattcacaatacg

SEQ ID NO: 3358137 - DNA, 25 bp, Homo sapien
tttttaatatagtgcagggatgcca

SEQ ID NO: 3358138 - DNA, 25 bp, Homo sapien
gatgcaagtgtcctcgtctaatgtg

SEQ ID NO: 3358139 - DNA, 25 bp, Homo sapien
cctccacttactctttacctctgag

SEQ ID NO: 3358140 - DNA, 25 bp, Homo sapien
tactggtattaatctgagagcggct

SEQ ID NO: 3358141 - DNA, 25 bp, Homo sapien
gattacttcatcctcggtgcatccc

SEQ ID NO: 3358142 - DNA, 25 bp, Homo sapien
tcggtgcatcccttatttactggta

SEQ ID NO: 3358143 - DNA, 25 bp, Homo sapien
tttctgccaacatgattacttcatc

SEQ ID NO: 3358144 - DNA, 25 bp, Homo sapien
atatcaaggtttttgaagttacctg

SEQ ID NO: 3358145 - DNA, 25 bp, Homo sapien
aatatgtaatgcctcttcgttcctc

SEQ ID NO: 3358146 - DNA, 25 bp, Homo sapien
gataacaagaaaagtacttattgaa

SEQ ID NO: 3358147 - DNA, 25 bp, Homo sapien
gaagttacctgtcacaaatatgtaa

SEQ ID NO: 3358148 - DNA, 25 bp, Homo sapien
ggagggacagaagctcacactgaaa

SEQ ID NO: 3358149 - DNA, 25 bp, Homo sapien
gtaactgacagtaagagcaaatgca

SEQ ID NO: 3358150 - DNA, 25 bp, Homo sapien
cacaaccttgacgtgaggaacggaa

SEQ ID NO: 3358151 - DNA, 25 bp, Homo sapien
catgatgtcaaaactcgagctgctg

SEQ ID NO: 3358152 - DNA, 25 bp, Homo sapien
caagcggactgaggaatcccaggtg

SEQ ID NO: 3358153 - DNA, 25 bp, Homo sapien
agcggactgaggaatcccaggtggt

SEQ ID NO: 3358154 - DNA, 25 bp, Homo sapien
ccaagcggactgaggaatcccaggt

SEQ ID NO: 3358155 - DNA, 25 bp, Homo sapien
cccaagcggactgaggaatcccagg

SEQ ID NO: 3358156 - DNA, 25 bp, Homo sapien
tttctttgagttcgaggaacaaggc

SEQ ID NO: 3358157 - DNA, 25 bp, Homo sapien
agccacttgctggacggcattccct

SEQ ID NO: 3358158 - DNA, 25 bp, Homo sapien
ttccagccacttgctggacggcatt

SEQ ID NO: 3358159 - DNA, 25 bp, Homo sapien
cacaaaatgagacttacccaaactt

SEQ ID NO: 3358160 - DNA, 25 bp, Homo sapien
gtttcactgataatactcccaccaa

SEQ ID NO: 3358161 - DNA, 25 bp, Homo sapien
tgaggcatgcactacagagataaag

SEQ ID NO: 3358162 - DNA, 25 bp, Homo sapien
tccttatgaaagatcaaacaacaca

SEQ ID NO: 3358163 - DNA, 25 bp, Homo sapien
tttttacccttgatacatatgactg

SEQ ID NO: 3358164 - DNA, 25 bp, Homo sapien
ggccgctggctccttgtgaactcta

SEQ ID NO: 3358165 - DNA, 25 bp, Homo sapien
caggtctgtcataaaagtgtgatgc

SEQ ID NO: 3358166 - DNA, 25 bp, Homo sapien
ccaggtctgtcataaaagtgtgatg

SEQ ID NO: 3358167 - DNA, 25 bp, Homo sapien
gctggctccttgtgaactctatttt

SEQ ID NO: 3358168 - DNA, 25 bp, Homo sapien
cctgtgacaatttaacattctgttt

SEQ ID NO: 3358169 - DNA, 25 bp, Homo sapien
ctctcctgtgacaatttaacattct

SEQ ID NO: 3358170 - DNA, 25 bp, Homo sapien
aagctctctcctgtgacaatttaac

SEQ ID NO: 3358171 - DNA, 25 bp, Homo sapien
agctctctcctgtgacaatttaaca

SEQ ID NO: 3358172 - DNA, 25 bp, Homo sapien
gccagcaaaggctgttcctgtgtgc

SEQ ID NO: 3358173 - DNA, 25 bp, Homo sapien
ctttgtatgccatctgcggatatca

SEQ ID NO: 3358174 - DNA, 25 bp, Homo sapien
tggccagcaaaggctgttcctgtgt

SEQ ID NO: 3358175 - DNA, 25 bp, Homo sapien
ttcctgctccctaaatttggctatg

SEQ ID NO: 3358176 - DNA, 25 bp, Homo sapien
gctcatctgtcttagggagctccag

SEQ ID NO: 3358177 - DNA, 25 bp, Homo sapien
tcctgccccaggatgtcttaggcag

SEQ ID NO: 3358178 - DNA, 25 bp, Homo sapien
gtcttaggcagcactcacaatctcc

SEQ ID NO: 3358179 - DNA, 25 bp, Homo sapien
ttcccaacgtggctttaaatagctc

SEQ ID NO: 3358180 - DNA, 25 bp, Homo sapien
tccaaaacgagaggcactgagctca

SEQ ID NO: 3358181 - DNA, 25 bp, Homo sapien
tgtggggcagtagcattcaatgacc

SEQ ID NO: 3358182 - DNA, 25 bp, Homo sapien
gggcagtagcattcaatgacctctt

SEQ ID NO: 3358183 - DNA, 25 bp, Homo sapien
caatgacctcttccaaaacgagagg

SEQ ID NO: 3358184 - DNA, 25 bp, Homo sapien
tagtgtgaccgtaaagtcaaagaac

SEQ ID NO: 3358185 - DNA, 25 bp, Homo sapien
caggaaatgtgtagaagaatctcaa

SEQ ID NO: 3358186 - DNA, 25 bp, Homo sapien
gtttgaacccaatggcccttgacta

SEQ ID NO: 3358187 - DNA, 25 bp, Homo sapien
tggatatccaccaacacaggaaatg

SEQ ID NO: 3358188 - DNA, 25 bp, Homo sapien
ctcagacacattcaacctgttacca

SEQ ID NO: 3358189 - DNA, 25 bp, Homo sapien
tttttcttggttcccgcatctacca

SEQ ID NO: 3358190 - DNA, 25 bp, Homo sapien
cattcaacctgttaccacaatccat

SEQ ID NO: 3358191 - DNA, 25 bp, Homo sapien
ccgcatctaccaaggcttgctcaga

SEQ ID NO: 3358192 - DNA, 25 bp, Homo sapien
tgaaggttaacaaagactggtctaa

SEQ ID NO: 3358193 - DNA, 25 bp, Homo sapien
tgttctatcagatgtccatgcaaag

SEQ ID NO: 3358194 - DNA, 25 bp, Homo sapien
tatttgtggctcacactagggatcc

SEQ ID NO: 3358195 - DNA, 25 bp, Homo sapien
cccagctcggcaagtgtgaaatcac

SEQ ID NO: 3358196 - DNA, 25 bp, Homo sapien
ggtacttatatctgaaagatttgca

SEQ ID NO: 3358197 - DNA, 25 bp, Homo sapien
taatgacaacattcgtgccagacat

SEQ ID NO: 3358198 - DNA, 25 bp, Homo sapien
tacaataccgcaatgctcttctcac

SEQ ID NO: 3358199 - DNA, 25 bp, Homo sapien
taatactcgactctgcatttcggta

SEQ ID NO: 3358200 - DNA, 25 bp, Homo sapien
agcaaacaaggaaactgcaaaataa

SEQ ID NO: 3358201 - DNA, 25 bp, Homo sapien
tacaaataaacgcttttagcacagt

SEQ ID NO: 3358202 - DNA, 25 bp, Homo sapien
agagaaacattcattagccttactg

SEQ ID NO: 3358203 - DNA, 25 bp, Homo sapien
cattagccttactggcaagtgtcta

SEQ ID NO: 3358204 - DNA, 25 bp, Homo sapien
tgtctgtccctcttccatattctct

SEQ ID NO: 3358205 - DNA, 25 bp, Homo sapien
ttgtgtctgtccctcttccatattc

SEQ ID NO: 3358206 - DNA, 25 bp, Homo sapien
ctgtccctcttccatattctcttcc

SEQ ID NO: 3358207 - DNA, 25 bp, Homo sapien
ctttttgtgtctgtccctcttccat

SEQ ID NO: 3358208 - DNA, 25 bp, Homo sapien
taagacaggacttgtaatcccacac

SEQ ID NO: 3358209 - DNA, 25 bp, Homo sapien
gggtgtcctcctaacatgaagccga

SEQ ID NO: 3358210 - DNA, 25 bp, Homo sapien
gattcccgtcggttctttatgctgc

SEQ ID NO: 3358211 - DNA, 25 bp, Homo sapien
tcacccagtcagatacgttgcaaaa

SEQ ID NO: 3358212 - DNA, 25 bp, Homo sapien
tgtcaccatgcccagttaattttgt

SEQ ID NO: 3358213 - DNA, 25 bp, Homo sapien
ccaagtatcgaggattacaggcatg

SEQ ID NO: 3358214 - DNA, 25 bp, Homo sapien
taattttgtatttttagcagagacg

SEQ ID NO: 3358215 - DNA, 25 bp, Homo sapien
cagaccatggctccaggaagattga

SEQ ID NO: 3358216 - DNA, 25 bp, Homo sapien
tcacggttttcagcgatgtgctcaa

SEQ ID NO: 3358217 - DNA, 25 bp, Homo sapien
taagcagtaagcaacccgctgccat

SEQ ID NO: 3358218 - DNA, 25 bp, Homo sapien
ttcgaatgaacctgcagacaccact

SEQ ID NO: 3358219 - DNA, 25 bp, Homo sapien
taatgtcaggttcttacatgggcaa

SEQ ID NO: 3358220 - DNA, 25 bp, Homo sapien
gctctgttagcttgtgttgtcaacc

SEQ ID NO: 3358221 - DNA, 25 bp, Homo sapien
caaaatctctactatgaaatggtca

SEQ ID NO: 3358222 - DNA, 25 bp, Homo sapien
ggcaatctttaacatcacccatagc

SEQ ID NO: 3358223 - DNA, 25 bp, Homo sapien
catcaaaccaagcagcagttactag

SEQ ID NO: 3358224 - DNA, 25 bp, Homo sapien
ggaacctcaaatcagctatacccag

SEQ ID NO: 3358225 - DNA, 25 bp, Homo sapien
caaatcagctatacccagggcatca

SEQ ID NO: 3358226 - DNA, 25 bp, Homo sapien
cagggcatcaaaccaagcagcagtt

SEQ ID NO: 3358227 - DNA, 25 bp, Homo sapien
ccttcttagcaagttcaaacaattg

SEQ ID NO: 3358228 - DNA, 25 bp, Homo sapien
ccagtggagtcgttctatgctttta

SEQ ID NO: 3358229 - DNA, 25 bp, Homo sapien
tgttgtaagcctaaacactcttaac

SEQ ID NO: 3358230 - DNA, 25 bp, Homo sapien
tgagaactcacatgactctgaggtt

SEQ ID NO: 3358231 - DNA, 25 bp, Homo sapien
aataggtcggccaaagatttaagca

SEQ ID NO: 3358232 - DNA, 25 bp, Homo sapien
aagggttggacgctgcggctcttgc

SEQ ID NO: 3358233 - DNA, 25 bp, Homo sapien
gagaggtaggctatgtaaataggtc

SEQ ID NO: 3358234 - DNA, 25 bp, Homo sapien
tgtgacatcgctacacacttattag

SEQ ID NO: 3358235 - DNA, 25 bp, Homo sapien
gaagtaatggtgatttccaaactcc

SEQ ID NO: 3358236 - DNA, 25 bp, Homo sapien
ttgatctggcaagactaactccctg

SEQ ID NO: 3358237 - DNA, 25 bp, Homo sapien
tgccctgtgtcatctagatccagag

SEQ ID NO: 3358238 - DNA, 25 bp, Homo sapien
tgtagtatctgtagtgaaacaccct

SEQ ID NO: 3358239 - DNA, 25 bp, Homo sapien
tacttctcccgtataggaatattgc

SEQ ID NO: 3358240 - DNA, 25 bp, Homo sapien
tgacttcttctatcccagggttatc

SEQ ID NO: 3358241 - DNA, 25 bp, Homo sapien
tcaatcttactaacaagtagctgcc

SEQ ID NO: 3358242 - DNA, 25 bp, Homo sapien
gattctcaagtaatgacactatccc

SEQ ID NO: 3358243 - DNA, 25 bp, Homo sapien
ttctggaagctgtcttttgagttcc

SEQ ID NO: 3358244 - DNA, 25 bp, Homo sapien
tccagtcaaatctgtcctgtgggat

SEQ ID NO: 3358245 - DNA, 25 bp, Homo sapien
gttccatggtaaccgcatccttcca

SEQ ID NO: 3358246 - DNA, 25 bp, Homo sapien
tgtttttggaggagatacatttctt

SEQ ID NO: 3358247 - DNA, 25 bp, Homo sapien
ctaatttcaggacagtagttattcc

SEQ ID NO: 3358248 - DNA, 25 bp, Homo sapien
gataagacatgttacaactggtgtc

SEQ ID NO: 3358249 - DNA, 25 bp, Homo sapien
tcttatataagggtcttcgaagttc

SEQ ID NO: 3358250 - DNA, 25 bp, Homo sapien
cacatcatgcatctactaagtggca

SEQ ID NO: 3358251 - DNA, 25 bp, Homo sapien
ccagaatgcgatagagtgagaaacc

SEQ ID NO: 3358252 - DNA, 25 bp, Homo sapien
taggattataacattagagtagcta

SEQ ID NO: 3358253 - DNA, 25 bp, Homo sapien
taaacaccaaaggttagctaggata

SEQ ID NO: 3358254 - DNA, 25 bp, Homo sapien
ccaaaggttagctaggatacagaat

SEQ ID NO: 3358255 - DNA, 25 bp, Homo sapien
ttagagtagctaccattaaaaagaa

SEQ ID NO: 3358256 - DNA, 25 bp, Homo sapien
caagaatgtgtgtagcacctttttt

SEQ ID NO: 3358257 - DNA, 25 bp, Homo sapien
gaagtattctcatacaagatgctac

SEQ ID NO: 3358258 - DNA, 25 bp, Homo sapien
tacatggttatgatatgggagctaa

SEQ ID NO: 3358259 - DNA, 25 bp, Homo sapien
ccaaaagtccatcagcaaaaggatg

SEQ ID NO: 3358260 - DNA, 25 bp, Homo sapien
cttcacgaagggaaatttatgacct

SEQ ID NO: 3358261 - DNA, 25 bp, Homo sapien
aatacgggtcttcatattgtctaag

SEQ ID NO: 3358262 - DNA, 25 bp, Homo sapien
tggaaaaccgccgatgttcatgctt

SEQ ID NO: 3358263 - DNA, 25 bp, Homo sapien
gattttagccaaatacaggagggta

SEQ ID NO: 3358264 - DNA, 25 bp, Homo sapien
tggaccgcatttccctgtatctttg

SEQ ID NO: 3358265 - DNA, 25 bp, Homo sapien
aacagctggtgtggaccgcatttcc

SEQ ID NO: 3358266 - DNA, 25 bp, Homo sapien
cgcatttccctgtatctttgcttac

SEQ ID NO: 3358267 - DNA, 25 bp, Homo sapien
aaacagctggtgtggaccgcatttc

SEQ ID NO: 3358268 - DNA, 25 bp, Homo sapien
tgtgcttaacaccatcaaattcaat

SEQ ID NO: 3358269 - DNA, 25 bp, Homo sapien
caataagagtgaacatttaaggccc

SEQ ID NO: 3358270 - DNA, 25 bp, Homo sapien
tcaacagaataacattgcagcaggg

SEQ ID NO: 3358271 - DNA, 25 bp, Homo sapien
tttaaggcccattaagtcatctttc

SEQ ID NO: 3358272 - DNA, 25 bp, Homo sapien
agaagcattgaaattcaagaacgat

SEQ ID NO: 3358273 - DNA, 25 bp, Homo sapien
gcattgaaattcaagaacgatgtca

SEQ ID NO: 3358274 - DNA, 25 bp, Homo sapien
agcattgaaattcaagaacgatgtc

SEQ ID NO: 3358275 - DNA, 25 bp, Homo sapien
gaagcattgaaattcaagaacgatg

SEQ ID NO: 3358276 - DNA, 25 bp, Homo sapien
tgtaattctaatgagtccaatccga

SEQ ID NO: 3358277 - DNA, 25 bp, Homo sapien
cgattgacttggatggaattctacc

SEQ ID NO: 3358278 - DNA, 25 bp, Homo sapien
taccctgatgagaacccaaattaag

SEQ ID NO: 3358279 - DNA, 25 bp, Homo sapien
gggaaatctcagctacagaagtaag

SEQ ID NO: 3358280 - DNA, 25 bp, Homo sapien
ttctctggtgtaccatggtagcttt

SEQ ID NO: 3358281 - DNA, 25 bp, Homo sapien
gtgtaccatggtagctttctggctg

SEQ ID NO: 3358282 - DNA, 25 bp, Homo sapien
agtgggtacctcaagaataatttgg

SEQ ID NO: 3358283 - DNA, 25 bp, Homo sapien
ctcagtgggtacctcaagaataatt

SEQ ID NO: 3358284 - DNA, 25 bp, Homo sapien
tccctgtgttatcctgatcactgca

SEQ ID NO: 3358285 - DNA, 25 bp, Homo sapien
ttctgttttcccatcgctcttgaac

SEQ ID NO: 3358286 - DNA, 25 bp, Homo sapien
cctatccgtaaaagcacacaatgat

SEQ ID NO: 3358287 - DNA, 25 bp, Homo sapien
gctcttgaacgaggatgctccctgt

SEQ ID NO: 3358288 - DNA, 25 bp, Homo sapien
tacaggcacccaccagcacatgcgg

SEQ ID NO: 3358289 - DNA, 25 bp, Homo sapien
ggcacccaccagcacatgcggctaa

SEQ ID NO: 3358290 - DNA, 25 bp, Homo sapien
gcacccaccagcacatgcggctaat

SEQ ID NO: 3358291 - DNA, 25 bp, Homo sapien
caggcacccaccagcacatgcggct

SEQ ID NO: 3358292 - DNA, 25 bp, Homo sapien
ctacttgcgtgcacacggggactgg

SEQ ID NO: 3358293 - DNA, 25 bp, Homo sapien
tgctacttgcgtgcacacggggact

SEQ ID NO: 3358294 - DNA, 25 bp, Homo sapien
cttgcgtgcacacggggactgggtc

SEQ ID NO: 3358295 - DNA, 25 bp, Homo sapien
tctgctacttgcgtgcacacgggga

SEQ ID NO: 3358296 - DNA, 25 bp, Homo sapien
tgtgaaagtcagtgatgggatctct

SEQ ID NO: 3358297 - DNA, 25 bp, Homo sapien
atttccttggcctgacacacgctgt

SEQ ID NO: 3358298 - DNA, 25 bp, Homo sapien
tgacacacgctgtcttactgctggg

SEQ ID NO: 3358299 - DNA, 25 bp, Homo sapien
cttgtgaaagtcagtgatgggatct

SEQ ID NO: 3358300 - DNA, 25 bp, Homo sapien
ttaaatggcgggtcagactccccag

SEQ ID NO: 3358301 - DNA, 25 bp, Homo sapien
tctggcaggttttgtgatagaactg

SEQ ID NO: 3358302 - DNA, 25 bp, Homo sapien
gcccacttggcctatacatgttgca

SEQ ID NO: 3358303 - DNA, 25 bp, Homo sapien
tttaatgcatataggaggactccag

SEQ ID NO: 3358304 - DNA, 25 bp, Homo sapien
atgcagaaaattccctgagtatcca

SEQ ID NO: 3358305 - DNA, 25 bp, Homo sapien
gagtatccagtgttgaagttcatta

SEQ ID NO: 3358306 - DNA, 25 bp, Homo sapien
ggcctaaatcttgctttagatagga

SEQ ID NO: 3358307 - DNA, 25 bp, Homo sapien
tgtataacctagtcaaacatatatc

SEQ ID NO: 3358308 - DNA, 25 bp, Homo sapien
tgcatacttgaatctctgtcctgag

SEQ ID NO: 3358309 - DNA, 25 bp, Homo sapien
tctcccctgctacaggcctgctctt

SEQ ID NO: 3358310 - DNA, 25 bp, Homo sapien
cttcctagtctctggactgcatact

SEQ ID NO: 3358311 - DNA, 25 bp, Homo sapien
ttttctctatttcgctcacctctgg

SEQ ID NO: 3358312 - DNA, 25 bp, Homo sapien
gatagccagtcctctcgagcttgag

SEQ ID NO: 3358313 - DNA, 25 bp, Homo sapien
tagtcaaagcatcccctaacccttg

SEQ ID NO: 3358314 - DNA, 25 bp, Homo sapien
tattccggacctgtctttccaatgg

SEQ ID NO: 3358315 - DNA, 25 bp, Homo sapien
taggctcaagtggtcaagtagaaca

SEQ ID NO: 3358316 - DNA, 25 bp, Homo sapien
gagccagtgtggacgcccttttaat

SEQ ID NO: 3358317 - DNA, 25 bp, Homo sapien
taagcaccgaataagcggaccctgc

SEQ ID NO: 3358318 - DNA, 25 bp, Homo sapien
gaccctgcctggaaacttgagcgaa

SEQ ID NO: 3358319 - DNA, 25 bp, Homo sapien
tgagcgaagctgaactgcgccgaac

SEQ ID NO: 3358320 - DNA, 25 bp, Homo sapien
ctcgcctccaggtgccaccccatcg

SEQ ID NO: 3358321 - DNA, 25 bp, Homo sapien
cagcacggtagaccggacccccagg

SEQ ID NO: 3358322 - DNA, 25 bp, Homo sapien
cctccaggtgccaccccatcgccat

SEQ ID NO: 3358323 - DNA, 25 bp, Homo sapien
gacccactgtaaacagtcgggcacc

SEQ ID NO: 3358324 - DNA, 25 bp, Homo sapien
ccagaggagagcgagtgaccagacg

SEQ ID NO: 3358325 - DNA, 25 bp, Homo sapien
caagttctccaagccgcgctgaggc

SEQ ID NO: 3358326 - DNA, 25 bp, Homo sapien
agaggagagcgagtgaccagacgct

SEQ ID NO: 3358327 - DNA, 25 bp, Homo sapien
aagttctccaagccgcgctgaggct

SEQ ID NO: 3358328 - DNA, 25 bp, Homo sapien
tctgcgggcgcacagacccctccct

SEQ ID NO: 3358329 - DNA, 25 bp, Homo sapien
agcggagacaactcgcagggcgcct

SEQ ID NO: 3358330 - DNA, 25 bp, Homo sapien
tcccagcggagacaactcgcagggc

SEQ ID NO: 3358331 - DNA, 25 bp, Homo sapien
ctggcgactctgcgggcgcacagac

SEQ ID NO: 3358332 - DNA, 25 bp, Homo sapien
tcctctgcgagaagcccgttttcct

SEQ ID NO: 3358333 - DNA, 25 bp, Homo sapien
ctttcattagagacacgtgcaaagt

SEQ ID NO: 3358334 - DNA, 25 bp, Homo sapien
tagagacacgtgcaaagtctctctc

SEQ ID NO: 3358335 - DNA, 25 bp, Homo sapien
tgcctcctctgcgagaagcccgttt

SEQ ID NO: 3358336 - DNA, 25 bp, Homo sapien
tgcacaaagctctcttgaccaggca

SEQ ID NO: 3358337 - DNA, 25 bp, Homo sapien
gcacaaagctctcttgaccaggcac

SEQ ID NO: 3358338 - DNA, 25 bp, Homo sapien
actgcacaaagctctcttgaccagg

SEQ ID NO: 3358339 - DNA, 25 bp, Homo sapien
tcactgcacaaagctctcttgacca

SEQ ID NO: 3358340 - DNA, 25 bp, Homo sapien
ttccgaactgcccagagtgaaggga

SEQ ID NO: 3358341 - DNA, 25 bp, Homo sapien
aggagagaccctggaggaaatcagt

SEQ ID NO: 3358342 - DNA, 25 bp, Homo sapien
cagtttcaacttgggctccaccaat

SEQ ID NO: 3358343 - DNA, 25 bp, Homo sapien
ggattttcatctggaggagagaccc

SEQ ID NO: 3358344 - DNA, 25 bp, Homo sapien
gcataattctgacccattaacaagc

SEQ ID NO: 3358345 - DNA, 25 bp, Homo sapien
tcagatctctcgtagcccaggagca

SEQ ID NO: 3358346 - DNA, 25 bp, Homo sapien
tcttcgcacgtataagccatgggca

SEQ ID NO: 3358347 - DNA, 25 bp, Homo sapien
gggtagtgctccatctcagatctct

SEQ ID NO: 3358348 - DNA, 25 bp, Homo sapien
tccatgttcatccacggatgcttca

SEQ ID NO: 3358349 - DNA, 25 bp, Homo sapien
ttcatccacggatgcttcatgattt

SEQ ID NO: 3358350 - DNA, 25 bp, Homo sapien
aagtgcctctcctgcgagagttgag

SEQ ID NO: 3358351 - DNA, 25 bp, Homo sapien
tctaaagtgcctctcctgcgagagt

SEQ ID NO: 3358352 - DNA, 25 bp, Homo sapien
ggattttcttaatgtcaatcacttc

SEQ ID NO: 3358353 - DNA, 25 bp, Homo sapien
aatttcactatggtgggttgattca

SEQ ID NO: 3358354 - DNA, 25 bp, Homo sapien
tccacaatactgtagaggattttct

SEQ ID NO: 3358355 - DNA, 25 bp, Homo sapien
tccaccaacatactccacaatactg

SEQ ID NO: 3358356 - DNA, 25 bp, Homo sapien
ggagccagtcgactaaggagccagt

SEQ ID NO: 3358357 - DNA, 25 bp, Homo sapien
gactaaggagccagtcgttgccatt

SEQ ID NO: 3358358 - DNA, 25 bp, Homo sapien
cgttgccattatgggtctcttcctg

SEQ ID NO: 3358359 - DNA, 25 bp, Homo sapien
cactgatggagccagtcgactaagg

SEQ ID NO: 3358360 - DNA, 25 bp, Homo sapien
tcttgggcccaatcagacaataatg

SEQ ID NO: 3358361 - DNA, 25 bp, Homo sapien
ttatccattgagctctcccacagac

SEQ ID NO: 3358362 - DNA, 25 bp, Homo sapien
ttttcctagaaagtgcagactcgct

SEQ ID NO: 3358363 - DNA, 25 bp, Homo sapien
gacaataatgaagtgcaggcgagac

SEQ ID NO: 3358364 - DNA, 25 bp, Homo sapien
aagcatgcagttcagtggtttctag

SEQ ID NO: 3358365 - DNA, 25 bp, Homo sapien
ttcacaaagctctacaattattacc

SEQ ID NO: 3358366 - DNA, 25 bp, Homo sapien
agtatattcacaaagctctacaatt

SEQ ID NO: 3358367 - DNA, 25 bp, Homo sapien
cagcccaataggcacggaaattgtt

SEQ ID NO: 3358368 - DNA, 25 bp, Homo sapien
tatgtcaatctgtatatattgtacc

SEQ ID NO: 3358369 - DNA, 25 bp, Homo sapien
gtgaggaggattattaactggcaca

SEQ ID NO: 3358370 - DNA, 25 bp, Homo sapien
cacatatgtactaaaaacccctcac

SEQ ID NO: 3358371 - DNA, 25 bp, Homo sapien
gaatagccacccaatttctgtctga

SEQ ID NO: 3358372 - DNA, 25 bp, Homo sapien
ctatagaaacactgactacagtata

SEQ ID NO: 3358373 - DNA, 25 bp, Homo sapien
gaaacactgactacagtatacccca

SEQ ID NO: 3358374 - DNA, 25 bp, Homo sapien
tatagaaacactgactacagtatac

SEQ ID NO: 3358375 - DNA, 25 bp, Homo sapien
tagaaacactgactacagtataccc

SEQ ID NO: 3358376 - DNA, 25 bp, Homo sapien
gcctggcataggagtttaataaaca

SEQ ID NO: 3358377 - DNA, 25 bp, Homo sapien
aacaatgcctggcataggagtttaa

SEQ ID NO: 3358378 - DNA, 25 bp, Homo sapien
taataaacaaattgaatggaaaaga

SEQ ID NO: 3358379 - DNA, 25 bp, Homo sapien
aatgcctggcataggagtttaataa

SEQ ID NO: 3358380 - DNA, 25 bp, Homo sapien
ttattgaaatacatccaatactagg

SEQ ID NO: 3358381 - DNA, 25 bp, Homo sapien
ggaaaagacaccactctatttatta

SEQ ID NO: 3358382 - DNA, 25 bp, Homo sapien
tcttcaaagccatttgacaggtgct

SEQ ID NO: 3358383 - DNA, 25 bp, Homo sapien
ctttattatggctagagatggtggc

SEQ ID NO: 3358384 - DNA, 25 bp, Homo sapien
cttgtccatgtttctgataggtttc

SEQ ID NO: 3358385 - DNA, 25 bp, Homo sapien
ttgtccatgtttctgataggtttca

SEQ ID NO: 3358386 - DNA, 25 bp, Homo sapien
taataagaatgttgtccagcttgct

SEQ ID NO: 3358387 - DNA, 25 bp, Homo sapien
agagtaataagaatgttgtccagct

SEQ ID NO: 3358388 - DNA, 25 bp, Homo sapien
cacatgtatttctctatgtgaactg

SEQ ID NO: 3358389 - DNA, 25 bp, Homo sapien
tctatgtgaactgccaccactacct

SEQ ID NO: 3358390 - DNA, 25 bp, Homo sapien
tatttctctatgtgaactgccacca

SEQ ID NO: 3358391 - DNA, 25 bp, Homo sapien
gaactgccaccactacctatatttg

SEQ ID NO: 3358392 - DNA, 25 bp, Homo sapien
aatgagcctgacgtgtttccaactc

SEQ ID NO: 3358393 - DNA, 25 bp, Homo sapien
taatgagcctgacgtgtttccaact

SEQ ID NO: 3358394 - DNA, 25 bp, Homo sapien
tgagcctgacgtgtttccaactcac

SEQ ID NO: 3358395 - DNA, 25 bp, Homo sapien
ctaatgagcctgacgtgtttccaac

SEQ ID NO: 3358396 - DNA, 25 bp, Homo sapien
caggaaggtgattgagagtaacttc

SEQ ID NO: 3358397 - DNA, 25 bp, Homo sapien
ggtgattgagagtaacttctcccac

SEQ ID NO: 3358398 - DNA, 25 bp, Homo sapien
tatatctgcgcccagaggcttgggc

SEQ ID NO: 3358399 - DNA, 25 bp, Homo sapien
aaattatatctgcgcccagaggctt

SEQ ID NO: 3358400 - DNA, 25 bp, Homo sapien
tggacaagagtaaggaaggacaaaa

SEQ ID NO: 3358401 - DNA, 25 bp, Homo sapien
tatgagtaaagccagagatgagaaa

SEQ ID NO: 3358402 - DNA, 25 bp, Homo sapien
tctcattaataacctgaatcacgtc

SEQ ID NO: 3358403 - DNA, 25 bp, Homo sapien
gatgttaaaattggtgctttcctct

SEQ ID NO: 3358404 - DNA, 25 bp, Homo sapien
gccacagaaatgatgcggtctctag

SEQ ID NO: 3358405 - DNA, 25 bp, Homo sapien
gtggtatcctgagtaaactgccaga

SEQ ID NO: 3358406 - DNA, 25 bp, Homo sapien
tcccgaatgtttgggtgccacagaa

SEQ ID NO: 3358407 - DNA, 25 bp, Homo sapien
caattactctgccacctgccagtga

SEQ ID NO: 3358408 - DNA, 25 bp, Homo sapien
tagacttcgaaactgtagacctgga

SEQ ID NO: 3358409 - DNA, 25 bp, Homo sapien
gggtaaacgcatctggtagctatag

SEQ ID NO: 3358410 - DNA, 25 bp, Homo sapien
tcagcatgttgggattgcttagtaa

SEQ ID NO: 3358411 - DNA, 25 bp, Homo sapien
ggatgaggaactccgctttaagttc

SEQ ID NO: 3358412 - DNA, 25 bp, Homo sapien
taataaagtgtaaacctcttctatc

SEQ ID NO: 3358413 - DNA, 25 bp, Homo sapien
taaagtgtaaacctcttctatcaat

SEQ ID NO: 3358414 - DNA, 25 bp, Homo sapien
ctatcaatatttcaggcactccagc

SEQ ID NO: 3358415 - DNA, 25 bp, Homo sapien
gctttacaatgaattgttccatgga

SEQ ID NO: 3358416 - DNA, 25 bp, Homo sapien
agaggtcccgttttcaaaggatgat

SEQ ID NO: 3358417 - DNA, 25 bp, Homo sapien
tccaactgtgcccagttatccaact

SEQ ID NO: 3358418 - DNA, 25 bp, Homo sapien
caaaggatgataattcaagttccca

SEQ ID NO: 3358419 - DNA, 25 bp, Homo sapien
cagttatccaacttgacttttaaag

SEQ ID NO: 3358420 - DNA, 25 bp, Homo sapien
caattaggaagccatttgaaaaatc

SEQ ID NO: 3358421 - DNA, 25 bp, Homo sapien
aattaggaagccatttgaaaaatct

SEQ ID NO: 3358422 - DNA, 25 bp, Homo sapien
ctgcaattaggaagccatttgaaaa

SEQ ID NO: 3358423 - DNA, 25 bp, Homo sapien
tgcaattaggaagccatttgaaaaa

SEQ ID NO: 3358424 - DNA, 25 bp, Homo sapien
taccttgggtcaatcacagtcggaa

SEQ ID NO: 3358425 - DNA, 25 bp, Homo sapien
gatagtttcggcatcacacctcaaa

SEQ ID NO: 3358426 - DNA, 25 bp, Homo sapien
tagatgccatctccgacaaagggta

SEQ ID NO: 3358427 - DNA, 25 bp, Homo sapien
gttgctctaaggagaacctactgtg

SEQ ID NO: 3358428 - DNA, 25 bp, Homo sapien
gctgagatccagaccctgaagccaa

SEQ ID NO: 3358429 - DNA, 25 bp, Homo sapien
tcttcggcgcatgcggatagaccag

SEQ ID NO: 3358430 - DNA, 25 bp, Homo sapien
tgacggtgacttgtctagggctgcc

SEQ ID NO: 3358431 - DNA, 25 bp, Homo sapien
aacggaacgagacaagcgggagctc

SEQ ID NO: 3358432 - DNA, 25 bp, Homo sapien
tgcggcaacagcagaaggcggggct

SEQ ID NO: 3358433 - DNA, 25 bp, Homo sapien
ggctgggccttattgctggcggcgc

SEQ ID NO: 3358434 - DNA, 25 bp, Homo sapien
cttattgctggcggcgcggtctcgt

SEQ ID NO: 3358435 - DNA, 25 bp, Homo sapien
cggagtcttatggggcgagacctca

SEQ ID NO: 3358436 - DNA, 25 bp, Homo sapien
cagaagtggctatactgagaggctc

SEQ ID NO: 3358437 - DNA, 25 bp, Homo sapien
ggcgtagcaataagaatgcagtaca

SEQ ID NO: 3358438 - DNA, 25 bp, Homo sapien
tgaggagtctcatcatagagcaaaa

SEQ ID NO: 3358439 - DNA, 25 bp, Homo sapien
tccccgttttggttgcagcattgaa

SEQ ID NO: 3358440 - DNA, 25 bp, Homo sapien
ctgtgagcagatggtgtggattcct

SEQ ID NO: 3358441 - DNA, 25 bp, Homo sapien
gaagtctccaaggagaacacaatga

SEQ ID NO: 3358442 - DNA, 25 bp, Homo sapien
aacttgcaaaagtgtactgctgagt

SEQ ID NO: 3358443 - DNA, 25 bp, Homo sapien
atgaaaggaagagggcggccctcac

SEQ ID NO: 3358444 - DNA, 25 bp, Homo sapien
cttgtgattggaacgaatgtgcagc

SEQ ID NO: 3358445 - DNA, 25 bp, Homo sapien
cagcctgcatgaatccacttaggac

SEQ ID NO: 3358446 - DNA, 25 bp, Homo sapien
tcttctgtatgtgtagggcatttat

SEQ ID NO: 3358447 - DNA, 25 bp, Homo sapien
gtatgtgtagggcatttatattctc

SEQ ID NO: 3358448 - DNA, 25 bp, Homo sapien
taggacagcaattccactggatgtt

SEQ ID NO: 3358449 - DNA, 25 bp, Homo sapien
gagtcacccttatttgcatcaactg

SEQ ID NO: 3358450 - DNA, 25 bp, Homo sapien
gccttatctctggagctataaagat

SEQ ID NO: 3358451 - DNA, 25 bp, Homo sapien
caactgcagaggcatagctgccagc

SEQ ID NO: 3358452 - DNA, 25 bp, Homo sapien
tgagtgttggcagtaagagtcaccc

SEQ ID NO: 3358453 - DNA, 25 bp, Homo sapien
tccttggactgatgtgatgatcccc

SEQ ID NO: 3358454 - DNA, 25 bp, Homo sapien
tccaatgtgttaagtggcacccact

SEQ ID NO: 3358455 - DNA, 25 bp, Homo sapien
gatgatccccggaatatgatccagg

SEQ ID NO: 3358456 - DNA, 25 bp, Homo sapien
tcctctagctcagggaaaatactgg

SEQ ID NO: 3358457 - DNA, 25 bp, Homo sapien
taagtccaagtatcactagctattg

SEQ ID NO: 3358458 - DNA, 25 bp, Homo sapien
aagaaggctggagtaatatgcatat

SEQ ID NO: 3358459 - DNA, 25 bp, Homo sapien
ccaagtatcactagctattgacaat

SEQ ID NO: 3358460 - DNA, 25 bp, Homo sapien
ccgccttgataagagatcatcaggg

SEQ ID NO: 3358461 - DNA, 25 bp, Homo sapien
agaaggaggcagtcttaacatagcc

SEQ ID NO: 3358462 - DNA, 25 bp, Homo sapien
agagggcagtattgacctttcatcc

SEQ ID NO: 3358463 - DNA, 25 bp, Homo sapien
gaccagtggacattcaacatagtgg

SEQ ID NO: 3358464 - DNA, 25 bp, Homo sapien
agtgacttgtgagtcctttgccagg

SEQ ID NO: 3358465 - DNA, 25 bp, Homo sapien
cggatacagagtcggcaaagttggt

SEQ ID NO: 3358466 - DNA, 25 bp, Homo sapien
tggttttcctatgtagcttcggata

SEQ ID NO: 3358467 - DNA, 25 bp, Homo sapien
tgtgggataaggtgcaatcttggtt

SEQ ID NO: 3358468 - DNA, 25 bp, Homo sapien
tcttcagtaacgttggcagctggag

SEQ ID NO: 3358469 - DNA, 25 bp, Homo sapien
tcatgttgaagcaatatcctttcca

SEQ ID NO: 3358470 - DNA, 25 bp, Homo sapien
tctgtgctggattgttgagcagcag

SEQ ID NO: 3358471 - DNA, 25 bp, Homo sapien
cagcatgtaatggagtatcccaata

SEQ ID NO: 3358472 - DNA, 25 bp, Homo sapien
tacatctataggtcgcagaagctct

SEQ ID NO: 3358473 - DNA, 25 bp, Homo sapien
aagcttccagatgcaatggaattgc

SEQ ID NO: 3358474 - DNA, 25 bp, Homo sapien
tccagatgcaatggaattgctgtga

SEQ ID NO: 3358475 - DNA, 25 bp, Homo sapien
cttccagatgcaatggaattgctgt

SEQ ID NO: 3358476 - DNA, 25 bp, Homo sapien
cagatgcaatggaattgctgtgaca

SEQ ID NO: 3358477 - DNA, 25 bp, Homo sapien
caggatatcaggatgtcaagacatt

SEQ ID NO: 3358478 - DNA, 25 bp, Homo sapien
tgccccaggatatcaggatgtcaag

SEQ ID NO: 3358479 - DNA, 25 bp, Homo sapien
ggtcaacatctatgccccaggatat

SEQ ID NO: 3358480 - DNA, 25 bp, Homo sapien
aatttcttggtcaacatctatgccc

SEQ ID NO: 3358481 - DNA, 25 bp, Homo sapien
gggatggaagacatgactccagctg

SEQ ID NO: 3358482 - DNA, 25 bp, Homo sapien
ggcaccatactccagaagcagctct

SEQ ID NO: 3358483 - DNA, 25 bp, Homo sapien
cctcatgcgttggggatggaagaca

SEQ ID NO: 3358484 - DNA, 25 bp, Homo sapien
ctggcggcctcatgcgttggggatg

SEQ ID NO: 3358485 - DNA, 25 bp, Homo sapien
cgccatctatcgtgattgcatttac

SEQ ID NO: 3358486 - DNA, 25 bp, Homo sapien
ggagtcacgccatctatcgtgattg

SEQ ID NO: 3358487 - DNA, 25 bp, Homo sapien
ggagcatgcgttgaataacggagtc

SEQ ID NO: 3358488 - DNA, 25 bp, Homo sapien
gttgaataacggagtcacgccatct

SEQ ID NO: 3358489 - DNA, 25 bp, Homo sapien
catggtctaaggttactgcatttac

SEQ ID NO: 3358490 - DNA, 25 bp, Homo sapien
gcagagttctggcacatgccacgtg

SEQ ID NO: 3358491 - DNA, 25 bp, Homo sapien
gggtgacatggtctaaggttactgc

SEQ ID NO: 3358492 - DNA, 25 bp, Homo sapien
tccaaggcaggcttcgtgcaatggg

SEQ ID NO: 3358493 - DNA, 25 bp, Homo sapien
tatcgatgaacaaatatgctgtctg

SEQ ID NO: 3358494 - DNA, 25 bp, Homo sapien
catatttgcattgattggttttgac

SEQ ID NO: 3358495 - DNA, 25 bp, Homo sapien
gaaactattgacttctctgacatga

SEQ ID NO: 3358496 - DNA, 25 bp, Homo sapien
tggttttgaccatgttctgtgcaca

SEQ ID NO: 3358497 - DNA, 25 bp, Homo sapien
ctgtgataataatgttctcagagca

SEQ ID NO: 3358498 - DNA, 25 bp, Homo sapien
cagagcaagaaggcgaccttgactt

SEQ ID NO: 3358499 - DNA, 25 bp, Homo sapien
caagaaggcgaccttgacttgctgc

SEQ ID NO: 3358500 - DNA, 25 bp, Homo sapien
agaaggcgaccttgacttgctgctt

SEQ ID NO: 3358501 - DNA, 25 bp, Homo sapien
tcttctcccttgcatactaatgtgt

SEQ ID NO: 3358502 - DNA, 25 bp, Homo sapien
ccttgcatactaatgtgtttgttca

SEQ ID NO: 3358503 - DNA, 25 bp, Homo sapien
cttctcccttgcatactaatgtgtt

SEQ ID NO: 3358504 - DNA, 25 bp, Homo sapien
ctcccttgcatactaatgtgtttgt

SEQ ID NO: 3358505 - DNA, 25 bp, Homo sapien
ccagccactgtcgaggtaaatccga

SEQ ID NO: 3358506 - DNA, 25 bp, Homo sapien
cttcacaccagccactgtcgaggta

SEQ ID NO: 3358507 - DNA, 25 bp, Homo sapien
ggcacttcacaccagccactgtcga

SEQ ID NO: 3358508 - DNA, 25 bp, Homo sapien
cactgtcgaggtaaatccgactcat

SEQ ID NO: 3358509 - DNA, 25 bp, Homo sapien
tggtggactgttattccataatgag

SEQ ID NO: 3358510 - DNA, 25 bp, Homo sapien
taactaacagactagacaaatgaag

SEQ ID NO: 3358511 - DNA, 25 bp, Homo sapien
aaagccaggaagcaaactccgttct

SEQ ID NO: 3358512 - DNA, 25 bp, Homo sapien
ccctagaactcatagggcacttggt

SEQ ID NO: 3358513 - DNA, 25 bp, Homo sapien
gtgatgttctgaacatcgctcactg

SEQ ID NO: 3358514 - DNA, 25 bp, Homo sapien
cagtgatgttctgaacatcgctcac

SEQ ID NO: 3358515 - DNA, 25 bp, Homo sapien
gatgttctgaacatcgctcactgca

SEQ ID NO: 3358516 - DNA, 25 bp, Homo sapien
atgttctgaacatcgctcactgcag

SEQ ID NO: 3358517 - DNA, 25 bp, Homo sapien
tcagaataccccagctagcttttcg

SEQ ID NO: 3358518 - DNA, 25 bp, Homo sapien
tagaagaacattcctctatactcac

SEQ ID NO: 3358519 - DNA, 25 bp, Homo sapien
ccagctagcttttcgtttagaagaa

SEQ ID NO: 3358520 - DNA, 25 bp, Homo sapien
cttgactggtcagaataccccagct

SEQ ID NO: 3358521 - DNA, 25 bp, Homo sapien
tagccttcttttcgtgaggacctgc

SEQ ID NO: 3358522 - DNA, 25 bp, Homo sapien
ttttcgtgaggacctgcttaatgca

SEQ ID NO: 3358523 - DNA, 25 bp, Homo sapien
ccttcttttcgtgaggacctgctta

SEQ ID NO: 3358524 - DNA, 25 bp, Homo sapien
cctgcttaatgcagttcatttcaac

SEQ ID NO: 3358525 - DNA, 25 bp, Homo sapien
tgcggacatagtttggttgacgttt

SEQ ID NO: 3358526 - DNA, 25 bp, Homo sapien
ctgcggacatagtttggttgacgtt

SEQ ID NO: 3358527 - DNA, 25 bp, Homo sapien
accaggtgtcataagtgcaaatgct

SEQ ID NO: 3358528 - DNA, 25 bp, Homo sapien
gtttctttacaaggccgtgccctca

SEQ ID NO: 3358529 - DNA, 25 bp, Homo sapien
acatgagtacctaaatctgttggcc

SEQ ID NO: 3358530 - DNA, 25 bp, Homo sapien
ccaccattgcaaagaggcatctgga

SEQ ID NO: 3358531 - DNA, 25 bp, Homo sapien
catacaacctttaggagtcatatct

SEQ ID NO: 3358532 - DNA, 25 bp, Homo sapien
tgccatccaactcttacattatctt

SEQ ID NO: 3358533 - DNA, 25 bp, Homo sapien
aactcttacattatcttttcttcca

SEQ ID NO: 3358534 - DNA, 25 bp, Homo sapien
gggaaacagatccaacataaccaag

SEQ ID NO: 3358535 - DNA, 25 bp, Homo sapien
agggaaacagatccaacataaccaa

SEQ ID NO: 3358536 - DNA, 25 bp, Homo sapien
tgctgaatgtctgctctaccactga

SEQ ID NO: 3358537 - DNA, 25 bp, Homo sapien
tgctgttctttattccaacctgcag

SEQ ID NO: 3358538 - DNA, 25 bp, Homo sapien
tgagggtaataagagacttcagttc

SEQ ID NO: 3358539 - DNA, 25 bp, Homo sapien
tattccaacctgcagtcttagtggg

SEQ ID NO: 3358540 - DNA, 25 bp, Homo sapien
ggcatccgagaagacctaggaaatt

SEQ ID NO: 3358541 - DNA, 25 bp, Homo sapien
ctgagaagtaacagggcatccgaga

SEQ ID NO: 3358542 - DNA, 25 bp, Homo sapien
tgagaagtaacagggcatccgagaa

SEQ ID NO: 3358543 - DNA, 25 bp, Homo sapien
gaagacctaggaaatttctcctcat

SEQ ID NO: 3358544 - DNA, 25 bp, Homo sapien
tgcggttgcctttcactatgtagaa

SEQ ID NO: 3358545 - DNA, 25 bp, Homo sapien
ggccgattttcttctaacaccgaca

SEQ ID NO: 3358546 - DNA, 25 bp, Homo sapien
gataattgttgagcaaacggccgat

SEQ ID NO: 3358547 - DNA, 25 bp, Homo sapien
taaaattcagctgctatccttgccg

SEQ ID NO: 3358548 - DNA, 25 bp, Homo sapien
aaatgtgcctggctctcgtccggga

SEQ ID NO: 3358549 - DNA, 25 bp, Homo sapien
gaatctgcggcggtctttagttgga

SEQ ID NO: 3358550 - DNA, 25 bp, Homo sapien
ggtctttagttggatccaagtctca

SEQ ID NO: 3358551 - DNA, 25 bp, Homo sapien
tgcagaagaatctgcggcggtcttt

SEQ ID NO: 3358552 - DNA, 25 bp, Homo sapien
gagataaatgtttttataatatacc

SEQ ID NO: 3358553 - DNA, 25 bp, Homo sapien
gataaatgtttttataatataccat

SEQ ID NO: 3358554 - DNA, 25 bp, Homo sapien
agataaatgtttttataatatacca

SEQ ID NO: 3358555 - DNA, 25 bp, Homo sapien
tgagataaatgtttttataatatac

SEQ ID NO: 3358556 - DNA, 25 bp, Homo sapien
catattgagatctgccctaactaga

SEQ ID NO: 3358557 - DNA, 25 bp, Homo sapien
tcattaacttagactgcatccaggt

SEQ ID NO: 3358558 - DNA, 25 bp, Homo sapien
tactaccagtatgatggaacaaaag

SEQ ID NO: 3358559 - DNA, 25 bp, Homo sapien
caagttgtcacggtaatatattcac

SEQ ID NO: 3358560 - DNA, 25 bp, Homo sapien
aaattgggaacctgtcagctgtctg

SEQ ID NO: 3358561 - DNA, 25 bp, Homo sapien
gggaattcagcatctggctgagtcc

SEQ ID NO: 3358562 - DNA, 25 bp, Homo sapien
tgtctggggaattcagcatctggct

SEQ ID NO: 3358563 - DNA, 25 bp, Homo sapien
ctggaaattgggaacctgtcagctg

SEQ ID NO: 3358564 - DNA, 25 bp, Homo sapien
ctgcagcgaggcaagcaggaggtag

SEQ ID NO: 3358565 - DNA, 25 bp, Homo sapien
ctgaagatgtgatcgtggcaatgat

SEQ ID NO: 3358566 - DNA, 25 bp, Homo sapien
catcttgttgtatattaccgtaacc

SEQ ID NO: 3358567 - DNA, 25 bp, Homo sapien
gatcgtggcaatgataataagaata

SEQ ID NO: 3358568 - DNA, 25 bp, Homo sapien
taagaatagtaacagcaaatacatc

SEQ ID NO: 3358569 - DNA, 25 bp, Homo sapien
ttactggttatagagattagaatcc

SEQ ID NO: 3358570 - DNA, 25 bp, Homo sapien
tttctttcttcatatccttggtata

SEQ ID NO: 3358571 - DNA, 25 bp, Homo sapien
ccttggtataaaaatgtgaatagtt

SEQ ID NO: 3358572 - DNA, 25 bp, Homo sapien
tccttggtataaaaatgtgaatagt

SEQ ID NO: 3358573 - DNA, 25 bp, Homo sapien
ctttcttcatatccttggtataaaa

SEQ ID NO: 3358574 - DNA, 25 bp, Homo sapien
gggcacacctggttcttaggaaagc

SEQ ID NO: 3358575 - DNA, 25 bp, Homo sapien
ggactcagtcctagcatactcctct

SEQ ID NO: 3358576 - DNA, 25 bp, Homo sapien
ggatcttgatgcaaaactagcagtc

SEQ ID NO: 3358577 - DNA, 25 bp, Homo sapien
cagtgcaccaattagcccgaaggga

SEQ ID NO: 3358578 - DNA, 25 bp, Homo sapien
aaaatggagaaatgtaattggtggg

SEQ ID NO: 3358579 - DNA, 25 bp, Homo sapien
ggctcaatgaacactgaaaatggag

SEQ ID NO: 3358580 - DNA, 25 bp, Homo sapien
acatttatatccaatggctcaatga

SEQ ID NO: 3358581 - DNA, 25 bp, Homo sapien
aatgtaattggtgggttgactaaag

SEQ ID NO: 3358582 - DNA, 25 bp, Homo sapien
catgacgggtagagcctcagatggt

SEQ ID NO: 3358583 - DNA, 25 bp, Homo sapien
ttaacatgacgggtagagcctcaga

SEQ ID NO: 3358584 - DNA, 25 bp, Homo sapien
aacatgacgggtagagcctcagatg

SEQ ID NO: 3358585 - DNA, 25 bp, Homo sapien
atgacgggtagagcctcagatggta

SEQ ID NO: 3358586 - DNA, 25 bp, Homo sapien
tcagaaatacagttaggcatgtctt

SEQ ID NO: 3358587 - DNA, 25 bp, Homo sapien
tactcaagcgctgacaaagcatgcc

SEQ ID NO: 3358588 - DNA, 25 bp, Homo sapien
cccattactgccactaggttctgag

SEQ ID NO: 3358589 - DNA, 25 bp, Homo sapien
gcatgtctttcccagctgatcgcta

SEQ ID NO: 3358590 - DNA, 25 bp, Homo sapien
ttaaagaccagatccaaatgctact

SEQ ID NO: 3358591 - DNA, 25 bp, Homo sapien
ttattccaggaatgcttactgggcc

SEQ ID NO: 3358592 - DNA, 25 bp, Homo sapien
aactaattcatcatgaccaggtgga

SEQ ID NO: 3358593 - DNA, 25 bp, Homo sapien
gatatcagttgtccccatctgactg

SEQ ID NO: 3358594 - DNA, 25 bp, Homo sapien
taatgtgtcttgtttaggctttgtg

SEQ ID NO: 3358595 - DNA, 25 bp, Homo sapien
cattaccagggctgtaattccttcc

SEQ ID NO: 3358596 - DNA, 25 bp, Homo sapien
gaaagtgatcagtacaatctctgta

SEQ ID NO: 3358597 - DNA, 25 bp, Homo sapien
taatttgcacactgtgttgtcccac

SEQ ID NO: 3358598 - DNA, 25 bp, Homo sapien
caaatacttaggatcggtagcctca

SEQ ID NO: 3358599 - DNA, 25 bp, Homo sapien
tgacagctttaaggacttgggcggc

SEQ ID NO: 3358600 - DNA, 25 bp, Homo sapien
gaactattcctggtacacggtaggc

SEQ ID NO: 3358601 - DNA, 25 bp, Homo sapien
cacggtaggcacttggtaataatcc

SEQ ID NO: 3358602 - DNA, 25 bp, Homo sapien
cagcgaacgaccggttcccaattct

SEQ ID NO: 3358603 - DNA, 25 bp, Homo sapien
taagtaatcaagaagtcgcagtccc

SEQ ID NO: 3358604 - DNA, 25 bp, Homo sapien
cagacctctgaccaaagaaccgaaa

SEQ ID NO: 3358605 - DNA, 25 bp, Homo sapien
gaaaataaatggtacataagtaatc

SEQ ID NO: 3358606 - DNA, 25 bp, Homo sapien
tgaacccaaaggtcggagaagcaat

SEQ ID NO: 3358607 - DNA, 25 bp, Homo sapien
ctgaacccaaaggtcggagaagcaa

SEQ ID NO: 3358608 - DNA, 25 bp, Homo sapien
cccaaaggtcggagaagcaatttag

SEQ ID NO: 3358609 - DNA, 25 bp, Homo sapien
aggtcggagaagcaatttagaagag

SEQ ID NO: 3358610 - DNA, 25 bp, Homo sapien
ctgggtgtgcgtgtggagtccggac

SEQ ID NO: 3358611 - DNA, 25 bp, Homo sapien
gaactcactgttcgccttctcgctg

SEQ ID NO: 3358612 - DNA, 25 bp, Homo sapien
cgtgggagacgatcgcgatgaacac

SEQ ID NO: 3358613 - DNA, 25 bp, Homo sapien
cgccggaacgggagcctgggtgtgc

SEQ ID NO: 3358614 - DNA, 25 bp, Homo sapien
tgcggctgcacgtctcgcggatcat

SEQ ID NO: 3358615 - DNA, 25 bp, Homo sapien
aaagacaggagcgtcccggtgcggc

SEQ ID NO: 3358616 - DNA, 25 bp, Homo sapien
agcgtcccggtgcggctgcacgtct

SEQ ID NO: 3358617 - DNA, 25 bp, Homo sapien
cggtgcggctgcacgtctcgcggat

SEQ ID NO: 3358618 - DNA, 25 bp, Homo sapien
tcggaacttgcacccctccaccgta

SEQ ID NO: 3358619 - DNA, 25 bp, Homo sapien
gacgtcgcaggcttttccggcgtcc

SEQ ID NO: 3358620 - DNA, 25 bp, Homo sapien
gatcgccctcctgagcggcagttcg

SEQ ID NO: 3358621 - DNA, 25 bp, Homo sapien
caccgtaaattcccgggcttgctct

SEQ ID NO: 3358622 - DNA, 25 bp, Homo sapien
aatgagggagcaacacaacagcaga

SEQ ID NO: 3358623 - DNA, 25 bp, Homo sapien
gtccggtgccgctcgtggtccgcat

SEQ ID NO: 3358624 - DNA, 25 bp, Homo sapien
ggccaatgagggagcaacacaacag

SEQ ID NO: 3358625 - DNA, 25 bp, Homo sapien
tggtccgcatgcgaggccctccagg

SEQ ID NO: 3358626 - DNA, 25 bp, Homo sapien
ttgcattcacgcaaattcacattgg

SEQ ID NO: 3358627 - DNA, 25 bp, Homo sapien
taagaactaacatcaaaaggcctgt

SEQ ID NO: 3358628 - DNA, 25 bp, Homo sapien
ggtgcctgtagagtcataataactg

SEQ ID NO: 3358629 - DNA, 25 bp, Homo sapien
cttaggaaggcccataatacttgtt

SEQ ID NO: 3358630 - DNA, 25 bp, Homo sapien
gtacctgaatgctaaactgcctggc

SEQ ID NO: 3358631 - DNA, 25 bp, Homo sapien
cattgttacctagccagcaaggagt

SEQ ID NO: 3358632 - DNA, 25 bp, Homo sapien
tgtatagttcatgcaaaagcctgtg

SEQ ID NO: 3358633 - DNA, 25 bp, Homo sapien
gctgccaacaacttatatcgaggta

SEQ ID NO: 3358634 - DNA, 25 bp, Homo sapien
catgatacttctgtgatgagtggat

SEQ ID NO: 3358635 - DNA, 25 bp, Homo sapien
gcatgtgcgataagcctgcagtctt

SEQ ID NO: 3358636 - DNA, 25 bp, Homo sapien
ccagacctggtaccagtttaacagt

SEQ ID NO: 3358637 - DNA, 25 bp, Homo sapien
acttaaaatgtgcaggtgtcaaagc

SEQ ID NO: 3358638 - DNA, 25 bp, Homo sapien
cttcagaaattcctaagggtgtaat

SEQ ID NO: 3358639 - DNA, 25 bp, Homo sapien
cagaaattcctaagggtgtaataag

SEQ ID NO: 3358640 - DNA, 25 bp, Homo sapien
catttggtttctttattctgaaagg

SEQ ID NO: 3358641 - DNA, 25 bp, Homo sapien
tctttattctgaaaggaaaataaca

SEQ ID NO: 3358642 - DNA, 25 bp, Homo sapien
ccatgagctgtgaacattggtagca

SEQ ID NO: 3358643 - DNA, 25 bp, Homo sapien
tttgcattgacatgaagtgggttca

SEQ ID NO: 3358644 - DNA, 25 bp, Homo sapien
gatctttcgggtatatgtcaatgga

SEQ ID NO: 3358645 - DNA, 25 bp, Homo sapien
gacggagatctgctcttacgcccag

SEQ ID NO: 3358646 - DNA, 25 bp, Homo sapien
tatgctttttacgtgaagctgctaa

SEQ ID NO: 3358647 - DNA, 25 bp, Homo sapien
gctctttgagggcagtctgtcagat

SEQ ID NO: 3358648 - DNA, 25 bp, Homo sapien
ttccccagcgcctagtgtagtgcct

SEQ ID NO: 3358649 - DNA, 25 bp, Homo sapien
tcttctccagagactgtatgctcct

SEQ ID NO: 3358650 - DNA, 25 bp, Homo sapien
cctttatatccaaataaacctcaag

SEQ ID NO: 3358651 - DNA, 25 bp, Homo sapien
ttatacacattccacttgtgtatct

SEQ ID NO: 3358652 - DNA, 25 bp, Homo sapien
agtgttcccttttcatgtgcataat

SEQ ID NO: 3358653 - DNA, 25 bp, Homo sapien
tgtgtatctgttgagtatagttgga

SEQ ID NO: 3358654 - DNA, 25 bp, Homo sapien
tactacctctgttgcatcctatcag

SEQ ID NO: 3358655 - DNA, 25 bp, Homo sapien
tgttgcatcctatcagctttactgc

SEQ ID NO: 3358656 - DNA, 25 bp, Homo sapien
gaaaagtttactacctctgttgcat

SEQ ID NO: 3358657 - DNA, 25 bp, Homo sapien
ctttctgcggtcttcagttttgtgt

SEQ ID NO: 3358658 - DNA, 25 bp, Homo sapien
ctgttggaaactcttggagcctctg

SEQ ID NO: 3358659 - DNA, 25 bp, Homo sapien
gttggaaactcttggagcctctgat

SEQ ID NO: 3358660 - DNA, 25 bp, Homo sapien
tgttggaaactcttggagcctctga

SEQ ID NO: 3358661 - DNA, 25 bp, Homo sapien
ggtgtaggagacagatgttctctga

SEQ ID NO: 3358662 - DNA, 25 bp, Homo sapien
gttctctgaacaacagacttagtat

SEQ ID NO: 3358663 - DNA, 25 bp, Homo sapien
cagatgttctctgaacaacagactt

SEQ ID NO: 3358664 - DNA, 25 bp, Homo sapien
cagtatctttggtgtaggagacaga

SEQ ID NO: 3358665 - DNA, 25 bp, Homo sapien
tggccaggcggatcagtcctttcaa

SEQ ID NO: 3358666 - DNA, 25 bp, Homo sapien
caggcggatcagtcctttcaaatct

SEQ ID NO: 3358667 - DNA, 25 bp, Homo sapien
gaattgccaaatttggccaggcgga

SEQ ID NO: 3358668 - DNA, 25 bp, Homo sapien
caaatttggccaggcggatcagtcc

SEQ ID NO: 3358669 - DNA, 25 bp, Homo sapien
ggtgatacagctcatgaaaacaagt

SEQ ID NO: 3358670 - DNA, 25 bp, Homo sapien
cagtttacaacaccaaaatgcagaa

SEQ ID NO: 3358671 - DNA, 25 bp, Homo sapien
gtttttagaacatgagacaccttct

SEQ ID NO: 3358672 - DNA, 25 bp, Homo sapien
gtcttgcctcacataaaaattgcta

SEQ ID NO: 3358673 - DNA, 25 bp, Homo sapien
aatcataacattggagacatttatt

SEQ ID NO: 3358674 - DNA, 25 bp, Homo sapien
tgcatgtggatctcgttaggaaaaa

SEQ ID NO: 3358675 - DNA, 25 bp, Homo sapien
tttttgcatgtggatctcgttagga

SEQ ID NO: 3358676 - DNA, 25 bp, Homo sapien
tggatctcgttaggaaaaatcataa

SEQ ID NO: 3358677 - DNA, 25 bp, Homo sapien
tcagtgaaggcgtattgatccaacg

SEQ ID NO: 3358678 - DNA, 25 bp, Homo sapien
ctagtagagcttcagtgaaggcgta

SEQ ID NO: 3358679 - DNA, 25 bp, Homo sapien
ttgatccaacgtcctgaaacaagtc

SEQ ID NO: 3358680 - DNA, 25 bp, Homo sapien
ggcgtattgatccaacgtcctgaaa

SEQ ID NO: 3358681 - DNA, 25 bp, Homo sapien
tagtccaggaaatcactcaagggca

SEQ ID NO: 3358682 - DNA, 25 bp, Homo sapien
tcctcgtgtgggtcactgatgacac

SEQ ID NO: 3358683 - DNA, 25 bp, Homo sapien
tcctgatggatgcaatgcccaggtg

SEQ ID NO: 3358684 - DNA, 25 bp, Homo sapien
ccctgctcctcgtgtgggtcactga

SEQ ID NO: 3358685 - DNA, 25 bp, Homo sapien
tgagctatagccatgtgaagagaag

SEQ ID NO: 3358686 - DNA, 25 bp, Homo sapien
atctggagctttcttagcaaaacaa

SEQ ID NO: 3358687 - DNA, 25 bp, Homo sapien
tggaagatttcagtatcggcatatc

SEQ ID NO: 3358688 - DNA, 25 bp, Homo sapien
caaaggtgacagagggttgtaatta

SEQ ID NO: 3358689 - DNA, 25 bp, Homo sapien
caagcccccaatataacttgcctga

SEQ ID NO: 3358690 - DNA, 25 bp, Homo sapien
cgtgtcatcaagcccccaatataac

SEQ ID NO: 3358691 - DNA, 25 bp, Homo sapien
tcaagcccccaatataacttgcctg

SEQ ID NO: 3358692 - DNA, 25 bp, Homo sapien
atcaagcccccaatataacttgcct

SEQ ID NO: 3358693 - DNA, 25 bp, Homo sapien
gaattttaccgtgggatgctcgcca

SEQ ID NO: 3358694 - DNA, 25 bp, Homo sapien
tcatcagtgtcgttgccacatttgg

SEQ ID NO: 3358695 - DNA, 25 bp, Homo sapien
caaatgctccaggttttgagttact

SEQ ID NO: 3358696 - DNA, 25 bp, Homo sapien
tatgttttgcttcagtcatggtaga

SEQ ID NO: 3358697 - DNA, 25 bp, Homo sapien
gaactgtttgcatggcctttctccc

SEQ ID NO: 3358698 - DNA, 25 bp, Homo sapien
tccaattttgtcgttctctttcaca

SEQ ID NO: 3358699 - DNA, 25 bp, Homo sapien
tgggcagctatttccatcccatgtg

SEQ ID NO: 3358700 - DNA, 25 bp, Homo sapien
catgtgcgagaaagccttgcttcag

SEQ ID NO: 3358701 - DNA, 25 bp, Homo sapien
tgtgagacctgaggctacacctcac

SEQ ID NO: 3358702 - DNA, 25 bp, Homo sapien
tcacattcgcagcaattgtcctcat

SEQ ID NO: 3358703 - DNA, 25 bp, Homo sapien
ggtcttggtgtttgtccaagtgtga

SEQ ID NO: 3358704 - DNA, 25 bp, Homo sapien
ggctacacctcacattcgcagcaat

SEQ ID NO: 3358705 - DNA, 25 bp, Homo sapien
tcaaaccttcatgtgactctggagt

SEQ ID NO: 3358706 - DNA, 25 bp, Homo sapien
gattcaggggctttcctaatgttat

SEQ ID NO: 3358707 - DNA, 25 bp, Homo sapien
atcccatcacagcttcaagctctcc

SEQ ID NO: 3358708 - DNA, 25 bp, Homo sapien
gggctttcctaatgttatcaggacc

SEQ ID NO: 3358709 - DNA, 25 bp, Homo sapien
caagctgatctgagagtcaaggcag

SEQ ID NO: 3358710 - DNA, 25 bp, Homo sapien
gcagctttacagagggtaaagaaga

SEQ ID NO: 3358711 - DNA, 25 bp, Homo sapien
tcttcctgaacaaaagaaccgtgta

SEQ ID NO: 3358712 - DNA, 25 bp, Homo sapien
ctcctataataagtaagtctggctg

SEQ ID NO: 3358713 - DNA, 25 bp, Homo sapien
tagatctctcacgtaattattcagg

SEQ ID NO: 3358714 - DNA, 25 bp, Homo sapien
tgtactttgtacttgcaactgtgtg

SEQ ID NO: 3358715 - DNA, 25 bp, Homo sapien
tgatttataacaacgcgggagaaag

SEQ ID NO: 3358716 - DNA, 25 bp, Homo sapien
ggcggattcttgagctggattttaa

SEQ ID NO: 3358717 - DNA, 25 bp, Homo sapien
ctggttggtgactaacaagagctgg

SEQ ID NO: 3358718 - DNA, 25 bp, Homo sapien
ggtgactaacaagagctggtgtcaa

SEQ ID NO: 3358719 - DNA, 25 bp, Homo sapien
gagctggtgtcaattctgtaaccat

SEQ ID NO: 3358720 - DNA, 25 bp, Homo sapien
agagctggtgtcaattctgtaacca

SEQ ID NO: 3358721 - DNA, 25 bp, Homo sapien
ccttagccagtatgtagaatgccca

SEQ ID NO: 3358722 - DNA, 25 bp, Homo sapien
tgttgactgctgacaagcttcagag

SEQ ID NO: 3358723 - DNA, 25 bp, Homo sapien
gattggccagatcaacagtaacaga

SEQ ID NO: 3358724 - DNA, 25 bp, Homo sapien
catggcctcagggtgcttactgaaa

SEQ ID NO: 3358725 - DNA, 25 bp, Homo sapien
taagatgataatggactgaacttag

SEQ ID NO: 3358726 - DNA, 25 bp, Homo sapien
gatgataatggactgaacttagcag

SEQ ID NO: 3358727 - DNA, 25 bp, Homo sapien
agatgataatggactgaacttagca

SEQ ID NO: 3358728 - DNA, 25 bp, Homo sapien
atgataatggactgaacttagcagc

SEQ ID NO: 3358729 - DNA, 25 bp, Homo sapien
accagtctttacaagaggccttttg

SEQ ID NO: 3358730 - DNA, 25 bp, Homo sapien
cagacagttctactgtggcaacaca

SEQ ID NO: 3358731 - DNA, 25 bp, Homo sapien
tgtaaagttatccacatggttcagg

SEQ ID NO: 3358732 - DNA, 25 bp, Homo sapien
ttgttagcatggacccacaagggtc

SEQ ID NO: 3358733 - DNA, 25 bp, Homo sapien
cttctggcggttcgtacatggccgt

SEQ ID NO: 3358734 - DNA, 25 bp, Homo sapien
gaagggacacaacgacacacttctt

SEQ ID NO: 3358735 - DNA, 25 bp, Homo sapien
tcctggctcacaagccttctggcgg

SEQ ID NO: 3358736 - DNA, 25 bp, Homo sapien
aacgacacacttcttcactatatga

SEQ ID NO: 3358737 - DNA, 25 bp, Homo sapien
agatcaaggcaatggattcatcatg

SEQ ID NO: 3358738 - DNA, 25 bp, Homo sapien
aggcaatggattcatcatgctacca

SEQ ID NO: 3358739 - DNA, 25 bp, Homo sapien
catgctaccaaggtatttctgtgtt

SEQ ID NO: 3358740 - DNA, 25 bp, Homo sapien
cacacttacgttaaagatcaaggca

SEQ ID NO: 3358741 - DNA, 25 bp, Homo sapien
acacactggcatgagtttctgtcta

SEQ ID NO: 3358742 - DNA, 25 bp, Homo sapien
tttcatcaaattctcggttggcccc

SEQ ID NO: 3358743 - DNA, 25 bp, Homo sapien
cattggctggggaagagtttgtttt

SEQ ID NO: 3358744 - DNA, 25 bp, Homo sapien
aaattctcggttggccccacattgg

SEQ ID NO: 3358745 - DNA, 25 bp, Homo sapien
cagagaatctttactataccttact

SEQ ID NO: 3358746 - DNA, 25 bp, Homo sapien
aatagtcagagaatctttactatac

SEQ ID NO: 3358747 - DNA, 25 bp, Homo sapien
gtcagagaatctttactatacctta

SEQ ID NO: 3358748 - DNA, 25 bp, Homo sapien
agaatctttactataccttacttgg

SEQ ID NO: 3358749 - DNA, 25 bp, Homo sapien
catctccagcatccgaggaaaacat

SEQ ID NO: 3358750 - DNA, 25 bp, Homo sapien
cacatgtaattggtggggcaggtct

SEQ ID NO: 3358751 - DNA, 25 bp, Homo sapien
ttccacatgtaattggtggggcagg

SEQ ID NO: 3358752 - DNA, 25 bp, Homo sapien
ccagcatccgaggaaaacataaaat

SEQ ID NO: 3358753 - DNA, 25 bp, Homo sapien
cctcttcatatgacagtttgtcgaa

SEQ ID NO: 3358754 - DNA, 25 bp, Homo sapien
cagcatcacatagaggaatttttca

SEQ ID NO: 3358755 - DNA, 25 bp, Homo sapien
aataatagcctggtaactcttacag

SEQ ID NO: 3358756 - DNA, 25 bp, Homo sapien
tctacagcatctactagacacagac

SEQ ID NO: 3358757 - DNA, 25 bp, Homo sapien
cccttcttgagtttcttcaagagtc

SEQ ID NO: 3358758 - DNA, 25 bp, Homo sapien
gtcccttcttgagtttcttcaagag

SEQ ID NO: 3358759 - DNA, 25 bp, Homo sapien
tttgtcccttcttgagtttcttcaa

SEQ ID NO: 3358760 - DNA, 25 bp, Homo sapien
tgtcccttcttgagtttcttcaaga

SEQ ID NO: 3358761 - DNA, 25 bp, Homo sapien
gaattccaagggcaagtctctactc

SEQ ID NO: 3358762 - DNA, 25 bp, Homo sapien
gagaagttctgtatcatcagcaagt

SEQ ID NO: 3358763 - DNA, 25 bp, Homo sapien
gacagtcaggacttatccaaaacag

SEQ ID NO: 3358764 - DNA, 25 bp, Homo sapien
tacacagatagcatccgttacacat

SEQ ID NO: 3358765 - DNA, 25 bp, Homo sapien
tctcataatccagttccacatgcaa

SEQ ID NO: 3358766 - DNA, 25 bp, Homo sapien
gttccacatgcaacatttgcagacc

SEQ ID NO: 3358767 - DNA, 25 bp, Homo sapien
aatccagttccacatgcaacatttg

SEQ ID NO: 3358768 - DNA, 25 bp, Homo sapien
cagttccacatgcaacatttgcaga

SEQ ID NO: 3358769 - DNA, 25 bp, Homo sapien
gaggatgaagttaatccagtgagtg

SEQ ID NO: 3358770 - DNA, 25 bp, Homo sapien
tgaggatgaagttaatccagtgagt

SEQ ID NO: 3358771 - DNA, 25 bp, Homo sapien
gggaatcggacttggtgaaacacag

SEQ ID NO: 3358772 - DNA, 25 bp, Homo sapien
ggccagaatagaaacaagatacaga

SEQ ID NO: 3358773 - DNA, 25 bp, Homo sapien
agcttggcgttctgggaatcggact

SEQ ID NO: 3358774 - DNA, 25 bp, Homo sapien
cagggccagaatagaaacaagatac

SEQ ID NO: 3358775 - DNA, 25 bp, Homo sapien
gcagggaacgtctaataatggaatg

SEQ ID NO: 3358776 - DNA, 25 bp, Homo sapien
gagagaggcactgtaatttcaaata

SEQ ID NO: 3358777 - DNA, 25 bp, Homo sapien
gcaggaagtgtgattggcaaaactg

SEQ ID NO: 3358778 - DNA, 25 bp, Homo sapien
tccagtttagacatgcatcggcagg

SEQ ID NO: 3358779 - DNA, 25 bp, Homo sapien
aaattaaaactatctgccgggtgcg

SEQ ID NO: 3358780 - DNA, 25 bp, Homo sapien
taatgggtgtaccacatgcacttgt

SEQ ID NO: 3358781 - DNA, 25 bp, Homo sapien
cagaaattttatgcctcgacctccc

SEQ ID NO: 3358782 - DNA, 25 bp, Homo sapien
taatttgttagttccatagggcagg

SEQ ID NO: 3358783 - DNA, 25 bp, Homo sapien
gactccactatatgaagagtttgca

SEQ ID NO: 3358784 - DNA, 25 bp, Homo sapien
ttctgcatgaggctttgactccact

SEQ ID NO: 3358785 - DNA, 25 bp, Homo sapien
taaagcatcaattactttctttgtg

SEQ ID NO: 3358786 - DNA, 25 bp, Homo sapien
ttcattcccctaaagaaaatatgag

SEQ ID NO: 3358787 - DNA, 25 bp, Homo sapien
cgtcttgctgaggtagctcgtgctg

SEQ ID NO: 3358788 - DNA, 25 bp, Homo sapien
gctcgtgctggtgttcatgcactgc

SEQ ID NO: 3358789 - DNA, 25 bp, Homo sapien
ctgaggtagctcgtgctggtgttca

SEQ ID NO: 3358790 - DNA, 25 bp, Homo sapien
aggtagctcgtgctggtgttcatgc

SEQ ID NO: 3358791 - DNA, 25 bp, Homo sapien
aagaaggtgtttgtcgcgactccaa

SEQ ID NO: 3358792 - DNA, 25 bp, Homo sapien
ggtgtttgtcgcgactccaaactcc

SEQ ID NO: 3358793 - DNA, 25 bp, Homo sapien
gtttgtcgcgactccaaactccttc

SEQ ID NO: 3358794 - DNA, 25 bp, Homo sapien
ttaaagaaggtgtttgtcgcgactc

SEQ ID NO: 3358795 - DNA, 25 bp, Homo sapien
ctcccgtggcatgcattgagtcttt

SEQ ID NO: 3358796 - DNA, 25 bp, Homo sapien
cgtggcatgcattgagtctttctcc

SEQ ID NO: 3358797 - DNA, 25 bp, Homo sapien
cccgtggcatgcattgagtctttct

SEQ ID NO: 3358798 - DNA, 25 bp, Homo sapien
ggcatgcattgagtctttctccact

SEQ ID NO: 3358799 - DNA, 25 bp, Homo sapien
ggtagagtacagtcatgagttcatc

SEQ ID NO: 3358800 - DNA, 25 bp, Homo sapien
tgagttcatctacactggacacaga

SEQ ID NO: 3358801 - DNA, 25 bp, Homo sapien
tcctccagatctttgcttgcataag

SEQ ID NO: 3358802 - DNA, 25 bp, Homo sapien
tccttgagttgaggttggcctgttc

SEQ ID NO: 3358803 - DNA, 25 bp, Homo sapien
gtttgtctctgcttgttgaatagcc

SEQ ID NO: 3358804 - DNA, 25 bp, Homo sapien
ttttgtttgtctctgcttgttgaat

SEQ ID NO: 3358805 - DNA, 25 bp, Homo sapien
ctgcagtaaaatgtgacagatcagt

SEQ ID NO: 3358806 - DNA, 25 bp, Homo sapien
tgcagtaaaatgtgacagatcagtt

SEQ ID NO: 3358807 - DNA, 25 bp, Homo sapien
ataacaccaaatgctaaacagcctt

SEQ ID NO: 3358808 - DNA, 25 bp, Homo sapien
gctaaacagccttttgattggttga

SEQ ID NO: 3358809 - DNA, 25 bp, Homo sapien
gttgtgcaaattagggtatatgtga

SEQ ID NO: 3358810 - DNA, 25 bp, Homo sapien
tggaaagttgtgcaaattagggtat

SEQ ID NO: 3358811 - DNA, 25 bp, Homo sapien
tcctgctgaaacagtcagtgacagg

SEQ ID NO: 3358812 - DNA, 25 bp, Homo sapien
tgctgtggcattcttaagggctggt

SEQ ID NO: 3358813 - DNA, 25 bp, Homo sapien
aagggctggtgaatggtagtgctga

SEQ ID NO: 3358814 - DNA, 25 bp, Homo sapien
tctagcctgatcctgctgaaacagt

SEQ ID NO: 3358815 - DNA, 25 bp, Homo sapien
aaataccagtcgtcatttacatcca

SEQ ID NO: 3358816 - DNA, 25 bp, Homo sapien
attcaaataccagtcgtcatttaca

SEQ ID NO: 3358817 - DNA, 25 bp, Homo sapien
tcaaataccagtcgtcatttacatc

SEQ ID NO: 3358818 - DNA, 25 bp, Homo sapien
aataccagtcgtcatttacatccat

SEQ ID NO: 3358819 - DNA, 25 bp, Homo sapien
gcctcgcccgcgtcgggctccgcgt

SEQ ID NO: 3358820 - DNA, 25 bp, Homo sapien
ccgagaggtcgagtccggactcgaa

SEQ ID NO: 3358821 - DNA, 25 bp, Homo sapien
ctccgcgtccgagaggtcgagtccg

SEQ ID NO: 3358822 - DNA, 25 bp, Homo sapien
cccgcgtcgggctccgcgtccgaga

SEQ ID NO: 3358823 - DNA, 25 bp, Homo sapien
cagcggcgagcagagaacacgccac

SEQ ID NO: 3358824 - DNA, 25 bp, Homo sapien
agaacacgccacagagaagaagccc

SEQ ID NO: 3358825 - DNA, 25 bp, Homo sapien
ggcgagcagagaacacgccacagag

SEQ ID NO: 3358826 - DNA, 25 bp, Homo sapien
cagagaacacgccacagagaagaag

SEQ ID NO: 3358827 - DNA, 25 bp, Homo sapien
tccgcgttcccaactttgcagggcg

SEQ ID NO: 3358828 - DNA, 25 bp, Homo sapien
ggcgggtgtcaggtaaaagcctcac

SEQ ID NO: 3358829 - DNA, 25 bp, Homo sapien
gcggcgggtgtcaggtaaaagcctc

SEQ ID NO: 3358830 - DNA, 25 bp, Homo sapien
tcccagccagtgccggggaaaggcg

SEQ ID NO: 3358831 - DNA, 25 bp, Homo sapien
gccgccgcggtccgcgtcggtgtag

SEQ ID NO: 3358832 - DNA, 25 bp, Homo sapien
cccgcattcggagcccgcgaggtga

SEQ ID NO: 3358833 - DNA, 25 bp, Homo sapien
cgaggtgaagcgagggcgagggagg

SEQ ID NO: 3358834 - DNA, 25 bp, Homo sapien
gaaaccggacatccgagctccccgc

SEQ ID NO: 3358835 - DNA, 25 bp, Homo sapien
gaacaccccgcgatgttcagcccct

SEQ ID NO: 3358836 - DNA, 25 bp, Homo sapien
ctccaaacccgccagagccctcgtc

SEQ ID NO: 3358837 - DNA, 25 bp, Homo sapien
acaccagaacaccccgcgatgttca

SEQ ID NO: 3358838 - DNA, 25 bp, Homo sapien
tccaaacccgccagagccctcgtcc

SEQ ID NO: 3358839 - DNA, 25 bp, Homo sapien
tttagaggtgatgcgaccaccctgg

SEQ ID NO: 3358840 - DNA, 25 bp, Homo sapien
tgcgaccaccctggaccacgtgcag

SEQ ID NO: 3358841 - DNA, 25 bp, Homo sapien
gctttagaggtgatgcgaccaccct

SEQ ID NO: 3358842 - DNA, 25 bp, Homo sapien
ctttagaggtgatgcgaccaccctg

SEQ ID NO: 3358843 - DNA, 25 bp, Homo sapien
tggcacacgtgcagaccatacatgt

SEQ ID NO: 3358844 - DNA, 25 bp, Homo sapien
tctgtaatgccccaagtagcgctaa

SEQ ID NO: 3358845 - DNA, 25 bp, Homo sapien
tgcaagcacgcctacaaagggtaat

SEQ ID NO: 3358846 - DNA, 25 bp, Homo sapien
cctaagtgaataaagaccctcccag

SEQ ID NO: 3358847 - DNA, 25 bp, Homo sapien
tcctagttgtctgcaactgttatct

SEQ ID NO: 3358848 - DNA, 25 bp, Homo sapien
gtagcatctgtggaacctcaactct

SEQ ID NO: 3358849 - DNA, 25 bp, Homo sapien
actcttagctgatgatctcacttca

SEQ ID NO: 3358850 - DNA, 25 bp, Homo sapien
tctatcgtaaagtgtttcctagttg

SEQ ID NO: 3358851 - DNA, 25 bp, Homo sapien
aagccagtattttatccgcaattcc

SEQ ID NO: 3358852 - DNA, 25 bp, Homo sapien
ttgacaatagggctagagccagaac

SEQ ID NO: 3358853 - DNA, 25 bp, Homo sapien
gccagtattttatccgcaattcctt

SEQ ID NO: 3358854 - DNA, 25 bp, Homo sapien
gcttgttgacaatagggctagagcc

SEQ ID NO: 3358855 - DNA, 25 bp, Homo sapien
ttgtttgagcttctttccaggaaac

SEQ ID NO: 3358856 - DNA, 25 bp, Homo sapien
cattgtttgagcttctttccaggaa

SEQ ID NO: 3358857 - DNA, 25 bp, Homo sapien
tcattgtttgagcttctttccagga

SEQ ID NO: 3358858 - DNA, 25 bp, Homo sapien
ctcattgtttgagcttctttccagg

SEQ ID NO: 3358859 - DNA, 25 bp, Homo sapien
tcactgggaatagcaatgtttcttg

SEQ ID NO: 3358860 - DNA, 25 bp, Homo sapien
cagagctccttgtaagccttaacca

SEQ ID NO: 3358861 - DNA, 25 bp, Homo sapien
tctgatgttgtggagacagagctcc

SEQ ID NO: 3358862 - DNA, 25 bp, Homo sapien
ttgggaccaggccaggacatcgcag

SEQ ID NO: 3358863 - DNA, 25 bp, Homo sapien
agcatcaccctctgcggtgctcaga

SEQ ID NO: 3358864 - DNA, 25 bp, Homo sapien
tgtcactgggacgtcacataagtct

SEQ ID NO: 3358865 - DNA, 25 bp, Homo sapien
gactgtgcagcactattggtgtcca

SEQ ID NO: 3358866 - DNA, 25 bp, Homo sapien
tacatgcaataaaacttcttcgagc

SEQ ID NO: 3358867 - DNA, 25 bp, Homo sapien
tcaagctgtgatcggtcctgcattc

SEQ ID NO: 3358868 - DNA, 25 bp, Homo sapien
aacattctggaaccataagtatatg

SEQ ID NO: 3358869 - DNA, 25 bp, Homo sapien
tcacggtagaaacttccatcctgtg

SEQ ID NO: 3358870 - DNA, 25 bp, Homo sapien
tgagggttgcatacctgccaaatct

SEQ ID NO: 3358871 - DNA, 25 bp, Homo sapien
cataagtatatggtctccaaacacc

SEQ ID NO: 3358872 - DNA, 25 bp, Homo sapien
caggtgactgtagttcatcagctgc

SEQ ID NO: 3358873 - DNA, 25 bp, Homo sapien
tcagctgctgaatatagttacatgc

SEQ ID NO: 3358874 - DNA, 25 bp, Homo sapien
ttgaagcaggttatggactccccag

SEQ ID NO: 3358875 - DNA, 25 bp, Homo sapien
cttacagtgcaagcccgattgggtt

SEQ ID NO: 3358876 - DNA, 25 bp, Homo sapien
tttgcttataaccataaaacataca

SEQ ID NO: 3358877 - DNA, 25 bp, Homo sapien
tttttgcttataaccataaaacata

SEQ ID NO: 3358878 - DNA, 25 bp, Homo sapien
ttgcttataaccataaaacatacaa

SEQ ID NO: 3358879 - DNA, 25 bp, Homo sapien
tgtttttgcttataaccataaaaca

SEQ ID NO: 3358880 - DNA, 25 bp, Homo sapien
cagagcacttgcaatatgaatctct

SEQ ID NO: 3358881 - DNA, 25 bp, Homo sapien
tgaatctctacagtgattcccaagt

SEQ ID NO: 3358882 - DNA, 25 bp, Homo sapien
tgcaatatgaatctctacagtgatt

SEQ ID NO: 3358883 - DNA, 25 bp, Homo sapien
agttaaggattaaggcactcaacat

SEQ ID NO: 3358884 - DNA, 25 bp, Homo sapien
cattttggctaaattctctggttca

SEQ ID NO: 3358885 - DNA, 25 bp, Homo sapien
ccaatagtagtgaagcagtacacca

SEQ ID NO: 3358886 - DNA, 25 bp, Homo sapien
caatcgcccatgtagaaatgtgctc

SEQ ID NO: 3358887 - DNA, 25 bp, Homo sapien
ggttcaacaatttcaatcgcccatg

SEQ ID NO: 3358888 - DNA, 25 bp, Homo sapien
cagtgactgcagaggactccctccc

SEQ ID NO: 3358889 - DNA, 25 bp, Homo sapien
agtgactgcagaggactccctccca

SEQ ID NO: 3358890 - DNA, 25 bp, Homo sapien
gtgactgcagaggactccctcccat

SEQ ID NO: 3358891 - DNA, 25 bp, Homo sapien
ccagtgactgcagaggactccctcc

SEQ ID NO: 3358892 - DNA, 25 bp, Homo sapien
cacatacagagattgacttggcgtg

SEQ ID NO: 3358893 - DNA, 25 bp, Homo sapien
caagtaacaagggatgaagcacata

SEQ ID NO: 3358894 - DNA, 25 bp, Homo sapien
tcaacatcattaagtgaaaagccca

SEQ ID NO: 3358895 - DNA, 25 bp, Homo sapien
gaaaagcccatcatttcccaagtaa

SEQ ID NO: 3358896 - DNA, 25 bp, Homo sapien
ttatctgtatatttaggctcttctt

SEQ ID NO: 3358897 - DNA, 25 bp, Homo sapien
atagtgttcttctagtactgcagac

SEQ ID NO: 3358898 - DNA, 25 bp, Homo sapien
tatgaaggtgggtcatggacatctg

SEQ ID NO: 3358899 - DNA, 25 bp, Homo sapien
ggttcatcaaatagtgttcttctag

SEQ ID NO: 3358900 - DNA, 25 bp, Homo sapien
attcagttcctacaaactgaatgcg

SEQ ID NO: 3358901 - DNA, 25 bp, Homo sapien
tttcctgccttcatatgtctgtaca

SEQ ID NO: 3358902 - DNA, 25 bp, Homo sapien
gccttcatatgtctgtacatcatct

SEQ ID NO: 3358903 - DNA, 25 bp, Homo sapien
tcctacaaactgaatgcgtatatac

SEQ ID NO: 3358904 - DNA, 25 bp, Homo sapien
catgagcaactgctcccacccaaca

SEQ ID NO: 3358905 - DNA, 25 bp, Homo sapien
tgccccttgtgttctagtgattctc

SEQ ID NO: 3358906 - DNA, 25 bp, Homo sapien
tgacctctgccccttgtgttctagt

SEQ ID NO: 3358907 - DNA, 25 bp, Homo sapien
agcaactgctcccacccaacaaaat

SEQ ID NO: 3358908 - DNA, 25 bp, Homo sapien
gaatttccatggcccaactgccttc

SEQ ID NO: 3358909 - DNA, 25 bp, Homo sapien
ctaaatgctataggtaggaggcccc

SEQ ID NO: 3358910 - DNA, 25 bp, Homo sapien
cactacaaagccctctctagatgtg

SEQ ID NO: 3358911 - DNA, 25 bp, Homo sapien
gccttcattcacactgttactacca

SEQ ID NO: 3358912 - DNA, 25 bp, Homo sapien
ctagtaggaaacaccactgcttgtg

SEQ ID NO: 3358913 - DNA, 25 bp, Homo sapien
taaaatttgtgagccagaaagtgga

SEQ ID NO: 3358914 - DNA, 25 bp, Homo sapien
tattcgcaaattgagttaagtgaca

SEQ ID NO: 3358915 - DNA, 25 bp, Homo sapien
tagaatgaggtgatacattagccaa

SEQ ID NO: 3358916 - DNA, 25 bp, Homo sapien
tcagagtatgccacaaccaagttgc

SEQ ID NO: 3358917 - DNA, 25 bp, Homo sapien
tgtcgaaggcttttcagagtatgcc

SEQ ID NO: 3358918 - DNA, 25 bp, Homo sapien
gaggtgaatccataagctccacaag

SEQ ID NO: 3358919 - DNA, 25 bp, Homo sapien
caagcccttgtgtagcttgtcgaag

SEQ ID NO: 3358920 - DNA, 25 bp, Homo sapien
taattacagggagtgcaatataacc

SEQ ID NO: 3358921 - DNA, 25 bp, Homo sapien
ctggaaggcatcgtggacacagaga

SEQ ID NO: 3358922 - DNA, 25 bp, Homo sapien
tataaccatgtaaggaagatgctgg

SEQ ID NO: 3358923 - DNA, 25 bp, Homo sapien
tggaaggcatcgtggacacagagaa

SEQ ID NO: 3358924 - DNA, 25 bp, Homo sapien
aacctaataatgctcccgggacact

SEQ ID NO: 3358925 - DNA, 25 bp, Homo sapien
tctatcggaggattgtgagcccttt

SEQ ID NO: 3358926 - DNA, 25 bp, Homo sapien
ttaggccgagagacattaaactgag

SEQ ID NO: 3358927 - DNA, 25 bp, Homo sapien
taaagatggacactgagatactcga

SEQ ID NO: 3358928 - DNA, 25 bp, Homo sapien
tcaaagctcctgtccacaccggcat

SEQ ID NO: 3358929 - DNA, 25 bp, Homo sapien
cagagaagctctagctccacaactc

SEQ ID NO: 3358930 - DNA, 25 bp, Homo sapien
gaagctctagctccacaactcaaag

SEQ ID NO: 3358931 - DNA, 25 bp, Homo sapien
tagctccacaactcaaagctcctgt

SEQ ID NO: 3358932 - DNA, 25 bp, Homo sapien
tatgtaccacgctcaaataaaagga

SEQ ID NO: 3358933 - DNA, 25 bp, Homo sapien
gctccaatggccaaagtaggaacaa

SEQ ID NO: 3358934 - DNA, 25 bp, Homo sapien
ggaagtgctcaaaaacgtatggaag

SEQ ID NO: 3358935 - DNA, 25 bp, Homo sapien
ggagaatacaagtcaagcctgagtc

SEQ ID NO: 3358936 - DNA, 25 bp, Homo sapien
tatacctgggactcaagaatctccg

SEQ ID NO: 3358937 - DNA, 25 bp, Homo sapien
gaccattgagggacttttttctagc

SEQ ID NO: 3358938 - DNA, 25 bp, Homo sapien
tagctgaatgctacgggcaagtcat

SEQ ID NO: 3358939 - DNA, 25 bp, Homo sapien
gccaaagttcgaaatagcagtcaca

SEQ ID NO: 3358940 - DNA, 25 bp, Homo sapien
ccctcattccactgctataagatta

SEQ ID NO: 3358941 - DNA, 25 bp, Homo sapien
gcacgtctgcagtcgttcgttcctt

SEQ ID NO: 3358942 - DNA, 25 bp, Homo sapien
ataagattagatcctttttggccag

SEQ ID NO: 3358943 - DNA, 25 bp, Homo sapien
gtctgcagtcgttcgttccttctgg

SEQ ID NO: 3358944 - DNA, 25 bp, Homo sapien
atctatttgacacggagggacaata

SEQ ID NO: 3358945 - DNA, 25 bp, Homo sapien
catctatttgacacggagggacaat

SEQ ID NO: 3358946 - DNA, 25 bp, Homo sapien
tcatctatttgacacggagggacaa

SEQ ID NO: 3358947 - DNA, 25 bp, Homo sapien
tctatttgacacggagggacaatac

SEQ ID NO: 3358948 - DNA, 25 bp, Homo sapien
cagccaggcctgcagtagaaggata

SEQ ID NO: 3358949 - DNA, 25 bp, Homo sapien
tagaaggatattccagtagatgcca

SEQ ID NO: 3358950 - DNA, 25 bp, Homo sapien
tacgcctcatttgccacagggtcca

SEQ ID NO: 3358951 - DNA, 25 bp, Homo sapien
tcatttcagtggctacatacgcctc

SEQ ID NO: 3358952 - DNA, 25 bp, Homo sapien
aaaaatagcactgtgggaagcgttc

SEQ ID NO: 3358953 - DNA, 25 bp, Homo sapien
gggaagcgttcttgtgcagttttca

SEQ ID NO: 3358954 - DNA, 25 bp, Homo sapien
tggtgaccatgtgagaaaaatagca

SEQ ID NO: 3358955 - DNA, 25 bp, Homo sapien
ttttcactgtaatccgatcaataca

SEQ ID NO: 3358956 - DNA, 25 bp, Homo sapien
aagagttcattcagcctttacgaaa

SEQ ID NO: 3358957 - DNA, 25 bp, Homo sapien
ctgaggccaaagtatttacttaagg

SEQ ID NO: 3358958 - DNA, 25 bp, Homo sapien
gaaagatgaagtggagatgccaaac

SEQ ID NO: 3358959 - DNA, 25 bp, Homo sapien
aatactgaggccaaagtatttactt

SEQ ID NO: 3358960 - DNA, 25 bp, Homo sapien
ttaatgcagcacagcttgctacttg

SEQ ID NO: 3358961 - DNA, 25 bp, Homo sapien
gcagcacagcttgctacttgcaata

SEQ ID NO: 3358962 - DNA, 25 bp, Homo sapien
ttgctacttgcaatatcatcaagca

SEQ ID NO: 3358963 - DNA, 25 bp, Homo sapien
cagcttgctacttgcaatatcatca

SEQ ID NO: 3358964 - DNA, 25 bp, Homo sapien
cactgtagccggccaagacttcttt

SEQ ID NO: 3358965 - DNA, 25 bp, Homo sapien
atggctccattttagttaccaccaa

SEQ ID NO: 3358966 - DNA, 25 bp, Homo sapien
tggctccattttagttaccaccaag

SEQ ID NO: 3358967 - DNA, 25 bp, Homo sapien
actatggctccattttagttaccac

SEQ ID NO: 3358968 - DNA, 25 bp, Homo sapien
tatggctccattttagttaccacca

SEQ ID NO: 3358969 - DNA, 25 bp, Homo sapien
agcgcagcagctgtctcagtagagc

SEQ ID NO: 3358970 - DNA, 25 bp, Homo sapien
agcagtggcatcagcctcggattcc

SEQ ID NO: 3358971 - DNA, 25 bp, Homo sapien
gtcacagacactctcaagcgcagca

SEQ ID NO: 3358972 - DNA, 25 bp, Homo sapien
tcagtagagcaggtcccctgtggat

SEQ ID NO: 3358973 - DNA, 25 bp, Homo sapien
cagaaagtggaatcctgatgaggaa

SEQ ID NO: 3358974 - DNA, 25 bp, Homo sapien
cctatgacaagagttagatcccagc

SEQ ID NO: 3358975 - DNA, 25 bp, Homo sapien
tctgttgaacctgaacactctgcat

SEQ ID NO: 3358976 - DNA, 25 bp, Homo sapien
ctgcatccctgaagaccagtgaata

SEQ ID NO: 3358977 - DNA, 25 bp, Homo sapien
cagggaatacgtgaggagctatgaa

SEQ ID NO: 3358978 - DNA, 25 bp, Homo sapien
ggccagggaatacgtgaggagctat

SEQ ID NO: 3358979 - DNA, 25 bp, Homo sapien
ttttgggccagggaatacgtgagga

SEQ ID NO: 3358980 - DNA, 25 bp, Homo sapien
ttgggccagggaatacgtgaggagc

SEQ ID NO: 3358981 - DNA, 25 bp, Homo sapien
ttaggcacaagactttttctgttcc

SEQ ID NO: 3358982 - DNA, 25 bp, Homo sapien
tggcagccaggacttaacttagtgt

SEQ ID NO: 3358983 - DNA, 25 bp, Homo sapien
ttaacttagtgtctgttctacctct

SEQ ID NO: 3358984 - DNA, 25 bp, Homo sapien
ctgttcccgcttctgctttgtggca

SEQ ID NO: 3358985 - DNA, 25 bp, Homo sapien
tgctgatttttctgactgccctctc

SEQ ID NO: 3358986 - DNA, 25 bp, Homo sapien
tcttcttgtcctccatatattcttg

SEQ ID NO: 3358987 - DNA, 25 bp, Homo sapien
cttggttatttctctgtcttgctga

SEQ ID NO: 3358988 - DNA, 25 bp, Homo sapien
ttctcttggttatttctctgtcttg

SEQ ID NO: 3358989 - DNA, 25 bp, Homo sapien
gaaggttcctctggtaagagtgcac

SEQ ID NO: 3358990 - DNA, 25 bp, Homo sapien
gatagcagttagcaggatcctgaca

SEQ ID NO: 3358991 - DNA, 25 bp, Homo sapien
gatacacagcgtatgcgagtttgct

SEQ ID NO: 3358992 - DNA, 25 bp, Homo sapien
gactcagaggctagtcacatataaa

SEQ ID NO: 3358993 - DNA, 25 bp, Homo sapien
taaagaagctggtgcagagtaatgg

SEQ ID NO: 3358994 - DNA, 25 bp, Homo sapien
gatgatgagaatactggccaacccc

SEQ ID NO: 3358995 - DNA, 25 bp, Homo sapien
taatgggcaagcgatggttaccagc

SEQ ID NO: 3358996 - DNA, 25 bp, Homo sapien
gacactggacgtggtaccctagtaa

SEQ ID NO: 3358997 - DNA, 25 bp, Homo sapien
ctagagggccaagagatgaaaatta

SEQ ID NO: 3358998 - DNA, 25 bp, Homo sapien
gacttgaccaagcacgtagctaggc

SEQ ID NO: 3358999 - DNA, 25 bp, Homo sapien
gctaggcctttgtgccgctgtgcac

SEQ ID NO: 3359000 - DNA, 25 bp, Homo sapien
tgtgcacgagggaagcttcatgcag

SEQ ID NO: 3359001 - DNA, 25 bp, Homo sapien
tgaacctcagaggatacgtgggtct

SEQ ID NO: 3359002 - DNA, 25 bp, Homo sapien
gaggactgtccccatctaggctact

SEQ ID NO: 3359003 - DNA, 25 bp, Homo sapien
tggtcataggaggactgtccccatc

SEQ ID NO: 3359004 - DNA, 25 bp, Homo sapien
gggtctgaacatgaacacgtgtaag

SEQ ID NO: 3359005 - DNA, 25 bp, Homo sapien
gggtgatttgtattcatcgtaaaat

SEQ ID NO: 3359006 - DNA, 25 bp, Homo sapien
cagcatgatgtattacgggctttag

SEQ ID NO: 3359007 - DNA, 25 bp, Homo sapien
gcatgatgtattacgggctttaggg

SEQ ID NO: 3359008 - DNA, 25 bp, Homo sapien
ttctctcagtactattagagcccat

SEQ ID NO: 3359009 - DNA, 25 bp, Homo sapien
ctggtctgagataggacctactgtc

SEQ ID NO: 3359010 - DNA, 25 bp, Homo sapien
tctccctgtagcagtgagagcctgg

SEQ ID NO: 3359011 - DNA, 25 bp, Homo sapien
ttctctccctgtagcagtgagagcc

SEQ ID NO: 3359012 - DNA, 25 bp, Homo sapien
gagataggacctactgtctgacaat

SEQ ID NO: 3359013 - DNA, 25 bp, Homo sapien
gttgctcagtggtcttatacataag

SEQ ID NO: 3359014 - DNA, 25 bp, Homo sapien
gatacagcaaatatgtggttaaggc

SEQ ID NO: 3359015 - DNA, 25 bp, Homo sapien
aatgtttaagaacatgtgggcatct

SEQ ID NO: 3359016 - DNA, 25 bp, Homo sapien
tctactgtgcccttgtgaatcatct

SEQ ID NO: 3359017 - DNA, 25 bp, Homo sapien
atgatttccaaaatctgaagggtca

SEQ ID NO: 3359018 - DNA, 25 bp, Homo sapien
gatgttgcacatgatttccaaaatc

SEQ ID NO: 3359019 - DNA, 25 bp, Homo sapien
tgatttccaaaatctgaagggtcat

SEQ ID NO: 3359020 - DNA, 25 bp, Homo sapien
caagatgttgcacatgatttccaaa

SEQ ID NO: 3359021 - DNA, 25 bp, Homo sapien
aatgctgaagcataatcctgtatta

SEQ ID NO: 3359022 - DNA, 25 bp, Homo sapien
tgctgaagcataatcctgtattaat

SEQ ID NO: 3359023 - DNA, 25 bp, Homo sapien
aaatgctgaagcataatcctgtatt

SEQ ID NO: 3359024 - DNA, 25 bp, Homo sapien
aatcctgtattaatttatgggccat

SEQ ID NO: 3359025 - DNA, 25 bp, Homo sapien
tgttctgacttctacttggtgctct

SEQ ID NO: 3359026 - DNA, 25 bp, Homo sapien
cccctatttcaatgggattgctgtc

SEQ ID NO: 3359027 - DNA, 25 bp, Homo sapien
cctgtcttctattggaactctggag

SEQ ID NO: 3359028 - DNA, 25 bp, Homo sapien
ctaggcccctatttcaatgggattg

SEQ ID NO: 3359029 - DNA, 25 bp, Homo sapien
atttccctgatattccctgccctca

SEQ ID NO: 3359030 - DNA, 25 bp, Homo sapien
ggtacacctgacattgatacatcat

SEQ ID NO: 3359031 - DNA, 25 bp, Homo sapien
tgtacatgttacagctggtacacct

SEQ ID NO: 3359032 - DNA, 25 bp, Homo sapien
agcagagttgtacatgttacagctg

SEQ ID NO: 3359033 - DNA, 25 bp, Homo sapien
taatatttcaccagtttcctacatg

SEQ ID NO: 3359034 - DNA, 25 bp, Homo sapien
gaagttccctccgtatacaacatca

SEQ ID NO: 3359035 - DNA, 25 bp, Homo sapien
cacatcatcaaagaagttccctccg

SEQ ID NO: 3359036 - DNA, 25 bp, Homo sapien
ccccgtgaacactggtatcacatca

SEQ ID NO: 3359037 - DNA, 25 bp, Homo sapien
ctgttcttaaaatgatagctttctc

SEQ ID NO: 3359038 - DNA, 25 bp, Homo sapien
tgttcttaaaatgatagctttctcc

SEQ ID NO: 3359039 - DNA, 25 bp, Homo sapien
gttcttaaaatgatagctttctccc

SEQ ID NO: 3359040 - DNA, 25 bp, Homo sapien
actgttcttaaaatgatagctttct

SEQ ID NO: 3359041 - DNA, 25 bp, Homo sapien
gaaagcacgcgcacaacttctgtag

SEQ ID NO: 3359042 - DNA, 25 bp, Homo sapien
gatcagaaatccaagtgtcacttaa

SEQ ID NO: 3359043 - DNA, 25 bp, Homo sapien
caattgctcatcagaagatagctgt

SEQ ID NO: 3359044 - DNA, 25 bp, Homo sapien
gtgctaagacatgcatcactgtgac

SEQ ID NO: 3359045 - DNA, 25 bp, Homo sapien
atgaggaacactagatgatgagagt

SEQ ID NO: 3359046 - DNA, 25 bp, Homo sapien
aaatacagatgttgacagtaaagat

SEQ ID NO: 3359047 - DNA, 25 bp, Homo sapien
tacagatgttgacagtaaagatgga

SEQ ID NO: 3359048 - DNA, 25 bp, Homo sapien
gatgatgagagtgagcagccttttc

SEQ ID NO: 3359049 - DNA, 25 bp, Homo sapien
taaatgttgaaagtttattgcaagc

SEQ ID NO: 3359050 - DNA, 25 bp, Homo sapien
agtccactttttcctcagttggctg

SEQ ID NO: 3359051 - DNA, 25 bp, Homo sapien
aattataaaccatgaaactaaactg

SEQ ID NO: 3359052 - DNA, 25 bp, Homo sapien
ctaaactgagtaaatgttgaaagtt

SEQ ID NO: 3359053 - DNA, 25 bp, Homo sapien
tgcttctggattcttgaaatcactt

SEQ ID NO: 3359054 - DNA, 25 bp, Homo sapien
aagctatggttggatcttctcctct

SEQ ID NO: 3359055 - DNA, 25 bp, Homo sapien
cgtaacttccagtcacattggcaca

SEQ ID NO: 3359056 - DNA, 25 bp, Homo sapien
tataacagccccaaagaattctgga

SEQ ID NO: 3359057 - DNA, 25 bp, Homo sapien
tatatcaccattcccagtggctgcg

SEQ ID NO: 3359058 - DNA, 25 bp, Homo sapien
gcaggaagcgcatcaatatatcacc

SEQ ID NO: 3359059 - DNA, 25 bp, Homo sapien
tgcccctgcagtatcgtcagcatag

SEQ ID NO: 3359060 - DNA, 25 bp, Homo sapien
tatcgtcagcataggctccagctcc

SEQ ID NO: 3359061 - DNA, 25 bp, Homo sapien
cgagtgtaaaacacattaagtcata

SEQ ID NO: 3359062 - DNA, 25 bp, Homo sapien
cggcaggaaatcgagtgtaaaacac

SEQ ID NO: 3359063 - DNA, 25 bp, Homo sapien
aacaatttacggcaggaaatcgagt

SEQ ID NO: 3359064 - DNA, 25 bp, Homo sapien
tgtaaaacacattaagtcataagct

SEQ ID NO: 3359065 - DNA, 25 bp, Homo sapien
atgttcaaaattggtttccctcatc

SEQ ID NO: 3359066 - DNA, 25 bp, Homo sapien
tccgcttcctatgtaatgtgccaaa

SEQ ID NO: 3359067 - DNA, 25 bp, Homo sapien
taccaggatggcacagatttacagt

SEQ ID NO: 3359068 - DNA, 25 bp, Homo sapien
aaaagaacttgttatcagccaggta

SEQ ID NO: 3359069 - DNA, 25 bp, Homo sapien
ttcagtgtatatttgagagctctgt

SEQ ID NO: 3359070 - DNA, 25 bp, Homo sapien
cattcagtgtatatttgagagctct

SEQ ID NO: 3359071 - DNA, 25 bp, Homo sapien
attcagtgtatatttgagagctctg

SEQ ID NO: 3359072 - DNA, 25 bp, Homo sapien
tgtaccagcagcaatatgtcctgtc

SEQ ID NO: 3359073 - DNA, 25 bp, Homo sapien
gcagcaatatgtcctgtcttatgga

SEQ ID NO: 3359074 - DNA, 25 bp, Homo sapien
catttgtagatgtaccagcagcaat

SEQ ID NO: 3359075 - DNA, 25 bp, Homo sapien
cctgtcttatggattacaaccatgc

SEQ ID NO: 3359076 - DNA, 25 bp, Homo sapien
ccaggaaaacaagctgtctccaaac

SEQ ID NO: 3359077 - DNA, 25 bp, Homo sapien
gccaggaaaacaagctgtctccaaa

SEQ ID NO: 3359078 - DNA, 25 bp, Homo sapien
agccaggaaaacaagctgtctccaa

SEQ ID NO: 3359079 - DNA, 25 bp, Homo sapien
taccaggtggtttgtagggtccgca

SEQ ID NO: 3359080 - DNA, 25 bp, Homo sapien
tatcctgctttaagataccaggtgg

SEQ ID NO: 3359081 - DNA, 25 bp, Homo sapien
tctttatggataggaatatcctgct

SEQ ID NO: 3359082 - DNA, 25 bp, Homo sapien
caatagtgtcatgaccacgatcatc

SEQ ID NO: 3359083 - DNA, 25 bp, Homo sapien
tccgagcaagccaatctgaatgaag

SEQ ID NO: 3359084 - DNA, 25 bp, Homo sapien
tcttcattgataaaccccatacttt

SEQ ID NO: 3359085 - DNA, 25 bp, Homo sapien
aagcagtggtagataagtcttcatt

SEQ ID NO: 3359086 - DNA, 25 bp, Homo sapien
cccatactttgagcaaatgtggtgg

SEQ ID NO: 3359087 - DNA, 25 bp, Homo sapien
gactctcctactaaaagtgtgtgtg

SEQ ID NO: 3359088 - DNA, 25 bp, Homo sapien
gtgtgtgtgttgtatgttccagtac

SEQ ID NO: 3359089 - DNA, 25 bp, Homo sapien
tagcatttttaattcgtctgagatc

SEQ ID NO: 3359090 - DNA, 25 bp, Homo sapien
tactgctcctacatccatagtagtg

SEQ ID NO: 3359091 - DNA, 25 bp, Homo sapien
cgtctgagatctcctactgctccta

SEQ ID NO: 3359092 - DNA, 25 bp, Homo sapien
ttccgtgccacaccaatagcatttt

SEQ ID NO: 3359093 - DNA, 25 bp, Homo sapien
aaagcctacagagccgtcacactgc

SEQ ID NO: 3359094 - DNA, 25 bp, Homo sapien
tgatcatggcatctagtgtggtttc

SEQ ID NO: 3359095 - DNA, 25 bp, Homo sapien
agagcctccagatgctaatgccctc

SEQ ID NO: 3359096 - DNA, 25 bp, Homo sapien
ttcctccaaagcctacagagccgtc

SEQ ID NO: 3359097 - DNA, 25 bp, Homo sapien
caggtcaggcagttagtttaaggtc

SEQ ID NO: 3359098 - DNA, 25 bp, Homo sapien
gtacaatcacgaccctcattttaaa

SEQ ID NO: 3359099 - DNA, 25 bp, Homo sapien
gaaaagtaaacagagccacaggtca

SEQ ID NO: 3359100 - DNA, 25 bp, Homo sapien
tgtggtaggtactgtacaatcacga

SEQ ID NO: 3359101 - DNA, 25 bp, Homo sapien
tgaaagtgtatttacgcaagttccc

SEQ ID NO: 3359102 - DNA, 25 bp, Homo sapien
aatacgttagcaacctcagatggag

SEQ ID NO: 3359103 - DNA, 25 bp, Homo sapien
tctctgaatcgtatgcactgccacc

SEQ ID NO: 3359104 - DNA, 25 bp, Homo sapien
ggagccaattctgccctagaaagtt

SEQ ID NO: 3359105 - DNA, 25 bp, Homo sapien
tgccaagataatggtacgtaaaggc

SEQ ID NO: 3359106 - DNA, 25 bp, Homo sapien
taacaaggtgtagaaggcaggaacc

SEQ ID NO: 3359107 - DNA, 25 bp, Homo sapien
tagtacaatgcgaaaatgccaagat

SEQ ID NO: 3359108 - DNA, 25 bp, Homo sapien
ctaactcattctggacacgagggca

SEQ ID NO: 3359109 - DNA, 25 bp, Homo sapien
ctgcaaatcgaaatcacctagggag

SEQ ID NO: 3359110 - DNA, 25 bp, Homo sapien
tcgaaatcacctagggagcttttta

SEQ ID NO: 3359111 - DNA, 25 bp, Homo sapien
aatcgaaatcacctagggagctttt

SEQ ID NO: 3359112 - DNA, 25 bp, Homo sapien
caaatcgaaatcacctagggagctt

SEQ ID NO: 3359113 - DNA, 25 bp, Homo sapien
gtcacaggaggtgggccccggcagg

SEQ ID NO: 3359114 - DNA, 25 bp, Homo sapien
agtcacaggaggtgggccccggcag

SEQ ID NO: 3359115 - DNA, 25 bp, Homo sapien
tcacaggaggtgggccccggcagga

SEQ ID NO: 3359116 - DNA, 25 bp, Homo sapien
ttgaattctaagtggcaggtaaagt

SEQ ID NO: 3359117 - DNA, 25 bp, Homo sapien
aggttggaaccttgaattctaagtg

SEQ ID NO: 3359118 - DNA, 25 bp, Homo sapien
aagtatgacaacacgtggcaaaaaa

SEQ ID NO: 3359119 - DNA, 25 bp, Homo sapien
aatgtacagcaaaggttggaacctt

SEQ ID NO: 3359120 - DNA, 25 bp, Homo sapien
tgggacactattagtcgtctacaaa

SEQ ID NO: 3359121 - DNA, 25 bp, Homo sapien
ggacactattagtcgtctacaaaat

SEQ ID NO: 3359122 - DNA, 25 bp, Homo sapien
gctgggacactattagtcgtctaca

SEQ ID NO: 3359123 - DNA, 25 bp, Homo sapien
ggctgggacactattagtcgtctac

SEQ ID NO: 3359124 - DNA, 25 bp, Homo sapien
gaaaagcgtagctgctacttgatta

SEQ ID NO: 3359125 - DNA, 25 bp, Homo sapien
gcagaaaagcgtagctgctacttga

SEQ ID NO: 3359126 - DNA, 25 bp, Homo sapien
aaagcgtagctgctacttgattaaa

SEQ ID NO: 3359127 - DNA, 25 bp, Homo sapien
gcgtagctgctacttgattaaagca

SEQ ID NO: 3359128 - DNA, 25 bp, Homo sapien
gagactcgggaagacctagagggcg

SEQ ID NO: 3359129 - DNA, 25 bp, Homo sapien
ctaaaatgcaacagcggtaggtggg

SEQ ID NO: 3359130 - DNA, 25 bp, Homo sapien
cagtaaaggccacttgcaagagact

SEQ ID NO: 3359131 - DNA, 25 bp, Homo sapien
acttgcaagagactgagcggcgctg

SEQ ID NO: 3359132 - DNA, 25 bp, Homo sapien
agggctggagcagcgcactagggcc

SEQ ID NO: 3359133 - DNA, 25 bp, Homo sapien
tgcttcggttgcattcttaaagggc

SEQ ID NO: 3359134 - DNA, 25 bp, Homo sapien
gagcagaaacggcacgagaagcaca

SEQ ID NO: 3359135 - DNA, 25 bp, Homo sapien
taaagggccaagtgttgacgaccag

SEQ ID NO: 3359136 - DNA, 25 bp, Homo sapien
ctgaccaccgaagagaccagcgcga

SEQ ID NO: 3359137 - DNA, 25 bp, Homo sapien
gaccaccgaagagaccagcgcgaga

SEQ ID NO: 3359138 - DNA, 25 bp, Homo sapien
agaccagcgcgagaaaagtcccggc

SEQ ID NO: 3359139 - DNA, 25 bp, Homo sapien
accagcgcgagaaaagtcccggcag

SEQ ID NO: 3359140 - DNA, 25 bp, Homo sapien
actccccactgaactattacctagg

SEQ ID NO: 3359141 - DNA, 25 bp, Homo sapien
atcccctccggcttttgcactgatg

SEQ ID NO: 3359142 - DNA, 25 bp, Homo sapien
tatttacttgattggcatttgctcc

SEQ ID NO: 3359143 - DNA, 25 bp, Homo sapien
ttcaaagctgtaagcctgacttggc

SEQ ID NO: 3359144 - DNA, 25 bp, Homo sapien
cctgagcaatgcagctagactctgt

SEQ ID NO: 3359145 - DNA, 25 bp, Homo sapien
tgagcaatgcagctagactctgttt

SEQ ID NO: 3359146 - DNA, 25 bp, Homo sapien
gcctgagcaatgcagctagactctg

SEQ ID NO: 3359147 - DNA, 25 bp, Homo sapien
ctgagcaatgcagctagactctgtt

SEQ ID NO: 3359148 - DNA, 25 bp, Homo sapien
agctcagacgagagcaggcatgttc

SEQ ID NO: 3359149 - DNA, 25 bp, Homo sapien
ttctgagctcagacgagagcaggca

SEQ ID NO: 3359150 - DNA, 25 bp, Homo sapien
ctcagacgagagcaggcatgttcag

SEQ ID NO: 3359151 - DNA, 25 bp, Homo sapien
tgagctcagacgagagcaggcatgt

SEQ ID NO: 3359152 - DNA, 25 bp, Homo sapien
gtggtggccaaggacattagcttta

SEQ ID NO: 3359153 - DNA, 25 bp, Homo sapien
agcttttcctccctcaacgatgtca

SEQ ID NO: 3359154 - DNA, 25 bp, Homo sapien
tctcctagtggctgttggtcatgtc

SEQ ID NO: 3359155 - DNA, 25 bp, Homo sapien
cctcaacgatgtcactagacttgtc

SEQ ID NO: 3359156 - DNA, 25 bp, Homo sapien
cacagcctttctctaaggtggtgcc

SEQ ID NO: 3359157 - DNA, 25 bp, Homo sapien
taggaggcacaagtgacaatccctt

SEQ ID NO: 3359158 - DNA, 25 bp, Homo sapien
gatttgggactgcacaaagctgtca

SEQ ID NO: 3359159 - DNA, 25 bp, Homo sapien
gcagcaggaggtagaaactaaagta

SEQ ID NO: 3359160 - DNA, 25 bp, Homo sapien
gtaatgtcctacaggttcatccgtg

SEQ ID NO: 3359161 - DNA, 25 bp, Homo sapien
gaataaagccgcaatgaacacgaga

SEQ ID NO: 3359162 - DNA, 25 bp, Homo sapien
gaacacgagaatgcaactgtctatt

SEQ ID NO: 3359163 - DNA, 25 bp, Homo sapien
tattttgcaaggaacctcgatatcg

SEQ ID NO: 3359164 - DNA, 25 bp, Homo sapien
ctccatgtggctaatgctgtgctca

SEQ ID NO: 3359165 - DNA, 25 bp, Homo sapien
taagcccgttgcaaccacattaagc

SEQ ID NO: 3359166 - DNA, 25 bp, Homo sapien
caaagtcaatgcgtcagacaggatc

SEQ ID NO: 3359167 - DNA, 25 bp, Homo sapien
gaatacaagccctgctaagcccgtt

SEQ ID NO: 3359168 - DNA, 25 bp, Homo sapien
caatgatcacattgtgtttttcagt

SEQ ID NO: 3359169 - DNA, 25 bp, Homo sapien
aatgatcacattgtgtttttcagta

SEQ ID NO: 3359170 - DNA, 25 bp, Homo sapien
tccaatgatcacattgtgtttttca

SEQ ID NO: 3359171 - DNA, 25 bp, Homo sapien
tcatccaatgatcacattgtgtttt

SEQ ID NO: 3359172 - DNA, 25 bp, Homo sapien
aatttagggattccaagttgcctgg

SEQ ID NO: 3359173 - DNA, 25 bp, Homo sapien
taccataacttatacagagaacagt

SEQ ID NO: 3359174 - DNA, 25 bp, Homo sapien
tatacagagaacagtttagcagtct

SEQ ID NO: 3359175 - DNA, 25 bp, Homo sapien
caaaatttacacagctcatgcatac

SEQ ID NO: 3359176 - DNA, 25 bp, Homo sapien
tttgctattattatgcacgctaaag

SEQ ID NO: 3359177 - DNA, 25 bp, Homo sapien
tatgcacgctaaagcattagaagga

SEQ ID NO: 3359178 - DNA, 25 bp, Homo sapien
ctgcaatcagggtacttaaatttag

SEQ ID NO: 3359179 - DNA, 25 bp, Homo sapien
tcagggtacttaaatttagattaga

SEQ ID NO: 3359180 - DNA, 25 bp, Homo sapien
tgtatgttacgtttcacaaactacc

SEQ ID NO: 3359181 - DNA, 25 bp, Homo sapien
gcaccagtgattctagtccttaatt

SEQ ID NO: 3359182 - DNA, 25 bp, Homo sapien
gtgattctagtccttaatttcttca

SEQ ID NO: 3359183 - DNA, 25 bp, Homo sapien
taatgcagatgttagtagttcaatc

SEQ ID NO: 3359184 - DNA, 25 bp, Homo sapien
caaatgacatgatctgtttgcataa

SEQ ID NO: 3359185 - DNA, 25 bp, Homo sapien
gtaaacatcacacacttttggatat

SEQ ID NO: 3359186 - DNA, 25 bp, Homo sapien
ggatatagcttcacaacactattca

SEQ ID NO: 3359187 - DNA, 25 bp, Homo sapien
tttgcataaaagtgatctttgccca

SEQ ID NO: 3359188 - DNA, 25 bp, Homo sapien
catggattatgacttaggttaattc

SEQ ID NO: 3359189 - DNA, 25 bp, Homo sapien
ggcatggattatgacttaggttaat

SEQ ID NO: 3359190 - DNA, 25 bp, Homo sapien
tggattatgacttaggttaattctt

SEQ ID NO: 3359191 - DNA, 25 bp, Homo sapien
tgggcatggattatgacttaggtta

SEQ ID NO: 3359192 - DNA, 25 bp, Homo sapien
caatgtcctctataacaaggcagct

SEQ ID NO: 3359193 - DNA, 25 bp, Homo sapien
tccaatgtcctctataacaaggcag

SEQ ID NO: 3359194 - DNA, 25 bp, Homo sapien
atgtcctctataacaaggcagcttg

SEQ ID NO: 3359195 - DNA, 25 bp, Homo sapien
tttccaatgtcctctataacaaggc

SEQ ID NO: 3359196 - DNA, 25 bp, Homo sapien
gaaaagcatatcagtgaaattctta

SEQ ID NO: 3359197 - DNA, 25 bp, Homo sapien
attgtcactcagagttgttccggaa

SEQ ID NO: 3359198 - DNA, 25 bp, Homo sapien
gaaattcttaactgcagatgactca

SEQ ID NO: 3359199 - DNA, 25 bp, Homo sapien
gttgttccggaatatgtgtgaagtc

SEQ ID NO: 3359200 - DNA, 25 bp, Homo sapien
tacttcttttctataggtagcatct

SEQ ID NO: 3359201 - DNA, 25 bp, Homo sapien
tctacccatatttgtgattcttcag

SEQ ID NO: 3359202 - DNA, 25 bp, Homo sapien
tctctgctacacattgctattcctt

SEQ ID NO: 3359203 - DNA, 25 bp, Homo sapien
tctataggtagcatctctgctacac

SEQ ID NO: 3359204 - DNA, 25 bp, Homo sapien
catagtcacttgtatccagagctta

SEQ ID NO: 3359205 - DNA, 25 bp, Homo sapien
ctgcatgactcagcgggactggtgc

SEQ ID NO: 3359206 - DNA, 25 bp, Homo sapien
tagataagctacctagaagcttggc

SEQ ID NO: 3359207 - DNA, 25 bp, Homo sapien
aatgctgtaagctacacggatgtgc

SEQ ID NO: 3359208 - DNA, 25 bp, Homo sapien
tgttacagcttctacaagtgagtgt

SEQ ID NO: 3359209 - DNA, 25 bp, Homo sapien
acagcttctacaagtgagtgttcaa

SEQ ID NO: 3359210 - DNA, 25 bp, Homo sapien
gcttctacaagtgagtgttcaatca

SEQ ID NO: 3359211 - DNA, 25 bp, Homo sapien
cttctacaagtgagtgttcaatcat

SEQ ID NO: 3359212 - DNA, 25 bp, Homo sapien
tttactccagcatggtttggtcacc

SEQ ID NO: 3359213 - DNA, 25 bp, Homo sapien
gtcttgaaattccactcggagttag

SEQ ID NO: 3359214 - DNA, 25 bp, Homo sapien
cgttgggataatactggacaggtta

SEQ ID NO: 3359215 - DNA, 25 bp, Homo sapien
catgatttgtcaagcagtccgttgg

SEQ ID NO: 3359216 - DNA, 25 bp, Homo sapien
gagagttgacatggctactcagcat

SEQ ID NO: 3359217 - DNA, 25 bp, Homo sapien
tctgggaggcaggtaaactgttgtc

SEQ ID NO: 3359218 - DNA, 25 bp, Homo sapien
ccaggttatctttattccagcaggg

SEQ ID NO: 3359219 - DNA, 25 bp, Homo sapien
tttgagctacattgactgttgttgg

SEQ ID NO: 3359220 - DNA, 25 bp, Homo sapien
ctccttagaattgcctgcaggccgt

SEQ ID NO: 3359221 - DNA, 25 bp, Homo sapien
cagtgctgctgattatccctcactt

SEQ ID NO: 3359222 - DNA, 25 bp, Homo sapien
tcagagaagcatgtagaatactcct

SEQ ID NO: 3359223 - DNA, 25 bp, Homo sapien
tgcaggccgtggcatttgtccagtg

SEQ ID NO: 3359224 - DNA, 25 bp, Homo sapien
ctgtttgatggtaattaatatgact

SEQ ID NO: 3359225 - DNA, 25 bp, Homo sapien
gctgtttgatggtaattaatatgac

SEQ ID NO: 3359226 - DNA, 25 bp, Homo sapien
tcatccagaatatatgtactacatg

SEQ ID NO: 3359227 - DNA, 25 bp, Homo sapien
catgtgctgctaaatcctatggcca

SEQ ID NO: 3359228 - DNA, 25 bp, Homo sapien
gggtagttcaagaaacaatgattca

SEQ ID NO: 3359229 - DNA, 25 bp, Homo sapien
gaggttaagttcattcagtgtctgg

SEQ ID NO: 3359230 - DNA, 25 bp, Homo sapien
cattatctgcctcagtacctggtga

SEQ ID NO: 3359231 - DNA, 25 bp, Homo sapien
aaagtctgtcactgtgtcaaggcct

SEQ ID NO: 3359232 - DNA, 25 bp, Homo sapien
gcaagaaatatgaaccacggtagta

SEQ ID NO: 3359233 - DNA, 25 bp, Homo sapien
ccttcagtgtcagcatggaatatgc

SEQ ID NO: 3359234 - DNA, 25 bp, Homo sapien
tgacacaagtgtaccacaaaacgat

SEQ ID NO: 3359235 - DNA, 25 bp, Homo sapien
tgcaacaggctatgttagtagggct

SEQ ID NO: 3359236 - DNA, 25 bp, Homo sapien
aagatactcgtatcatcctttggat

SEQ ID NO: 3359237 - DNA, 25 bp, Homo sapien
tgttccccttagtgaattgcaaaaa

SEQ ID NO: 3359238 - DNA, 25 bp, Homo sapien
ttaacaagggatcaaatcctccctc

SEQ ID NO: 3359239 - DNA, 25 bp, Homo sapien
cctcaaagagttcgtattgcattga

SEQ ID NO: 3359240 - DNA, 25 bp, Homo sapien
gaaagcacttttagactttcccata

SEQ ID NO: 3359241 - DNA, 25 bp, Homo sapien
tgaaatcctaactactaactgtggg

SEQ ID NO: 3359242 - DNA, 25 bp, Homo sapien
tacatgctgtcaaggtgcaccagcc

SEQ ID NO: 3359243 - DNA, 25 bp, Homo sapien
gattccccacgcagggttgttctgg

SEQ ID NO: 3359244 - DNA, 25 bp, Homo sapien
ttttcatgaacgatactggccagcc

SEQ ID NO: 3359245 - DNA, 25 bp, Homo sapien
ccagtcaggctgtgttagataaatc

SEQ ID NO: 3359246 - DNA, 25 bp, Homo sapien
taagatttctggactgaattgtttc

SEQ ID NO: 3359247 - DNA, 25 bp, Homo sapien
cttgtaaactcggttcagctccttc

SEQ ID NO: 3359248 - DNA, 25 bp, Homo sapien
acctccttgtaaactcggttcagct

SEQ ID NO: 3359249 - DNA, 25 bp, Homo sapien
ggctgcatggggttgataagatttc

SEQ ID NO: 3359250 - DNA, 25 bp, Homo sapien
acttccattccccagagtcaagcga

SEQ ID NO: 3359251 - DNA, 25 bp, Homo sapien
gcaacttccattccccagagtcaag

SEQ ID NO: 3359252 - DNA, 25 bp, Homo sapien
cactgcaacttccattccccagagt

SEQ ID NO: 3359253 - DNA, 25 bp, Homo sapien
aggcaggatcccactctgtctccca

SEQ ID NO: 3359254 - DNA, 25 bp, Homo sapien
tagcttcgtctaaggtcccaacatt

SEQ ID NO: 3359255 - DNA, 25 bp, Homo sapien
gcttcagtcatttctatggaataag

SEQ ID NO: 3359256 - DNA, 25 bp, Homo sapien
gagacaatatctatcgacagctttt

SEQ ID NO: 3359257 - DNA, 25 bp, Homo sapien
gagccaccgtgtgaagccagaagtc

SEQ ID NO: 3359258 - DNA, 25 bp, Homo sapien
ctggcgtctatagtgaccagtcctg

SEQ ID NO: 3359259 - DNA, 25 bp, Homo sapien
tgcctcaggatcctgccgcgaaaac

SEQ ID NO: 3359260 - DNA, 25 bp, Homo sapien
gcttcagtgactgcaagttcaaatg

SEQ ID NO: 3359261 - DNA, 25 bp, Homo sapien
gaagactgcctcatgcttcagtgac

SEQ ID NO: 3359262 - DNA, 25 bp, Homo sapien
cattagagtcattcagatacatgga

SEQ ID NO: 3359263 - DNA, 25 bp, Homo sapien
tagagtcattcagatacatggatgt

SEQ ID NO: 3359264 - DNA, 25 bp, Homo sapien
cattcagatacatggatgttacatc

SEQ ID NO: 3359265 - DNA, 25 bp, Homo sapien
ggatgttacatctggaattttatta

SEQ ID NO: 3359266 - DNA, 25 bp, Homo sapien
cacaggaactttcctgctttggaag

SEQ ID NO: 3359267 - DNA, 25 bp, Homo sapien
tgacttgttcctccacaggaacttt

SEQ ID NO: 3359268 - DNA, 25 bp, Homo sapien
tcctgttgtcatagctctcatctga

SEQ ID NO: 3359269 - DNA, 25 bp, Homo sapien
gctctgagcattggccccatcctgt

SEQ ID NO: 3359270 - DNA, 25 bp, Homo sapien
caatgatagttaaaaacagtgttca

SEQ ID NO: 3359271 - DNA, 25 bp, Homo sapien
aagagttcctgtaagctcctgggtt

SEQ ID NO: 3359272 - DNA, 25 bp, Homo sapien
gtgttcagagcaaggtttgctcttt

SEQ ID NO: 3359273 - DNA, 25 bp, Homo sapien
tttctctggcacaatcaagagttcc

SEQ ID NO: 3359274 - DNA, 25 bp, Homo sapien
tcatcccgctgactgagttagccat

SEQ ID NO: 3359275 - DNA, 25 bp, Homo sapien
tttggatcagtccattccaactcat

SEQ ID NO: 3359276 - DNA, 25 bp, Homo sapien
tacagcatttacacagatttggatc

SEQ ID NO: 3359277 - DNA, 25 bp, Homo sapien
caactcatcccgctgactgagttag

SEQ ID NO: 3359278 - DNA, 25 bp, Homo sapien
ccagtaatgtatgagtattccagtt

SEQ ID NO: 3359279 - DNA, 25 bp, Homo sapien
aagtgactgtaccagcattactgca

SEQ ID NO: 3359280 - DNA, 25 bp, Homo sapien
tgctgggtcaggtgctatgtatatg

SEQ ID NO: 3359281 - DNA, 25 bp, Homo sapien
gacagttaggtgaattcaagttact

SEQ ID NO: 3359282 - DNA, 25 bp, Homo sapien
ttggtgtctgacatcagtttgagag

SEQ ID NO: 3359283 - DNA, 25 bp, Homo sapien
atcagtttgagagaattcttggtca

SEQ ID NO: 3359284 - DNA, 25 bp, Homo sapien
tattccttgtagttgtccaaagttc

SEQ ID NO: 3359285 - DNA, 25 bp, Homo sapien
gtttgagagaattcttggtcattac

SEQ ID NO: 3359286 - DNA, 25 bp, Homo sapien
gacatggatactggtggaaatgcac

SEQ ID NO: 3359287 - DNA, 25 bp, Homo sapien
tagggctgggaaaatatactcgaac

SEQ ID NO: 3359288 - DNA, 25 bp, Homo sapien
taagacaattaatagcagtaagccc

SEQ ID NO: 3359289 - DNA, 25 bp, Homo sapien
tgttaagctctatcaactccgcacc

SEQ ID NO: 3359290 - DNA, 25 bp, Homo sapien
gttgcctccattgtaagtatcatat

SEQ ID NO: 3359291 - DNA, 25 bp, Homo sapien
cataaaagttacagatactcttgcc

SEQ ID NO: 3359292 - DNA, 25 bp, Homo sapien
tgtgatcatgtccacttgatatgtt

SEQ ID NO: 3359293 - DNA, 25 bp, Homo sapien
ctgaagctctatggtaataaattgc

SEQ ID NO: 3359294 - DNA, 25 bp, Homo sapien
ttctcatgacggtggagcttcctcc

SEQ ID NO: 3359295 - DNA, 25 bp, Homo sapien
tcccattctcatgacggtggagctt

SEQ ID NO: 3359296 - DNA, 25 bp, Homo sapien
ttaaagtaagtagctgacaaagtca

SEQ ID NO: 3359297 - DNA, 25 bp, Homo sapien
ttcaaaggatgtctgtgcacgctgc

SEQ ID NO: 3359298 - DNA, 25 bp, Homo sapien
tcctactccctaacacagtttttgc

SEQ ID NO: 3359299 - DNA, 25 bp, Homo sapien
agcgtttttcgtttcttcacagaga

SEQ ID NO: 3359300 - DNA, 25 bp, Homo sapien
tcttatttatgcacagcgtttttcg

SEQ ID NO: 3359301 - DNA, 25 bp, Homo sapien
agaaagtttcccaattgtccatccg

SEQ ID NO: 3359302 - DNA, 25 bp, Homo sapien
aaactttcattactggataaggatt

SEQ ID NO: 3359303 - DNA, 25 bp, Homo sapien
catattgtgagcattgttgcacttg

SEQ ID NO: 3359304 - DNA, 25 bp, Homo sapien
ggtaataacaagcatattgtgagca

SEQ ID NO: 3359305 - DNA, 25 bp, Homo sapien
tttaacgttggtaataacaagcata

SEQ ID NO: 3359306 - DNA, 25 bp, Homo sapien
tattaatgaaaagccgcaggaagca

SEQ ID NO: 3359307 - DNA, 25 bp, Homo sapien
ttgctgaacttggtacaatattaat

SEQ ID NO: 3359308 - DNA, 25 bp, Homo sapien
ctctgtgggagcctgttaacctgtt

SEQ ID NO: 3359309 - DNA, 25 bp, Homo sapien
aacctgttaccagcaagtctgattc

SEQ ID NO: 3359310 - DNA, 25 bp, Homo sapien
tgggttgaagttccctgctctttat

SEQ ID NO: 3359311 - DNA, 25 bp, Homo sapien
gcactgggttgaagttccctgctct

SEQ ID NO: 3359312 - DNA, 25 bp, Homo sapien
gggttgaagttccctgctctttatc

SEQ ID NO: 3359313 - DNA, 25 bp, Homo sapien
ggcctcacaggtagaaaatcaaatg

SEQ ID NO: 3359314 - DNA, 25 bp, Homo sapien
tgagcccatgttcctgaggcactac

SEQ ID NO: 3359315 - DNA, 25 bp, Homo sapien
gcatgatacctacttgaccaagcag

SEQ ID NO: 3359316 - DNA, 25 bp, Homo sapien
taatactctccttacagtctgggcc

SEQ ID NO: 3359317 - DNA, 25 bp, Homo sapien
ttactctgtagatctatggactgca

SEQ ID NO: 3359318 - DNA, 25 bp, Homo sapien
tactctgtagatctatggactgcat

SEQ ID NO: 3359319 - DNA, 25 bp, Homo sapien
aagtctccaaggaaatatgtgtttg

SEQ ID NO: 3359320 - DNA, 25 bp, Homo sapien
gacaaaccttgtaccacaaataatg

SEQ ID NO: 3359321 - DNA, 25 bp, Homo sapien
gcagaaacaatttaactcaactggt

SEQ ID NO: 3359322 - DNA, 25 bp, Homo sapien
gacctttagtaagcaaagtctccaa

SEQ ID NO: 3359323 - DNA, 25 bp, Homo sapien
caggctttaagggtcaaccaggcct

SEQ ID NO: 3359324 - DNA, 25 bp, Homo sapien
atggtaatggtacatccaggcttta

SEQ ID NO: 3359325 - DNA, 25 bp, Homo sapien
gactgaaatagactcgccggaattt

SEQ ID NO: 3359326 - DNA, 25 bp, Homo sapien
ggtacatccaggctttaagggtcaa

SEQ ID NO: 3359327 - DNA, 25 bp, Homo sapien
tatcgtctgcctgaacagggcaggc

SEQ ID NO: 3359328 - DNA, 25 bp, Homo sapien
cttattgtgatgatcagatatcgtc

SEQ ID NO: 3359329 - DNA, 25 bp, Homo sapien
attggtggttgacaggtgttcagat

SEQ ID NO: 3359330 - DNA, 25 bp, Homo sapien
tcatgagaccaattttcaataggtg

SEQ ID NO: 3359331 - DNA, 25 bp, Homo sapien
gccttgaagtgcacacaggagctat

SEQ ID NO: 3359332 - DNA, 25 bp, Homo sapien
cagcagctgtgccttgaagtgcaca

SEQ ID NO: 3359333 - DNA, 25 bp, Homo sapien
agctgtgccttgaagtgcacacagg

SEQ ID NO: 3359334 - DNA, 25 bp, Homo sapien
tgtgccttgaagtgcacacaggagc

SEQ ID NO: 3359335 - DNA, 25 bp, Homo sapien
cttgaatctccttatagtctctgtg

SEQ ID NO: 3359336 - DNA, 25 bp, Homo sapien
tgaatctccttatagtctctgtgct

SEQ ID NO: 3359337 - DNA, 25 bp, Homo sapien
ttgaatctccttatagtctctgtgc

SEQ ID NO: 3359338 - DNA, 25 bp, Homo sapien
cacatttatcgtgcaatggataaac

SEQ ID NO: 3359339 - DNA, 25 bp, Homo sapien
gagcacatttatcgtgcaatggata

SEQ ID NO: 3359340 - DNA, 25 bp, Homo sapien
agtgagcacatttatcgtgcaatgg

SEQ ID NO: 3359341 - DNA, 25 bp, Homo sapien
tgagcacatttatcgtgcaatggat

SEQ ID NO: 3359342 - DNA, 25 bp, Homo sapien
tggagtgcatgcagcaacctcaact

SEQ ID NO: 3359343 - DNA, 25 bp, Homo sapien
caccaaggctcagggctttcgcagt

SEQ ID NO: 3359344 - DNA, 25 bp, Homo sapien
gaatgtggactgacagctgactcag

SEQ ID NO: 3359345 - DNA, 25 bp, Homo sapien
tccacagcatagactgagcatcgtg

SEQ ID NO: 3359346 - DNA, 25 bp, Homo sapien
cagttttgttgttagcatctgcaaa

SEQ ID NO: 3359347 - DNA, 25 bp, Homo sapien
agcactgtcccatgagtaaaactga

SEQ ID NO: 3359348 - DNA, 25 bp, Homo sapien
tattgatattttccagcgcttagag

SEQ ID NO: 3359349 - DNA, 25 bp, Homo sapien
aatgcaggcgtagatttgagaagaa

SEQ ID NO: 3359350 - DNA, 25 bp, Homo sapien
cagagtattgacagtcactctttgc

SEQ ID NO: 3359351 - DNA, 25 bp, Homo sapien
agcactcagagtattgacagtcact

SEQ ID NO: 3359352 - DNA, 25 bp, Homo sapien
tattgacagtcactctttgcttctg

SEQ ID NO: 3359353 - DNA, 25 bp, Homo sapien
tgacagtcactctttgcttctgctt

SEQ ID NO: 3359354 - DNA, 25 bp, Homo sapien
tctgcaaggagattaggtactggac

SEQ ID NO: 3359355 - DNA, 25 bp, Homo sapien
taaactctgtctccgtgtacctggc

SEQ ID NO: 3359356 - DNA, 25 bp, Homo sapien
agcctctgtactgttggacctgccg

SEQ ID NO: 3359357 - DNA, 25 bp, Homo sapien
gagtggctccacgataactggcaag

SEQ ID NO: 3359358 - DNA, 25 bp, Homo sapien
cctcatcgttattctgctgaagaag

SEQ ID NO: 3359359 - DNA, 25 bp, Homo sapien
tcgttattctgctgaagaagagcca

SEQ ID NO: 3359360 - DNA, 25 bp, Homo sapien
cgttattctgctgaagaagagccat

SEQ ID NO: 3359361 - DNA, 25 bp, Homo sapien
catcgttattctgctgaagaagagc

SEQ ID NO: 3359362 - DNA, 25 bp, Homo sapien
ttaggaagggatttgcagctattac

SEQ ID NO: 3359363 - DNA, 25 bp, Homo sapien
tctaaaatgtaagatctatgctact

SEQ ID NO: 3359364 - DNA, 25 bp, Homo sapien
ggaagggatttgcagctattacttg

SEQ ID NO: 3359365 - DNA, 25 bp, Homo sapien
ttctaaaatgtaagatctatgctac

SEQ ID NO: 3359366 - DNA, 25 bp, Homo sapien
ggcctattcggaagtcccagtagaa

SEQ ID NO: 3359367 - DNA, 25 bp, Homo sapien
tagaatgcctccactcgcttggcct

SEQ ID NO: 3359368 - DNA, 25 bp, Homo sapien
caactactatgctaattttggccac

SEQ ID NO: 3359369 - DNA, 25 bp, Homo sapien
gagagtcttacataattgcagaaac

SEQ ID NO: 3359370 - DNA, 25 bp, Homo sapien
ctctcagaacttccatatgctccag

SEQ ID NO: 3359371 - DNA, 25 bp, Homo sapien
gctccagcatgcacataccgtaatc

SEQ ID NO: 3359372 - DNA, 25 bp, Homo sapien
cagcatgcacataccgtaatctgtt

SEQ ID NO: 3359373 - DNA, 25 bp, Homo sapien
aggtctttaggaactacctgctcca

SEQ ID NO: 3359374 - DNA, 25 bp, Homo sapien
cctttaatcttatatctgcactata

SEQ ID NO: 3359375 - DNA, 25 bp, Homo sapien
aatcctttaatcttatatctgcact

SEQ ID NO: 3359376 - DNA, 25 bp, Homo sapien
tctttgccattggtatttccattcc

SEQ ID NO: 3359377 - DNA, 25 bp, Homo sapien
catctttgccattggtatttccatt

SEQ ID NO: 3359378 - DNA, 25 bp, Homo sapien
catgcaacattgacgctggctgctt

SEQ ID NO: 3359379 - DNA, 25 bp, Homo sapien
agtgacctcagtactgcaatttggt

SEQ ID NO: 3359380 - DNA, 25 bp, Homo sapien
gggtgaattggctggacatgcaaca

SEQ ID NO: 3359381 - DNA, 25 bp, Homo sapien
tactgcaatttggtggctctttcca

SEQ ID NO: 3359382 - DNA, 25 bp, Homo sapien
caattctgtactcataactaataag

SEQ ID NO: 3359383 - DNA, 25 bp, Homo sapien
caccacctttatgacatgactgata

SEQ ID NO: 3359384 - DNA, 25 bp, Homo sapien
ctgtactcataactaataagtggat

SEQ ID NO: 3359385 - DNA, 25 bp, Homo sapien
tgactgatattcacaattctgtact

SEQ ID NO: 3359386 - DNA, 25 bp, Homo sapien
gaatttccaaacaggctccttataa

SEQ ID NO: 3359387 - DNA, 25 bp, Homo sapien
tccaaacaggctccttataatctcc

SEQ ID NO: 3359388 - DNA, 25 bp, Homo sapien
aacaggctccttataatctcccatg

SEQ ID NO: 3359389 - DNA, 25 bp, Homo sapien
tatagaatttccaaacaggctcctt

SEQ ID NO: 3359390 - DNA, 25 bp, Homo sapien
gacggttttggcagtatagctctct

SEQ ID NO: 3359391 - DNA, 25 bp, Homo sapien
accacttgtgtactggctgtaggca

SEQ ID NO: 3359392 - DNA, 25 bp, Homo sapien
tgaagaggccattggagaatgtccc

SEQ ID NO: 3359393 - DNA, 25 bp, Homo sapien
aatgtcccttcactggtggctaaac

SEQ ID NO: 3359394 - DNA, 25 bp, Homo sapien
ctctgacacattttgttcaactgaa

SEQ ID NO: 3359395 - DNA, 25 bp, Homo sapien
tccctgtgaaaacaaccttggtctg

SEQ ID NO: 3359396 - DNA, 25 bp, Homo sapien
taatttgagcgtacaaatggtcaca

SEQ ID NO: 3359397 - DNA, 25 bp, Homo sapien
cacactcacggtgcttttggaggca

SEQ ID NO: 3359398 - DNA, 25 bp, Homo sapien
agtaagttcaacggagccccatttg

SEQ ID NO: 3359399 - DNA, 25 bp, Homo sapien
ttcagcaatcttcagggatatctgg

SEQ ID NO: 3359400 - DNA, 25 bp, Homo sapien
agccccatttgggagtgccgcaatc

SEQ ID NO: 3359401 - DNA, 25 bp, Homo sapien
tccctcagggaaatctctctcattc

SEQ ID NO: 3359402 - DNA, 25 bp, Homo sapien
ggatcatgagtccactgatttgaac

SEQ ID NO: 3359403 - DNA, 25 bp, Homo sapien
gacaatcacattcattgtaggagta

SEQ ID NO: 3359404 - DNA, 25 bp, Homo sapien
caaagtatgggcatataaatgaagg

SEQ ID NO: 3359405 - DNA, 25 bp, Homo sapien
actgctgtccccgtgacaatcacat

SEQ ID NO: 3359406 - DNA, 25 bp, Homo sapien
ctagtctccgattaagaatgtgata

SEQ ID NO: 3359407 - DNA, 25 bp, Homo sapien
cgattaagaatgtgatagaagagcc

SEQ ID NO: 3359408 - DNA, 25 bp, Homo sapien
cgctgacgaaagaacagtgcatact

SEQ ID NO: 3359409 - DNA, 25 bp, Homo sapien
tgtgatagaagagccaacgctgacg

SEQ ID NO: 3359410 - DNA, 25 bp, Homo sapien
atgatttggttggtaaacgcatggt

SEQ ID NO: 3359411 - DNA, 25 bp, Homo sapien
tgcttcacctccacgcataattctg

SEQ ID NO: 3359412 - DNA, 25 bp, Homo sapien
ttggtaaacgcatggtgattgtgtg

SEQ ID NO: 3359413 - DNA, 25 bp, Homo sapien
cttcaaactgtgtggtccattccct

SEQ ID NO: 3359414 - DNA, 25 bp, Homo sapien
ccaagccatcaccaaattgttcctt

SEQ ID NO: 3359415 - DNA, 25 bp, Homo sapien
ggtcaaatcttatgccattcttggt

SEQ ID NO: 3359416 - DNA, 25 bp, Homo sapien
tcagatactcaggtcaaatcttatg

SEQ ID NO: 3359417 - DNA, 25 bp, Homo sapien
tgcaggtcagaatctactgcaagac

SEQ ID NO: 3359418 - DNA, 25 bp, Homo sapien
gcaggtcagaatctactgcaagact

SEQ ID NO: 3359419 - DNA, 25 bp, Homo sapien
catccatggcatcaagaaaggtacc

SEQ ID NO: 3359420 - DNA, 25 bp, Homo sapien
ccccgtgttacagaactatctttga

SEQ ID NO: 3359421 - DNA, 25 bp, Homo sapien
tttcccaagagcaacgtctacagga

SEQ ID NO: 3359422 - DNA, 25 bp, Homo sapien
cactttgaaaaatagcgtagttgat

SEQ ID NO: 3359423 - DNA, 25 bp, Homo sapien
actttgcctggattgtcaggtagca

SEQ ID NO: 3359424 - DNA, 25 bp, Homo sapien
gactttgcctggattgtcaggtagc

SEQ ID NO: 3359425 - DNA, 25 bp, Homo sapien
tggactttgcctggattgtcaggta

SEQ ID NO: 3359426 - DNA, 25 bp, Homo sapien
ctggactttgcctggattgtcaggt

SEQ ID NO: 3359427 - DNA, 25 bp, Homo sapien
tttcccaatctgtgcataataacgg

SEQ ID NO: 3359428 - DNA, 25 bp, Homo sapien
cccaatctgtgcataataacggaag

SEQ ID NO: 3359429 - DNA, 25 bp, Homo sapien
gcataataacggaagaattatacat

SEQ ID NO: 3359430 - DNA, 25 bp, Homo sapien
tctgtgcataataacggaagaatta

SEQ ID NO: 3359431 - DNA, 25 bp, Homo sapien
gcactggcaaagagtgggtttctat

SEQ ID NO: 3359432 - DNA, 25 bp, Homo sapien
ctggcaaagagtgggtttctataac

SEQ ID NO: 3359433 - DNA, 25 bp, Homo sapien
aggtgctaagatggtttgaacattc

SEQ ID NO: 3359434 - DNA, 25 bp, Homo sapien
aaaaggtgctaagatggtttgaaca

SEQ ID NO: 3359435 - DNA, 25 bp, Homo sapien
ctggatgctcagaaagcttatttct

SEQ ID NO: 3359436 - DNA, 25 bp, Homo sapien
tcccaaacactccaccagcagacat

SEQ ID NO: 3359437 - DNA, 25 bp, Homo sapien
tatttctattcttcccaaacactcc

SEQ ID NO: 3359438 - DNA, 25 bp, Homo sapien
attcttcccaaacactccaccagca

SEQ ID NO: 3359439 - DNA, 25 bp, Homo sapien
taatgctgatgatataatgttacca

SEQ ID NO: 3359440 - DNA, 25 bp, Homo sapien
taccatgagaactgtaacttttctg

SEQ ID NO: 3359441 - DNA, 25 bp, Homo sapien
tattgtgcaggcagtataatgctga

SEQ ID NO: 3359442 - DNA, 25 bp, Homo sapien
ttctaaatacgtattttattgtgca

SEQ ID NO: 3359443 - DNA, 25 bp, Homo sapien
ttattcctttgctgctccatagtca

SEQ ID NO: 3359444 - DNA, 25 bp, Homo sapien
aaaaatgtatgtgtagatttcttta

SEQ ID NO: 3359445 - DNA, 25 bp, Homo sapien
ccacattgtgacaatatcaagaaaa

SEQ ID NO: 3359446 - DNA, 25 bp, Homo sapien
tcctttgctgctccatagtcatctt

SEQ ID NO: 3359447 - DNA, 25 bp, Homo sapien
cataaaaaagtttcaaagttgcttg

SEQ ID NO: 3359448 - DNA, 25 bp, Homo sapien
gtttcaaagttgcttgtggaatgat

SEQ ID NO: 3359449 - DNA, 25 bp, Homo sapien
aaagtttcaaagttgcttgtggaat

SEQ ID NO: 3359450 - DNA, 25 bp, Homo sapien
agtttcaaagttgcttgtggaatga

SEQ ID NO: 3359451 - DNA, 25 bp, Homo sapien
cactggagaagtgtaccaaattgtc

SEQ ID NO: 3359452 - DNA, 25 bp, Homo sapien
agattacactggagaagtgtaccaa

SEQ ID NO: 3359453 - DNA, 25 bp, Homo sapien
aattgtctgagagtacaagagaagg

SEQ ID NO: 3359454 - DNA, 25 bp, Homo sapien
gaagtgtaccaaattgtctgagagt

SEQ ID NO: 3359455 - DNA, 25 bp, Homo sapien
catagtcacctgacaagatttcaga

SEQ ID NO: 3359456 - DNA, 25 bp, Homo sapien
tagtcacctgacaagatttcagaca

SEQ ID NO: 3359457 - DNA, 25 bp, Homo sapien
tatcatagtcacctgacaagatttc

SEQ ID NO: 3359458 - DNA, 25 bp, Homo sapien
tcatagtcacctgacaagatttcag

SEQ ID NO: 3359459 - DNA, 25 bp, Homo sapien
acataaacggtagttctggcttcac

SEQ ID NO: 3359460 - DNA, 25 bp, Homo sapien
aaactcaacataaacggtagttctg

SEQ ID NO: 3359461 - DNA, 25 bp, Homo sapien
aatataataccttcgtagaaaccag

SEQ ID NO: 3359462 - DNA, 25 bp, Homo sapien
tgaaatataataccttcgtagaaac

SEQ ID NO: 3359463 - DNA, 25 bp, Homo sapien
tgcccagagcagcattgtaactcaa

SEQ ID NO: 3359464 - DNA, 25 bp, Homo sapien
gcaatatcaaaccacagaaccgctt

SEQ ID NO: 3359465 - DNA, 25 bp, Homo sapien
ccccatggagtaagggctgggcttt

SEQ ID NO: 3359466 - DNA, 25 bp, Homo sapien
cagccgtcaggtccagcaatatcaa

SEQ ID NO: 3359467 - DNA, 25 bp, Homo sapien
ataacaggttcaattctctgcacag

SEQ ID NO: 3359468 - DNA, 25 bp, Homo sapien
aaataacaggttcaattctctgcac

SEQ ID NO: 3359469 - DNA, 25 bp, Homo sapien
ggaaaataacaggttcaattctctg

SEQ ID NO: 3359470 - DNA, 25 bp, Homo sapien
taacaggttcaattctctgcacagc

SEQ ID NO: 3359471 - DNA, 25 bp, Homo sapien
tctctctcgtagttggcgatgctac

SEQ ID NO: 3359472 - DNA, 25 bp, Homo sapien
gcgatgctacgtaggattgggctcc

SEQ ID NO: 3359473 - DNA, 25 bp, Homo sapien
tattgcttgtacaatgacagaagcc

SEQ ID NO: 3359474 - DNA, 25 bp, Homo sapien
tatgatctgcgatgaaggcaaagat

SEQ ID NO: 3359475 - DNA, 25 bp, Homo sapien
attagtctatagaaatatatggcaa

SEQ ID NO: 3359476 - DNA, 25 bp, Homo sapien
aatatatggcaaaggctaataaata

SEQ ID NO: 3359477 - DNA, 25 bp, Homo sapien
taataaatagatcttgagtgtagtg

SEQ ID NO: 3359478 - DNA, 25 bp, Homo sapien
aatgtgaagcgaagtcaaagtatac

SEQ ID NO: 3359479 - DNA, 25 bp, Homo sapien
gtacttccttcacccaaattcttga

SEQ ID NO: 3359480 - DNA, 25 bp, Homo sapien
cttcacccaaattcttgatcttggc

SEQ ID NO: 3359481 - DNA, 25 bp, Homo sapien
tgtacttccttcacccaaattcttg

SEQ ID NO: 3359482 - DNA, 25 bp, Homo sapien
cacccaaattcttgatcttggctac

SEQ ID NO: 3359483 - DNA, 25 bp, Homo sapien
tagcacatgctacttggagagcctt

SEQ ID NO: 3359484 - DNA, 25 bp, Homo sapien
catgctacttggagagccttgacca

SEQ ID NO: 3359485 - DNA, 25 bp, Homo sapien
gctacttggagagccttgaccacca

SEQ ID NO: 3359486 - DNA, 25 bp, Homo sapien
gggttgtagcacatgctacttggag

SEQ ID NO: 3359487 - DNA, 25 bp, Homo sapien
atgtagcctcacctcttaacatcat

SEQ ID NO: 3359488 - DNA, 25 bp, Homo sapien
gatgtagcctcacctcttaacatca

SEQ ID NO: 3359489 - DNA, 25 bp, Homo sapien
ggatgtagcctcacctcttaacatc

SEQ ID NO: 3359490 - DNA, 25 bp, Homo sapien
cttcaaagttgagaatgggtctgtt

SEQ ID NO: 3359491 - DNA, 25 bp, Homo sapien
gaatactgccatggttgtaagagtt

SEQ ID NO: 3359492 - DNA, 25 bp, Homo sapien
ccatggttgtaagagtttcagtgca

SEQ ID NO: 3359493 - DNA, 25 bp, Homo sapien
tcaaagttgagaatgggtctgtttt

SEQ ID NO: 3359494 - DNA, 25 bp, Homo sapien
cgagtagcttgtggaaatgttgagt

SEQ ID NO: 3359495 - DNA, 25 bp, Homo sapien
gacttccatgaacgagtagcttgtg

SEQ ID NO: 3359496 - DNA, 25 bp, Homo sapien
ttatgcgacttccatgaacgagtag

SEQ ID NO: 3359497 - DNA, 25 bp, Homo sapien
ttttccaggaattgataaatatatc

SEQ ID NO: 3359498 - DNA, 25 bp, Homo sapien
tatctcgctgaagggaaggatgaaa

SEQ ID NO: 3359499 - DNA, 25 bp, Homo sapien
agtcatctatctcgctgaagggaag

SEQ ID NO: 3359500 - DNA, 25 bp, Homo sapien
taagggtattgagtcatctatctcg

SEQ ID NO: 3359501 - DNA, 25 bp, Homo sapien
ggtattgagtcatctatctcgctga

SEQ ID NO: 3359502 - DNA, 25 bp, Homo sapien
caaccatcatcacagcaaggtgctg

SEQ ID NO: 3359503 - DNA, 25 bp, Homo sapien
ggcacaggggacatccaaccatcat

SEQ ID NO: 3359504 - DNA, 25 bp, Homo sapien
ggtatgctccaatgcaggcacaggg

SEQ ID NO: 3359505 - DNA, 25 bp, Homo sapien
caaggtgctgctcagggtgcagttt

SEQ ID NO: 3359506 - DNA, 25 bp, Homo sapien
gatatgtacgggaactaaaggatct

SEQ ID NO: 3359507 - DNA, 25 bp, Homo sapien
gaataggattatgtttagctcagat

SEQ ID NO: 3359508 - DNA, 25 bp, Homo sapien
gagggagatggtccatgatatgtac

SEQ ID NO: 3359509 - DNA, 25 bp, Homo sapien
tatgtttagctcagattcatccaca

SEQ ID NO: 3359510 - DNA, 25 bp, Homo sapien
aatggaagcaaattaaagaaggatt

SEQ ID NO: 3359511 - DNA, 25 bp, Homo sapien
tgttctgaggaatgtcaaatcatca

SEQ ID NO: 3359512 - DNA, 25 bp, Homo sapien
cacatttgttgtactgatctgacca

SEQ ID NO: 3359513 - DNA, 25 bp, Homo sapien
taaaatttctgttggtctagtgttc

SEQ ID NO: 3359514 - DNA, 25 bp, Homo sapien
tttgaaatccatggcattactggtg

SEQ ID NO: 3359515 - DNA, 25 bp, Homo sapien
gcgtgcttgggcttgttcgatgcct

SEQ ID NO: 3359516 - DNA, 25 bp, Homo sapien
ttactggtggataactttaaattca

SEQ ID NO: 3359517 - DNA, 25 bp, Homo sapien
gccttacacaatatcacgaggaact

SEQ ID NO: 3359518 - DNA, 25 bp, Homo sapien
ctcctggccctcattggggttattg

SEQ ID NO: 3359519 - DNA, 25 bp, Homo sapien
gttcctgtaatatagaataacatct

SEQ ID NO: 3359520 - DNA, 25 bp, Homo sapien
tgtactccccatcacattgtaatga

SEQ ID NO: 3359521 - DNA, 25 bp, Homo sapien
tgttcctgtaatatagaataacatc

SEQ ID NO: 3359522 - DNA, 25 bp, Homo sapien
ttcactgatttgtgctacaatcagc

SEQ ID NO: 3359523 - DNA, 25 bp, Homo sapien
cattttgactctctatgaaatccaa

SEQ ID NO: 3359524 - DNA, 25 bp, Homo sapien
agattcactgatttgtgctacaatc

SEQ ID NO: 3359525 - DNA, 25 bp, Homo sapien
ctgatttgtgctacaatcagcaggg

SEQ ID NO: 3359526 - DNA, 25 bp, Homo sapien
tgtaccattcgaaatgcaagcctga

SEQ ID NO: 3359527 - DNA, 25 bp, Homo sapien
tttttgtaccattcgaaatgcaagc

SEQ ID NO: 3359528 - DNA, 25 bp, Homo sapien
cgaaatgcaagcctgatggacaatg

SEQ ID NO: 3359529 - DNA, 25 bp, Homo sapien
cattcgaaatgcaagcctgatggac

SEQ ID NO: 3359530 - DNA, 25 bp, Homo sapien
ggtttaacaaggtgatcactatggt

SEQ ID NO: 3359531 - DNA, 25 bp, Homo sapien
cctgaaaaatgataggtttaacaag

SEQ ID NO: 3359532 - DNA, 25 bp, Homo sapien
caaggtgatcactatggtatgattc

SEQ ID NO: 3359533 - DNA, 25 bp, Homo sapien
cactatggtatgattcagctgtcat

SEQ ID NO: 3359534 - DNA, 25 bp, Homo sapien
tgaactctaagtcccttataaatgt

SEQ ID NO: 3359535 - DNA, 25 bp, Homo sapien
gggcttgatcacaagtctgaactct

SEQ ID NO: 3359536 - DNA, 25 bp, Homo sapien
cgtctgtgagtggatatacagcata

SEQ ID NO: 3359537 - DNA, 25 bp, Homo sapien
gatggacactgattctatccgtttg

SEQ ID NO: 3359538 - DNA, 25 bp, Homo sapien
ggctgcagtggcgggcgtcgtggct

SEQ ID NO: 3359539 - DNA, 25 bp, Homo sapien
aggctgcagtggcgggcgtcgtggc

SEQ ID NO: 3359540 - DNA, 25 bp, Homo sapien
gctgcagtggcgggcgtcgtggctg

SEQ ID NO: 3359541 - DNA, 25 bp, Homo sapien
tcaggctgcagtggcgggcgtcgtg

SEQ ID NO: 3359542 - DNA, 25 bp, Homo sapien
tgcataatacagcatgagggcaaag

SEQ ID NO: 3359543 - DNA, 25 bp, Homo sapien
gggcaaagagcagctgagcacatct

SEQ ID NO: 3359544 - DNA, 25 bp, Homo sapien
caatgatgagcctacacttgtgggc

SEQ ID NO: 3359545 - DNA, 25 bp, Homo sapien
tcagctcgagttcctctgcagatgc

SEQ ID NO: 3359546 - DNA, 25 bp, Homo sapien
cacaagagcaccaagaggatgaagg

SEQ ID NO: 3359547 - DNA, 25 bp, Homo sapien
gaggatgaaggctctgtgctctgcc

SEQ ID NO: 3359548 - DNA, 25 bp, Homo sapien
tgttcacaagatcacaagagcacca

SEQ ID NO: 3359549 - DNA, 25 bp, Homo sapien
caccaagaggatgaaggctctgtgc

SEQ ID NO: 3359550 - DNA, 25 bp, Homo sapien
cttgataacttgttacatctgtcat

SEQ ID NO: 3359551 - DNA, 25 bp, Homo sapien
tagggaaagtctccacattgatgaa

SEQ ID NO: 3359552 - DNA, 25 bp, Homo sapien
gatgaagtgctaatccctcgaccct

SEQ ID NO: 3359553 - DNA, 25 bp, Homo sapien
cacgctagcattggcttcagttgac

SEQ ID NO: 3359554 - DNA, 25 bp, Homo sapien
cctgctctcactgggcaggtaggga

SEQ ID NO: 3359555 - DNA, 25 bp, Homo sapien
ggcccagggacttcgacaacttctg

SEQ ID NO: 3359556 - DNA, 25 bp, Homo sapien
caggtctaaaatggccagaggagtt

SEQ ID NO: 3359557 - DNA, 25 bp, Homo sapien
cagggacttcgacaacttctgcatt

SEQ ID NO: 3359558 - DNA, 25 bp, Homo sapien
cttctgcattttgcgcagcccatgt

SEQ ID NO: 3359559 - DNA, 25 bp, Homo sapien
aaatatagtatttcctatggcaaat

SEQ ID NO: 3359560 - DNA, 25 bp, Homo sapien
aatctctgtgtctatgacaacttca

SEQ ID NO: 3359561 - DNA, 25 bp, Homo sapien
tatttcctatggcaaatttaaatga

SEQ ID NO: 3359562 - DNA, 25 bp, Homo sapien
tctcctgcaatctctgtgtctatga

SEQ ID NO: 3359563 - DNA, 25 bp, Homo sapien
tcagccccagtcatagagctgaact

SEQ ID NO: 3359564 - DNA, 25 bp, Homo sapien
cagccccagtcatagagctgaactg

SEQ ID NO: 3359565 - DNA, 25 bp, Homo sapien
agctgaactgcctcagcaatgcagc

SEQ ID NO: 3359566 - DNA, 25 bp, Homo sapien
tagagctgaactgcctcagcaatgc

SEQ ID NO: 3359567 - DNA, 25 bp, Homo sapien
tccaatttggacagataagtacctc

SEQ ID NO: 3359568 - DNA, 25 bp, Homo sapien
attctggtgaatggcgggtcttgct

SEQ ID NO: 3359569 - DNA, 25 bp, Homo sapien
cttgctttggttcaacggttgactg

SEQ ID NO: 3359570 - DNA, 25 bp, Homo sapien
caacggttgactgtttccaatttgg

SEQ ID NO: 3359571 - DNA, 25 bp, Homo sapien
aactttcatagcaaccatcacttga

SEQ ID NO: 3359572 - DNA, 25 bp, Homo sapien
ttcatagcaaccatcacttgatggc

SEQ ID NO: 3359573 - DNA, 25 bp, Homo sapien
atcacttgatggcatgttacctcct

SEQ ID NO: 3359574 - DNA, 25 bp, Homo sapien
ttgatggcatgttacctcctcattc

SEQ ID NO: 3359575 - DNA, 25 bp, Homo sapien
tagagttcaggtaccagctagaggt

SEQ ID NO: 3359576 - DNA, 25 bp, Homo sapien
catggcacatcccttgagtagttca

SEQ ID NO: 3359577 - DNA, 25 bp, Homo sapien
gttcattgtataacaaaggaacatc

SEQ ID NO: 3359578 - DNA, 25 bp, Homo sapien
tctctggacagagatatgggcttgt

SEQ ID NO: 3359579 - DNA, 25 bp, Homo sapien
atacagctgttgaagtgacaacttc

SEQ ID NO: 3359580 - DNA, 25 bp, Homo sapien
acagctgttgaagtgacaacttcat

SEQ ID NO: 3359581 - DNA, 25 bp, Homo sapien
ccatgtttgattaatgttgtaatat

SEQ ID NO: 3359582 - DNA, 25 bp, Homo sapien
caatacagctgttgaagtgacaact

SEQ ID NO: 3359583 - DNA, 25 bp, Homo sapien
gaattccacgggactgagatatttc

SEQ ID NO: 3359584 - DNA, 25 bp, Homo sapien
tagtatttagaattccacgggactg

SEQ ID NO: 3359585 - DNA, 25 bp, Homo sapien
tttagaattccacgggactgagata

SEQ ID NO: 3359586 - DNA, 25 bp, Homo sapien
ttccacgggactgagatatttctga

SEQ ID NO: 3359587 - DNA, 25 bp, Homo sapien
ttagcctttatccaatgggctattc

SEQ ID NO: 3359588 - DNA, 25 bp, Homo sapien
gtatccacatcatcctgtaactcaa

SEQ ID NO: 3359589 - DNA, 25 bp, Homo sapien
cctcagtatccacatcatcctgtaa

SEQ ID NO: 3359590 - DNA, 25 bp, Homo sapien
caatgggctattcactagaaacaaa

SEQ ID NO: 3359591 - DNA, 25 bp, Homo sapien
gcaataccactgtgcaagcggcaat

SEQ ID NO: 3359592 - DNA, 25 bp, Homo sapien
cagctgctgtgtttatgtgcaatac

SEQ ID NO: 3359593 - DNA, 25 bp, Homo sapien
ggcagtcagcacacaactggcactg

SEQ ID NO: 3359594 - DNA, 25 bp, Homo sapien
gagtaatgcagctgggtctaaaatt

SEQ ID NO: 3359595 - DNA, 25 bp, Homo sapien
cccatgaagcttcactatattcttg

SEQ ID NO: 3359596 - DNA, 25 bp, Homo sapien
ttccaacccatgaagcttcactata

SEQ ID NO: 3359597 - DNA, 25 bp, Homo sapien
tgcttcaagcttaacatagaatttt

SEQ ID NO: 3359598 - DNA, 25 bp, Homo sapien
acattgcttcaagcttaacatagaa

SEQ ID NO: 3359599 - DNA, 25 bp, Homo sapien
ttactgcctttattttgaacaactg

SEQ ID NO: 3359600 - DNA, 25 bp, Homo sapien
ctgcctttattttgaacaactgata

SEQ ID NO: 3359601 - DNA, 25 bp, Homo sapien
tactgcctttattttgaacaactga

SEQ ID NO: 3359602 - DNA, 25 bp, Homo sapien
cctttattttgaacaactgatacca

SEQ ID NO: 3359603 - DNA, 25 bp, Homo sapien
ttcttttcatccatgaaccctgact

SEQ ID NO: 3359604 - DNA, 25 bp, Homo sapien
tttcatccatgaaccctgactttac

SEQ ID NO: 3359605 - DNA, 25 bp, Homo sapien
tgagatgctagtccccctatgactg

SEQ ID NO: 3359606 - DNA, 25 bp, Homo sapien
tttgagatgctagtccccctatgac

SEQ ID NO: 3359607 - DNA, 25 bp, Homo sapien
aggcccctccagagctaagatccag

SEQ ID NO: 3359608 - DNA, 25 bp, Homo sapien
tagccagatccaggaaacaccagga

SEQ ID NO: 3359609 - DNA, 25 bp, Homo sapien
aacaccaggaattgatattgtctga

SEQ ID NO: 3359610 - DNA, 25 bp, Homo sapien
gaattgatattgtctgaatccaaac

SEQ ID NO: 3359611 - DNA, 25 bp, Homo sapien
gaaacaccatttgactcagaattcc

SEQ ID NO: 3359612 - DNA, 25 bp, Homo sapien
gcaggcatacgttcattgcagcacc

SEQ ID NO: 3359613 - DNA, 25 bp, Homo sapien
tacatgccaccaacaagcatatata

SEQ ID NO: 3359614 - DNA, 25 bp, Homo sapien
tagtttaaccattatgagaaacagt

SEQ ID NO: 3359615 - DNA, 25 bp, Homo sapien
tagtatcctgtatgtgttagagtca

SEQ ID NO: 3359616 - DNA, 25 bp, Homo sapien
ctgctgtggtcctgtaacgtagtat

SEQ ID NO: 3359617 - DNA, 25 bp, Homo sapien
tgtggtcctgtaacgtagtatcctg

SEQ ID NO: 3359618 - DNA, 25 bp, Homo sapien
cctgtaacgtagtatcctgtatgtg

SEQ ID NO: 3359619 - DNA, 25 bp, Homo sapien
ccatttgtcaattttaggacaagaa

SEQ ID NO: 3359620 - DNA, 25 bp, Homo sapien
gaccatttgtcaattttaggacaag

SEQ ID NO: 3359621 - DNA, 25 bp, Homo sapien
tcagaccatttgtcaattttaggac

SEQ ID NO: 3359622 - DNA, 25 bp, Homo sapien
acctcagaccatttgtcaattttag

SEQ ID NO: 3359623 - DNA, 25 bp, Homo sapien
agttcccacaatccacacccgtcct

SEQ ID NO: 3359624 - DNA, 25 bp, Homo sapien
gcagttcccacaatccacacccgtc

SEQ ID NO: 3359625 - DNA, 25 bp, Homo sapien
tcccacaatccacacccgtcctcct

SEQ ID NO: 3359626 - DNA, 25 bp, Homo sapien
tggcataaacccaatcaggagagtc

SEQ ID NO: 3359627 - DNA, 25 bp, Homo sapien
ggaagcaacaaccaggcattcgcct

SEQ ID NO: 3359628 - DNA, 25 bp, Homo sapien
tgctagcatgatacaattgacactt

SEQ ID NO: 3359629 - DNA, 25 bp, Homo sapien
ctttgaggatccatggagagagcac

SEQ ID NO: 3359630 - DNA, 25 bp, Homo sapien
tcctgaccccttgctatgtacgacg

SEQ ID NO: 3359631 - DNA, 25 bp, Homo sapien
atttaagcaacacatcagcgacccg

SEQ ID NO: 3359632 - DNA, 25 bp, Homo sapien
atcagcgacccgatcatttccctag

SEQ ID NO: 3359633 - DNA, 25 bp, Homo sapien
gatcatttccctagctctcagttca

SEQ ID NO: 3359634 - DNA, 25 bp, Homo sapien
gtggggaagttctgtcatttaagca

SEQ ID NO: 3359635 - DNA, 25 bp, Homo sapien
tctatgcagataggactgctgttgc

SEQ ID NO: 3359636 - DNA, 25 bp, Homo sapien
agtcatcatctctatgcagatagga

SEQ ID NO: 3359637 - DNA, 25 bp, Homo sapien
catctctatgcagataggactgctg

SEQ ID NO: 3359638 - DNA, 25 bp, Homo sapien
tatgcagataggactgctgttgcac

SEQ ID NO: 3359639 - DNA, 25 bp, Homo sapien
tactctctcgttcagctttgaccac

SEQ ID NO: 3359640 - DNA, 25 bp, Homo sapien
cgaatgtagggcactcaaattgtct

SEQ ID NO: 3359641 - DNA, 25 bp, Homo sapien
tttgaccacaaatggatatgtgtac

SEQ ID NO: 3359642 - DNA, 25 bp, Homo sapien
caaatggatatgtgtactgcccagg

SEQ ID NO: 3359643 - DNA, 25 bp, Homo sapien
tcctgatgcaccttggcagagttta

SEQ ID NO: 3359644 - DNA, 25 bp, Homo sapien
gctcttctcgtcctctcttccctaa

SEQ ID NO: 3359645 - DNA, 25 bp, Homo sapien
ccttggcagagtttactttgggaga

SEQ ID NO: 3359646 - DNA, 25 bp, Homo sapien
agtttactttgggagaatgctcttc

SEQ ID NO: 3359647 - DNA, 25 bp, Homo sapien
caatccttttagcatagcgagacat

SEQ ID NO: 3359648 - DNA, 25 bp, Homo sapien
cacaatccttttagcatagcgagac

SEQ ID NO: 3359649 - DNA, 25 bp, Homo sapien
gacacaatccttttagcatagcgag

SEQ ID NO: 3359650 - DNA, 25 bp, Homo sapien
ctggacacaatccttttagcatagc

SEQ ID NO: 3359651 - DNA, 25 bp, Homo sapien
tgcgccagtatagtatagatctcca

SEQ ID NO: 3359652 - DNA, 25 bp, Homo sapien
gcgccagtatagtatagatctccat

SEQ ID NO: 3359653 - DNA, 25 bp, Homo sapien
ccttgcgccagtatagtatagatct

SEQ ID NO: 3359654 - DNA, 25 bp, Homo sapien
cttgcgccagtatagtatagatctc

SEQ ID NO: 3359655 - DNA, 25 bp, Homo sapien
tgtttggtgtctcaacaccaaaacg

SEQ ID NO: 3359656 - DNA, 25 bp, Homo sapien
catgtgtttggtgtctcaacaccaa

SEQ ID NO: 3359657 - DNA, 25 bp, Homo sapien
ggtgtctcaacaccaaaacgataag

SEQ ID NO: 3359658 - DNA, 25 bp, Homo sapien
tcatgtgtttggtgtctcaacacca

SEQ ID NO: 3359659 - DNA, 25 bp, Homo sapien
atgtagacctagtgatggtgttttg

SEQ ID NO: 3359660 - DNA, 25 bp, Homo sapien
ctgtgaatgtagacctagtgatggt

SEQ ID NO: 3359661 - DNA, 25 bp, Homo sapien
gtgaatgtagacctagtgatggtgt

SEQ ID NO: 3359662 - DNA, 25 bp, Homo sapien
gaatgtagacctagtgatggtgttt

SEQ ID NO: 3359663 - DNA, 25 bp, Homo sapien
tccttgttgtaagaccaacaaccaa

SEQ ID NO: 3359664 - DNA, 25 bp, Homo sapien
tactgtccacttggttgactttcct

SEQ ID NO: 3359665 - DNA, 25 bp, Homo sapien
atttgaagacgcagccatggtgagg

SEQ ID NO: 3359666 - DNA, 25 bp, Homo sapien
caaccaatcaggacaacaggtcctt

SEQ ID NO: 3359667 - DNA, 25 bp, Homo sapien
tctgtgatgcaaatctttccaggca

SEQ ID NO: 3359668 - DNA, 25 bp, Homo sapien
ttattcctgctgtacacttgccatc

SEQ ID NO: 3359669 - DNA, 25 bp, Homo sapien
gttctttattcctgctgtacacttg

SEQ ID NO: 3359670 - DNA, 25 bp, Homo sapien
tgtgtcattcacgttgcctcttcct

SEQ ID NO: 3359671 - DNA, 25 bp, Homo sapien
ctagtcatttaatggccctggatcc

SEQ ID NO: 3359672 - DNA, 25 bp, Homo sapien
ctttcacatgtcttagcgcaatgca

SEQ ID NO: 3359673 - DNA, 25 bp, Homo sapien
catttaatggccctggatcctgttt

SEQ ID NO: 3359674 - DNA, 25 bp, Homo sapien
tagcgcaatgcaacttcataagtaa

SEQ ID NO: 3359675 - DNA, 25 bp, Homo sapien
ccagtaagagtctgttcaaatggag

SEQ ID NO: 3359676 - DNA, 25 bp, Homo sapien
acatttctgcgctttacaacacatc

SEQ ID NO: 3359677 - DNA, 25 bp, Homo sapien
cacatttctgcgctttacaacacat

SEQ ID NO: 3359678 - DNA, 25 bp, Homo sapien
cacatctgccatacatccagtaaga

SEQ ID NO: 3359679 - DNA, 25 bp, Homo sapien
caacagaatgaagaatgtcctcggt

SEQ ID NO: 3359680 - DNA, 25 bp, Homo sapien
tcttgtagcaccaacaactgtcaaa

SEQ ID NO: 3359681 - DNA, 25 bp, Homo sapien
caatacttccgtagatcttgtagca

SEQ ID NO: 3359682 - DNA, 25 bp, Homo sapien
tgctctgaaacttatggacaatact

SEQ ID NO: 3359683 - DNA, 25 bp, Homo sapien
aatggacaactgcatcatagatcat

SEQ ID NO: 3359684 - DNA, 25 bp, Homo sapien
gaaaatggacaactgcatcatagat

SEQ ID NO: 3359685 - DNA, 25 bp, Homo sapien
ctgaaaatggacaactgcatcatag

SEQ ID NO: 3359686 - DNA, 25 bp, Homo sapien
aaatggacaactgcatcatagatca

SEQ ID NO: 3359687 - DNA, 25 bp, Homo sapien
ttggggataaacgtccttcacactc

SEQ ID NO: 3359688 - DNA, 25 bp, Homo sapien
atgaagagaggagacagatgttttc

SEQ ID NO: 3359689 - DNA, 25 bp, Homo sapien
cttcacactccatgtggatgaagag

SEQ ID NO: 3359690 - DNA, 25 bp, Homo sapien
ggataaacgtccttcacactccatg

SEQ ID NO: 3359691 - DNA, 25 bp, Homo sapien
cctaacagagctaaactcagcaagt

SEQ ID NO: 3359692 - DNA, 25 bp, Homo sapien
tcagcaagttgcctggggatgtagt

SEQ ID NO: 3359693 - DNA, 25 bp, Homo sapien
tgtagtacttattgtacgatgccat

SEQ ID NO: 3359694 - DNA, 25 bp, Homo sapien
gggatgtagtacttattgtacgatg

SEQ ID NO: 3359695 - DNA, 25 bp, Homo sapien
tcctgattgatagagcaaaatgacg

SEQ ID NO: 3359696 - DNA, 25 bp, Homo sapien
tagagcaaaatgacgacctttttct

SEQ ID NO: 3359697 - DNA, 25 bp, Homo sapien
caaatctgttatgctcatttcctga

SEQ ID NO: 3359698 - DNA, 25 bp, Homo sapien
caggcagccactagcaaatctgtta

SEQ ID NO: 3359699 - DNA, 25 bp, Homo sapien
gtggatagcgttacccttttgagag

SEQ ID NO: 3359700 - DNA, 25 bp, Homo sapien
cttttgagagttatgaggcagtggc

SEQ ID NO: 3359701 - DNA, 25 bp, Homo sapien
aatcttcttaggtaaagcccactgg

SEQ ID NO: 3359702 - DNA, 25 bp, Homo sapien
attaaacacaggaatcctccggtgg

SEQ ID NO: 3359703 - DNA, 25 bp, Homo sapien
gatccagatgccaaactgcgaaaat

SEQ ID NO: 3359704 - DNA, 25 bp, Homo sapien
caatgtggacactatcttatgcctc

SEQ ID NO: 3359705 - DNA, 25 bp, Homo sapien
gttgaatggtaattccaggatccag

SEQ ID NO: 3359706 - DNA, 25 bp, Homo sapien
tatcttatgcctcatcttcatatgc

SEQ ID NO: 3359707 - DNA, 25 bp, Homo sapien
gcagcactattactgtggggaacag

SEQ ID NO: 3359708 - DNA, 25 bp, Homo sapien
tggcatatagtaccagtttctgcag

SEQ ID NO: 3359709 - DNA, 25 bp, Homo sapien
acagggatcccctggtggcatatag

SEQ ID NO: 3359710 - DNA, 25 bp, Homo sapien
tcccctggtggcatatagtaccagt

SEQ ID NO: 3359711 - DNA, 25 bp, Homo sapien
acagctgcaatccaccagaggttgg

SEQ ID NO: 3359712 - DNA, 25 bp, Homo sapien
caactgctgagtatttcaagcagga

SEQ ID NO: 3359713 - DNA, 25 bp, Homo sapien
aggcgaacagaacccacgatgcagt

SEQ ID NO: 3359714 - DNA, 25 bp, Homo sapien
tcacagaggagaacaatgagctcac

SEQ ID NO: 3359715 - DNA, 25 bp, Homo sapien
ggagatttgaatccctgaaccacca

SEQ ID NO: 3359716 - DNA, 25 bp, Homo sapien
gataaaattggtagcattgcacaca

SEQ ID NO: 3359717 - DNA, 25 bp, Homo sapien
tcagcggaaatgtatgagacactct

SEQ ID NO: 3359718 - DNA, 25 bp, Homo sapien
tataatggaagatgactctcagcgg

SEQ ID NO: 3359719 - DNA, 25 bp, Homo sapien
taaatgaagagacacatcaggatga

SEQ ID NO: 3359720 - DNA, 25 bp, Homo sapien
gataaatgaagagacacatcaggat

SEQ ID NO: 3359721 - DNA, 25 bp, Homo sapien
aaatgaagagacacatcaggatgaa

SEQ ID NO: 3359722 - DNA, 25 bp, Homo sapien
ggataaatgaagagacacatcagga

SEQ ID NO: 3359723 - DNA, 25 bp, Homo sapien
aataacctgagggatgttgatcgca

SEQ ID NO: 3359724 - DNA, 25 bp, Homo sapien
ctctctcctctagagttcttcaata

SEQ ID NO: 3359725 - DNA, 25 bp, Homo sapien
gagttcttcaataacctgagggatg

SEQ ID NO: 3359726 - DNA, 25 bp, Homo sapien
tgttgatcgcaagctgttggaagtg

SEQ ID NO: 3359727 - DNA, 25 bp, Homo sapien
gcttctgaaaactgatcgctgaaat

SEQ ID NO: 3359728 - DNA, 25 bp, Homo sapien
tgatcggcctgagtacttgtaatgc

SEQ ID NO: 3359729 - DNA, 25 bp, Homo sapien
cagaatgcactttcgccagacttgc

SEQ ID NO: 3359730 - DNA, 25 bp, Homo sapien
gttaagtttagagccccagaatgca

SEQ ID NO: 3359731 - DNA, 25 bp, Homo sapien
taactgccagaaggcagaatgtctc

SEQ ID NO: 3359732 - DNA, 25 bp, Homo sapien
actgccagaaggcagaatgtctcat

SEQ ID NO: 3359733 - DNA, 25 bp, Homo sapien
aaaacctctcctaactgccagaagg

SEQ ID NO: 3359734 - DNA, 25 bp, Homo sapien
tctcctaactgccagaaggcagaat

SEQ ID NO: 3359735 - DNA, 25 bp, Homo sapien
gctggatgcaagaacaggatctggt

SEQ ID NO: 3359736 - DNA, 25 bp, Homo sapien
gaggtatcaagacttctccactgca

SEQ ID NO: 3359737 - DNA, 25 bp, Homo sapien
ttaggaggccagcttcggagatact

SEQ ID NO: 3359738 - DNA, 25 bp, Homo sapien
tactgagatagaatctggagcatgc

SEQ ID NO: 3359739 - DNA, 25 bp, Homo sapien
tatggaagtacttttaactcaatct

SEQ ID NO: 3359740 - DNA, 25 bp, Homo sapien
cacacacactcaaaactgtgttttc

SEQ ID NO: 3359741 - DNA, 25 bp, Homo sapien
catatgcataatctacctgggtcag

SEQ ID NO: 3359742 - DNA, 25 bp, Homo sapien
agaatattacctcaattatggaagt

SEQ ID NO: 3359743 - DNA, 25 bp, Homo sapien
ttatgcttattattgtccatgaact

SEQ ID NO: 3359744 - DNA, 25 bp, Homo sapien
gcttattattgtccatgaacttttt

SEQ ID NO: 3359745 - DNA, 25 bp, Homo sapien
agatcaagtcagcagatctaatttc

SEQ ID NO: 3359746 - DNA, 25 bp, Homo sapien
cagatcaagtcagcagatctaattt

SEQ ID NO: 3359747 - DNA, 25 bp, Homo sapien
aggagggtccccaatcttctattat

SEQ ID NO: 3359748 - DNA, 25 bp, Homo sapien
tatcgtggattatttcggaaggagg

SEQ ID NO: 3359749 - DNA, 25 bp, Homo sapien
caggcccatacagtatcgtggatta

SEQ ID NO: 3359750 - DNA, 25 bp, Homo sapien
cttctattatgaaaccaagtgatgt

SEQ ID NO: 3359751 - DNA, 25 bp, Homo sapien
tcaagtgcggatgtaatgtccagtc

SEQ ID NO: 3359752 - DNA, 25 bp, Homo sapien
ttgaacaggcttcagttgccctttg

SEQ ID NO: 3359753 - DNA, 25 bp, Homo sapien
ggatgtaatgtccagtccatgtgtt

SEQ ID NO: 3359754 - DNA, 25 bp, Homo sapien
ccctttgtgaaaataagactgtggg

SEQ ID NO: 3359755 - DNA, 25 bp, Homo sapien
attctcttcataggagctctctgac

SEQ ID NO: 3359756 - DNA, 25 bp, Homo sapien
cttctgggtgcaggtacactctgac

SEQ ID NO: 3359757 - DNA, 25 bp, Homo sapien
tctcttcataggagctctctgacat

SEQ ID NO: 3359758 - DNA, 25 bp, Homo sapien
caggtacactctgaccaagattctc

SEQ ID NO: 3359759 - DNA, 25 bp, Homo sapien
cgtcaagtggaatgtcggaattgct

SEQ ID NO: 3359760 - DNA, 25 bp, Homo sapien
ggaattgctatgatccccataccac

SEQ ID NO: 3359761 - DNA, 25 bp, Homo sapien
tctccacaacgtcaagtggaatgtc

SEQ ID NO: 3359762 - DNA, 25 bp, Homo sapien
gaattgctatgatccccataccaca

SEQ ID NO: 3359763 - DNA, 25 bp, Homo sapien
gtcctgtttatactcgcctggcagt

SEQ ID NO: 3359764 - DNA, 25 bp, Homo sapien
ttcaggtactgagccagataaggca

SEQ ID NO: 3359765 - DNA, 25 bp, Homo sapien
gataaggcagtttcgggtaccagaa

SEQ ID NO: 3359766 - DNA, 25 bp, Homo sapien
ttccatctgagaaaacgctgcattc

SEQ ID NO: 3359767 - DNA, 25 bp, Homo sapien
aactcaggacctgaagagccagaac

SEQ ID NO: 3359768 - DNA, 25 bp, Homo sapien
gaatccatatggtccagagtgcctg

SEQ ID NO: 3359769 - DNA, 25 bp, Homo sapien
tgctttaatagaggccgattccagt

SEQ ID NO: 3359770 - DNA, 25 bp, Homo sapien
gattccagtgattgcaactcaggac

SEQ ID NO: 3359771 - DNA, 25 bp, Homo sapien
tattttagctattacatctttcttc

SEQ ID NO: 3359772 - DNA, 25 bp, Homo sapien
tattcttcaataacttttggctctt

SEQ ID NO: 3359773 - DNA, 25 bp, Homo sapien
ttattcttcaataacttttggctct

SEQ ID NO: 3359774 - DNA, 25 bp, Homo sapien
tggctctttgctatttattttagct

SEQ ID NO: 3359775 - DNA, 25 bp, Homo sapien
tgatgacactgttcgcttgagagaa

SEQ ID NO: 3359776 - DNA, 25 bp, Homo sapien
atgacactgttcgcttgagagaaaa

SEQ ID NO: 3359777 - DNA, 25 bp, Homo sapien
ctgtgatgacactgttcgcttgaga

SEQ ID NO: 3359778 - DNA, 25 bp, Homo sapien
gtgatgacactgttcgcttgagaga

SEQ ID NO: 3359779 - DNA, 25 bp, Homo sapien
ttacgtcagtgtctgtgccagttta

SEQ ID NO: 3359780 - DNA, 25 bp, Homo sapien
acgtcagtgtctgtgccagtttatg

SEQ ID NO: 3359781 - DNA, 25 bp, Homo sapien
gtcagtgtctgtgccagtttatgac

SEQ ID NO: 3359782 - DNA, 25 bp, Homo sapien
cgtcagtgtctgtgccagtttatga

SEQ ID NO: 3359783 - DNA, 25 bp, Homo sapien
tgtcctctgacagaccaccacaaag

SEQ ID NO: 3359784 - DNA, 25 bp, Homo sapien
gctagttctctgatagtcctgtcct

SEQ ID NO: 3359785 - DNA, 25 bp, Homo sapien
ctctgacagaccaccacaaagttgc

SEQ ID NO: 3359786 - DNA, 25 bp, Homo sapien
ccggccaacagctagttctctgata

SEQ ID NO: 3359787 - DNA, 25 bp, Homo sapien
agccccatctatcctgagagaccac

SEQ ID NO: 3359788 - DNA, 25 bp, Homo sapien
ccccatctatcctgagagaccacct

SEQ ID NO: 3359789 - DNA, 25 bp, Homo sapien
gccccatctatcctgagagaccacc

SEQ ID NO: 3359790 - DNA, 25 bp, Homo sapien
cagccccatctatcctgagagacca

SEQ ID NO: 3359791 - DNA, 25 bp, Homo sapien
gcatcattttgccaggcgttctgct

SEQ ID NO: 3359792 - DNA, 25 bp, Homo sapien
gtctcacagccttgactacttcatg

SEQ ID NO: 3359793 - DNA, 25 bp, Homo sapien
tccctcacaataacatgtattctgt

SEQ ID NO: 3359794 - DNA, 25 bp, Homo sapien
ccttgactacttcatgctcagggca

SEQ ID NO: 3359795 - DNA, 25 bp, Homo sapien
tagaagacaagcccacgggaactgt

SEQ ID NO: 3359796 - DNA, 25 bp, Homo sapien
cccacgggaactgtggagaaggtgc

SEQ ID NO: 3359797 - DNA, 25 bp, Homo sapien
aagacaagcccacgggaactgtgga

SEQ ID NO: 3359798 - DNA, 25 bp, Homo sapien
acaagcccacgggaactgtggagaa

SEQ ID NO: 3359799 - DNA, 25 bp, Homo sapien
gtagatttgaatccgtgcagtagaa

SEQ ID NO: 3359800 - DNA, 25 bp, Homo sapien
gatttgaatccgtgcagtagaaagg

SEQ ID NO: 3359801 - DNA, 25 bp, Homo sapien
caagtagatttgaatccgtgcagta

SEQ ID NO: 3359802 - DNA, 25 bp, Homo sapien
tgcaagtagatttgaatccgtgcag

SEQ ID NO: 3359803 - DNA, 25 bp, Homo sapien
catttcagacctaaaacgcagaagc

SEQ ID NO: 3359804 - DNA, 25 bp, Homo sapien
atttcagacctaaaacgcagaagca

SEQ ID NO: 3359805 - DNA, 25 bp, Homo sapien
tttcagacctaaaacgcagaagcat

SEQ ID NO: 3359806 - DNA, 25 bp, Homo sapien
tccacgtgtgcgctgaacttcattt

SEQ ID NO: 3359807 - DNA, 25 bp, Homo sapien
gactgcaaactctttccacgtgtgc

SEQ ID NO: 3359808 - DNA, 25 bp, Homo sapien
cgtgtgcgctgaacttcattttttc

SEQ ID NO: 3359809 - DNA, 25 bp, Homo sapien
aaactctttccacgtgtgcgctgaa

SEQ ID NO: 3359810 - DNA, 25 bp, Homo sapien
aaatgttctgtatgcacttgataag

SEQ ID NO: 3359811 - DNA, 25 bp, Homo sapien
taacttcaagttgactctccatgag

SEQ ID NO: 3359812 - DNA, 25 bp, Homo sapien
tctccatgagttttatatcgtttcc

SEQ ID NO: 3359813 - DNA, 25 bp, Homo sapien
ccttcaattgtttagtggaatgttc

SEQ ID NO: 3359814 - DNA, 25 bp, Homo sapien
ttgtgtagtaatgccggagagactc

SEQ ID NO: 3359815 - DNA, 25 bp, Homo sapien
cttgtatgtttgtgtagtaatgccg

SEQ ID NO: 3359816 - DNA, 25 bp, Homo sapien
catcctattccaatttgatctgagt

SEQ ID NO: 3359817 - DNA, 25 bp, Homo sapien
tctgagtccgtacttaacaagagaa

SEQ ID NO: 3359818 - DNA, 25 bp, Homo sapien
actgacccaaatctaagtaggctct

SEQ ID NO: 3359819 - DNA, 25 bp, Homo sapien
caaaagttggccttcatatgaccaa

SEQ ID NO: 3359820 - DNA, 25 bp, Homo sapien
cttttgctgtggtacaaaagttggc

SEQ ID NO: 3359821 - DNA, 25 bp, Homo sapien
tatgaattacaaagacgcccttatg

SEQ ID NO: 3359822 - DNA, 25 bp, Homo sapien
tgtgatattatgagttgcttcaatc

SEQ ID NO: 3359823 - DNA, 25 bp, Homo sapien
ctgtgatattatgagttgcttcaat

SEQ ID NO: 3359824 - DNA, 25 bp, Homo sapien
caatcttatgtttcttgtgactcat

SEQ ID NO: 3359825 - DNA, 25 bp, Homo sapien
gagttgcttcaatcttatgtttctt

SEQ ID NO: 3359826 - DNA, 25 bp, Homo sapien
cacctccatagcagtgttctgtgca

SEQ ID NO: 3359827 - DNA, 25 bp, Homo sapien
gctactcttgagtctgtaatcctga

SEQ ID NO: 3359828 - DNA, 25 bp, Homo sapien
catagggagtgaggccaatctgccc

SEQ ID NO: 3359829 - DNA, 25 bp, Homo sapien
cagacattgcttgtgcctagtaaca

SEQ ID NO: 3359830 - DNA, 25 bp, Homo sapien
gactgaaagaccgtagcaacagcgg

SEQ ID NO: 3359831 - DNA, 25 bp, Homo sapien
gcccggtaggccgtgactgaaagac

SEQ ID NO: 3359832 - DNA, 25 bp, Homo sapien
cagcggtcaattgccgttttagagc

SEQ ID NO: 3359833 - DNA, 25 bp, Homo sapien
tcaggtcgcctctcccgcaggtttg

SEQ ID NO: 3359834 - DNA, 25 bp, Homo sapien
aaatgcaaacccctgtcttctgtgg

SEQ ID NO: 3359835 - DNA, 25 bp, Homo sapien
agtggaggcagcctaaccgcgtagc

SEQ ID NO: 3359836 - DNA, 25 bp, Homo sapien
cagcggcggctcgaaagtggaggca

SEQ ID NO: 3359837 - DNA, 25 bp, Homo sapien
gctgaaaccaccattcacaaatgca

SEQ ID NO: 3359838 - DNA, 25 bp, Homo sapien
agcaagacgcgaccagagagccacc

SEQ ID NO: 3359839 - DNA, 25 bp, Homo sapien
tcgcgcgcctctgagaggctgtccg

SEQ ID NO: 3359840 - DNA, 25 bp, Homo sapien
tgcgtgagtgtggatttgccgggac

SEQ ID NO: 3359841 - DNA, 25 bp, Homo sapien
ccaataagagcgagggagagagcaa

SEQ ID NO: 3359842 - DNA, 25 bp, Homo sapien
ctccacctcgcacatgcgggcggcc

SEQ ID NO: 3359843 - DNA, 25 bp, Homo sapien
ctcgcacatgcgggcggccgctgca

SEQ ID NO: 3359844 - DNA, 25 bp, Homo sapien
tcgcacatgcgggcggccgctgcag

SEQ ID NO: 3359845 - DNA, 25 bp, Homo sapien
cacctcgcacatgcgggcggccgct

SEQ ID NO: 3359846 - DNA, 25 bp, Homo sapien
tcattatgatgttccctgtgatgct

SEQ ID NO: 3359847 - DNA, 25 bp, Homo sapien
gggtgtccttcattatgatgttccc

SEQ ID NO: 3359848 - DNA, 25 bp, Homo sapien
cttccgggggtgtccttcattatga

SEQ ID NO: 3359849 - DNA, 25 bp, Homo sapien
tccttcattatgatgttccctgtga

SEQ ID NO: 3359850 - DNA, 25 bp, Homo sapien
ggctccctgatccttggtaaatcgt

SEQ ID NO: 3359851 - DNA, 25 bp, Homo sapien
tgtcccgtctgtgactggaagaagg

SEQ ID NO: 3359852 - DNA, 25 bp, Homo sapien
gagagcgcaactctggagctgcctg

SEQ ID NO: 3359853 - DNA, 25 bp, Homo sapien
tggtaaatcgtgtttggagaggcat

SEQ ID NO: 3359854 - DNA, 25 bp, Homo sapien
ttgttgcaccgtttcaggaaagaac

SEQ ID NO: 3359855 - DNA, 25 bp, Homo sapien
tcaggaaagaactggttcttcaatc

SEQ ID NO: 3359856 - DNA, 25 bp, Homo sapien
ggttcttcaatctagtctgctcatc

SEQ ID NO: 3359857 - DNA, 25 bp, Homo sapien
ctgctttgttgcaccgtttcaggaa

SEQ ID NO: 3359858 - DNA, 25 bp, Homo sapien
cctccttttcacatgcaagttctgc

SEQ ID NO: 3359859 - DNA, 25 bp, Homo sapien
ttcctccttttcacatgcaagttct

SEQ ID NO: 3359860 - DNA, 25 bp, Homo sapien
tttcctccttttcacatgcaagttc

SEQ ID NO: 3359861 - DNA, 25 bp, Homo sapien
tcctccttttcacatgcaagttctg

SEQ ID NO: 3359862 - DNA, 25 bp, Homo sapien
taataaatgggatcgtttacagacc

SEQ ID NO: 3359863 - DNA, 25 bp, Homo sapien
gaggcaaggctttgagccactataa

SEQ ID NO: 3359864 - DNA, 25 bp, Homo sapien
tggatcttgatctctgctaatgtgc

SEQ ID NO: 3359865 - DNA, 25 bp, Homo sapien
gatgatcaccagttattacaagaag

SEQ ID NO: 3359866 - DNA, 25 bp, Homo sapien
aaaactgtctgagcatttcatcctt

SEQ ID NO: 3359867 - DNA, 25 bp, Homo sapien
aaactgtctgagcatttcatccttc

SEQ ID NO: 3359868 - DNA, 25 bp, Homo sapien
aactgtctgagcatttcatccttca

SEQ ID NO: 3359869 - DNA, 25 bp, Homo sapien
cagcaaaccttggtatggctggctt

SEQ ID NO: 3359870 - DNA, 25 bp, Homo sapien
cacactctgtccctatgattctgtc

SEQ ID NO: 3359871 - DNA, 25 bp, Homo sapien
cccatggtattggtacttgctcttc

SEQ ID NO: 3359872 - DNA, 25 bp, Homo sapien
tgctgagttgtcctaccccatggta

SEQ ID NO: 3359873 - DNA, 25 bp, Homo sapien
tctgagttggagcaagtcctccaca

SEQ ID NO: 3359874 - DNA, 25 bp, Homo sapien
tcagacggaagcagtctgagttgga

SEQ ID NO: 3359875 - DNA, 25 bp, Homo sapien
gggctccctgttgtactctgattta

SEQ ID NO: 3359876 - DNA, 25 bp, Homo sapien
catgcttggcgaacaagggctccct

SEQ ID NO: 3359877 - DNA, 25 bp, Homo sapien
aagcatgcaactggatttccccaca

SEQ ID NO: 3359878 - DNA, 25 bp, Homo sapien
ggatttccccacatgatcatttcca

SEQ ID NO: 3359879 - DNA, 25 bp, Homo sapien
cacacatgcctaagcatgcaactgg

SEQ ID NO: 3359880 - DNA, 25 bp, Homo sapien
ttgctgacaaatttcacacatgcct

SEQ ID NO: 3359881 - DNA, 25 bp, Homo sapien
ctgttgtggatttaagtgtgtgaga

SEQ ID NO: 3359882 - DNA, 25 bp, Homo sapien
ttagccaaatatttaggcgcttctg

SEQ ID NO: 3359883 - DNA, 25 bp, Homo sapien
tgtgtgagagggaggtaaacacttt

SEQ ID NO: 3359884 - DNA, 25 bp, Homo sapien
tgtgagagggaggtaaacacttttc

SEQ ID NO: 3359885 - DNA, 25 bp, Homo sapien
cttcctgttctcaatacaaatggtt

SEQ ID NO: 3359886 - DNA, 25 bp, Homo sapien
gaatctcttcctgttctcaatacaa

SEQ ID NO: 3359887 - DNA, 25 bp, Homo sapien
tcttcctgttctcaatacaaatggt

SEQ ID NO: 3359888 - DNA, 25 bp, Homo sapien
gaaaagcatgtctatatggctcact

SEQ ID NO: 3359889 - DNA, 25 bp, Homo sapien
taatctggttagcacctaagtggca

SEQ ID NO: 3359890 - DNA, 25 bp, Homo sapien
cattctaaatgaaaagcgcgtacag

SEQ ID NO: 3359891 - DNA, 25 bp, Homo sapien
gaatcctaattctggtccctgttga

SEQ ID NO: 3359892 - DNA, 25 bp, Homo sapien
aatttcacagagagcgtaagacatt

SEQ ID NO: 3359893 - DNA, 25 bp, Homo sapien
atttcacagagagcgtaagacattt

SEQ ID NO: 3359894 - DNA, 25 bp, Homo sapien
tgaaaagtctctggttgaggtgcag

SEQ ID NO: 3359895 - DNA, 25 bp, Homo sapien
ggaagcgtcttccttcaattcctgg

SEQ ID NO: 3359896 - DNA, 25 bp, Homo sapien
tcttgtagtggttctgcgccatttt

SEQ ID NO: 3359897 - DNA, 25 bp, Homo sapien
tagtagttgcgggtgtaacacacac

SEQ ID NO: 3359898 - DNA, 25 bp, Homo sapien
tcctccgcagtttgcccctgaagat

SEQ ID NO: 3359899 - DNA, 25 bp, Homo sapien
agatcctccgcagtttgcccctgaa

SEQ ID NO: 3359900 - DNA, 25 bp, Homo sapien
cattcgtggtctgcttaattccagt

SEQ ID NO: 3359901 - DNA, 25 bp, Homo sapien
ctcacttcaacattcgtggtctgct

SEQ ID NO: 3359902 - DNA, 25 bp, Homo sapien
cgcatgtcgtctcctgactataaag

SEQ ID NO: 3359903 - DNA, 25 bp, Homo sapien
tcctgactataaaggccgccacaac

SEQ ID NO: 3359904 - DNA, 25 bp, Homo sapien
tataaaggccgccacaacagtgcac

SEQ ID NO: 3359905 - DNA, 25 bp, Homo sapien
aacagtgcacgaccgtatcacccag

SEQ ID NO: 3359906 - DNA, 25 bp, Homo sapien
tgttcagatccagagggagagagac

SEQ ID NO: 3359907 - DNA, 25 bp, Homo sapien
gatccagagggagagagacagttct

SEQ ID NO: 3359908 - DNA, 25 bp, Homo sapien
ccagagggagagagacagttctcac

SEQ ID NO: 3359909 - DNA, 25 bp, Homo sapien
ctgttcagatccagagggagagaga

SEQ ID NO: 3359910 - DNA, 25 bp, Homo sapien
taaacttggcttgcctccggtcatc

SEQ ID NO: 3359911 - DNA, 25 bp, Homo sapien
ggcttgcctccggtcatctccaaat

SEQ ID NO: 3359912 - DNA, 25 bp, Homo sapien
catcttaaacttggcttgcctccgg

SEQ ID NO: 3359913 - DNA, 25 bp, Homo sapien
caaatacccatcttaaacttggctt

SEQ ID NO: 3359914 - DNA, 25 bp, Homo sapien
gggtctttgttaatgccaggccaaa

SEQ ID NO: 3359915 - DNA, 25 bp, Homo sapien
ggacacgtgggttcttgacttctaa

SEQ ID NO: 3359916 - DNA, 25 bp, Homo sapien
cacaaccagcaagtagtagacctgg

SEQ ID NO: 3359917 - DNA, 25 bp, Homo sapien
tattccttacaagagccccatgaga

SEQ ID NO: 3359918 - DNA, 25 bp, Homo sapien
ctgagtcttatatttgggtcatctc

SEQ ID NO: 3359919 - DNA, 25 bp, Homo sapien
gacaatgcaattagctttgtgatga

SEQ ID NO: 3359920 - DNA, 25 bp, Homo sapien
gcagcatacaattattacagaatag

SEQ ID NO: 3359921 - DNA, 25 bp, Homo sapien
tctgtacctgtaatgaatgaggggc

SEQ ID NO: 3359922 - DNA, 25 bp, Homo sapien
tgtatgaggtcatttgacaatgcaa

SEQ ID NO: 3359923 - DNA, 25 bp, Homo sapien
caatgaagtggcaaattctaggctc

SEQ ID NO: 3359924 - DNA, 25 bp, Homo sapien
ggatctgttgctccaatggatctcc

SEQ ID NO: 3359925 - DNA, 25 bp, Homo sapien
ttctaggctccagggcactttctct

SEQ ID NO: 3359926 - DNA, 25 bp, Homo sapien
ttgccagattataggtgatcgggac

SEQ ID NO: 3359927 - DNA, 25 bp, Homo sapien
gtgtaaaagcccccagtggatatgt

SEQ ID NO: 3359928 - DNA, 25 bp, Homo sapien
cccagtggatatgtcatactgaatt

SEQ ID NO: 3359929 - DNA, 25 bp, Homo sapien
ccagtggatatgtcatactgaattc

SEQ ID NO: 3359930 - DNA, 25 bp, Homo sapien
tccttgtgtaaaagcccccagtgga

SEQ ID NO: 3359931 - DNA, 25 bp, Homo sapien
tcatatttaaagtgcatgaagtcag

SEQ ID NO: 3359932 - DNA, 25 bp, Homo sapien
gcatgaagtcagtaaattcacaagt

SEQ ID NO: 3359933 - DNA, 25 bp, Homo sapien
tatttaaagtgcatgaagtcagtaa

SEQ ID NO: 3359934 - DNA, 25 bp, Homo sapien
taaagtgcatgaagtcagtaaattc

SEQ ID NO: 3359935 - DNA, 25 bp, Homo sapien
gctgctcccgtgaaatcatccgaac

SEQ ID NO: 3359936 - DNA, 25 bp, Homo sapien
tatggctacagccagctccgagaga

SEQ ID NO: 3359937 - DNA, 25 bp, Homo sapien
ttgtacttttgcgtgggcacactgt

SEQ ID NO: 3359938 - DNA, 25 bp, Homo sapien
cagccagctccgagagatttgtact

SEQ ID NO: 3359939 - DNA, 25 bp, Homo sapien
tgacttctcgcactttatggctaca

SEQ ID NO: 3359940 - DNA, 25 bp, Homo sapien
ctttgagggcagtgaatctctagga

SEQ ID NO: 3359941 - DNA, 25 bp, Homo sapien
tctaggaggtggttcactactgtct

SEQ ID NO: 3359942 - DNA, 25 bp, Homo sapien
tattcctgatgccctttgagggcag

SEQ ID NO: 3359943 - DNA, 25 bp, Homo sapien
aggaggtggttcactactgtcttcc

SEQ ID NO: 3359944 - DNA, 25 bp, Homo sapien
caggtgtggcaccaaacctttcctt

SEQ ID NO: 3359945 - DNA, 25 bp, Homo sapien
gcaggtgtggcaccaaacctttcct

SEQ ID NO: 3359946 - DNA, 25 bp, Homo sapien
gaagaaaatccctcacacacttttg

SEQ ID NO: 3359947 - DNA, 25 bp, Homo sapien
cactgcaggaggtctgggtcttcct

SEQ ID NO: 3359948 - DNA, 25 bp, Homo sapien
tttttgctcactcgagtcttccagg

SEQ ID NO: 3359949 - DNA, 25 bp, Homo sapien
gctcgtgttgtacatggatctgctg

SEQ ID NO: 3359950 - DNA, 25 bp, Homo sapien
tagcatttggcagtagtcgatgagc

SEQ ID NO: 3359951 - DNA, 25 bp, Homo sapien
atctcccttggtgttctagcatttg

SEQ ID NO: 3359952 - DNA, 25 bp, Homo sapien
tgttctagcatttggcagtagtcga

SEQ ID NO: 3359953 - DNA, 25 bp, Homo sapien
ttggcagtagtcgatgagcattaat

SEQ ID NO: 3359954 - DNA, 25 bp, Homo sapien
taaacaaccgtgtctttcgcagact

SEQ ID NO: 3359955 - DNA, 25 bp, Homo sapien
gacccagtgctaggagagcaactct

SEQ ID NO: 3359956 - DNA, 25 bp, Homo sapien
tattcccctggtgacttgttaaaca

SEQ ID NO: 3359957 - DNA, 25 bp, Homo sapien
tctggtctagcaatcttcggcaggg

SEQ ID NO: 3359958 - DNA, 25 bp, Homo sapien
ggcagtagaggcataagtcgtcagt

SEQ ID NO: 3359959 - DNA, 25 bp, Homo sapien
tgttgatgaagtacaccggggcact

SEQ ID NO: 3359960 - DNA, 25 bp, Homo sapien
cgtctgttgcctctatggtcttctg

SEQ ID NO: 3359961 - DNA, 25 bp, Homo sapien
tgtcactagactgtctaggcagtag

SEQ ID NO: 3359962 - DNA, 25 bp, Homo sapien
aactttcatccttggttcgctggca

SEQ ID NO: 3359963 - DNA, 25 bp, Homo sapien
catcatccatcaaaccaactttcat

SEQ ID NO: 3359964 - DNA, 25 bp, Homo sapien
ccccagaacatgatcctcattttct

SEQ ID NO: 3359965 - DNA, 25 bp, Homo sapien
ttcgctggcacctcctatggactct

SEQ ID NO: 3359966 - DNA, 25 bp, Homo sapien
gaagttttcaaaggacgagcagtga

SEQ ID NO: 3359967 - DNA, 25 bp, Homo sapien
tatttttataataccgctatttagc

SEQ ID NO: 3359968 - DNA, 25 bp, Homo sapien
ttttcaaaggacgagcagtgacata

SEQ ID NO: 3359969 - DNA, 25 bp, Homo sapien
caaaggacgagcagtgacatatttg

SEQ ID NO: 3359970 - DNA, 25 bp, Homo sapien
tttcaaatacgttataattcagcat

SEQ ID NO: 3359971 - DNA, 25 bp, Homo sapien
cttggtttcaccacatttaatcctt

SEQ ID NO: 3359972 - DNA, 25 bp, Homo sapien
caccacatttaatccttttagggag

SEQ ID NO: 3359973 - DNA, 25 bp, Homo sapien
aatttcaaatacgttataattcagc

SEQ ID NO: 3359974 - DNA, 25 bp, Homo sapien
gccagttggactccaccaagctgca

SEQ ID NO: 3359975 - DNA, 25 bp, Homo sapien
gttggactccaccaagctgcaccac

SEQ ID NO: 3359976 - DNA, 25 bp, Homo sapien
tcagccagttggactccaccaagct

SEQ ID NO: 3359977 - DNA, 25 bp, Homo sapien
agttggactccaccaagctgcacca

SEQ ID NO: 3359978 - DNA, 25 bp, Homo sapien
ccatggcgaataagaagagttagca

SEQ ID NO: 3359979 - DNA, 25 bp, Homo sapien
aggtgaaaattgctgacgtcagagc

SEQ ID NO: 3359980 - DNA, 25 bp, Homo sapien
ggctggctgatatcaagagagctcc

SEQ ID NO: 3359981 - DNA, 25 bp, Homo sapien
agttcctgttgtagaatccaattgg

SEQ ID NO: 3359982 - DNA, 25 bp, Homo sapien
ggtaggaagacgttctccactttga

SEQ ID NO: 3359983 - DNA, 25 bp, Homo sapien
gagacagctccctaatcttctgcca

SEQ ID NO: 3359984 - DNA, 25 bp, Homo sapien
tagcccagctacaatattcctggag

SEQ ID NO: 3359985 - DNA, 25 bp, Homo sapien
tccactttgaccacgatgtgtacga

SEQ ID NO: 3359986 - DNA, 25 bp, Homo sapien
gaaatttgaaagtgagtcagtacca

SEQ ID NO: 3359987 - DNA, 25 bp, Homo sapien
gtcagtaccatagggacttaacaag

SEQ ID NO: 3359988 - DNA, 25 bp, Homo sapien
tatatcgaggataattctccagtgg

SEQ ID NO: 3359989 - DNA, 25 bp, Homo sapien
cagttgtccatagctagaataaaag

SEQ ID NO: 3359990 - DNA, 25 bp, Homo sapien
tgcagttgatcttgccattatcctt

SEQ ID NO: 3359991 - DNA, 25 bp, Homo sapien
tcagaaccttgaaacatggcctaaa

SEQ ID NO: 3359992 - DNA, 25 bp, Homo sapien
gccattatcctttaagtgatcttca

SEQ ID NO: 3359993 - DNA, 25 bp, Homo sapien
aacatggcctaaattgcagttgatc

SEQ ID NO: 3359994 - DNA, 25 bp, Homo sapien
tccctggaagacttgatagatgaat

SEQ ID NO: 3359995 - DNA, 25 bp, Homo sapien
ccctggaagacttgatagatgaatt

SEQ ID NO: 3359996 - DNA, 25 bp, Homo sapien
gttccctggaagacttgatagatga

SEQ ID NO: 3359997 - DNA, 25 bp, Homo sapien
tggttccctggaagacttgatagat

SEQ ID NO: 3359998 - DNA, 25 bp, Homo sapien
gatttgatggattggtttattacgg

SEQ ID NO: 3359999 - DNA, 25 bp, Homo sapien
gaacaatctaaactgatcattaaaa

SEQ ID NO: 3360000 - DNA, 25 bp, Homo sapien
tctgagcatagcgactgagtaggta

SEQ ID NO: 3360001 - DNA, 25 bp, Homo sapien
cggttaaattgagcatggaacaatc

SEQ ID NO: 3360002 - DNA, 25 bp, Homo sapien
gctgtggctgtttgaattaggtgtt

SEQ ID NO: 3360003 - DNA, 25 bp, Homo sapien
tctcatgccaaaattgattatggaa

SEQ ID NO: 3360004 - DNA, 25 bp, Homo sapien
gattatggaagtagcacctcttctg

SEQ ID NO: 3360005 - DNA, 25 bp, Homo sapien
ttctgtcataactgtctggaccagg

SEQ ID NO: 3360006 - DNA, 25 bp, Homo sapien
ttttccacatcatcgactagcacag

SEQ ID NO: 3360007 - DNA, 25 bp, Homo sapien
gaaaaacttctctagttctctagta

SEQ ID NO: 3360008 - DNA, 25 bp, Homo sapien
cagaaaaacttctctagttctctag

SEQ ID NO: 3360009 - DNA, 25 bp, Homo sapien
aaacttctctagttctctagtaaca

SEQ ID NO: 3360010 - DNA, 25 bp, Homo sapien
acttctctagttctctagtaacaaa

SEQ ID NO: 3360011 - DNA, 25 bp, Homo sapien
caacagacgcatgtgcttagaagct

SEQ ID NO: 3360012 - DNA, 25 bp, Homo sapien
gctcctccaacagacgcatgtgctt

SEQ ID NO: 3360013 - DNA, 25 bp, Homo sapien
catgtgcttagaagctgattgctcc

SEQ ID NO: 3360014 - DNA, 25 bp, Homo sapien
cagacgcatgtgcttagaagctgat

SEQ ID NO: 3360015 - DNA, 25 bp, Homo sapien
tcagagtgaagctcatgaattctgt

SEQ ID NO: 3360016 - DNA, 25 bp, Homo sapien
gaagctcatgaattctgtgtgatga

SEQ ID NO: 3360017 - DNA, 25 bp, Homo sapien
ctgtgtgatgactggtggaagatac

SEQ ID NO: 3360018 - DNA, 25 bp, Homo sapien
actggcctaatcagagtgaagctca

SEQ ID NO: 3360019 - DNA, 25 bp, Homo sapien
gctgtatgctacgtgatgctgccat

SEQ ID NO: 3360020 - DNA, 25 bp, Homo sapien
tcttcgccttagatgttgtactctg

SEQ ID NO: 3360021 - DNA, 25 bp, Homo sapien
ccactgaatgatggccacttagatg

SEQ ID NO: 3360022 - DNA, 25 bp, Homo sapien
tgtactctgtctttgttgccactga

SEQ ID NO: 3360023 - DNA, 25 bp, Homo sapien
ctccggatgcacacccttcatattt

SEQ ID NO: 3360024 - DNA, 25 bp, Homo sapien
ccaccatatgctatttggaaaagca

SEQ ID NO: 3360025 - DNA, 25 bp, Homo sapien
cctttgagaagtcctccaccatatg

SEQ ID NO: 3360026 - DNA, 25 bp, Homo sapien
cttcatatttaaaggtagcaccatc

SEQ ID NO: 3360027 - DNA, 25 bp, Homo sapien
agttggccatttccatgatatgcca

SEQ ID NO: 3360028 - DNA, 25 bp, Homo sapien
aagttggccatttccatgatatgcc

SEQ ID NO: 3360029 - DNA, 25 bp, Homo sapien
caagttggccatttccatgatatgc

SEQ ID NO: 3360030 - DNA, 25 bp, Homo sapien
gttggccatttccatgatatgccat

SEQ ID NO: 3360031 - DNA, 25 bp, Homo sapien
tcagtactcatcagttttttaaggg

SEQ ID NO: 3360032 - DNA, 25 bp, Homo sapien
cactcatctaaggctgcatcttctt

SEQ ID NO: 3360033 - DNA, 25 bp, Homo sapien
tcatcagttttttaagggttgtcaa

SEQ ID NO: 3360034 - DNA, 25 bp, Homo sapien
aatctgtcgtactttttcacttgca

SEQ ID NO: 3360035 - DNA, 25 bp, Homo sapien
ctaaataccaatgtgactgtgtcat

SEQ ID NO: 3360036 - DNA, 25 bp, Homo sapien
cttacaaattcatttaggaggtgat

SEQ ID NO: 3360037 - DNA, 25 bp, Homo sapien
taccacttacaaattcatttaggag

SEQ ID NO: 3360038 - DNA, 25 bp, Homo sapien
taggaggtgatttacctttactctg

SEQ ID NO: 3360039 - DNA, 25 bp, Homo sapien
ggtgatttacctttactctgattaa

SEQ ID NO: 3360040 - DNA, 25 bp, Homo sapien
gcctcttgaagcattgctgatcatg

SEQ ID NO: 3360041 - DNA, 25 bp, Homo sapien
tgccagccacatgtgggttatgaat

SEQ ID NO: 3360042 - DNA, 25 bp, Homo sapien
gccacatgtgggttatgaataaagt

SEQ ID NO: 3360043 - DNA, 25 bp, Homo sapien
cattgctgatcatgccgctgctcag

SEQ ID NO: 3360044 - DNA, 25 bp, Homo sapien
gtggcccctgatatcactctgcaga

SEQ ID NO: 3360045 - DNA, 25 bp, Homo sapien
gctggtgaagaaattgggtgactaa

SEQ ID NO: 3360046 - DNA, 25 bp, Homo sapien
gcttctagagcagatatattgcaaa

SEQ ID NO: 3360047 - DNA, 25 bp, Homo sapien
tatgccaagctaagcactgcctgcc

SEQ ID NO: 3360048 - DNA, 25 bp, Homo sapien
tacatgataataggttctttttctt

SEQ ID NO: 3360049 - DNA, 25 bp, Homo sapien
taggttctttttcttccttcatgtc

SEQ ID NO: 3360050 - DNA, 25 bp, Homo sapien
gttctttttcttccttcatgtcacc

SEQ ID NO: 3360051 - DNA, 25 bp, Homo sapien
ttacatgataataggttctttttct

SEQ ID NO: 3360052 - DNA, 25 bp, Homo sapien
gatgttactatgcaacccagtttta

SEQ ID NO: 3360053 - DNA, 25 bp, Homo sapien
caggttattagagttggcggctgca

SEQ ID NO: 3360054 - DNA, 25 bp, Homo sapien
catggtacagatagtgaggcccgcc

SEQ ID NO: 3360055 - DNA, 25 bp, Homo sapien
gccgtatgtaggtgtcttcatggaa

SEQ ID NO: 3360056 - DNA, 25 bp, Homo sapien
ctggggccgagagttccgcttttct

SEQ ID NO: 3360057 - DNA, 25 bp, Homo sapien
gggccgagagttccgcttttctcac

SEQ ID NO: 3360058 - DNA, 25 bp, Homo sapien
tggggccgagagttccgcttttctc

SEQ ID NO: 3360059 - DNA, 25 bp, Homo sapien
ggggccgagagttccgcttttctca

SEQ ID NO: 3360060 - DNA, 25 bp, Homo sapien
cttatcatatctggaacacagattt

SEQ ID NO: 3360061 - DNA, 25 bp, Homo sapien
agatttgctctgctcgtcatatttt

SEQ ID NO: 3360062 - DNA, 25 bp, Homo sapien
tatagacgttgagtggaatatgctc

SEQ ID NO: 3360063 - DNA, 25 bp, Homo sapien
gaatatgctccaatctatacccatg

SEQ ID NO: 3360064 - DNA, 25 bp, Homo sapien
ccatgacctggataatgtgccccgt

SEQ ID NO: 3360065 - DNA, 25 bp, Homo sapien
cacatgcttctcattatagacgttg

SEQ ID NO: 3360066 - DNA, 25 bp, Homo sapien
ttataaagcttctacgtgcatccaa

SEQ ID NO: 3360067 - DNA, 25 bp, Homo sapien
gtgcatccaaggcttcacgtaaata

SEQ ID NO: 3360068 - DNA, 25 bp, Homo sapien
ccaaggcttcacgtaaatattctct

SEQ ID NO: 3360069 - DNA, 25 bp, Homo sapien
gcttctacgtgcatccaaggcttca

SEQ ID NO: 3360070 - DNA, 25 bp, Homo sapien
tctaacagcttcaggctacacgtgt

SEQ ID NO: 3360071 - DNA, 25 bp, Homo sapien
catccttgcttgttgttcggtatca

SEQ ID NO: 3360072 - DNA, 25 bp, Homo sapien
ggtgccatccattcctagttggaac

SEQ ID NO: 3360073 - DNA, 25 bp, Homo sapien
gttggaactttgactcgtactgcag

SEQ ID NO: 3360074 - DNA, 25 bp, Homo sapien
cagtgatctcaagcttagcagggca

SEQ ID NO: 3360075 - DNA, 25 bp, Homo sapien
gacaaaactatgaaccacattccag

SEQ ID NO: 3360076 - DNA, 25 bp, Homo sapien
ggattaaggaggaaacagtgtcctc

SEQ ID NO: 3360077 - DNA, 25 bp, Homo sapien
gcagaggacctaggagacttgaaca

SEQ ID NO: 3360078 - DNA, 25 bp, Homo sapien
tgtgggcaatccgtcttgatatagg

SEQ ID NO: 3360079 - DNA, 25 bp, Homo sapien
gacggtcactgctctttcatagttc

SEQ ID NO: 3360080 - DNA, 25 bp, Homo sapien
ttggcttcgatctgaatgacggtca

SEQ ID NO: 3360081 - DNA, 25 bp, Homo sapien
caggactattatggaaactgtgggc

SEQ ID NO: 3360082 - DNA, 25 bp, Homo sapien
tcattgaatccagaaagtttgatgg

SEQ ID NO: 3360083 - DNA, 25 bp, Homo sapien
ttgaatccagaaagtttgatggtaa

SEQ ID NO: 3360084 - DNA, 25 bp, Homo sapien
ttcccatgatctccctttcgaaagc

SEQ ID NO: 3360085 - DNA, 25 bp, Homo sapien
tatcattgaatccagaaagtttgat

SEQ ID NO: 3360086 - DNA, 25 bp, Homo sapien
cactgataacaatgcatgggtaatg

SEQ ID NO: 3360087 - DNA, 25 bp, Homo sapien
caatgcatgggtaatgagatcaaca

SEQ ID NO: 3360088 - DNA, 25 bp, Homo sapien
tccaggaacactgataacaatgcat

SEQ ID NO: 3360089 - DNA, 25 bp, Homo sapien
aacaatgcatgggtaatgagatcaa

SEQ ID NO: 3360090 - DNA, 25 bp, Homo sapien
tggttcttgggtatgaagcagaaga

SEQ ID NO: 3360091 - DNA, 25 bp, Homo sapien
ttgctttggttcttgggtatgaagc

SEQ ID NO: 3360092 - DNA, 25 bp, Homo sapien
aaaaactgccgataccttgttggtg

SEQ ID NO: 3360093 - DNA, 25 bp, Homo sapien
ccttgttggtgtgtgtccacttggt

SEQ ID NO: 3360094 - DNA, 25 bp, Homo sapien
taattctggatttgcactgtcaaca

SEQ ID NO: 3360095 - DNA, 25 bp, Homo sapien
tgaagaacaatgctctcgggcaccc

SEQ ID NO: 3360096 - DNA, 25 bp, Homo sapien
ttcatgcaatatccaggagctggcc

SEQ ID NO: 3360097 - DNA, 25 bp, Homo sapien
tgggttctgaagaacaatgctctcg

SEQ ID NO: 3360098 - DNA, 25 bp, Homo sapien
gtagttagatggagttcttattttc

SEQ ID NO: 3360099 - DNA, 25 bp, Homo sapien
tagttagatggagttcttattttct

SEQ ID NO: 3360100 - DNA, 25 bp, Homo sapien
ctgaacagatcaggtttgccttaga

SEQ ID NO: 3360101 - DNA, 25 bp, Homo sapien
gtttgcttcaaagtgacttgcagca

SEQ ID NO: 3360102 - DNA, 25 bp, Homo sapien
tcaaagtgacttgcagcattgaaga

SEQ ID NO: 3360103 - DNA, 25 bp, Homo sapien
gaaggaagtttgcttcaaagtgact

SEQ ID NO: 3360104 - DNA, 25 bp, Homo sapien
gcttcaaagtgacttgcagcattga

SEQ ID NO: 3360105 - DNA, 25 bp, Homo sapien
ggtttgatgagaactttgtcaacca

SEQ ID NO: 3360106 - DNA, 25 bp, Homo sapien
gctacatagggtgttttgtacccag

SEQ ID NO: 3360107 - DNA, 25 bp, Homo sapien
tgcaaaaatgcagctacatagggtg

SEQ ID NO: 3360108 - DNA, 25 bp, Homo sapien
gtacccaggtttgatgagaactttg

SEQ ID NO: 3360109 - DNA, 25 bp, Homo sapien
attccataagagtgacaatctaaag

SEQ ID NO: 3360110 - DNA, 25 bp, Homo sapien
tcacctttatgtaaaggttctgcac

SEQ ID NO: 3360111 - DNA, 25 bp, Homo sapien
cctttatgtaaaggttctgcacaat

SEQ ID NO: 3360112 - DNA, 25 bp, Homo sapien
tccataagagtgacaatctaaagcc

SEQ ID NO: 3360113 - DNA, 25 bp, Homo sapien
agaaaatcacagagcccgtagagct

SEQ ID NO: 3360114 - DNA, 25 bp, Homo sapien
tcacagagcccgtagagctggccat

SEQ ID NO: 3360115 - DNA, 25 bp, Homo sapien
ccttatcattttccaaggagaaaat

SEQ ID NO: 3360116 - DNA, 25 bp, Homo sapien
aggagaaaatcacagagcccgtaga

SEQ ID NO: 3360117 - DNA, 25 bp, Homo sapien
ttttgaagtgcatagaagttcccct

SEQ ID NO: 3360118 - DNA, 25 bp, Homo sapien
tgagacatacgcaatgtcactgggc

SEQ ID NO: 3360119 - DNA, 25 bp, Homo sapien
gtcactgggccgttgagtatagcaa

SEQ ID NO: 3360120 - DNA, 25 bp, Homo sapien
gaaagtcgcctctttccggcactga

SEQ ID NO: 3360121 - DNA, 25 bp, Homo sapien
atgtacatttagtcttctggtgaaa

SEQ ID NO: 3360122 - DNA, 25 bp, Homo sapien
tgtacatttagtcttctggtgaaaa

SEQ ID NO: 3360123 - DNA, 25 bp, Homo sapien
aatgtacatttagtcttctggtgaa

SEQ ID NO: 3360124 - DNA, 25 bp, Homo sapien
atccttattggaaggctgattcttt

SEQ ID NO: 3360125 - DNA, 25 bp, Homo sapien
catccttattggaaggctgattctt

SEQ ID NO: 3360126 - DNA, 25 bp, Homo sapien
gcatccttattggaaggctgattct

SEQ ID NO: 3360127 - DNA, 25 bp, Homo sapien
gcctctcgtgcatcctaatatccat

SEQ ID NO: 3360128 - DNA, 25 bp, Homo sapien
cttcagtgttaggtttccaagcctc

SEQ ID NO: 3360129 - DNA, 25 bp, Homo sapien
tgccagctcctaaataacagggctt

SEQ ID NO: 3360130 - DNA, 25 bp, Homo sapien
gcttccggcttcagtgttaggtttc

SEQ ID NO: 3360131 - DNA, 25 bp, Homo sapien
ggcgcctggaaatactgattaagtc

SEQ ID NO: 3360132 - DNA, 25 bp, Homo sapien
aatcaggatccaggcgcctggaaat

SEQ ID NO: 3360133 - DNA, 25 bp, Homo sapien
ggatccaggcgcctggaaatactga

SEQ ID NO: 3360134 - DNA, 25 bp, Homo sapien
tccaggcgcctggaaatactgatta

SEQ ID NO: 3360135 - DNA, 25 bp, Homo sapien
cattgaaatgtcgttcctgtaccac

SEQ ID NO: 3360136 - DNA, 25 bp, Homo sapien
tgcaagagttactggtagcagacaa

SEQ ID NO: 3360137 - DNA, 25 bp, Homo sapien
gaagcaggtctatagtcattgaaat

SEQ ID NO: 3360138 - DNA, 25 bp, Homo sapien
ttttattccactactgcaggttggg

SEQ ID NO: 3360139 - DNA, 25 bp, Homo sapien
cagctttgcttcactgctttgattt

SEQ ID NO: 3360140 - DNA, 25 bp, Homo sapien
ctgctttgatttttgaggacagtct

SEQ ID NO: 3360141 - DNA, 25 bp, Homo sapien
tcagctttgcttcactgctttgatt

SEQ ID NO: 3360142 - DNA, 25 bp, Homo sapien
ctttgatttttgaggacagtcttac

SEQ ID NO: 3360143 - DNA, 25 bp, Homo sapien
cctcttaagggcattggaaagtcca

SEQ ID NO: 3360144 - DNA, 25 bp, Homo sapien
tgcatcagtcctgtctgtccacctg

SEQ ID NO: 3360145 - DNA, 25 bp, Homo sapien
agtccaggtctttgggcacagtgtg

SEQ ID NO: 3360146 - DNA, 25 bp, Homo sapien
tgtctcttgggcttatgcatcagtc

SEQ ID NO: 3360147 - DNA, 25 bp, Homo sapien
tctgaccatgttgtggcctaccttt

SEQ ID NO: 3360148 - DNA, 25 bp, Homo sapien
tgtgtcccctgcatggcacatgggg

SEQ ID NO: 3360149 - DNA, 25 bp, Homo sapien
ccctgcatggcacatggggacgaag

SEQ ID NO: 3360150 - DNA, 25 bp, Homo sapien
ccctttgtctgaccatgttgtggcc

SEQ ID NO: 3360151 - DNA, 25 bp, Homo sapien
tccggtcatctgtaggattgcttag

SEQ ID NO: 3360152 - DNA, 25 bp, Homo sapien
ggtaagataaactcctccattgaca

SEQ ID NO: 3360153 - DNA, 25 bp, Homo sapien
ttgacatatttcttaacattatggg

SEQ ID NO: 3360154 - DNA, 25 bp, Homo sapien
ttgcttagggcattcactgggagtc

SEQ ID NO: 3360155 - DNA, 25 bp, Homo sapien
tttgaaccacaatagcagacctgaa

SEQ ID NO: 3360156 - DNA, 25 bp, Homo sapien
tacaggaggtcattatgatggtcag

SEQ ID NO: 3360157 - DNA, 25 bp, Homo sapien
gacctgaaaattagcctctttggaa

SEQ ID NO: 3360158 - DNA, 25 bp, Homo sapien
ggtatcacacctttattaacagcta

SEQ ID NO: 3360159 - DNA, 25 bp, Homo sapien
ttgaggcacaggaatccttggtgag

SEQ ID NO: 3360160 - DNA, 25 bp, Homo sapien
caccccgatagttttcatggtcaag

SEQ ID NO: 3360161 - DNA, 25 bp, Homo sapien
catggtcaagcccttgaggggctat

SEQ ID NO: 3360162 - DNA, 25 bp, Homo sapien
ttagtcaccccgatagttttcatgg

SEQ ID NO: 3360163 - DNA, 25 bp, Homo sapien
cagacccttagaacaaccttcagag

SEQ ID NO: 3360164 - DNA, 25 bp, Homo sapien
gtttgtatcatcaagtgtggatggg

SEQ ID NO: 3360165 - DNA, 25 bp, Homo sapien
tgtagatcatagtcccaggcaccaa

SEQ ID NO: 3360166 - DNA, 25 bp, Homo sapien
caagtgatcttttacagccttaaat

SEQ ID NO: 3360167 - DNA, 25 bp, Homo sapien
caggcaccaaacataacactcaagt

SEQ ID NO: 3360168 - DNA, 25 bp, Homo sapien
atccatggcactcagacagcctttg

SEQ ID NO: 3360169 - DNA, 25 bp, Homo sapien
acatcatcctgcctggactttgcaa

SEQ ID NO: 3360170 - DNA, 25 bp, Homo sapien
agcctttgttgaggagccctcccac

SEQ ID NO: 3360171 - DNA, 25 bp, Homo sapien
gcctggactttgcaacccactctgg

SEQ ID NO: 3360172 - DNA, 25 bp, Homo sapien
tggactctatggtacagcccgttgc

SEQ ID NO: 3360173 - DNA, 25 bp, Homo sapien
gaacagcccactacacatctggact

SEQ ID NO: 3360174 - DNA, 25 bp, Homo sapien
tatacacctgtacagcatcatactg

SEQ ID NO: 3360175 - DNA, 25 bp, Homo sapien
cagcccgttgcttctgggttataca

SEQ ID NO: 3360176 - DNA, 25 bp, Homo sapien
ctttctgccatggtccacatagata

SEQ ID NO: 3360177 - DNA, 25 bp, Homo sapien
ttctgccatggtccacatagatagc

SEQ ID NO: 3360178 - DNA, 25 bp, Homo sapien
tttctgccatggtccacatagatag

SEQ ID NO: 3360179 - DNA, 25 bp, Homo sapien
catgacagttattttaagcggttta

SEQ ID NO: 3360180 - DNA, 25 bp, Homo sapien
gaattctcgtcattaatacatgaca

SEQ ID NO: 3360181 - DNA, 25 bp, Homo sapien
tttcttttagaacgaattctcgtca

SEQ ID NO: 3360182 - DNA, 25 bp, Homo sapien
cagttattttaagcggtttatagat

SEQ ID NO: 3360183 - DNA, 25 bp, Homo sapien
ttggggaacttgacagtcacaaatc

SEQ ID NO: 3360184 - DNA, 25 bp, Homo sapien
gacacattcaaaccgctttgggtct

SEQ ID NO: 3360185 - DNA, 25 bp, Homo sapien
tgttgtgggactttcacgtccttgg

SEQ ID NO: 3360186 - DNA, 25 bp, Homo sapien
aatgccacacaacagatgcttttga

SEQ ID NO: 3360187 - DNA, 25 bp, Homo sapien
tgcaggatcctgacccctaatgtct

SEQ ID NO: 3360188 - DNA, 25 bp, Homo sapien
ggatcctgacccctaatgtctttac

SEQ ID NO: 3360189 - DNA, 25 bp, Homo sapien
ctgcaggatcctgacccctaatgtc

SEQ ID NO: 3360190 - DNA, 25 bp, Homo sapien
caggatcctgacccctaatgtcttt

SEQ ID NO: 3360191 - DNA, 25 bp, Homo sapien
tgggcagcagaataagccggtattc

SEQ ID NO: 3360192 - DNA, 25 bp, Homo sapien
caggctgataacttctgggcagcag

SEQ ID NO: 3360193 - DNA, 25 bp, Homo sapien
catgaactctctcagcagattcact

SEQ ID NO: 3360194 - DNA, 25 bp, Homo sapien
aataagccggtattcatgaactctc

SEQ ID NO: 3360195 - DNA, 25 bp, Homo sapien
taacattgctcttccggttgtggtt

SEQ ID NO: 3360196 - DNA, 25 bp, Homo sapien
ttcctgtaaacagatcttaacttga

SEQ ID NO: 3360197 - DNA, 25 bp, Homo sapien
tccggttgtggttcctgtaaacaga

SEQ ID NO: 3360198 - DNA, 25 bp, Homo sapien
gctcttccggttgtggttcctgtaa

SEQ ID NO: 3360199 - DNA, 25 bp, Homo sapien
ctgatagttgtcatttccagagtgg

SEQ ID NO: 3360200 - DNA, 25 bp, Homo sapien
tcactgatagttgtcatttccagag

SEQ ID NO: 3360201 - DNA, 25 bp, Homo sapien
gttgtcatttccagagtggttgcag

SEQ ID NO: 3360202 - DNA, 25 bp, Homo sapien
tgtttcactgatagttgtcatttcc

SEQ ID NO: 3360203 - DNA, 25 bp, Homo sapien
atttctgtagttctcagaacaactt

SEQ ID NO: 3360204 - DNA, 25 bp, Homo sapien
aggttgtgggcttcccatgtaccct

SEQ ID NO: 3360205 - DNA, 25 bp, Homo sapien
atttcaggaatcttgccagtgttga

SEQ ID NO: 3360206 - DNA, 25 bp, Homo sapien
ccagtgttgatgattggctgaaggt

SEQ ID NO: 3360207 - DNA, 25 bp, Homo sapien
ctgttggtggcaatggaagcaagtt

SEQ ID NO: 3360208 - DNA, 25 bp, Homo sapien
gtcctctcccattctaagtgcgcca

SEQ ID NO: 3360209 - DNA, 25 bp, Homo sapien
ttctaagtgcgccatagcccattag

SEQ ID NO: 3360210 - DNA, 25 bp, Homo sapien
aagtgcgccatagcccattagggtc

SEQ ID NO: 3360211 - DNA, 25 bp, Homo sapien
tcattggttcttgtgttttggagat

SEQ ID NO: 3360212 - DNA, 25 bp, Homo sapien
agaattctggggcaatttgcttgtg

SEQ ID NO: 3360213 - DNA, 25 bp, Homo sapien
tgtttagcacatgttctcttcccag

SEQ ID NO: 3360214 - DNA, 25 bp, Homo sapien
aatctgtttagcacatgttctcttc

SEQ ID NO: 3360215 - DNA, 25 bp, Homo sapien
aggcaggaatctgtttagcacatgt

SEQ ID NO: 3360216 - DNA, 25 bp, Homo sapien
tgagatctgccgctgctgaggactg

SEQ ID NO: 3360217 - DNA, 25 bp, Homo sapien
cacagtgtcttgtatcttggaacaa

SEQ ID NO: 3360218 - DNA, 25 bp, Homo sapien
gccacagtccaacacgtgaggtgac

SEQ ID NO: 3360219 - DNA, 25 bp, Homo sapien
tctgcacacagtgtcttgtatcttg

SEQ ID NO: 3360220 - DNA, 25 bp, Homo sapien
tagggtctcacatagccacactcag

SEQ ID NO: 3360221 - DNA, 25 bp, Homo sapien
gagtcagtcaattcagttgccggca

SEQ ID NO: 3360222 - DNA, 25 bp, Homo sapien
catgggcaaacctttactgagtact

SEQ ID NO: 3360223 - DNA, 25 bp, Homo sapien
caggtgtcttcgaagtagttcaaca

SEQ ID NO: 3360224 - DNA, 25 bp, Homo sapien
cattcatttgacagggcagtaggag

SEQ ID NO: 3360225 - DNA, 25 bp, Homo sapien
caagaggagtatcttgaggagatct

SEQ ID NO: 3360226 - DNA, 25 bp, Homo sapien
cctctgggaacgttttgataattca

SEQ ID NO: 3360227 - DNA, 25 bp, Homo sapien
taggttgtttgcttccggtagcagg

SEQ ID NO: 3360228 - DNA, 25 bp, Homo sapien
gaagatcagtgtcatgaccacatga

SEQ ID NO: 3360229 - DNA, 25 bp, Homo sapien
cacatgaatttactctgttaaccat

SEQ ID NO: 3360230 - DNA, 25 bp, Homo sapien
ttaagctgccggtgtagtggattct

SEQ ID NO: 3360231 - DNA, 25 bp, Homo sapien
ctgaggtgataaacttgcttccaca

SEQ ID NO: 3360232 - DNA, 25 bp, Homo sapien
tcacctgttcctcttggtgtagtaa

SEQ ID NO: 3360233 - DNA, 25 bp, Homo sapien
acctgttcctcttggtgtagtaaag

SEQ ID NO: 3360234 - DNA, 25 bp, Homo sapien
cacctgttcctcttggtgtagtaaa

SEQ ID NO: 3360235 - DNA, 25 bp, Homo sapien
ttattgctggagaggtagaggcctc

SEQ ID NO: 3360236 - DNA, 25 bp, Homo sapien
attgctggagaggtagaggcctctg

SEQ ID NO: 3360237 - DNA, 25 bp, Homo sapien
tattgctggagaggtagaggcctct

SEQ ID NO: 3360238 - DNA, 25 bp, Homo sapien
ttgctggagaggtagaggcctctgc

SEQ ID NO: 3360239 - DNA, 25 bp, Homo sapien
gaagaggccttggataaatctgagt

SEQ ID NO: 3360240 - DNA, 25 bp, Homo sapien
cacatatgcgaagagaagaggcctt

SEQ ID NO: 3360241 - DNA, 25 bp, Homo sapien
gagtacgaggccacaacatctcaca

SEQ ID NO: 3360242 - DNA, 25 bp, Homo sapien
atttgaacctctgaacagccacata

SEQ ID NO: 3360243 - DNA, 25 bp, Homo sapien
tttccatacatactcggttttccta

SEQ ID NO: 3360244 - DNA, 25 bp, Homo sapien
tttcaggcagttaagtttccataca

SEQ ID NO: 3360245 - DNA, 25 bp, Homo sapien
ctggttgagtaacgaatatttcagg

SEQ ID NO: 3360246 - DNA, 25 bp, Homo sapien
tccatacatactcggttttcctatg

SEQ ID NO: 3360247 - DNA, 25 bp, Homo sapien
ttgtcttcatgtagaatcaaggcca

SEQ ID NO: 3360248 - DNA, 25 bp, Homo sapien
cttgtcttcatgtagaatcaaggcc

SEQ ID NO: 3360249 - DNA, 25 bp, Homo sapien
tgtgtagtcgttgatccagaaatac

SEQ ID NO: 3360250 - DNA, 25 bp, Homo sapien
tattcgggcattacagagagttagg

SEQ ID NO: 3360251 - DNA, 25 bp, Homo sapien
ccagaaatacgctctcataggatag

SEQ ID NO: 3360252 - DNA, 25 bp, Homo sapien
cactagtatgaatgtatattcgggc

SEQ ID NO: 3360253 - DNA, 25 bp, Homo sapien
tgtccaagcaaattaccatttatat

SEQ ID NO: 3360254 - DNA, 25 bp, Homo sapien
taaagagcacacgttatagaaattc

SEQ ID NO: 3360255 - DNA, 25 bp, Homo sapien
tttatgtccaagcaaattaccattt

SEQ ID NO: 3360256 - DNA, 25 bp, Homo sapien
agcctttcattaaagagcacacgtt

SEQ ID NO: 3360257 - DNA, 25 bp, Homo sapien
gacagacggcaaagttgctgttcta

SEQ ID NO: 3360258 - DNA, 25 bp, Homo sapien
caagattctagtttcggaccctgca

SEQ ID NO: 3360259 - DNA, 25 bp, Homo sapien
ttcggaccctgcaatgattcgctgg

SEQ ID NO: 3360260 - DNA, 25 bp, Homo sapien
tctattgacaagattctagtttcgg

SEQ ID NO: 3360261 - DNA, 25 bp, Homo sapien
gatttgagtaatgcaatatgtggta

SEQ ID NO: 3360262 - DNA, 25 bp, Homo sapien
aatgcaatatgtggtataatcccac

SEQ ID NO: 3360263 - DNA, 25 bp, Homo sapien
ttcacattttagatagcaacctttt

SEQ ID NO: 3360264 - DNA, 25 bp, Homo sapien
cacattttagatagcaacctttttt

SEQ ID NO: 3360265 - DNA, 25 bp, Homo sapien
ccagaaataagccaatggctgtgtc

SEQ ID NO: 3360266 - DNA, 25 bp, Homo sapien
gaaataagccaatggctgtgtccat

SEQ ID NO: 3360267 - DNA, 25 bp, Homo sapien
cagaaataagccaatggctgtgtcc

SEQ ID NO: 3360268 - DNA, 25 bp, Homo sapien
tgccagaaataagccaatggctgtg

SEQ ID NO: 3360269 - DNA, 25 bp, Homo sapien
tacaatgccagtaaatttcctcgtg

SEQ ID NO: 3360270 - DNA, 25 bp, Homo sapien
caaaaccaacaatagagtcagcatc

SEQ ID NO: 3360271 - DNA, 25 bp, Homo sapien
gctttggctccggttcagggccatc

SEQ ID NO: 3360272 - DNA, 25 bp, Homo sapien
cacaaatgaaagtgtgagtctcaga

SEQ ID NO: 3360273 - DNA, 25 bp, Homo sapien
aaaccagaacgtgtggtgcagtaca

SEQ ID NO: 3360274 - DNA, 25 bp, Homo sapien
gcatagaacatacttcatccctgaa

SEQ ID NO: 3360275 - DNA, 25 bp, Homo sapien
cttcatccctgaaaccagaacgtgt

SEQ ID NO: 3360276 - DNA, 25 bp, Homo sapien
cagatctgcatagaacatacttcat

SEQ ID NO: 3360277 - DNA, 25 bp, Homo sapien
cccgtaagtaaggtgacagcagtag

SEQ ID NO: 3360278 - DNA, 25 bp, Homo sapien
ctggcttcccgtaagtaaggtgaca

SEQ ID NO: 3360279 - DNA, 25 bp, Homo sapien
gcttcccgtaagtaaggtgacagca

SEQ ID NO: 3360280 - DNA, 25 bp, Homo sapien
tctcacctggcttcccgtaagtaag

SEQ ID NO: 3360281 - DNA, 25 bp, Homo sapien
ggttttgaggacctgtattcacagg

SEQ ID NO: 3360282 - DNA, 25 bp, Homo sapien
ttgggatctcaatgggatcactggc

SEQ ID NO: 3360283 - DNA, 25 bp, Homo sapien
tcacaggactttgcagtagactgtc

SEQ ID NO: 3360284 - DNA, 25 bp, Homo sapien
ctggtccaactgcttttaaaagttg

SEQ ID NO: 3360285 - DNA, 25 bp, Homo sapien
acagatgtaggaaaggatagttcca

SEQ ID NO: 3360286 - DNA, 25 bp, Homo sapien
ggtgcgtgcctggacgatgacttca

SEQ ID NO: 3360287 - DNA, 25 bp, Homo sapien
gatgacttcaagtctgcggcactga

SEQ ID NO: 3360288 - DNA, 25 bp, Homo sapien
tgtgtaacatgctcagggtatggat

SEQ ID NO: 3360289 - DNA, 25 bp, Homo sapien
tttcttctatgaaagtgtggttccc

SEQ ID NO: 3360290 - DNA, 25 bp, Homo sapien
gtgtggttcccagatgtagtgagat

SEQ ID NO: 3360291 - DNA, 25 bp, Homo sapien
cccagatgtagtgagattgcactta

SEQ ID NO: 3360292 - DNA, 25 bp, Homo sapien
cattgcggggaattgttctttttct

SEQ ID NO: 3360293 - DNA, 25 bp, Homo sapien
ttaatagttggatatttctcaggca

SEQ ID NO: 3360294 - DNA, 25 bp, Homo sapien
gttaatagttggatatttctcaggc

SEQ ID NO: 3360295 - DNA, 25 bp, Homo sapien
ttgttaatagttggatatttctcag

SEQ ID NO: 3360296 - DNA, 25 bp, Homo sapien
ttttgttaatagttggatatttctc

SEQ ID NO: 3360297 - DNA, 25 bp, Homo sapien
tagtcttttggcaatggtgaagtgc

SEQ ID NO: 3360298 - DNA, 25 bp, Homo sapien
caatgaaggcgtcttctgaagggcc

SEQ ID NO: 3360299 - DNA, 25 bp, Homo sapien
cagaggaaagggctgttgatagtct

SEQ ID NO: 3360300 - DNA, 25 bp, Homo sapien
gaagtgccacttgggaatagtgttc

SEQ ID NO: 3360301 - DNA, 25 bp, Homo sapien
tcagggatgtgtagtgggcatgggt

SEQ ID NO: 3360302 - DNA, 25 bp, Homo sapien
ggcatgggtaccacagcggagtttt

SEQ ID NO: 3360303 - DNA, 25 bp, Homo sapien
ggtaccacagcggagttttgtccat

SEQ ID NO: 3360304 - DNA, 25 bp, Homo sapien
atgtgtagtgggcatgggtaccaca

SEQ ID NO: 3360305 - DNA, 25 bp, Homo sapien
tccacttgaccttgacatatttggg

SEQ ID NO: 3360306 - DNA, 25 bp, Homo sapien
ctctcagggcagaacaaatccagcc

SEQ ID NO: 3360307 - DNA, 25 bp, Homo sapien
cctctcagggcagaacaaatccagc

SEQ ID NO: 3360308 - DNA, 25 bp, Homo sapien
tcctcccatggtatccacttgacct

SEQ ID NO: 3360309 - DNA, 25 bp, Homo sapien
ccctgtgagtccaagctcccctgtc

SEQ ID NO: 3360310 - DNA, 25 bp, Homo sapien
ctgtgagtccaagctcccctgtcat

SEQ ID NO: 3360311 - DNA, 25 bp, Homo sapien
cctgtgagtccaagctcccctgtca

SEQ ID NO: 3360312 - DNA, 25 bp, Homo sapien
cggcagagtcagtagtggagttcat

SEQ ID NO: 3360313 - DNA, 25 bp, Homo sapien
agcagatggcagttaggcgactttc

SEQ ID NO: 3360314 - DNA, 25 bp, Homo sapien
cataagtgccatcgttgcaaacggc

SEQ ID NO: 3360315 - DNA, 25 bp, Homo sapien
taggcgactttctacataagtgcca

SEQ ID NO: 3360316 - DNA, 25 bp, Homo sapien
tagcaccatctgaagagctaccaga

SEQ ID NO: 3360317 - DNA, 25 bp, Homo sapien
gagtgcagcatttggcacgtcccgc

SEQ ID NO: 3360318 - DNA, 25 bp, Homo sapien
cagagcaagcaccttgcggaagggc

SEQ ID NO: 3360319 - DNA, 25 bp, Homo sapien
gaagggccgtaagcatattcttgag

SEQ ID NO: 3360320 - DNA, 25 bp, Homo sapien
tatagtaagggtttctgtgaagtta

SEQ ID NO: 3360321 - DNA, 25 bp, Homo sapien
gtagttgtgtacgagattttgtaac

SEQ ID NO: 3360322 - DNA, 25 bp, Homo sapien
tgatcagcatcactactttttgtag

SEQ ID NO: 3360323 - DNA, 25 bp, Homo sapien
ctgacttgggaggagtggttcccgg

SEQ ID NO: 3360324 - DNA, 25 bp, Homo sapien
caatctgagatctgcactgaactga

SEQ ID NO: 3360325 - DNA, 25 bp, Homo sapien
aatctgagatctgcactgaactgac

SEQ ID NO: 3360326 - DNA, 25 bp, Homo sapien
tcaatctgagatctgcactgaactg

SEQ ID NO: 3360327 - DNA, 25 bp, Homo sapien
cctgctggccgagtctgctgtggac

SEQ ID NO: 3360328 - DNA, 25 bp, Homo sapien
cagtgctctaatctgggtgtcaggc

SEQ ID NO: 3360329 - DNA, 25 bp, Homo sapien
ggctgcgaacgctaaagatttgctt

SEQ ID NO: 3360330 - DNA, 25 bp, Homo sapien
cacttcttgattcaggacactgaaa

SEQ ID NO: 3360331 - DNA, 25 bp, Homo sapien
cagtaacagtgatggattcgcttgt

SEQ ID NO: 3360332 - DNA, 25 bp, Homo sapien
tgctaatcctatttggcctccattt

SEQ ID NO: 3360333 - DNA, 25 bp, Homo sapien
tccacaccttcgatttctgttaaat

SEQ ID NO: 3360334 - DNA, 25 bp, Homo sapien
ttcgcttgtctgagatcctttccac

SEQ ID NO: 3360335 - DNA, 25 bp, Homo sapien
accttttgtccagacctggaggtct

SEQ ID NO: 3360336 - DNA, 25 bp, Homo sapien
cagacctggaggtctgttttcatct

SEQ ID NO: 3360337 - DNA, 25 bp, Homo sapien
gacctggaggtctgttttcatctct

SEQ ID NO: 3360338 - DNA, 25 bp, Homo sapien
tccagacctggaggtctgttttcat

SEQ ID NO: 3360339 - DNA, 25 bp, Homo sapien
atgtctggcttataaagacgatctg

SEQ ID NO: 3360340 - DNA, 25 bp, Homo sapien
ggcttataaagacgatctgtgacag

SEQ ID NO: 3360341 - DNA, 25 bp, Homo sapien
ctcatcagtttatagcactgaaatg

SEQ ID NO: 3360342 - DNA, 25 bp, Homo sapien
cttataaagacgatctgtgacagaa

SEQ ID NO: 3360343 - DNA, 25 bp, Homo sapien
tccaggctgccagtcggattctccc

SEQ ID NO: 3360344 - DNA, 25 bp, Homo sapien
aggctgccagtcggattctcccttt

SEQ ID NO: 3360345 - DNA, 25 bp, Homo sapien
caggctgccagtcggattctccctt

SEQ ID NO: 3360346 - DNA, 25 bp, Homo sapien
ccaggctgccagtcggattctccct

SEQ ID NO: 3360347 - DNA, 25 bp, Homo sapien
tgctgcttgaacagcatgcctctta

SEQ ID NO: 3360348 - DNA, 25 bp, Homo sapien
gctgcttgaacagcatgcctcttag

SEQ ID NO: 3360349 - DNA, 25 bp, Homo sapien
tgtggacccaattagcacagtttgc

SEQ ID NO: 3360350 - DNA, 25 bp, Homo sapien
gcacagtttgcagccacttcataat

SEQ ID NO: 3360351 - DNA, 25 bp, Homo sapien
ccaattagcacagtttgcagccact

SEQ ID NO: 3360352 - DNA, 25 bp, Homo sapien
gcagccacttcataattcaaaagaa

SEQ ID NO: 3360353 - DNA, 25 bp, Homo sapien
ctggagcaggatgactagttttcag

SEQ ID NO: 3360354 - DNA, 25 bp, Homo sapien
gcagctttgattacactctccaggc

SEQ ID NO: 3360355 - DNA, 25 bp, Homo sapien
gatagtccttggcataaatccatgc

SEQ ID NO: 3360356 - DNA, 25 bp, Homo sapien
tttcagttgtgcaatggaggcagct

SEQ ID NO: 3360357 - DNA, 25 bp, Homo sapien
gcaacttcagggcaattgagatcag

SEQ ID NO: 3360358 - DNA, 25 bp, Homo sapien
caattgagatcagctggtggtctgc

SEQ ID NO: 3360359 - DNA, 25 bp, Homo sapien
acttcagggcaattgagatcagctg

SEQ ID NO: 3360360 - DNA, 25 bp, Homo sapien
tcagggcaattgagatcagctggtg

SEQ ID NO: 3360361 - DNA, 25 bp, Homo sapien
caggcagagttgctccagaagaggc

SEQ ID NO: 3360362 - DNA, 25 bp, Homo sapien
gaccacctgctgcactttcaggcag

SEQ ID NO: 3360363 - DNA, 25 bp, Homo sapien
accaacccagttcttcgtgacctct

SEQ ID NO: 3360364 - DNA, 25 bp, Homo sapien
tccttcctgcccactgatgttgttg

SEQ ID NO: 3360365 - DNA, 25 bp, Homo sapien
cccagatagatggtgctcttttctc

SEQ ID NO: 3360366 - DNA, 25 bp, Homo sapien
tgtcagaactatatttggcagatgc

SEQ ID NO: 3360367 - DNA, 25 bp, Homo sapien
gagacaaataacagaccccagatag

SEQ ID NO: 3360368 - DNA, 25 bp, Homo sapien
tggaaacaatctatgcgattgagac

SEQ ID NO: 3360369 - DNA, 25 bp, Homo sapien
ttcctatatccatccggcagtaatt

SEQ ID NO: 3360370 - DNA, 25 bp, Homo sapien
ccggcagtaattttccaggagaaat

SEQ ID NO: 3360371 - DNA, 25 bp, Homo sapien
catccggcagtaattttccaggaga

SEQ ID NO: 3360372 - DNA, 25 bp, Homo sapien
tatccatccggcagtaattttccag

SEQ ID NO: 3360373 - DNA, 25 bp, Homo sapien
gaatgtcactaccattacaattttg

SEQ ID NO: 3360374 - DNA, 25 bp, Homo sapien
tctggaaaaataagcgtgtaatttg

SEQ ID NO: 3360375 - DNA, 25 bp, Homo sapien
tacaaccccttttactgcatatgtt

SEQ ID NO: 3360376 - DNA, 25 bp, Homo sapien
aaaatgaatgtcactaccattacaa

SEQ ID NO: 3360377 - DNA, 25 bp, Homo sapien
gaaaaatccattcgggcagtcacaa

SEQ ID NO: 3360378 - DNA, 25 bp, Homo sapien
tcaggttagaggagagctcagcaca

SEQ ID NO: 3360379 - DNA, 25 bp, Homo sapien
taaaaggttggcatgtgcaagccca

SEQ ID NO: 3360380 - DNA, 25 bp, Homo sapien
ccaagtggccacaggttatcaatga

SEQ ID NO: 3360381 - DNA, 25 bp, Homo sapien
ggctcccagttgacttcttggtaca

SEQ ID NO: 3360382 - DNA, 25 bp, Homo sapien
tgtttgcacatgctccaaagtctgt

SEQ ID NO: 3360383 - DNA, 25 bp, Homo sapien
taaatatcccatatcctgaacaggc

SEQ ID NO: 3360384 - DNA, 25 bp, Homo sapien
tgtgctcaaagctgacaaagataaa

SEQ ID NO: 3360385 - DNA, 25 bp, Homo sapien
cacagacaacctctctgactataat

SEQ ID NO: 3360386 - DNA, 25 bp, Homo sapien
tataattgccccattacaggagtga

SEQ ID NO: 3360387 - DNA, 25 bp, Homo sapien
gatcaactgagacgtcattgccaaa

SEQ ID NO: 3360388 - DNA, 25 bp, Homo sapien
gagggcttgggttacatcacagaca

SEQ ID NO: 3360389 - DNA, 25 bp, Homo sapien
cgtaattagtattgtggttaagatc

SEQ ID NO: 3360390 - DNA, 25 bp, Homo sapien
tgcccttaagattaataacctcgta

SEQ ID NO: 3360391 - DNA, 25 bp, Homo sapien
acagatgttgcccttaagattaata

SEQ ID NO: 3360392 - DNA, 25 bp, Homo sapien
aataacctcgtaattagtattgtgg

SEQ ID NO: 3360393 - DNA, 25 bp, Homo sapien
ttgtgatctacccatgttggaaagt

SEQ ID NO: 3360394 - DNA, 25 bp, Homo sapien
gcctctggtattcttgcctataaac

SEQ ID NO: 3360395 - DNA, 25 bp, Homo sapien
tgtgatctacccatgttggaaagtg

SEQ ID NO: 3360396 - DNA, 25 bp, Homo sapien
tgcgcccagcgcctctggtattctt

SEQ ID NO: 3360397 - DNA, 25 bp, Homo sapien
gatgggcttatcttgaacacgggct

SEQ ID NO: 3360398 - DNA, 25 bp, Homo sapien
gctgatatacacttccaggagatgg

SEQ ID NO: 3360399 - DNA, 25 bp, Homo sapien
gtgaagaacaatctccctcagtgag

SEQ ID NO: 3360400 - DNA, 25 bp, Homo sapien
aaggtcttttgcacacagtcggaac

SEQ ID NO: 3360401 - DNA, 25 bp, Homo sapien
ctcaggggaccgaagaagaaagctt

SEQ ID NO: 3360402 - DNA, 25 bp, Homo sapien
tcactagcctactcaggggaccgaa

SEQ ID NO: 3360403 - DNA, 25 bp, Homo sapien
gcctactcaggggaccgaagaagaa

SEQ ID NO: 3360404 - DNA, 25 bp, Homo sapien
gttgtcactagcctactcaggggac

SEQ ID NO: 3360405 - DNA, 25 bp, Homo sapien
ttctgggactcctagctgagcgccc

SEQ ID NO: 3360406 - DNA, 25 bp, Homo sapien
tattctgggactcctagctgagcgc

SEQ ID NO: 3360407 - DNA, 25 bp, Homo sapien
tgggactcctagctgagcgcccagc

SEQ ID NO: 3360408 - DNA, 25 bp, Homo sapien
gactcctagctgagcgcccagcagg

SEQ ID NO: 3360409 - DNA, 25 bp, Homo sapien
tgataagtatatatccagtacactt

SEQ ID NO: 3360410 - DNA, 25 bp, Homo sapien
gcagttgataagtatatatccagta

SEQ ID NO: 3360411 - DNA, 25 bp, Homo sapien
tccacaggggaaatgagcagttgat

SEQ ID NO: 3360412 - DNA, 25 bp, Homo sapien
gagcagttgataagtatatatccag

SEQ ID NO: 3360413 - DNA, 25 bp, Homo sapien
gtttgtaactccttccaagcagctc

SEQ ID NO: 3360414 - DNA, 25 bp, Homo sapien
cagtttgtaactccttccaagcagc

SEQ ID NO: 3360415 - DNA, 25 bp, Homo sapien
aagcagctcagttctggatctgctc

SEQ ID NO: 3360416 - DNA, 25 bp, Homo sapien
tcagtttgtaactccttccaagcag

SEQ ID NO: 3360417 - DNA, 25 bp, Homo sapien
taggcaaacatagacaaaacactgg

SEQ ID NO: 3360418 - DNA, 25 bp, Homo sapien
aacactggaacctttggtggtccag

SEQ ID NO: 3360419 - DNA, 25 bp, Homo sapien
tctaaaggacttgcaaacaaaaagc

SEQ ID NO: 3360420 - DNA, 25 bp, Homo sapien
gcagattcaaggtatgggtcaaaga

SEQ ID NO: 3360421 - DNA, 25 bp, Homo sapien
ttctgggtacacatagctaaactac

SEQ ID NO: 3360422 - DNA, 25 bp, Homo sapien
aaactacgatactccttacccacag

SEQ ID NO: 3360423 - DNA, 25 bp, Homo sapien
catagctaaactacgatactcctta

SEQ ID NO: 3360424 - DNA, 25 bp, Homo sapien
tactccttacccacagattttggca

SEQ ID NO: 3360425 - DNA, 25 bp, Homo sapien
tacacatgcctgatctttgagttgc

SEQ ID NO: 3360426 - DNA, 25 bp, Homo sapien
gaatccctggcgaagtgtttcctcc

SEQ ID NO: 3360427 - DNA, 25 bp, Homo sapien
aataccactggaaactgcattccca

SEQ ID NO: 3360428 - DNA, 25 bp, Homo sapien
ttcccaggaacaatggaatccctgg

SEQ ID NO: 3360429 - DNA, 25 bp, Homo sapien
ccttttcttggatccagaaacagtc

SEQ ID NO: 3360430 - DNA, 25 bp, Homo sapien
atccagaaacagtcaataccagcat

SEQ ID NO: 3360431 - DNA, 25 bp, Homo sapien
cactcgccttttcttggatccagaa

SEQ ID NO: 3360432 - DNA, 25 bp, Homo sapien
aaccactcgccttttcttggatcca

SEQ ID NO: 3360433 - DNA, 25 bp, Homo sapien
ttttactctcggtattgtatctcca

SEQ ID NO: 3360434 - DNA, 25 bp, Homo sapien
ttactctcggtattgtatctccatt

SEQ ID NO: 3360435 - DNA, 25 bp, Homo sapien
tctttttactctcggtattgtatct

SEQ ID NO: 3360436 - DNA, 25 bp, Homo sapien
atatctttttactctcggtattgta

SEQ ID NO: 3360437 - DNA, 25 bp, Homo sapien
ctgagctgtgcacggattagggaat

SEQ ID NO: 3360438 - DNA, 25 bp, Homo sapien
ttttgtgattcacactctcagtgga

SEQ ID NO: 3360439 - DNA, 25 bp, Homo sapien
cagtggattccttgcgtttggaaaa

SEQ ID NO: 3360440 - DNA, 25 bp, Homo sapien
ctgacacctcagtccaagaaacctg

SEQ ID NO: 3360441 - DNA, 25 bp, Homo sapien
catccacttcggcatgctttccagg

SEQ ID NO: 3360442 - DNA, 25 bp, Homo sapien
ttcctagtgtgatatgtgaaagggt

SEQ ID NO: 3360443 - DNA, 25 bp, Homo sapien
tccaggacccttcaatcgcagttga

SEQ ID NO: 3360444 - DNA, 25 bp, Homo sapien
agggtttgcctcaccactttactct

SEQ ID NO: 3360445 - DNA, 25 bp, Homo sapien
gcggatgtaacattggactcagcaa

SEQ ID NO: 3360446 - DNA, 25 bp, Homo sapien
acagtggcctggttgcaacgctaat

SEQ ID NO: 3360447 - DNA, 25 bp, Homo sapien
taagcacgattctccttcgtggcca

SEQ ID NO: 3360448 - DNA, 25 bp, Homo sapien
gtcgtttctgttttcatacctgctc

SEQ ID NO: 3360449 - DNA, 25 bp, Homo sapien
ggaacaacctcttgatgtacaatca

SEQ ID NO: 3360450 - DNA, 25 bp, Homo sapien
ctgagatgtttaagtctggaacaac

SEQ ID NO: 3360451 - DNA, 25 bp, Homo sapien
catgtggcccactcaaactgtttcg

SEQ ID NO: 3360452 - DNA, 25 bp, Homo sapien
tctttgcagcctgagtaattaagtc

SEQ ID NO: 3360453 - DNA, 25 bp, Homo sapien
gagatttcttagtttgacgcgctca

SEQ ID NO: 3360454 - DNA, 25 bp, Homo sapien
ttcttagtttgacgcgctcagcagg

SEQ ID NO: 3360455 - DNA, 25 bp, Homo sapien
tgagcgcctggcaatgcttcagcat

SEQ ID NO: 3360456 - DNA, 25 bp, Homo sapien
gcattctgagctttgaaagtctttc

SEQ ID NO: 3360457 - DNA, 25 bp, Homo sapien
aggtgtctgagtctcatcagtgcct

SEQ ID NO: 3360458 - DNA, 25 bp, Homo sapien
agtctcatcagtgccttctccacag

SEQ ID NO: 3360459 - DNA, 25 bp, Homo sapien
caggtgttggatgccatttggtgta

SEQ ID NO: 3360460 - DNA, 25 bp, Homo sapien
tctgagtctcatcagtgccttctcc

SEQ ID NO: 3360461 - DNA, 25 bp, Homo sapien
gactatcatgtaaaagccactcaaa

SEQ ID NO: 3360462 - DNA, 25 bp, Homo sapien
gatgagccggaactgtccggaagct

SEQ ID NO: 3360463 - DNA, 25 bp, Homo sapien
gcctgtgagtttcgcatggaatccg

SEQ ID NO: 3360464 - DNA, 25 bp, Homo sapien
taaaacgacatacagcaggtgggcc

SEQ ID NO: 3360465 - DNA, 25 bp, Homo sapien
ggttaccctgtagttcatttccaca

SEQ ID NO: 3360466 - DNA, 25 bp, Homo sapien
gggaatccatacagcccttgccatc

SEQ ID NO: 3360467 - DNA, 25 bp, Homo sapien
tcagggtcaagtactcccagcgaga

SEQ ID NO: 3360468 - DNA, 25 bp, Homo sapien
tactcccagcgagagccagggaatc

SEQ ID NO: 3360469 - DNA, 25 bp, Homo sapien
cagtgctataaaatggagtgttcca

SEQ ID NO: 3360470 - DNA, 25 bp, Homo sapien
tcggattggatgatgcttcctcagc

SEQ ID NO: 3360471 - DNA, 25 bp, Homo sapien
ttcagtgctataaaatggagtgttc

SEQ ID NO: 3360472 - DNA, 25 bp, Homo sapien
tccaattcctacaattgaatgtcgg

SEQ ID NO: 3360473 - DNA, 25 bp, Homo sapien
cgccctccaggcaacatatgttatt

SEQ ID NO: 3360474 - DNA, 25 bp, Homo sapien
ccctccaggcaacatatgttattaa

SEQ ID NO: 3360475 - DNA, 25 bp, Homo sapien
gccctccaggcaacatatgttatta

SEQ ID NO: 3360476 - DNA, 25 bp, Homo sapien
gaaatcctgagagagctactttttg

SEQ ID NO: 3360477 - DNA, 25 bp, Homo sapien
ctcaaaaggcttcacgtcgagatgt

SEQ ID NO: 3360478 - DNA, 25 bp, Homo sapien
gatgtttatctggacctcttgcctt

SEQ ID NO: 3360479 - DNA, 25 bp, Homo sapien
caagggttctgttgacacatacttc

SEQ ID NO: 3360480 - DNA, 25 bp, Homo sapien
tatttgcgtaggagctcgggtgaac

SEQ ID NO: 3360481 - DNA, 25 bp, Homo sapien
taaaacacgcatggcaggagacact

SEQ ID NO: 3360482 - DNA, 25 bp, Homo sapien
tgagaatactaagaggacaacgctg

SEQ ID NO: 3360483 - DNA, 25 bp, Homo sapien
ggcagcctgcttagagtaaaacacg

SEQ ID NO: 3360484 - DNA, 25 bp, Homo sapien
tctccctttgtgtacgtgaggatag

SEQ ID NO: 3360485 - DNA, 25 bp, Homo sapien
gaaggttctgagtgactgattttct

SEQ ID NO: 3360486 - DNA, 25 bp, Homo sapien
tgtcactgttagacctgacccatgg

SEQ ID NO: 3360487 - DNA, 25 bp, Homo sapien
tggtccccatagaccagaaggttct

SEQ ID NO: 3360488 - DNA, 25 bp, Homo sapien
gatgaatgacgttctagtccacaga

SEQ ID NO: 3360489 - DNA, 25 bp, Homo sapien
tgcaatgatgaatgacgttctagtc

SEQ ID NO: 3360490 - DNA, 25 bp, Homo sapien
gcctggattagggtcttcgtgttaa

SEQ ID NO: 3360491 - DNA, 25 bp, Homo sapien
tcgtgttaaagttcgttttagcatc

SEQ ID NO: 3360492 - DNA, 25 bp, Homo sapien
ttcctcagagccatcagctgaagct

SEQ ID NO: 3360493 - DNA, 25 bp, Homo sapien
ctcagagccatcagctgaagctggg

SEQ ID NO: 3360494 - DNA, 25 bp, Homo sapien
tgaagctgggtgctctctgcatctc

SEQ ID NO: 3360495 - DNA, 25 bp, Homo sapien
gaggtcttcctcagagccatcagct

SEQ ID NO: 3360496 - DNA, 25 bp, Homo sapien
aatacttgctctattaatagcctcg

SEQ ID NO: 3360497 - DNA, 25 bp, Homo sapien
tattaatagcctcgagtgtagctct

SEQ ID NO: 3360498 - DNA, 25 bp, Homo sapien
gttggaataagctattgttaagcac

SEQ ID NO: 3360499 - DNA, 25 bp, Homo sapien
cctcgagtgtagctctttgttggaa

SEQ ID NO: 3360500 - DNA, 25 bp, Homo sapien
tccctggttgaggctgagaatgggg

SEQ ID NO: 3360501 - DNA, 25 bp, Homo sapien
ctccctggttgaggctgagaatggg

SEQ ID NO: 3360502 - DNA, 25 bp, Homo sapien
catggaaaacttctccactaattgg

SEQ ID NO: 3360503 - DNA, 25 bp, Homo sapien
cttctccactaattggctgacattc

SEQ ID NO: 3360504 - DNA, 25 bp, Homo sapien
gacaggaagcctggttagggcagca

SEQ ID NO: 3360505 - DNA, 25 bp, Homo sapien
ggatcagcagctgttgaagcaaatt

SEQ ID NO: 3360506 - DNA, 25 bp, Homo sapien
ttgtccatctctcatggccacagcc

SEQ ID NO: 3360507 - DNA, 25 bp, Homo sapien
tctccttgtccatctctcatggcca

SEQ ID NO: 3360508 - DNA, 25 bp, Homo sapien
tccttgtccatctctcatggccaca

SEQ ID NO: 3360509 - DNA, 25 bp, Homo sapien
ccttgtccatctctcatggccacag

SEQ ID NO: 3360510 - DNA, 25 bp, Homo sapien
caattataaggtcattagcaccaac

SEQ ID NO: 3360511 - DNA, 25 bp, Homo sapien
gatgctagcacactgattgcacctg

SEQ ID NO: 3360512 - DNA, 25 bp, Homo sapien
tagacatagacagaagcggcttgag

SEQ ID NO: 3360513 - DNA, 25 bp, Homo sapien
catcactcggtcaggcaaagggaga

SEQ ID NO: 3360514 - DNA, 25 bp, Homo sapien
gtcagggagacaagatacatcacag

SEQ ID NO: 3360515 - DNA, 25 bp, Homo sapien
cctctttgaggctcaatgacctcat

SEQ ID NO: 3360516 - DNA, 25 bp, Homo sapien
gtcctctttgaggctcaatgacctc

SEQ ID NO: 3360517 - DNA, 25 bp, Homo sapien
tcctctttgaggctcaatgacctca

SEQ ID NO: 3360518 - DNA, 25 bp, Homo sapien
cgtcctctttgaggctcaatgacct

SEQ ID NO: 3360519 - DNA, 25 bp, Homo sapien
tgccaaattctctggtaggtcgttc

SEQ ID NO: 3360520 - DNA, 25 bp, Homo sapien
aattctctggtaggtcgttcctgcc

SEQ ID NO: 3360521 - DNA, 25 bp, Homo sapien
tctggtaggtcgttcctgccatcac

SEQ ID NO: 3360522 - DNA, 25 bp, Homo sapien
caaattctctggtaggtcgttcctg

SEQ ID NO: 3360523 - DNA, 25 bp, Homo sapien
tcagcccctgaaatttcttgtttgc

SEQ ID NO: 3360524 - DNA, 25 bp, Homo sapien
tgaagtggactctcgtggacaatga

SEQ ID NO: 3360525 - DNA, 25 bp, Homo sapien
tggacaatgatcaactgctcagccc

SEQ ID NO: 3360526 - DNA, 25 bp, Homo sapien
gctggtccctagaatccacttcaga

SEQ ID NO: 3360527 - DNA, 25 bp, Homo sapien
gatgtagagatttctggcctgccca

SEQ ID NO: 3360528 - DNA, 25 bp, Homo sapien
tacacagcaaacctttcgccagatg

SEQ ID NO: 3360529 - DNA, 25 bp, Homo sapien
tgcccatagggctggaaaaccctgc

SEQ ID NO: 3360530 - DNA, 25 bp, Homo sapien
gaccagtaggagtcagaagatatcc

SEQ ID NO: 3360531 - DNA, 25 bp, Homo sapien
cttcctccctggatgaaccaggtgt

SEQ ID NO: 3360532 - DNA, 25 bp, Homo sapien
ctggatgaaccaggtgtttcattct

SEQ ID NO: 3360533 - DNA, 25 bp, Homo sapien
tcctccctggatgaaccaggtgttt

SEQ ID NO: 3360534 - DNA, 25 bp, Homo sapien
ctccctggatgaaccaggtgtttca

SEQ ID NO: 3360535 - DNA, 25 bp, Homo sapien
tttcattgacagcattcattaagtt

SEQ ID NO: 3360536 - DNA, 25 bp, Homo sapien
attctttcattgacagcattcatta

SEQ ID NO: 3360537 - DNA, 25 bp, Homo sapien
tctttcattgacagcattcattaag

SEQ ID NO: 3360538 - DNA, 25 bp, Homo sapien
tcatattctttcattgacagcattc

SEQ ID NO: 3360539 - DNA, 25 bp, Homo sapien
cttgtgaaggaacacaatcgttttc

SEQ ID NO: 3360540 - DNA, 25 bp, Homo sapien
tattgtcttttggatcaaggtaatt

SEQ ID NO: 3360541 - DNA, 25 bp, Homo sapien
ttgtcttttggatcaaggtaatttg

SEQ ID NO: 3360542 - DNA, 25 bp, Homo sapien
acaatcgttttcttcctagggacag

SEQ ID NO: 3360543 - DNA, 25 bp, Homo sapien
gggatgttcataaatagcgctgttc

SEQ ID NO: 3360544 - DNA, 25 bp, Homo sapien
gtactggaccgaaggtggaccagca

SEQ ID NO: 3360545 - DNA, 25 bp, Homo sapien
tgaagaaatgatgtactggaccgaa

SEQ ID NO: 3360546 - DNA, 25 bp, Homo sapien
aagcagggatgttcataaatagcgc

SEQ ID NO: 3360547 - DNA, 25 bp, Homo sapien
tcactccaaccaataacctccgtta

SEQ ID NO: 3360548 - DNA, 25 bp, Homo sapien
cactccaaccaataacctccgttag

SEQ ID NO: 3360549 - DNA, 25 bp, Homo sapien
cttcactccaaccaataacctccgt

SEQ ID NO: 3360550 - DNA, 25 bp, Homo sapien
gagctgattacccagcaggcggtgc

SEQ ID NO: 3360551 - DNA, 25 bp, Homo sapien
cccgccgaggtctccccttgcagag

SEQ ID NO: 3360552 - DNA, 25 bp, Homo sapien
gagcgcagagctgattacccagcag

SEQ ID NO: 3360553 - DNA, 25 bp, Homo sapien
agaatggtgctgactgttccctggg

SEQ ID NO: 3360554 - DNA, 25 bp, Homo sapien
aaagtagtagcagctttggaaattc

SEQ ID NO: 3360555 - DNA, 25 bp, Homo sapien
cagctttggaaattctctctttagt

SEQ ID NO: 3360556 - DNA, 25 bp, Homo sapien
gtagcatctggtaggaaagtagtag

SEQ ID NO: 3360557 - DNA, 25 bp, Homo sapien
tcaatgagcggctttgaccctgaaa

SEQ ID NO: 3360558 - DNA, 25 bp, Homo sapien
gcaagcttcaggttgtaaccgcttt

SEQ ID NO: 3360559 - DNA, 25 bp, Homo sapien
ttgcttttgaaaatacaccggccat

SEQ ID NO: 3360560 - DNA, 25 bp, Homo sapien
caagcttcaggttgtaaccgctttt

SEQ ID NO: 3360561 - DNA, 25 bp, Homo sapien
gcttcaggttgtaaccgcttttgat

SEQ ID NO: 3360562 - DNA, 25 bp, Homo sapien
gcaaaatcttcttgccatggctgcc

SEQ ID NO: 3360563 - DNA, 25 bp, Homo sapien
gaatgctgacagactcagtggcaag

SEQ ID NO: 3360564 - DNA, 25 bp, Homo sapien
tactgggcagaaatcaaccagcagc

SEQ ID NO: 3360565 - DNA, 25 bp, Homo sapien
tctgagccttgcaataatatcctct

SEQ ID NO: 3360566 - DNA, 25 bp, Homo sapien
gtgtgctgccgacaataaagggtcg

SEQ ID NO: 3360567 - DNA, 25 bp, Homo sapien
cacaggtgtgctgccgacaataaag

SEQ ID NO: 3360568 - DNA, 25 bp, Homo sapien
caggtgtgctgccgacaataaaggg

SEQ ID NO: 3360569 - DNA, 25 bp, Homo sapien
ggtgtgctgccgacaataaagggtc

SEQ ID NO: 3360570 - DNA, 25 bp, Homo sapien
gtggaatgagcctccgcgtaagcca

SEQ ID NO: 3360571 - DNA, 25 bp, Homo sapien
gccgctgctcccgactgtggaatga

SEQ ID NO: 3360572 - DNA, 25 bp, Homo sapien
tgcagggaaactggagcagccattc

SEQ ID NO: 3360573 - DNA, 25 bp, Homo sapien
acactggagccgcacttgagcaggg

SEQ ID NO: 3360574 - DNA, 25 bp, Homo sapien
gatggagcccgcatctcctccgtga

SEQ ID NO: 3360575 - DNA, 25 bp, Homo sapien
ccgtgactgccgttgaaataatgaa

SEQ ID NO: 3360576 - DNA, 25 bp, Homo sapien
gcttactcccatgattcagctggca

SEQ ID NO: 3360577 - DNA, 25 bp, Homo sapien
taattaggcctgtgctgaatctgcg

SEQ ID NO: 3360578 - DNA, 25 bp, Homo sapien
tgtttcagtgctgtgcattcggctg

SEQ ID NO: 3360579 - DNA, 25 bp, Homo sapien
tgagctttgatctcttttcagacag

SEQ ID NO: 3360580 - DNA, 25 bp, Homo sapien
agcagctgccacgggccatgtttca

SEQ ID NO: 3360581 - DNA, 25 bp, Homo sapien
ctgtgcattcggctgttttacagcc

SEQ ID NO: 3360582 - DNA, 25 bp, Homo sapien
ggctgggtggaggaatgttagctgt

SEQ ID NO: 3360583 - DNA, 25 bp, Homo sapien
gtgtcagtgcctctaagccataaaa

SEQ ID NO: 3360584 - DNA, 25 bp, Homo sapien
ggaggaatgttagctgttgaatttc

SEQ ID NO: 3360585 - DNA, 25 bp, Homo sapien
gaaatgaaaatactcattacttgta

SEQ ID NO: 3360586 - DNA, 25 bp, Homo sapien
tgaagatatggataatatcaggcac

SEQ ID NO: 3360587 - DNA, 25 bp, Homo sapien
tttggtgtagactcttgtctgtcca

SEQ ID NO: 3360588 - DNA, 25 bp, Homo sapien
ctgtccatgttgaacgctcaacaat

SEQ ID NO: 3360589 - DNA, 25 bp, Homo sapien
caaatgcaggctttggtgtagactc

SEQ ID NO: 3360590 - DNA, 25 bp, Homo sapien
tcaacaatttcacgaccccagaagt

SEQ ID NO: 3360591 - DNA, 25 bp, Homo sapien
actgtcccatgaccttcatcagagg

SEQ ID NO: 3360592 - DNA, 25 bp, Homo sapien
tgtcccatgaccttcatcagagggc

SEQ ID NO: 3360593 - DNA, 25 bp, Homo sapien
tcaaactgtcccatgaccttcatca

SEQ ID NO: 3360594 - DNA, 25 bp, Homo sapien
aactgtcccatgaccttcatcagag

SEQ ID NO: 3360595 - DNA, 25 bp, Homo sapien
gattcgtgcaaatgatcccgcttta

SEQ ID NO: 3360596 - DNA, 25 bp, Homo sapien
gttggaatatgagggattcgtgcaa

SEQ ID NO: 3360597 - DNA, 25 bp, Homo sapien
tatgagggattcgtgcaaatgatcc

SEQ ID NO: 3360598 - DNA, 25 bp, Homo sapien
caaatgatcccgctttagacaccat

SEQ ID NO: 3360599 - DNA, 25 bp, Homo sapien
gaagaagcggactctggccaagtcc

SEQ ID NO: 3360600 - DNA, 25 bp, Homo sapien
aagtctcaggaagaagcggactctg

SEQ ID NO: 3360601 - DNA, 25 bp, Homo sapien
tctcaggaagaagcggactctggcc

SEQ ID NO: 3360602 - DNA, 25 bp, Homo sapien
aagaagcggactctggccaagtcca

SEQ ID NO: 3360603 - DNA, 25 bp, Homo sapien
ccacctgggctaagttcaaggtgcc

SEQ ID NO: 3360604 - DNA, 25 bp, Homo sapien
ctgggctaagttcaaggtgcccagg

SEQ ID NO: 3360605 - DNA, 25 bp, Homo sapien
acctgggctaagttcaaggtgccca

SEQ ID NO: 3360606 - DNA, 25 bp, Homo sapien
cacctgggctaagttcaaggtgccc

SEQ ID NO: 3360607 - DNA, 25 bp, Homo sapien
tgttttgacaaattgaaatctgccc

SEQ ID NO: 3360608 - DNA, 25 bp, Homo sapien
ggtagttgattgctttggagttcca

SEQ ID NO: 3360609 - DNA, 25 bp, Homo sapien
agtatccccaggtagttgattgctt

SEQ ID NO: 3360610 - DNA, 25 bp, Homo sapien
gatggtcgtgcagtgtattggaggg

SEQ ID NO: 3360611 - DNA, 25 bp, Homo sapien
cataagaaaaacgactgcctgagtg

SEQ ID NO: 3360612 - DNA, 25 bp, Homo sapien
tcctgtcttcgtaaagtaacaagca

SEQ ID NO: 3360613 - DNA, 25 bp, Homo sapien
tgcctgagtgtaccctatcatttag

SEQ ID NO: 3360614 - DNA, 25 bp, Homo sapien
ttaacaaatgtatgaggcgctgcaa

SEQ ID NO: 3360615 - DNA, 25 bp, Homo sapien
ttagcataggtcatggaactagtgt

SEQ ID NO: 3360616 - DNA, 25 bp, Homo sapien
ttcatttcttggttagcataggtca

SEQ ID NO: 3360617 - DNA, 25 bp, Homo sapien
tcatttcttggttagcataggtcat

SEQ ID NO: 3360618 - DNA, 25 bp, Homo sapien
tcatggaactagtgttaataatcat

SEQ ID NO: 3360619 - DNA, 25 bp, Homo sapien
aggatgcttccctgcagtaggaaca

SEQ ID NO: 3360620 - DNA, 25 bp, Homo sapien
gggccatggtgggaaagtccggtgc

SEQ ID NO: 3360621 - DNA, 25 bp, Homo sapien
ccaagggccatggtgggaaagtccg

SEQ ID NO: 3360622 - DNA, 25 bp, Homo sapien
gcaggatgcttccctgcagtaggaa

SEQ ID NO: 3360623 - DNA, 25 bp, Homo sapien
ccttatggggctgtaaacatttgcc

SEQ ID NO: 3360624 - DNA, 25 bp, Homo sapien
tgtttggaggagctataaaccttat

SEQ ID NO: 3360625 - DNA, 25 bp, Homo sapien
ctgatgtttggaggagctataaacc

SEQ ID NO: 3360626 - DNA, 25 bp, Homo sapien
cttttatcgttcttggccttatggg

SEQ ID NO: 3360627 - DNA, 25 bp, Homo sapien
cagagagccaccaagctaccttggg

SEQ ID NO: 3360628 - DNA, 25 bp, Homo sapien
tgtcagaggatctcttccataagac

SEQ ID NO: 3360629 - DNA, 25 bp, Homo sapien
aagctaccttgggaacttctatggg

SEQ ID NO: 3360630 - DNA, 25 bp, Homo sapien
cagtggttgtcaagctgggctcaga

SEQ ID NO: 3360631 - DNA, 25 bp, Homo sapien
ctctcctcatcaccagctatcagcc

SEQ ID NO: 3360632 - DNA, 25 bp, Homo sapien
tcctcatcaccagctatcagcccgt

SEQ ID NO: 3360633 - DNA, 25 bp, Homo sapien
caccagctatcagcccgtttcccag

SEQ ID NO: 3360634 - DNA, 25 bp, Homo sapien
tcatcaccagctatcagcccgtttc

SEQ ID NO: 3360635 - DNA, 25 bp, Homo sapien
tctcaaaattattacagaacttggg

SEQ ID NO: 3360636 - DNA, 25 bp, Homo sapien
taccctttactattgttgaaggtga

SEQ ID NO: 3360637 - DNA, 25 bp, Homo sapien
ctcaaaattattacagaacttgggt

SEQ ID NO: 3360638 - DNA, 25 bp, Homo sapien
attctcaaaattattacagaacttg

SEQ ID NO: 3360639 - DNA, 25 bp, Homo sapien
aggcgctcagggaaaccgaacggca

SEQ ID NO: 3360640 - DNA, 25 bp, Homo sapien
tcagggaaaccgaacggcagcgagt

SEQ ID NO: 3360641 - DNA, 25 bp, Homo sapien
tcttggtagcgaagaaacacgaagg

SEQ ID NO: 3360642 - DNA, 25 bp, Homo sapien
tttcttggtagcgaagaaacacgaa

SEQ ID NO: 3360643 - DNA, 25 bp, Homo sapien
ttgagaacaggattccacactgctg

SEQ ID NO: 3360644 - DNA, 25 bp, Homo sapien
aattaacagggacgctcaactcgac

SEQ ID NO: 3360645 - DNA, 25 bp, Homo sapien
cagggcacacgctgctgattaccag

SEQ ID NO: 3360646 - DNA, 25 bp, Homo sapien
tcaactcgactgcttcagggcacac

SEQ ID NO: 3360647 - DNA, 25 bp, Homo sapien
taatcccacgttggactgcaccttt

SEQ ID NO: 3360648 - DNA, 25 bp, Homo sapien
ggaagtatgccatgttgactgaaac

SEQ ID NO: 3360649 - DNA, 25 bp, Homo sapien
tgttttgccatataggaagtatgcc

SEQ ID NO: 3360650 - DNA, 25 bp, Homo sapien
aacagcattaatcccacgttggact

SEQ ID NO: 3360651 - DNA, 25 bp, Homo sapien
taccactgagagcttttctatgaga

SEQ ID NO: 3360652 - DNA, 25 bp, Homo sapien
tcatacttaaccacttgacctggaa

SEQ ID NO: 3360653 - DNA, 25 bp, Homo sapien
gctgatcatgatagcaattggaaaa

SEQ ID NO: 3360654 - DNA, 25 bp, Homo sapien
gaaaaacggcaaatcctatcaaaca

SEQ ID NO: 3360655 - DNA, 25 bp, Homo sapien
tcctgaagcgtctgtggtttccttc

SEQ ID NO: 3360656 - DNA, 25 bp, Homo sapien
ggcaatattccatgtggaactcttc

SEQ ID NO: 3360657 - DNA, 25 bp, Homo sapien
caatattccatgtggaactcttcct

SEQ ID NO: 3360658 - DNA, 25 bp, Homo sapien
cctgttcctgaagcgtctgtggttt

SEQ ID NO: 3360659 - DNA, 25 bp, Homo sapien
gctttttgagttatcaatgctgccg

SEQ ID NO: 3360660 - DNA, 25 bp, Homo sapien
ccatgctttttgagttatcaatgct

SEQ ID NO: 3360661 - DNA, 25 bp, Homo sapien
ttccttgccatgctttttgagttat

SEQ ID NO: 3360662 - DNA, 25 bp, Homo sapien
ttttgagttatcaatgctgccgtca

SEQ ID NO: 3360663 - DNA, 25 bp, Homo sapien
tatggatgatcccaaaccgtggctg

SEQ ID NO: 3360664 - DNA, 25 bp, Homo sapien
cctcatagagagtggtgaaatctgt

SEQ ID NO: 3360665 - DNA, 25 bp, Homo sapien
aaatctgtactacccgatgacggac

SEQ ID NO: 3360666 - DNA, 25 bp, Homo sapien
ttactcgtgcaaggcgatggtctag

SEQ ID NO: 3360667 - DNA, 25 bp, Homo sapien
tcccagatccgattgattccggttc

SEQ ID NO: 3360668 - DNA, 25 bp, Homo sapien
tttgctttgcttagcgttcctggcg

SEQ ID NO: 3360669 - DNA, 25 bp, Homo sapien
gacacctccaggtgcttatttaacc

SEQ ID NO: 3360670 - DNA, 25 bp, Homo sapien
agtccaagtggactgctttgctttg

SEQ ID NO: 3360671 - DNA, 25 bp, Homo sapien
catcgaaggtgtttttgtatgggaa

SEQ ID NO: 3360672 - DNA, 25 bp, Homo sapien
tcatcaaatcggatcagtatgcata

SEQ ID NO: 3360673 - DNA, 25 bp, Homo sapien
tctgacattttagccatcgaaggtg

SEQ ID NO: 3360674 - DNA, 25 bp, Homo sapien
caaatcggatcagtatgcatatttt

SEQ ID NO: 3360675 - DNA, 25 bp, Homo sapien
cctgtggtaaaatggacaatgggaa

SEQ ID NO: 3360676 - DNA, 25 bp, Homo sapien
gcatttgaatgtgcatcttgaccca

SEQ ID NO: 3360677 - DNA, 25 bp, Homo sapien
tcactgtggtccactgagtatctgg

SEQ ID NO: 3360678 - DNA, 25 bp, Homo sapien
caagtacgtgtcattgtgtctcaca

SEQ ID NO: 3360679 - DNA, 25 bp, Homo sapien
catcatcccatctgaaacgtgtagc

SEQ ID NO: 3360680 - DNA, 25 bp, Homo sapien
catcccatctgaaacgtgtagccat

SEQ ID NO: 3360681 - DNA, 25 bp, Homo sapien
tcatcccatctgaaacgtgtagcca

SEQ ID NO: 3360682 - DNA, 25 bp, Homo sapien
tcatcatcccatctgaaacgtgtag

SEQ ID NO: 3360683 - DNA, 25 bp, Homo sapien
agagagaaggcaacacggctttcca

SEQ ID NO: 3360684 - DNA, 25 bp, Homo sapien
gagagaaggcaacacggctttccat

SEQ ID NO: 3360685 - DNA, 25 bp, Homo sapien
gcatgccagtgaacaggaggacaga

SEQ ID NO: 3360686 - DNA, 25 bp, Homo sapien
tgggcatgccagtgaacaggaggac

SEQ ID NO: 3360687 - DNA, 25 bp, Homo sapien
ggtcctgggcatgccagtgaacagg

SEQ ID NO: 3360688 - DNA, 25 bp, Homo sapien
gcacggggtcctgggcatgccagtg

SEQ ID NO: 3360689 - DNA, 25 bp, Homo sapien
tgtcgctagattgtgcagattgcaa

SEQ ID NO: 3360690 - DNA, 25 bp, Homo sapien
gttgaaaagtgaccctccagtgtgg

SEQ ID NO: 3360691 - DNA, 25 bp, Homo sapien
gaccgcgtgaaacagtgtcgctaga

SEQ ID NO: 3360692 - DNA, 25 bp, Homo sapien
gaatcagtgagactttccaataaag

SEQ ID NO: 3360693 - DNA, 25 bp, Homo sapien
tagccatgagctcacactcataaag

SEQ ID NO: 3360694 - DNA, 25 bp, Homo sapien
taaacattgatttagccatgagctc

SEQ ID NO: 3360695 - DNA, 25 bp, Homo sapien
agtgtttgccattcagagatacatc

SEQ ID NO: 3360696 - DNA, 25 bp, Homo sapien
gagatacatcatgcataaacattga

SEQ ID NO: 3360697 - DNA, 25 bp, Homo sapien
ctgtgtaagaaaacagaaaagcagc

SEQ ID NO: 3360698 - DNA, 25 bp, Homo sapien
gaaaacagaaaagcagcatattgtt

SEQ ID NO: 3360699 - DNA, 25 bp, Homo sapien
gtaagaaaacagaaaagcagcatat

SEQ ID NO: 3360700 - DNA, 25 bp, Homo sapien
aagaaaacagaaaagcagcatattg

SEQ ID NO: 3360701 - DNA, 25 bp, Homo sapien
aggcttgtcccaggcatactgtcca

SEQ ID NO: 3360702 - DNA, 25 bp, Homo sapien
caatggttcagtgtccgcttgcata

SEQ ID NO: 3360703 - DNA, 25 bp, Homo sapien
tactgtccaggaacggaatgacaca

SEQ ID NO: 3360704 - DNA, 25 bp, Homo sapien
tggtcttctctggaagtaccaactt

SEQ ID NO: 3360705 - DNA, 25 bp, Homo sapien
gctccagggtccaacccatgtttct

SEQ ID NO: 3360706 - DNA, 25 bp, Homo sapien
ccttcctcctgattctgccttgcaa

SEQ ID NO: 3360707 - DNA, 25 bp, Homo sapien
ttcctcctgattctgccttgcaaag

SEQ ID NO: 3360708 - DNA, 25 bp, Homo sapien
cagggtccaacccatgtttctctct

SEQ ID NO: 3360709 - DNA, 25 bp, Homo sapien
tgagacctgtcaacatcacagctaa

SEQ ID NO: 3360710 - DNA, 25 bp, Homo sapien
ctctgctatctgagacctgtcaaca

SEQ ID NO: 3360711 - DNA, 25 bp, Homo sapien
tgctatctgagacctgtcaacatca

SEQ ID NO: 3360712 - DNA, 25 bp, Homo sapien
tatctgagacctgtcaacatcacag

SEQ ID NO: 3360713 - DNA, 25 bp, Homo sapien
gctcgaagagtcactttccatggtc

SEQ ID NO: 3360714 - DNA, 25 bp, Homo sapien
ttccatggtcccattgctacaaaga

SEQ ID NO: 3360715 - DNA, 25 bp, Homo sapien
gtgtgcctttgtcactgctcgaaga

SEQ ID NO: 3360716 - DNA, 25 bp, Homo sapien
taattacaggcaaaatgattggttg

SEQ ID NO: 3360717 - DNA, 25 bp, Homo sapien
aagtacttagtaccacctgccctcg

SEQ ID NO: 3360718 - DNA, 25 bp, Homo sapien
cacctgccctcgaaaagatgtaaaa

SEQ ID NO: 3360719 - DNA, 25 bp, Homo sapien
cactcctggtgttggtaagtactta

SEQ ID NO: 3360720 - DNA, 25 bp, Homo sapien
taccaccaaaagtaaggcctccatg

SEQ ID NO: 3360721 - DNA, 25 bp, Homo sapien
ggagaaacacgtggcccataacaca

SEQ ID NO: 3360722 - DNA, 25 bp, Homo sapien
tgagagtcttggaccaagtcgagta

SEQ ID NO: 3360723 - DNA, 25 bp, Homo sapien
taatagagtctcagaccacaagaat

SEQ ID NO: 3360724 - DNA, 25 bp, Homo sapien
ggaagaggcgatgcacgtgctttct

SEQ ID NO: 3360725 - DNA, 25 bp, Homo sapien
tcgtctataacctttctgaaagcag

SEQ ID NO: 3360726 - DNA, 25 bp, Homo sapien
gggtttatatgtccccatcgtctat

SEQ ID NO: 3360727 - DNA, 25 bp, Homo sapien
tccccatcgtctataacctttctga

SEQ ID NO: 3360728 - DNA, 25 bp, Homo sapien
ttgggtttatatgtccccatcgtct

SEQ ID NO: 3360729 - DNA, 25 bp, Homo sapien
tcttcactatttctaagatgtagtg

SEQ ID NO: 3360730 - DNA, 25 bp, Homo sapien
tccaatgctgatgttttagaatgtt

SEQ ID NO: 3360731 - DNA, 25 bp, Homo sapien
tttccaatgctgatgttttagaatg

SEQ ID NO: 3360732 - DNA, 25 bp, Homo sapien
gtagtgttttgattgttcgtagcat

SEQ ID NO: 3360733 - DNA, 25 bp, Homo sapien
tgttttctctcgagtccctgtattt

SEQ ID NO: 3360734 - DNA, 25 bp, Homo sapien
acacttgttttcgttctcccaagca

SEQ ID NO: 3360735 - DNA, 25 bp, Homo sapien
cttttgttttctctcgagtccctgt

SEQ ID NO: 3360736 - DNA, 25 bp, Homo sapien
cgttctcccaagcatgcattctgaa

SEQ ID NO: 3360737 - DNA, 25 bp, Homo sapien
agggaagccctagggtagcgggcat

SEQ ID NO: 3360738 - DNA, 25 bp, Homo sapien
aagccctagggtagcgggcatgagc

SEQ ID NO: 3360739 - DNA, 25 bp, Homo sapien
ggaagccctagggtagcgggcatga

SEQ ID NO: 3360740 - DNA, 25 bp, Homo sapien
agccctagggtagcgggcatgagca

SEQ ID NO: 3360741 - DNA, 25 bp, Homo sapien
agtcattgctacagaaaaaatccta

SEQ ID NO: 3360742 - DNA, 25 bp, Homo sapien
cctcatcacaccaagaaccaacagt

SEQ ID NO: 3360743 - DNA, 25 bp, Homo sapien
cacaccaagaaccaacagtcattgc

SEQ ID NO: 3360744 - DNA, 25 bp, Homo sapien
tcatcacaccaagaaccaacagtca

SEQ ID NO: 3360745 - DNA, 25 bp, Homo sapien
tgagaatttttgtcatgatcttttg

SEQ ID NO: 3360746 - DNA, 25 bp, Homo sapien
tttccacgtaaattagttggtatca

SEQ ID NO: 3360747 - DNA, 25 bp, Homo sapien
tcttttgttggggacgaagactgac

SEQ ID NO: 3360748 - DNA, 25 bp, Homo sapien
tagttggtatcacgcattgtttgtg

SEQ ID NO: 3360749 - DNA, 25 bp, Homo sapien
tgaaagggcaaacacaatcattcca

SEQ ID NO: 3360750 - DNA, 25 bp, Homo sapien
agggcaaacacaatcattccacttt

SEQ ID NO: 3360751 - DNA, 25 bp, Homo sapien
gaaagggcaaacacaatcattccac

SEQ ID NO: 3360752 - DNA, 25 bp, Homo sapien
gctgaaagggcaaacacaatcattc

SEQ ID NO: 3360753 - DNA, 25 bp, Homo sapien
gtagtaaattagcttgtgctggaag

SEQ ID NO: 3360754 - DNA, 25 bp, Homo sapien
taaagggtagtaaattagcttgtgc

SEQ ID NO: 3360755 - DNA, 25 bp, Homo sapien
ggtagtaaattagcttgtgctggaa

SEQ ID NO: 3360756 - DNA, 25 bp, Homo sapien
aagggtagtaaattagcttgtgctg

SEQ ID NO: 3360757 - DNA, 25 bp, Homo sapien
gaggacagttaaaagtttttgcaca

SEQ ID NO: 3360758 - DNA, 25 bp, Homo sapien
cagcagaagcatgaggacagttaaa

SEQ ID NO: 3360759 - DNA, 25 bp, Homo sapien
tgaggacagttaaaagtttttgcac

SEQ ID NO: 3360760 - DNA, 25 bp, Homo sapien
ttggagacatttgataagtaggata

SEQ ID NO: 3360761 - DNA, 25 bp, Homo sapien
tggtaaatttgaccaactagctgtt

SEQ ID NO: 3360762 - DNA, 25 bp, Homo sapien
gctgttattcccttgtgatctgcct

SEQ ID NO: 3360763 - DNA, 25 bp, Homo sapien
catttgataagtaggatatggtaaa

SEQ ID NO: 3360764 - DNA, 25 bp, Homo sapien
tctcccttgagaatcatatggttga

SEQ ID NO: 3360765 - DNA, 25 bp, Homo sapien
ctcccttgagaatcatatggttgat

SEQ ID NO: 3360766 - DNA, 25 bp, Homo sapien
cccttgagaatcatatggttgatga

SEQ ID NO: 3360767 - DNA, 25 bp, Homo sapien
ttctcccttgagaatcatatggttg

SEQ ID NO: 3360768 - DNA, 25 bp, Homo sapien
tcatcacgaagtactgagccactgg

SEQ ID NO: 3360769 - DNA, 25 bp, Homo sapien
gagccactggaggataagaccagca

SEQ ID NO: 3360770 - DNA, 25 bp, Homo sapien
tttggactcccagatgcgcctccat

SEQ ID NO: 3360771 - DNA, 25 bp, Homo sapien
tctccataaatcctctgcgcaaaag

SEQ ID NO: 3360772 - DNA, 25 bp, Homo sapien
catctgggctggctaacgttctgaa

SEQ ID NO: 3360773 - DNA, 25 bp, Homo sapien
gctggctaacgttctgaaacaattt

SEQ ID NO: 3360774 - DNA, 25 bp, Homo sapien
tctgggctggctaacgttctgaaac

SEQ ID NO: 3360775 - DNA, 25 bp, Homo sapien
tgggctggctaacgttctgaaacaa

SEQ ID NO: 3360776 - DNA, 25 bp, Homo sapien
tttctacattgcagaatccgatcag

SEQ ID NO: 3360777 - DNA, 25 bp, Homo sapien
tgtggaatatgctcccatttctaca

SEQ ID NO: 3360778 - DNA, 25 bp, Homo sapien
tgagatacggtcaatagcagcacga

SEQ ID NO: 3360779 - DNA, 25 bp, Homo sapien
cagtcatggaactcttgagatacgg

SEQ ID NO: 3360780 - DNA, 25 bp, Homo sapien
tctaccagcaccttggcatctgttt

SEQ ID NO: 3360781 - DNA, 25 bp, Homo sapien
ggagaggaaggacacgcttgatcta

SEQ ID NO: 3360782 - DNA, 25 bp, Homo sapien
gaaggacacgcttgatctaccagca

SEQ ID NO: 3360783 - DNA, 25 bp, Homo sapien
catctgttttcactgcctctagcca

SEQ ID NO: 3360784 - DNA, 25 bp, Homo sapien
aaactccaaccattgctaattttgg

SEQ ID NO: 3360785 - DNA, 25 bp, Homo sapien
gtaaggcctgaacgctgttgggata

SEQ ID NO: 3360786 - DNA, 25 bp, Homo sapien
tggcaaactccaaccattgctaatt

SEQ ID NO: 3360787 - DNA, 25 bp, Homo sapien
actggctaggtggtatggtataatg

SEQ ID NO: 3360788 - DNA, 25 bp, Homo sapien
ctcgactgcttgtaaataggaaaac

SEQ ID NO: 3360789 - DNA, 25 bp, Homo sapien
gagtttccgactgcattttggctta

SEQ ID NO: 3360790 - DNA, 25 bp, Homo sapien
gccactcttaggacatgtgaacaga

SEQ ID NO: 3360791 - DNA, 25 bp, Homo sapien
tattcatatcaaggtcagatgggca

SEQ ID NO: 3360792 - DNA, 25 bp, Homo sapien
ggtgagacttctgtaaactgcgcta

SEQ ID NO: 3360793 - DNA, 25 bp, Homo sapien
gccggcgatccagctgcatgaaaga

SEQ ID NO: 3360794 - DNA, 25 bp, Homo sapien
gcccctttgaagcttggtagcagga

SEQ ID NO: 3360795 - DNA, 25 bp, Homo sapien
gactcattcatgcatccagggctgg

SEQ ID NO: 3360796 - DNA, 25 bp, Homo sapien
tgggtgacaccacaaactcgctgag

SEQ ID NO: 3360797 - DNA, 25 bp, Homo sapien
tgtgggtgacaccacaaactcgctg

SEQ ID NO: 3360798 - DNA, 25 bp, Homo sapien
ctgtgggtgacaccacaaactcgct

SEQ ID NO: 3360799 - DNA, 25 bp, Homo sapien
ggtgacaccacaaactcgctgagcc

SEQ ID NO: 3360800 - DNA, 25 bp, Homo sapien
gatcaacatggctttcggtattgaa

SEQ ID NO: 3360801 - DNA, 25 bp, Homo sapien
atgatcaacatggctttcggtattg

SEQ ID NO: 3360802 - DNA, 25 bp, Homo sapien
catgatcaacatggctttcggtatt

SEQ ID NO: 3360803 - DNA, 25 bp, Homo sapien
tgatcaacatggctttcggtattga

SEQ ID NO: 3360804 - DNA, 25 bp, Homo sapien
ccaagtaattgtgttatggcgagtt

SEQ ID NO: 3360805 - DNA, 25 bp, Homo sapien
aagatagccaagtaattgtgttatg

SEQ ID NO: 3360806 - DNA, 25 bp, Homo sapien
taattgtgttatggcgagttgggaa

SEQ ID NO: 3360807 - DNA, 25 bp, Homo sapien
tagccaagtaattgtgttatggcga

SEQ ID NO: 3360808 - DNA, 25 bp, Homo sapien
gaggttggataccaccctgggcatt

SEQ ID NO: 3360809 - DNA, 25 bp, Homo sapien
taatatttttggctcggaggacagc

SEQ ID NO: 3360810 - DNA, 25 bp, Homo sapien
tacgtccagtaaatgctgcgcttgc

SEQ ID NO: 3360811 - DNA, 25 bp, Homo sapien
gcgcttgcagacacatgagtatcat

SEQ ID NO: 3360812 - DNA, 25 bp, Homo sapien
aaatagggcaaagtctcctccgctg

SEQ ID NO: 3360813 - DNA, 25 bp, Homo sapien
gctgtgctttccatatcaaataggg

SEQ ID NO: 3360814 - DNA, 25 bp, Homo sapien
agctcctaactctgaggctctgata

SEQ ID NO: 3360815 - DNA, 25 bp, Homo sapien
gctgggttggagtctgtacacagaa

SEQ ID NO: 3360816 - DNA, 25 bp, Homo sapien
tatttgccaagaagtctgcctgagc

SEQ ID NO: 3360817 - DNA, 25 bp, Homo sapien
gccaagaagtctgcctgagcggtat

SEQ ID NO: 3360818 - DNA, 25 bp, Homo sapien
tctgcctgagcggtatttatacagc

SEQ ID NO: 3360819 - DNA, 25 bp, Homo sapien
gaagtctgcctgagcggtatttata

SEQ ID NO: 3360820 - DNA, 25 bp, Homo sapien
caggacgatgcctaccaagcaacag

SEQ ID NO: 3360821 - DNA, 25 bp, Homo sapien
caagcaacagtcttttatagacaga

SEQ ID NO: 3360822 - DNA, 25 bp, Homo sapien
gatgcttcaccccaggtatgaggca

SEQ ID NO: 3360823 - DNA, 25 bp, Homo sapien
cagtcggaaccaggtaaggagagca

SEQ ID NO: 3360824 - DNA, 25 bp, Homo sapien
agcagttccttcaccttccaaatta

SEQ ID NO: 3360825 - DNA, 25 bp, Homo sapien
cagcagttccttcaccttccaaatt

SEQ ID NO: 3360826 - DNA, 25 bp, Homo sapien
accagcagttccttcaccttccaaa

SEQ ID NO: 3360827 - DNA, 25 bp, Homo sapien
ctaccagcagttccttcaccttcca

SEQ ID NO: 3360828 - DNA, 25 bp, Homo sapien
ccttcaaggatctagcaggagagag

SEQ ID NO: 3360829 - DNA, 25 bp, Homo sapien
cactagtaattcagacactgggtga

SEQ ID NO: 3360830 - DNA, 25 bp, Homo sapien
aagctttctgtgtgagcttttcaag

SEQ ID NO: 3360831 - DNA, 25 bp, Homo sapien
tcaagagtgctacgtttaggtggag

SEQ ID NO: 3360832 - DNA, 25 bp, Homo sapien
acttgcaggttccatatcgccttag

SEQ ID NO: 3360833 - DNA, 25 bp, Homo sapien
ttgcaggttccatatcgccttagca

SEQ ID NO: 3360834 - DNA, 25 bp, Homo sapien
ctacttgcaggttccatatcgcctt

SEQ ID NO: 3360835 - DNA, 25 bp, Homo sapien
caggttccatatcgccttagcattc

SEQ ID NO: 3360836 - DNA, 25 bp, Homo sapien
gcttgtgctaagatccagaccagcg

SEQ ID NO: 3360837 - DNA, 25 bp, Homo sapien
gacagcttgtgctaagatccagacc

SEQ ID NO: 3360838 - DNA, 25 bp, Homo sapien
cagcttgtgctaagatccagaccag

SEQ ID NO: 3360839 - DNA, 25 bp, Homo sapien
ctgacagcttgtgctaagatccaga

SEQ ID NO: 3360840 - DNA, 25 bp, Homo sapien
tgtttgatcatggacacgctgacag

SEQ ID NO: 3360841 - DNA, 25 bp, Homo sapien
tgatcatggacacgctgacagtacc

SEQ ID NO: 3360842 - DNA, 25 bp, Homo sapien
tggacacgctgacagtaccgtcacc

SEQ ID NO: 3360843 - DNA, 25 bp, Homo sapien
ttagtgtttgatcatggacacgctg

SEQ ID NO: 3360844 - DNA, 25 bp, Homo sapien
cgctttagaaatccggtcagtgtac

SEQ ID NO: 3360845 - DNA, 25 bp, Homo sapien
ccataggtttgtagcgctttagaaa

SEQ ID NO: 3360846 - DNA, 25 bp, Homo sapien
tcagatatgatacaggtccataggt

SEQ ID NO: 3360847 - DNA, 25 bp, Homo sapien
gtcagtgtactcttcttccgtttgc

SEQ ID NO: 3360848 - DNA, 25 bp, Homo sapien
gactaaacaaccaaaccaactgctc

SEQ ID NO: 3360849 - DNA, 25 bp, Homo sapien
tcatgaggatggactaaacaaccaa

SEQ ID NO: 3360850 - DNA, 25 bp, Homo sapien
tgtttcttcggcatataattgcaag

SEQ ID NO: 3360851 - DNA, 25 bp, Homo sapien
cctccacgcggttacttagtttatg

SEQ ID NO: 3360852 - DNA, 25 bp, Homo sapien
tgggttggcttcaacttctctccat

SEQ ID NO: 3360853 - DNA, 25 bp, Homo sapien
actgggttggcttcaacttctctcc

SEQ ID NO: 3360854 - DNA, 25 bp, Homo sapien
gggttggcttcaacttctctccatc

SEQ ID NO: 3360855 - DNA, 25 bp, Homo sapien
gactgggttggcttcaacttctctc

SEQ ID NO: 3360856 - DNA, 25 bp, Homo sapien
attggtccaatggattgagttttga

SEQ ID NO: 3360857 - DNA, 25 bp, Homo sapien
gtaataattccgcagtccactcatc

SEQ ID NO: 3360858 - DNA, 25 bp, Homo sapien
actttcttctaaattggtccaatgg

SEQ ID NO: 3360859 - DNA, 25 bp, Homo sapien
tttgaacattggaaatgggagatgt

SEQ ID NO: 3360860 - DNA, 25 bp, Homo sapien
ctggaaggtttatatgtattctcat

SEQ ID NO: 3360861 - DNA, 25 bp, Homo sapien
ctaggtctttaatggcataatcaga

SEQ ID NO: 3360862 - DNA, 25 bp, Homo sapien
taattccgtattcccagagatgttc

SEQ ID NO: 3360863 - DNA, 25 bp, Homo sapien
aatcagatcccatgtcaaataaatg

SEQ ID NO: 3360864 - DNA, 25 bp, Homo sapien
tgggctctgattaattccaggaggc

SEQ ID NO: 3360865 - DNA, 25 bp, Homo sapien
agctgggctctgattaattccagga

SEQ ID NO: 3360866 - DNA, 25 bp, Homo sapien
tctgattaattccaggaggccttgc

SEQ ID NO: 3360867 - DNA, 25 bp, Homo sapien
ggctctgattaattccaggaggcct

SEQ ID NO: 3360868 - DNA, 25 bp, Homo sapien
ttgcaatatactcttgaagtctcca

SEQ ID NO: 3360869 - DNA, 25 bp, Homo sapien
cttgaagtctccaagccccttgagt

SEQ ID NO: 3360870 - DNA, 25 bp, Homo sapien
tgaagtctccaagccccttgagtcc

SEQ ID NO: 3360871 - DNA, 25 bp, Homo sapien
ctccaagccccttgagtcctctttt

SEQ ID NO: 3360872 - DNA, 25 bp, Homo sapien
tcaacatcagactgtccaataaata

SEQ ID NO: 3360873 - DNA, 25 bp, Homo sapien
tctcgtaacagtgacaagcaagttc

SEQ ID NO: 3360874 - DNA, 25 bp, Homo sapien
tatatctcgtaacagtgacaagcaa

SEQ ID NO: 3360875 - DNA, 25 bp, Homo sapien
cgtaacagtgacaagcaagttctgt

SEQ ID NO: 3360876 - DNA, 25 bp, Homo sapien
gacagtcagatggaaatttacgttg

SEQ ID NO: 3360877 - DNA, 25 bp, Homo sapien
caagtgtctcctcctgtacgagaga

SEQ ID NO: 3360878 - DNA, 25 bp, Homo sapien
tcagtgaggaagcactccagtggtc

SEQ ID NO: 3360879 - DNA, 25 bp, Homo sapien
cagtaagcagccatcaatgtgattc

SEQ ID NO: 3360880 - DNA, 25 bp, Homo sapien
gagccattaaccttaaagtggattg

SEQ ID NO: 3360881 - DNA, 25 bp, Homo sapien
gccattaaccttaaagtggattgca

SEQ ID NO: 3360882 - DNA, 25 bp, Homo sapien
cattaaccttaaagtggattgcaga

SEQ ID NO: 3360883 - DNA, 25 bp, Homo sapien
agagccattaaccttaaagtggatt

SEQ ID NO: 3360884 - DNA, 25 bp, Homo sapien
caccagtttgtattggctctctttc

SEQ ID NO: 3360885 - DNA, 25 bp, Homo sapien
tcaccagtttgtattggctctcttt

SEQ ID NO: 3360886 - DNA, 25 bp, Homo sapien
ttcaccagtttgtattggctctctt

SEQ ID NO: 3360887 - DNA, 25 bp, Homo sapien
ccagtttgtattggctctctttctc

SEQ ID NO: 3360888 - DNA, 25 bp, Homo sapien
catctcagggtttccctcctctgca

SEQ ID NO: 3360889 - DNA, 25 bp, Homo sapien
gtggtctgcaaaactctcgaatccc

SEQ ID NO: 3360890 - DNA, 25 bp, Homo sapien
gcaaaactctcgaatcccagccaag

SEQ ID NO: 3360891 - DNA, 25 bp, Homo sapien
tcccagtggtctgcaaaactctcga

SEQ ID NO: 3360892 - DNA, 25 bp, Homo sapien
cctgtctgccgctggtaattgaatt

SEQ ID NO: 3360893 - DNA, 25 bp, Homo sapien
tataatgaataagagccttatctgg

SEQ ID NO: 3360894 - DNA, 25 bp, Homo sapien
gaaattgttgcatagcccattccat

SEQ ID NO: 3360895 - DNA, 25 bp, Homo sapien
aaatagactgaggaagtcttctacc

SEQ ID NO: 3360896 - DNA, 25 bp, Homo sapien
agggcctcagattcggagatcagtt

SEQ ID NO: 3360897 - DNA, 25 bp, Homo sapien
ggaagggcctcagattcggagatca

SEQ ID NO: 3360898 - DNA, 25 bp, Homo sapien
caaagtgaacattgagccgcaggcg

SEQ ID NO: 3360899 - DNA, 25 bp, Homo sapien
cttgcacaaagtgaacattgagccg

SEQ ID NO: 3360900 - DNA, 25 bp, Homo sapien
agtaggctctgaatcaactgagcat

SEQ ID NO: 3360901 - DNA, 25 bp, Homo sapien
agcatggaaactcaatttgcctggg

SEQ ID NO: 3360902 - DNA, 25 bp, Homo sapien
aactatgtatatcacaaaatcagta

SEQ ID NO: 3360903 - DNA, 25 bp, Homo sapien
aactgagcatggaaactcaatttgc

SEQ ID NO: 3360904 - DNA, 25 bp, Homo sapien
ttgcttaaagctacctgatgcttgc

SEQ ID NO: 3360905 - DNA, 25 bp, Homo sapien
cattgcttaaagctacctgatgctt

SEQ ID NO: 3360906 - DNA, 25 bp, Homo sapien
tgcacattgcttaaagctacctgat

SEQ ID NO: 3360907 - DNA, 25 bp, Homo sapien
ctgtgcacattgcttaaagctacct

SEQ ID NO: 3360908 - DNA, 25 bp, Homo sapien
tttcatacacgttctgtttgaagaa

SEQ ID NO: 3360909 - DNA, 25 bp, Homo sapien
tgtgtctgtgtagtacagtagcatt

SEQ ID NO: 3360910 - DNA, 25 bp, Homo sapien
agtacagtagcattgctttctccca

SEQ ID NO: 3360911 - DNA, 25 bp, Homo sapien
tgaatgagctttttcatacacgttc

SEQ ID NO: 3360912 - DNA, 25 bp, Homo sapien
gtcaggctccaaacaagagtcacac

SEQ ID NO: 3360913 - DNA, 25 bp, Homo sapien
cagatgaggatgcttatttatgacc

SEQ ID NO: 3360914 - DNA, 25 bp, Homo sapien
gcatgtacatattgccgatctgggt

SEQ ID NO: 3360915 - DNA, 25 bp, Homo sapien
tgttttaataagaccaccatgccat

SEQ ID NO: 3360916 - DNA, 25 bp, Homo sapien
ccaggaggagtaagagggccatttt

SEQ ID NO: 3360917 - DNA, 25 bp, Homo sapien
tttagtgactgtaggatagaggctc

SEQ ID NO: 3360918 - DNA, 25 bp, Homo sapien
cagagtgaggtatggttctcccaac

SEQ ID NO: 3360919 - DNA, 25 bp, Homo sapien
ccaccgacgtggctggcgttgttca

SEQ ID NO: 3360920 - DNA, 25 bp, Homo sapien
gaccgaggcctgaaatatttcacac

SEQ ID NO: 3360921 - DNA, 25 bp, Homo sapien
tggaccgaggcctgaaatatttcac

SEQ ID NO: 3360922 - DNA, 25 bp, Homo sapien
ttctggaccgaggcctgaaatattt

SEQ ID NO: 3360923 - DNA, 25 bp, Homo sapien
ctggaccgaggcctgaaatatttca

SEQ ID NO: 3360924 - DNA, 25 bp, Homo sapien
cgtccttccaagtgccttgcttgag

SEQ ID NO: 3360925 - DNA, 25 bp, Homo sapien
ttgcttgagatcacagggcttttcc

SEQ ID NO: 3360926 - DNA, 25 bp, Homo sapien
cctttgttgtgaggctcaaactcat

SEQ ID NO: 3360927 - DNA, 25 bp, Homo sapien
gttgtgaggctcaaactcatcctct

SEQ ID NO: 3360928 - DNA, 25 bp, Homo sapien
cacaaactgggtggcctacatgata

SEQ ID NO: 3360929 - DNA, 25 bp, Homo sapien
tgcctgtctgtgtgtagaattccct

SEQ ID NO: 3360930 - DNA, 25 bp, Homo sapien
tatggaagccggaaccaacaagaaa

SEQ ID NO: 3360931 - DNA, 25 bp, Homo sapien
tctagtggctacaagtcgaaaatca

SEQ ID NO: 3360932 - DNA, 25 bp, Homo sapien
gagggcctcttcttcacaaaatcag

SEQ ID NO: 3360933 - DNA, 25 bp, Homo sapien
ttgagggcctcttcttcacaaaatc

SEQ ID NO: 3360934 - DNA, 25 bp, Homo sapien
cctcttcttcacaaaatcagggcac

SEQ ID NO: 3360935 - DNA, 25 bp, Homo sapien
gggcctcttcttcacaaaatcaggg

SEQ ID NO: 3360936 - DNA, 25 bp, Homo sapien
ctttttcctgtggatgctcaccatc

SEQ ID NO: 3360937 - DNA, 25 bp, Homo sapien
ttttcctgtggatgctcaccatcag

SEQ ID NO: 3360938 - DNA, 25 bp, Homo sapien
ttcctgtggatgctcaccatcaggg

SEQ ID NO: 3360939 - DNA, 25 bp, Homo sapien
tgtggatgctcaccatcaggggtga

SEQ ID NO: 3360940 - DNA, 25 bp, Homo sapien
caagtggtaggtgtagccaaggctc

SEQ ID NO: 3360941 - DNA, 25 bp, Homo sapien
tccaatgtagtgtgcaaacaccgtc

SEQ ID NO: 3360942 - DNA, 25 bp, Homo sapien
ccaggtctcttgtgcacgggtgctc

SEQ ID NO: 3360943 - DNA, 25 bp, Homo sapien
gaaactgaacccactttgcctgcag

SEQ ID NO: 3360944 - DNA, 25 bp, Homo sapien
tctggggttcgcaagccttctgagt

SEQ ID NO: 3360945 - DNA, 25 bp, Homo sapien
ggaatgccagttccctaatgtcaga

SEQ ID NO: 3360946 - DNA, 25 bp, Homo sapien
gtgtgggtaaggtgatctctcagac

SEQ ID NO: 3360947 - DNA, 25 bp, Homo sapien
atatttttattccacagtgtgggta

SEQ ID NO: 3360948 - DNA, 25 bp, Homo sapien
gtcccatatcaccggggaagttgtg

SEQ ID NO: 3360949 - DNA, 25 bp, Homo sapien
ccacattgtagacttcctcctccag

SEQ ID NO: 3360950 - DNA, 25 bp, Homo sapien
tcatctctcccacattgtagacttc

SEQ ID NO: 3360951 - DNA, 25 bp, Homo sapien
ttatcttcctggtaactcatctctc

SEQ ID NO: 3360952 - DNA, 25 bp, Homo sapien
tctgcgtgccagaatacttgaatgc

SEQ ID NO: 3360953 - DNA, 25 bp, Homo sapien
ttacctctctgcgtgccagaatact

SEQ ID NO: 3360954 - DNA, 25 bp, Homo sapien
ccaagaaactagcagatttgttaac

SEQ ID NO: 3360955 - DNA, 25 bp, Homo sapien
tagggttgaggtgataccaagaaac

SEQ ID NO: 3360956 - DNA, 25 bp, Homo sapien
gatgccaccccattcagcatttccc

SEQ ID NO: 3360957 - DNA, 25 bp, Homo sapien
caccatttcacctcttctagatccc

SEQ ID NO: 3360958 - DNA, 25 bp, Homo sapien
ctgatgccaccccattcagcatttc

SEQ ID NO: 3360959 - DNA, 25 bp, Homo sapien
ttcacctcttctagatcccatttct

SEQ ID NO: 3360960 - DNA, 25 bp, Homo sapien
aatcgatagggcatgtaaaagtaca

SEQ ID NO: 3360961 - DNA, 25 bp, Homo sapien
gcttcttcactttattaagcatgcc

SEQ ID NO: 3360962 - DNA, 25 bp, Homo sapien
catggcatattttacctgacatttg

SEQ ID NO: 3360963 - DNA, 25 bp, Homo sapien
catgcctttttgaacggaaataaca

SEQ ID NO: 3360964 - DNA, 25 bp, Homo sapien
gtccaatttatatgaaaaatgccaa

SEQ ID NO: 3360965 - DNA, 25 bp, Homo sapien
tgttagacaccagcattgtaaagac

SEQ ID NO: 3360966 - DNA, 25 bp, Homo sapien
cccatatgggtacgattatcttctc

SEQ ID NO: 3360967 - DNA, 25 bp, Homo sapien
tgcctgtaaggacttttgtaccgta

SEQ ID NO: 3360968 - DNA, 25 bp, Homo sapien
ttatctgtacaattttctcaccctg

SEQ ID NO: 3360969 - DNA, 25 bp, Homo sapien
tgtacaattttctcaccctgaactc

SEQ ID NO: 3360970 - DNA, 25 bp, Homo sapien
tctgtacaattttctcaccctgaac

SEQ ID NO: 3360971 - DNA, 25 bp, Homo sapien
tatctgtacaattttctcaccctga

SEQ ID NO: 3360972 - DNA, 25 bp, Homo sapien
taccaatccatggttggtcaagggc

SEQ ID NO: 3360973 - DNA, 25 bp, Homo sapien
gagtattcgcctagatgtgactgcg

SEQ ID NO: 3360974 - DNA, 25 bp, Homo sapien
gcatccaataaaatcgtcagtcagt

SEQ ID NO: 3360975 - DNA, 25 bp, Homo sapien
ggaaaccattctcaagcaggaaaag

SEQ ID NO: 3360976 - DNA, 25 bp, Homo sapien
tcatttccccagttgaattaaatct

SEQ ID NO: 3360977 - DNA, 25 bp, Homo sapien
catttccccagttgaattaaatcta

SEQ ID NO: 3360978 - DNA, 25 bp, Homo sapien
aacacggcctttatacgaaagctca

SEQ ID NO: 3360979 - DNA, 25 bp, Homo sapien
tgtgtagtagacctttatgccaact

SEQ ID NO: 3360980 - DNA, 25 bp, Homo sapien
caaatcggccttgactcttgacttt

SEQ ID NO: 3360981 - DNA, 25 bp, Homo sapien
ccaactaacttgtatataactgtca

SEQ ID NO: 3360982 - DNA, 25 bp, Homo sapien
aaacattcttgctcccttcgggtca

SEQ ID NO: 3360983 - DNA, 25 bp, Homo sapien
gctcccttcgggtcaatgtcagaat

SEQ ID NO: 3360984 - DNA, 25 bp, Homo sapien
agaataaccacaaccaaaactgctg

SEQ ID NO: 3360985 - DNA, 25 bp, Homo sapien
tcagaataaccacaaccaaaactgc

SEQ ID NO: 3360986 - DNA, 25 bp, Homo sapien
gggtggattgtcacaaggatcatga

SEQ ID NO: 3360987 - DNA, 25 bp, Homo sapien
ctggggtggattgtcacaaggatca

SEQ ID NO: 3360988 - DNA, 25 bp, Homo sapien
gaaatttggaggaacttcattagat

SEQ ID NO: 3360989 - DNA, 25 bp, Homo sapien
tcattagatgaagggaatattggga

SEQ ID NO: 3360990 - DNA, 25 bp, Homo sapien
taattatcataggttttttcctctc

SEQ ID NO: 3360991 - DNA, 25 bp, Homo sapien
attatcataggttttttcctctcct

SEQ ID NO: 3360992 - DNA, 25 bp, Homo sapien
ttatcataggttttttcctctcctc

SEQ ID NO: 3360993 - DNA, 25 bp, Homo sapien
tataattatcataggttttttcctc

SEQ ID NO: 3360994 - DNA, 25 bp, Homo sapien
cgatcatctagtgttatctctgcag

SEQ ID NO: 3360995 - DNA, 25 bp, Homo sapien
aaagaccactcgcacacattttgga

SEQ ID NO: 3360996 - DNA, 25 bp, Homo sapien
caaagaatgtggcatttcgatcatc

SEQ ID NO: 3360997 - DNA, 25 bp, Homo sapien
cactttttataggaaccgctactct

SEQ ID NO: 3360998 - DNA, 25 bp, Homo sapien
ccagcgtcaggatgtcgcatctgtt

SEQ ID NO: 3360999 - DNA, 25 bp, Homo sapien
gcagcactggtgcaaaaagtatgct

SEQ ID NO: 3361000 - DNA, 25 bp, Homo sapien
cccactaccccttgatgttttgtag

SEQ ID NO: 3361001 - DNA, 25 bp, Homo sapien
tcattgggttcatctctagcagttg

SEQ ID NO: 3361002 - DNA, 25 bp, Homo sapien
aggagaagaacgacatgctttctaa

SEQ ID NO: 3361003 - DNA, 25 bp, Homo sapien
ggagaagaacgacatgctttctaac

SEQ ID NO: 3361004 - DNA, 25 bp, Homo sapien
ttagcttctgactagaaagttctgc

SEQ ID NO: 3361005 - DNA, 25 bp, Homo sapien
tgcctgataaataggagggttagaa

SEQ ID NO: 3361006 - DNA, 25 bp, Homo sapien
gctttaggaaagattaccagaggta

SEQ ID NO: 3361007 - DNA, 25 bp, Homo sapien
taccagaggtaaatatgcctgataa

SEQ ID NO: 3361008 - DNA, 25 bp, Homo sapien
agcttgtagccagttagaagacttg

SEQ ID NO: 3361009 - DNA, 25 bp, Homo sapien
gcttgtagccagttagaagacttgc

SEQ ID NO: 3361010 - DNA, 25 bp, Homo sapien
tagcttgtagccagttagaagactt

SEQ ID NO: 3361011 - DNA, 25 bp, Homo sapien
gagaggtactgtgcacctgagcttt

SEQ ID NO: 3361012 - DNA, 25 bp, Homo sapien
ggagaggtactgtgcacctgagctt

SEQ ID NO: 3361013 - DNA, 25 bp, Homo sapien
cctttgcagcccctcaagtggggag

SEQ ID NO: 3361014 - DNA, 25 bp, Homo sapien
ctcaagtggggaggttgctacagca

SEQ ID NO: 3361015 - DNA, 25 bp, Homo sapien
cttgctgttttcgatggcaggcact

SEQ ID NO: 3361016 - DNA, 25 bp, Homo sapien
gaagcagaccaactacactgttatt

SEQ ID NO: 3361017 - DNA, 25 bp, Homo sapien
atacgttttaagaagcagaccaact

SEQ ID NO: 3361018 - DNA, 25 bp, Homo sapien
tgaaaatgtcttcccgtgtccagta

SEQ ID NO: 3361019 - DNA, 25 bp, Homo sapien
aaagtttgccactattcttttgaag

SEQ ID NO: 3361020 - DNA, 25 bp, Homo sapien
caagaatgatattgcaaagtttgcc

SEQ ID NO: 3361021 - DNA, 25 bp, Homo sapien
cattagctccaagaatgatattgca

SEQ ID NO: 3361022 - DNA, 25 bp, Homo sapien
aagactgcagcaacattagctccaa

SEQ ID NO: 3361023 - DNA, 25 bp, Homo sapien
gaacaatcagatacggctgatttct

SEQ ID NO: 3361024 - DNA, 25 bp, Homo sapien
cagaatagagagatctcgaatgccc

SEQ ID NO: 3361025 - DNA, 25 bp, Homo sapien
cagatacggctgatttctgaagact

SEQ ID NO: 3361026 - DNA, 25 bp, Homo sapien
gtgatagccatcgttgtcaacagga

SEQ ID NO: 3361027 - DNA, 25 bp, Homo sapien
gacaaactggaaatccccatggagg

SEQ ID NO: 3361028 - DNA, 25 bp, Homo sapien
tcgtgaggtaatcgcacagtttggc

SEQ ID NO: 3361029 - DNA, 25 bp, Homo sapien
ttggcataaacttcaacgtaatgag

SEQ ID NO: 3361030 - DNA, 25 bp, Homo sapien
cttcacctcaaaggagtccaagaca

SEQ ID NO: 3361031 - DNA, 25 bp, Homo sapien
tccttatctccagccagtccgaggg

SEQ ID NO: 3361032 - DNA, 25 bp, Homo sapien
ccagccagtccgagggtcctttctg

SEQ ID NO: 3361033 - DNA, 25 bp, Homo sapien
atctccagccagtccgagggtcctt

SEQ ID NO: 3361034 - DNA, 25 bp, Homo sapien
cctttacatttgctgcccttaggat

SEQ ID NO: 3361035 - DNA, 25 bp, Homo sapien
tcctctatgtctaactcctggttcc

SEQ ID NO: 3361036 - DNA, 25 bp, Homo sapien
agccaatgcactaacttccctcttg

SEQ ID NO: 3361037 - DNA, 25 bp, Homo sapien
ggttccttcagagcaattttccatt

SEQ ID NO: 3361038 - DNA, 25 bp, Homo sapien
tcttgaggatgagcccagaaacctc

SEQ ID NO: 3361039 - DNA, 25 bp, Homo sapien
gagaatttcgtttcgttctgagagc

SEQ ID NO: 3361040 - DNA, 25 bp, Homo sapien
tctgaccgggaaggtctcagtaaag

SEQ ID NO: 3361041 - DNA, 25 bp, Homo sapien
atttctctggccagcacgtgctgcc

SEQ ID NO: 3361042 - DNA, 25 bp, Homo sapien
gagagctttcagtcaatccgattgc

SEQ ID NO: 3361043 - DNA, 25 bp, Homo sapien
cttggctccccgtagattcttgatc

SEQ ID NO: 3361044 - DNA, 25 bp, Homo sapien
ccgtagattcttgatccatccaacg

SEQ ID NO: 3361045 - DNA, 25 bp, Homo sapien
tccatccaacgcagaaattctagca

SEQ ID NO: 3361046 - DNA, 25 bp, Homo sapien
gatacttttaagtgacttggctccc

SEQ ID NO: 3361047 - DNA, 25 bp, Homo sapien
tctgtcatctgaacgctgtttgcca

SEQ ID NO: 3361048 - DNA, 25 bp, Homo sapien
tgaaccgtatgacaaaatgcagaga

SEQ ID NO: 3361049 - DNA, 25 bp, Homo sapien
aaacctgagtggaagataatagcct

SEQ ID NO: 3361050 - DNA, 25 bp, Homo sapien
aactgcctgagaatgcgtctcctaa

SEQ ID NO: 3361051 - DNA, 25 bp, Homo sapien
tcctgtcccccctacaatcaacatc

SEQ ID NO: 3361052 - DNA, 25 bp, Homo sapien
agtatgtacattctatcagtttgga

SEQ ID NO: 3361053 - DNA, 25 bp, Homo sapien
gttcccatatatcctgtccccccta

SEQ ID NO: 3361054 - DNA, 25 bp, Homo sapien
acatcccacaacacagtggtacatt

SEQ ID NO: 3361055 - DNA, 25 bp, Homo sapien
aagggaacttgcctgtatatcactg

SEQ ID NO: 3361056 - DNA, 25 bp, Homo sapien
tgcaatatgcttcaaaagggaactg

SEQ ID NO: 3361057 - DNA, 25 bp, Homo sapien
cctgttagagggcatttgcaatatg

SEQ ID NO: 3361058 - DNA, 25 bp, Homo sapien
aactgatgcatgttctttaagggaa

SEQ ID NO: 3361059 - DNA, 25 bp, Homo sapien
acaaagattgtttccccaataccag

SEQ ID NO: 3361060 - DNA, 25 bp, Homo sapien
gctgaacccttgtcttgaagaaatg

SEQ ID NO: 3361061 - DNA, 25 bp, Homo sapien
tgccagatcaattagaaacagtcct

SEQ ID NO: 3361062 - DNA, 25 bp, Homo sapien
taaattccatgccagatcaattaga

SEQ ID NO: 3361063 - DNA, 25 bp, Homo sapien
tcaaaagtggttcgttgtaatgacc

SEQ ID NO: 3361064 - DNA, 25 bp, Homo sapien
tatctacatgttataggtgcttgct

SEQ ID NO: 3361065 - DNA, 25 bp, Homo sapien
cttcatggtcagagaagtagaacag

SEQ ID NO: 3361066 - DNA, 25 bp, Homo sapien
catcatatcctactgaaaaagagaa

SEQ ID NO: 3361067 - DNA, 25 bp, Homo sapien
ttatttatgacatacccctgtttaa

SEQ ID NO: 3361068 - DNA, 25 bp, Homo sapien
tttatttatgacatacccctgttta

SEQ ID NO: 3361069 - DNA, 25 bp, Homo sapien
tccaaagaggcataaggttgagccc

SEQ ID NO: 3361070 - DNA, 25 bp, Homo sapien
ccctgggtggtgctacgcaaatgca

SEQ ID NO: 3361071 - DNA, 25 bp, Homo sapien
tgccaacgggaggagagtatcacta

SEQ ID NO: 3361072 - DNA, 25 bp, Homo sapien
catgggctaggcttgtgtgtccaaa

SEQ ID NO: 3361073 - DNA, 25 bp, Homo sapien
tgcaaccatagtgtgaacgttcagc

SEQ ID NO: 3361074 - DNA, 25 bp, Homo sapien
gaacgttcagcattgcatactgaaa

SEQ ID NO: 3361075 - DNA, 25 bp, Homo sapien
gaaaaactttgaatctcatgtaaga

SEQ ID NO: 3361076 - DNA, 25 bp, Homo sapien
catgtaagaaggaactgggctagag

SEQ ID NO: 3361077 - DNA, 25 bp, Homo sapien
tagcaacttcgggaacacgggctgt

SEQ ID NO: 3361078 - DNA, 25 bp, Homo sapien
gagatggatctatcccagggcgact

SEQ ID NO: 3361079 - DNA, 25 bp, Homo sapien
gacttctctacttaacgcgctgcgc

SEQ ID NO: 3361080 - DNA, 25 bp, Homo sapien
tgggcacaccacctcgagtttaggg

SEQ ID NO: 3361081 - DNA, 25 bp, Homo sapien
tcctaacggccgagtacaggtacag

SEQ ID NO: 3361082 - DNA, 25 bp, Homo sapien
gaggcgtcgtccttgttctcccagt

SEQ ID NO: 3361083 - DNA, 25 bp, Homo sapien
ggcggaatcctctgctctgaagctg

SEQ ID NO: 3361084 - DNA, 25 bp, Homo sapien
ttccaaggacaggttggcgacggcc

SEQ ID NO: 3361085 - DNA, 25 bp, Homo sapien
acctccagcagtttcggaagctccg

SEQ ID NO: 3361086 - DNA, 25 bp, Homo sapien
gcagggacagtgtccggccgctaat

SEQ ID NO: 3361087 - DNA, 25 bp, Homo sapien
ggctttcctgcagacagggggcggg

SEQ ID NO: 3361088 - DNA, 25 bp, Homo sapien
agccagcgctgcggtgggaacttca

SEQ ID NO: 3361089 - DNA, 25 bp, Homo sapien
cagacaattgttctgctgcagtgcc

SEQ ID NO: 3361090 - DNA, 25 bp, Homo sapien
aaaggaaggcgcgggtcattttcag

SEQ ID NO: 3361091 - DNA, 25 bp, Homo sapien
gacgaaagaacactgtggaaaggaa

SEQ ID NO: 3361092 - DNA, 25 bp, Homo sapien
catttgcgcttttcggtctcggacg

SEQ ID NO: 3361093 - DNA, 25 bp, Homo sapien
gactcagctgacctgaaatgcccac

SEQ ID NO: 3361094 - DNA, 25 bp, Homo sapien
ctcggaatccgtcttcccggcagtg

SEQ ID NO: 3361095 - DNA, 25 bp, Homo sapien
tcctcgggtgactcagctgacctga

SEQ ID NO: 3361096 - DNA, 25 bp, Homo sapien
taattacacccttctgcctcggaat

SEQ ID NO: 3361097 - DNA, 25 bp, Homo sapien
cggcaagagccattcatcagcgtga

SEQ ID NO: 3361098 - DNA, 25 bp, Homo sapien
ccccattttgttggtgcgtgtgaat

SEQ ID NO: 3361099 - DNA, 25 bp, Homo sapien
ttagtgttttcaatcggcggcgggc

SEQ ID NO: 3361100 - DNA, 25 bp, Homo sapien
tcaaatggcgcagtaagttcattag

SEQ ID NO: 3361101 - DNA, 25 bp, Homo sapien
cgccccgtgattgggctctcccgcg

SEQ ID NO: 3361102 - DNA, 25 bp, Homo sapien
cggaggagtcaaggattataaatga

SEQ ID NO: 3361103 - DNA, 25 bp, Homo sapien
tcatcttgacaagtggcggagcgga

SEQ ID NO: 3361104 - DNA, 25 bp, Homo sapien
gtccagctcgccccgtgattgggct

SEQ ID NO: 3361105 - DNA, 25 bp, Homo sapien
cccggcctggtccgccgccttggag

SEQ ID NO: 3361106 - DNA, 25 bp, Homo sapien
ccggtcctcccgctcgcgggctgaa

SEQ ID NO: 3361107 - DNA, 25 bp, Homo sapien
gcctggtccgccgccttggaggagg

SEQ ID NO: 3361108 - DNA, 25 bp, Homo sapien
ggtcctcccgctcgcgggctgaacc

SEQ ID NO: 3361109 - DNA, 25 bp, Homo sapien
agttagtgttgtgttcatagttgcc

SEQ ID NO: 3361110 - DNA, 25 bp, Homo sapien
ccttgtaaagtggaatgatagcccg

SEQ ID NO: 3361111 - DNA, 25 bp, Homo sapien
tgaacacatgcattcggagtaaagt

SEQ ID NO: 3361112 - DNA, 25 bp, Homo sapien
tagcccgtaggaaaattgaacacat

SEQ ID NO: 3361113 - DNA, 25 bp, Homo sapien
gagtgctgttgtaatcaattttaga

SEQ ID NO: 3361114 - DNA, 25 bp, Homo sapien
tcattttgagtgctgttgtaatcaa

SEQ ID NO: 3361115 - DNA, 25 bp, Homo sapien
tggtttggagggctgcgttcatttt

SEQ ID NO: 3361116 - DNA, 25 bp, Homo sapien
gagggctgcgttcattttgagtgct

SEQ ID NO: 3361117 - DNA, 25 bp, Homo sapien
gttttatcagcttttaagtctcttc

SEQ ID NO: 3361118 - DNA, 25 bp, Homo sapien
tggttttatcagcttttaagtctct

SEQ ID NO: 3361119 - DNA, 25 bp, Homo sapien
ctgaaagaccactttaagattttct

SEQ ID NO: 3361120 - DNA, 25 bp, Homo sapien
tagatgatccgataattctggtgtt

SEQ ID NO: 3361121 - DNA, 25 bp, Homo sapien
ttagatgatccgataattctggtgt

SEQ ID NO: 3361122 - DNA, 25 bp, Homo sapien
gctcttgtgtccaagtggctgtgtc

SEQ ID NO: 3361123 - DNA, 25 bp, Homo sapien
tgctcttgtgtccaagtggctgtgt

SEQ ID NO: 3361124 - DNA, 25 bp, Homo sapien
tgtgctcttgtgtccaagtggctgt

SEQ ID NO: 3361125 - DNA, 25 bp, Homo sapien
tctgtgctcttgtgtccaagtggct

SEQ ID NO: 3361126 - DNA, 25 bp, Homo sapien
gacggtccacagttgcttcagaggg

SEQ ID NO: 3361127 - DNA, 25 bp, Homo sapien
gctgagaggctgttccagtccggcc

SEQ ID NO: 3361128 - DNA, 25 bp, Homo sapien
gtagtggacgctcatactgacggtc

SEQ ID NO: 3361129 - DNA, 25 bp, Homo sapien
tgtcttatccgggagcagcgacacg

SEQ ID NO: 3361130 - DNA, 25 bp, Homo sapien
aatgtggctgtttcgtaaagatacc

SEQ ID NO: 3361131 - DNA, 25 bp, Homo sapien
ctcagagacatcgtcaaagagcatg

SEQ ID NO: 3361132 - DNA, 25 bp, Homo sapien
aaagccattcttagggacttcagca

SEQ ID NO: 3361133 - DNA, 25 bp, Homo sapien
tgaagcttggcacctcagtcatggc

SEQ ID NO: 3361134 - DNA, 25 bp, Homo sapien
tgctctaccctcaaaactacttaag

SEQ ID NO: 3361135 - DNA, 25 bp, Homo sapien
atttctgctatggaaccaccctgaa

SEQ ID NO: 3361136 - DNA, 25 bp, Homo sapien
ggctctacccgctgcccttggtctt

SEQ ID NO: 3361137 - DNA, 25 bp, Homo sapien
actacttaagtgatgttgcttgttg

SEQ ID NO: 3361138 - DNA, 25 bp, Homo sapien
ccagaagctgaaacaaaacgatgcc

SEQ ID NO: 3361139 - DNA, 25 bp, Homo sapien
gcatacgcttcgcagtgtgccaaag

SEQ ID NO: 3361140 - DNA, 25 bp, Homo sapien
aaacgatgccagctgactttaaggc

SEQ ID NO: 3361141 - DNA, 25 bp, Homo sapien
gaaacagcggttgtacatagaaaac

SEQ ID NO: 3361142 - DNA, 25 bp, Homo sapien
gaacctaggaggatgctgttgtaga

SEQ ID NO: 3361143 - DNA, 25 bp, Homo sapien
caccatcacaggtttggaatttgag

SEQ ID NO: 3361144 - DNA, 25 bp, Homo sapien
tttcatcatgaagttaaggtaagca

SEQ ID NO: 3361145 - DNA, 25 bp, Homo sapien
aggtaagcattgtgtattcccatga

SEQ ID NO: 3361146 - DNA, 25 bp, Homo sapien
aaatggtatccttgatccgagctgc

SEQ ID NO: 3361147 - DNA, 25 bp, Homo sapien
ggtgtacttcaccagtttcaagact

SEQ ID NO: 3361148 - DNA, 25 bp, Homo sapien
taagtgagccttctgattgggacga

SEQ ID NO: 3361149 - DNA, 25 bp, Homo sapien
tctgagcagaattgttaagtgagcc

SEQ ID NO: 3361150 - DNA, 25 bp, Homo sapien
tcaggacctgactccttgaagttgt

SEQ ID NO: 3361151 - DNA, 25 bp, Homo sapien
atcttctcggatgccaaggagctca

SEQ ID NO: 3361152 - DNA, 25 bp, Homo sapien
ttctctcgtcctcaaatgtgatgca

SEQ ID NO: 3361153 - DNA, 25 bp, Homo sapien
cattgttcacgtttcccatcctcgg

SEQ ID NO: 3361154 - DNA, 25 bp, Homo sapien
gggtctgaagttattcccatggcag

SEQ ID NO: 3361155 - DNA, 25 bp, Homo sapien
cagcggaagggggtctgaagttatt

SEQ ID NO: 3361156 - DNA, 25 bp, Homo sapien
aagggggtctgaagttattcccatg

SEQ ID NO: 3361157 - DNA, 25 bp, Homo sapien
gggggtctgaagttattcccatggc

SEQ ID NO: 3361158 - DNA, 25 bp, Homo sapien
tggaatctgaatctttgacccggca

SEQ ID NO: 3361159 - DNA, 25 bp, Homo sapien
ggacttgctgttctttagtcagagg

SEQ ID NO: 3361160 - DNA, 25 bp, Homo sapien
ggactttctgacctgaaaggacttg

SEQ ID NO: 3361161 - DNA, 25 bp, Homo sapien
tgacccggcaacaataaaagtgatt

SEQ ID NO: 3361162 - DNA, 25 bp, Homo sapien
cacagttagtaattgtgtaaatgcg

SEQ ID NO: 3361163 - DNA, 25 bp, Homo sapien
caggcacagttagtaattgtgtaaa

SEQ ID NO: 3361164 - DNA, 25 bp, Homo sapien
ctggtggcctgggagaattcttcag

SEQ ID NO: 3361165 - DNA, 25 bp, Homo sapien
attcttcaggcacagttagtaattg

SEQ ID NO: 3361166 - DNA, 25 bp, Homo sapien
tgatgtgtggactggacaaaccgag

SEQ ID NO: 3361167 - DNA, 25 bp, Homo sapien
tacccttgtcgctgtccctcatcat

SEQ ID NO: 3361168 - DNA, 25 bp, Homo sapien
cttccctcctaagggagtgatgtgt

SEQ ID NO: 3361169 - DNA, 25 bp, Homo sapien
actggacaaaccgaggccaacaggg

SEQ ID NO: 3361170 - DNA, 25 bp, Homo sapien
gtcagtttcgttactccatcttcat

SEQ ID NO: 3361171 - DNA, 25 bp, Homo sapien
cagtttcgttactccatcttcatca

SEQ ID NO: 3361172 - DNA, 25 bp, Homo sapien
agtttcgttactccatcttcatcac

SEQ ID NO: 3361173 - DNA, 25 bp, Homo sapien
ctgtcagtttcgttactccatcttc

SEQ ID NO: 3361174 - DNA, 25 bp, Homo sapien
ggcatcacgcagcatgctgcgattc

SEQ ID NO: 3361175 - DNA, 25 bp, Homo sapien
tcacttcgtcctacagtctcttctg

SEQ ID NO: 3361176 - DNA, 25 bp, Homo sapien
acagtctcttctggcatcacgcagc

SEQ ID NO: 3361177 - DNA, 25 bp, Homo sapien
ctgcgattccaggtccaaatgtggg

SEQ ID NO: 3361178 - DNA, 25 bp, Homo sapien
aattctgtggtacataggaaactgg

SEQ ID NO: 3361179 - DNA, 25 bp, Homo sapien
tgactgacgacagcgggagatgaac

SEQ ID NO: 3361180 - DNA, 25 bp, Homo sapien
tggaatggttaggacctctcagagc

SEQ ID NO: 3361181 - DNA, 25 bp, Homo sapien
ggcacctgatcttttcagtggtgaa

SEQ ID NO: 3361182 - DNA, 25 bp, Homo sapien
ctcctggtgcctgttcaagcttcat

SEQ ID NO: 3361183 - DNA, 25 bp, Homo sapien
ctctcctggtgcctgttcaagcttc

SEQ ID NO: 3361184 - DNA, 25 bp, Homo sapien
tctcctggtgcctgttcaagcttca

SEQ ID NO: 3361185 - DNA, 25 bp, Homo sapien
gttatctcaacaggtggtagctggt

SEQ ID NO: 3361186 - DNA, 25 bp, Homo sapien
tctgcagatctcaaagcatgtgtga

SEQ ID NO: 3361187 - DNA, 25 bp, Homo sapien
aagtatgtgtattcattgtggttgg

SEQ ID NO: 3361188 - DNA, 25 bp, Homo sapien
cattgtggttggtagtaatacagca

SEQ ID NO: 3361189 - DNA, 25 bp, Homo sapien
tcgttcatccacagagcgagtggcc

SEQ ID NO: 3361190 - DNA, 25 bp, Homo sapien
aaagttcgttcatccacagagcgag

SEQ ID NO: 3361191 - DNA, 25 bp, Homo sapien
tccacaaaagttcgttcatccacag

SEQ ID NO: 3361192 - DNA, 25 bp, Homo sapien
ccacagagcgagtggcccctgtgtt

SEQ ID NO: 3361193 - DNA, 25 bp, Homo sapien
aagatttagagtaagaatagcagag

SEQ ID NO: 3361194 - DNA, 25 bp, Homo sapien
gactgtagcgtgcaatctccagtgt

SEQ ID NO: 3361195 - DNA, 25 bp, Homo sapien
cttcccaggcggtggttcttcagga

SEQ ID NO: 3361196 - DNA, 25 bp, Homo sapien
gcctcggtgtgctccaagatttaga

SEQ ID NO: 3361197 - DNA, 25 bp, Homo sapien
tatcttgcgtgcactttgagcatgt

SEQ ID NO: 3361198 - DNA, 25 bp, Homo sapien
agttatcttgcgtgcactttgagca

SEQ ID NO: 3361199 - DNA, 25 bp, Homo sapien
aagttatcttgcgtgcactttgagc

SEQ ID NO: 3361200 - DNA, 25 bp, Homo sapien
tcaagttatcttgcgtgcactttga

SEQ ID NO: 3361201 - DNA, 25 bp, Homo sapien
atcagagcctggcaattctccctgc

SEQ ID NO: 3361202 - DNA, 25 bp, Homo sapien
gagcctggcaattctccctgcgagt

SEQ ID NO: 3361203 - DNA, 25 bp, Homo sapien
tctagcagggtgttcctcatggtgc

SEQ ID NO: 3361204 - DNA, 25 bp, Homo sapien
gtgttcctcatggtgccattcccca

SEQ ID NO: 3361205 - DNA, 25 bp, Homo sapien
atcaccacctacagcctcaaggatg

SEQ ID NO: 3361206 - DNA, 25 bp, Homo sapien
tgaagcccgcttctcatcaccacct

SEQ ID NO: 3361207 - DNA, 25 bp, Homo sapien
aggatgcctgcttgcatctttgagg

SEQ ID NO: 3361208 - DNA, 25 bp, Homo sapien
cctgcttgcatctttgaggcttttg

SEQ ID NO: 3361209 - DNA, 25 bp, Homo sapien
gcatggatgagcgaggcatgtcaca

SEQ ID NO: 3361210 - DNA, 25 bp, Homo sapien
tgaggacagaatcagagcatggatg

SEQ ID NO: 3361211 - DNA, 25 bp, Homo sapien
gacgtgggtgtaaatctatggcaga

SEQ ID NO: 3361212 - DNA, 25 bp, Homo sapien
tatggcagagtttgtgttggtcttc

SEQ ID NO: 3361213 - DNA, 25 bp, Homo sapien
taaaagacagttgattgtgagttag

SEQ ID NO: 3361214 - DNA, 25 bp, Homo sapien
tgattgtgagttagtcttgagggtt

SEQ ID NO: 3361215 - DNA, 25 bp, Homo sapien
aactggggagtgacaaggtttgatt

SEQ ID NO: 3361216 - DNA, 25 bp, Homo sapien
gaggagaggagcgtaaccaggtggt

SEQ ID NO: 3361217 - DNA, 25 bp, Homo sapien
catgttcgccgtgttctacctccat

SEQ ID NO: 3361218 - DNA, 25 bp, Homo sapien
gtttgactggggtcgcatgttcgcc

SEQ ID NO: 3361219 - DNA, 25 bp, Homo sapien
agtgaggacgtgtttggatattgaa

SEQ ID NO: 3361220 - DNA, 25 bp, Homo sapien
aaagtggagtgaggacgtgtttgga

SEQ ID NO: 3361221 - DNA, 25 bp, Homo sapien
ctatctacagcggcctgttcctggc

SEQ ID NO: 3361222 - DNA, 25 bp, Homo sapien
tgggacaactctgccaccaatttat

SEQ ID NO: 3361223 - DNA, 25 bp, Homo sapien
tccccgtactgctttcagggcagcc

SEQ ID NO: 3361224 - DNA, 25 bp, Homo sapien
tattttgcacgttcttgggacaact

SEQ ID NO: 3361225 - DNA, 25 bp, Homo sapien
tctgccaccaatttatctctacaat

SEQ ID NO: 3361226 - DNA, 25 bp, Homo sapien
aggcgctctagggtcttaaactcag

SEQ ID NO: 3361227 - DNA, 25 bp, Homo sapien
atattgtctccaggcgctctagggt

SEQ ID NO: 3361228 - DNA, 25 bp, Homo sapien
tgtctccaggcgctctagggtctta

SEQ ID NO: 3361229 - DNA, 25 bp, Homo sapien
cagtggggtcgcgttcccatggcat

SEQ ID NO: 3361230 - DNA, 25 bp, Homo sapien
tcagtgaagttcgagtgactcattt

SEQ ID NO: 3361231 - DNA, 25 bp, Homo sapien
tactccttcccattcacactcatgg

SEQ ID NO: 3361232 - DNA, 25 bp, Homo sapien
ttctgcccaggcaccttggtcactc

SEQ ID NO: 3361233 - DNA, 25 bp, Homo sapien
agcctgcgctgctcccacacgaggc

SEQ ID NO: 3361234 - DNA, 25 bp, Homo sapien
tgcatcttacgttgaacgtcacctc

SEQ ID NO: 3361235 - DNA, 25 bp, Homo sapien
acttcctcggagcctgtacccaggg

SEQ ID NO: 3361236 - DNA, 25 bp, Homo sapien
gggtgcatcttacgttgaacgtcac

SEQ ID NO: 3361237 - DNA, 25 bp, Homo sapien
tgtacccaggggtgcatcttacgtt

SEQ ID NO: 3361238 - DNA, 25 bp, Homo sapien
ttggcatatttgctgtccatagctt

SEQ ID NO: 3361239 - DNA, 25 bp, Homo sapien
tttggcatatttgctgtccatagct

SEQ ID NO: 3361240 - DNA, 25 bp, Homo sapien
gaattctctagctcgtttggcatat

SEQ ID NO: 3361241 - DNA, 25 bp, Homo sapien
tctctagctcgtttggcatatttgc

SEQ ID NO: 3361242 - DNA, 25 bp, Homo sapien
tctttggctaccactgagggttaga

SEQ ID NO: 3361243 - DNA, 25 bp, Homo sapien
ttgctgcttgtgaacgtggtatctt

SEQ ID NO: 3361244 - DNA, 25 bp, Homo sapien
cacaggtggatggtaaggtctaatt

SEQ ID NO: 3361245 - DNA, 25 bp, Homo sapien
gagggttagactcaggtccactaca

SEQ ID NO: 3361246 - DNA, 25 bp, Homo sapien
tatagaagaggacatggtcaaggca

SEQ ID NO: 3361247 - DNA, 25 bp, Homo sapien
ggacatggtcaaggcagtaaacaga

SEQ ID NO: 3361248 - DNA, 25 bp, Homo sapien
gaagaggacatggtcaaggcagtaa

SEQ ID NO: 3361249 - DNA, 25 bp, Homo sapien
tggaagtatagaagaggacatggtc

SEQ ID NO: 3361250 - DNA, 25 bp, Homo sapien
tcacagaagcccatttcatgtaggg

SEQ ID NO: 3361251 - DNA, 25 bp, Homo sapien
gcttgggaggaagtcgttgctatcc

SEQ ID NO: 3361252 - DNA, 25 bp, Homo sapien
gaagtcgttgctatcctggatgttc

SEQ ID NO: 3361253 - DNA, 25 bp, Homo sapien
tggatgttcttacgttctttagtaa

SEQ ID NO: 3361254 - DNA, 25 bp, Homo sapien
tgggaattcgtctgtccactgacag

SEQ ID NO: 3361255 - DNA, 25 bp, Homo sapien
gagacacctgcattcgcatcgctga

SEQ ID NO: 3361256 - DNA, 25 bp, Homo sapien
ccactttccagggatccgtgaggaa

SEQ ID NO: 3361257 - DNA, 25 bp, Homo sapien
gatgccatgttgacggagacacctg

SEQ ID NO: 3361258 - DNA, 25 bp, Homo sapien
gggcagtagacagtgtatatgttta

SEQ ID NO: 3361259 - DNA, 25 bp, Homo sapien
gtgggcagtagacagtgtatatgtt

SEQ ID NO: 3361260 - DNA, 25 bp, Homo sapien
cagtagacagtgtatatgtttatta

SEQ ID NO: 3361261 - DNA, 25 bp, Homo sapien
ctggtgggcagtagacagtgtatat

SEQ ID NO: 3361262 - DNA, 25 bp, Homo sapien
cctctgaaccagatattattactgg

SEQ ID NO: 3361263 - DNA, 25 bp, Homo sapien
ctgaaccagatattattactggcaa

SEQ ID NO: 3361264 - DNA, 25 bp, Homo sapien
tctgaaccagatattattactggca

SEQ ID NO: 3361265 - DNA, 25 bp, Homo sapien
tccctctgaaccagatattattact

SEQ ID NO: 3361266 - DNA, 25 bp, Homo sapien
aaataagtgttagagccatagaacc

SEQ ID NO: 3361267 - DNA, 25 bp, Homo sapien
aattgaatagcagtgagtgctgaat

SEQ ID NO: 3361268 - DNA, 25 bp, Homo sapien
gagtgctgaatcaggtttattgatg

SEQ ID NO: 3361269 - DNA, 25 bp, Homo sapien
catagaaccttcgtttatttgccat

SEQ ID NO: 3361270 - DNA, 25 bp, Homo sapien
tgtatttatcttcaccacagccgta

SEQ ID NO: 3361271 - DNA, 25 bp, Homo sapien
gccgtaatgagggttttgcagctga

SEQ ID NO: 3361272 - DNA, 25 bp, Homo sapien
ccacagccgtaatgagggttttgca

SEQ ID NO: 3361273 - DNA, 25 bp, Homo sapien
ggttttgcagctgatatactttcca

SEQ ID NO: 3361274 - DNA, 25 bp, Homo sapien
cctacttcttggtaaatttctgtgt

SEQ ID NO: 3361275 - DNA, 25 bp, Homo sapien
aaaattcttatttcctggatcacca

SEQ ID NO: 3361276 - DNA, 25 bp, Homo sapien
ttctgtgtaatttccagctttggat

SEQ ID NO: 3361277 - DNA, 25 bp, Homo sapien
gctttggatttctctagagttttcc

SEQ ID NO: 3361278 - DNA, 25 bp, Homo sapien
ttatgttaagaattgcttcagcaac

SEQ ID NO: 3361279 - DNA, 25 bp, Homo sapien
catttgcgctgtcatttggcacgct

SEQ ID NO: 3361280 - DNA, 25 bp, Homo sapien
cacgcttttggaatcaatattgtag

SEQ ID NO: 3361281 - DNA, 25 bp, Homo sapien
aattgcttcagcaacatttgcgctg

SEQ ID NO: 3361282 - DNA, 25 bp, Homo sapien
cggaatttaacgaaggccacatctt

SEQ ID NO: 3361283 - DNA, 25 bp, Homo sapien
ccggaatttaacgaaggccacatct

SEQ ID NO: 3361284 - DNA, 25 bp, Homo sapien
ggaatttaacgaaggccacatcttg

SEQ ID NO: 3361285 - DNA, 25 bp, Homo sapien
gcgaattagggtattttcaaccatc

SEQ ID NO: 3361286 - DNA, 25 bp, Homo sapien
ttgcgaattagggtattttcaacca

SEQ ID NO: 3361287 - DNA, 25 bp, Homo sapien
tttcaaccatctgggcatctggggt

SEQ ID NO: 3361288 - DNA, 25 bp, Homo sapien
atctgggcatctggggttgctcttt

SEQ ID NO: 3361289 - DNA, 25 bp, Homo sapien
gtttcattgactgtattagcgttaa

SEQ ID NO: 3361290 - DNA, 25 bp, Homo sapien
ttcattgactgtattagcgttaaac

SEQ ID NO: 3361291 - DNA, 25 bp, Homo sapien
ctgtttcattgactgtattagcgtt

SEQ ID NO: 3361292 - DNA, 25 bp, Homo sapien
cattgactgtattagcgttaaactt

SEQ ID NO: 3361293 - DNA, 25 bp, Homo sapien
gttgttgttgccaaggactcctctg

SEQ ID NO: 3361294 - DNA, 25 bp, Homo sapien
tggttgttgttgccaaggactcctc

SEQ ID NO: 3361295 - DNA, 25 bp, Homo sapien
ggttgttgttgccaaggactcctct

SEQ ID NO: 3361296 - DNA, 25 bp, Homo sapien
aagtgggattgcagtaccagtttcg

SEQ ID NO: 3361297 - DNA, 25 bp, Homo sapien
ccagtttcgagtttgctaacaaggt

SEQ ID NO: 3361298 - DNA, 25 bp, Homo sapien
gattgcagtaccagtttcgagtttg

SEQ ID NO: 3361299 - DNA, 25 bp, Homo sapien
ttgtaaagtgggattgcagtaccag

SEQ ID NO: 3361300 - DNA, 25 bp, Homo sapien
tgatgtccacggcagggttatcctg

SEQ ID NO: 3361301 - DNA, 25 bp, Homo sapien
gcccaatctggagcaaaatggcatg

SEQ ID NO: 3361302 - DNA, 25 bp, Homo sapien
gtcccacttgatatgatgattactg

SEQ ID NO: 3361303 - DNA, 25 bp, Homo sapien
tcctggatgtccctgtgtagcccaa

SEQ ID NO: 3361304 - DNA, 25 bp, Homo sapien
cagccacctgctctaccgtacggag

SEQ ID NO: 3361305 - DNA, 25 bp, Homo sapien
gatgtgaacagtgaagggtcgttct

SEQ ID NO: 3361306 - DNA, 25 bp, Homo sapien
catataaggctgtgggatgtgaaca

SEQ ID NO: 3361307 - DNA, 25 bp, Homo sapien
tctaagcggctctccattgctgcag

SEQ ID NO: 3361308 - DNA, 25 bp, Homo sapien
aaaccttcggaccaactgcaaacat

SEQ ID NO: 3361309 - DNA, 25 bp, Homo sapien
ttgaaagctcattaactggaacggt

SEQ ID NO: 3361310 - DNA, 25 bp, Homo sapien
tctgggaacaaaatgggccccatcc

SEQ ID NO: 3361311 - DNA, 25 bp, Homo sapien
ctgcaaacatttatcttctgggaac

SEQ ID NO: 3361312 - DNA, 25 bp, Homo sapien
tcccactggggtcatctctcagaag

SEQ ID NO: 3361313 - DNA, 25 bp, Homo sapien
catctctcagaagatacgcagggtc

SEQ ID NO: 3361314 - DNA, 25 bp, Homo sapien
gttggagaacctggcatcccactgg

SEQ ID NO: 3361315 - DNA, 25 bp, Homo sapien
tgttggagaacctggcatcccactg

SEQ ID NO: 3361316 - DNA, 25 bp, Homo sapien
ccaggattgggctagatattccaca

SEQ ID NO: 3361317 - DNA, 25 bp, Homo sapien
ttttaactgtaatagccccaggagc

SEQ ID NO: 3361318 - DNA, 25 bp, Homo sapien
ttcttcagcagtcgatgatgaggac

SEQ ID NO: 3361319 - DNA, 25 bp, Homo sapien
tggctgcggtattttcccctgtcgg

SEQ ID NO: 3361320 - DNA, 25 bp, Homo sapien
tgtctcccgaggctcacagtatttc

SEQ ID NO: 3361321 - DNA, 25 bp, Homo sapien
atgcctggacgcatggcccacgcag

SEQ ID NO: 3361322 - DNA, 25 bp, Homo sapien
gtagctctcggctggcaagctgcca

SEQ ID NO: 3361323 - DNA, 25 bp, Homo sapien
tatttctctttgcagggcctcgcta

SEQ ID NO: 3361324 - DNA, 25 bp, Homo sapien
ggcagtttccgtgcgaaatgaatcc

SEQ ID NO: 3361325 - DNA, 25 bp, Homo sapien
catcattcgggatgaccattggctg

SEQ ID NO: 3361326 - DNA, 25 bp, Homo sapien
gcaacttggcttttacattaggcag

SEQ ID NO: 3361327 - DNA, 25 bp, Homo sapien
gaaatggccctttagatctaccagg

SEQ ID NO: 3361328 - DNA, 25 bp, Homo sapien
aataaatctttaatggcaatttgca

SEQ ID NO: 3361329 - DNA, 25 bp, Homo sapien
ataaatctttaatggcaatttgcat

SEQ ID NO: 3361330 - DNA, 25 bp, Homo sapien
cttaataaatctttaatggcaattt

SEQ ID NO: 3361331 - DNA, 25 bp, Homo sapien
taataaatctttaatggcaatttgc

SEQ ID NO: 3361332 - DNA, 25 bp, Homo sapien
gcctttaggcatatcataatgtctc

SEQ ID NO: 3361333 - DNA, 25 bp, Homo sapien
acttctttgcttaagggagtatggg

SEQ ID NO: 3361334 - DNA, 25 bp, Homo sapien
ggtcgtagggactctcattttctat

SEQ ID NO: 3361335 - DNA, 25 bp, Homo sapien
tctgtttgactgtgaaggtcgtagg

SEQ ID NO: 3361336 - DNA, 25 bp, Homo sapien
gctgtccagccctggtatatcatgg

SEQ ID NO: 3361337 - DNA, 25 bp, Homo sapien
tatatcatggagagtggctcgggcc

SEQ ID NO: 3361338 - DNA, 25 bp, Homo sapien
tcagcccctggtaccgtcttctctc

SEQ ID NO: 3361339 - DNA, 25 bp, Homo sapien
gggtcgcgacactgactcgtcaacg

SEQ ID NO: 3361340 - DNA, 25 bp, Homo sapien
ctttcagtggcctggttcttagcta

SEQ ID NO: 3361341 - DNA, 25 bp, Homo sapien
gcctggttcttagctaacacaactg

SEQ ID NO: 3361342 - DNA, 25 bp, Homo sapien
tcacaaatacaagctgcggaacttc

SEQ ID NO: 3361343 - DNA, 25 bp, Homo sapien
aactgcagtcacaaatacaagctgc

SEQ ID NO: 3361344 - DNA, 25 bp, Homo sapien
tattttcgctggtcggtgctgcctg

SEQ ID NO: 3361345 - DNA, 25 bp, Homo sapien
caccagtattttcgctggtcggtgc

SEQ ID NO: 3361346 - DNA, 25 bp, Homo sapien
agagtttccaagagctgacttgcat

SEQ ID NO: 3361347 - DNA, 25 bp, Homo sapien
caccttcgcaccagtattttcgctg

SEQ ID NO: 3361348 - DNA, 25 bp, Homo sapien
tgctatggactgcatatgcctgcca

SEQ ID NO: 3361349 - DNA, 25 bp, Homo sapien
ggaaatggttgtgctatggactgca

SEQ ID NO: 3361350 - DNA, 25 bp, Homo sapien
tttggtatttggtcgtaatagagat

SEQ ID NO: 3361351 - DNA, 25 bp, Homo sapien
tatgcctgccacttttggtatttgg

SEQ ID NO: 3361352 - DNA, 25 bp, Homo sapien
gaaacgagacagctagttctacatt

SEQ ID NO: 3361353 - DNA, 25 bp, Homo sapien
gtgaaagtgaaaacacgctgaaacg

SEQ ID NO: 3361354 - DNA, 25 bp, Homo sapien
gacagctagttctacattctgataa

SEQ ID NO: 3361355 - DNA, 25 bp, Homo sapien
gaaaacacgctgaaacgagacagct

SEQ ID NO: 3361356 - DNA, 25 bp, Homo sapien
ttctgaactcttcttgcaagtgatt

SEQ ID NO: 3361357 - DNA, 25 bp, Homo sapien
tcttcttgcaagtgattgcaaactg

SEQ ID NO: 3361358 - DNA, 25 bp, Homo sapien
aactcttcttgcaagtgattgcaaa

SEQ ID NO: 3361359 - DNA, 25 bp, Homo sapien
tgaactcttcttgcaagtgattgca

SEQ ID NO: 3361360 - DNA, 25 bp, Homo sapien
tgagctgtgtggaagattcacttat

SEQ ID NO: 3361361 - DNA, 25 bp, Homo sapien
gagctgtgtggaagattcacttatt

SEQ ID NO: 3361362 - DNA, 25 bp, Homo sapien
agctgtgtggaagattcacttattt

SEQ ID NO: 3361363 - DNA, 25 bp, Homo sapien
tggcagtggactgcatctacccagc

SEQ ID NO: 3361364 - DNA, 25 bp, Homo sapien
ggtgctgccatggacattggtgtaa

SEQ ID NO: 3361365 - DNA, 25 bp, Homo sapien
tgttccaggtaaagtgcacctgctg

SEQ ID NO: 3361366 - DNA, 25 bp, Homo sapien
gagaagaacaggtacatgctagccc

SEQ ID NO: 3361367 - DNA, 25 bp, Homo sapien
catgatccgtgaagcctcttttgaa

SEQ ID NO: 3361368 - DNA, 25 bp, Homo sapien
cgtgaagcctcttttgaagtcaggt

SEQ ID NO: 3361369 - DNA, 25 bp, Homo sapien
tgtcatattcatgatccgtgaagcc

SEQ ID NO: 3361370 - DNA, 25 bp, Homo sapien
tatctgtcatattcatgatccgtga

SEQ ID NO: 3361371 - DNA, 25 bp, Homo sapien
tgttcttgtattggtttcttaggca

SEQ ID NO: 3361372 - DNA, 25 bp, Homo sapien
ttcttgtattggtttcttaggcagg

SEQ ID NO: 3361373 - DNA, 25 bp, Homo sapien
gttcttgtattggtttcttaggcag

SEQ ID NO: 3361374 - DNA, 25 bp, Homo sapien
gtgttcttgtattggtttcttaggc

SEQ ID NO: 3361375 - DNA, 25 bp, Homo sapien
gaagccttggaagccttcaattcat

SEQ ID NO: 3361376 - DNA, 25 bp, Homo sapien
ttcaccaacaccactacttgatgaa

SEQ ID NO: 3361377 - DNA, 25 bp, Homo sapien
gatgaagactccctagatcctcttt

SEQ ID NO: 3361378 - DNA, 25 bp, Homo sapien
tattcataggagtctactgtgttca

SEQ ID NO: 3361379 - DNA, 25 bp, Homo sapien
tattcgtcactttcctgtaacttgg

SEQ ID NO: 3361380 - DNA, 25 bp, Homo sapien
gcagtcatcctctttttacgtttaa

SEQ ID NO: 3361381 - DNA, 25 bp, Homo sapien
ttattcgtcactttcctgtaacttg

SEQ ID NO: 3361382 - DNA, 25 bp, Homo sapien
ggatgcagtcatcctctttttacgt

SEQ ID NO: 3361383 - DNA, 25 bp, Homo sapien
taatgctgctatagagttgtccaga

SEQ ID NO: 3361384 - DNA, 25 bp, Homo sapien
cctctgacatctgccacgtttggga

SEQ ID NO: 3361385 - DNA, 25 bp, Homo sapien
tgcctgcaggagtttagttgtcaaa

SEQ ID NO: 3361386 - DNA, 25 bp, Homo sapien
cgagttctattgtccccatgtgtat

SEQ ID NO: 3361387 - DNA, 25 bp, Homo sapien
ccatactcaaaatgaagccagcaag

SEQ ID NO: 3361388 - DNA, 25 bp, Homo sapien
tgagtggagtaccatactcaaaatg

SEQ ID NO: 3361389 - DNA, 25 bp, Homo sapien
tgtttgcttgagtggagtaccatac

SEQ ID NO: 3361390 - DNA, 25 bp, Homo sapien
atgaagccagcaagatttccaaata

SEQ ID NO: 3361391 - DNA, 25 bp, Homo sapien
tactgggctagtgccataattgaac

SEQ ID NO: 3361392 - DNA, 25 bp, Homo sapien
gatttccaagtagattatagttttc

SEQ ID NO: 3361393 - DNA, 25 bp, Homo sapien
tagaaaggaagaacgtcttatatac

SEQ ID NO: 3361394 - DNA, 25 bp, Homo sapien
tctattcctatcattctgaagagat

SEQ ID NO: 3361395 - DNA, 25 bp, Homo sapien
actgggcaggtggaaatcaaatcgt

SEQ ID NO: 3361396 - DNA, 25 bp, Homo sapien
gctggtagcaccctcctagtcatga

SEQ ID NO: 3361397 - DNA, 25 bp, Homo sapien
tatggattccctgtgaaggttgaga

SEQ ID NO: 3361398 - DNA, 25 bp, Homo sapien
gctagcctggagcatagttgcagag

SEQ ID NO: 3361399 - DNA, 25 bp, Homo sapien
ctttttgaacaggagtaaaaatgct

SEQ ID NO: 3361400 - DNA, 25 bp, Homo sapien
tctttttgaacaggagtaaaaatgc

SEQ ID NO: 3361401 - DNA, 25 bp, Homo sapien
tttttgaacaggagtaaaaatgctc

SEQ ID NO: 3361402 - DNA, 25 bp, Homo sapien
gcaacatgtcggttaaaatttctga

SEQ ID NO: 3361403 - DNA, 25 bp, Homo sapien
catgtcggttaaaatttctgaacag

SEQ ID NO: 3361404 - DNA, 25 bp, Homo sapien
tagagcaacatgtcggttaaaattt

SEQ ID NO: 3361405 - DNA, 25 bp, Homo sapien
ttactttagagcaacatgtcggtta

SEQ ID NO: 3361406 - DNA, 25 bp, Homo sapien
gggcactctcctaaattcactgtct

SEQ ID NO: 3361407 - DNA, 25 bp, Homo sapien
ctccgacttcggctctcatgttttg

SEQ ID NO: 3361408 - DNA, 25 bp, Homo sapien
tgtctcatgtacgacattatctccg

SEQ ID NO: 3361409 - DNA, 25 bp, Homo sapien
catttgtagggttcttcacaaagat

SEQ ID NO: 3361410 - DNA, 25 bp, Homo sapien
ctgtgttgatgtaaaagagcgccct

SEQ ID NO: 3361411 - DNA, 25 bp, Homo sapien
tctggcgtcctagcgcttctgcagg

SEQ ID NO: 3361412 - DNA, 25 bp, Homo sapien
gggtgctctgcggaccataaaaata

SEQ ID NO: 3361413 - DNA, 25 bp, Homo sapien
tgatgtaaaagagcgccctgctcgt

SEQ ID NO: 3361414 - DNA, 25 bp, Homo sapien
gcttctggtgttacactcttctcca

SEQ ID NO: 3361415 - DNA, 25 bp, Homo sapien
ggagcttctggtgttacactcttct

SEQ ID NO: 3361416 - DNA, 25 bp, Homo sapien
agcagggagcttctggtgttacact

SEQ ID NO: 3361417 - DNA, 25 bp, Homo sapien
ggtgttacactcttctccactaaga

SEQ ID NO: 3361418 - DNA, 25 bp, Homo sapien
gaataggctgtttctacgggctgct

SEQ ID NO: 3361419 - DNA, 25 bp, Homo sapien
cagtgtttgccaggactttttaggg

SEQ ID NO: 3361420 - DNA, 25 bp, Homo sapien
gtccaagcttcacaagaggcatgct

SEQ ID NO: 3361421 - DNA, 25 bp, Homo sapien
gcaaagatgatcatttggccctgtg

SEQ ID NO: 3361422 - DNA, 25 bp, Homo sapien
gatgaggacgtgcataaaaacactc

SEQ ID NO: 3361423 - DNA, 25 bp, Homo sapien
ttgttcacctcacgccaatggctag

SEQ ID NO: 3361424 - DNA, 25 bp, Homo sapien
gaaaggcgatacctacgttttgctg

SEQ ID NO: 3361425 - DNA, 25 bp, Homo sapien
gaaagacttgatctggcacctgatg

SEQ ID NO: 3361426 - DNA, 25 bp, Homo sapien
gcttcataagaacgtttttctcctc

SEQ ID NO: 3361427 - DNA, 25 bp, Homo sapien
gaaaactgctctccgagtgatccca

SEQ ID NO: 3361428 - DNA, 25 bp, Homo sapien
gggagcaaatggaacgcaggcttca

SEQ ID NO: 3361429 - DNA, 25 bp, Homo sapien
ctctccgagtgatcccagatgaaga

SEQ ID NO: 3361430 - DNA, 25 bp, Homo sapien
gccagccgaacttgataaggcagat

SEQ ID NO: 3361431 - DNA, 25 bp, Homo sapien
ccagccgaacttgataaggcagata

SEQ ID NO: 3361432 - DNA, 25 bp, Homo sapien
aacttgataaggcagtctcacagcc

SEQ ID NO: 3361433 - DNA, 25 bp, Homo sapien
gaacttgataaggcagtctcacagc

SEQ ID NO: 3361434 - DNA, 25 bp, Homo sapien
atcactgtgtgttcccatcaaggca

SEQ ID NO: 3361435 - DNA, 25 bp, Homo sapien
actgtgtgttcccatcaaggcattt

SEQ ID NO: 3361436 - DNA, 25 bp, Homo sapien
ctgtgtgttcccatcaaggcatttt

SEQ ID NO: 3361437 - DNA, 25 bp, Homo sapien
tcactgtgtgttcccatcaaggcat

SEQ ID NO: 3361438 - DNA, 25 bp, Homo sapien
aatataatctagtctcataatggat

SEQ ID NO: 3361439 - DNA, 25 bp, Homo sapien
taatctagtctcataatggatattg

SEQ ID NO: 3361440 - DNA, 25 bp, Homo sapien
gctggactgcggtgatacggtcacg

SEQ ID NO: 3361441 - DNA, 25 bp, Homo sapien
aaatgttttgggtgccaacattcaa

SEQ ID NO: 3361442 - DNA, 25 bp, Homo sapien
gccaaattcgtctttcgctcagtgt

SEQ ID NO: 3361443 - DNA, 25 bp, Homo sapien
tctttacatacaccaatttcatcaa

SEQ ID NO: 3361444 - DNA, 25 bp, Homo sapien
taatctatgttgatgttgcagtttg

SEQ ID NO: 3361445 - DNA, 25 bp, Homo sapien
cattgagagcaatggcagatctgca

SEQ ID NO: 3361446 - DNA, 25 bp, Homo sapien
gatgtttgtccataatctgataatt

SEQ ID NO: 3361447 - DNA, 25 bp, Homo sapien
gcaggtcataggcttgaaacccgaa

SEQ ID NO: 3361448 - DNA, 25 bp, Homo sapien
cagcaagtagaccaaggacccgcag

SEQ ID NO: 3361449 - DNA, 25 bp, Homo sapien
ataggcttgaaacccgaatacttgc

SEQ ID NO: 3361450 - DNA, 25 bp, Homo sapien
aggacccgcaggtcataggcttgaa

SEQ ID NO: 3361451 - DNA, 25 bp, Homo sapien
tagccttggcatttagagtaatctg

SEQ ID NO: 3361452 - DNA, 25 bp, Homo sapien
gctttggagaacgaagtgtctggtt

SEQ ID NO: 3361453 - DNA, 25 bp, Homo sapien
tgtgctttcctacggaatccatgta

SEQ ID NO: 3361454 - DNA, 25 bp, Homo sapien
taatctgtagatctgccttgtgctt

SEQ ID NO: 3361455 - DNA, 25 bp, Homo sapien
gctggcggcaaagtgcttcgtgtgt

SEQ ID NO: 3361456 - DNA, 25 bp, Homo sapien
ggcaaagtgcttcgtgtgtgtccct

SEQ ID NO: 3361457 - DNA, 25 bp, Homo sapien
agtgcttcgtgtgtgtccctggatc

SEQ ID NO: 3361458 - DNA, 25 bp, Homo sapien
tgcttcgtgtgtgtccctggatcat

SEQ ID NO: 3361459 - DNA, 25 bp, Homo sapien
tagcctcatgaaacaagtggacagg

SEQ ID NO: 3361460 - DNA, 25 bp, Homo sapien
gaaaaagattcagtcttagtcctga

SEQ ID NO: 3361461 - DNA, 25 bp, Homo sapien
cattgaaggaggcatttatgtctca

SEQ ID NO: 3361462 - DNA, 25 bp, Homo sapien
tttccaggggaaaggcatagcctaa

SEQ ID NO: 3361463 - DNA, 25 bp, Homo sapien
tacagacggtaattgtctgagcgaa

SEQ ID NO: 3361464 - DNA, 25 bp, Homo sapien
tatccataagtgtaatttcattgta

SEQ ID NO: 3361465 - DNA, 25 bp, Homo sapien
tgaataatccataaatacagacggt

SEQ ID NO: 3361466 - DNA, 25 bp, Homo sapien
ttgtctgagcgaaaagaagcagcaa

SEQ ID NO: 3361467 - DNA, 25 bp, Homo sapien
tcacatgaatgtacggcaactccga

SEQ ID NO: 3361468 - DNA, 25 bp, Homo sapien
taagtggtgtctcaagggtcaggcc

SEQ ID NO: 3361469 - DNA, 25 bp, Homo sapien
gatgtaccctggaccaaaatggctg

SEQ ID NO: 3361470 - DNA, 25 bp, Homo sapien
tactgagcatgaacacgagtctgtg

SEQ ID NO: 3361471 - DNA, 25 bp, Homo sapien
tcggttaaaaagatggtgagattcc

SEQ ID NO: 3361472 - DNA, 25 bp, Homo sapien
taacagagaacagtcccctggatgc

SEQ ID NO: 3361473 - DNA, 25 bp, Homo sapien
tgagattccacccagttgaagccct

SEQ ID NO: 3361474 - DNA, 25 bp, Homo sapien
tctccagtgatggaatagttggccc

SEQ ID NO: 3361475 - DNA, 25 bp, Homo sapien
gcgctgcatttttaggagggctgta

SEQ ID NO: 3361476 - DNA, 25 bp, Homo sapien
agttttgacatagctttagcgctgc

SEQ ID NO: 3361477 - DNA, 25 bp, Homo sapien
tggacacttgccacgtgtgttaggt

SEQ ID NO: 3361478 - DNA, 25 bp, Homo sapien
tgtagttcctatccgggcctctgtg

SEQ ID NO: 3361479 - DNA, 25 bp, Homo sapien
ctttatctctaaaaagctgctttag

SEQ ID NO: 3361480 - DNA, 25 bp, Homo sapien
cactaaataggtgttcctccttgcc

SEQ ID NO: 3361481 - DNA, 25 bp, Homo sapien
ccttgccttcatgtatgtctgtccc

SEQ ID NO: 3361482 - DNA, 25 bp, Homo sapien
acatctgaatctcactaaataggtg

SEQ ID NO: 3361483 - DNA, 25 bp, Homo sapien
tactttagaccttacaaagggcagc

SEQ ID NO: 3361484 - DNA, 25 bp, Homo sapien
tgcacaaatacctcgcacagaaaag

SEQ ID NO: 3361485 - DNA, 25 bp, Homo sapien
aagggcagcctgtaagttcacaaag

SEQ ID NO: 3361486 - DNA, 25 bp, Homo sapien
tatggccagctttctgactatcctg

SEQ ID NO: 3361487 - DNA, 25 bp, Homo sapien
gcttcccttacacggtgattgtcag

SEQ ID NO: 3361488 - DNA, 25 bp, Homo sapien
taaactcgttctgcaactgtctaga

SEQ ID NO: 3361489 - DNA, 25 bp, Homo sapien
tattccggatgtgctaacttgttcc

SEQ ID NO: 3361490 - DNA, 25 bp, Homo sapien
ccatttggcaagtcaatattccgga

SEQ ID NO: 3361491 - DNA, 25 bp, Homo sapien
tgtaaaatctttcgctgttgctgtt

SEQ ID NO: 3361492 - DNA, 25 bp, Homo sapien
tccgggttcgctgtttgtgcacaag

SEQ ID NO: 3361493 - DNA, 25 bp, Homo sapien
tcctcaggaaggacgatcaaggagt

SEQ ID NO: 3361494 - DNA, 25 bp, Homo sapien
gccattaagattccgcatcagcccg

SEQ ID NO: 3361495 - DNA, 25 bp, Homo sapien
tgatatgtttaaatggccttatgaa

SEQ ID NO: 3361496 - DNA, 25 bp, Homo sapien
cttatgaaacgatgggagtaacggg

SEQ ID NO: 3361497 - DNA, 25 bp, Homo sapien
ggtaggtcccgcctctctttgatat

SEQ ID NO: 3361498 - DNA, 25 bp, Homo sapien
ggtcccgcctctctttgatatgttt

SEQ ID NO: 3361499 - DNA, 25 bp, Homo sapien
gacattgagtcatctagccgagaag

SEQ ID NO: 3361500 - DNA, 25 bp, Homo sapien
tcgatcgattctttctacaccatgg

SEQ ID NO: 3361501 - DNA, 25 bp, Homo sapien
tgcggcaacacccactttccaaggt

SEQ ID NO: 3361502 - DNA, 25 bp, Homo sapien
agcacccagacagaatgcggcaaca

SEQ ID NO: 3361503 - DNA, 25 bp, Homo sapien
cacaagttgtgtagctctgtaagca

SEQ ID NO: 3361504 - DNA, 25 bp, Homo sapien
tgcccaaggccacaagtttttgaaa

SEQ ID NO: 3361505 - DNA, 25 bp, Homo sapien
tttactcaggcaaaggcaaatggct

SEQ ID NO: 3361506 - DNA, 25 bp, Homo sapien
gatgaacacagagtcccaaaattgg

SEQ ID NO: 3361507 - DNA, 25 bp, Homo sapien
ggtactacgtactctcggtggagca

SEQ ID NO: 3361508 - DNA, 25 bp, Homo sapien
tgcagggctacgacgggtactacgt

SEQ ID NO: 3361509 - DNA, 25 bp, Homo sapien
tgtcctgtggcacaacccgagtggg

SEQ ID NO: 3361510 - DNA, 25 bp, Homo sapien
gaatgagactgctgttacgacccac

SEQ ID NO: 3361511 - DNA, 25 bp, Homo sapien
gcaaagttactgtttctagacaacc

SEQ ID NO: 3361512 - DNA, 25 bp, Homo sapien
caatgctaacgtggtttcccttcgg

SEQ ID NO: 3361513 - DNA, 25 bp, Homo sapien
cattggcacagtgacttctgcggcg

SEQ ID NO: 3361514 - DNA, 25 bp, Homo sapien
gaatccttgtcactgataagcaaag

SEQ ID NO: 3361515 - DNA, 25 bp, Homo sapien
tgtatttagcatgctgtaagtactt

SEQ ID NO: 3361516 - DNA, 25 bp, Homo sapien
tatttgcagttctgttccgtggaac

SEQ ID NO: 3361517 - DNA, 25 bp, Homo sapien
ccgtggaacttctgcaggcctgtat

SEQ ID NO: 3361518 - DNA, 25 bp, Homo sapien
tacttttgggtgaaataggctctga

SEQ ID NO: 3361519 - DNA, 25 bp, Homo sapien
ggtaaaaccacccgggcagtgctca

SEQ ID NO: 3361520 - DNA, 25 bp, Homo sapien
tgatccacatcatgttctgtctggg

SEQ ID NO: 3361521 - DNA, 25 bp, Homo sapien
ctgacagcaaatcagctgtccgagg

SEQ ID NO: 3361522 - DNA, 25 bp, Homo sapien
ctgtccgaggtgcttttggaaagga

SEQ ID NO: 3361523 - DNA, 25 bp, Homo sapien
cccttcccatgggcacttgatcttt

SEQ ID NO: 3361524 - DNA, 25 bp, Homo sapien
cccatgggcacttgatctttccaaa

SEQ ID NO: 3361525 - DNA, 25 bp, Homo sapien
cttcccatgggcacttgatctttcc

SEQ ID NO: 3361526 - DNA, 25 bp, Homo sapien
tcccatgggcacttgatctttccaa

SEQ ID NO: 3361527 - DNA, 25 bp, Homo sapien
ggctcccgggctcttgtaaatcaaa

SEQ ID NO: 3361528 - DNA, 25 bp, Homo sapien
ggcctctgccaattagtgctccagt

SEQ ID NO: 3361529 - DNA, 25 bp, Homo sapien
tcttgggtcgtaagcacaggctggc

SEQ ID NO: 3361530 - DNA, 25 bp, Homo sapien
taaatcaaagggcaacaggactcgc

SEQ ID NO: 3361531 - DNA, 25 bp, Homo sapien
atccagctgagtggagtgtctccca

SEQ ID NO: 3361532 - DNA, 25 bp, Homo sapien
ctcaaatccagctgagtggagtgtc

SEQ ID NO: 3361533 - DNA, 25 bp, Homo sapien
tcctcaaatccagctgagtggagtg

SEQ ID NO: 3361534 - DNA, 25 bp, Homo sapien
caaatccagctgagtggagtgtctc

SEQ ID NO: 3361535 - DNA, 25 bp, Homo sapien
ttgcccaagtcgcaagcaagtccag

SEQ ID NO: 3361536 - DNA, 25 bp, Homo sapien
tggactggcgcctgcttcatggtgc

SEQ ID NO: 3361537 - DNA, 25 bp, Homo sapien
gcaggtgcacttgtgtcttgcccaa

SEQ ID NO: 3361538 - DNA, 25 bp, Homo sapien
gacacatggcatcctcagtagcttc

SEQ ID NO: 3361539 - DNA, 25 bp, Homo sapien
ttcattcattcccgccaggaggacg

SEQ ID NO: 3361540 - DNA, 25 bp, Homo sapien
tcccttgctggttctcgtcttcatt

SEQ ID NO: 3361541 - DNA, 25 bp, Homo sapien
aaagggtctccccgcaaaggagatg

SEQ ID NO: 3361542 - DNA, 25 bp, Homo sapien
tctccccgcaaaggagatgtccatg

SEQ ID NO: 3361543 - DNA, 25 bp, Homo sapien
gattttgtgggcctatagcagcctc

SEQ ID NO: 3361544 - DNA, 25 bp, Homo sapien
tgctccattatgtggctccggcaaa

SEQ ID NO: 3361545 - DNA, 25 bp, Homo sapien
cctgcggtgtggagacagcatcact

SEQ ID NO: 3361546 - DNA, 25 bp, Homo sapien
ggcaaatggcttgtctcccgtggag

SEQ ID NO: 3361547 - DNA, 25 bp, Homo sapien
taaagctgttcttagattcctcctc

SEQ ID NO: 3361548 - DNA, 25 bp, Homo sapien
tagccagaaggagacagtccaacag

SEQ ID NO: 3361549 - DNA, 25 bp, Homo sapien
gcacagagccctatgatccctaata

SEQ ID NO: 3361550 - DNA, 25 bp, Homo sapien
gatcctgagctaggaagtctcccaa

SEQ ID NO: 3361551 - DNA, 25 bp, Homo sapien
caccgtgcccggccaggaaggcttt

SEQ ID NO: 3361552 - DNA, 25 bp, Homo sapien
tcctttccagtaacaggaagattgc

SEQ ID NO: 3361553 - DNA, 25 bp, Homo sapien
cagcgccgtgatggtttacaagtca

SEQ ID NO: 3361554 - DNA, 25 bp, Homo sapien
tcaccctacatggtctaaaagaacg

SEQ ID NO: 3361555 - DNA, 25 bp, Homo sapien
tagcacatcatcgagaaataacctt

SEQ ID NO: 3361556 - DNA, 25 bp, Homo sapien
cacagccaccaggagttgggtagtt

SEQ ID NO: 3361557 - DNA, 25 bp, Homo sapien
ttgggtagttctcagctcacgccgt

SEQ ID NO: 3361558 - DNA, 25 bp, Homo sapien
gccgtcctccgaaaggctctagcaa

SEQ ID NO: 3361559 - DNA, 25 bp, Homo sapien
aaatcaaagtggagccccgctgcat

SEQ ID NO: 3361560 - DNA, 25 bp, Homo sapien
tttttggccagagcgaatcctacct

SEQ ID NO: 3361561 - DNA, 25 bp, Homo sapien
acgccagtctttttggccagagcga

SEQ ID NO: 3361562 - DNA, 25 bp, Homo sapien
gccagagcgaatcctacctgtagga

SEQ ID NO: 3361563 - DNA, 25 bp, Homo sapien
gtctttttggccagagcgaatccta

SEQ ID NO: 3361564 - DNA, 25 bp, Homo sapien
gattgacggatttgggcaagtttcc

SEQ ID NO: 3361565 - DNA, 25 bp, Homo sapien
gatttgggcaagtttcccctccagc

SEQ ID NO: 3361566 - DNA, 25 bp, Homo sapien
tcctgctctttgtctggattgacgg

SEQ ID NO: 3361567 - DNA, 25 bp, Homo sapien
tttgtctggattgacggatttgggc

SEQ ID NO: 3361568 - DNA, 25 bp, Homo sapien
gtgtttccctcaccagccggtacat

SEQ ID NO: 3361569 - DNA, 25 bp, Homo sapien
gaggacaccctctccgtgaagtcct

SEQ ID NO: 3361570 - DNA, 25 bp, Homo sapien
cagcgccagcctgagctgagttcct

SEQ ID NO: 3361571 - DNA, 25 bp, Homo sapien
ggctgtgtttccctcaccagccggt

SEQ ID NO: 3361572 - DNA, 25 bp, Homo sapien
tgacatccgtgcagctctggtaaag

SEQ ID NO: 3361573 - DNA, 25 bp, Homo sapien
tatttgcctcaaaaaacgcctaggc

SEQ ID NO: 3361574 - DNA, 25 bp, Homo sapien
ccacagggcctaggacatatttgct

SEQ ID NO: 3361575 - DNA, 25 bp, Homo sapien
tgtaccaggaactgcgctagaagcc

SEQ ID NO: 3361576 - DNA, 25 bp, Homo sapien
gagcacggcgacttccctggttttg

SEQ ID NO: 3361577 - DNA, 25 bp, Homo sapien
cttttctctgagacgccgcttggat

SEQ ID NO: 3361578 - DNA, 25 bp, Homo sapien
tctgattttcaccttgctcgctgac

SEQ ID NO: 3361579 - DNA, 25 bp, Homo sapien
tacaggttctgatcaggtggccacg

SEQ ID NO: 3361580 - DNA, 25 bp, Homo sapien
caagattgcagattggtttccctca

SEQ ID NO: 3361581 - DNA, 25 bp, Homo sapien
cgccgtaaacgaacagtgcatctgg

SEQ ID NO: 3361582 - DNA, 25 bp, Homo sapien
taattgagctctcttgccgccgtaa

SEQ ID NO: 3361583 - DNA, 25 bp, Homo sapien
taccagaacataaattcacacaggg

SEQ ID NO: 3361584 - DNA, 25 bp, Homo sapien
tcctttcacttagctcactgtccaa

SEQ ID NO: 3361585 - DNA, 25 bp, Homo sapien
tccaaagttcgtccatgcagtagca

SEQ ID NO: 3361586 - DNA, 25 bp, Homo sapien
tagcatgtgttggatggactttcct

SEQ ID NO: 3361587 - DNA, 25 bp, Homo sapien
tcatctcgcgcaggtgggatcatct

SEQ ID NO: 3361588 - DNA, 25 bp, Homo sapien
cacgctagagaggatccgagtccag

SEQ ID NO: 3361589 - DNA, 25 bp, Homo sapien
cgagtccagcgtctagctctgcaca

SEQ ID NO: 3361590 - DNA, 25 bp, Homo sapien
ctgactgtgatcagccctgctctga

SEQ ID NO: 3361591 - DNA, 25 bp, Homo sapien
gcccgagggctgttgcgtggcccat

SEQ ID NO: 3361592 - DNA, 25 bp, Homo sapien
agcactcccaatgccaaggtgccgg

SEQ ID NO: 3361593 - DNA, 25 bp, Homo sapien
tgccgggcttgcattgacagagtcc

SEQ ID NO: 3361594 - DNA, 25 bp, Homo sapien
aaagaactccagcactcccaatgcc

SEQ ID NO: 3361595 - DNA, 25 bp, Homo sapien
caatgccaaggtgccgggcttgcat

SEQ ID NO: 3361596 - DNA, 25 bp, Homo sapien
gaggctccggctgacttcctaattg

SEQ ID NO: 3361597 - DNA, 25 bp, Homo sapien
gacttcctaattgggccaaagcacc

SEQ ID NO: 3361598 - DNA, 25 bp, Homo sapien
caaagcacctcgagtgccctgaagt

SEQ ID NO: 3361599 - DNA, 25 bp, Homo sapien
agttcacttgcactgccatcagcgg

SEQ ID NO: 3361600 - DNA, 25 bp, Homo sapien
gtttccaaggcagcgttttgctctt

SEQ ID NO: 3361601 - DNA, 25 bp, Homo sapien
tccaaggcagcgttttgctcttccc

SEQ ID NO: 3361602 - DNA, 25 bp, Homo sapien
gtgtttccaaggcagcgttttgctc

SEQ ID NO: 3361603 - DNA, 25 bp, Homo sapien
ttccaaggcagcgttttgctcttcc

SEQ ID NO: 3361604 - DNA, 25 bp, Homo sapien
gactcagagatgctcggccatgacg

SEQ ID NO: 3361605 - DNA, 25 bp, Homo sapien
ctgctgctgtttggtaaagagcccc

SEQ ID NO: 3361606 - DNA, 25 bp, Homo sapien
gctgctgtttggtaaagagccccac

SEQ ID NO: 3361607 - DNA, 25 bp, Homo sapien
ggccatgacgcttctcatcaatctg

SEQ ID NO: 3361608 - DNA, 25 bp, Homo sapien
taaacacaaagagcccgtgctggct

SEQ ID NO: 3361609 - DNA, 25 bp, Homo sapien
tggtacattagagaacctgttttta

SEQ ID NO: 3361610 - DNA, 25 bp, Homo sapien
tcatgaatagatattaaatgttgct

SEQ ID NO: 3361611 - DNA, 25 bp, Homo sapien
tcattaagtctgatattcctagaga

SEQ ID NO: 3361612 - DNA, 25 bp, Homo sapien
ttcacattgcaactagcttttaaga

SEQ ID NO: 3361613 - DNA, 25 bp, Homo sapien
tgcaaaaatgtaacacgatgctgct

SEQ ID NO: 3361614 - DNA, 25 bp, Homo sapien
tatcaaattgtggtgtggtatcaaa

SEQ ID NO: 3361615 - DNA, 25 bp, Homo sapien
agccagacacgaaaaacagttgcaa

SEQ ID NO: 3361616 - DNA, 25 bp, Homo sapien
ctgcagtgagatatgatcacgccac

SEQ ID NO: 3361617 - DNA, 25 bp, Homo sapien
agtgagatatgatcacgccactgcc

SEQ ID NO: 3361618 - DNA, 25 bp, Homo sapien
gctgcagtgagatatgatcacgcca

SEQ ID NO: 3361619 - DNA, 25 bp, Homo sapien
gcagtgagatatgatcacgccactg

SEQ ID NO: 3361620 - DNA, 25 bp, Homo sapien
tggcgaggcacactgcacattcagg

SEQ ID NO: 3361621 - DNA, 25 bp, Homo sapien
gcccaggtgtccattggtgcgtgaa

SEQ ID NO: 3361622 - DNA, 25 bp, Homo sapien
tgtgaacacaatgggcgattcttcg

SEQ ID NO: 3361623 - DNA, 25 bp, Homo sapien
tccttcaaggtaggtgactggtgca

SEQ ID NO: 3361624 - DNA, 25 bp, Homo sapien
tattaactggaacatgaacatctgc

SEQ ID NO: 3361625 - DNA, 25 bp, Homo sapien
gaattctctggataggacaattcta

SEQ ID NO: 3361626 - DNA, 25 bp, Homo sapien
gacaattctactattcttatagtga

SEQ ID NO: 3361627 - DNA, 25 bp, Homo sapien
tcaaagcaaacctctattaactgga

SEQ ID NO: 3361628 - DNA, 25 bp, Homo sapien
tcataggtggaagcatcacaacccc

SEQ ID NO: 3361629 - DNA, 25 bp, Homo sapien
ggtcggttcataggtggaagcatca

SEQ ID NO: 3361630 - DNA, 25 bp, Homo sapien
tagaaacgaagacataatcactcac

SEQ ID NO: 3361631 - DNA, 25 bp, Homo sapien
ccaggagaccagggtcggttcatag

SEQ ID NO: 3361632 - DNA, 25 bp, Homo sapien
ggtaaggagccaaattacagaatac

SEQ ID NO: 3361633 - DNA, 25 bp, Homo sapien
aattacagaataccctagaatgtgg

SEQ ID NO: 3361634 - DNA, 25 bp, Homo sapien
gaataccctagaatgtggaatacaa

SEQ ID NO: 3361635 - DNA, 25 bp, Homo sapien
taataatattggtaaggagccaaat

SEQ ID NO: 3361636 - DNA, 25 bp, Homo sapien
tgattaggaaggtgatgcttgtgta

SEQ ID NO: 3361637 - DNA, 25 bp, Homo sapien
aagagctccgaacaccaacagtgct

SEQ ID NO: 3361638 - DNA, 25 bp, Homo sapien
cagtaagctgtctccacgtgggtgg

SEQ ID NO: 3361639 - DNA, 25 bp, Homo sapien
gtgtaggtgaaagcatggagccagg

SEQ ID NO: 3361640 - DNA, 25 bp, Homo sapien
tctccagttgcagaggggccttgta

SEQ ID NO: 3361641 - DNA, 25 bp, Homo sapien
gggccttgtacatgaactgcgttgg

SEQ ID NO: 3361642 - DNA, 25 bp, Homo sapien
acatgaactgcgttggcatgcggag

SEQ ID NO: 3361643 - DNA, 25 bp, Homo sapien
tttctctccagttgcagaggggcct

SEQ ID NO: 3361644 - DNA, 25 bp, Homo sapien
cagctgccaccacggcagggcatgg

SEQ ID NO: 3361645 - DNA, 25 bp, Homo sapien
cccagctgccaccacggcagggcat

SEQ ID NO: 3361646 - DNA, 25 bp, Homo sapien
gttggggacccctcccatccacagc

SEQ ID NO: 3361647 - DNA, 25 bp, Homo sapien
gccccagctgccaccacggcagggc

SEQ ID NO: 3361648 - DNA, 25 bp, Homo sapien
cacttgggccagatgttcagatcag

SEQ ID NO: 3361649 - DNA, 25 bp, Homo sapien
ccagagggataatgtgccaccaccc

SEQ ID NO: 3361650 - DNA, 25 bp, Homo sapien
aattgagccaaaacaacaggcgtcc

SEQ ID NO: 3361651 - DNA, 25 bp, Homo sapien
ggaagagctccatgtgaccaacaaa

SEQ ID NO: 3361652 - DNA, 25 bp, Homo sapien
gaggcactctcgttctagccctgtg

SEQ ID NO: 3361653 - DNA, 25 bp, Homo sapien
tatttgtccttccagcacatgtagc

SEQ ID NO: 3361654 - DNA, 25 bp, Homo sapien
catgtagcagtgaagagaggctgcc

SEQ ID NO: 3361655 - DNA, 25 bp, Homo sapien
caagatgaaaggcattagcaacctc

SEQ ID NO: 3361656 - DNA, 25 bp, Homo sapien
tgaagcttttgactcggtctgctgt

SEQ ID NO: 3361657 - DNA, 25 bp, Homo sapien
attgaatcaaagtcaatgacaatct

SEQ ID NO: 3361658 - DNA, 25 bp, Homo sapien
gacaatcttgctgcacttcggtatg

SEQ ID NO: 3361659 - DNA, 25 bp, Homo sapien
cggtctgctgttaattgaatcaaag

SEQ ID NO: 3361660 - DNA, 25 bp, Homo sapien
tcagaaggcaccacggttgagttca

SEQ ID NO: 3361661 - DNA, 25 bp, Homo sapien
tgctgaacgccaataccatgaagcg

SEQ ID NO: 3361662 - DNA, 25 bp, Homo sapien
cactgagctgtatccctaatgacca

SEQ ID NO: 3361663 - DNA, 25 bp, Homo sapien
tgctgtaaaaagaatccccaggtgg

SEQ ID NO: 3361664 - DNA, 25 bp, Homo sapien
ggccatattaaacaggagcctcgca

SEQ ID NO: 3361665 - DNA, 25 bp, Homo sapien
ggaatgtcaccccggccatattaaa

SEQ ID NO: 3361666 - DNA, 25 bp, Homo sapien
aggagcctcgcagcagttgcctcgt

SEQ ID NO: 3361667 - DNA, 25 bp, Homo sapien
tcactatcatggtatttatcagaca

SEQ ID NO: 3361668 - DNA, 25 bp, Homo sapien
cacttcaaaccagctctacagaggg

SEQ ID NO: 3361669 - DNA, 25 bp, Homo sapien
ggcagtatgcacaaggtagcttctc

SEQ ID NO: 3361670 - DNA, 25 bp, Homo sapien
ggagctcccttagtgtacgcaccta

SEQ ID NO: 3361671 - DNA, 25 bp, Homo sapien
tgctttctaatacagcagagggtgg

SEQ ID NO: 3361672 - DNA, 25 bp, Homo sapien
caggccgcttctgctctgagatcca

SEQ ID NO: 3361673 - DNA, 25 bp, Homo sapien
tcccaggaacggtgacggcgacagc

SEQ ID NO: 3361674 - DNA, 25 bp, Homo sapien
gagcccacgcgactcctcagtacca

SEQ ID NO: 3361675 - DNA, 25 bp, Homo sapien
ctcagtaccagcaggccgcttctgc

SEQ ID NO: 3361676 - DNA, 25 bp, Homo sapien
tactacagcctttcacatcggtcga

SEQ ID NO: 3361677 - DNA, 25 bp, Homo sapien
tgagcttagcgcattcattacaagg

SEQ ID NO: 3361678 - DNA, 25 bp, Homo sapien
tgatggcattcagctccgcatggca

SEQ ID NO: 3361679 - DNA, 25 bp, Homo sapien
ggtcgaatttttgttcatgatggca

SEQ ID NO: 3361680 - DNA, 25 bp, Homo sapien
gtgcattccacccatgatcccgggt

SEQ ID NO: 3361681 - DNA, 25 bp, Homo sapien
tgatcccgggtcacatccggacctg

SEQ ID NO: 3361682 - DNA, 25 bp, Homo sapien
gacctgcctgagttcagagtcaagg

SEQ ID NO: 3361683 - DNA, 25 bp, Homo sapien
cagaggtccagtttgcctagatgct

SEQ ID NO: 3361684 - DNA, 25 bp, Homo sapien
gagaatcatcttcgctgcccagagt

SEQ ID NO: 3361685 - DNA, 25 bp, Homo sapien
atcatcttcgctgcccagagtgacc

SEQ ID NO: 3361686 - DNA, 25 bp, Homo sapien
agagtgaccagagccatgccccgag

SEQ ID NO: 3361687 - DNA, 25 bp, Homo sapien
atgccccgagacttgcaggtctcat

SEQ ID NO: 3361688 - DNA, 25 bp, Homo sapien
gtggctgacactcgtctatcagctc

SEQ ID NO: 3361689 - DNA, 25 bp, Homo sapien
tgtggctgacactcgtctatcagct

SEQ ID NO: 3361690 - DNA, 25 bp, Homo sapien
gctgacactcgtctatcagctccag

SEQ ID NO: 3361691 - DNA, 25 bp, Homo sapien
ggctgacactcgtctatcagctcca

SEQ ID NO: 3361692 - DNA, 25 bp, Homo sapien
aggccaagcatcctcccctctgtac

SEQ ID NO: 3361693 - DNA, 25 bp, Homo sapien
cactcgatgactgcctggcctgtga

SEQ ID NO: 3361694 - DNA, 25 bp, Homo sapien
ctggcctgtgacgagctcatgcctg

SEQ ID NO: 3361695 - DNA, 25 bp, Homo sapien
tcaggccacaaagagcactcgatga

SEQ ID NO: 3361696 - DNA, 25 bp, Homo sapien
cgctcttgtaatttgcaggagtgac

SEQ ID NO: 3361697 - DNA, 25 bp, Homo sapien
gcttggaagccggatgaccttcgac

SEQ ID NO: 3361698 - DNA, 25 bp, Homo sapien
cacgagggctcaaggtccaatttgc

SEQ ID NO: 3361699 - DNA, 25 bp, Homo sapien
tctgccagcgagtgtggacaaagag

SEQ ID NO: 3361700 - DNA, 25 bp, Homo sapien
tgttcatagattctcagatgccaga

SEQ ID NO: 3361701 - DNA, 25 bp, Homo sapien
gggcttccatgtacctttcctctat

SEQ ID NO: 3361702 - DNA, 25 bp, Homo sapien
ggtgtctagccataactgcccatct

SEQ ID NO: 3361703 - DNA, 25 bp, Homo sapien
gtcactgaccttaagaatccatctg

SEQ ID NO: 3361704 - DNA, 25 bp, Homo sapien
agtactgtgatggagcttaaaagcc

SEQ ID NO: 3361705 - DNA, 25 bp, Homo sapien
gatgcctaaaatgcgtgacaacagc

SEQ ID NO: 3361706 - DNA, 25 bp, Homo sapien
caagagaaacagagcgctaatcagc

SEQ ID NO: 3361707 - DNA, 25 bp, Homo sapien
tgtactgcatccacggtaggccatg

SEQ ID NO: 3361708 - DNA, 25 bp, Homo sapien
gctccatcttcctattatgttacaa

SEQ ID NO: 3361709 - DNA, 25 bp, Homo sapien
ttatgaagttttgatcccaagactg

SEQ ID NO: 3361710 - DNA, 25 bp, Homo sapien
taactctctagagacacagcccagg

SEQ ID NO: 3361711 - DNA, 25 bp, Homo sapien
atgttacaagtagtgtgtgtttccc

SEQ ID NO: 3361712 - DNA, 25 bp, Homo sapien
tgtgacatcccaggcaatccaaaca

SEQ ID NO: 3361713 - DNA, 25 bp, Homo sapien
aacatttctgtgacatcccaggcaa

SEQ ID NO: 3361714 - DNA, 25 bp, Homo sapien
tctgtgacatcccaggcaatccaaa

SEQ ID NO: 3361715 - DNA, 25 bp, Homo sapien
tttctgtgacatcccaggcaatcca

SEQ ID NO: 3361716 - DNA, 25 bp, Homo sapien
cgcactgtccaaccacgggtatctt

SEQ ID NO: 3361717 - DNA, 25 bp, Homo sapien
tatcttttgcaccagcttgagtatg

SEQ ID NO: 3361718 - DNA, 25 bp, Homo sapien
caaccacgggtatcttttgcaccag

SEQ ID NO: 3361719 - DNA, 25 bp, Homo sapien
cagcttgagtatgacggaccgccat

SEQ ID NO: 3361720 - DNA, 25 bp, Homo sapien
tatttcactgcccagactcggtgac

SEQ ID NO: 3361721 - DNA, 25 bp, Homo sapien
cagccccagggccaatatttcactg

SEQ ID NO: 3361722 - DNA, 25 bp, Homo sapien
actgcccagactcggtgacatactg

SEQ ID NO: 3361723 - DNA, 25 bp, Homo sapien
agaattcctccatatcaaagtccag

SEQ ID NO: 3361724 - DNA, 25 bp, Homo sapien
tgcagagacgccgactatcagtgca

SEQ ID NO: 3361725 - DNA, 25 bp, Homo sapien
aggttgccagtgaagcctgccaggc

SEQ ID NO: 3361726 - DNA, 25 bp, Homo sapien
cgactatcagtgcactggtgtggtg

SEQ ID NO: 3361727 - DNA, 25 bp, Homo sapien
tggccactaccatgcttctctccgt

SEQ ID NO: 3361728 - DNA, 25 bp, Homo sapien
caatcccgacaatcttgttttctga

SEQ ID NO: 3361729 - DNA, 25 bp, Homo sapien
tctccaaggcaacacgtcatcactg

SEQ ID NO: 3361730 - DNA, 25 bp, Homo sapien
cgtacgggtatttggtgtccagctt

SEQ ID NO: 3361731 - DNA, 25 bp, Homo sapien
tctgaattcacgatgcaggcgccga

SEQ ID NO: 3361732 - DNA, 25 bp, Homo sapien
tctggccattccaaatagtcgtccc

SEQ ID NO: 3361733 - DNA, 25 bp, Homo sapien
aggccacagccataaaatactctgg

SEQ ID NO: 3361734 - DNA, 25 bp, Homo sapien
gaaggccacagccataaaatactct

SEQ ID NO: 3361735 - DNA, 25 bp, Homo sapien
tagtcgtcccgtttcttgcaggaaa

SEQ ID NO: 3361736 - DNA, 25 bp, Homo sapien
agtggtcgctttcaaaaggaatgaa

SEQ ID NO: 3361737 - DNA, 25 bp, Homo sapien
aagcagagactgtctacggcaggga

SEQ ID NO: 3361738 - DNA, 25 bp, Homo sapien
tcctaggacttcaggggagtggtcg

SEQ ID NO: 3361739 - DNA, 25 bp, Homo sapien
gcaagcagagactgtctacggcagg

SEQ ID NO: 3361740 - DNA, 25 bp, Homo sapien
gaatgtggtctaaaggaaggcaagc

SEQ ID NO: 3361741 - DNA, 25 bp, Homo sapien
tcaggctccacactttatttaggca

SEQ ID NO: 3361742 - DNA, 25 bp, Homo sapien
cacggagaaatcttgagaaaggcga

SEQ ID NO: 3361743 - DNA, 25 bp, Homo sapien
gcatctgctacagtgcagggcggca

SEQ ID NO: 3361744 - DNA, 25 bp, Homo sapien
agggccagcatccatcatcgctgtg

SEQ ID NO: 3361745 - DNA, 25 bp, Homo sapien
gactgaggcccagctgtagaaacag

SEQ ID NO: 3361746 - DNA, 25 bp, Homo sapien
cgattcaggaagacacatccggtca

SEQ ID NO: 3361747 - DNA, 25 bp, Homo sapien
gagaactggagctcgaatacaacga

SEQ ID NO: 3361748 - DNA, 25 bp, Homo sapien
gaaatcgaccctggagtgactgcgg

SEQ ID NO: 3361749 - DNA, 25 bp, Homo sapien
acgcctcccggtccccgtgacgcag

SEQ ID NO: 3361750 - DNA, 25 bp, Homo sapien
ccgcgcgttcgcaggacggcggctg

SEQ ID NO: 3361751 - DNA, 25 bp, Homo sapien
gccgcaaaggcgctgctccgcgtcg

SEQ ID NO: 3361752 - DNA, 25 bp, Homo sapien
gccgtgctcagggaaggaagtcggg

SEQ ID NO: 3361753 - DNA, 25 bp, Homo sapien
tcaaccacaacatcattaagctttc

SEQ ID NO: 3361754 - DNA, 25 bp, Homo sapien
tccttcctctgctcggtaaagactg

SEQ ID NO: 3361755 - DNA, 25 bp, Homo sapien
catacatcaccaattgctgctgctc

SEQ ID NO: 3361756 - DNA, 25 bp, Homo sapien
tctgctcggtaaagactgtcataca

SEQ ID NO: 3361757 - DNA, 25 bp, Homo sapien
caatggaaagtgtatcagtgcaagc

SEQ ID NO: 3361758 - DNA, 25 bp, Homo sapien
gaaacacgcggcaaagcagtacaaa

SEQ ID NO: 3361759 - DNA, 25 bp, Homo sapien
cctggatgaactatagagtgagaac

SEQ ID NO: 3361760 - DNA, 25 bp, Homo sapien
gctggtacagctccctatgatatgg

SEQ ID NO: 3361761 - DNA, 25 bp, Homo sapien
cccattcttggtgtaactgttttcg

SEQ ID NO: 3361762 - DNA, 25 bp, Homo sapien
ggaaagcatggtgtgctccaactac

SEQ ID NO: 3361763 - DNA, 25 bp, Homo sapien
tgtaactgttttcggcagaagccag

SEQ ID NO: 3361764 - DNA, 25 bp, Homo sapien
tactgtacctgctgatctctgtcgg

SEQ ID NO: 3361765 - DNA, 25 bp, Homo sapien
gctctcctcacagttacactctgct

SEQ ID NO: 3361766 - DNA, 25 bp, Homo sapien
tcctcacagttacactctgctcctg

SEQ ID NO: 3361767 - DNA, 25 bp, Homo sapien
ctgctctcctcacagttacactctg

SEQ ID NO: 3361768 - DNA, 25 bp, Homo sapien
ctcctcacagttacactctgctcct

SEQ ID NO: 3361769 - DNA, 25 bp, Homo sapien
aatcctttccactgatgtttccgtc

SEQ ID NO: 3361770 - DNA, 25 bp, Homo sapien
tccactgatgtttccgtcaaaagat

SEQ ID NO: 3361771 - DNA, 25 bp, Homo sapien
tcacttcatgtagacacagcagaaa

SEQ ID NO: 3361772 - DNA, 25 bp, Homo sapien
ttcatgtagacacagcagaaatcct

SEQ ID NO: 3361773 - DNA, 25 bp, Homo sapien
tgttacagcctgaccatacaaaagg

SEQ ID NO: 3361774 - DNA, 25 bp, Homo sapien
ccacatctgttacagcctgaccata

SEQ ID NO: 3361775 - DNA, 25 bp, Homo sapien
cagcctgaccatacaaaaggatccc

SEQ ID NO: 3361776 - DNA, 25 bp, Homo sapien
acatctgttacagcctgaccataca

SEQ ID NO: 3361777 - DNA, 25 bp, Homo sapien
gaagtggcacacgcatccacctctt

SEQ ID NO: 3361778 - DNA, 25 bp, Homo sapien
gcatccacctcttctagaaaccagg

SEQ ID NO: 3361779 - DNA, 25 bp, Homo sapien
gcacacgcatccacctcttctagaa

SEQ ID NO: 3361780 - DNA, 25 bp, Homo sapien
tccacctcttctagaaaccaggtgc

SEQ ID NO: 3361781 - DNA, 25 bp, Homo sapien
ggatgttttcttgttgaggtaggct

SEQ ID NO: 3361782 - DNA, 25 bp, Homo sapien
ggttggataggatgttttcttgttg

SEQ ID NO: 3361783 - DNA, 25 bp, Homo sapien
tgttttcttgttgaggtaggctgca

SEQ ID NO: 3361784 - DNA, 25 bp, Homo sapien
ctggttggataggatgttttcttgt

SEQ ID NO: 3361785 - DNA, 25 bp, Homo sapien
ccaggtagcgatgggaaattgagta

SEQ ID NO: 3361786 - DNA, 25 bp, Homo sapien
aattgagtagggtccattctgcttg

SEQ ID NO: 3361787 - DNA, 25 bp, Homo sapien
ttggtcatgagatagatgagaggca

SEQ ID NO: 3361788 - DNA, 25 bp, Homo sapien
cttattaggtgccaattggtatgta

SEQ ID NO: 3361789 - DNA, 25 bp, Homo sapien
tgtgaggagtggaccccttattaac

SEQ ID NO: 3361790 - DNA, 25 bp, Homo sapien
cactcagggttgtgctcagcgtgga

SEQ ID NO: 3361791 - DNA, 25 bp, Homo sapien
tgacaacgcagaatccgcaggatgt

SEQ ID NO: 3361792 - DNA, 25 bp, Homo sapien
caacgttccctctcggattttcagg

SEQ ID NO: 3361793 - DNA, 25 bp, Homo sapien
aaggtcactgtagcagatgctgcca

SEQ ID NO: 3361794 - DNA, 25 bp, Homo sapien
tcactgtagcagatgctgccaacgg

SEQ ID NO: 3361795 - DNA, 25 bp, Homo sapien
cagatgctgccaacggcctggccat

SEQ ID NO: 3361796 - DNA, 25 bp, Homo sapien
gtagcagatgctgccaacggcctgg

SEQ ID NO: 3361797 - DNA, 25 bp, Homo sapien
ttaatcttcgactctcctgccacac

SEQ ID NO: 3361798 - DNA, 25 bp, Homo sapien
cacttaatcttcgactctcctgcca

SEQ ID NO: 3361799 - DNA, 25 bp, Homo sapien
cctccacttaatcttcgactctcct

SEQ ID NO: 3361800 - DNA, 25 bp, Homo sapien
cccgccttctaggggatggctcctt

SEQ ID NO: 3361801 - DNA, 25 bp, Homo sapien
tttccacttggaacatagcaatctt

SEQ ID NO: 3361802 - DNA, 25 bp, Homo sapien
tggaacatagcaatcttaagcggga

SEQ ID NO: 3361803 - DNA, 25 bp, Homo sapien
gattctgctcccagcttttccactt

SEQ ID NO: 3361804 - DNA, 25 bp, Homo sapien
aatcttaagcgggatgctcaggcag

SEQ ID NO: 3361805 - DNA, 25 bp, Homo sapien
gaggctgaggcgagaaggttgcttg

SEQ ID NO: 3361806 - DNA, 25 bp, Homo sapien
gagattatagtgagctatgaccgtg

SEQ ID NO: 3361807 - DNA, 25 bp, Homo sapien
attatagtgagctatgaccgtgcca

SEQ ID NO: 3361808 - DNA, 25 bp, Homo sapien
ctgaggcgagaaggttgcttgagcc

SEQ ID NO: 3361809 - DNA, 25 bp, Homo sapien
tcctgacttggattgtcaccagcct

SEQ ID NO: 3361810 - DNA, 25 bp, Homo sapien
ccaatgcttcctccacacatgtggg

SEQ ID NO: 3361811 - DNA, 25 bp, Homo sapien
catgggaacagtgaacgatgagtca

SEQ ID NO: 3361812 - DNA, 25 bp, Homo sapien
cagagtttgggatgtcatcagtcac

SEQ ID NO: 3361813 - DNA, 25 bp, Homo sapien
gggaatccatactgcataggctatg

SEQ ID NO: 3361814 - DNA, 25 bp, Homo sapien
gatattgctctattcaagggccttg

SEQ ID NO: 3361815 - DNA, 25 bp, Homo sapien
gcatttctctaacagggaggccaca

SEQ ID NO: 3361816 - DNA, 25 bp, Homo sapien
ccaaggtatagcacctacataggtg

SEQ ID NO: 3361817 - DNA, 25 bp, Homo sapien
ccactgcgccggtctgcttttcttt

SEQ ID NO: 3361818 - DNA, 25 bp, Homo sapien
gccactgcgccggtctgcttttctt

SEQ ID NO: 3361819 - DNA, 25 bp, Homo sapien
aacatctgaccatatatgggagggt

SEQ ID NO: 3361820 - DNA, 25 bp, Homo sapien
caattcttccaatactatttgttga

SEQ ID NO: 3361821 - DNA, 25 bp, Homo sapien
attggcaccctgttgaaaaacatct

SEQ ID NO: 3361822 - DNA, 25 bp, Homo sapien
ccaggtattggcaccctgttgaaaa

SEQ ID NO: 3361823 - DNA, 25 bp, Homo sapien
gacctgaagccaacaacatggtgta

SEQ ID NO: 3361824 - DNA, 25 bp, Homo sapien
gaagccaacaacatggtgtaaggtg

SEQ ID NO: 3361825 - DNA, 25 bp, Homo sapien
acaacatggtgtaaggtgctcctgg

SEQ ID NO: 3361826 - DNA, 25 bp, Homo sapien
gccaacaacatggtgtaaggtgctc

SEQ ID NO: 3361827 - DNA, 25 bp, Homo sapien
tgtccattcacaattacagcagggc

SEQ ID NO: 3361828 - DNA, 25 bp, Homo sapien
ggtggtgtgaaccaactcttcattc

SEQ ID NO: 3361829 - DNA, 25 bp, Homo sapien
aaggctgggcttgttgcatgtgtcc

SEQ ID NO: 3361830 - DNA, 25 bp, Homo sapien
tgagaggtgtgagcccttgatgatc

SEQ ID NO: 3361831 - DNA, 25 bp, Homo sapien
cagttcagaagcacattgggagcct

SEQ ID NO: 3361832 - DNA, 25 bp, Homo sapien
tctgcgtcacttcccgttgggagca

SEQ ID NO: 3361833 - DNA, 25 bp, Homo sapien
tgcagatgggtgttgctgccgcctt

SEQ ID NO: 3361834 - DNA, 25 bp, Homo sapien
gctttgaaccactcgtctctgcgtc

SEQ ID NO: 3361835 - DNA, 25 bp, Homo sapien
atggcagaatatatggcatcacaaa

SEQ ID NO: 3361836 - DNA, 25 bp, Homo sapien
tatggcatcacaaagaagcatgcac

SEQ ID NO: 3361837 - DNA, 25 bp, Homo sapien
ccaccctgactataacggcattaat

SEQ ID NO: 3361838 - DNA, 25 bp, Homo sapien
gggctgaaatcccatgataattaac

SEQ ID NO: 3361839 - DNA, 25 bp, Homo sapien
agaacagtactcagaggaaacgcgc

SEQ ID NO: 3361840 - DNA, 25 bp, Homo sapien
gaacagtactcagaggaaacgcgcc

SEQ ID NO: 3361841 - DNA, 25 bp, Homo sapien
tcatcttgtcctacacagagctgac

SEQ ID NO: 3361842 - DNA, 25 bp, Homo sapien
cactagcatagtgaagacggttcat

SEQ ID NO: 3361843 - DNA, 25 bp, Homo sapien
tgcactgatgtttccctcccaaggt

SEQ ID NO: 3361844 - DNA, 25 bp, Homo sapien
tcctgacctttaactttctgctggg

SEQ ID NO: 3361845 - DNA, 25 bp, Homo sapien
cattagcgggcaggattaaacgact

SEQ ID NO: 3361846 - DNA, 25 bp, Homo sapien
tccaccgggaactagagaagcttga

SEQ ID NO: 3361847 - DNA, 25 bp, Homo sapien
tggaaagtccttacgcattagcggg

SEQ ID NO: 3361848 - DNA, 25 bp, Homo sapien
taaacgacttcacaccacgaggtgc

SEQ ID NO: 3361849 - DNA, 25 bp, Homo sapien
tgcgggccagcacgtacgtagtagc

SEQ ID NO: 3361850 - DNA, 25 bp, Homo sapien
gaccctgaagcttggcgtccaggcc

SEQ ID NO: 3361851 - DNA, 25 bp, Homo sapien
tgcctatgcaacagggaacgtcccg

SEQ ID NO: 3361852 - DNA, 25 bp, Homo sapien
ggctcgcggtctcagccgaggtcat

SEQ ID NO: 3361853 - DNA, 25 bp, Homo sapien
cctttgtgccctctccgcttgttga

SEQ ID NO: 3361854 - DNA, 25 bp, Homo sapien
ttttgcaatcttccccgtccagaaa

SEQ ID NO: 3361855 - DNA, 25 bp, Homo sapien
ggcgggcgcatgctaatcgcatgca

SEQ ID NO: 3361856 - DNA, 25 bp, Homo sapien
tccctagaagacgaaagaggttgag

SEQ ID NO: 3361857 - DNA, 25 bp, Homo sapien
gagcaacctgtaccttctaactgaa

SEQ ID NO: 3361858 - DNA, 25 bp, Homo sapien
tggctttaccaactcccagtagaat

SEQ ID NO: 3361859 - DNA, 25 bp, Homo sapien
ggcaagggtcagatgttgagcaacc

SEQ ID NO: 3361860 - DNA, 25 bp, Homo sapien
taatctgtggcttatggcaagggtc

SEQ ID NO: 3361861 - DNA, 25 bp, Homo sapien
tactttggtttcactaggagtggag

SEQ ID NO: 3361862 - DNA, 25 bp, Homo sapien
tgaggtagtcatgcactaacagagt

SEQ ID NO: 3361863 - DNA, 25 bp, Homo sapien
ttttcactcctgtagctcatgagga

SEQ ID NO: 3361864 - DNA, 25 bp, Homo sapien
cctatactttttgccctgatgtcag

SEQ ID NO: 3361865 - DNA, 25 bp, Homo sapien
gcctgggttgtgttggtcaccagtt

SEQ ID NO: 3361866 - DNA, 25 bp, Homo sapien
gtggcctgggttgtgttggtcacca

SEQ ID NO: 3361867 - DNA, 25 bp, Homo sapien
ttcctttggtgtgaactttgctcct

SEQ ID NO: 3361868 - DNA, 25 bp, Homo sapien
tgaactttgctcctgctgcatgtgc

SEQ ID NO: 3361869 - DNA, 25 bp, Homo sapien
agagattggtgctacaaacccctga

SEQ ID NO: 3361870 - DNA, 25 bp, Homo sapien
ctgaatgtgaacaacagaggtaaac

SEQ ID NO: 3361871 - DNA, 25 bp, Homo sapien
tgaattatagagattggtgctacaa

SEQ ID NO: 3361872 - DNA, 25 bp, Homo sapien
cagaggtaaacgttgaattatagag

SEQ ID NO: 3361873 - DNA, 25 bp, Homo sapien
tatttatcttcggtgttccagaaga

SEQ ID NO: 3361874 - DNA, 25 bp, Homo sapien
tatcttcggtgttccagaagaattc

SEQ ID NO: 3361875 - DNA, 25 bp, Homo sapien
tttgagtttacttgagtctgtaggt

SEQ ID NO: 3361876 - DNA, 25 bp, Homo sapien
tacttgagtctgtaggtgttttatt

SEQ ID NO: 3361877 - DNA, 25 bp, Homo sapien
tagccgtaggcgagatgctgtgctc

SEQ ID NO: 3361878 - DNA, 25 bp, Homo sapien
gaattcccggtgcttctttagagtg

SEQ ID NO: 3361879 - DNA, 25 bp, Homo sapien
gatgctgtgctcatagaattcccgg

SEQ ID NO: 3361880 - DNA, 25 bp, Homo sapien
ctaagggagtatagccgtaggcgag

SEQ ID NO: 3361881 - DNA, 25 bp, Homo sapien
taggcataggtccagtgacagtgtc

SEQ ID NO: 3361882 - DNA, 25 bp, Homo sapien
agggagtgagaggtcctggcctgca

SEQ ID NO: 3361883 - DNA, 25 bp, Homo sapien
tgttgctgccattgagtacttcaga

SEQ ID NO: 3361884 - DNA, 25 bp, Homo sapien
ctagaaagggccatttgataggcat

SEQ ID NO: 3361885 - DNA, 25 bp, Homo sapien
tcagctgcccagtttttggatctat

SEQ ID NO: 3361886 - DNA, 25 bp, Homo sapien
cagctgcccagtttttggatctatt

SEQ ID NO: 3361887 - DNA, 25 bp, Homo sapien
ttcagctgcccagtttttggatcta

SEQ ID NO: 3361888 - DNA, 25 bp, Homo sapien
agctgcccagtttttggatctattc

SEQ ID NO: 3361889 - DNA, 25 bp, Homo sapien
tcttcctagactcttagtagtattc

SEQ ID NO: 3361890 - DNA, 25 bp, Homo sapien
tagtattccctttactctttggcac

SEQ ID NO: 3361891 - DNA, 25 bp, Homo sapien
gtagtattccctttactctttggca

SEQ ID NO: 3361892 - DNA, 25 bp, Homo sapien
tagactcttagtagtattcccttta

SEQ ID NO: 3361893 - DNA, 25 bp, Homo sapien
agaggcccctcctccccttccagca

SEQ ID NO: 3361894 - DNA, 25 bp, Homo sapien
cctcctccccttccagcatcatcat

SEQ ID NO: 3361895 - DNA, 25 bp, Homo sapien
ccattccttcttcccacagaggccc

SEQ ID NO: 3361896 - DNA, 25 bp, Homo sapien
cccattccttcttcccacagaggcc

SEQ ID NO: 3361897 - DNA, 25 bp, Homo sapien
ttgggcagcgcttgacttctgagga

SEQ ID NO: 3361898 - DNA, 25 bp, Homo sapien
tattcttgggcagcgcttgacttct

SEQ ID NO: 3361899 - DNA, 25 bp, Homo sapien
ggtattcttgggcagcgcttgactt

SEQ ID NO: 3361900 - DNA, 25 bp, Homo sapien
ttgtgggtattcttgggcagcgctt

SEQ ID NO: 3361901 - DNA, 25 bp, Homo sapien
ccaggcagaacgctgtgccctcctc

SEQ ID NO: 3361902 - DNA, 25 bp, Homo sapien
cagccaagcaacaccggcctcacac

SEQ ID NO: 3361903 - DNA, 25 bp, Homo sapien
aagcaacaccggcctcacactccag

SEQ ID NO: 3361904 - DNA, 25 bp, Homo sapien
gcaacaccggcctcacactccaggc

SEQ ID NO: 3361905 - DNA, 25 bp, Homo sapien
gctgccatagcagattggtcctcac

SEQ ID NO: 3361906 - DNA, 25 bp, Homo sapien
tagcactttaggaatggcccagcca

SEQ ID NO: 3361907 - DNA, 25 bp, Homo sapien
tgtgtccgttttgaccaggtagcac

SEQ ID NO: 3361908 - DNA, 25 bp, Homo sapien
ttaatgccgtaggagtagtaactct

SEQ ID NO: 3361909 - DNA, 25 bp, Homo sapien
ctaatggttgtatgtggagcccacc

SEQ ID NO: 3361910 - DNA, 25 bp, Homo sapien
cacaagtgatgtagcagagaacaga

SEQ ID NO: 3361911 - DNA, 25 bp, Homo sapien
ggagcccaccaaatattgaatgcag

SEQ ID NO: 3361912 - DNA, 25 bp, Homo sapien
catgctagtcataaagctgccctta

SEQ ID NO: 3361913 - DNA, 25 bp, Homo sapien
gagggaaccttgtgcccattagcag

SEQ ID NO: 3361914 - DNA, 25 bp, Homo sapien
aaatggcatcgtatactgtgtgatc

SEQ ID NO: 3361915 - DNA, 25 bp, Homo sapien
cattattgcaatctaactgtaggac

SEQ ID NO: 3361916 - DNA, 25 bp, Homo sapien
ttcccgatgtgcctgttacagacat

SEQ ID NO: 3361917 - DNA, 25 bp, Homo sapien
tttcagtaaggtggaagtggtagtc

SEQ ID NO: 3361918 - DNA, 25 bp, Homo sapien
caagttgacagttgccctttattgg

SEQ ID NO: 3361919 - DNA, 25 bp, Homo sapien
cagcatctgggattctgctttcctc

SEQ ID NO: 3361920 - DNA, 25 bp, Homo sapien
catcatacacggttctagcagcatc

SEQ ID NO: 3361921 - DNA, 25 bp, Homo sapien
gtacagagctaagagactaggcaca

SEQ ID NO: 3361922 - DNA, 25 bp, Homo sapien
gcctcctctgagattgtggtacaga

SEQ ID NO: 3361923 - DNA, 25 bp, Homo sapien
gaaattcctctccacattcggctgg

SEQ ID NO: 3361924 - DNA, 25 bp, Homo sapien
gactaggcacaagaaattcctctcc

SEQ ID NO: 3361925 - DNA, 25 bp, Homo sapien
tgtcctaatgagatttgaaggaggc

SEQ ID NO: 3361926 - DNA, 25 bp, Homo sapien
gtcctaatgagatttgaaggaggca

SEQ ID NO: 3361927 - DNA, 25 bp, Homo sapien
atgtgctgatgtcctaatgagattt

SEQ ID NO: 3361928 - DNA, 25 bp, Homo sapien
gctgatgtcctaatgagatttgaag

SEQ ID NO: 3361929 - DNA, 25 bp, Homo sapien
gaagtgtaaattcccatctgctgag

SEQ ID NO: 3361930 - DNA, 25 bp, Homo sapien
tctacctgggatcttggccctctag

SEQ ID NO: 3361931 - DNA, 25 bp, Homo sapien
gcagtgtcagccttacttgcaagaa

SEQ ID NO: 3361932 - DNA, 25 bp, Homo sapien
gaattgacaaatacgctaagggaaa

SEQ ID NO: 3361933 - DNA, 25 bp, Homo sapien
tagacagcatccgtttgtgaggagc

SEQ ID NO: 3361934 - DNA, 25 bp, Homo sapien
taatgacaatatggcagttcgcccc

SEQ ID NO: 3361935 - DNA, 25 bp, Homo sapien
gagacaaacactgatgaagccgcta

SEQ ID NO: 3361936 - DNA, 25 bp, Homo sapien
tgttggacagatatcacacggcctg

SEQ ID NO: 3361937 - DNA, 25 bp, Homo sapien
gggtatcagacgatggtagaacaca

SEQ ID NO: 3361938 - DNA, 25 bp, Homo sapien
cataccatgtccaggtcttgagcga

SEQ ID NO: 3361939 - DNA, 25 bp, Homo sapien
ggaggaacacacagtttttgtagct

SEQ ID NO: 3361940 - DNA, 25 bp, Homo sapien
gaaatgcggtttcagtatctctgga

SEQ ID NO: 3361941 - DNA, 25 bp, Homo sapien
cacgttcagtaggaccggtgtttgc

SEQ ID NO: 3361942 - DNA, 25 bp, Homo sapien
aaagtgggtagtggagcttcacagc

SEQ ID NO: 3361943 - DNA, 25 bp, Homo sapien
gactctccattagtaaaggtccaga

SEQ ID NO: 3361944 - DNA, 25 bp, Homo sapien
tccaggtctacgagagcagtgcttc

SEQ ID NO: 3361945 - DNA, 25 bp, Homo sapien
ctagaatagaggatttcaccctggg

SEQ ID NO: 3361946 - DNA, 25 bp, Homo sapien
gcctgtaaaacgtgatgagaatctg

SEQ ID NO: 3361947 - DNA, 25 bp, Homo sapien
gccttagcgtagcttggccatgtga

SEQ ID NO: 3361948 - DNA, 25 bp, Homo sapien
tgttgaccagccatgattttagccc

SEQ ID NO: 3361949 - DNA, 25 bp, Homo sapien
ctgggaccaagtttcaggaatatca

SEQ ID NO: 3361950 - DNA, 25 bp, Homo sapien
tgggaccaagtttcaggaatatcag

SEQ ID NO: 3361951 - DNA, 25 bp, Homo sapien
gaccaagtttcaggaatatcagggt

SEQ ID NO: 3361952 - DNA, 25 bp, Homo sapien
ggaccaagtttcaggaatatcaggg

SEQ ID NO: 3361953 - DNA, 25 bp, Homo sapien
ctgacgggtgccgtcacttcctgtg

SEQ ID NO: 3361954 - DNA, 25 bp, Homo sapien
tgacgggtgccgtcacttcctgtgc

SEQ ID NO: 3361955 - DNA, 25 bp, Homo sapien
tcttttaaaatgtcaccacaaccca

SEQ ID NO: 3361956 - DNA, 25 bp, Homo sapien
ttaaaatgtcaccacaacccaacat

SEQ ID NO: 3361957 - DNA, 25 bp, Homo sapien
gattcttttaaaatgtcaccacaac

SEQ ID NO: 3361958 - DNA, 25 bp, Homo sapien
ttgattcttttaaaatgtcaccaca

SEQ ID NO: 3361959 - DNA, 25 bp, Homo sapien
taagtttctgacgatgattagaatc

SEQ ID NO: 3361960 - DNA, 25 bp, Homo sapien
gtagtaagtttctgacgatgattag

SEQ ID NO: 3361961 - DNA, 25 bp, Homo sapien
agtaagtttctgacgatgattagaa

SEQ ID NO: 3361962 - DNA, 25 bp, Homo sapien
agtttctgacgatgattagaatcat

SEQ ID NO: 3361963 - DNA, 25 bp, Homo sapien
gcagagttgatgactgcaagggcat

SEQ ID NO: 3361964 - DNA, 25 bp, Homo sapien
atgaagtccaccagaccctgcagag

SEQ ID NO: 3361965 - DNA, 25 bp, Homo sapien
tgcagagttgatgactgcaagggca

SEQ ID NO: 3361966 - DNA, 25 bp, Homo sapien
ttcatgaagtccaccagaccctgca

SEQ ID NO: 3361967 - DNA, 25 bp, Homo sapien
tcatggaaggatggctgcaagctcc

SEQ ID NO: 3361968 - DNA, 25 bp, Homo sapien
cattttacagacattccttgggcag

SEQ ID NO: 3361969 - DNA, 25 bp, Homo sapien
taggcgggtaaccaggtcattgcag

SEQ ID NO: 3361970 - DNA, 25 bp, Homo sapien
tgcagtgcatgtggaaggagctaac

SEQ ID NO: 3361971 - DNA, 25 bp, Homo sapien
gggctctccgtgcacaaaaccaaat

SEQ ID NO: 3361972 - DNA, 25 bp, Homo sapien
ggagaactgggctcaagttgcacag

SEQ ID NO: 3361973 - DNA, 25 bp, Homo sapien
ggcttccacccgtggtctctgacgg

SEQ ID NO: 3361974 - DNA, 25 bp, Homo sapien
ggaagctgtgcagaaggcttccacc

SEQ ID NO: 3361975 - DNA, 25 bp, Homo sapien
cctgtggtgccagcgctcgagatgg

SEQ ID NO: 3361976 - DNA, 25 bp, Homo sapien
ccctgtggtgccagcgctcgagatg

SEQ ID NO: 3361977 - DNA, 25 bp, Homo sapien
tgccctgtggtgccagcgctcgaga

SEQ ID NO: 3361978 - DNA, 25 bp, Homo sapien
gccctgtggtgccagcgctcgagat

SEQ ID NO: 3361979 - DNA, 25 bp, Homo sapien
attaaaaaatgggagtgctcatctt

SEQ ID NO: 3361980 - DNA, 25 bp, Homo sapien
atctaaagccagggttaggggtcag

SEQ ID NO: 3361981 - DNA, 25 bp, Homo sapien
aaaaatgggagtgctcatcttcaat

SEQ ID NO: 3361982 - DNA, 25 bp, Homo sapien
taaaaaatgggagtgctcatcttca

SEQ ID NO: 3361983 - DNA, 25 bp, Homo sapien
ccagaaaatgtgaggtgactgggaa

SEQ ID NO: 3361984 - DNA, 25 bp, Homo sapien
cccagaaaatgtgaggtgactggga

SEQ ID NO: 3361985 - DNA, 25 bp, Homo sapien
cagaaaatgtgaggtgactgggaaa

SEQ ID NO: 3361986 - DNA, 25 bp, Homo sapien
tcccagaaaatgtgaggtgactggg

SEQ ID NO: 3361987 - DNA, 25 bp, Homo sapien
ctagaaagaatggctggagaggtca

SEQ ID NO: 3361988 - DNA, 25 bp, Homo sapien
atgctagaaagaatggctggagagg

SEQ ID NO: 3361989 - DNA, 25 bp, Homo sapien
tgctagaaagaatggctggagaggt

SEQ ID NO: 3361990 - DNA, 25 bp, Homo sapien
gctagaaagaatggctggagaggtc

SEQ ID NO: 3361991 - DNA, 25 bp, Homo sapien
caaagtccgcccgaaatggatgctg

SEQ ID NO: 3361992 - DNA, 25 bp, Homo sapien
agaaacaacttggttcagccggtgg

SEQ ID NO: 3361993 - DNA, 25 bp, Homo sapien
gaatagaggcagtaccccacatgtg

SEQ ID NO: 3361994 - DNA, 25 bp, Homo sapien
tcttggctacacgaaagatcttggg

SEQ ID NO: 3361995 - DNA, 25 bp, Homo sapien
aatatgtgctctgtggtcgctgcgc

SEQ ID NO: 3361996 - DNA, 25 bp, Homo sapien
gaaacgctgcccgtgaaatacagaa

SEQ ID NO: 3361997 - DNA, 25 bp, Homo sapien
ccaaatccagtgttgagcaagcgtc

SEQ ID NO: 3361998 - DNA, 25 bp, Homo sapien
tatagaaggcgtgactgaatgtggc

SEQ ID NO: 3361999 - DNA, 25 bp, Homo sapien
ggcccgaagctaggggagcgtggct

SEQ ID NO: 3362000 - DNA, 25 bp, Homo sapien
ggctgcacagtggagcagacaccct

SEQ ID NO: 3362001 - DNA, 25 bp, Homo sapien
aggctgcacagtggagcagacaccc

SEQ ID NO: 3362002 - DNA, 25 bp, Homo sapien
gcgtagtggcccgaagctaggggag

SEQ ID NO: 3362003 - DNA, 25 bp, Homo sapien
agaaagtccagcaaaccagcccaga

SEQ ID NO: 3362004 - DNA, 25 bp, Homo sapien
agagaaagtccagcaaaccagccca

SEQ ID NO: 3362005 - DNA, 25 bp, Homo sapien
aaagtccagcaaaccagcccagaaa

SEQ ID NO: 3362006 - DNA, 25 bp, Homo sapien
agaagagaaagtccagcaaaccagc

SEQ ID NO: 3362007 - DNA, 25 bp, Homo sapien
gcaggtagtttgtaagacaggataa

SEQ ID NO: 3362008 - DNA, 25 bp, Homo sapien
tagttgagctacagttctaaatact

SEQ ID NO: 3362009 - DNA, 25 bp, Homo sapien
gcaaagataatgaaactccagctag

SEQ ID NO: 3362010 - DNA, 25 bp, Homo sapien
taatgaaactccagctagttgagct

SEQ ID NO: 3362011 - DNA, 25 bp, Homo sapien
agagctttagccaaactaactcctg

SEQ ID NO: 3362012 - DNA, 25 bp, Homo sapien
ctgagagctttagccaaactaactc

SEQ ID NO: 3362013 - DNA, 25 bp, Homo sapien
tgagagctttagccaaactaactcc

SEQ ID NO: 3362014 - DNA, 25 bp, Homo sapien
gagagctttagccaaactaactcct

SEQ ID NO: 3362015 - DNA, 25 bp, Homo sapien
ctgagtttgcatttgcgccactgca

SEQ ID NO: 3362016 - DNA, 25 bp, Homo sapien
cttccagtgtggcaaataagttgta

SEQ ID NO: 3362017 - DNA, 25 bp, Homo sapien
cgccactgcatagtggcccaaagct

SEQ ID NO: 3362018 - DNA, 25 bp, Homo sapien
taaaatccatcccaggagagatagt

SEQ ID NO: 3362019 - DNA, 25 bp, Homo sapien
ttgtggttgacggtaatgtgacaat

SEQ ID NO: 3362020 - DNA, 25 bp, Homo sapien
tcttaggactttgccacccctatag

SEQ ID NO: 3362021 - DNA, 25 bp, Homo sapien
ggttgacggtaatgtgacaatcttg

SEQ ID NO: 3362022 - DNA, 25 bp, Homo sapien
tgtggttgacggtaatgtgacaatc

SEQ ID NO: 3362023 - DNA, 25 bp, Homo sapien
taagctgtggtcattaactctttgg

SEQ ID NO: 3362024 - DNA, 25 bp, Homo sapien
ctgtggtcattaactctttgggcac

SEQ ID NO: 3362025 - DNA, 25 bp, Homo sapien
aatataagctgtggtcattaactct

SEQ ID NO: 3362026 - DNA, 25 bp, Homo sapien
ggaatataagctgtggtcattaact

SEQ ID NO: 3362027 - DNA, 25 bp, Homo sapien
ctctgttaaaactatgagttgggct

SEQ ID NO: 3362028 - DNA, 25 bp, Homo sapien
aaggacttgatctgttaccttccaa

SEQ ID NO: 3362029 - DNA, 25 bp, Homo sapien
ggtaaaattatatccccaatgcttg

SEQ ID NO: 3362030 - DNA, 25 bp, Homo sapien
cacgtaaaggacgaaggactctgtt

SEQ ID NO: 3362031 - DNA, 25 bp, Homo sapien
tcctcggattcctttgaaaggtaga

SEQ ID NO: 3362032 - DNA, 25 bp, Homo sapien
ctcgagtgtcgcaggagctcagagt

SEQ ID NO: 3362033 - DNA, 25 bp, Homo sapien
tggcccacatcctcgagtgtcgcag

SEQ ID NO: 3362034 - DNA, 25 bp, Homo sapien
cggattcctttgaaaggtagaggct

SEQ ID NO: 3362035 - DNA, 25 bp, Homo sapien
gggctgcaccgtctcctctccacat

SEQ ID NO: 3362036 - DNA, 25 bp, Homo sapien
agattcccagggctgcaccgtctcc

SEQ ID NO: 3362037 - DNA, 25 bp, Homo sapien
cagggctgcaccgtctcctctccac

SEQ ID NO: 3362038 - DNA, 25 bp, Homo sapien
ctgccccagattcccagggctgcac

SEQ ID NO: 3362039 - DNA, 25 bp, Homo sapien
tccagagggccggagacctgtctgg

SEQ ID NO: 3362040 - DNA, 25 bp, Homo sapien
tggatccagagggccggagacctgt

SEQ ID NO: 3362041 - DNA, 25 bp, Homo sapien
gatccagagggccggagacctgtct

SEQ ID NO: 3362042 - DNA, 25 bp, Homo sapien
ctggatccagagggccggagacctg

SEQ ID NO: 3362043 - DNA, 25 bp, Homo sapien
ccaggaggcagtcggggtggtgaag

SEQ ID NO: 3362044 - DNA, 25 bp, Homo sapien
cagtgcacaggatatggcaagcttg

SEQ ID NO: 3362045 - DNA, 25 bp, Homo sapien
accagtgcacaggatatggcaagct

SEQ ID NO: 3362046 - DNA, 25 bp, Homo sapien
gtgcacaggatatggcaagcttgag

SEQ ID NO: 3362047 - DNA, 25 bp, Homo sapien
agaaagccaaccagagactctaagg

SEQ ID NO: 3362048 - DNA, 25 bp, Homo sapien
cagaggatctttagggaaccaccag

SEQ ID NO: 3362049 - DNA, 25 bp, Homo sapien
acacgttttgcccaggacattcagg

SEQ ID NO: 3362050 - DNA, 25 bp, Homo sapien
ggcagtggcttcctacatcagagga

SEQ ID NO: 3362051 - DNA, 25 bp, Homo sapien
ctgaatgcatcctccggcagtcggg

SEQ ID NO: 3362052 - DNA, 25 bp, Homo sapien
ctcctcctcgggccagagtcagaac

SEQ ID NO: 3362053 - DNA, 25 bp, Homo sapien
gtcagaaccctgaatgcatcctccg

SEQ ID NO: 3362054 - DNA, 25 bp, Homo sapien
aaccctgaatgcatcctccggcagt

SEQ ID NO: 3362055 - DNA, 25 bp, Homo sapien
gaaaacagtgcgctaaccgggtctg

SEQ ID NO: 3362056 - DNA, 25 bp, Homo sapien
taaccgggtctgaaggaggtctctc

SEQ ID NO: 3362057 - DNA, 25 bp, Homo sapien
tctcaacaggttgttccattcaggt

SEQ ID NO: 3362058 - DNA, 25 bp, Homo sapien
gccacaaacacaagcgctctttgct

SEQ ID NO: 3362059 - DNA, 25 bp, Homo sapien
tatgcaactggatgcttctaaaatt

SEQ ID NO: 3362060 - DNA, 25 bp, Homo sapien
tcatctgcgagtgggtggtttgttg

SEQ ID NO: 3362061 - DNA, 25 bp, Homo sapien
cactggctgaaacagatgccctttt

SEQ ID NO: 3362062 - DNA, 25 bp, Homo sapien
tttttgtgccatggaaaaggcttgc

SEQ ID NO: 3362063 - DNA, 25 bp, Homo sapien
gagtgcttcgtgcttctctctctag

SEQ ID NO: 3362064 - DNA, 25 bp, Homo sapien
gatcagataccctggtcagtgaccg

SEQ ID NO: 3362065 - DNA, 25 bp, Homo sapien
cacactgtaccgtccatggcgtttg

SEQ ID NO: 3362066 - DNA, 25 bp, Homo sapien
tcctcctccgacatgagcgagtgct

SEQ ID NO: 3362067 - DNA, 25 bp, Homo sapien
ggtattatcagcacaaagattccca

SEQ ID NO: 3362068 - DNA, 25 bp, Homo sapien
gagctgtgggtattatcagcacaaa

SEQ ID NO: 3362069 - DNA, 25 bp, Homo sapien
tatcagcacaaagattcccaccaac

SEQ ID NO: 3362070 - DNA, 25 bp, Homo sapien
gagaagagctgtgggtattatcagc

SEQ ID NO: 3362071 - DNA, 25 bp, Homo sapien
ttctaccgcatctattgtggctcag

SEQ ID NO: 3362072 - DNA, 25 bp, Homo sapien
tagagattggagtggcatgatgaga

SEQ ID NO: 3362073 - DNA, 25 bp, Homo sapien
atctctgaggtgtcccgtttctacc

SEQ ID NO: 3362074 - DNA, 25 bp, Homo sapien
tactatgaatttcagagcgtgacaa

SEQ ID NO: 3362075 - DNA, 25 bp, Homo sapien
aatggaaaaaaccatgatcctgtgg

SEQ ID NO: 3362076 - DNA, 25 bp, Homo sapien
acaatggaaaaaaccatgatcctgt

SEQ ID NO: 3362077 - DNA, 25 bp, Homo sapien
taacaatggaaaaaaccatgatcct

SEQ ID NO: 3362078 - DNA, 25 bp, Homo sapien
caatggaaaaaaccatgatcctgtg

SEQ ID NO: 3362079 - DNA, 25 bp, Homo sapien
ccccagggaccaaatatgtggagtc

SEQ ID NO: 3362080 - DNA, 25 bp, Homo sapien
gctgcatgatttcgggctgggatcc

SEQ ID NO: 3362081 - DNA, 25 bp, Homo sapien
gtggagtccacattcacagagcatc

SEQ ID NO: 3362082 - DNA, 25 bp, Homo sapien
ggctggcttgcctcttagttgaccc

SEQ ID NO: 3362083 - DNA, 25 bp, Homo sapien
acaaataaatacacagcagctgcaa

SEQ ID NO: 3362084 - DNA, 25 bp, Homo sapien
taatgtaacaagagctatggaactg

SEQ ID NO: 3362085 - DNA, 25 bp, Homo sapien
ttcaggaaataagcatgcccatatg

SEQ ID NO: 3362086 - DNA, 25 bp, Homo sapien
cccacttttgggaatacactacaag

SEQ ID NO: 3362087 - DNA, 25 bp, Homo sapien
cacgtagtgccgggcaggaattgac

SEQ ID NO: 3362088 - DNA, 25 bp, Homo sapien
attttccatttgaattagaaggcta

SEQ ID NO: 3362089 - DNA, 25 bp, Homo sapien
ttccatttgaattagaaggctaaga

SEQ ID NO: 3362090 - DNA, 25 bp, Homo sapien
tcatctccgctgcacgtagtgccgg

SEQ ID NO: 3362091 - DNA, 25 bp, Homo sapien
gacaattggtccgtctgggctggca

SEQ ID NO: 3362092 - DNA, 25 bp, Homo sapien
attggtccgtctgggctggcatttg

SEQ ID NO: 3362093 - DNA, 25 bp, Homo sapien
tctgggacaattggtccgtctgggc

SEQ ID NO: 3362094 - DNA, 25 bp, Homo sapien
ctgggacaattggtccgtctgggct

SEQ ID NO: 3362095 - DNA, 25 bp, Homo sapien
ctgtgtggaatggaaaggagttatg

SEQ ID NO: 3362096 - DNA, 25 bp, Homo sapien
caatcctggtgcaaattgggagctt

SEQ ID NO: 3362097 - DNA, 25 bp, Homo sapien
gagcaacaacctcatatcagggata

SEQ ID NO: 3362098 - DNA, 25 bp, Homo sapien
tcagcaacaatcctggtgcaaattg

SEQ ID NO: 3362099 - DNA, 25 bp, Homo sapien
gtgaatgagcaacaacctcatatca

SEQ ID NO: 3362100 - DNA, 25 bp, Homo sapien
cagtaagtactcagtcaattccagc

SEQ ID NO: 3362101 - DNA, 25 bp, Homo sapien
attatctgggtaacagcttttcact

SEQ ID NO: 3362102 - DNA, 25 bp, Homo sapien
taaaccggtctctatccagtaagta

SEQ ID NO: 3362103 - DNA, 25 bp, Homo sapien
ccagtttgaacagtctctctcagtt

SEQ ID NO: 3362104 - DNA, 25 bp, Homo sapien
tctgctttgcgggacacggctgact

SEQ ID NO: 3362105 - DNA, 25 bp, Homo sapien
gggtccgtgccagtcggccctggtc

SEQ ID NO: 3362106 - DNA, 25 bp, Homo sapien
ctttgcgggacacggctgactacag

SEQ ID NO: 3362107 - DNA, 25 bp, Homo sapien
ctggtcctgactctacctagcaggg

SEQ ID NO: 3362108 - DNA, 25 bp, Homo sapien
acaggaaatgagaacgcccagggct

SEQ ID NO: 3362109 - DNA, 25 bp, Homo sapien
catcctgcttccaaggaggaggtca

SEQ ID NO: 3362110 - DNA, 25 bp, Homo sapien
gaaatgtctcatcaggtctagaagg

SEQ ID NO: 3362111 - DNA, 25 bp, Homo sapien
gatgtgatacacagaactgccccag

SEQ ID NO: 3362112 - DNA, 25 bp, Homo sapien
gtgtttgattcactggggacacaga

SEQ ID NO: 3362113 - DNA, 25 bp, Homo sapien
cagatcctagtggaggtgcctcttg

SEQ ID NO: 3362114 - DNA, 25 bp, Homo sapien
aaggccagatcctagtggaggtgcc

SEQ ID NO: 3362115 - DNA, 25 bp, Homo sapien
tgggctgaaggccagatcctagtgg

SEQ ID NO: 3362116 - DNA, 25 bp, Homo sapien
ggccagatcctagtggaggtgcctc

SEQ ID NO: 3362117 - DNA, 25 bp, Homo sapien
cccaatatcggtgtcccagacactg

SEQ ID NO: 3362118 - DNA, 25 bp, Homo sapien
tgccccaatatcggtgtcccagaca

SEQ ID NO: 3362119 - DNA, 25 bp, Homo sapien
tgtcctgccccaatatcggtgtccc

SEQ ID NO: 3362120 - DNA, 25 bp, Homo sapien
cctgccccaatatcggtgtcccaga

SEQ ID NO: 3362121 - DNA, 25 bp, Homo sapien
tatgcatcagaagtctcggatcggg

SEQ ID NO: 3362122 - DNA, 25 bp, Homo sapien
caaatggaaagtacatccgtgcgcg

SEQ ID NO: 3362123 - DNA, 25 bp, Homo sapien
tcggatcgggccttagtgtagctga

SEQ ID NO: 3362124 - DNA, 25 bp, Homo sapien
caaaattcccgtgtttgagggcaca

SEQ ID NO: 3362125 - DNA, 25 bp, Homo sapien
ccagcccagagcgtttcttaggcag

SEQ ID NO: 3362126 - DNA, 25 bp, Homo sapien
ttccagcccagagcgtttcttaggc

SEQ ID NO: 3362127 - DNA, 25 bp, Homo sapien
attccagcccagagcgtttcttagg

SEQ ID NO: 3362128 - DNA, 25 bp, Homo sapien
cagcccagagcgtttcttaggcagc

SEQ ID NO: 3362129 - DNA, 25 bp, Homo sapien
tgtgtgtgaccaagaaccctgcggg

SEQ ID NO: 3362130 - DNA, 25 bp, Homo sapien
ctgctctccggtgtgtgtgaccaag

SEQ ID NO: 3362131 - DNA, 25 bp, Homo sapien
tgtgtgaccaagaaccctgcgggct

SEQ ID NO: 3362132 - DNA, 25 bp, Homo sapien
tgtgaccaagaaccctgcgggctcc

SEQ ID NO: 3362133 - DNA, 25 bp, Homo sapien
cttaagctcagtcgtggagacccta

SEQ ID NO: 3362134 - DNA, 25 bp, Homo sapien
gaaatcagggatctcgcagccttga

SEQ ID NO: 3362135 - DNA, 25 bp, Homo sapien
tagctgaaagtattccttacgggaa

SEQ ID NO: 3362136 - DNA, 25 bp, Homo sapien
actctaatgaggtccgtgtgagagg

SEQ ID NO: 3362137 - DNA, 25 bp, Homo sapien
tagagcgtatggaggcagagctttc

SEQ ID NO: 3362138 - DNA, 25 bp, Homo sapien
caacaggcgtgggtcctaaggtgct

SEQ ID NO: 3362139 - DNA, 25 bp, Homo sapien
tctctctaggctcatgtgtgtgcag

SEQ ID NO: 3362140 - DNA, 25 bp, Homo sapien
tgcccagccccagtagttgatagag

SEQ ID NO: 3362141 - DNA, 25 bp, Homo sapien
aaatgttcccagatgctgcggtcat

SEQ ID NO: 3362142 - DNA, 25 bp, Homo sapien
tctgcaaaccaggaggatactctca

SEQ ID NO: 3362143 - DNA, 25 bp, Homo sapien
caaataggcttcacggaggctgtgt

SEQ ID NO: 3362144 - DNA, 25 bp, Homo sapien
gagaagatgacgatagcacacatgc

SEQ ID NO: 3362145 - DNA, 25 bp, Homo sapien
agaagctcggctttcccatgaccag

SEQ ID NO: 3362146 - DNA, 25 bp, Homo sapien
ggcagtccctaagaagctcggcttt

SEQ ID NO: 3362147 - DNA, 25 bp, Homo sapien
ccatggcagtccctaagaagctcgg

SEQ ID NO: 3362148 - DNA, 25 bp, Homo sapien
gctcggctttcccatgaccagacat

SEQ ID NO: 3362149 - DNA, 25 bp, Homo sapien
ctgcctcgggaggatgcactttacc

SEQ ID NO: 3362150 - DNA, 25 bp, Homo sapien
aggccgctgtgaaggctctggagga

SEQ ID NO: 3362151 - DNA, 25 bp, Homo sapien
ccagagaggcgtgagacatgagggt

SEQ ID NO: 3362152 - DNA, 25 bp, Homo sapien
gcagaacttgcaggcgcccttgggt

SEQ ID NO: 3362153 - DNA, 25 bp, Homo sapien
agctaggagggcttctcagcccgcg

SEQ ID NO: 3362154 - DNA, 25 bp, Homo sapien
ctcccgctgccaggcgccgggaccg

SEQ ID NO: 3362155 - DNA, 25 bp, Homo sapien
tggcccccggattcaaacctatcat

SEQ ID NO: 3362156 - DNA, 25 bp, Homo sapien
gcggctccatccagaacctcccgct

SEQ ID NO: 3362157 - DNA, 25 bp, Homo sapien
ccaggcaggtgggttccaaatattt

SEQ ID NO: 3362158 - DNA, 25 bp, Homo sapien
ccctgtggtccctacaagtgaagat

SEQ ID NO: 3362159 - DNA, 25 bp, Homo sapien
tgaagatttgtcgtttttcgagggc

SEQ ID NO: 3362160 - DNA, 25 bp, Homo sapien
tgtcgtttttcgagggcctgaccca

SEQ ID NO: 3362161 - DNA, 25 bp, Homo sapien
cagttagagtacgtaactgtgggaa

SEQ ID NO: 3362162 - DNA, 25 bp, Homo sapien
tatacctggaatgggaaacgtaaca

SEQ ID NO: 3362163 - DNA, 25 bp, Homo sapien
tatcttacagtgcatgtatacctgg

SEQ ID NO: 3362164 - DNA, 25 bp, Homo sapien
catctgccggttggtggtaaagctg

SEQ ID NO: 3362165 - DNA, 25 bp, Homo sapien
ccaagacagaacgtgcatcagctca

SEQ ID NO: 3362166 - DNA, 25 bp, Homo sapien
caacggcaggatctgggaaagcttc

SEQ ID NO: 3362167 - DNA, 25 bp, Homo sapien
gagatcgatctgtttccagccaaag

SEQ ID NO: 3362168 - DNA, 25 bp, Homo sapien
cagttcaacgtgtatagggtcggcc

SEQ ID NO: 3362169 - DNA, 25 bp, Homo sapien
aatacaattgcaaaaacccataaag

SEQ ID NO: 3362170 - DNA, 25 bp, Homo sapien
ccagaaaatagtaagcgaaatgcac

SEQ ID NO: 3362171 - DNA, 25 bp, Homo sapien
tgtaaatgccagtgagacgtgctgt

SEQ ID NO: 3362172 - DNA, 25 bp, Homo sapien
aacccataaagtccacacatgtaaa

SEQ ID NO: 3362173 - DNA, 25 bp, Homo sapien
ttccctctttcagccggtgtctgag

SEQ ID NO: 3362174 - DNA, 25 bp, Homo sapien
ctgaggagttttgcctgcagcccat

SEQ ID NO: 3362175 - DNA, 25 bp, Homo sapien
aggagttttgcctgcagcccatcct

SEQ ID NO: 3362176 - DNA, 25 bp, Homo sapien
cctctttcagccggtgtctgaggag

SEQ ID NO: 3362177 - DNA, 25 bp, Homo sapien
cactccagctgtgcgacaagagcga

SEQ ID NO: 3362178 - DNA, 25 bp, Homo sapien
ccagctgtgcgacaagagcgaaatt

SEQ ID NO: 3362179 - DNA, 25 bp, Homo sapien
tgcactccagcctgccattgcactc

SEQ ID NO: 3362180 - DNA, 25 bp, Homo sapien
ctccagctgtgcgacaagagcgaaa

SEQ ID NO: 3362181 - DNA, 25 bp, Homo sapien
ttttccagtataacaagcatgaaga

SEQ ID NO: 3362182 - DNA, 25 bp, Homo sapien
ttcatcccaggatccagtatttgtg

SEQ ID NO: 3362183 - DNA, 25 bp, Homo sapien
caggtgcttagtccaaattcatccc

SEQ ID NO: 3362184 - DNA, 25 bp, Homo sapien
aattgaaaaggaaatctgcaggtgc

SEQ ID NO: 3362185 - DNA, 25 bp, Homo sapien
tccaaacacccatgttgacctttca

SEQ ID NO: 3362186 - DNA, 25 bp, Homo sapien
tcccacttttggatggataatagtt

SEQ ID NO: 3362187 - DNA, 25 bp, Homo sapien
tctcatttctaggccctcttccttc

SEQ ID NO: 3362188 - DNA, 25 bp, Homo sapien
ttgaatcccacttttggatggataa

SEQ ID NO: 3362189 - DNA, 25 bp, Homo sapien
tgagctaccgcacccggccggaaat

SEQ ID NO: 3362190 - DNA, 25 bp, Homo sapien
tcgctcttgtctcccgggctggaga

SEQ ID NO: 3362191 - DNA, 25 bp, Homo sapien
cttgtctcccgggctggagagcaat

SEQ ID NO: 3362192 - DNA, 25 bp, Homo sapien
gctcttgtctcccgggctggagagc

SEQ ID NO: 3362193 - DNA, 25 bp, Homo sapien
caactacagcctcgacattttgtac

SEQ ID NO: 3362194 - DNA, 25 bp, Homo sapien
tggactttgaggactattgtttgtt

SEQ ID NO: 3362195 - DNA, 25 bp, Homo sapien
taggtttagatctattgtattgagc

SEQ ID NO: 3362196 - DNA, 25 bp, Homo sapien
ccagccatactttcaatagtaggtt

SEQ ID NO: 3362197 - DNA, 25 bp, Homo sapien
tatgaacaggcaacatgtaggcagc

SEQ ID NO: 3362198 - DNA, 25 bp, Homo sapien
caaagctaattaagtctgggcacgt

SEQ ID NO: 3362199 - DNA, 25 bp, Homo sapien
gtttgtgcaacgcaacctggcgagc

SEQ ID NO: 3362200 - DNA, 25 bp, Homo sapien
tggctacggcaaccaaaactcaggg

SEQ ID NO: 3362201 - DNA, 25 bp, Homo sapien
taagaaggatagagctcaaagttgt

SEQ ID NO: 3362202 - DNA, 25 bp, Homo sapien
gtggcccaagccaaaaccctagatg

SEQ ID NO: 3362203 - DNA, 25 bp, Homo sapien
cagccttaacaagatctacctgtgg

SEQ ID NO: 3362204 - DNA, 25 bp, Homo sapien
ggattttctatttcgtacagcctta

SEQ ID NO: 3362205 - DNA, 25 bp, Homo sapien
ttagccagataccagaagaaaacat

SEQ ID NO: 3362206 - DNA, 25 bp, Homo sapien
tttagccagataccagaagaaaaca

SEQ ID NO: 3362207 - DNA, 25 bp, Homo sapien
tcttcctcagaaaaacattgctctc

SEQ ID NO: 3362208 - DNA, 25 bp, Homo sapien
tacaacacgctatcaattggtgact

SEQ ID NO: 3362209 - DNA, 25 bp, Homo sapien
aaaatgcatgggatttgctggatcc

SEQ ID NO: 3362210 - DNA, 25 bp, Homo sapien
tgctggatcctgttaaaccaaatgt

SEQ ID NO: 3362211 - DNA, 25 bp, Homo sapien
gacggcacgaaggaccgagccgcct

SEQ ID NO: 3362212 - DNA, 25 bp, Homo sapien
ttgcaggctcgcgaggagccgcact

SEQ ID NO: 3362213 - DNA, 25 bp, Homo sapien
gtccgaaaaggaaccgcctgctgct

SEQ ID NO: 3362214 - DNA, 25 bp, Homo sapien
agccgcactcggaccgcctgatggg

SEQ ID NO: 3362215 - DNA, 25 bp, Homo sapien
ccttgagtgcgtggagtcgctgccc

SEQ ID NO: 3362216 - DNA, 25 bp, Homo sapien
gtcgctgccccacgacatgcagagg

SEQ ID NO: 3362217 - DNA, 25 bp, Homo sapien
cagcagcaactgtactcgtcggccg

SEQ ID NO: 3362218 - DNA, 25 bp, Homo sapien
ggagccggctgctcacctgctacgt

SEQ ID NO: 3362219 - DNA, 25 bp, Homo sapien
tgaacgagcctcagataaagcaaag

SEQ ID NO: 3362220 - DNA, 25 bp, Homo sapien
gcggaccagtgaaagccgtgattta

SEQ ID NO: 3362221 - DNA, 25 bp, Homo sapien
tgaagactgtgatgatcagccacct

SEQ ID NO: 3362222 - DNA, 25 bp, Homo sapien
tcgggcaagacaaatggagttacac

SEQ ID NO: 3362223 - DNA, 25 bp, Homo sapien
tatttgttatgctccactgaggtct

SEQ ID NO: 3362224 - DNA, 25 bp, Homo sapien
cctgtagtaactaggcgacgtccct

SEQ ID NO: 3362225 - DNA, 25 bp, Homo sapien
taccaaagggacaagagaagcaact

SEQ ID NO: 3362226 - DNA, 25 bp, Homo sapien
tcatgtagaacgtggagaggaatcc

SEQ ID NO: 3362227 - DNA, 25 bp, Homo sapien
ggctgtcatgttaatcacccgctgg

SEQ ID NO: 3362228 - DNA, 25 bp, Homo sapien
caacttatatatgtgagagggtgcg

SEQ ID NO: 3362229 - DNA, 25 bp, Homo sapien
gaacagttgttcagcaccaccatga

SEQ ID NO: 3362230 - DNA, 25 bp, Homo sapien
taacacacgactatgctgatggctc

SEQ ID NO: 3362231 - DNA, 25 bp, Homo sapien
tggggggccgccctgtgcttggcca

SEQ ID NO: 3362232 - DNA, 25 bp, Homo sapien
agctggggggccgccctgtgcttgg

SEQ ID NO: 3362233 - DNA, 25 bp, Homo sapien
cctccttggaccactcagtgtagct

SEQ ID NO: 3362234 - DNA, 25 bp, Homo sapien
cttggtcaggtgacccctccttgga

SEQ ID NO: 3362235 - DNA, 25 bp, Homo sapien
cagagtctgagttgttcaacgtcac

SEQ ID NO: 3362236 - DNA, 25 bp, Homo sapien
ggtcagagggggtcgttccattcat

SEQ ID NO: 3362237 - DNA, 25 bp, Homo sapien
gttcaacgtcactagtaaggtcaga

SEQ ID NO: 3362238 - DNA, 25 bp, Homo sapien
caacgtcactagtaaggtcagaggg

SEQ ID NO: 3362239 - DNA, 25 bp, Homo sapien
tgagcagatgtgacttacaccagga

SEQ ID NO: 3362240 - DNA, 25 bp, Homo sapien
aatgtgattgcctgctgtgatggcc

SEQ ID NO: 3362241 - DNA, 25 bp, Homo sapien
caccaggatgagcagaagcttcaat

SEQ ID NO: 3362242 - DNA, 25 bp, Homo sapien
ttccacaccttgttgtcagcccggg

SEQ ID NO: 3362243 - DNA, 25 bp, Homo sapien
gagctagttgtctattcctgcactg

SEQ ID NO: 3362244 - DNA, 25 bp, Homo sapien
aagtatggctcaaaacagtttcagg

SEQ ID NO: 3362245 - DNA, 25 bp, Homo sapien
tcttagtccaggttccaggcttatt

SEQ ID NO: 3362246 - DNA, 25 bp, Homo sapien
tgctatttgcctcagtgaatcccag

SEQ ID NO: 3362247 - DNA, 25 bp, Homo sapien
cctgctttaggagtttgcccagtga

SEQ ID NO: 3362248 - DNA, 25 bp, Homo sapien
ggcaggcaggcacctaagtgctagg

SEQ ID NO: 3362249 - DNA, 25 bp, Homo sapien
gagcagggtgagatgaaagcatccc

SEQ ID NO: 3362250 - DNA, 25 bp, Homo sapien
gggccttgcggccaaggttctagaa

SEQ ID NO: 3362251 - DNA, 25 bp, Homo sapien
gacaactctaccaatgtaactggta

SEQ ID NO: 3362252 - DNA, 25 bp, Homo sapien
caaagttagaattgatttcgcagtc

SEQ ID NO: 3362253 - DNA, 25 bp, Homo sapien
cgccttaaagacctgaaatgtttca

SEQ ID NO: 3362254 - DNA, 25 bp, Homo sapien
tcatctgccatgtagcatctcaaga

SEQ ID NO: 3362255 - DNA, 25 bp, Homo sapien
gctcattcattttagctccctctgc

SEQ ID NO: 3362256 - DNA, 25 bp, Homo sapien
tgtttcagcaacatagatcattaaa

SEQ ID NO: 3362257 - DNA, 25 bp, Homo sapien
gaaaggtgatgtgtctggttttcaa

SEQ ID NO: 3362258 - DNA, 25 bp, Homo sapien
ttcaaatccttgtgcgttggaagca

SEQ ID NO: 3362259 - DNA, 25 bp, Homo sapien
aagcatcgccgacttgcactcagct

SEQ ID NO: 3362260 - DNA, 25 bp, Homo sapien
gctctcagggacgtcagcatcacag

SEQ ID NO: 3362261 - DNA, 25 bp, Homo sapien
ttgagctgatgactaccaagcatcg

SEQ ID NO: 3362262 - DNA, 25 bp, Homo sapien
gactaccaagcatcgccgacttgca

SEQ ID NO: 3362263 - DNA, 25 bp, Homo sapien
cagttcgctgtctggagagcctgtt

SEQ ID NO: 3362264 - DNA, 25 bp, Homo sapien
cctgttgaccttgtgagaagttcca

SEQ ID NO: 3362265 - DNA, 25 bp, Homo sapien
gagcctgttgccagcacctgttgac

SEQ ID NO: 3362266 - DNA, 25 bp, Homo sapien
gggaacaaaatgtctgcttgggcat

SEQ ID NO: 3362267 - DNA, 25 bp, Homo sapien
tctggggctttgacggcccttggcc

SEQ ID NO: 3362268 - DNA, 25 bp, Homo sapien
tccagtggacgtccagaatcaggga

SEQ ID NO: 3362269 - DNA, 25 bp, Homo sapien
ccttggcctccagtggacgtccaga

SEQ ID NO: 3362270 - DNA, 25 bp, Homo sapien
ggcctccagtggacgtccagaatca

SEQ ID NO: 3362271 - DNA, 25 bp, Homo sapien
gctccagggtccaaatcttcgtatg

SEQ ID NO: 3362272 - DNA, 25 bp, Homo sapien
tgaaaatctcccgtaggctccaggg

SEQ ID NO: 3362273 - DNA, 25 bp, Homo sapien
caaacatatggcatgcagcgtcttc

SEQ ID NO: 3362274 - DNA, 25 bp, Homo sapien
tcttcttgccgtaggagcaggagaa

SEQ ID NO: 3362275 - DNA, 25 bp, Homo sapien
attgcttattaattatgtcactcca

SEQ ID NO: 3362276 - DNA, 25 bp, Homo sapien
tgtgtataattcagactttattgct

SEQ ID NO: 3362277 - DNA, 25 bp, Homo sapien
ctgtgtataattcagactttattgc

SEQ ID NO: 3362278 - DNA, 25 bp, Homo sapien
gcttattaattatgtcactccacaa

SEQ ID NO: 3362279 - DNA, 25 bp, Homo sapien
tttcttggcacaactagaccaatag

SEQ ID NO: 3362280 - DNA, 25 bp, Homo sapien
tgttgaaccatttaggagacctcag

SEQ ID NO: 3362281 - DNA, 25 bp, Homo sapien
cagttcagcatttaaaagactccca

SEQ ID NO: 3362282 - DNA, 25 bp, Homo sapien
gttatccaacaactaaaagcacaca

SEQ ID NO: 3362283 - DNA, 25 bp, Homo sapien
aaagcactcatgatcaaacatcttg

SEQ ID NO: 3362284 - DNA, 25 bp, Homo sapien
cccatcctggtatatgcaagagaaa

SEQ ID NO: 3362285 - DNA, 25 bp, Homo sapien
tattccacataccactcaaagcact

SEQ ID NO: 3362286 - DNA, 25 bp, Homo sapien
aaggcatcttttactcccatcctgg

SEQ ID NO: 3362287 - DNA, 25 bp, Homo sapien
ttcactgagtactccgctccactgg

SEQ ID NO: 3362288 - DNA, 25 bp, Homo sapien
tgaaaagggcttcatactcctttaa

SEQ ID NO: 3362289 - DNA, 25 bp, Homo sapien
taaaaggaagcagttcatctttcaa

SEQ ID NO: 3362290 - DNA, 25 bp, Homo sapien
gcacatccaccaggataagatcatt

SEQ ID NO: 3362291 - DNA, 25 bp, Homo sapien
tttaatacaacaagatctcttcatg

SEQ ID NO: 3362292 - DNA, 25 bp, Homo sapien
tattaaggcaagtttgtgaaaataa

SEQ ID NO: 3362293 - DNA, 25 bp, Homo sapien
atttaatacaacaagatctcttcat

SEQ ID NO: 3362294 - DNA, 25 bp, Homo sapien
cattttcaccttttattaaggcaag

SEQ ID NO: 3362295 - DNA, 25 bp, Homo sapien
tcgcctcaataccagaaaatagtaa

SEQ ID NO: 3362296 - DNA, 25 bp, Homo sapien
tttataaaaagtcgcctcaatacca

SEQ ID NO: 3362297 - DNA, 25 bp, Homo sapien
tagtaatgaaagattttgaacccag

SEQ ID NO: 3362298 - DNA, 25 bp, Homo sapien
aatgctctttccttgtctcaaattc

SEQ ID NO: 3362299 - DNA, 25 bp, Homo sapien
tcatcatccttagagccagttttgc

SEQ ID NO: 3362300 - DNA, 25 bp, Homo sapien
catccttagagccagttttgcttaa

SEQ ID NO: 3362301 - DNA, 25 bp, Homo sapien
ctactcatcatccttagagccagtt

SEQ ID NO: 3362302 - DNA, 25 bp, Homo sapien
tactcatcatccttagagccagttt

SEQ ID NO: 3362303 - DNA, 25 bp, Homo sapien
ggtgagcgggacactcttgaagctt

SEQ ID NO: 3362304 - DNA, 25 bp, Homo sapien
ctaaactcaacagaacaaggtggtg

SEQ ID NO: 3362305 - DNA, 25 bp, Homo sapien
taaactataggcaacgaggcttaag

SEQ ID NO: 3362306 - DNA, 25 bp, Homo sapien
tcaagctcagctacttcaaacgggt

SEQ ID NO: 3362307 - DNA, 25 bp, Homo sapien
ggtgtggtggctgccgccggcaatc

SEQ ID NO: 3362308 - DNA, 25 bp, Homo sapien
tgatgaacaaccacgtttaaggtct

SEQ ID NO: 3362309 - DNA, 25 bp, Homo sapien
tactatgttaaatattagtgtaacg

SEQ ID NO: 3362310 - DNA, 25 bp, Homo sapien
tagtgtaacgtatttgaaactacag

SEQ ID NO: 3362311 - DNA, 25 bp, Homo sapien
tgtaacaagtttaaagactagaata

SEQ ID NO: 3362312 - DNA, 25 bp, Homo sapien
aacccagttccagcctcgaggaagt

SEQ ID NO: 3362313 - DNA, 25 bp, Homo sapien
gttccagcctcgaggaagttctcct

SEQ ID NO: 3362314 - DNA, 25 bp, Homo sapien
atcaacccagttccagcctcgagga

SEQ ID NO: 3362315 - DNA, 25 bp, Homo sapien
agcctcgaggaagttctcctttgtg

SEQ ID NO: 3362316 - DNA, 25 bp, Homo sapien
gtaatggctttaggtgggcatcatc

SEQ ID NO: 3362317 - DNA, 25 bp, Homo sapien
ctgtcattatgggaaggtaatggct

SEQ ID NO: 3362318 - DNA, 25 bp, Homo sapien
aaagctccaagtcacaaactcgtat

SEQ ID NO: 3362319 - DNA, 25 bp, Homo sapien
caaactcgtatactgtcattatggg

SEQ ID NO: 3362320 - DNA, 25 bp, Homo sapien
cttgatggggctgtattaggagttt

SEQ ID NO: 3362321 - DNA, 25 bp, Homo sapien
gctgtattaggagtttcaattgaga

SEQ ID NO: 3362322 - DNA, 25 bp, Homo sapien
tcaattgagatgatattgcttatcg

SEQ ID NO: 3362323 - DNA, 25 bp, Homo sapien
caattgagatgatattgcttatcga

SEQ ID NO: 3362324 - DNA, 25 bp, Homo sapien
aaccacttgcacagaagacaggcct

SEQ ID NO: 3362325 - DNA, 25 bp, Homo sapien
catgggttaatgcagtcagggtata

SEQ ID NO: 3362326 - DNA, 25 bp, Homo sapien
tcctgggaaggaagatctgattatc

SEQ ID NO: 3362327 - DNA, 25 bp, Homo sapien
gaaaaatcacgtgtgcctacctaga

SEQ ID NO: 3362328 - DNA, 25 bp, Homo sapien
ttaagctttatggagagattaaaca

SEQ ID NO: 3362329 - DNA, 25 bp, Homo sapien
ctcagttttggtgggcatgttatat

SEQ ID NO: 3362330 - DNA, 25 bp, Homo sapien
gagatcccttagctgtttaagcttt

SEQ ID NO: 3362331 - DNA, 25 bp, Homo sapien
aatactaggttctatgatatctcag

SEQ ID NO: 3362332 - DNA, 25 bp, Homo sapien
atgggattgtgattctccatgaact

SEQ ID NO: 3362333 - DNA, 25 bp, Homo sapien
catagcggttccaagattagcttct

SEQ ID NO: 3362334 - DNA, 25 bp, Homo sapien
ggtcatagcggttccaagattagct

SEQ ID NO: 3362335 - DNA, 25 bp, Homo sapien
aggtcatagcggttccaagattagc

SEQ ID NO: 3362336 - DNA, 25 bp, Homo sapien
gcagtaaaaacaagacactactcac

SEQ ID NO: 3362337 - DNA, 25 bp, Homo sapien
attaagaaggctttgggatcaccat

SEQ ID NO: 3362338 - DNA, 25 bp, Homo sapien
aaggctttgggatcaccattttcac

SEQ ID NO: 3362339 - DNA, 25 bp, Homo sapien
aaaaaagcgttcatagatagaattg

SEQ ID NO: 3362340 - DNA, 25 bp, Homo sapien
cgttcatagatagaattggaggtgt

SEQ ID NO: 3362341 - DNA, 25 bp, Homo sapien
aatagagcgtaatgcttctagttcc

SEQ ID NO: 3362342 - DNA, 25 bp, Homo sapien
taaatagagcgtaatgcttctagtt

SEQ ID NO: 3362343 - DNA, 25 bp, Homo sapien
tagagcgtaatgcttctagttccat

SEQ ID NO: 3362344 - DNA, 25 bp, Homo sapien
cataaatagagcgtaatgcttctag

SEQ ID NO: 3362345 - DNA, 25 bp, Homo sapien
ctttctcattcaagcccactcaact

SEQ ID NO: 3362346 - DNA, 25 bp, Homo sapien
aatgaattagaaatagagggtcttt

SEQ ID NO: 3362347 - DNA, 25 bp, Homo sapien
tgaattagaaatagagggtctttac

SEQ ID NO: 3362348 - DNA, 25 bp, Homo sapien
actatgtaaaagcttgactaactta

SEQ ID NO: 3362349 - DNA, 25 bp, Homo sapien
gcctcctgagcggacggcgttcgca

SEQ ID NO: 3362350 - DNA, 25 bp, Homo sapien
gacggcgttcgcaacaacgaagaga

SEQ ID NO: 3362351 - DNA, 25 bp, Homo sapien
tcttggcactggcagacgccaactg

SEQ ID NO: 3362352 - DNA, 25 bp, Homo sapien
ttggcactggcagacgccaactgcg

SEQ ID NO: 3362353 - DNA, 25 bp, Homo sapien
ctcactggagctaccagaacagata

SEQ ID NO: 3362354 - DNA, 25 bp, Homo sapien
agctaccagaacagatactgggacc

SEQ ID NO: 3362355 - DNA, 25 bp, Homo sapien
cactggagctaccagaacagatact

SEQ ID NO: 3362356 - DNA, 25 bp, Homo sapien
ctttcctcactggagctaccagaac

SEQ ID NO: 3362357 - DNA, 25 bp, Homo sapien
ctccgtgttgctccaattttagcat

SEQ ID NO: 3362358 - DNA, 25 bp, Homo sapien
tctccgtgttgctccaattttagca

SEQ ID NO: 3362359 - DNA, 25 bp, Homo sapien
tccgtgttgctccaattttagcata

SEQ ID NO: 3362360 - DNA, 25 bp, Homo sapien
ttctccgtgttgctccaattttagc

SEQ ID NO: 3362361 - DNA, 25 bp, Homo sapien
aatttttggagataactaaggcagc

SEQ ID NO: 3362362 - DNA, 25 bp, Homo sapien
tatgcactagtaagcagccatgaaa

SEQ ID NO: 3362363 - DNA, 25 bp, Homo sapien
tatgcatgcggaataaatatagagc

SEQ ID NO: 3362364 - DNA, 25 bp, Homo sapien
tacacaaagagcatgtatgcatgcg

SEQ ID NO: 3362365 - DNA, 25 bp, Homo sapien
gtatgtatcactgcatcttagagtg

SEQ ID NO: 3362366 - DNA, 25 bp, Homo sapien
ttaaagttgctgttgtgattaaaac

SEQ ID NO: 3362367 - DNA, 25 bp, Homo sapien
gagtgacttataattaaagttgctg

SEQ ID NO: 3362368 - DNA, 25 bp, Homo sapien
ttttagaatgctttgtatgtatcac

SEQ ID NO: 3362369 - DNA, 25 bp, Homo sapien
agatcgagaccatcctggctaacac

SEQ ID NO: 3362370 - DNA, 25 bp, Homo sapien
aaggtgggtggatcacgaggtcagg

SEQ ID NO: 3362371 - DNA, 25 bp, Homo sapien
tttaagaaatgatccctggctgggc

SEQ ID NO: 3362372 - DNA, 25 bp, Homo sapien
cggtggctcacgcctgtaatcccag

SEQ ID NO: 3362373 - DNA, 25 bp, Homo sapien
gggtctgagtcaggccttctggtta

SEQ ID NO: 3362374 - DNA, 25 bp, Homo sapien
tattattcaaaaggtggaggcattg

SEQ ID NO: 3362375 - DNA, 25 bp, Homo sapien
taaacataatttcctagactgaaag

SEQ ID NO: 3362376 - DNA, 25 bp, Homo sapien
aaaaatcatagggtgaaaattgtat

SEQ ID NO: 3362377 - DNA, 25 bp, Homo sapien
acaaattctactgtgagtatattct

SEQ ID NO: 3362378 - DNA, 25 bp, Homo sapien
ggaattctcccatatcacaaattct

SEQ ID NO: 3362379 - DNA, 25 bp, Homo sapien
tcttagagttggcaatagagtaagc

SEQ ID NO: 3362380 - DNA, 25 bp, Homo sapien
ctgtgcgcgcttctgtacggatatc

SEQ ID NO: 3362381 - DNA, 25 bp, Homo sapien
tgccagcagccacgaccatctgtcc

SEQ ID NO: 3362382 - DNA, 25 bp, Homo sapien
gtctttgtacgtttggttctcaaca

SEQ ID NO: 3362383 - DNA, 25 bp, Homo sapien
ccatctgtccctcatgagaacgtct

SEQ ID NO: 3362384 - DNA, 25 bp, Homo sapien
tcatgagaacgtctgccttctgtct

SEQ ID NO: 3362385 - DNA, 25 bp, Homo sapien
tgttggcagcagctggcgcctgcgc

SEQ ID NO: 3362386 - DNA, 25 bp, Homo sapien
gtgttggcagcagctggcgcctgcg

SEQ ID NO: 3362387 - DNA, 25 bp, Homo sapien
ggcttccctcgcgctttgtgccttg

SEQ ID NO: 3362388 - DNA, 25 bp, Homo sapien
ttgcccaccgctcagacgctctgct

SEQ ID NO: 3362389 - DNA, 25 bp, Homo sapien
ccccgtttggccaacgctaagcatt

SEQ ID NO: 3362390 - DNA, 25 bp, Homo sapien
ggccaacgctaagcattttgccaaa

SEQ ID NO: 3362391 - DNA, 25 bp, Homo sapien
taaggacacagcccccgtttggcca

SEQ ID NO: 3362392 - DNA, 25 bp, Homo sapien
tttggccaacgctaagcattttgcc

SEQ ID NO: 3362393 - DNA, 25 bp, Homo sapien
gcatctgctcacatacgcctttcca

SEQ ID NO: 3362394 - DNA, 25 bp, Homo sapien
tctgctcacatacgcctttccactg

SEQ ID NO: 3362395 - DNA, 25 bp, Homo sapien
tccggcatctgctcacatacgcctt

SEQ ID NO: 3362396 - DNA, 25 bp, Homo sapien
ggtccggcatctgctcacatacgcc

SEQ ID NO: 3362397 - DNA, 25 bp, Homo sapien
tcaccgtgggtgctctagccctaag

SEQ ID NO: 3362398 - DNA, 25 bp, Homo sapien
cataacgtgcctaaggatacggaca

SEQ ID NO: 3362399 - DNA, 25 bp, Homo sapien
taagttggagatgtaccgtggccta

SEQ ID NO: 3362400 - DNA, 25 bp, Homo sapien
gatggcccatgtcgttcattcaccg

SEQ ID NO: 3362401 - DNA, 25 bp, Homo sapien
gaacgatggccctgacagatgtgac

SEQ ID NO: 3362402 - DNA, 25 bp, Homo sapien
aattgtattccctgcgcttgagtcc

SEQ ID NO: 3362403 - DNA, 25 bp, Homo sapien
tcctggtcttctgagctgacataag

SEQ ID NO: 3362404 - DNA, 25 bp, Homo sapien
gacagttgtagcacacgctgaacga

SEQ ID NO: 3362405 - DNA, 25 bp, Homo sapien
tcccgacaggccacacgtaatttct

SEQ ID NO: 3362406 - DNA, 25 bp, Homo sapien
gaggctgcaccggtgaacctgtgca

SEQ ID NO: 3362407 - DNA, 25 bp, Homo sapien
caaggtgccgggaagtgattgcgca

SEQ ID NO: 3362408 - DNA, 25 bp, Homo sapien
ctacctgcaagatttgctcttattt

SEQ ID NO: 3362409 - DNA, 25 bp, Homo sapien
gtgcccatccgagcaggactgcagg

SEQ ID NO: 3362410 - DNA, 25 bp, Homo sapien
ggactgtccatgacccctaacaacc

SEQ ID NO: 3362411 - DNA, 25 bp, Homo sapien
gaaaagccaccctcattgaccacat

SEQ ID NO: 3362412 - DNA, 25 bp, Homo sapien
catgtactgagtgcccatccgagca

SEQ ID NO: 3362413 - DNA, 25 bp, Homo sapien
gctgcacctgcacacttggcttctg

SEQ ID NO: 3362414 - DNA, 25 bp, Homo sapien
gacaaacttcagtcaatggcagaca

SEQ ID NO: 3362415 - DNA, 25 bp, Homo sapien
cagggagttcaccatcggatagcag

SEQ ID NO: 3362416 - DNA, 25 bp, Homo sapien
caagagtcagtggatgaagtctgcc

SEQ ID NO: 3362417 - DNA, 25 bp, Homo sapien
agacagggttgcggcccagcagagg

SEQ ID NO: 3362418 - DNA, 25 bp, Homo sapien
ctcccagacagggttgcggcccagc

SEQ ID NO: 3362419 - DNA, 25 bp, Homo sapien
acagggttgcggcccagcagaggcg

SEQ ID NO: 3362420 - DNA, 25 bp, Homo sapien
ccagacagggttgcggcccagcaga

SEQ ID NO: 3362421 - DNA, 25 bp, Homo sapien
catcgttgtcatcggtgaaatttcc

SEQ ID NO: 3362422 - DNA, 25 bp, Homo sapien
tcatcgttgtcatcggtgaaatttc

SEQ ID NO: 3362423 - DNA, 25 bp, Homo sapien
gactggaagcctgcggaaatccttt

SEQ ID NO: 3362424 - DNA, 25 bp, Homo sapien
gcctgcggaaatcctttggaatgta

SEQ ID NO: 3362425 - DNA, 25 bp, Homo sapien
tggactggaagcctgcggaaatcct

SEQ ID NO: 3362426 - DNA, 25 bp, Homo sapien
tggaagcctgcggaaatcctttgga

SEQ ID NO: 3362427 - DNA, 25 bp, Homo sapien
tcagcgttgcagcttagggcacagc

SEQ ID NO: 3362428 - DNA, 25 bp, Homo sapien
tctgtctcggtggtctgcgtgctac

SEQ ID NO: 3362429 - DNA, 25 bp, Homo sapien
tggtctgcgtgctactggctcttgt

SEQ ID NO: 3362430 - DNA, 25 bp, Homo sapien
tgttttctgcgtcgaatccttcccc

SEQ ID NO: 3362431 - DNA, 25 bp, Homo sapien
gtagtcacggccaagcctgactttg

SEQ ID NO: 3362432 - DNA, 25 bp, Homo sapien
aactttgccattgaatccagtcgtg

SEQ ID NO: 3362433 - DNA, 25 bp, Homo sapien
ggccttgctctgtggaaacggtagt

SEQ ID NO: 3362434 - DNA, 25 bp, Homo sapien
tccagtcgtgcaggtctgggccttg

SEQ ID NO: 3362435 - DNA, 25 bp, Homo sapien
tgcagttcccaaggccgtgagcagg

SEQ ID NO: 3362436 - DNA, 25 bp, Homo sapien
aaaggaacgtcctggcgcggtgaca

SEQ ID NO: 3362437 - DNA, 25 bp, Homo sapien
tcaaaggcgggaccgtgggtcttca

SEQ ID NO: 3362438 - DNA, 25 bp, Homo sapien
gagcaggaggcgctatcaggatcaa

SEQ ID NO: 3362439 - DNA, 25 bp, Homo sapien
atctggcgacagctgacatcaaggg

SEQ ID NO: 3362440 - DNA, 25 bp, Homo sapien
ttccatagaggaaaaatctggcgac

SEQ ID NO: 3362441 - DNA, 25 bp, Homo sapien
gaggaaaaatctggcgacagctgac

SEQ ID NO: 3362442 - DNA, 25 bp, Homo sapien
ccctaacattccatagaggaaaaat

SEQ ID NO: 3362443 - DNA, 25 bp, Homo sapien
tgccacgaaggatccttccaaaggc

SEQ ID NO: 3362444 - DNA, 25 bp, Homo sapien
tcacggtcgggtttgccacgaagga

SEQ ID NO: 3362445 - DNA, 25 bp, Homo sapien
tcatcacgtaattcagacaagctgg

SEQ ID NO: 3362446 - DNA, 25 bp, Homo sapien
cacgggagcagtcgggaggacagag

SEQ ID NO: 3362447 - DNA, 25 bp, Homo sapien
ttattgatacatggcaattttgtct

SEQ ID NO: 3362448 - DNA, 25 bp, Homo sapien
ttgatacatggcaattttgtcttat

SEQ ID NO: 3362449 - DNA, 25 bp, Homo sapien
tttattgatacatggcaattttgtc

SEQ ID NO: 3362450 - DNA, 25 bp, Homo sapien
tttttattgatacatggcaattttg

SEQ ID NO: 3362451 - DNA, 25 bp, Homo sapien
gagctcgtccgtgtgaagggacagc

SEQ ID NO: 3362452 - DNA, 25 bp, Homo sapien
cagcagtgtcgtggagagctcgtcc

SEQ ID NO: 3362453 - DNA, 25 bp, Homo sapien
tggaatgtcagcctcgactccgctt

SEQ ID NO: 3362454 - DNA, 25 bp, Homo sapien
tgaactcgcttgttctgcttcgggc

SEQ ID NO: 3362455 - DNA, 25 bp, Homo sapien
atgttgttgaccatgtgcaccagga

SEQ ID NO: 3362456 - DNA, 25 bp, Homo sapien
tatcacagctcgagggagtcctgga

SEQ ID NO: 3362457 - DNA, 25 bp, Homo sapien
tcatttcatcgaggagcagtctgga

SEQ ID NO: 3362458 - DNA, 25 bp, Homo sapien
gaggcactctgctcggatgacacag

SEQ ID NO: 3362459 - DNA, 25 bp, Homo sapien
tcaccctcccatgcattggatgatc

SEQ ID NO: 3362460 - DNA, 25 bp, Homo sapien
tctttttagggcagtgtcaccctcc

SEQ ID NO: 3362461 - DNA, 25 bp, Homo sapien
tttagggcagtgtcaccctcccatg

SEQ ID NO: 3362462 - DNA, 25 bp, Homo sapien
cagtgtcaccctcccatgcattgga

SEQ ID NO: 3362463 - DNA, 25 bp, Homo sapien
taatggttgattgggtttcctctag

SEQ ID NO: 3362464 - DNA, 25 bp, Homo sapien
cctcttcataaaccgagggttaatg

SEQ ID NO: 3362465 - DNA, 25 bp, Homo sapien
tcctctagggtaggccaaagtatat

SEQ ID NO: 3362466 - DNA, 25 bp, Homo sapien
cataaaccgagggttaatggttgat

SEQ ID NO: 3362467 - DNA, 25 bp, Homo sapien
cttcctgggctggatcgacgagcag

SEQ ID NO: 3362468 - DNA, 25 bp, Homo sapien
catccgctgcctgggtgagtgcgac

SEQ ID NO: 3362469 - DNA, 25 bp, Homo sapien
ttcaaagccgagaacatgcagcact

SEQ ID NO: 3362470 - DNA, 25 bp, Homo sapien
gagatcttcgccgacttcaaagccg

SEQ ID NO: 3362471 - DNA, 25 bp, Homo sapien
tcatgaatccgggagtccctggagc

SEQ ID NO: 3362472 - DNA, 25 bp, Homo sapien
cctgagagctctgcgtgtgacagca

SEQ ID NO: 3362473 - DNA, 25 bp, Homo sapien
ttagtctagctctctggcatggaag

SEQ ID NO: 3362474 - DNA, 25 bp, Homo sapien
tcttcactgtgaaccccgggatact

SEQ ID NO: 3362475 - DNA, 25 bp, Homo sapien
tactgctctgcatggataaataaac

SEQ ID NO: 3362476 - DNA, 25 bp, Homo sapien
tccttttgaccttgtaactacagta

SEQ ID NO: 3362477 - DNA, 25 bp, Homo sapien
tatgaagaattaacttgtttggtgg

SEQ ID NO: 3362478 - DNA, 25 bp, Homo sapien
tttgaccttgtaactacagtactgc

SEQ ID NO: 3362479 - DNA, 25 bp, Homo sapien
agagcacaggtgttggaggtaaggt

SEQ ID NO: 3362480 - DNA, 25 bp, Homo sapien
agcacaggtgttggaggtaaggtca

SEQ ID NO: 3362481 - DNA, 25 bp, Homo sapien
cacaggtgttggaggtaaggtcaca

SEQ ID NO: 3362482 - DNA, 25 bp, Homo sapien
tcagagagcacaggtgttggaggta

SEQ ID NO: 3362483 - DNA, 25 bp, Homo sapien
cctataactggctcttacccttact

SEQ ID NO: 3362484 - DNA, 25 bp, Homo sapien
tcttacccttactgtcgttaggctc

SEQ ID NO: 3362485 - DNA, 25 bp, Homo sapien
gactctcggctcaattaaaaagatg

SEQ ID NO: 3362486 - DNA, 25 bp, Homo sapien
tcttcctctgactctcggctcaatt

SEQ ID NO: 3362487 - DNA, 25 bp, Homo sapien
tcctgcagtactggttatcccatag

SEQ ID NO: 3362488 - DNA, 25 bp, Homo sapien
ccgcaggactggttatcccgcagga

SEQ ID NO: 3362489 - DNA, 25 bp, Homo sapien
cataggactggttgcctcgtaggac

SEQ ID NO: 3362490 - DNA, 25 bp, Homo sapien
cataggattggtcatcccacaggac

SEQ ID NO: 3362491 - DNA, 25 bp, Homo sapien
ttcccacctcctgaatcccgggcag

SEQ ID NO: 3362492 - DNA, 25 bp, Homo sapien
gcagctgtggaatggaggaaccttc

SEQ ID NO: 3362493 - DNA, 25 bp, Homo sapien
catcgatgctgttggcggcacagct

SEQ ID NO: 3362494 - DNA, 25 bp, Homo sapien
agctgtggaatggaggaaccttccc

SEQ ID NO: 3362495 - DNA, 25 bp, Homo sapien
ccctgggataatgataattcatcca

SEQ ID NO: 3362496 - DNA, 25 bp, Homo sapien
ctgttctctccctgggataatgata

SEQ ID NO: 3362497 - DNA, 25 bp, Homo sapien
tgagggtatccccaggtttcagtcc

SEQ ID NO: 3362498 - DNA, 25 bp, Homo sapien
tctctccctgggataatgataattc

SEQ ID NO: 3362499 - DNA, 25 bp, Homo sapien
cttgggattaggaggggcagttcct

SEQ ID NO: 3362500 - DNA, 25 bp, Homo sapien
cttgctcatcgctgtgcccctgctc

SEQ ID NO: 3362501 - DNA, 25 bp, Homo sapien
tcttcccagtgttgtagggtgtcac

SEQ ID NO: 3362502 - DNA, 25 bp, Homo sapien
ttcccagtgttgtagggtgtcacat

SEQ ID NO: 3362503 - DNA, 25 bp, Homo sapien
gaagaggtgaccaaagtgcctccga

SEQ ID NO: 3362504 - DNA, 25 bp, Homo sapien
tgaagaggtgaccaaagtgcctccg

SEQ ID NO: 3362505 - DNA, 25 bp, Homo sapien
tgaaaacagacaaatgcaacagggc

SEQ ID NO: 3362506 - DNA, 25 bp, Homo sapien
ggcagatacagccatgaaaacagac

SEQ ID NO: 3362507 - DNA, 25 bp, Homo sapien
aatgcaacagggcaagatcacgacg

SEQ ID NO: 3362508 - DNA, 25 bp, Homo sapien
cgcagtagggcagatacagccatga

SEQ ID NO: 3362509 - DNA, 25 bp, Homo sapien
gagctcagctggcagtgaccaaaga

SEQ ID NO: 3362510 - DNA, 25 bp, Homo sapien
aggatgacagcaggcatttcagggg

SEQ ID NO: 3362511 - DNA, 25 bp, Homo sapien
gctggcagtgaccaaagaggatgac

SEQ ID NO: 3362512 - DNA, 25 bp, Homo sapien
gcagtgaccaaagaggatgacagca

SEQ ID NO: 3362513 - DNA, 25 bp, Homo sapien
ccaggtgggagtggactgtcccgtt

SEQ ID NO: 3362514 - DNA, 25 bp, Homo sapien
caggtgggagtggactgtcccgtta

SEQ ID NO: 3362515 - DNA, 25 bp, Homo sapien
gctgtttgccgccatggtgaagttt

SEQ ID NO: 3362516 - DNA, 25 bp, Homo sapien
ggagaaccggggagctttcagcctc

SEQ ID NO: 3362517 - DNA, 25 bp, Homo sapien
atagatacccaggaagagggagaac

SEQ ID NO: 3362518 - DNA, 25 bp, Homo sapien
gaagtttgttgcactgtaatgttca

SEQ ID NO: 3362519 - DNA, 25 bp, Homo sapien
cccaccaatctcactggggatgttt

SEQ ID NO: 3362520 - DNA, 25 bp, Homo sapien
atctcactggggatgtttaggttgc

SEQ ID NO: 3362521 - DNA, 25 bp, Homo sapien
cagggagcccaccaatctcactggg

SEQ ID NO: 3362522 - DNA, 25 bp, Homo sapien
gagcccaccaatctcactggggatg

SEQ ID NO: 3362523 - DNA, 25 bp, Homo sapien
tcatcgtagttcaggatcttccgac

SEQ ID NO: 3362524 - DNA, 25 bp, Homo sapien
taggtgttcacagaaccactgagct

SEQ ID NO: 3362525 - DNA, 25 bp, Homo sapien
tctggcagtttgtggaagagtgtct

SEQ ID NO: 3362526 - DNA, 25 bp, Homo sapien
tggttgactttaattcgaaacagaa

SEQ ID NO: 3362527 - DNA, 25 bp, Homo sapien
cagaatgttcagacctcttagcacc

SEQ ID NO: 3362528 - DNA, 25 bp, Homo sapien
tacagaggtaaacgaggctgtttac

SEQ ID NO: 3362529 - DNA, 25 bp, Homo sapien
gcctttactatcctaacatgcactg

SEQ ID NO: 3362530 - DNA, 25 bp, Homo sapien
catgcactgttattctccagaacgg

SEQ ID NO: 3362531 - DNA, 25 bp, Homo sapien
tttaactcctgaatgcctacctcag

SEQ ID NO: 3362532 - DNA, 25 bp, Homo sapien
ttgagtgaaggttgctcaggtggac

SEQ ID NO: 3362533 - DNA, 25 bp, Homo sapien
cgaatgtcccgacttgagtgaaggt

SEQ ID NO: 3362534 - DNA, 25 bp, Homo sapien
caaagacgaatgtcccgacttgagt

SEQ ID NO: 3362535 - DNA, 25 bp, Homo sapien
agaacctgccccaaagacgaatgtc

SEQ ID NO: 3362536 - DNA, 25 bp, Homo sapien
cgtaagtggatgacggataggcttc

SEQ ID NO: 3362537 - DNA, 25 bp, Homo sapien
tatggtattaataaccagacatgga

SEQ ID NO: 3362538 - DNA, 25 bp, Homo sapien
gacggataggcttcttggtattcct

SEQ ID NO: 3362539 - DNA, 25 bp, Homo sapien
cagataagtggatgacgtaagtgga

SEQ ID NO: 3362540 - DNA, 25 bp, Homo sapien
tgagccaagtcgttcacggctgcgc

SEQ ID NO: 3362541 - DNA, 25 bp, Homo sapien
tgtggcctgagccaagtcgttcacg

SEQ ID NO: 3362542 - DNA, 25 bp, Homo sapien
tgctgagctgtcagtagttctcatt

SEQ ID NO: 3362543 - DNA, 25 bp, Homo sapien
tctcattgtcccgtaggggacccag

SEQ ID NO: 3362544 - DNA, 25 bp, Homo sapien
tgagtgcgaatggagaagcgttttc

SEQ ID NO: 3362545 - DNA, 25 bp, Homo sapien
tttctagactgagaacggttgacag

SEQ ID NO: 3362546 - DNA, 25 bp, Homo sapien
tcttgaaacgtgcacaaagccctgt

SEQ ID NO: 3362547 - DNA, 25 bp, Homo sapien
tgtgagttccattgtgagtgcgaat

SEQ ID NO: 3362548 - DNA, 25 bp, Homo sapien
tgggacgcatggaagctttgagttt

SEQ ID NO: 3362549 - DNA, 25 bp, Homo sapien
aaatagggtctgtaactttgttgca

SEQ ID NO: 3362550 - DNA, 25 bp, Homo sapien
tatgcgtgctctgcacagtggagtg

SEQ ID NO: 3362551 - DNA, 25 bp, Homo sapien
gcagagccgttttgcatgctctgta

SEQ ID NO: 3362552 - DNA, 25 bp, Homo sapien
tcaagttggctgaaaccagattgtc

SEQ ID NO: 3362553 - DNA, 25 bp, Homo sapien
tgtctgccttagagaaacgttaggg

SEQ ID NO: 3362554 - DNA, 25 bp, Homo sapien
ggattttcctgagagcagcggtcat

SEQ ID NO: 3362555 - DNA, 25 bp, Homo sapien
gatcccgggagtgagaatccagaag

SEQ ID NO: 3362556 - DNA, 25 bp, Homo sapien
gagagacagaggacttatgtagctg

SEQ ID NO: 3362557 - DNA, 25 bp, Homo sapien
tagggctgaacactcagatgtccaa

SEQ ID NO: 3362558 - DNA, 25 bp, Homo sapien
tatgtagctgatcagtccgagagcg

SEQ ID NO: 3362559 - DNA, 25 bp, Homo sapien
cattggctttggctggtccaagaag

SEQ ID NO: 3362560 - DNA, 25 bp, Homo sapien
cctccttgctgtatttgagtgatga

SEQ ID NO: 3362561 - DNA, 25 bp, Homo sapien
ccttgctgtatttgagtgatgatga

SEQ ID NO: 3362562 - DNA, 25 bp, Homo sapien
tccttgctgtatttgagtgatgatg

SEQ ID NO: 3362563 - DNA, 25 bp, Homo sapien
gcctccttgctgtatttgagtgatg

SEQ ID NO: 3362564 - DNA, 25 bp, Homo sapien
ggtgtaggcagatgcaagatcagga

SEQ ID NO: 3362565 - DNA, 25 bp, Homo sapien
cctccagagggcgaaggttcagatg

SEQ ID NO: 3362566 - DNA, 25 bp, Homo sapien
aagatcaggagggtgaaggttccga

SEQ ID NO: 3362567 - DNA, 25 bp, Homo sapien
cagggtggacacgagggctctgaga

SEQ ID NO: 3362568 - DNA, 25 bp, Homo sapien
tcttgaaggctatgttcctatccat

SEQ ID NO: 3362569 - DNA, 25 bp, Homo sapien
gccagattcttgaaggctatgttcc

SEQ ID NO: 3362570 - DNA, 25 bp, Homo sapien
gaataatgccagattcttgaaggct

SEQ ID NO: 3362571 - DNA, 25 bp, Homo sapien
ttctacacacgaagaataatgccag

SEQ ID NO: 3362572 - DNA, 25 bp, Homo sapien
cagtgtggactgttagccgacctaa

SEQ ID NO: 3362573 - DNA, 25 bp, Homo sapien
gctcgtatctactgagacgccacag

SEQ ID NO: 3362574 - DNA, 25 bp, Homo sapien
gaagtgatcacgtggaaaccctgca

SEQ ID NO: 3362575 - DNA, 25 bp, Homo sapien
gaaacatgctccacatgaagtgctg

SEQ ID NO: 3362576 - DNA, 25 bp, Homo sapien
accttaggttcttcagatgagcaga

SEQ ID NO: 3362577 - DNA, 25 bp, Homo sapien
gatgagcagatgtagctgttgtaca

SEQ ID NO: 3362578 - DNA, 25 bp, Homo sapien
ttgaagtcttgtgggtataacctta

SEQ ID NO: 3362579 - DNA, 25 bp, Homo sapien
ttcagatgagcagatgtagctgttg

SEQ ID NO: 3362580 - DNA, 25 bp, Homo sapien
agagcctgctcggatcctgtgcaca

SEQ ID NO: 3362581 - DNA, 25 bp, Homo sapien
ggacgacgcgggctcttcctggatt

SEQ ID NO: 3362582 - DNA, 25 bp, Homo sapien
ggacacgactcggacactgtcatcc

SEQ ID NO: 3362583 - DNA, 25 bp, Homo sapien
tcggccagtaagtaggagcatgcat

SEQ ID NO: 3362584 - DNA, 25 bp, Homo sapien
tgtaaaatcggagccttcgccgtgg

SEQ ID NO: 3362585 - DNA, 25 bp, Homo sapien
accatgaagaagacccggagcacaa

SEQ ID NO: 3362586 - DNA, 25 bp, Homo sapien
tagctcggatttctcggaccgggcc

SEQ ID NO: 3362587 - DNA, 25 bp, Homo sapien
taagccgggcggattgcaaatgaag

SEQ ID NO: 3362588 - DNA, 25 bp, Homo sapien
cctcctgtttgtgggaatagtgctc

SEQ ID NO: 3362589 - DNA, 25 bp, Homo sapien
taaaggtatgcgttttaggactcgc

SEQ ID NO: 3362590 - DNA, 25 bp, Homo sapien
tgtgtccctggcgagtaatatgacc

SEQ ID NO: 3362591 - DNA, 25 bp, Homo sapien
gttttaataaagagcgtcctgtcac

SEQ ID NO: 3362592 - DNA, 25 bp, Homo sapien
agcaaaatcacttgtgttgcttccc

SEQ ID NO: 3362593 - DNA, 25 bp, Homo sapien
tgctctgggctctgggagctcttta

SEQ ID NO: 3362594 - DNA, 25 bp, Homo sapien
gctctgggctctgggagctctttac

SEQ ID NO: 3362595 - DNA, 25 bp, Homo sapien
cctgtgctctgggctctgggagctc

SEQ ID NO: 3362596 - DNA, 25 bp, Homo sapien
tgtgctctgggctctgggagctctt

SEQ ID NO: 3362597 - DNA, 25 bp, Homo sapien
tgtacctgttgtagtttatgtgact

SEQ ID NO: 3362598 - DNA, 25 bp, Homo sapien
gactttgcccagaatgcgttctcca

SEQ ID NO: 3362599 - DNA, 25 bp, Homo sapien
tgactttgcccagaatgcgttctcc

SEQ ID NO: 3362600 - DNA, 25 bp, Homo sapien
tgcatcagcgcctgtcaccttgtgt

SEQ ID NO: 3362601 - DNA, 25 bp, Homo sapien
tacaaaaacctgtagtcctccagct

SEQ ID NO: 3362602 - DNA, 25 bp, Homo sapien
tgtatacaaaaacctgtagtcctcc

SEQ ID NO: 3362603 - DNA, 25 bp, Homo sapien
aatctgtatacaaaaacctgtagtc

SEQ ID NO: 3362604 - DNA, 25 bp, Homo sapien
tcataatctgtatacaaaaacctgt

SEQ ID NO: 3362605 - DNA, 25 bp, Homo sapien
ttcctctctccttgcgaagggctgt

SEQ ID NO: 3362606 - DNA, 25 bp, Homo sapien
tcctctctccttgcgaagggctgta

SEQ ID NO: 3362607 - DNA, 25 bp, Homo sapien
tctctccttgcgaagggctgtagcc

SEQ ID NO: 3362608 - DNA, 25 bp, Homo sapien
tctccttgcgaagggctgtagccat

SEQ ID NO: 3362609 - DNA, 25 bp, Homo sapien
cagagtcctacagctggtgtgtgag

SEQ ID NO: 3362610 - DNA, 25 bp, Homo sapien
tagacattaggaggttcaaaacttg

SEQ ID NO: 3362611 - DNA, 25 bp, Homo sapien
gactgtgggcctctaattctcattg

SEQ ID NO: 3362612 - DNA, 25 bp, Homo sapien
cgacatgagtgagtgaaatttgctt

SEQ ID NO: 3362613 - DNA, 25 bp, Homo sapien
tcctcctctgatcgggactagtagc

SEQ ID NO: 3362614 - DNA, 25 bp, Homo sapien
tctttgaagggccaagtattgtgct

SEQ ID NO: 3362615 - DNA, 25 bp, Homo sapien
ccagtgctcatcagaagtgccagat

SEQ ID NO: 3362616 - DNA, 25 bp, Homo sapien
gagacttagctttgagagcgccctg

SEQ ID NO: 3362617 - DNA, 25 bp, Homo sapien
tagttgagttgggctatctggttca

SEQ ID NO: 3362618 - DNA, 25 bp, Homo sapien
catagttgagttgggctatctggtt

SEQ ID NO: 3362619 - DNA, 25 bp, Homo sapien
agttgagttgggctatctggttcat

SEQ ID NO: 3362620 - DNA, 25 bp, Homo sapien
atagttgagttgggctatctggttc

SEQ ID NO: 3362621 - DNA, 25 bp, Homo sapien
tggcccaagccaagttatcaaaagg

SEQ ID NO: 3362622 - DNA, 25 bp, Homo sapien
tactggtccagctgttgtctacctg

SEQ ID NO: 3362623 - DNA, 25 bp, Homo sapien
gctacaaacgcagggctgaaaagac

SEQ ID NO: 3362624 - DNA, 25 bp, Homo sapien
gaatctggccagaatttactaagta

SEQ ID NO: 3362625 - DNA, 25 bp, Homo sapien
agtaaaatgtggaaggaagaaaatg

SEQ ID NO: 3362626 - DNA, 25 bp, Homo sapien
gtaaaatgtggaaggaagaaaatgc

SEQ ID NO: 3362627 - DNA, 25 bp, Homo sapien
caaggatgggataaaagtaaaatgt

SEQ ID NO: 3362628 - DNA, 25 bp, Homo sapien
cagcaaggatgggataaaagtaaaa

SEQ ID NO: 3362629 - DNA, 25 bp, Homo sapien
ggaaggtccctgcaaacctccctga

SEQ ID NO: 3362630 - DNA, 25 bp, Homo sapien
tctgtccccggatacggaggtgtcg

SEQ ID NO: 3362631 - DNA, 25 bp, Homo sapien
cattaggagtctgtccccggatacg

SEQ ID NO: 3362632 - DNA, 25 bp, Homo sapien
tggaaggtccctgcaaacctccctg

SEQ ID NO: 3362633 - DNA, 25 bp, Homo sapien
agatgagcttgtggtggttttgcct

SEQ ID NO: 3362634 - DNA, 25 bp, Homo sapien
gcctgaccgtgtatattcttttcca

SEQ ID NO: 3362635 - DNA, 25 bp, Homo sapien
ctctcggtagggcagcaagatgagc

SEQ ID NO: 3362636 - DNA, 25 bp, Homo sapien
ctcggtagggcagcaagatgagctt

SEQ ID NO: 3362637 - DNA, 25 bp, Homo sapien
acgagacccaggcttgcaaagactt

SEQ ID NO: 3362638 - DNA, 25 bp, Homo sapien
tgtgtgtcgggaatgacgagaccca

SEQ ID NO: 3362639 - DNA, 25 bp, Homo sapien
tgggtgagctccaccgctgcccggg

SEQ ID NO: 3362640 - DNA, 25 bp, Homo sapien
cgggctgcgagcctgacggctgtgt

SEQ ID NO: 3362641 - DNA, 25 bp, Homo sapien
atgtcagcaccacccgtgaagaggg

SEQ ID NO: 3362642 - DNA, 25 bp, Homo sapien
taggaaataatcagactgccccaga

SEQ ID NO: 3362643 - DNA, 25 bp, Homo sapien
tctgagaagtcttgctgttccgctc

SEQ ID NO: 3362644 - DNA, 25 bp, Homo sapien
gctgtatatctatctcgctcgctgc

SEQ ID NO: 3362645 - DNA, 25 bp, Homo sapien
tgttgccgtaaaggacaaatgagca

SEQ ID NO: 3362646 - DNA, 25 bp, Homo sapien
actgttgccgtaaaggacaaatgag

SEQ ID NO: 3362647 - DNA, 25 bp, Homo sapien
taaagaactgttgccgtaaaggaca

SEQ ID NO: 3362648 - DNA, 25 bp, Homo sapien
agaactgttgccgtaaaggacaaat

SEQ ID NO: 3362649 - DNA, 25 bp, Homo sapien
taaaatgctcctcactgccaagcag

SEQ ID NO: 3362650 - DNA, 25 bp, Homo sapien
gacattgaacaacccagcagctttt

SEQ ID NO: 3362651 - DNA, 25 bp, Homo sapien
ttctgtcctatgagtgcgtagccac

SEQ ID NO: 3362652 - DNA, 25 bp, Homo sapien
tagcttcatgagaaatcacacggct

SEQ ID NO: 3362653 - DNA, 25 bp, Homo sapien
caccgccacggtttccacattggaa

SEQ ID NO: 3362654 - DNA, 25 bp, Homo sapien
gcagttccgggaaactaatcatgaa

SEQ ID NO: 3362655 - DNA, 25 bp, Homo sapien
cacacttgctgggttaggaatagag

SEQ ID NO: 3362656 - DNA, 25 bp, Homo sapien
tccttagagcagttgacacagatac

SEQ ID NO: 3362657 - DNA, 25 bp, Homo sapien
aatcttatccctactgtgagagttc

SEQ ID NO: 3362658 - DNA, 25 bp, Homo sapien
tcttatccctactgtgagagttctt

SEQ ID NO: 3362659 - DNA, 25 bp, Homo sapien
tatccctactgtgagagttcttgga

SEQ ID NO: 3362660 - DNA, 25 bp, Homo sapien
tccctactgtgagagttcttggatt

SEQ ID NO: 3362661 - DNA, 25 bp, Homo sapien
tttgcactaagagcctttggttctc

SEQ ID NO: 3362662 - DNA, 25 bp, Homo sapien
ctttgcactaagagcctttggttct

SEQ ID NO: 3362663 - DNA, 25 bp, Homo sapien
ttctgtagatgtctgccaccagctg

SEQ ID NO: 3362664 - DNA, 25 bp, Homo sapien
ctctgacacttctgtagatgtctgc

SEQ ID NO: 3362665 - DNA, 25 bp, Homo sapien
accatctttcccgtatacacacaga

SEQ ID NO: 3362666 - DNA, 25 bp, Homo sapien
gctgtcttttgacacaaaaccatct

SEQ ID NO: 3362667 - DNA, 25 bp, Homo sapien
tatacatgatattgaccattccctg

SEQ ID NO: 3362668 - DNA, 25 bp, Homo sapien
tgtcagctgtcttttgacacaaaac

SEQ ID NO: 3362669 - DNA, 25 bp, Homo sapien
tcattgtcaggtcgaggctgtgact

SEQ ID NO: 3362670 - DNA, 25 bp, Homo sapien
taaattctaaatgattgaaccatgg

SEQ ID NO: 3362671 - DNA, 25 bp, Homo sapien
gaaccatggtagtaaattcattgtc

SEQ ID NO: 3362672 - DNA, 25 bp, Homo sapien
caagactgttgagactaaattctaa

SEQ ID NO: 3362673 - DNA, 25 bp, Homo sapien
ttgttcttgccctagctgactgatg

SEQ ID NO: 3362674 - DNA, 25 bp, Homo sapien
tgactgagtctagcaaatgaaactt

SEQ ID NO: 3362675 - DNA, 25 bp, Homo sapien
ccaccagaggttaattgactgtcag

SEQ ID NO: 3362676 - DNA, 25 bp, Homo sapien
taggtgactcttccaactattagca

SEQ ID NO: 3362677 - DNA, 25 bp, Homo sapien
gtgggcttggctcctcaaaactgta

SEQ ID NO: 3362678 - DNA, 25 bp, Homo sapien
tattgggtgtaatcccactgaagga

SEQ ID NO: 3362679 - DNA, 25 bp, Homo sapien
tgttagacgcacctggggagtcgct

SEQ ID NO: 3362680 - DNA, 25 bp, Homo sapien
cgctcccacccatattgggtgtaat

SEQ ID NO: 3362681 - DNA, 25 bp, Homo sapien
ctcctaggaagggaggagccctgtc

SEQ ID NO: 3362682 - DNA, 25 bp, Homo sapien
cctgtctatggagcaggcgggtcca

SEQ ID NO: 3362683 - DNA, 25 bp, Homo sapien
tgtgtgtcccgtatcccaagtcagg

SEQ ID NO: 3362684 - DNA, 25 bp, Homo sapien
cctttatggagctgtcgttggttca

SEQ ID NO: 3362685 - DNA, 25 bp, Homo sapien
tgctatagatggaaagccataccgt

SEQ ID NO: 3362686 - DNA, 25 bp, Homo sapien
cataccgtggaagacaacgggccaa

SEQ ID NO: 3362687 - DNA, 25 bp, Homo sapien
tgcgatgcccgaaagaatgctatag

SEQ ID NO: 3362688 - DNA, 25 bp, Homo sapien
gggccaattctcacaagcagcaggg

SEQ ID NO: 3362689 - DNA, 25 bp, Homo sapien
agccccgtgcctgtcactgagacat

SEQ ID NO: 3362690 - DNA, 25 bp, Homo sapien
ctgagacatttgagggtccgtttct

SEQ ID NO: 3362691 - DNA, 25 bp, Homo sapien
tcttgccgatgaggcagttttttaa

SEQ ID NO: 3362692 - DNA, 25 bp, Homo sapien
ggctctccatctggggacgactcat

SEQ ID NO: 3362693 - DNA, 25 bp, Homo sapien
taattcgtctccctgactctagtgc

SEQ ID NO: 3362694 - DNA, 25 bp, Homo sapien
cctttggcagggtctcttggtttca

SEQ ID NO: 3362695 - DNA, 25 bp, Homo sapien
gcctatagggtagtgtgctaacatt

SEQ ID NO: 3362696 - DNA, 25 bp, Homo sapien
aatccgttcttcatactgggactag

SEQ ID NO: 3362697 - DNA, 25 bp, Homo sapien
tcaggttctgccgtgatttggcttc

SEQ ID NO: 3362698 - DNA, 25 bp, Homo sapien
aagcgggagctctgagttaggccat

SEQ ID NO: 3362699 - DNA, 25 bp, Homo sapien
tcttgccctgaacatgggaatcatg

SEQ ID NO: 3362700 - DNA, 25 bp, Homo sapien
cttcatgagggatggcctactcgct

SEQ ID NO: 3362701 - DNA, 25 bp, Homo sapien
cggcactgtgccattaatgtaattc

SEQ ID NO: 3362702 - DNA, 25 bp, Homo sapien
tgctcttcagtggaaactccttgaa

SEQ ID NO: 3362703 - DNA, 25 bp, Homo sapien
gaagccggcactgtgccattaatgt

SEQ ID NO: 3362704 - DNA, 25 bp, Homo sapien
gaaactccttgaagccggcactgtg

SEQ ID NO: 3362705 - DNA, 25 bp, Homo sapien
gaaaccctggcagttggtcaccttg

SEQ ID NO: 3362706 - DNA, 25 bp, Homo sapien
agtttctgcgaacgtctctggtcca

SEQ ID NO: 3362707 - DNA, 25 bp, Homo sapien
aaatctcacctcttgggaaccccag

SEQ ID NO: 3362708 - DNA, 25 bp, Homo sapien
taggcatcagctcccctggaaaaag

SEQ ID NO: 3362709 - DNA, 25 bp, Homo sapien
tgtcccagcatcctgagattcaggt

SEQ ID NO: 3362710 - DNA, 25 bp, Homo sapien
ttcaggtggagagcttgtcgatgcc

SEQ ID NO: 3362711 - DNA, 25 bp, Homo sapien
tcttgcctatgagtgatgatgctac

SEQ ID NO: 3362712 - DNA, 25 bp, Homo sapien
gacttagcggtgtggatgtcccagc

SEQ ID NO: 3362713 - DNA, 25 bp, Homo sapien
gaaggagcacgctccaagatcaagg

SEQ ID NO: 3362714 - DNA, 25 bp, Homo sapien
ctgctatgacggcagtgtagaaggg

SEQ ID NO: 3362715 - DNA, 25 bp, Homo sapien
tcctccagaaggagcacgctccaag

SEQ ID NO: 3362716 - DNA, 25 bp, Homo sapien
gggctcttggcacaccaatatcctc

SEQ ID NO: 3362717 - DNA, 25 bp, Homo sapien
ctttgttcagcttccagcgacagac

SEQ ID NO: 3362718 - DNA, 25 bp, Homo sapien
gctgctcagtcgctgtcccatattt

SEQ ID NO: 3362719 - DNA, 25 bp, Homo sapien
tgttcagcttccagcgacagacagc

SEQ ID NO: 3362720 - DNA, 25 bp, Homo sapien
gctgtcccatattttataatcacct

SEQ ID NO: 3362721 - DNA, 25 bp, Homo sapien
ttttggcagccatgcccgtgtgtgc

SEQ ID NO: 3362722 - DNA, 25 bp, Homo sapien
gggaagaacttctgataaaagcatt

SEQ ID NO: 3362723 - DNA, 25 bp, Homo sapien
tcctgaagatgctgcatgtgtcagc

SEQ ID NO: 3362724 - DNA, 25 bp, Homo sapien
cactaaactcttgtggtcactgaaa

SEQ ID NO: 3362725 - DNA, 25 bp, Homo sapien
ctgttcctgtcccagtgggtacaat

SEQ ID NO: 3362726 - DNA, 25 bp, Homo sapien
agtttataggaatgagagagataaa

SEQ ID NO: 3362727 - DNA, 25 bp, Homo sapien
gtttataggaatgagagagataaag

SEQ ID NO: 3362728 - DNA, 25 bp, Homo sapien
ggtacgtccaatggccaagagtgag

SEQ ID NO: 3362729 - DNA, 25 bp, Homo sapien
taccagcccctctgcgtgaaagcag

SEQ ID NO: 3362730 - DNA, 25 bp, Homo sapien
caaagagccgactgcagcggtacgt

SEQ ID NO: 3362731 - DNA, 25 bp, Homo sapien
gaacacgggtcactgagcttcctgt

SEQ ID NO: 3362732 - DNA, 25 bp, Homo sapien
gagtgccccgaatctgagcacagca

SEQ ID NO: 3362733 - DNA, 25 bp, Homo sapien
ttggagtgccccgaatctgagcaca

SEQ ID NO: 3362734 - DNA, 25 bp, Homo sapien
tcagcttggagtgccccgaatctga

SEQ ID NO: 3362735 - DNA, 25 bp, Homo sapien
agctcagcttggagtgccccgaatc

SEQ ID NO: 3362736 - DNA, 25 bp, Homo sapien
acttctcctggtccagtgagcaccc

SEQ ID NO: 3362737 - DNA, 25 bp, Homo sapien
gcaccctgggtggtacaggaaagaa

SEQ ID NO: 3362738 - DNA, 25 bp, Homo sapien
gtggcccctggaaccaccaatgtga

SEQ ID NO: 3362739 - DNA, 25 bp, Homo sapien
tggaaccaccaatgtgatggaactt

SEQ ID NO: 3362740 - DNA, 25 bp, Homo sapien
agcaggcattccgcactcagggaac

SEQ ID NO: 3362741 - DNA, 25 bp, Homo sapien
caggcattccgcactcagggaacca

SEQ ID NO: 3362742 - DNA, 25 bp, Homo sapien
cattccgcactcagggaaccacccc

SEQ ID NO: 3362743 - DNA, 25 bp, Homo sapien
aggcattccgcactcagggaaccac

SEQ ID NO: 3362744 - DNA, 25 bp, Homo sapien
ttaaacatttgaggcactgtactag

SEQ ID NO: 3362745 - DNA, 25 bp, Homo sapien
atagcacgcacctgagaccaagttt

SEQ ID NO: 3362746 - DNA, 25 bp, Homo sapien
tgcctgagtgtgtcttgtagcaccg

SEQ ID NO: 3362747 - DNA, 25 bp, Homo sapien
gctgtgagtcttgaataatgcctga

SEQ ID NO: 3362748 - DNA, 25 bp, Homo sapien
ttagggattcttcctccacagtgga

SEQ ID NO: 3362749 - DNA, 25 bp, Homo sapien
caattgatccgatggtttactggcg

SEQ ID NO: 3362750 - DNA, 25 bp, Homo sapien
tcctgaggagacctgatatattgcc

SEQ ID NO: 3362751 - DNA, 25 bp, Homo sapien
tatgtgccgggcttcatgccacgat

SEQ ID NO: 3362752 - DNA, 25 bp, Homo sapien
ataaccactccaagtttggttgctg

SEQ ID NO: 3362753 - DNA, 25 bp, Homo sapien
gcaggtccctgctcagagagttcat

SEQ ID NO: 3362754 - DNA, 25 bp, Homo sapien
ccagagccacgtctgtctgcaataa

SEQ ID NO: 3362755 - DNA, 25 bp, Homo sapien
cagtacaggattgtggccacagaca

SEQ ID NO: 3362756 - DNA, 25 bp, Homo sapien
taatgaagctattattcacacataa

SEQ ID NO: 3362757 - DNA, 25 bp, Homo sapien
tacaatgtgcatggtcttgattgtg

SEQ ID NO: 3362758 - DNA, 25 bp, Homo sapien
gaacttttatgtatagaattatcca

SEQ ID NO: 3362759 - DNA, 25 bp, Homo sapien
aagctaggattttcctaccttctgg

SEQ ID NO: 3362760 - DNA, 25 bp, Homo sapien
ggcggggcagtgctggcgcggccct

SEQ ID NO: 3362761 - DNA, 25 bp, Homo sapien
cggggcagtgctggcgcggcccttc

SEQ ID NO: 3362762 - DNA, 25 bp, Homo sapien
gggcagtgctggcgcggcccttcag

SEQ ID NO: 3362763 - DNA, 25 bp, Homo sapien
gcggggcagtgctggcgcggccctt

SEQ ID NO: 3362764 - DNA, 25 bp, Homo sapien
cctggaccaggatccgttgttgggc

SEQ ID NO: 3362765 - DNA, 25 bp, Homo sapien
gagcagctctgaagttggatttgaa

SEQ ID NO: 3362766 - DNA, 25 bp, Homo sapien
cattgcacatgacattgtagacgtc

SEQ ID NO: 3362767 - DNA, 25 bp, Homo sapien
tccaccgacctgataggagcagctc

SEQ ID NO: 3362768 - DNA, 25 bp, Homo sapien
ggcaaacaaacaagttgtcatggca

SEQ ID NO: 3362769 - DNA, 25 bp, Homo sapien
aagttgtcatggcagctccagggca

SEQ ID NO: 3362770 - DNA, 25 bp, Homo sapien
caaacaagttgtcatggcagctcca

SEQ ID NO: 3362771 - DNA, 25 bp, Homo sapien
gaaaggcaaacaaacaagttgtcat

SEQ ID NO: 3362772 - DNA, 25 bp, Homo sapien
cggtgctcgctagctcagcagccat

SEQ ID NO: 3362773 - DNA, 25 bp, Homo sapien
gaaactgcagttttctcggtgctcg

SEQ ID NO: 3362774 - DNA, 25 bp, Homo sapien
ttgctgccccatcgaggtcacaggt

SEQ ID NO: 3362775 - DNA, 25 bp, Homo sapien
aggtcacaggtcttgatggaatgtg

SEQ ID NO: 3362776 - DNA, 25 bp, Homo sapien
ttatatttagtgcaggaggacggac

SEQ ID NO: 3362777 - DNA, 25 bp, Homo sapien
cagtgagactcacagcggtcagcaa

SEQ ID NO: 3362778 - DNA, 25 bp, Homo sapien
ggtcatttccgcgagtgcccttgag

SEQ ID NO: 3362779 - DNA, 25 bp, Homo sapien
gaagcgatcgcatcaacagtgagac

SEQ ID NO: 3362780 - DNA, 25 bp, Homo sapien
cttggctcataaagagggtctgtaa

SEQ ID NO: 3362781 - DNA, 25 bp, Homo sapien
gagaccggctgggtttgctctgctt

SEQ ID NO: 3362782 - DNA, 25 bp, Homo sapien
ttggctacatttgccaaacccaaga

SEQ ID NO: 3362783 - DNA, 25 bp, Homo sapien
gagggtctgtaaggaaatccctgca

SEQ ID NO: 3362784 - DNA, 25 bp, Homo sapien
gggtctgagagcatctggtcatttc

SEQ ID NO: 3362785 - DNA, 25 bp, Homo sapien
gtctgagagcatctggtcatttcct

SEQ ID NO: 3362786 - DNA, 25 bp, Homo sapien
ggtctgagagcatctggtcatttcc

SEQ ID NO: 3362787 - DNA, 25 bp, Homo sapien
gctgttcatccaaaacggaagcatc

SEQ ID NO: 3362788 - DNA, 25 bp, Homo sapien
ccccgcatgtccatgagctcgttgt

SEQ ID NO: 3362789 - DNA, 25 bp, Homo sapien
ctgccggtgctgttcatccaaaacg

SEQ ID NO: 3362790 - DNA, 25 bp, Homo sapien
gctcgttgtcgtagccgtgccatcc

SEQ ID NO: 3362791 - DNA, 25 bp, Homo sapien
ggcagacacatgacactacgtcctg

SEQ ID NO: 3362792 - DNA, 25 bp, Homo sapien
atgacactacgtcctgaccgtggcg

SEQ ID NO: 3362793 - DNA, 25 bp, Homo sapien
gacacatgacactacgtcctgaccg

SEQ ID NO: 3362794 - DNA, 25 bp, Homo sapien
tacgtcctgaccgtggcgctgagcg

SEQ ID NO: 3362795 - DNA, 25 bp, Homo sapien
tgtttcctgagtttcccgcatccct

SEQ ID NO: 3362796 - DNA, 25 bp, Homo sapien
tccagctgtggttcgtgtttttcca

SEQ ID NO: 3362797 - DNA, 25 bp, Homo sapien
ttctccagctgtggttcgtgttttt

SEQ ID NO: 3362798 - DNA, 25 bp, Homo sapien
ataaatcgccccctcgcattgcagc

SEQ ID NO: 3362799 - DNA, 25 bp, Homo sapien
tgctgaccccatccagccactgcgg

SEQ ID NO: 3362800 - DNA, 25 bp, Homo sapien
tccatctgtggatccgcaagctcct

SEQ ID NO: 3362801 - DNA, 25 bp, Homo sapien
tctgtggatccgcaagctcctggtt

SEQ ID NO: 3362802 - DNA, 25 bp, Homo sapien
tgtggatccgcaagctcctggttgg

SEQ ID NO: 3362803 - DNA, 25 bp, Homo sapien
ggggaggcgccccagccctccagat

SEQ ID NO: 3362804 - DNA, 25 bp, Homo sapien
ctagtgacatccggggaggcgcccc

SEQ ID NO: 3362805 - DNA, 25 bp, Homo sapien
catccggggaggcgccccagccctc

SEQ ID NO: 3362806 - DNA, 25 bp, Homo sapien
tccggggaggcgccccagccctcca

SEQ ID NO: 3362807 - DNA, 25 bp, Homo sapien
ggggtcgctccaagggtcctgcagt

SEQ ID NO: 3362808 - DNA, 25 bp, Homo sapien
ggaactccaagagcggaggagccct

SEQ ID NO: 3362809 - DNA, 25 bp, Homo sapien
tggaactccaagagcggaggagccc

SEQ ID NO: 3362810 - DNA, 25 bp, Homo sapien
tcctggaactccaagagcggaggag

SEQ ID NO: 3362811 - DNA, 25 bp, Homo sapien
gccagggcccatccgtttgcattca

SEQ ID NO: 3362812 - DNA, 25 bp, Homo sapien
gtttgttcgacacttgccagggccc

SEQ ID NO: 3362813 - DNA, 25 bp, Homo sapien
gcacactcagaaatgcgaggctgcg

SEQ ID NO: 3362814 - DNA, 25 bp, Homo sapien
tgtaggattcctttgagtgctgagc

SEQ ID NO: 3362815 - DNA, 25 bp, Homo sapien
ccatgtttattatttgccgcttcac

SEQ ID NO: 3362816 - DNA, 25 bp, Homo sapien
tatttgccgcttcacatgggcaagg

SEQ ID NO: 3362817 - DNA, 25 bp, Homo sapien
acaggacgaggcgaggagcactgag

SEQ ID NO: 3362818 - DNA, 25 bp, Homo sapien
ggagcactgagtggtccatgtttat

SEQ ID NO: 3362819 - DNA, 25 bp, Homo sapien
gggtccagaccatgttctacgatct

SEQ ID NO: 3362820 - DNA, 25 bp, Homo sapien
tccccagatattttgagtccaggcc

SEQ ID NO: 3362821 - DNA, 25 bp, Homo sapien
tgtcactaaagctccgaagccacgt

SEQ ID NO: 3362822 - DNA, 25 bp, Homo sapien
ggcctggacaataccacactagctg

SEQ ID NO: 3362823 - DNA, 25 bp, Homo sapien
cctggcccaccgtgacattgtgaca

SEQ ID NO: 3362824 - DNA, 25 bp, Homo sapien
tctcccacagtttagcatcgccgag

SEQ ID NO: 3362825 - DNA, 25 bp, Homo sapien
tgacattgtgacaacccaacctgcc

SEQ ID NO: 3362826 - DNA, 25 bp, Homo sapien
acagtttagcatcgccgagcctgcc

SEQ ID NO: 3362827 - DNA, 25 bp, Homo sapien
atagctgcctgagaaggacctcgct

SEQ ID NO: 3362828 - DNA, 25 bp, Homo sapien
acccctaaccgaatctgctctcttc

SEQ ID NO: 3362829 - DNA, 25 bp, Homo sapien
tctgtctgagagcacccagaagcca

SEQ ID NO: 3362830 - DNA, 25 bp, Homo sapien
cttctctctgtctgagagcacccag

SEQ ID NO: 3362831 - DNA, 25 bp, Homo sapien
tctctgtctgagagcacccagaagc

SEQ ID NO: 3362832 - DNA, 25 bp, Homo sapien
tttgcatagagaataaattggcaca

SEQ ID NO: 3362833 - DNA, 25 bp, Homo sapien
atttgcatagagaataaattggcac

SEQ ID NO: 3362834 - DNA, 25 bp, Homo sapien
gaatttgcatagagaataaattggc

SEQ ID NO: 3362835 - DNA, 25 bp, Homo sapien
tgcatagagaataaattggcacata

SEQ ID NO: 3362836 - DNA, 25 bp, Homo sapien
tctcgtagacagtcatgtgttccac

SEQ ID NO: 3362837 - DNA, 25 bp, Homo sapien
tgtaatagaacctgcttgggatggc

SEQ ID NO: 3362838 - DNA, 25 bp, Homo sapien
ggcttctttctcgtagacagtcatg

SEQ ID NO: 3362839 - DNA, 25 bp, Homo sapien
aaccagccttcatcagccactaaag

SEQ ID NO: 3362840 - DNA, 25 bp, Homo sapien
tccgccccccacgggtctgtcttgc

SEQ ID NO: 3362841 - DNA, 25 bp, Homo sapien
ggcccacatggccctcctccgcccc

SEQ ID NO: 3362842 - DNA, 25 bp, Homo sapien
ctccgccccccacgggtctgtcttg

SEQ ID NO: 3362843 - DNA, 25 bp, Homo sapien
gagggcccacatggccctcctccgc

SEQ ID NO: 3362844 - DNA, 25 bp, Homo sapien
tccgtgatccgagaaaataatgacg

SEQ ID NO: 3362845 - DNA, 25 bp, Homo sapien
aataatgacgttcaggcggtcctgc

SEQ ID NO: 3362846 - DNA, 25 bp, Homo sapien
gatgtacttattcagctcaatcact

SEQ ID NO: 3362847 - DNA, 25 bp, Homo sapien
catccagaaaatgtcggtcattccg

SEQ ID NO: 3362848 - DNA, 25 bp, Homo sapien
gaaagcacacctaggtcagtctctc

SEQ ID NO: 3362849 - DNA, 25 bp, Homo sapien
tgtctacatgtcaagctgctaccaa

SEQ ID NO: 3362850 - DNA, 25 bp, Homo sapien
gctgagccaggcgagaaagcacacc

SEQ ID NO: 3362851 - DNA, 25 bp, Homo sapien
gctaccaaacttattaggagtccac

SEQ ID NO: 3362852 - DNA, 25 bp, Homo sapien
caaagcctgtgctggcccaattggc

SEQ ID NO: 3362853 - DNA, 25 bp, Homo sapien
gaagccaagggactcgtcaaagcct

SEQ ID NO: 3362854 - DNA, 25 bp, Homo sapien
tttagcagtaagagggaagatgttg

SEQ ID NO: 3362855 - DNA, 25 bp, Homo sapien
ggatcacttggtatcgcaggaggca

SEQ ID NO: 3362856 - DNA, 25 bp, Homo sapien
aaggccaggccacgtgtctttgctt

SEQ ID NO: 3362857 - DNA, 25 bp, Homo sapien
tggaggagacaaacagagggtgaca

SEQ ID NO: 3362858 - DNA, 25 bp, Homo sapien
gccaggccacgtgtctttgcttcag

SEQ ID NO: 3362859 - DNA, 25 bp, Homo sapien
aggccacgtgtctttgcttcaggtc

SEQ ID NO: 3362860 - DNA, 25 bp, Homo sapien
tagtggtggccttccacgtcaatgc

SEQ ID NO: 3362861 - DNA, 25 bp, Homo sapien
tgagggcatctttcctctgcggaga

SEQ ID NO: 3362862 - DNA, 25 bp, Homo sapien
ggacagtgtctacagccttgagggc

SEQ ID NO: 3362863 - DNA, 25 bp, Homo sapien
tggtatatggctgccaggtcggccc

SEQ ID NO: 3362864 - DNA, 25 bp, Homo sapien
gagcatcgctgactgcattggcaaa

SEQ ID NO: 3362865 - DNA, 25 bp, Homo sapien
gcaaaattgatatccgttgggacat

SEQ ID NO: 3362866 - DNA, 25 bp, Homo sapien
ttgaaggagtcaagagcatcgctga

SEQ ID NO: 3362867 - DNA, 25 bp, Homo sapien
taggcagtaggtgggtctgacaccc

SEQ ID NO: 3362868 - DNA, 25 bp, Homo sapien
aaaagatggcaaatagttactctct

SEQ ID NO: 3362869 - DNA, 25 bp, Homo sapien
gatggcaaatagttactctcttcaa

SEQ ID NO: 3362870 - DNA, 25 bp, Homo sapien
caataagtaatgtcgagttatgagc

SEQ ID NO: 3362871 - DNA, 25 bp, Homo sapien
tcaataagtaatgtcgagttatgag

SEQ ID NO: 3362872 - DNA, 25 bp, Homo sapien
tcctcaggtcccgatgttgggctca

SEQ ID NO: 3362873 - DNA, 25 bp, Homo sapien
atttagccacggcagtgggatgcag

SEQ ID NO: 3362874 - DNA, 25 bp, Homo sapien
caggtcccgatgttgggctcagttt

SEQ ID NO: 3362875 - DNA, 25 bp, Homo sapien
aagccttcctcaggtcccgatgttg

SEQ ID NO: 3362876 - DNA, 25 bp, Homo sapien
tgaccaggtgtctgcttctagcatc

SEQ ID NO: 3362877 - DNA, 25 bp, Homo sapien
aaattgtaagtaatgcagtatgacc

SEQ ID NO: 3362878 - DNA, 25 bp, Homo sapien
taacagtcatgtacagtgtgaccag

SEQ ID NO: 3362879 - DNA, 25 bp, Homo sapien
gcatctctgacacatctgtatgtaa

SEQ ID NO: 3362880 - DNA, 25 bp, Homo sapien
gccaattaactctcctagaagcacg

SEQ ID NO: 3362881 - DNA, 25 bp, Homo sapien
ttgtaacaataacccctgtgcgctg

SEQ ID NO: 3362882 - DNA, 25 bp, Homo sapien
tagaagcacgtaaccttttccagga

SEQ ID NO: 3362883 - DNA, 25 bp, Homo sapien
gacgtttggcggtggctcccttctg

SEQ ID NO: 3362884 - DNA, 25 bp, Homo sapien
tcatggccaatcccggaattctctg

SEQ ID NO: 3362885 - DNA, 25 bp, Homo sapien
ggccaatcccggaattctctgggca

SEQ ID NO: 3362886 - DNA, 25 bp, Homo sapien
tggccaatcccggaattctctgggc

SEQ ID NO: 3362887 - DNA, 25 bp, Homo sapien
catggccaatcccggaattctctgg

SEQ ID NO: 3362888 - DNA, 25 bp, Homo sapien
agactctggcattctcctctgaggg

SEQ ID NO: 3362889 - DNA, 25 bp, Homo sapien
ctcctctgagggctaatttaatatg

SEQ ID NO: 3362890 - DNA, 25 bp, Homo sapien
caaacacctcagactctggcattct

SEQ ID NO: 3362891 - DNA, 25 bp, Homo sapien
tctgagggctaatttaatatgtggg

SEQ ID NO: 3362892 - DNA, 25 bp, Homo sapien
tggagccctcttcgttactttgcca

SEQ ID NO: 3362893 - DNA, 25 bp, Homo sapien
cctcgcaggcgggacgggacagaca

SEQ ID NO: 3362894 - DNA, 25 bp, Homo sapien
agccctcttcgttactttgccagga

SEQ ID NO: 3362895 - DNA, 25 bp, Homo sapien
ctcttcgttactttgccaggactcc

SEQ ID NO: 3362896 - DNA, 25 bp, Homo sapien
cagggagcctgacgtcaagtccaat

SEQ ID NO: 3362897 - DNA, 25 bp, Homo sapien
ttcccagggagcctgacgtcaagtc

SEQ ID NO: 3362898 - DNA, 25 bp, Homo sapien
ggagcctgacgtcaagtccaatggc

SEQ ID NO: 3362899 - DNA, 25 bp, Homo sapien
tgtggaacggatcgggggcagcctt

SEQ ID NO: 3362900 - DNA, 25 bp, Homo sapien
ggtcagatggcactctccgtgggaa

SEQ ID NO: 3362901 - DNA, 25 bp, Homo sapien
tctccgtgggaaggaaccttcttca

SEQ ID NO: 3362902 - DNA, 25 bp, Homo sapien
ctccaggtcagatggcactctccgt

SEQ ID NO: 3362903 - DNA, 25 bp, Homo sapien
tggcactctccgtgggaaggaacct

SEQ ID NO: 3362904 - DNA, 25 bp, Homo sapien
gggtacaatcccgtactcatcgttc

SEQ ID NO: 3362905 - DNA, 25 bp, Homo sapien
tactcatcgttcctttatgtaaggc

SEQ ID NO: 3362906 - DNA, 25 bp, Homo sapien
tgttaggatgaaatagtgtgtggcc

SEQ ID NO: 3362907 - DNA, 25 bp, Homo sapien
tatgtaaggcactgaggactgttag

SEQ ID NO: 3362908 - DNA, 25 bp, Homo sapien
gagcagcctgagaagggccttcccg

SEQ ID NO: 3362909 - DNA, 25 bp, Homo sapien
gaggaggaggtgagcagcctgagaa

SEQ ID NO: 3362910 - DNA, 25 bp, Homo sapien
cagcctgagaagggccttcccgcat

SEQ ID NO: 3362911 - DNA, 25 bp, Homo sapien
tgagcagcctgagaagggccttccc

SEQ ID NO: 3362912 - DNA, 25 bp, Homo sapien
gatcattttgtggagacaatctcac

SEQ ID NO: 3362913 - DNA, 25 bp, Homo sapien
gagatgtgaatttgcaatccttttc

SEQ ID NO: 3362914 - DNA, 25 bp, Homo sapien
aacatcagcgatgcagatcttgccg

SEQ ID NO: 3362915 - DNA, 25 bp, Homo sapien
aatggtcgacgcctagaaaccctgc

SEQ ID NO: 3362916 - DNA, 25 bp, Homo sapien
tagagcaacgaagattttccaggcc

SEQ ID NO: 3362917 - DNA, 25 bp, Homo sapien
gagcaacgaagattttccaggcctc

SEQ ID NO: 3362918 - DNA, 25 bp, Homo sapien
ctagagcaacgaagattttccaggc

SEQ ID NO: 3362919 - DNA, 25 bp, Homo sapien
gcaacgaagattttccaggcctcac

SEQ ID NO: 3362920 - DNA, 25 bp, Homo sapien
ccttttggccttggtcagagtgacc

SEQ ID NO: 3362921 - DNA, 25 bp, Homo sapien
gaggttctgatccattccaccagag

SEQ ID NO: 3362922 - DNA, 25 bp, Homo sapien
gacgccaatgtcaaaggacttgttg

SEQ ID NO: 3362923 - DNA, 25 bp, Homo sapien
gccagtagtacatgtagaccttcct

SEQ ID NO: 3362924 - DNA, 25 bp, Homo sapien
tagtgagcgtcatttggcaccagga

SEQ ID NO: 3362925 - DNA, 25 bp, Homo sapien
taacacaaacattggcaagtgcatc

SEQ ID NO: 3362926 - DNA, 25 bp, Homo sapien
tggttttcacccaaagctgtagaat

SEQ ID NO: 3362927 - DNA, 25 bp, Homo sapien
gcaaggcaggccacaaactatgcta

SEQ ID NO: 3362928 - DNA, 25 bp, Homo sapien
ttcacaaggcaaaataaccatgatc

SEQ ID NO: 3362929 - DNA, 25 bp, Homo sapien
gaaaaggcctccttcgtggacagtc

SEQ ID NO: 3362930 - DNA, 25 bp, Homo sapien
tccttcgtggacagtctttcctcat

SEQ ID NO: 3362931 - DNA, 25 bp, Homo sapien
aaaggcctccttcgtggacagtctt

SEQ ID NO: 3362932 - DNA, 25 bp, Homo sapien
tctgctggcggctgcggtcttcacc

SEQ ID NO: 3362933 - DNA, 25 bp, Homo sapien
aaggagcgagccctctgagcctggc

SEQ ID NO: 3362934 - DNA, 25 bp, Homo sapien
tgaagatgccgagaatgtaggcaga

SEQ ID NO: 3362935 - DNA, 25 bp, Homo sapien
caggattcgcaggaatctgacagct

SEQ ID NO: 3362936 - DNA, 25 bp, Homo sapien
agaggaaatgtacattcgttcaccg

SEQ ID NO: 3362937 - DNA, 25 bp, Homo sapien
gaggaaatgtacattcgttcaccgt

SEQ ID NO: 3362938 - DNA, 25 bp, Homo sapien
tgagtccgcagcactggcagtgaac

SEQ ID NO: 3362939 - DNA, 25 bp, Homo sapien
tgaacggggctcatgaccaatgaca

SEQ ID NO: 3362940 - DNA, 25 bp, Homo sapien
aagcaatgctgaagctccggtttga

SEQ ID NO: 3362941 - DNA, 25 bp, Homo sapien
aaagtaaaggtaagcatggacaggc

SEQ ID NO: 3362942 - DNA, 25 bp, Homo sapien
catagagtttaagtatggtgccttc

SEQ ID NO: 3362943 - DNA, 25 bp, Homo sapien
cgatctggaatttagtgaaaaggta

SEQ ID NO: 3362944 - DNA, 25 bp, Homo sapien
tgcccctcacaatatttgacagagt

SEQ ID NO: 3362945 - DNA, 25 bp, Homo sapien
aacttatcctggtttgtgtgtggac

SEQ ID NO: 3362946 - DNA, 25 bp, Homo sapien
tgttgccacggtccctgatagctct

SEQ ID NO: 3362947 - DNA, 25 bp, Homo sapien
ccttgctgagatcctaatgctattt

SEQ ID NO: 3362948 - DNA, 25 bp, Homo sapien
cactgaatgtgagcatggtccccga

SEQ ID NO: 3362949 - DNA, 25 bp, Homo sapien
ccttgtctcctttgatacctcttct

SEQ ID NO: 3362950 - DNA, 25 bp, Homo sapien
tcagaataaggtcgagagctcaggc

SEQ ID NO: 3362951 - DNA, 25 bp, Homo sapien
aaagggcaacttgggtacatggcga

SEQ ID NO: 3362952 - DNA, 25 bp, Homo sapien
tccatctcagattgtacctcccggg

SEQ ID NO: 3362953 - DNA, 25 bp, Homo sapien
taaagggtgtaagcagccagtcttc

SEQ ID NO: 3362954 - DNA, 25 bp, Homo sapien
cttccccctgtgtctatatgtggtc

SEQ ID NO: 3362955 - DNA, 25 bp, Homo sapien
ccctgtgtctatatgtggtcttccc

SEQ ID NO: 3362956 - DNA, 25 bp, Homo sapien
ccccctgtgtctatatgtggtcttc

SEQ ID NO: 3362957 - DNA, 25 bp, Homo sapien
aagatgtcatcagggttgatttctt

SEQ ID NO: 3362958 - DNA, 25 bp, Homo sapien
gctgtgtgtgtgaagccgctgcaca

SEQ ID NO: 3362959 - DNA, 25 bp, Homo sapien
tgtgtgtgtgaagccgctgcacaga

SEQ ID NO: 3362960 - DNA, 25 bp, Homo sapien
acgtctatgtgagagccggcagcct

SEQ ID NO: 3362961 - DNA, 25 bp, Homo sapien
gagtcggctgtccacacaatcacgt

SEQ ID NO: 3362962 - DNA, 25 bp, Homo sapien
taaattctttctgagagcctctcgc

SEQ ID NO: 3362963 - DNA, 25 bp, Homo sapien
cagagtgcatagctgagtcccgcat

SEQ ID NO: 3362964 - DNA, 25 bp, Homo sapien
caataacagtgcattcttagcagcc

SEQ ID NO: 3362965 - DNA, 25 bp, Homo sapien
gcagcctccctggatagtttgctaa

SEQ ID NO: 3362966 - DNA, 25 bp, Homo sapien
aaaccaggcaatgactccagcgcct

SEQ ID NO: 3362967 - DNA, 25 bp, Homo sapien
tgtagtctgagcgaaaaccatccag

SEQ ID NO: 3362968 - DNA, 25 bp, Homo sapien
tagggaagtctggagtcaagtaatc

SEQ ID NO: 3362969 - DNA, 25 bp, Homo sapien
taattgggatacgagagactaggga

SEQ ID NO: 3362970 - DNA, 25 bp, Homo sapien
ggagggtcccaagcttcactgccat

SEQ ID NO: 3362971 - DNA, 25 bp, Homo sapien
ttccaggggctggaccttgagccgc

SEQ ID NO: 3362972 - DNA, 25 bp, Homo sapien
ggatggagaatctgtagctattctc

SEQ ID NO: 3362973 - DNA, 25 bp, Homo sapien
gctggaccttgagccgctggccttc

SEQ ID NO: 3362974 - DNA, 25 bp, Homo sapien
tgaggatggagaatctgtagctatt

SEQ ID NO: 3362975 - DNA, 25 bp, Homo sapien
agccactctcagtcaaccccaaaat

SEQ ID NO: 3362976 - DNA, 25 bp, Homo sapien
tttctgttgtatttgagtcaagccc

SEQ ID NO: 3362977 - DNA, 25 bp, Homo sapien
ccaaacacaggatcaccatgtcact

SEQ ID NO: 3362978 - DNA, 25 bp, Homo sapien
gagtcaagcccaaacacaggatcac

SEQ ID NO: 3362979 - DNA, 25 bp, Homo sapien
gaagaaagagacgtattggatggaa

SEQ ID NO: 3362980 - DNA, 25 bp, Homo sapien
gtctccaggtcttgaaccgtctaac

SEQ ID NO: 3362981 - DNA, 25 bp, Homo sapien
aagccagtctccaggtcttgaaccg

SEQ ID NO: 3362982 - DNA, 25 bp, Homo sapien
caatatatgaagaaagagacgtatt

SEQ ID NO: 3362983 - DNA, 25 bp, Homo sapien
tctatctgttaacttgagtggtggt

SEQ ID NO: 3362984 - DNA, 25 bp, Homo sapien
tcttgatggcatgtgatatcccttc

SEQ ID NO: 3362985 - DNA, 25 bp, Homo sapien
cggagagaggtggtgacttaggaag

SEQ ID NO: 3362986 - DNA, 25 bp, Homo sapien
cttggtggaggtgcggagagaggtg

SEQ ID NO: 3362987 - DNA, 25 bp, Homo sapien
ttatttaatcgcttcctgtgcttca

SEQ ID NO: 3362988 - DNA, 25 bp, Homo sapien
ctagagaagcaccgtggtctgcttc

SEQ ID NO: 3362989 - DNA, 25 bp, Homo sapien
ggcttactctggtcaagttatttaa

SEQ ID NO: 3362990 - DNA, 25 bp, Homo sapien
ccgtggtctgcttctgacacttata

SEQ ID NO: 3362991 - DNA, 25 bp, Homo sapien
aatattaataataaggttccatgga

SEQ ID NO: 3362992 - DNA, 25 bp, Homo sapien
atattaataataaggttccatggaa

SEQ ID NO: 3362993 - DNA, 25 bp, Homo sapien
caatattaataataaggttccatgg

SEQ ID NO: 3362994 - DNA, 25 bp, Homo sapien
tattaataataaggttccatggaat

SEQ ID NO: 3362995 - DNA, 25 bp, Homo sapien
tgagtgaaaaattgagcagcgggaa

SEQ ID NO: 3362996 - DNA, 25 bp, Homo sapien
catctattccgtagtgagttgcatc

SEQ ID NO: 3362997 - DNA, 25 bp, Homo sapien
cccgtgtcgcaagatgatgagtgaa

SEQ ID NO: 3362998 - DNA, 25 bp, Homo sapien
aaacactgatacttttgcctctgcc

SEQ ID NO: 3362999 - DNA, 25 bp, Homo sapien
gaacgtgggaaggctgcaggcagcc

SEQ ID NO: 3363000 - DNA, 25 bp, Homo sapien
gtgggaaggctgcaggcagcctcac

SEQ ID NO: 3363001 - DNA, 25 bp, Homo sapien
aacgtgggaaggctgcaggcagcct

SEQ ID NO: 3363002 - DNA, 25 bp, Homo sapien
tcagtcagaacgtgggaaggctgca

SEQ ID NO: 3363003 - DNA, 25 bp, Homo sapien
tcccccgggactgctcccatcatcc

SEQ ID NO: 3363004 - DNA, 25 bp, Homo sapien
ccccgggactgctcccatcatcctc

SEQ ID NO: 3363005 - DNA, 25 bp, Homo sapien
cccgggactgctcccatcatcctca

SEQ ID NO: 3363006 - DNA, 25 bp, Homo sapien
ccgggactgctcccatcatcctcac

SEQ ID NO: 3363007 - DNA, 25 bp, Homo sapien
tcctgagctgagcagtaattagacc

SEQ ID NO: 3363008 - DNA, 25 bp, Homo sapien
aacatactggaaatgtgtcatcagc

SEQ ID NO: 3363009 - DNA, 25 bp, Homo sapien
agcacctccatcaaagttgcgatga

SEQ ID NO: 3363010 - DNA, 25 bp, Homo sapien
caaagttgcgatgagcagtgtgaaa

SEQ ID NO: 3363011 - DNA, 25 bp, Homo sapien
cacgcacagacaccaggaaggtgag

SEQ ID NO: 3363012 - DNA, 25 bp, Homo sapien
acgcacagacaccaggaaggtgagc

SEQ ID NO: 3363013 - DNA, 25 bp, Homo sapien
ctgcacacgcacagacaccaggaag

SEQ ID NO: 3363014 - DNA, 25 bp, Homo sapien
cacacgcacagacaccaggaaggtg

SEQ ID NO: 3363015 - DNA, 25 bp, Homo sapien
accaagcctgggtgcttcttgcaga

SEQ ID NO: 3363016 - DNA, 25 bp, Homo sapien
caagcctgggtgcttcttgcagaaa

SEQ ID NO: 3363017 - DNA, 25 bp, Homo sapien
ctggatgggagcccagtcctcactg

SEQ ID NO: 3363018 - DNA, 25 bp, Homo sapien
aagcttccagccctttttgctggat

SEQ ID NO: 3363019 - DNA, 25 bp, Homo sapien
tgatgagaagcactctggtggcgca

SEQ ID NO: 3363020 - DNA, 25 bp, Homo sapien
catttcataggctgtggtctctcga

SEQ ID NO: 3363021 - DNA, 25 bp, Homo sapien
cccaagctgcaaggaccgtgtcatg

SEQ ID NO: 3363022 - DNA, 25 bp, Homo sapien
tgtcatgatcgatgggcaatgcctg

SEQ ID NO: 3363023 - DNA, 25 bp, Homo sapien
cggtttttccacacgagcctgaaga

SEQ ID NO: 3363024 - DNA, 25 bp, Homo sapien
tagttttctctaggtggcgggatta

SEQ ID NO: 3363025 - DNA, 25 bp, Homo sapien
tatattcttccgattgctttttcta

SEQ ID NO: 3363026 - DNA, 25 bp, Homo sapien
aatacactcaaaatactaacagtag

SEQ ID NO: 3363027 - DNA, 25 bp, Homo sapien
gctatgcagttacccttagtgctgt

SEQ ID NO: 3363028 - DNA, 25 bp, Homo sapien
cttgctgctatgcagttacccttag

SEQ ID NO: 3363029 - DNA, 25 bp, Homo sapien
gctgctatgcagttacccttagtgc

SEQ ID NO: 3363030 - DNA, 25 bp, Homo sapien
tgctatgcagttacccttagtgctg

SEQ ID NO: 3363031 - DNA, 25 bp, Homo sapien
ttagctgcccagtcttcaaaaccac

SEQ ID NO: 3363032 - DNA, 25 bp, Homo sapien
gtgcatgacacttgataggcctaat

SEQ ID NO: 3363033 - DNA, 25 bp, Homo sapien
gaggactccagtcgggaaggaaaca

SEQ ID NO: 3363034 - DNA, 25 bp, Homo sapien
tatctgcagtgtacagggagccagc

SEQ ID NO: 3363035 - DNA, 25 bp, Homo sapien
catgctgagcttacccgtgagtgac

SEQ ID NO: 3363036 - DNA, 25 bp, Homo sapien
gaagagttgtcctggcgttgtgcac

SEQ ID NO: 3363037 - DNA, 25 bp, Homo sapien
tttcagggcatacacacggaacgtg

SEQ ID NO: 3363038 - DNA, 25 bp, Homo sapien
tggcttggagagcaaacagtacccc

SEQ ID NO: 3363039 - DNA, 25 bp, Homo sapien
gctgaaaccacgcatttcagaacct

SEQ ID NO: 3363040 - DNA, 25 bp, Homo sapien
tggatgctgaaaccacgcatttcag

SEQ ID NO: 3363041 - DNA, 25 bp, Homo sapien
ctgtaggtacattccaagctcccca

SEQ ID NO: 3363042 - DNA, 25 bp, Homo sapien
gctgtaggtacattccaagctcccc

SEQ ID NO: 3363043 - DNA, 25 bp, Homo sapien
tagttggaggggacatcttaggtca

SEQ ID NO: 3363044 - DNA, 25 bp, Homo sapien
caaagtagttggaggggacatctta

SEQ ID NO: 3363045 - DNA, 25 bp, Homo sapien
tggaggggacatcttaggtcatacg

SEQ ID NO: 3363046 - DNA, 25 bp, Homo sapien
gaggggacatcttaggtcatacgac

SEQ ID NO: 3363047 - DNA, 25 bp, Homo sapien
ctgattatacaagtgctaagtggca

SEQ ID NO: 3363048 - DNA, 25 bp, Homo sapien
attatacaagtgctaagtggcagaa

SEQ ID NO: 3363049 - DNA, 25 bp, Homo sapien
tgattatacaagtgctaagtggcag

SEQ ID NO: 3363050 - DNA, 25 bp, Homo sapien
gattatacaagtgctaagtggcaga

SEQ ID NO: 3363051 - DNA, 25 bp, Homo sapien
ccctttttgtcaataggtgcttctg

SEQ ID NO: 3363052 - DNA, 25 bp, Homo sapien
aattcgatgtaattgaaattcccct

SEQ ID NO: 3363053 - DNA, 25 bp, Homo sapien
gtcaataggtgcttctgtgtacagc

SEQ ID NO: 3363054 - DNA, 25 bp, Homo sapien
atgtttcaggatgcttgtgaattcg

SEQ ID NO: 3363055 - DNA, 25 bp, Homo sapien
cttcttaccaaacatggcgagcaac

SEQ ID NO: 3363056 - DNA, 25 bp, Homo sapien
taacttcttaccaaacatggcgagc

SEQ ID NO: 3363057 - DNA, 25 bp, Homo sapien
cttaccaaacatggcgagcaacatg

SEQ ID NO: 3363058 - DNA, 25 bp, Homo sapien
aacttcttaccaaacatggcgagca

SEQ ID NO: 3363059 - DNA, 25 bp, Homo sapien
ggtggttgcttaattccggcaccaa

SEQ ID NO: 3363060 - DNA, 25 bp, Homo sapien
gtggcaaacaccttggacgttgcac

SEQ ID NO: 3363061 - DNA, 25 bp, Homo sapien
gcaccaaataccagaaacggaacca

SEQ ID NO: 3363062 - DNA, 25 bp, Homo sapien
caccttggacgttgcacactgaggg

SEQ ID NO: 3363063 - DNA, 25 bp, Homo sapien
tgtgcgagatgacaagcgacagcga

SEQ ID NO: 3363064 - DNA, 25 bp, Homo sapien
agatgacaagcgacagcgaggagcg

SEQ ID NO: 3363065 - DNA, 25 bp, Homo sapien
tgacaagcgacagcgaggagcgcgg

SEQ ID NO: 3363066 - DNA, 25 bp, Homo sapien
ctgtgcgagatgacaagcgacagcg

SEQ ID NO: 3363067 - DNA, 25 bp, Homo sapien
catatattggataggattaatcaca

SEQ ID NO: 3363068 - DNA, 25 bp, Homo sapien
caacaaaaaatcaccggatagccaa

SEQ ID NO: 3363069 - DNA, 25 bp, Homo sapien
gaaattatagttataactgtattcc

SEQ ID NO: 3363070 - DNA, 25 bp, Homo sapien
cacagtttagacatctaagaagaaa

SEQ ID NO: 3363071 - DNA, 25 bp, Homo sapien
gaggagacgtagttcctgcacccaa

SEQ ID NO: 3363072 - DNA, 25 bp, Homo sapien
gcacccaaggatctcatgcaatgag

SEQ ID NO: 3363073 - DNA, 25 bp, Homo sapien
gacttcatctacagagcttagcaca

SEQ ID NO: 3363074 - DNA, 25 bp, Homo sapien
ggagctcagtgcacagttattgaaa

SEQ ID NO: 3363075 - DNA, 25 bp, Homo sapien
gatgtgccgcatgaccatttttgag

SEQ ID NO: 3363076 - DNA, 25 bp, Homo sapien
gttttgcccttttaatgggcagcat

SEQ ID NO: 3363077 - DNA, 25 bp, Homo sapien
ccttttaatgggcagcatatctcct

SEQ ID NO: 3363078 - DNA, 25 bp, Homo sapien
tgtgtgatgcgggaactgcccacac

SEQ ID NO: 3363079 - DNA, 25 bp, Homo sapien
caaaactactagtttgcagcagcag

SEQ ID NO: 3363080 - DNA, 25 bp, Homo sapien
gaggacaccggtgccatgtttctgt

SEQ ID NO: 3363081 - DNA, 25 bp, Homo sapien
gaatctgcctctgattcttggaatt

SEQ ID NO: 3363082 - DNA, 25 bp, Homo sapien
cctagaatctgcctctgattcttgg

SEQ ID NO: 3363083 - DNA, 25 bp, Homo sapien
caggcggcttctgcatcctgagaca

SEQ ID NO: 3363084 - DNA, 25 bp, Homo sapien
actgggccccatagacgccaattag

SEQ ID NO: 3363085 - DNA, 25 bp, Homo sapien
gagacacccttcctgaatcgacact

SEQ ID NO: 3363086 - DNA, 25 bp, Homo sapien
tagatggacgtggtctccacactgc

SEQ ID NO: 3363087 - DNA, 25 bp, Homo sapien
ttgcagaaggagcacgcgctcccca

SEQ ID NO: 3363088 - DNA, 25 bp, Homo sapien
cccaagatgaccactgttctggtgc

SEQ ID NO: 3363089 - DNA, 25 bp, Homo sapien
ttcttccccgctcctgagcgaccag

SEQ ID NO: 3363090 - DNA, 25 bp, Homo sapien
gctcctgagcgaccaggactgcctt

SEQ ID NO: 3363091 - DNA, 25 bp, Homo sapien
tttatcagctaattcaactaaactt

SEQ ID NO: 3363092 - DNA, 25 bp, Homo sapien
ctagtctaagctttctcgtaaatgg

SEQ ID NO: 3363093 - DNA, 25 bp, Homo sapien
cttttatcagctaattcaactaaac

SEQ ID NO: 3363094 - DNA, 25 bp, Homo sapien
taaatgggggcctgacgtggctact

SEQ ID NO: 3363095 - DNA, 25 bp, Homo sapien
gctctggttctctagttcactcgaa

SEQ ID NO: 3363096 - DNA, 25 bp, Homo sapien
tagttcactcgaatgaacacaggag

SEQ ID NO: 3363097 - DNA, 25 bp, Homo sapien
tctttgcatgcatcgccatgggggt

SEQ ID NO: 3363098 - DNA, 25 bp, Homo sapien
tcgccatgggggttttcccagctct

SEQ ID NO: 3363099 - DNA, 25 bp, Homo sapien
agttgagtcataagggtaacctcca

SEQ ID NO: 3363100 - DNA, 25 bp, Homo sapien
gttgagtcataagggtaacctccag

SEQ ID NO: 3363101 - DNA, 25 bp, Homo sapien
aagaataaggcctttataagcacaa

SEQ ID NO: 3363102 - DNA, 25 bp, Homo sapien
ctgaggaagaataaggcctttataa

SEQ ID NO: 3363103 - DNA, 25 bp, Homo sapien
gaggaagaataaggcctttataagc

SEQ ID NO: 3363104 - DNA, 25 bp, Homo sapien
ataaatcccaatcagacagtcaacc

SEQ ID NO: 3363105 - DNA, 25 bp, Homo sapien
taagacatgggggtccattccaaga

SEQ ID NO: 3363106 - DNA, 25 bp, Homo sapien
gttttatttgagaataagacatggg

SEQ ID NO: 3363107 - DNA, 25 bp, Homo sapien
gaataagacatgggggtccattcca

SEQ ID NO: 3363108 - DNA, 25 bp, Homo sapien
tttgagaataagacatgggggtcca

SEQ ID NO: 3363109 - DNA, 25 bp, Homo sapien
gccaatgcatatgaagccctcccgg

SEQ ID NO: 3363110 - DNA, 25 bp, Homo sapien
ccaatgcatatgaagccctcccgga

SEQ ID NO: 3363111 - DNA, 25 bp, Homo sapien
ttcccagccttacaggtgagtcagg

SEQ ID NO: 3363112 - DNA, 25 bp, Homo sapien
gactttctggcaggccaaagaaact

SEQ ID NO: 3363113 - DNA, 25 bp, Homo sapien
ccagccttacaggtgagtcaggaag

SEQ ID NO: 3363114 - DNA, 25 bp, Homo sapien
tgactttctggcaggccaaagaaac

SEQ ID NO: 3363115 - DNA, 25 bp, Homo sapien
tacttgtaaattgaacgggatcctg

SEQ ID NO: 3363116 - DNA, 25 bp, Homo sapien
cagcctgcctagtccaattgtaaca

SEQ ID NO: 3363117 - DNA, 25 bp, Homo sapien
catgatctgggatggccactgcagt

SEQ ID NO: 3363118 - DNA, 25 bp, Homo sapien
tggacacttctacactctgctcgga

SEQ ID NO: 3363119 - DNA, 25 bp, Homo sapien
tcaagctttaaaacctggagagtcc

SEQ ID NO: 3363120 - DNA, 25 bp, Homo sapien
gacaagtctaaaatctgtctctgta

SEQ ID NO: 3363121 - DNA, 25 bp, Homo sapien
gcaccttgctgttaggatgcagcga

SEQ ID NO: 3363122 - DNA, 25 bp, Homo sapien
tatgtaggagttgctcaacaggcag

SEQ ID NO: 3363123 - DNA, 25 bp, Homo sapien
tcatcacaacagtgaggttggcaca

SEQ ID NO: 3363124 - DNA, 25 bp, Homo sapien
tctaacagacactctaccaaagaag

SEQ ID NO: 3363125 - DNA, 25 bp, Homo sapien
cacaagtggtaatctatatgcaaaa

SEQ ID NO: 3363126 - DNA, 25 bp, Homo sapien
tagggcgagtccataaagtaagctg

SEQ ID NO: 3363127 - DNA, 25 bp, Homo sapien
ttcatcactatcttagttttggtgg

SEQ ID NO: 3363128 - DNA, 25 bp, Homo sapien
ccatggcactggtaaactgttatgg

SEQ ID NO: 3363129 - DNA, 25 bp, Homo sapien
ggcactggtaaactgttatggcact

SEQ ID NO: 3363130 - DNA, 25 bp, Homo sapien
actttcatcactatcttagttttgg

SEQ ID NO: 3363131 - DNA, 25 bp, Homo sapien
caaaaggtcaggcatcttcaagatg

SEQ ID NO: 3363132 - DNA, 25 bp, Homo sapien
caacaaggacctatggaaagggagt

SEQ ID NO: 3363133 - DNA, 25 bp, Homo sapien
tacttaccgctgtgtgatccgagca

SEQ ID NO: 3363134 - DNA, 25 bp, Homo sapien
tattggatgagaaacccagtattcc

SEQ ID NO: 3363135 - DNA, 25 bp, Homo sapien
gctagaaggtcaaagacggtcacac

SEQ ID NO: 3363136 - DNA, 25 bp, Homo sapien
cagctgggctagaaggtcaaagacg

SEQ ID NO: 3363137 - DNA, 25 bp, Homo sapien
gaaggtcaaagacggtcacactcac

SEQ ID NO: 3363138 - DNA, 25 bp, Homo sapien
ctgggctagaaggtcaaagacggtc

SEQ ID NO: 3363139 - DNA, 25 bp, Homo sapien
gaaggtggtactgcgctgctgtctg

SEQ ID NO: 3363140 - DNA, 25 bp, Homo sapien
ctctggaaggtggtactgcgctgct

SEQ ID NO: 3363141 - DNA, 25 bp, Homo sapien
gtactgcgctgctgtctgtggcgtc

SEQ ID NO: 3363142 - DNA, 25 bp, Homo sapien
ggtggtactgcgctgctgtctgtgg

SEQ ID NO: 3363143 - DNA, 25 bp, Homo sapien
tcatcctccaatgcaggtgagatct

SEQ ID NO: 3363144 - DNA, 25 bp, Homo sapien
gcgtctcatcctccaatgcaggtga

SEQ ID NO: 3363145 - DNA, 25 bp, Homo sapien
tcctccaatgcaggtgagatctgct

SEQ ID NO: 3363146 - DNA, 25 bp, Homo sapien
caatgcaggtgagatctgctgcttt

SEQ ID NO: 3363147 - DNA, 25 bp, Homo sapien
agcctgattgttccttcatgggctg

SEQ ID NO: 3363148 - DNA, 25 bp, Homo sapien
gagcactgagaacattagattattc

SEQ ID NO: 3363149 - DNA, 25 bp, Homo sapien
ggctgaaatcatgctgctctctcca

SEQ ID NO: 3363150 - DNA, 25 bp, Homo sapien
taaactagcaatggctgtcccttat

SEQ ID NO: 3363151 - DNA, 25 bp, Homo sapien
gccagtggtccagtacagggttcaa

SEQ ID NO: 3363152 - DNA, 25 bp, Homo sapien
acagttgcatgaggcagaggtaggg

SEQ ID NO: 3363153 - DNA, 25 bp, Homo sapien
taggcccctcctatggcagtgacag

SEQ ID NO: 3363154 - DNA, 25 bp, Homo sapien
tacagggttcaagggatgcagctgc

SEQ ID NO: 3363155 - DNA, 25 bp, Homo sapien
ccaaatgggattggtcagggccagt

SEQ ID NO: 3363156 - DNA, 25 bp, Homo sapien
acagctcttgcagagtaataccgac

SEQ ID NO: 3363157 - DNA, 25 bp, Homo sapien
gccttgcagacggaaagcctttgtc

SEQ ID NO: 3363158 - DNA, 25 bp, Homo sapien
agtgcgtgacacactgccttgcaga

SEQ ID NO: 3363159 - DNA, 25 bp, Homo sapien
gggtcccacgctgagctttgtccat

SEQ ID NO: 3363160 - DNA, 25 bp, Homo sapien
ggctggagccccacgcgtgtgctct

SEQ ID NO: 3363161 - DNA, 25 bp, Homo sapien
agcgagcagtgctgccctttgctga

SEQ ID NO: 3363162 - DNA, 25 bp, Homo sapien
tgccccagcaaagcgagcagtgctg

SEQ ID NO: 3363163 - DNA, 25 bp, Homo sapien
tgtgctcttatgtgctgctgctgtg

SEQ ID NO: 3363164 - DNA, 25 bp, Homo sapien
gaggaaatagcttgtcattagatca

SEQ ID NO: 3363165 - DNA, 25 bp, Homo sapien
gacagaggtgtgtctggcaacgtct

SEQ ID NO: 3363166 - DNA, 25 bp, Homo sapien
gctttatcaaatggccttggcttta

SEQ ID NO: 3363167 - DNA, 25 bp, Homo sapien
gcccttcgggacactaatggtagag

SEQ ID NO: 3363168 - DNA, 25 bp, Homo sapien
gccccctcagcaagaggaagtgcat

SEQ ID NO: 3363169 - DNA, 25 bp, Homo sapien
tcgggccccctcagcaagaggaagt

SEQ ID NO: 3363170 - DNA, 25 bp, Homo sapien
ctttcgggccccctcagcaagagga

SEQ ID NO: 3363171 - DNA, 25 bp, Homo sapien
gggaggctttcgggccccctcagca

SEQ ID NO: 3363172 - DNA, 25 bp, Homo sapien
caccaggtttgcttccgaggagcag

SEQ ID NO: 3363173 - DNA, 25 bp, Homo sapien
ccaggtttgcttccgaggagcagcg

SEQ ID NO: 3363174 - DNA, 25 bp, Homo sapien
ctgaagctgtggtgaatgtgctcct

SEQ ID NO: 3363175 - DNA, 25 bp, Homo sapien
gtgctccttttggagcagggcccaa

SEQ ID NO: 3363176 - DNA, 25 bp, Homo sapien
ctgaagtgtaccgtgagggggtgtg

SEQ ID NO: 3363177 - DNA, 25 bp, Homo sapien
gacagggggacgcagaagcaccttc

SEQ ID NO: 3363178 - DNA, 25 bp, Homo sapien
aggatgaggacagggggacgcagaa

SEQ ID NO: 3363179 - DNA, 25 bp, Homo sapien
gggacgcagaagcaccttcctgctg

SEQ ID NO: 3363180 - DNA, 25 bp, Homo sapien
ggaggatgaggaatagagagcccgg

SEQ ID NO: 3363181 - DNA, 25 bp, Homo sapien
gagagcccggaaggcgagaaatagg

SEQ ID NO: 3363182 - DNA, 25 bp, Homo sapien
gcccggaaggcgagaaataggtcta

SEQ ID NO: 3363183 - DNA, 25 bp, Homo sapien
tagagagcccggaaggcgagaaata

SEQ ID NO: 3363184 - DNA, 25 bp, Homo sapien
tgtgtgtgcaccgaaggtccacctg

SEQ ID NO: 3363185 - DNA, 25 bp, Homo sapien
ggtccacctggcctgtagttggtat

SEQ ID NO: 3363186 - DNA, 25 bp, Homo sapien
tggtatgtcgatgaggccttttccc

SEQ ID NO: 3363187 - DNA, 25 bp, Homo sapien
ggtgtgtgtgcaccgaaggtccacc

SEQ ID NO: 3363188 - DNA, 25 bp, Homo sapien
tagcttctaggtcatcaaaggcggc

SEQ ID NO: 3363189 - DNA, 25 bp, Homo sapien
tagtcaagacgtagagcctaattcc

SEQ ID NO: 3363190 - DNA, 25 bp, Homo sapien
tcaaggcaggtttgggactcactca

SEQ ID NO: 3363191 - DNA, 25 bp, Homo sapien
acgtgaagtccgagtacccaaggca

SEQ ID NO: 3363192 - DNA, 25 bp, Homo sapien
ccacccagcttaggcaggagtggcc

SEQ ID NO: 3363193 - DNA, 25 bp, Homo sapien
tgggggaccaccacccagcttaggc

SEQ ID NO: 3363194 - DNA, 25 bp, Homo sapien
ccaggatgagctgcccacaggtgag

SEQ ID NO: 3363195 - DNA, 25 bp, Homo sapien
tcctccaggatgagctgcccacagg

SEQ ID NO: 3363196 - DNA, 25 bp, Homo sapien
agcaggtccataagaccatgctttg

SEQ ID NO: 3363197 - DNA, 25 bp, Homo sapien
atttggagcagtactttggagctgg

SEQ ID NO: 3363198 - DNA, 25 bp, Homo sapien
cccagcaggtccataagaccatgct

SEQ ID NO: 3363199 - DNA, 25 bp, Homo sapien
gctgtcttgatctgtattacattca

SEQ ID NO: 3363200 - DNA, 25 bp, Homo sapien
ctcccgtgtgcaagaagtttgtaga

SEQ ID NO: 3363201 - DNA, 25 bp, Homo sapien
ttgatagagtaactcccgtgtgcaa

SEQ ID NO: 3363202 - DNA, 25 bp, Homo sapien
agagtaactcccgtgtgcaagaagt

SEQ ID NO: 3363203 - DNA, 25 bp, Homo sapien
acatattcattgaaaagtgagtgtc

SEQ ID NO: 3363204 - DNA, 25 bp, Homo sapien
tccacagtgtgagatagtacatacc

SEQ ID NO: 3363205 - DNA, 25 bp, Homo sapien
catcggcctgtaagctacctccttt

SEQ ID NO: 3363206 - DNA, 25 bp, Homo sapien
cataggatccttagctttgactgag

SEQ ID NO: 3363207 - DNA, 25 bp, Homo sapien
gagttccttcgcattctttgtgacc

SEQ ID NO: 3363208 - DNA, 25 bp, Homo sapien
ccagtaatcagcactacagggtgtc

SEQ ID NO: 3363209 - DNA, 25 bp, Homo sapien
ggtacccaagagagctgaccgcatg

SEQ ID NO: 3363210 - DNA, 25 bp, Homo sapien
caccaagatggccataagggatcca

SEQ ID NO: 3363211 - DNA, 25 bp, Homo sapien
tcttgggtgagtgtctgcatctgca

SEQ ID NO: 3363212 - DNA, 25 bp, Homo sapien
gcctgatatataatgggctgctcaa

SEQ ID NO: 3363213 - DNA, 25 bp, Homo sapien
ccaggaactcctatagtgcctgata

SEQ ID NO: 3363214 - DNA, 25 bp, Homo sapien
ggtggaagttcttatcaggactata

SEQ ID NO: 3363215 - DNA, 25 bp, Homo sapien
taacttcagaccagtatcctccagg

SEQ ID NO: 3363216 - DNA, 25 bp, Homo sapien
tatgggagtcgaggaacaccttcca

SEQ ID NO: 3363217 - DNA, 25 bp, Homo sapien
taggctcagggacgtatatatcatt

SEQ ID NO: 3363218 - DNA, 25 bp, Homo sapien
ttgcagcccaaaataagccgtatgt

SEQ ID NO: 3363219 - DNA, 25 bp, Homo sapien
tatttgccaaaatagcttcgctgga

SEQ ID NO: 3363220 - DNA, 25 bp, Homo sapien
taatagcagcatttcagtgggagaa

SEQ ID NO: 3363221 - DNA, 25 bp, Homo sapien
taggtatagatttcccctgcacagg

SEQ ID NO: 3363222 - DNA, 25 bp, Homo sapien
tttggagaattaagtcagcacctgc

SEQ ID NO: 3363223 - DNA, 25 bp, Homo sapien
caagcagagacttccgtgataggta

SEQ ID NO: 3363224 - DNA, 25 bp, Homo sapien
ttgacagggcgtacattacacatcc

SEQ ID NO: 3363225 - DNA, 25 bp, Homo sapien
gacgtgtcactcctctaaatggctg

SEQ ID NO: 3363226 - DNA, 25 bp, Homo sapien
tacttccacgaagctggctaaggag

SEQ ID NO: 3363227 - DNA, 25 bp, Homo sapien
ccttgggagtttcagttagcctgca

SEQ ID NO: 3363228 - DNA, 25 bp, Homo sapien
agagtgaagaacggcatccctggcc

SEQ ID NO: 3363229 - DNA, 25 bp, Homo sapien
agtgaagaacggcatccctggccag

SEQ ID NO: 3363230 - DNA, 25 bp, Homo sapien
gagagtgaagaacggcatccctggc

SEQ ID NO: 3363231 - DNA, 25 bp, Homo sapien
tggagagtgaagaacggcatccctg

SEQ ID NO: 3363232 - DNA, 25 bp, Homo sapien
ttcttgaggtcagcgatatagccac

SEQ ID NO: 3363233 - DNA, 25 bp, Homo sapien
tgtccgcaggttttcttgaggtcag

SEQ ID NO: 3363234 - DNA, 25 bp, Homo sapien
ttaaatacccgtcttccagcacagt

SEQ ID NO: 3363235 - DNA, 25 bp, Homo sapien
gctgatacttctttagcagattttg

SEQ ID NO: 3363236 - DNA, 25 bp, Homo sapien
cttatttgataaaccagtctctgca

SEQ ID NO: 3363237 - DNA, 25 bp, Homo sapien
atttgataaaccagtctctgcagat

SEQ ID NO: 3363238 - DNA, 25 bp, Homo sapien
ttatttgataaaccagtctctgcag

SEQ ID NO: 3363239 - DNA, 25 bp, Homo sapien
tatttgataaaccagtctctgcaga

SEQ ID NO: 3363240 - DNA, 25 bp, Homo sapien
tggacaggttcttaattcaggaata

SEQ ID NO: 3363241 - DNA, 25 bp, Homo sapien
cagtgcagtgcagaaatgggtagta

SEQ ID NO: 3363242 - DNA, 25 bp, Homo sapien
gtctctaaggagcactactgtttct

SEQ ID NO: 3363243 - DNA, 25 bp, Homo sapien
tccccttccctttaactgtgctgtg

SEQ ID NO: 3363244 - DNA, 25 bp, Homo sapien
tctccaaatcactgaactgaataat

SEQ ID NO: 3363245 - DNA, 25 bp, Homo sapien
attttgccatagttgttttgatgca

SEQ ID NO: 3363246 - DNA, 25 bp, Homo sapien
ttgatgcataagtatttcaatacct

SEQ ID NO: 3363247 - DNA, 25 bp, Homo sapien
tccacagattctgatgtgtaaacat

SEQ ID NO: 3363248 - DNA, 25 bp, Homo sapien
agattcaaagaaaaggcgtggtact

SEQ ID NO: 3363249 - DNA, 25 bp, Homo sapien
tgagcaaaggtgaaagcctcagaga

SEQ ID NO: 3363250 - DNA, 25 bp, Homo sapien
cagattcaaagaaaaggcgtggtac

SEQ ID NO: 3363251 - DNA, 25 bp, Homo sapien
tacatcacagtggtcacgtcacaag

SEQ ID NO: 3363252 - DNA, 25 bp, Homo sapien
gtaacttcaatgtcccagggcttcc

SEQ ID NO: 3363253 - DNA, 25 bp, Homo sapien
tttttatcgtccagttgtaacttca

SEQ ID NO: 3363254 - DNA, 25 bp, Homo sapien
aatgaaggagatacagctttacatc

SEQ ID NO: 3363255 - DNA, 25 bp, Homo sapien
tcaactccttctggagtgtcttcct

SEQ ID NO: 3363256 - DNA, 25 bp, Homo sapien
ctctactgcagaggcgggaactctg

SEQ ID NO: 3363257 - DNA, 25 bp, Homo sapien
tcagcacccattctcaactccttct

SEQ ID NO: 3363258 - DNA, 25 bp, Homo sapien
tgacagacatcctgaagaggcactc

SEQ ID NO: 3363259 - DNA, 25 bp, Homo sapien
gaacgcaggttacagagtggcctca

SEQ ID NO: 3363260 - DNA, 25 bp, Homo sapien
ttagctgtttgacccctgaatgcca

SEQ ID NO: 3363261 - DNA, 25 bp, Homo sapien
ctcaagcagaaggaacgtctcatgt

SEQ ID NO: 3363262 - DNA, 25 bp, Homo sapien
gcctttaaagcctaatgaacgcagg

SEQ ID NO: 3363263 - DNA, 25 bp, Homo sapien
ctgaaaagtcgggtgccaaggagcc

SEQ ID NO: 3363264 - DNA, 25 bp, Homo sapien
tatgtgtaaggcctcgggtcctaga

SEQ ID NO: 3363265 - DNA, 25 bp, Homo sapien
tataccttcaaacaccaagtggctg

SEQ ID NO: 3363266 - DNA, 25 bp, Homo sapien
caagacagaccccaagttttgaggg

SEQ ID NO: 3363267 - DNA, 25 bp, Homo sapien
agggaatgctcccaacacagaggaa

SEQ ID NO: 3363268 - DNA, 25 bp, Homo sapien
tagtgccactatgagccaagtaaag

SEQ ID NO: 3363269 - DNA, 25 bp, Homo sapien
cagtggcgtggctaaaatactcccc

SEQ ID NO: 3363270 - DNA, 25 bp, Homo sapien
cgggaagtcatgcaaaacgctcagc

SEQ ID NO: 3363271 - DNA, 25 bp, Homo sapien
catattcatttattatcaatccaca

SEQ ID NO: 3363272 - DNA, 25 bp, Homo sapien
tgctgataaacaagaaaaggaatct

SEQ ID NO: 3363273 - DNA, 25 bp, Homo sapien
ggaaaatctgattgctacatgagct

SEQ ID NO: 3363274 - DNA, 25 bp, Homo sapien
tgtgccacaaggatgtaataacaac

SEQ ID NO: 3363275 - DNA, 25 bp, Homo sapien
actgcaatgtcgctagtgctgccta

SEQ ID NO: 3363276 - DNA, 25 bp, Homo sapien
tctcctccggatgtggaatggaagc

SEQ ID NO: 3363277 - DNA, 25 bp, Homo sapien
acattatctcgtccgttctgaggca

SEQ ID NO: 3363278 - DNA, 25 bp, Homo sapien
cctttgtaccgcgtggcattcaagc

SEQ ID NO: 3363279 - DNA, 25 bp, Homo sapien
caggagctgttgtaaggcaccggat

SEQ ID NO: 3363280 - DNA, 25 bp, Homo sapien
ttaacagctcttgacgcgggcctgg

SEQ ID NO: 3363281 - DNA, 25 bp, Homo sapien
ggcaccggattgctctcctctttga

SEQ ID NO: 3363282 - DNA, 25 bp, Homo sapien
tgttttcttgatgacgctggcccgg

SEQ ID NO: 3363283 - DNA, 25 bp, Homo sapien
actgtttgccttcaatattcctctt

SEQ ID NO: 3363284 - DNA, 25 bp, Homo sapien
gttgctgaggtactgtttgccttca

SEQ ID NO: 3363285 - DNA, 25 bp, Homo sapien
cttcaatattcctcttccgccagtg

SEQ ID NO: 3363286 - DNA, 25 bp, Homo sapien
aatattcctcttccgccagtgtggc

SEQ ID NO: 3363287 - DNA, 25 bp, Homo sapien
cagcgaggaacttagtgacaggcaa

SEQ ID NO: 3363288 - DNA, 25 bp, Homo sapien
tcactggagcgcagtaagtcaaggc

SEQ ID NO: 3363289 - DNA, 25 bp, Homo sapien
ggctagagctgcaaccttgaagaaa

SEQ ID NO: 3363290 - DNA, 25 bp, Homo sapien
ggcggcttagagctccacggtgtac

SEQ ID NO: 3363291 - DNA, 25 bp, Homo sapien
ctttctgccattgtgcacgccccat

SEQ ID NO: 3363292 - DNA, 25 bp, Homo sapien
tccagccactttctgccattgtgca

SEQ ID NO: 3363293 - DNA, 25 bp, Homo sapien
tcaagcgcagacccccagcaggtgg

SEQ ID NO: 3363294 - DNA, 25 bp, Homo sapien
gccactttctgccattgtgcacgcc

SEQ ID NO: 3363295 - DNA, 25 bp, Homo sapien
tgtttaagtggtaagagcatcggca

SEQ ID NO: 3363296 - DNA, 25 bp, Homo sapien
tccttggcagcatcgtgggcaggct

SEQ ID NO: 3363297 - DNA, 25 bp, Homo sapien
aaaggaaaggtgcataaccagcagc

SEQ ID NO: 3363298 - DNA, 25 bp, Homo sapien
tgtactggtcactgcttttggctgg

SEQ ID NO: 3363299 - DNA, 25 bp, Homo sapien
tcatcgctgggcacactatcagtcg

SEQ ID NO: 3363300 - DNA, 25 bp, Homo sapien
tctcttcatcgctgggcacactatc

SEQ ID NO: 3363301 - DNA, 25 bp, Homo sapien
ggcacactatcagtcgtttcgcttt

SEQ ID NO: 3363302 - DNA, 25 bp, Homo sapien
tcggcactctcttcatcgctgggca

SEQ ID NO: 3363303 - DNA, 25 bp, Homo sapien
tgtgtatacactgggcactacctcc

SEQ ID NO: 3363304 - DNA, 25 bp, Homo sapien
cccagtgcagagttgaccgtttcca

SEQ ID NO: 3363305 - DNA, 25 bp, Homo sapien
taatcttcggagaaaccaggcttga

SEQ ID NO: 3363306 - DNA, 25 bp, Homo sapien
gactgagtaactaaacgcatcacct

SEQ ID NO: 3363307 - DNA, 25 bp, Homo sapien
gaagatgagctgacgttgccgagca

SEQ ID NO: 3363308 - DNA, 25 bp, Homo sapien
tccaaatgtgtgtcgcttcaagcca

SEQ ID NO: 3363309 - DNA, 25 bp, Homo sapien
gacgacgatcccagctatgaagatg

SEQ ID NO: 3363310 - DNA, 25 bp, Homo sapien
caaacctgagtgatcgcggtgggct

SEQ ID NO: 3363311 - DNA, 25 bp, Homo sapien
ttcgtacagtaccaacaggcacatg

SEQ ID NO: 3363312 - DNA, 25 bp, Homo sapien
tgacttcttacacaagggagctgac

SEQ ID NO: 3363313 - DNA, 25 bp, Homo sapien
tgaagtcgtcaggaagatgcgccct

SEQ ID NO: 3363314 - DNA, 25 bp, Homo sapien
tattgtctaagcaggaacactgcgg

SEQ ID NO: 3363315 - DNA, 25 bp, Homo sapien
tcctcttaatctcaaagcgattgtg

SEQ ID NO: 3363316 - DNA, 25 bp, Homo sapien
tacactttctggaaggctcttgttc

SEQ ID NO: 3363317 - DNA, 25 bp, Homo sapien
gaaaggctttttgcactctgacatt

SEQ ID NO: 3363318 - DNA, 25 bp, Homo sapien
gctcttgttcagcaagtttgatttg

SEQ ID NO: 3363319 - DNA, 25 bp, Homo sapien
tgtctggcggattggtgacaatctc

SEQ ID NO: 3363320 - DNA, 25 bp, Homo sapien
ggctgctcgtcgctctcagtggtca

SEQ ID NO: 3363321 - DNA, 25 bp, Homo sapien
tcagtggtcacctctacaacttggc

SEQ ID NO: 3363322 - DNA, 25 bp, Homo sapien
agctcgctcatgctgaccggctgct

SEQ ID NO: 3363323 - DNA, 25 bp, Homo sapien
gatttccctggaccaccaagcggca

SEQ ID NO: 3363324 - DNA, 25 bp, Homo sapien
tctcgacatgtgaactgatttccct

SEQ ID NO: 3363325 - DNA, 25 bp, Homo sapien
caagcggcaaaacagacagcaacac

SEQ ID NO: 3363326 - DNA, 25 bp, Homo sapien
ctctctcgacatgtgaactgatttc

SEQ ID NO: 3363327 - DNA, 25 bp, Homo sapien
ctccaccataaggagacccaccacc

SEQ ID NO: 3363328 - DNA, 25 bp, Homo sapien
ctgctccaccataaggagacccacc

SEQ ID NO: 3363329 - DNA, 25 bp, Homo sapien
gctccaccataaggagacccaccac

SEQ ID NO: 3363330 - DNA, 25 bp, Homo sapien
tgctccaccataaggagacccacca

SEQ ID NO: 3363331 - DNA, 25 bp, Homo sapien
tgcaaactttttacactgcccggga

SEQ ID NO: 3363332 - DNA, 25 bp, Homo sapien
aaagcactgctaacctcggcaagag

SEQ ID NO: 3363333 - DNA, 25 bp, Homo sapien
tgccgagaccagtcagacagaatgt

SEQ ID NO: 3363334 - DNA, 25 bp, Homo sapien
agcggaggcctgtcaggacaattca

SEQ ID NO: 3363335 - DNA, 25 bp, Homo sapien
gatgttcaccgtactatccacttca

SEQ ID NO: 3363336 - DNA, 25 bp, Homo sapien
taagccccagagatgactcaactgg

SEQ ID NO: 3363337 - DNA, 25 bp, Homo sapien
ttttatagttgaagtcaggaccgca

SEQ ID NO: 3363338 - DNA, 25 bp, Homo sapien
tcaggagaaagatcacttactccat

SEQ ID NO: 3363339 - DNA, 25 bp, Homo sapien
ttcatgttcagctgccgaatacatt

SEQ ID NO: 3363340 - DNA, 25 bp, Homo sapien
ttctttaatgctagggtcattcatg

SEQ ID NO: 3363341 - DNA, 25 bp, Homo sapien
tgccgaatacattcatcccctgctt

SEQ ID NO: 3363342 - DNA, 25 bp, Homo sapien
ttaatgctagggtcattcatgttca

SEQ ID NO: 3363343 - DNA, 25 bp, Homo sapien
aaccaaacttccgacccgctgtctg

SEQ ID NO: 3363344 - DNA, 25 bp, Homo sapien
acctgggcccccattagttcctgtg

SEQ ID NO: 3363345 - DNA, 25 bp, Homo sapien
tagttcctgtggtctcgcttcctct

SEQ ID NO: 3363346 - DNA, 25 bp, Homo sapien
tctgcctttccggacttcgcctctc

SEQ ID NO: 3363347 - DNA, 25 bp, Homo sapien
gacatctctaagtctctgctaacag

SEQ ID NO: 3363348 - DNA, 25 bp, Homo sapien
taggctgacagctggacttcacaag

SEQ ID NO: 3363349 - DNA, 25 bp, Homo sapien
tttgaagccagatttaaggacatca

SEQ ID NO: 3363350 - DNA, 25 bp, Homo sapien
tgctaacagaacgtgtaggctgaca

SEQ ID NO: 3363351 - DNA, 25 bp, Homo sapien
agtgctgtaccctccaactttctag

SEQ ID NO: 3363352 - DNA, 25 bp, Homo sapien
actcactcaagtgctgtaccctcca

SEQ ID NO: 3363353 - DNA, 25 bp, Homo sapien
ttctctgcgggcctttgtctgcatc

SEQ ID NO: 3363354 - DNA, 25 bp, Homo sapien
tccaaagctaccaacgccattctca

SEQ ID NO: 3363355 - DNA, 25 bp, Homo sapien
ccaaagcgaaacaccctctccacaa

SEQ ID NO: 3363356 - DNA, 25 bp, Homo sapien
accctctccacaaaacgacctgcat

SEQ ID NO: 3363357 - DNA, 25 bp, Homo sapien
tccacaaaacgacctgcattcccaa

SEQ ID NO: 3363358 - DNA, 25 bp, Homo sapien
aaacgacctgcattcccaacactcg

SEQ ID NO: 3363359 - DNA, 25 bp, Homo sapien
gggcctcctctttaggccgctctta

SEQ ID NO: 3363360 - DNA, 25 bp, Homo sapien
ctctttaggccgctcttatctgcat

SEQ ID NO: 3363361 - DNA, 25 bp, Homo sapien
ttaggccgctcttatctgcatcctc

SEQ ID NO: 3363362 - DNA, 25 bp, Homo sapien
ctgaaggtgcaaaacgccggggcct

SEQ ID NO: 3363363 - DNA, 25 bp, Homo sapien
gggccaggatggtcaagcccaccca

SEQ ID NO: 3363364 - DNA, 25 bp, Homo sapien
atggtcaagcccacccaggaccgtg

SEQ ID NO: 3363365 - DNA, 25 bp, Homo sapien
caggaccgtgccttccacaacttgc

SEQ ID NO: 3363366 - DNA, 25 bp, Homo sapien
ccaggatggtcaagcccacccagga

SEQ ID NO: 3363367 - DNA, 25 bp, Homo sapien
taataggatcccaactttggctttc

SEQ ID NO: 3363368 - DNA, 25 bp, Homo sapien
tgatgtgcttaactttgtcttcttt

SEQ ID NO: 3363369 - DNA, 25 bp, Homo sapien
ttgatgtgcttaactttgtcttctt

SEQ ID NO: 3363370 - DNA, 25 bp, Homo sapien
ctttgtcttctttttctgtctttgg

SEQ ID NO: 3363371 - DNA, 25 bp, Homo sapien
cagcattcggtagaccctgaaggca

SEQ ID NO: 3363372 - DNA, 25 bp, Homo sapien
gaaattcgccttccatgttttggga

SEQ ID NO: 3363373 - DNA, 25 bp, Homo sapien
caggcaaggaattcatggcgcatct

SEQ ID NO: 3363374 - DNA, 25 bp, Homo sapien
cttgacttcttcaatatcaggcaag

SEQ ID NO: 3363375 - DNA, 25 bp, Homo sapien
catcccacccatgtctagccgcatg

SEQ ID NO: 3363376 - DNA, 25 bp, Homo sapien
ctgtatggattgcccagtttctaaa

SEQ ID NO: 3363377 - DNA, 25 bp, Homo sapien
catgtctagccgcatgcatccaggg

SEQ ID NO: 3363378 - DNA, 25 bp, Homo sapien
aagagtggtgcatctttttccacat

SEQ ID NO: 3363379 - DNA, 25 bp, Homo sapien
tgctactaaagaaaagtcgggtaca

SEQ ID NO: 3363380 - DNA, 25 bp, Homo sapien
gaaagtaatgttcgaatccctgtgg

SEQ ID NO: 3363381 - DNA, 25 bp, Homo sapien
tcgggtacatctgaggccactgtca

SEQ ID NO: 3363382 - DNA, 25 bp, Homo sapien
tagtaactccagctatcttaggtaa

SEQ ID NO: 3363383 - DNA, 25 bp, Homo sapien
gtacgtgtgtgcacaactctgccca

SEQ ID NO: 3363384 - DNA, 25 bp, Homo sapien
tacgtgtgtgcacaactctgcccat

SEQ ID NO: 3363385 - DNA, 25 bp, Homo sapien
agccgaggcctgcagtgacagtgat

SEQ ID NO: 3363386 - DNA, 25 bp, Homo sapien
ccatgtgcacgagcaatgccacgtg

SEQ ID NO: 3363387 - DNA, 25 bp, Homo sapien
catgtgcacgagcaatgccacgtgc

SEQ ID NO: 3363388 - DNA, 25 bp, Homo sapien
gtgcacgagcaatgccacgtgccca

SEQ ID NO: 3363389 - DNA, 25 bp, Homo sapien
ctaggcctcagcaggatgcagcttg

SEQ ID NO: 3363390 - DNA, 25 bp, Homo sapien
gctgagaggcggcacgggccggcag

SEQ ID NO: 3363391 - DNA, 25 bp, Homo sapien
gccacgggcacgctctccttcatca

SEQ ID NO: 3363392 - DNA, 25 bp, Homo sapien
tcggcctctgttccagggcggtgct

SEQ ID NO: 3363393 - DNA, 25 bp, Homo sapien
ttgagccccgggatcgtgttggagt

SEQ ID NO: 3363394 - DNA, 25 bp, Homo sapien
cttgagccccgggatcgtgttggag

SEQ ID NO: 3363395 - DNA, 25 bp, Homo sapien
tgagccccgggatcgtgttggagtt

SEQ ID NO: 3363396 - DNA, 25 bp, Homo sapien
cgggcgcatgcgcatcctttccacc

SEQ ID NO: 3363397 - DNA, 25 bp, Homo sapien
ccacgggcgcatgcgcatcctttcc

SEQ ID NO: 3363398 - DNA, 25 bp, Homo sapien
ggcgcatgcgcatcctttccaccgg

SEQ ID NO: 3363399 - DNA, 25 bp, Homo sapien
gcatgcgcatcctttccaccggcat

SEQ ID NO: 3363400 - DNA, 25 bp, Homo sapien
aggaatttgcctagagggaggcttt

SEQ ID NO: 3363401 - DNA, 25 bp, Homo sapien
tatggacattggagaccaggaccca

SEQ ID NO: 3363402 - DNA, 25 bp, Homo sapien
actgcactggccgtgttttgaggct

SEQ ID NO: 3363403 - DNA, 25 bp, Homo sapien
tgaggcttccgttgctcagaggccc

SEQ ID NO: 3363404 - DNA, 25 bp, Homo sapien
gaaagaagggaggtaccatgcccca

SEQ ID NO: 3363405 - DNA, 25 bp, Homo sapien
cattctttgagacacaaacgggaac

SEQ ID NO: 3363406 - DNA, 25 bp, Homo sapien
ccagctctgaagacggctctgaggg

SEQ ID NO: 3363407 - DNA, 25 bp, Homo sapien
tagtcctacaaagcgcaaatgttgc

SEQ ID NO: 3363408 - DNA, 25 bp, Homo sapien
gccctgggcaggtagtgcattacca

SEQ ID NO: 3363409 - DNA, 25 bp, Homo sapien
tagccgagggtgagcgtacatcttt

SEQ ID NO: 3363410 - DNA, 25 bp, Homo sapien
caggtttctcacgactagccgaggg

SEQ ID NO: 3363411 - DNA, 25 bp, Homo sapien
tcgcgacacggtacaaagtttgcca

SEQ ID NO: 3363412 - DNA, 25 bp, Homo sapien
ctccgtcttgcaaaccactgacagt

SEQ ID NO: 3363413 - DNA, 25 bp, Homo sapien
ccgtcttgcaaaccactgacagtca

SEQ ID NO: 3363414 - DNA, 25 bp, Homo sapien
ctttccaaactcctctccgtcttgc

SEQ ID NO: 3363415 - DNA, 25 bp, Homo sapien
tccgtcttgcaaaccactgacagtc

SEQ ID NO: 3363416 - DNA, 25 bp, Homo sapien
gaaagcagagcttttgacacactca

SEQ ID NO: 3363417 - DNA, 25 bp, Homo sapien
tgctcctttctgaagaggaggctgt

SEQ ID NO: 3363418 - DNA, 25 bp, Homo sapien
ttagggctgctgtcgtcctagcgca

SEQ ID NO: 3363419 - DNA, 25 bp, Homo sapien
tgctgtcgtcctagcgcagggacag

SEQ ID NO: 3363420 - DNA, 25 bp, Homo sapien
gactcctctggtacctgaaatgtgt

SEQ ID NO: 3363421 - DNA, 25 bp, Homo sapien
gaaatgtgtgctgcatccgaaccat

SEQ ID NO: 3363422 - DNA, 25 bp, Homo sapien
gaccacagactcctctggtacctga

SEQ ID NO: 3363423 - DNA, 25 bp, Homo sapien
ctctggtacctgaaatgtgtgctgc

SEQ ID NO: 3363424 - DNA, 25 bp, Homo sapien
ccattgccatgtcagccaccaaggg

SEQ ID NO: 3363425 - DNA, 25 bp, Homo sapien
gaggcctatacttactgcgtgtctg

SEQ ID NO: 3363426 - DNA, 25 bp, Homo sapien
atctgtcagaccatccccattaccc

SEQ ID NO: 3363427 - DNA, 25 bp, Homo sapien
ccacacagcggaggcctatacttac

SEQ ID NO: 3363428 - DNA, 25 bp, Homo sapien
caggatgttgtcaatatcctccacc

SEQ ID NO: 3363429 - DNA, 25 bp, Homo sapien
ggatgttgtcaatatcctccaccat

SEQ ID NO: 3363430 - DNA, 25 bp, Homo sapien
aggatgttgtcaatatcctccacca

SEQ ID NO: 3363431 - DNA, 25 bp, Homo sapien
caagacggaagcctgaacaactgtc

SEQ ID NO: 3363432 - DNA, 25 bp, Homo sapien
cacttgctcgtacttggctgaacac

SEQ ID NO: 3363433 - DNA, 25 bp, Homo sapien
gctgaacactgcagttactcccctg

SEQ ID NO: 3363434 - DNA, 25 bp, Homo sapien
gtttcctcgacgtgtgcaagacgga

SEQ ID NO: 3363435 - DNA, 25 bp, Homo sapien
ggtgaagaaccgatccttccttcca

SEQ ID NO: 3363436 - DNA, 25 bp, Homo sapien
caggggtgaagaaccgatccttcct

SEQ ID NO: 3363437 - DNA, 25 bp, Homo sapien
tgaagaaccgatccttccttccaca

SEQ ID NO: 3363438 - DNA, 25 bp, Homo sapien
gtgaagaaccgatccttccttccac

SEQ ID NO: 3363439 - DNA, 25 bp, Homo sapien
gctttaccttaccaatcaaatacat

SEQ ID NO: 3363440 - DNA, 25 bp, Homo sapien
tacgtatgtgctttaccttaccaat

SEQ ID NO: 3363441 - DNA, 25 bp, Homo sapien
gagtttacctaacaatacgtatgtg

SEQ ID NO: 3363442 - DNA, 25 bp, Homo sapien
atagtctccctaaggttcctttatg

SEQ ID NO: 3363443 - DNA, 25 bp, Homo sapien
tccacagacctcaaaaggtgtgttt

SEQ ID NO: 3363444 - DNA, 25 bp, Homo sapien
tcatttttgagctccacagacctca

SEQ ID NO: 3363445 - DNA, 25 bp, Homo sapien
gctgtttgtgtcacccagtcacctt

SEQ ID NO: 3363446 - DNA, 25 bp, Homo sapien
ctgagctgtttgtgtcacccagtca

SEQ ID NO: 3363447 - DNA, 25 bp, Homo sapien
cattggtgatacgaagaagctgcgc

SEQ ID NO: 3363448 - DNA, 25 bp, Homo sapien
gatcacactgatcacgggcgtctga

SEQ ID NO: 3363449 - DNA, 25 bp, Homo sapien
aaggtttccctgaagctgcgagttc

SEQ ID NO: 3363450 - DNA, 25 bp, Homo sapien
gaagccaagggatcctcaggtggaa

SEQ ID NO: 3363451 - DNA, 25 bp, Homo sapien
gacacgaagatagggaatgcatatg

SEQ ID NO: 3363452 - DNA, 25 bp, Homo sapien
tgtacagcatatgaagacagcgacc

SEQ ID NO: 3363453 - DNA, 25 bp, Homo sapien
tttgaaaagtcagaggtcacactct

SEQ ID NO: 3363454 - DNA, 25 bp, Homo sapien
catatgatgcgaagatagggaccgt

SEQ ID NO: 3363455 - DNA, 25 bp, Homo sapien
tcctcggcagcacccagtgtgtttt

SEQ ID NO: 3363456 - DNA, 25 bp, Homo sapien
gcctgctccacacatggaggcagaa

SEQ ID NO: 3363457 - DNA, 25 bp, Homo sapien
gcagaaaggctcgagaatggccccg

SEQ ID NO: 3363458 - DNA, 25 bp, Homo sapien
tctaagtgtctccaagtagccacag

SEQ ID NO: 3363459 - DNA, 25 bp, Homo sapien
ctttcaactggtccttgagttatca

SEQ ID NO: 3363460 - DNA, 25 bp, Homo sapien
ggagggtcctccagtctttcaactg

SEQ ID NO: 3363461 - DNA, 25 bp, Homo sapien
tataatgtcagcagctgcctagcag

SEQ ID NO: 3363462 - DNA, 25 bp, Homo sapien
catgtttcctggtggtataatgtca

SEQ ID NO: 3363463 - DNA, 25 bp, Homo sapien
cctttgatggcattaggtgtgcgag

SEQ ID NO: 3363464 - DNA, 25 bp, Homo sapien
tgaaaggtcaatctcatgaaatggg

SEQ ID NO: 3363465 - DNA, 25 bp, Homo sapien
ggtgtgcgagtatcaaatgccttca

SEQ ID NO: 3363466 - DNA, 25 bp, Homo sapien
ccttcagcagatagcaacagtgtta

SEQ ID NO: 3363467 - DNA, 25 bp, Homo sapien
tctttgtcaactccgctctttcttg

SEQ ID NO: 3363468 - DNA, 25 bp, Homo sapien
gaatactaaactgataaaggagtta

SEQ ID NO: 3363469 - DNA, 25 bp, Homo sapien
agggaatactaaactgataaaggag

SEQ ID NO: 3363470 - DNA, 25 bp, Homo sapien
gtcaactccgctctttcttgcttat

SEQ ID NO: 3363471 - DNA, 25 bp, Homo sapien
tctgcgtgcgtggtgaagttaaaca

SEQ ID NO: 3363472 - DNA, 25 bp, Homo sapien
gagaacctgcagtcgatatgaaaac

SEQ ID NO: 3363473 - DNA, 25 bp, Homo sapien
tctgggcctggtagggataactgca

SEQ ID NO: 3363474 - DNA, 25 bp, Homo sapien
gcagaccgagtcacagccataagga

SEQ ID NO: 3363475 - DNA, 25 bp, Homo sapien
gagagggtggcaaacgcacccagac

SEQ ID NO: 3363476 - DNA, 25 bp, Homo sapien
ccgcttcttagggaacaaggaggag

SEQ ID NO: 3363477 - DNA, 25 bp, Homo sapien
actgacccgggcgtttcacctggtg

SEQ ID NO: 3363478 - DNA, 25 bp, Homo sapien
ctggtgcccgaccacggctctggcg

SEQ ID NO: 3363479 - DNA, 25 bp, Homo sapien
tgagaacagtccagatcgaaagcaa

SEQ ID NO: 3363480 - DNA, 25 bp, Homo sapien
caattccgcaaggtataagtgttgc

SEQ ID NO: 3363481 - DNA, 25 bp, Homo sapien
ttttcacgctaccaatacaattccg

SEQ ID NO: 3363482 - DNA, 25 bp, Homo sapien
cgtcagttgaataatcgcaggagca

SEQ ID NO: 3363483 - DNA, 25 bp, Homo sapien
tgaattaaaacatccgccactcgcc

SEQ ID NO: 3363484 - DNA, 25 bp, Homo sapien
gccactcgccctgctatgatcagct

SEQ ID NO: 3363485 - DNA, 25 bp, Homo sapien
tgatcagctcccacaacatattgat

SEQ ID NO: 3363486 - DNA, 25 bp, Homo sapien
tatacataactaaacgttttgtatc

SEQ ID NO: 3363487 - DNA, 25 bp, Homo sapien
caatgatgtagaatgtgccacgggt

SEQ ID NO: 3363488 - DNA, 25 bp, Homo sapien
gagccagccacttatgagataccca

SEQ ID NO: 3363489 - DNA, 25 bp, Homo sapien
cacgggtgctactagccagggcagt

SEQ ID NO: 3363490 - DNA, 25 bp, Homo sapien
tacagggccatcatcgtcaaactat

SEQ ID NO: 3363491 - DNA, 25 bp, Homo sapien
tgctgcctaaaggatgagagtttcc

SEQ ID NO: 3363492 - DNA, 25 bp, Homo sapien
gtgacagcagcccatcttagccctt

SEQ ID NO: 3363493 - DNA, 25 bp, Homo sapien
agttccctctgaggctgccggctct

SEQ ID NO: 3363494 - DNA, 25 bp, Homo sapien
gacccacgcagagacttttaaccag

SEQ ID NO: 3363495 - DNA, 25 bp, Homo sapien
tctttggccaaattggccgagtgca

SEQ ID NO: 3363496 - DNA, 25 bp, Homo sapien
tgtcaccggtgtaaaaacaacagag

SEQ ID NO: 3363497 - DNA, 25 bp, Homo sapien
cagcatcctgctcttctacagaggt

SEQ ID NO: 3363498 - DNA, 25 bp, Homo sapien
ttctggtggaactctttcacggaga

SEQ ID NO: 3363499 - DNA, 25 bp, Homo sapien
ctgcagcagaatcctgctcctcaca

SEQ ID NO: 3363500 - DNA, 25 bp, Homo sapien
tgcagcagaatcctgctcctcacag

SEQ ID NO: 3363501 - DNA, 25 bp, Homo sapien
agaatcctgctcctcacaggtgcag

SEQ ID NO: 3363502 - DNA, 25 bp, Homo sapien
agcagaatcctgctcctcacaggtg

SEQ ID NO: 3363503 - DNA, 25 bp, Homo sapien
tctgcttccatagtgaccagtttcc

SEQ ID NO: 3363504 - DNA, 25 bp, Homo sapien
tttttatctggcagtagcgaggcaa

SEQ ID NO: 3363505 - DNA, 25 bp, Homo sapien
tatctggcagtagcgaggcaatgag

SEQ ID NO: 3363506 - DNA, 25 bp, Homo sapien
gaggccacgattggttctgaactcc

SEQ ID NO: 3363507 - DNA, 25 bp, Homo sapien
gcagcaaggttaggccaggtgagag

SEQ ID NO: 3363508 - DNA, 25 bp, Homo sapien
ggccacgctccagtggcatccgcag

SEQ ID NO: 3363509 - DNA, 25 bp, Homo sapien
gagggcagcaaggttaggccaggtg

SEQ ID NO: 3363510 - DNA, 25 bp, Homo sapien
agcctggccacgctccagtggcatc

SEQ ID NO: 3363511 - DNA, 25 bp, Homo sapien
tcaaagtctgtgtagggccaggcgc

SEQ ID NO: 3363512 - DNA, 25 bp, Homo sapien
tataaatagacaaacgcttcccgtg

SEQ ID NO: 3363513 - DNA, 25 bp, Homo sapien
tatgagcaattccatggtgaagggc

SEQ ID NO: 3363514 - DNA, 25 bp, Homo sapien
gcagcaggttgcagctttcataaca

SEQ ID NO: 3363515 - DNA, 25 bp, Homo sapien
aagcccacaccacacgttgaagccc

SEQ ID NO: 3363516 - DNA, 25 bp, Homo sapien
cagctgaagtcctgttagtcccagt

SEQ ID NO: 3363517 - DNA, 25 bp, Homo sapien
acgttgaagccccagctgaagtcct

SEQ ID NO: 3363518 - DNA, 25 bp, Homo sapien
tggccgtggtgtcaggaagcccaca

SEQ ID NO: 3363519 - DNA, 25 bp, Homo sapien
tgtgagctcagcctaatgactagtc

SEQ ID NO: 3363520 - DNA, 25 bp, Homo sapien
gactagtcctcaaagattgtccctg

SEQ ID NO: 3363521 - DNA, 25 bp, Homo sapien
tatgcaatatcagcagatccttctg

SEQ ID NO: 3363522 - DNA, 25 bp, Homo sapien
tgtccctgagtggaactgagatgtt

SEQ ID NO: 3363523 - DNA, 25 bp, Homo sapien
caaatatttgttcagcgcctaccac

SEQ ID NO: 3363524 - DNA, 25 bp, Homo sapien
gagagacatattcaacacgagcctg

SEQ ID NO: 3363525 - DNA, 25 bp, Homo sapien
cagcagcctggtgcaaagtcactga

SEQ ID NO: 3363526 - DNA, 25 bp, Homo sapien
taataattggcatggatatcagccc

SEQ ID NO: 3363527 - DNA, 25 bp, Homo sapien
tcttctagattgtccagtttacatg

SEQ ID NO: 3363528 - DNA, 25 bp, Homo sapien
cttctagattgtccagtttacatgc

SEQ ID NO: 3363529 - DNA, 25 bp, Homo sapien
tggtcatccctaggcacatgctctg

SEQ ID NO: 3363530 - DNA, 25 bp, Homo sapien
tctgttctttgtgacagccaggccc

SEQ ID NO: 3363531 - DNA, 25 bp, Homo sapien
tctcagttaattgtgacagtaggca

SEQ ID NO: 3363532 - DNA, 25 bp, Homo sapien
cagtaggcagggttcaataaaccca

SEQ ID NO: 3363533 - DNA, 25 bp, Homo sapien
taaacgcatcaacttgtcaccactg

SEQ ID NO: 3363534 - DNA, 25 bp, Homo sapien
cacgtgtgtaggactgcaattttaa

SEQ ID NO: 3363535 - DNA, 25 bp, Homo sapien
gctgaggattcatcggttcacaaca

SEQ ID NO: 3363536 - DNA, 25 bp, Homo sapien
gggaacttaacacccaagtctgtgc

SEQ ID NO: 3363537 - DNA, 25 bp, Homo sapien
tcccaagcagccgacaaacgagggc

SEQ ID NO: 3363538 - DNA, 25 bp, Homo sapien
caagcagccgacaaacgagggctct

SEQ ID NO: 3363539 - DNA, 25 bp, Homo sapien
agcagccgacaaacgagggctcttc

SEQ ID NO: 3363540 - DNA, 25 bp, Homo sapien
gcagccgacaaacgagggctcttcc

SEQ ID NO: 3363541 - DNA, 25 bp, Homo sapien
tgccaggcaccgtacaaaacattag

SEQ ID NO: 3363542 - DNA, 25 bp, Homo sapien
tagaaacagatcacgcaggttaatg

SEQ ID NO: 3363543 - DNA, 25 bp, Homo sapien
gaaggcaactggtgatatctgtcaa

SEQ ID NO: 3363544 - DNA, 25 bp, Homo sapien
tccgtggcactttgcatgatgctga

SEQ ID NO: 3363545 - DNA, 25 bp, Homo sapien
tccacctctaaaaccaccgcttctg

SEQ ID NO: 3363546 - DNA, 25 bp, Homo sapien
taaaaccaccgcttctgccactgcc

SEQ ID NO: 3363547 - DNA, 25 bp, Homo sapien
ccacatcttggaggtcctttctcac

SEQ ID NO: 3363548 - DNA, 25 bp, Homo sapien
ccaccacatcttggaggtcctttct

SEQ ID NO: 3363549 - DNA, 25 bp, Homo sapien
ttcatctgccgtacgtttacaaact

SEQ ID NO: 3363550 - DNA, 25 bp, Homo sapien
ttttcatctgccgtacgtttacaaa

SEQ ID NO: 3363551 - DNA, 25 bp, Homo sapien
tctgccgtacgtttacaaactatgt

SEQ ID NO: 3363552 - DNA, 25 bp, Homo sapien
catctgccgtacgtttacaaactat

SEQ ID NO: 3363553 - DNA, 25 bp, Homo sapien
aggaactctcctaacaagactgcac

SEQ ID NO: 3363554 - DNA, 25 bp, Homo sapien
caggaactctcctaacaagactgca

SEQ ID NO: 3363555 - DNA, 25 bp, Homo sapien
aacaagactgcacgttctggaggtc

SEQ ID NO: 3363556 - DNA, 25 bp, Homo sapien
ctcctaacaagactgcacgttctgg

SEQ ID NO: 3363557 - DNA, 25 bp, Homo sapien
tcaattgactgtggcctgttgggag

SEQ ID NO: 3363558 - DNA, 25 bp, Homo sapien
gacgaagcacaagtagcctgttttt

SEQ ID NO: 3363559 - DNA, 25 bp, Homo sapien
agactccgtgaaaaagacgaagcac

SEQ ID NO: 3363560 - DNA, 25 bp, Homo sapien
gaaaatgaacgtggaagggaagcac

SEQ ID NO: 3363561 - DNA, 25 bp, Homo sapien
tcagcaggcctaggttagagcagca

SEQ ID NO: 3363562 - DNA, 25 bp, Homo sapien
cattgtactcaaagcgggtcagcct

SEQ ID NO: 3363563 - DNA, 25 bp, Homo sapien
ccttggtctttgagagtgagtcccc

SEQ ID NO: 3363564 - DNA, 25 bp, Homo sapien
caagactcattgaccggacgggaaa

SEQ ID NO: 3363565 - DNA, 25 bp, Homo sapien
tgagttgcttctattcatcctgaaa

SEQ ID NO: 3363566 - DNA, 25 bp, Homo sapien
aacccagaatagtctttgacagcat

SEQ ID NO: 3363567 - DNA, 25 bp, Homo sapien
taatgacaaggtatttccaacccag

SEQ ID NO: 3363568 - DNA, 25 bp, Homo sapien
taactgacagatatttgtgtatgag

SEQ ID NO: 3363569 - DNA, 25 bp, Homo sapien
gcaatatagtcgttacagaaggagt

SEQ ID NO: 3363570 - DNA, 25 bp, Homo sapien
ctagggtccaatctgagaatgtgga

SEQ ID NO: 3363571 - DNA, 25 bp, Homo sapien
gacttggattggagagctagcaata

SEQ ID NO: 3363572 - DNA, 25 bp, Homo sapien
tgagaatgtggaatagcaaagactt

SEQ ID NO: 3363573 - DNA, 25 bp, Homo sapien
cacggaaatctcagtcaaggcagca

SEQ ID NO: 3363574 - DNA, 25 bp, Homo sapien
gcccagttgctaggaatcctaatga

SEQ ID NO: 3363575 - DNA, 25 bp, Homo sapien
aaccagcccacggaaatctcagtca

SEQ ID NO: 3363576 - DNA, 25 bp, Homo sapien
gaatcctaatgagttgatacttctc

SEQ ID NO: 3363577 - DNA, 25 bp, Homo sapien
gaatttccaagtgaatcaggagccg

SEQ ID NO: 3363578 - DNA, 25 bp, Homo sapien
ttcccagcgttcctcacgcgttgtt

SEQ ID NO: 3363579 - DNA, 25 bp, Homo sapien
tcaggagccgattcccaggcatctt

SEQ ID NO: 3363580 - DNA, 25 bp, Homo sapien
tcacgcgttgttaaggcgtggcccc

SEQ ID NO: 3363581 - DNA, 25 bp, Homo sapien
tgttcctttgctgatacccacgccc

SEQ ID NO: 3363582 - DNA, 25 bp, Homo sapien
gcccagcaccatgtggtgatcccag

SEQ ID NO: 3363583 - DNA, 25 bp, Homo sapien
gcaccatgtggtgatcccagctcag

SEQ ID NO: 3363584 - DNA, 25 bp, Homo sapien
gtttctccttgcctagagctatgtt

SEQ ID NO: 3363585 - DNA, 25 bp, Homo sapien
aatctgtccattaaaagcggatact

SEQ ID NO: 3363586 - DNA, 25 bp, Homo sapien
tctgtccattaaaagcggatacttt

SEQ ID NO: 3363587 - DNA, 25 bp, Homo sapien
ttcagactaccaaattgattaacaa

SEQ ID NO: 3363588 - DNA, 25 bp, Homo sapien
caaagtggcaggaagtaaattagaa

SEQ ID NO: 3363589 - DNA, 25 bp, Homo sapien
ccttagtgattttggaggctcaaga

SEQ ID NO: 3363590 - DNA, 25 bp, Homo sapien
taacattgtctcatctctggcatct

SEQ ID NO: 3363591 - DNA, 25 bp, Homo sapien
cgcccgtgacacagcttcatgaaat

SEQ ID NO: 3363592 - DNA, 25 bp, Homo sapien
gtaataaactcccatagaagactgt

SEQ ID NO: 3363593 - DNA, 25 bp, Homo sapien
cttgctctggatcaactgaaattca

SEQ ID NO: 3363594 - DNA, 25 bp, Homo sapien
ttgctctggatcaactgaaattcag

SEQ ID NO: 3363595 - DNA, 25 bp, Homo sapien
aatggtctcttgcatgccacttcat

SEQ ID NO: 3363596 - DNA, 25 bp, Homo sapien
ctataatggtctcttgcatgccact

SEQ ID NO: 3363597 - DNA, 25 bp, Homo sapien
tgccacttcattcttcttagtccca

SEQ ID NO: 3363598 - DNA, 25 bp, Homo sapien
ggtctcttgcatgccacttcattct

SEQ ID NO: 3363599 - DNA, 25 bp, Homo sapien
caacctgtttctgaccacggcctcc

SEQ ID NO: 3363600 - DNA, 25 bp, Homo sapien
tgtgtgcccctccaattcaacctgt

SEQ ID NO: 3363601 - DNA, 25 bp, Homo sapien
tgtgcccctccaattcaacctgttt

SEQ ID NO: 3363602 - DNA, 25 bp, Homo sapien
aatgtgtgcccctccaattcaacct

SEQ ID NO: 3363603 - DNA, 25 bp, Homo sapien
tttctgaccacagcctccatcactt

SEQ ID NO: 3363604 - DNA, 25 bp, Homo sapien
tctgaccacagcctccatcacttac

SEQ ID NO: 3363605 - DNA, 25 bp, Homo sapien
ctgtttctgaccacagcctccatca

SEQ ID NO: 3363606 - DNA, 25 bp, Homo sapien
tgtttctgaccacagcctccatcac

SEQ ID NO: 3363607 - DNA, 25 bp, Homo sapien
gctggacaaagccaacacatgcgct

SEQ ID NO: 3363608 - DNA, 25 bp, Homo sapien
ccgagggtcatcaggtagattcaca

SEQ ID NO: 3363609 - DNA, 25 bp, Homo sapien
tgacaatgattgtttcaagcctgcc

SEQ ID NO: 3363610 - DNA, 25 bp, Homo sapien
tgcgctatccatggcagtacccaag

SEQ ID NO: 3363611 - DNA, 25 bp, Homo sapien
gaaatgtcatactgacagccagtga

SEQ ID NO: 3363612 - DNA, 25 bp, Homo sapien
gccgtctagagtcctatgtgctcat

SEQ ID NO: 3363613 - DNA, 25 bp, Homo sapien
tttgagcaacaagaaatctcccgtg

SEQ ID NO: 3363614 - DNA, 25 bp, Homo sapien
tgagacttggtgcagtgacggctcc

SEQ ID NO: 3363615 - DNA, 25 bp, Homo sapien
ggcgatggcgccctggcagcatcat

SEQ ID NO: 3363616 - DNA, 25 bp, Homo sapien
atccacacataccagtgcgtatgga

SEQ ID NO: 3363617 - DNA, 25 bp, Homo sapien
accagtgcgtatggagaaatgggct

SEQ ID NO: 3363618 - DNA, 25 bp, Homo sapien
cgtatggagaaatgggctgtaggcc

SEQ ID NO: 3363619 - DNA, 25 bp, Homo sapien
gaagctcaactgatatgcataggga

SEQ ID NO: 3363620 - DNA, 25 bp, Homo sapien
tctactctcaagttacaggcagctc

SEQ ID NO: 3363621 - DNA, 25 bp, Homo sapien
aggtttgagcctttgaccatgccca

SEQ ID NO: 3363622 - DNA, 25 bp, Homo sapien
tcaattgcaactacctgactggaag

SEQ ID NO: 3363623 - DNA, 25 bp, Homo sapien
gagcatggaaacaatacatggaatc

SEQ ID NO: 3363624 - DNA, 25 bp, Homo sapien
gcatgaaaagtagcgtcaaaggaaa

SEQ ID NO: 3363625 - DNA, 25 bp, Homo sapien
ttgcatgaaaagtagcgtcaaagga

SEQ ID NO: 3363626 - DNA, 25 bp, Homo sapien
aaatagagttcttttgtgagcatgg

SEQ ID NO: 3363627 - DNA, 25 bp, Homo sapien
tgtcggcatactgtttcagcatggc

SEQ ID NO: 3363628 - DNA, 25 bp, Homo sapien
tgtgcataaattcaagcttgtcggc

SEQ ID NO: 3363629 - DNA, 25 bp, Homo sapien
tcagcatggcacaaagcgactggat

SEQ ID NO: 3363630 - DNA, 25 bp, Homo sapien
taacccgggtaagaatgtgcataaa

SEQ ID NO: 3363631 - DNA, 25 bp, Homo sapien
tattttaatactgacttagccaaga

SEQ ID NO: 3363632 - DNA, 25 bp, Homo sapien
cacagtgttccaatcagatttcacc

SEQ ID NO: 3363633 - DNA, 25 bp, Homo sapien
tttgagtgtcctacttgtctacaga

SEQ ID NO: 3363634 - DNA, 25 bp, Homo sapien
caagaagagcaaacacgcagaaggt

SEQ ID NO: 3363635 - DNA, 25 bp, Homo sapien
tgacacgccatgtcatcatcaacac

SEQ ID NO: 3363636 - DNA, 25 bp, Homo sapien
ggtgctgtggagtatgcatacaaga

SEQ ID NO: 3363637 - DNA, 25 bp, Homo sapien
caagaagtcggcctccactggtatt

SEQ ID NO: 3363638 - DNA, 25 bp, Homo sapien
tgtctgtctcaatgccacagtccag

SEQ ID NO: 3363639 - DNA, 25 bp, Homo sapien
tgggttttccagttagacttctaca

SEQ ID NO: 3363640 - DNA, 25 bp, Homo sapien
tcttcaccatggctcagaagcacac

SEQ ID NO: 3363641 - DNA, 25 bp, Homo sapien
cttcttcaccatggctcagaagcac

SEQ ID NO: 3363642 - DNA, 25 bp, Homo sapien
ttcaccatggctcagaagcacacaa

SEQ ID NO: 3363643 - DNA, 25 bp, Homo sapien
caaaactgctccttttgctgtgatc

SEQ ID NO: 3363644 - DNA, 25 bp, Homo sapien
atctgtaccagaccgagatgtcatt

SEQ ID NO: 3363645 - DNA, 25 bp, Homo sapien
gtttccctgaggtttgctgcatcga

SEQ ID NO: 3363646 - DNA, 25 bp, Homo sapien
catcacgcatcaattccacaatttc

SEQ ID NO: 3363647 - DNA, 25 bp, Homo sapien
tttattcctgacttcatatttcaag

SEQ ID NO: 3363648 - DNA, 25 bp, Homo sapien
gctaaatcttggtgggaaacatccc

SEQ ID NO: 3363649 - DNA, 25 bp, Homo sapien
tcacactcagaggaaatgcgtttct

SEQ ID NO: 3363650 - DNA, 25 bp, Homo sapien
gagaaccttccacattaacgtacag

SEQ ID NO: 3363651 - DNA, 25 bp, Homo sapien
caaaatgatgtctttcacagcggtt

SEQ ID NO: 3363652 - DNA, 25 bp, Homo sapien
caggcaacagagcacatgaggatac

SEQ ID NO: 3363653 - DNA, 25 bp, Homo sapien
catactgtgtgactgcgcgaggtct

SEQ ID NO: 3363654 - DNA, 25 bp, Homo sapien
caagcatacagataggaggccagca

SEQ ID NO: 3363655 - DNA, 25 bp, Homo sapien
cgttcacagtgtatcagaggacctg

SEQ ID NO: 3363656 - DNA, 25 bp, Homo sapien
tccattttataactgttgtccaggg

SEQ ID NO: 3363657 - DNA, 25 bp, Homo sapien
cagggatattccagagtccattgat

SEQ ID NO: 3363658 - DNA, 25 bp, Homo sapien
tgattcgcttccatgtatgatcttt

SEQ ID NO: 3363659 - DNA, 25 bp, Homo sapien
tattatacataaacccatctcagga

SEQ ID NO: 3363660 - DNA, 25 bp, Homo sapien
gactaggtttccaactatgggtcac

SEQ ID NO: 3363661 - DNA, 25 bp, Homo sapien
taatcctatagagcgattcgggagg

SEQ ID NO: 3363662 - DNA, 25 bp, Homo sapien
tagccccatgttaaagacgaggttc

SEQ ID NO: 3363663 - DNA, 25 bp, Homo sapien
tttgtccccggactgaaaactggca

SEQ ID NO: 3363664 - DNA, 25 bp, Homo sapien
gattttgaatccactgagttttcag

SEQ ID NO: 3363665 - DNA, 25 bp, Homo sapien
ttttaatggattttgaatccactga

SEQ ID NO: 3363666 - DNA, 25 bp, Homo sapien
taatggattttgaatccactgagtt

SEQ ID NO: 3363667 - DNA, 25 bp, Homo sapien
ggattttgaatccactgagttttca

SEQ ID NO: 3363668 - DNA, 25 bp, Homo sapien
aaactcactgaagtgctgcttagca

SEQ ID NO: 3363669 - DNA, 25 bp, Homo sapien
cctccattagctagtgcccagcggg

SEQ ID NO: 3363670 - DNA, 25 bp, Homo sapien
gagcagagctttggttcccgcaaaa

SEQ ID NO: 3363671 - DNA, 25 bp, Homo sapien
agcaccaaatccacactcctgggag

SEQ ID NO: 3363672 - DNA, 25 bp, Homo sapien
agaggcaggtgcagggcacacccac

SEQ ID NO: 3363673 - DNA, 25 bp, Homo sapien
tgagaatgggggaagaggcaggtgc

SEQ ID NO: 3363674 - DNA, 25 bp, Homo sapien
gggaagaggcaggtgcagggcacac

SEQ ID NO: 3363675 - DNA, 25 bp, Homo sapien
agaatgggggaagaggcaggtgcag

SEQ ID NO: 3363676 - DNA, 25 bp, Homo sapien
tatgagctgcgagcactcacgaaac

SEQ ID NO: 3363677 - DNA, 25 bp, Homo sapien
tgtggccacggatacacagccacag

SEQ ID NO: 3363678 - DNA, 25 bp, Homo sapien
ctgggatttcaaggcgacgccaacc

SEQ ID NO: 3363679 - DNA, 25 bp, Homo sapien
tgtgagcagggctcgctaactcctc

SEQ ID NO: 3363680 - DNA, 25 bp, Homo sapien
ctgcagggccgaaaaggaattggag

SEQ ID NO: 3363681 - DNA, 25 bp, Homo sapien
tgcagggccgaaaaggaattggagt

SEQ ID NO: 3363682 - DNA, 25 bp, Homo sapien
aatagcacccatccgctaggagccg

SEQ ID NO: 3363683 - DNA, 25 bp, Homo sapien
ctcacaatagcacccatccgctagg

SEQ ID NO: 3363684 - DNA, 25 bp, Homo sapien
ttctacaaccgcctcacaatagcac

SEQ ID NO: 3363685 - DNA, 25 bp, Homo sapien
gagccgcgtctgcactgcttccgcg

SEQ ID NO: 3363686 - DNA, 25 bp, Homo sapien
agttatgctgtttggatgggagatc

SEQ ID NO: 3363687 - DNA, 25 bp, Homo sapien
gcagagttatgctgtttggatggga

SEQ ID NO: 3363688 - DNA, 25 bp, Homo sapien
tgtgtgagttgaatgttgctatgaa

SEQ ID NO: 3363689 - DNA, 25 bp, Homo sapien
gaatgttgctatgaatcattatccc

SEQ ID NO: 3363690 - DNA, 25 bp, Homo sapien
tcagtgcagcaacgtttgaatcagt

SEQ ID NO: 3363691 - DNA, 25 bp, Homo sapien
gctgtcaacaggtgcatctgctgat

SEQ ID NO: 3363692 - DNA, 25 bp, Homo sapien
ccacggtgagatatcggagacagca

SEQ ID NO: 3363693 - DNA, 25 bp, Homo sapien
gaatcagtgcactcattcccacggt

SEQ ID NO: 3363694 - DNA, 25 bp, Homo sapien
aaaattagctttggtgtaaattcag

SEQ ID NO: 3363695 - DNA, 25 bp, Homo sapien
aattcaggagaaatcgccttattaa

SEQ ID NO: 3363696 - DNA, 25 bp, Homo sapien
aattagctttggtgtaaattcagga

SEQ ID NO: 3363697 - DNA, 25 bp, Homo sapien
gagaaatcgccttattaattaatca

SEQ ID NO: 3363698 - DNA, 25 bp, Homo sapien
ccagaaaagatgattatggccttta

SEQ ID NO: 3363699 - DNA, 25 bp, Homo sapien
aaattactcaagatattaaccagaa

SEQ ID NO: 3363700 - DNA, 25 bp, Homo sapien
caagatattaaccagaaaagatgat

SEQ ID NO: 3363701 - DNA, 25 bp, Homo sapien
tattaaccagaaaagatgattatgg

SEQ ID NO: 3363702 - DNA, 25 bp, Homo sapien
tataggcacattttagtagactgct

SEQ ID NO: 3363703 - DNA, 25 bp, Homo sapien
agtaggccataacttctttgcaaaa

SEQ ID NO: 3363704 - DNA, 25 bp, Homo sapien
tgagactagtcttcctataggcaca

SEQ ID NO: 3363705 - DNA, 25 bp, Homo sapien
cagaaggtaacagcatgagactagt

SEQ ID NO: 3363706 - DNA, 25 bp, Homo sapien
tttcgcagatggctttcggctccca

SEQ ID NO: 3363707 - DNA, 25 bp, Homo sapien
tgatggttgatatttcgcagatggc

SEQ ID NO: 3363708 - DNA, 25 bp, Homo sapien
aaggagcttctctaactgatggttg

SEQ ID NO: 3363709 - DNA, 25 bp, Homo sapien
ccctggtcaaggagcttctctaact

SEQ ID NO: 3363710 - DNA, 25 bp, Homo sapien
tatcatctctattactggagacagg

SEQ ID NO: 3363711 - DNA, 25 bp, Homo sapien
ataaccttgtccttagatagcccaa

SEQ ID NO: 3363712 - DNA, 25 bp, Homo sapien
tcacaaagttgctagggagctgctc

SEQ ID NO: 3363713 - DNA, 25 bp, Homo sapien
tctgggacatgtcaaggcttggttt

SEQ ID NO: 3363714 - DNA, 25 bp, Homo sapien
gtttcaccatatcgcccaaggctgg

SEQ ID NO: 3363715 - DNA, 25 bp, Homo sapien
gggctcaagggatctacttgcctca

SEQ ID NO: 3363716 - DNA, 25 bp, Homo sapien
agcctcccgaagtgctatgattaca

SEQ ID NO: 3363717 - DNA, 25 bp, Homo sapien
ggggtttcaccatatcgcccaaggc

SEQ ID NO: 3363718 - DNA, 25 bp, Homo sapien
cttctgatactctagcatgaaaatg

SEQ ID NO: 3363719 - DNA, 25 bp, Homo sapien
caatcatcttctgaagcatggtaaa

SEQ ID NO: 3363720 - DNA, 25 bp, Homo sapien
tcttctgaagcatggtaaaaagtaa

SEQ ID NO: 3363721 - DNA, 25 bp, Homo sapien
ttccccaaagcttctgatactctag

SEQ ID NO: 3363722 - DNA, 25 bp, Homo sapien
gcttgaacatctgaataatcttgat

SEQ ID NO: 3363723 - DNA, 25 bp, Homo sapien
cctttacgtttggttcttgagcttg

SEQ ID NO: 3363724 - DNA, 25 bp, Homo sapien
attagataagaaatatgctgcattc

SEQ ID NO: 3363725 - DNA, 25 bp, Homo sapien
tacgtttggttcttgagcttgaaca

SEQ ID NO: 3363726 - DNA, 25 bp, Homo sapien
aaaataagtgacaaataataaaatg

SEQ ID NO: 3363727 - DNA, 25 bp, Homo sapien
aaataagtgacaaataataaaatgt

SEQ ID NO: 3363728 - DNA, 25 bp, Homo sapien
aataagtgacaaataataaaatgta

SEQ ID NO: 3363729 - DNA, 25 bp, Homo sapien
ataagtgacaaataataaaatgtac

SEQ ID NO: 3363730 - DNA, 25 bp, Homo sapien
ctgaggttgtaagtacgctgagcga

SEQ ID NO: 3363731 - DNA, 25 bp, Homo sapien
tggtgaaactgaggttgtaagtacg

SEQ ID NO: 3363732 - DNA, 25 bp, Homo sapien
tacgctgagcgagtgtgaagaaccg

SEQ ID NO: 3363733 - DNA, 25 bp, Homo sapien
agaaccggggctggccaactagatg

SEQ ID NO: 3363734 - DNA, 25 bp, Homo sapien
gttgacattcagaggctcgcaccag

SEQ ID NO: 3363735 - DNA, 25 bp, Homo sapien
caagtcttgggaactactggatcaa

SEQ ID NO: 3363736 - DNA, 25 bp, Homo sapien
gccaggcactacagtctaacacaga

SEQ ID NO: 3363737 - DNA, 25 bp, Homo sapien
aaaccagtggaagactgtcagtgcc

SEQ ID NO: 3363738 - DNA, 25 bp, Homo sapien
tggaccaacaaaaaaatgaggggca

SEQ ID NO: 3363739 - DNA, 25 bp, Homo sapien
tcaatgttgcgcagccagtaagtgg

SEQ ID NO: 3363740 - DNA, 25 bp, Homo sapien
tatcggagcttgaagataacctggg

SEQ ID NO: 3363741 - DNA, 25 bp, Homo sapien
taccctgccttcactgagtatcgga

SEQ ID NO: 3363742 - DNA, 25 bp, Homo sapien
cccaggcagctgaattctagaatct

SEQ ID NO: 3363743 - DNA, 25 bp, Homo sapien
tcctggacttcaatcatacgctgcc

SEQ ID NO: 3363744 - DNA, 25 bp, Homo sapien
tcatcctggacttcaatcatacgct

SEQ ID NO: 3363745 - DNA, 25 bp, Homo sapien
ctgccttttcttttcgatatctgaa

SEQ ID NO: 3363746 - DNA, 25 bp, Homo sapien
gacttcaatcatacgctgccttttc

SEQ ID NO: 3363747 - DNA, 25 bp, Homo sapien
atttgtcaacatctggctttcttta

SEQ ID NO: 3363748 - DNA, 25 bp, Homo sapien
cttagcattcttccttttcagattt

SEQ ID NO: 3363749 - DNA, 25 bp, Homo sapien
ttcagatttgtcaacatctggcttt

SEQ ID NO: 3363750 - DNA, 25 bp, Homo sapien
cagatttgtcaacatctggctttct

SEQ ID NO: 3363751 - DNA, 25 bp, Homo sapien
tggctgccttacaaactttagattc

SEQ ID NO: 3363752 - DNA, 25 bp, Homo sapien
cattaacataaaatgtggcgatggc

SEQ ID NO: 3363753 - DNA, 25 bp, Homo sapien
ggcgatggctgccttacaaacttta

SEQ ID NO: 3363754 - DNA, 25 bp, Homo sapien
gaattgttctttaacattaacataa

SEQ ID NO: 3363755 - DNA, 25 bp, Homo sapien
gcgagcatagtagcaaacaggttgt

SEQ ID NO: 3363756 - DNA, 25 bp, Homo sapien
ctgcatgacactgacgtttggggta

SEQ ID NO: 3363757 - DNA, 25 bp, Homo sapien
accccaccactcaggtagcgagcat

SEQ ID NO: 3363758 - DNA, 25 bp, Homo sapien
tgttatatgggcatactgcatgaca

SEQ ID NO: 3363759 - DNA, 25 bp, Homo sapien
ccgctggactgagtagtgtgatcat

SEQ ID NO: 3363760 - DNA, 25 bp, Homo sapien
tcacccccgctggactgagtagtgt

SEQ ID NO: 3363761 - DNA, 25 bp, Homo sapien
ccccgctggactgagtagtgtgatc

SEQ ID NO: 3363762 - DNA, 25 bp, Homo sapien
ctgtcacccccgctggactgagtag

SEQ ID NO: 3363763 - DNA, 25 bp, Homo sapien
gaatgttacctagcaatgaagtgga

SEQ ID NO: 3363764 - DNA, 25 bp, Homo sapien
atcctggaggtgatgcaatacacaa

SEQ ID NO: 3363765 - DNA, 25 bp, Homo sapien
cccaaaaggttgcacacgatacagt

SEQ ID NO: 3363766 - DNA, 25 bp, Homo sapien
tatcccagagaaatggaagctcagg

SEQ ID NO: 3363767 - DNA, 25 bp, Homo sapien
gtccctgtgtcctcaagactgaaac

SEQ ID NO: 3363768 - DNA, 25 bp, Homo sapien
caaacccccatgctggagaatgatg

SEQ ID NO: 3363769 - DNA, 25 bp, Homo sapien
cccatgctggagaatgatgacccag

SEQ ID NO: 3363770 - DNA, 25 bp, Homo sapien
ttccccagccaaacccccatgctgg

SEQ ID NO: 3363771 - DNA, 25 bp, Homo sapien
cccccatgctggagaatgatgaccc

SEQ ID NO: 3363772 - DNA, 25 bp, Homo sapien
acaatattcaactccttgatgtcac

SEQ ID NO: 3363773 - DNA, 25 bp, Homo sapien
aatattcaactccttgatgtcactg

SEQ ID NO: 3363774 - DNA, 25 bp, Homo sapien
caatattcaactccttgatgtcact

SEQ ID NO: 3363775 - DNA, 25 bp, Homo sapien
tggacaccaaatgtgcacaatgtca

SEQ ID NO: 3363776 - DNA, 25 bp, Homo sapien
ttctggacaccaaatgtgcacaatg

SEQ ID NO: 3363777 - DNA, 25 bp, Homo sapien
gacaccaaatgtgcacaatgtcaga

SEQ ID NO: 3363778 - DNA, 25 bp, Homo sapien
tccttctggacaccaaatgtgcaca

SEQ ID NO: 3363779 - DNA, 25 bp, Homo sapien
atccctgtgcacagtctcgcaaacc

SEQ ID NO: 3363780 - DNA, 25 bp, Homo sapien
gcacagtctcgcaaacccctacata

SEQ ID NO: 3363781 - DNA, 25 bp, Homo sapien
tgctgtctcgctggttctcctattt

SEQ ID NO: 3363782 - DNA, 25 bp, Homo sapien
actgctgtctcgctggttctcctat

SEQ ID NO: 3363783 - DNA, 25 bp, Homo sapien
ttcttccttttgtcatgagatatct

SEQ ID NO: 3363784 - DNA, 25 bp, Homo sapien
ctgagcctatggctttacttcttga

SEQ ID NO: 3363785 - DNA, 25 bp, Homo sapien
ttttgtcatgagatatcttcccttt

SEQ ID NO: 3363786 - DNA, 25 bp, Homo sapien
gagcctatggctttacttcttgatt

SEQ ID NO: 3363787 - DNA, 25 bp, Homo sapien
cccatgtgccaggttgagaccacat

SEQ ID NO: 3363788 - DNA, 25 bp, Homo sapien
tccttgtctgagtactgcccatgtg

SEQ ID NO: 3363789 - DNA, 25 bp, Homo sapien
gagaccacataaagcctaccagaag

SEQ ID NO: 3363790 - DNA, 25 bp, Homo sapien
aagcctaccagaagcactatcatgg

SEQ ID NO: 3363791 - DNA, 25 bp, Homo sapien
tgggattaaaggcatgcaccactcc

SEQ ID NO: 3363792 - DNA, 25 bp, Homo sapien
gggattaaaggcatgcaccactcca

SEQ ID NO: 3363793 - DNA, 25 bp, Homo sapien
ttaaaggcatgcaccactccatcca

SEQ ID NO: 3363794 - DNA, 25 bp, Homo sapien
gattaaaggcatgcaccactccatc

SEQ ID NO: 3363795 - DNA, 25 bp, Homo sapien
ttagaagtgacagactcagctggtt

SEQ ID NO: 3363796 - DNA, 25 bp, Homo sapien
gtttctctgaaagttctgaagacgc

SEQ ID NO: 3363797 - DNA, 25 bp, Homo sapien
catgacgttgtgtacttattttctc

SEQ ID NO: 3363798 - DNA, 25 bp, Homo sapien
tgaagacgctgtggttcgaataacc

SEQ ID NO: 3363799 - DNA, 25 bp, Homo sapien
ttgcttcatttccagaagtgtctga

SEQ ID NO: 3363800 - DNA, 25 bp, Homo sapien
tgcttcatttccagaagtgtctgaa

SEQ ID NO: 3363801 - DNA, 25 bp, Homo sapien
aagagagagacagtccacaatgttt

SEQ ID NO: 3363802 - DNA, 25 bp, Homo sapien
atagctgtgctatgtaaaggaggat

SEQ ID NO: 3363803 - DNA, 25 bp, Homo sapien
gcatatatagctgtgctatgtaaag

SEQ ID NO: 3363804 - DNA, 25 bp, Homo sapien
tatatagctgtgctatgtaaaggag

SEQ ID NO: 3363805 - DNA, 25 bp, Homo sapien
cagaattatcaggaaagtcgaacac

SEQ ID NO: 3363806 - DNA, 25 bp, Homo sapien
caataggcttgcacttttgaccagc

SEQ ID NO: 3363807 - DNA, 25 bp, Homo sapien
cttgagacatcagaattatcaggaa

SEQ ID NO: 3363808 - DNA, 25 bp, Homo sapien
agtcgaacacgtcaataggcttgca

SEQ ID NO: 3363809 - DNA, 25 bp, Homo sapien
atctttcatggaatgtgttctttct

SEQ ID NO: 3363810 - DNA, 25 bp, Homo sapien
taaagtgttctttgaacgtcttgcg

SEQ ID NO: 3363811 - DNA, 25 bp, Homo sapien
tctaaagtgttctttgaacgtcttg

SEQ ID NO: 3363812 - DNA, 25 bp, Homo sapien
ctttcatggaatgtgttctttctaa

SEQ ID NO: 3363813 - DNA, 25 bp, Homo sapien
tcttcagatcgtcttggcgtatggc

SEQ ID NO: 3363814 - DNA, 25 bp, Homo sapien
cgggggaactcctgttctcttcaga

SEQ ID NO: 3363815 - DNA, 25 bp, Homo sapien
tgttctcttcagatcgtcttggcgt

SEQ ID NO: 3363816 - DNA, 25 bp, Homo sapien
tcagatcgtcttggcgtatggcttt

SEQ ID NO: 3363817 - DNA, 25 bp, Homo sapien
tcagacctgtgaggccgcggccgcc

SEQ ID NO: 3363818 - DNA, 25 bp, Homo sapien
ccctcagacctgtgaggccgcggcc

SEQ ID NO: 3363819 - DNA, 25 bp, Homo sapien
cctcagacctgtgaggccgcggccg

SEQ ID NO: 3363820 - DNA, 25 bp, Homo sapien
ctcagacctgtgaggccgcggccgc

SEQ ID NO: 3363821 - DNA, 25 bp, Homo sapien
gctctcgagcgactggaagctcccg

SEQ ID NO: 3363822 - DNA, 25 bp, Homo sapien
tacctacggtccaaaacatgccaaa

SEQ ID NO: 3363823 - DNA, 25 bp, Homo sapien
ttattacagcgcaacggagctggag

SEQ ID NO: 3363824 - DNA, 25 bp, Homo sapien
tgccgcacaaccagttacctacggt

SEQ ID NO: 3363825 - DNA, 25 bp, Homo sapien
cagaaagcccgggagccacgtggga

SEQ ID NO: 3363826 - DNA, 25 bp, Homo sapien
tccctgagtcgtgggcaggtaagag

SEQ ID NO: 3363827 - DNA, 25 bp, Homo sapien
gcatcgccagttttccggcgccaga

SEQ ID NO: 3363828 - DNA, 25 bp, Homo sapien
agccacgtgggacggccccttgtgg

SEQ ID NO: 3363829 - DNA, 25 bp, Homo sapien
ccaagggaacaatccagggagaggt

SEQ ID NO: 3363830 - DNA, 25 bp, Homo sapien
taattggtagatgggagaacgcctc

SEQ ID NO: 3363831 - DNA, 25 bp, Homo sapien
aacacgttgcgtttatggctcctcc

SEQ ID NO: 3363832 - DNA, 25 bp, Homo sapien
gcatgctaacgtataagaccccaag

SEQ ID NO: 3363833 - DNA, 25 bp, Homo sapien
taaataaactttcactcggctctaa

SEQ ID NO: 3363834 - DNA, 25 bp, Homo sapien
ttaaataaactttcactcggctcta

SEQ ID NO: 3363835 - DNA, 25 bp, Homo sapien
ggctgaaaacgcaggagtggaggca

SEQ ID NO: 3363836 - DNA, 25 bp, Homo sapien
ggcagcggggtcaggagtcctaaag

SEQ ID NO: 3363837 - DNA, 25 bp, Homo sapien
agggatgggctgaaaacgcaggagt

SEQ ID NO: 3363838 - DNA, 25 bp, Homo sapien
ggaggcagcggggtcaggagtccta

SEQ ID NO: 3363839 - DNA, 25 bp, Homo sapien
agaaagggcctggagattcgacgat

SEQ ID NO: 3363840 - DNA, 25 bp, Homo sapien
gagcgcctcactttcagacgttgta

SEQ ID NO: 3363841 - DNA, 25 bp, Homo sapien
tgtcattggagcacagagcgcctca

SEQ ID NO: 3363842 - DNA, 25 bp, Homo sapien
aatactgcttcaaagtcagttcaag

SEQ ID NO: 3363843 - DNA, 25 bp, Homo sapien
tgccatgaaagagaatccacgcgtt

SEQ ID NO: 3363844 - DNA, 25 bp, Homo sapien
tagacagttattcaggcgtcacagc

SEQ ID NO: 3363845 - DNA, 25 bp, Homo sapien
tagcattcctatgagaagaaccccg

SEQ ID NO: 3363846 - DNA, 25 bp, Homo sapien
gaaccgagtccaagagcattctgcc

SEQ ID NO: 3363847 - DNA, 25 bp, Homo sapien
atagtggaatagaggtcatctatct

SEQ ID NO: 3363848 - DNA, 25 bp, Homo sapien
agtggaatagaggtcatctatctgc

SEQ ID NO: 3363849 - DNA, 25 bp, Homo sapien
ggaatagaggtcatctatctgcgac

SEQ ID NO: 3363850 - DNA, 25 bp, Homo sapien
tggaatagaggtcatctatctgcga

SEQ ID NO: 3363851 - DNA, 25 bp, Homo sapien
gaaaataattcagggtgcaatgtga

SEQ ID NO: 3363852 - DNA, 25 bp, Homo sapien
gcagctctggccttttcgccttcat

SEQ ID NO: 3363853 - DNA, 25 bp, Homo sapien
gagtcagaaggccattgtcgataga

SEQ ID NO: 3363854 - DNA, 25 bp, Homo sapien
tcgccttcattgttggagtcagaag

SEQ ID NO: 3363855 - DNA, 25 bp, Homo sapien
aatggtttcagaccagaatccttcc

SEQ ID NO: 3363856 - DNA, 25 bp, Homo sapien
ttcccaagtctcaccatatcttcga

SEQ ID NO: 3363857 - DNA, 25 bp, Homo sapien
cttcgaggatagcttttttgacatc

SEQ ID NO: 3363858 - DNA, 25 bp, Homo sapien
ctgttcaaatggtttcagaccagaa

SEQ ID NO: 3363859 - DNA, 25 bp, Homo sapien
tcaaacgacccttcaaatcctctct

SEQ ID NO: 3363860 - DNA, 25 bp, Homo sapien
caaacgacccttcaaatcctctctt

SEQ ID NO: 3363861 - DNA, 25 bp, Homo sapien
tcctcaaacgacccttcaaatcctc

SEQ ID NO: 3363862 - DNA, 25 bp, Homo sapien
tcctctcttttgggcccaggaacat

SEQ ID NO: 3363863 - DNA, 25 bp, Homo sapien
ctggtaccacaattgcaatgagaaa

SEQ ID NO: 3363864 - DNA, 25 bp, Homo sapien
gtaccacaattgcaatgagaaatgc

SEQ ID NO: 3363865 - DNA, 25 bp, Homo sapien
tggtaccacaattgcaatgagaaat

SEQ ID NO: 3363866 - DNA, 25 bp, Homo sapien
ggtaccacaattgcaatgagaaatg

SEQ ID NO: 3363867 - DNA, 25 bp, Homo sapien
ttctagatcaaacgaaaatagctgc

SEQ ID NO: 3363868 - DNA, 25 bp, Homo sapien
aacgtgcaggttagtgccatgttgg

SEQ ID NO: 3363869 - DNA, 25 bp, Homo sapien
ggaacccagcaatttgaagctgtaa

SEQ ID NO: 3363870 - DNA, 25 bp, Homo sapien
tgggaataccaatctaacaaatctc

SEQ ID NO: 3363871 - DNA, 25 bp, Homo sapien
ccggtcgataattttcaaggtgcca

SEQ ID NO: 3363872 - DNA, 25 bp, Homo sapien
gctttctccgtggacaaacacctga

SEQ ID NO: 3363873 - DNA, 25 bp, Homo sapien
tccttgtgccagcttaaatatgtgc

SEQ ID NO: 3363874 - DNA, 25 bp, Homo sapien
gagcaacaggctcacttcgcatgta

SEQ ID NO: 3363875 - DNA, 25 bp, Homo sapien
gccacagtagaattggaactgacat

SEQ ID NO: 3363876 - DNA, 25 bp, Homo sapien
ctatgggatgtgttcgtgagtgcca

SEQ ID NO: 3363877 - DNA, 25 bp, Homo sapien
gtgccacagtagaattggaactgac

SEQ ID NO: 3363878 - DNA, 25 bp, Homo sapien
caaggtccagagagactatgggatg

SEQ ID NO: 3363879 - DNA, 25 bp, Homo sapien
gaaaattcagggtgccactgccaca

SEQ ID NO: 3363880 - DNA, 25 bp, Homo sapien
gagaaaattcagggtgccactgcca

SEQ ID NO: 3363881 - DNA, 25 bp, Homo sapien
aattcagggtgccactgccacatgg

SEQ ID NO: 3363882 - DNA, 25 bp, Homo sapien
gtggaactgaactgtttgtgacctg

SEQ ID NO: 3363883 - DNA, 25 bp, Homo sapien
ttttcgctgggtccttcaagtagcc

SEQ ID NO: 3363884 - DNA, 25 bp, Homo sapien
taaccagccgtctttgtccaaagct

SEQ ID NO: 3363885 - DNA, 25 bp, Homo sapien
gtcccctgtgtgtaaccagccgtct

SEQ ID NO: 3363886 - DNA, 25 bp, Homo sapien
cttctgctgttttcgctgggtcctt

SEQ ID NO: 3363887 - DNA, 25 bp, Homo sapien
atacatttggccctttcacacacac

SEQ ID NO: 3363888 - DNA, 25 bp, Homo sapien
ctgaaatacatttggccctttcaca

SEQ ID NO: 3363889 - DNA, 25 bp, Homo sapien
tgaaatacatttggccctttcacac

SEQ ID NO: 3363890 - DNA, 25 bp, Homo sapien
aaatacatttggccctttcacacac

SEQ ID NO: 3363891 - DNA, 25 bp, Homo sapien
tgttgggaaataccacagcattcgc

SEQ ID NO: 3363892 - DNA, 25 bp, Homo sapien
gcaaaggccagcgatcacaggaaat

SEQ ID NO: 3363893 - DNA, 25 bp, Homo sapien
gaaatggcagcgagggaaaatgact

SEQ ID NO: 3363894 - DNA, 25 bp, Homo sapien
tcactaataggtacccagggcaatc

SEQ ID NO: 3363895 - DNA, 25 bp, Homo sapien
agttttatcaaattgcacggcatcg

SEQ ID NO: 3363896 - DNA, 25 bp, Homo sapien
acaagttttatcaaattgcacggca

SEQ ID NO: 3363897 - DNA, 25 bp, Homo sapien
tcgccctcggcagccatgtaattca

SEQ ID NO: 3363898 - DNA, 25 bp, Homo sapien
ttttatcaaattgcacggcatcggg

SEQ ID NO: 3363899 - DNA, 25 bp, Homo sapien
gatagcaaacaggattccacataag

SEQ ID NO: 3363900 - DNA, 25 bp, Homo sapien
gcaaatggtcattcctaagggaact

SEQ ID NO: 3363901 - DNA, 25 bp, Homo sapien
tcataacctcaggtcaaattatttt

SEQ ID NO: 3363902 - DNA, 25 bp, Homo sapien
taagggaactactcataacctcagg

SEQ ID NO: 3363903 - DNA, 25 bp, Homo sapien
gaggcttacccatgacagatgctca

SEQ ID NO: 3363904 - DNA, 25 bp, Homo sapien
tactactcaggtgacacagaggaag

SEQ ID NO: 3363905 - DNA, 25 bp, Homo sapien
tgaccagcaaataacgagaccctac

SEQ ID NO: 3363906 - DNA, 25 bp, Homo sapien
cagtgccctgacttacaagagtgtt

SEQ ID NO: 3363907 - DNA, 25 bp, Homo sapien
ccaaaaaggagcctcctacagccat

SEQ ID NO: 3363908 - DNA, 25 bp, Homo sapien
aaaaaggagcctcctacagccatac

SEQ ID NO: 3363909 - DNA, 25 bp, Homo sapien
caaaaaggagcctcctacagccata

SEQ ID NO: 3363910 - DNA, 25 bp, Homo sapien
caataacccagtatgaataacaaaa

SEQ ID NO: 3363911 - DNA, 25 bp, Homo sapien
ccggcagtgcactctgtctgtccgt

SEQ ID NO: 3363912 - DNA, 25 bp, Homo sapien
gcactctgtctgtccgtatccttca

SEQ ID NO: 3363913 - DNA, 25 bp, Homo sapien
ctgtctgtccgtatccttcataaaa

SEQ ID NO: 3363914 - DNA, 25 bp, Homo sapien
agcacccggcagtgcactctgtctg

SEQ ID NO: 3363915 - DNA, 25 bp, Homo sapien
gggcggctcctgtcaccatcagccg

SEQ ID NO: 3363916 - DNA, 25 bp, Homo sapien
gctgctctgaggaacgtcagcacag

SEQ ID NO: 3363917 - DNA, 25 bp, Homo sapien
catcagccggactcttccgcccagg

SEQ ID NO: 3363918 - DNA, 25 bp, Homo sapien
cgtcagcacagtggcagacaccggg

SEQ ID NO: 3363919 - DNA, 25 bp, Homo sapien
acacacctggaagtcggcggcctct

SEQ ID NO: 3363920 - DNA, 25 bp, Homo sapien
aagtcggcggcctctccgccaaggg

SEQ ID NO: 3363921 - DNA, 25 bp, Homo sapien
ttacacacctggaagtcggcggcct

SEQ ID NO: 3363922 - DNA, 25 bp, Homo sapien
tggaagtcggcggcctctccgccaa

SEQ ID NO: 3363923 - DNA, 25 bp, Homo sapien
agaactctgaaaagcgaagtcggtt

SEQ ID NO: 3363924 - DNA, 25 bp, Homo sapien
gtcggtttccatgggagcagtggct

SEQ ID NO: 3363925 - DNA, 25 bp, Homo sapien
tctgaaaagcgaagtcggtttccat

SEQ ID NO: 3363926 - DNA, 25 bp, Homo sapien
aagtcggtttccatgggagcagtgg

SEQ ID NO: 3363927 - DNA, 25 bp, Homo sapien
tgatgccgctgcgaagctctgcttc

SEQ ID NO: 3363928 - DNA, 25 bp, Homo sapien
aggcaaagtccaagagccatcgctt

SEQ ID NO: 3363929 - DNA, 25 bp, Homo sapien
tttgtggaagatcagccggtcccac

SEQ ID NO: 3363930 - DNA, 25 bp, Homo sapien
catcgcttcagcgtggtgtttgctt

SEQ ID NO: 3363931 - DNA, 25 bp, Homo sapien
gatggcacatggcacagcccaattc

SEQ ID NO: 3363932 - DNA, 25 bp, Homo sapien
cagtcctgggacttcgctgcttgga

SEQ ID NO: 3363933 - DNA, 25 bp, Homo sapien
tgcgtccaagtcagtgctcagtcct

SEQ ID NO: 3363934 - DNA, 25 bp, Homo sapien
gattgtccagggtcatacagatggc

SEQ ID NO: 3363935 - DNA, 25 bp, Homo sapien
gaagacagtgggttgaagcaccttg

SEQ ID NO: 3363936 - DNA, 25 bp, Homo sapien
tgaagcaccttgaggtcatccatga

SEQ ID NO: 3363937 - DNA, 25 bp, Homo sapien
ggttcagcagtcttggaaccacggg

SEQ ID NO: 3363938 - DNA, 25 bp, Homo sapien
aatccgattttagctccatgacaca

SEQ ID NO: 3363939 - DNA, 25 bp, Homo sapien
tgttcataaatgtgagcaagtggta

SEQ ID NO: 3363940 - DNA, 25 bp, Homo sapien
taaatgtgagcaagtggtaaatatg

SEQ ID NO: 3363941 - DNA, 25 bp, Homo sapien
aactgttcataaatgtgagcaagtg

SEQ ID NO: 3363942 - DNA, 25 bp, Homo sapien
cactggcactcaagggaagtgcttt

SEQ ID NO: 3363943 - DNA, 25 bp, Homo sapien
tctcaaacatatgggcgagaggcaa

SEQ ID NO: 3363944 - DNA, 25 bp, Homo sapien
actctctcaaacatatgggcgagag

SEQ ID NO: 3363945 - DNA, 25 bp, Homo sapien
tctctcaaacatatgggcgagaggc

SEQ ID NO: 3363946 - DNA, 25 bp, Homo sapien
aagaaagatatcaaagtatcatctg

SEQ ID NO: 3363947 - DNA, 25 bp, Homo sapien
tgactggatagactaagacactgga

SEQ ID NO: 3363948 - DNA, 25 bp, Homo sapien
tgccacatggacctaacacactggt

SEQ ID NO: 3363949 - DNA, 25 bp, Homo sapien
tatttcccaaatacagggacgctgg

SEQ ID NO: 3363950 - DNA, 25 bp, Homo sapien
taaagtaagtggcaagatccctcaa

SEQ ID NO: 3363951 - DNA, 25 bp, Homo sapien
ttcacaaaagctgaacaatcgctca

SEQ ID NO: 3363952 - DNA, 25 bp, Homo sapien
tgtttcggtgagtgaccattgctcc

SEQ ID NO: 3363953 - DNA, 25 bp, Homo sapien
aaaagctgaacaatcgctcactatg

SEQ ID NO: 3363954 - DNA, 25 bp, Homo sapien
caatcgctcactatgtttcggtgag

SEQ ID NO: 3363955 - DNA, 25 bp, Homo sapien
tccacttgtgaaacaaattactgca

SEQ ID NO: 3363956 - DNA, 25 bp, Homo sapien
ggcttccgtctgttggctcttccca

SEQ ID NO: 3363957 - DNA, 25 bp, Homo sapien
gcttccgtctgttggctcttcccag

SEQ ID NO: 3363958 - DNA, 25 bp, Homo sapien
tcatacagcagtcaaaaaacaccag

SEQ ID NO: 3363959 - DNA, 25 bp, Homo sapien
tgttgccgcaaaagtttcacagcct

SEQ ID NO: 3363960 - DNA, 25 bp, Homo sapien
caggtaagtgtaaaacaatgtcttc

SEQ ID NO: 3363961 - DNA, 25 bp, Homo sapien
tatccaaattagtgcactgttgccg

SEQ ID NO: 3363962 - DNA, 25 bp, Homo sapien
gaaggttctgttagaacacccgcgc

SEQ ID NO: 3363963 - DNA, 25 bp, Homo sapien
tgaaaagatcttcctccggccatgt

SEQ ID NO: 3363964 - DNA, 25 bp, Homo sapien
tccacgagccatccagggaaaagaa

SEQ ID NO: 3363965 - DNA, 25 bp, Homo sapien
tgtgcctactgggttcctcaggaaa

SEQ ID NO: 3363966 - DNA, 25 bp, Homo sapien
caactatgattttaaggcctggtat

SEQ ID NO: 3363967 - DNA, 25 bp, Homo sapien
catcgccttcatgctggtgacttcc

SEQ ID NO: 3363968 - DNA, 25 bp, Homo sapien
tgccgtaggcatccatgacaactat

SEQ ID NO: 3363969 - DNA, 25 bp, Homo sapien
taataagagtttggccttctctggc

SEQ ID NO: 3363970 - DNA, 25 bp, Homo sapien
caagggtatcataaagtggaacgat

SEQ ID NO: 3363971 - DNA, 25 bp, Homo sapien
tgttgactatgtacgtgatggcttc

SEQ ID NO: 3363972 - DNA, 25 bp, Homo sapien
tcaccatcgaataagcaaagcatcc

SEQ ID NO: 3363973 - DNA, 25 bp, Homo sapien
gactatgtacgtgatggcttcattt

SEQ ID NO: 3363974 - DNA, 25 bp, Homo sapien
tgactggcacagatggttctggctg

SEQ ID NO: 3363975 - DNA, 25 bp, Homo sapien
cggagcagccactgagagtttctca

SEQ ID NO: 3363976 - DNA, 25 bp, Homo sapien
tctggctggagagcacggagcagcc

SEQ ID NO: 3363977 - DNA, 25 bp, Homo sapien
tagtgagagcgatctgactggcaca

SEQ ID NO: 3363978 - DNA, 25 bp, Homo sapien
gtaccttgtctagcagcaaaactgt

SEQ ID NO: 3363979 - DNA, 25 bp, Homo sapien
agtaccttgtctagcagcaaaactg

SEQ ID NO: 3363980 - DNA, 25 bp, Homo sapien
aagtaccttgtctagcagcaaaact

SEQ ID NO: 3363981 - DNA, 25 bp, Homo sapien
gaagtaccttgtctagcagcaaaac

SEQ ID NO: 3363982 - DNA, 25 bp, Homo sapien
cagaagttaggctcttatatctgag

SEQ ID NO: 3363983 - DNA, 25 bp, Homo sapien
tctaaggtgtaacgtaaagctatac

SEQ ID NO: 3363984 - DNA, 25 bp, Homo sapien
aaaatctggtctctagcagaagtta

SEQ ID NO: 3363985 - DNA, 25 bp, Homo sapien
caaaatcatgcatagcaagtaccta

SEQ ID NO: 3363986 - DNA, 25 bp, Homo sapien
gatcagtgctgagcctatgcactcc

SEQ ID NO: 3363987 - DNA, 25 bp, Homo sapien
aaagatgccaatgaactgatctggg

SEQ ID NO: 3363988 - DNA, 25 bp, Homo sapien
gctgagcctatgcactccgacaatt

SEQ ID NO: 3363989 - DNA, 25 bp, Homo sapien
actgatctggggcagtcttgaagcc

SEQ ID NO: 3363990 - DNA, 25 bp, Homo sapien
gtctggagcacgtgcctgttccggg

SEQ ID NO: 3363991 - DNA, 25 bp, Homo sapien
ttcctggacagctgtgtggaagcag

SEQ ID NO: 3363992 - DNA, 25 bp, Homo sapien
gcctgtctggagcacgtgcctgttc

SEQ ID NO: 3363993 - DNA, 25 bp, Homo sapien
cagggacgggagcctttcctggaca

SEQ ID NO: 3363994 - DNA, 25 bp, Homo sapien
cccctgcttgcaagaggagtccaca

SEQ ID NO: 3363995 - DNA, 25 bp, Homo sapien
tggatgccccatgcttacggcaagg

SEQ ID NO: 3363996 - DNA, 25 bp, Homo sapien
catacactctggagaaaccttccgg

SEQ ID NO: 3363997 - DNA, 25 bp, Homo sapien
aaccttccggctccaagaatgcaca

SEQ ID NO: 3363998 - DNA, 25 bp, Homo sapien
tttccgagagcctaaacaagggcca

SEQ ID NO: 3363999 - DNA, 25 bp, Homo sapien
gccattcatagggttggtctggttt

SEQ ID NO: 3364000 - DNA, 25 bp, Homo sapien
tctggtttccgagagcctaaacaag

SEQ ID NO: 3364001 - DNA, 25 bp, Homo sapien
cgagagcctaaacaagggccattat

SEQ ID NO: 3364002 - DNA, 25 bp, Homo sapien
gctcgtcgctgtcaagtagtgcgga

SEQ ID NO: 3364003 - DNA, 25 bp, Homo sapien
ttgacacctgtattcccctctggaa

SEQ ID NO: 3364004 - DNA, 25 bp, Homo sapien
tagaaatacaccaagggctcgtcgc

SEQ ID NO: 3364005 - DNA, 25 bp, Homo sapien
gaaaccttcgtataatgttgtgaca

SEQ ID NO: 3364006 - DNA, 25 bp, Homo sapien
gaaatgcattcatggtctttttcag

SEQ ID NO: 3364007 - DNA, 25 bp, Homo sapien
tctggaatccgagaaacatggaggc

SEQ ID NO: 3364008 - DNA, 25 bp, Homo sapien
aaatctgtggctctatgaaaagacc

SEQ ID NO: 3364009 - DNA, 25 bp, Homo sapien
taattgaaggctcgatgatacggga

SEQ ID NO: 3364010 - DNA, 25 bp, Homo sapien
gaagggcacaaaacattaggatctg

SEQ ID NO: 3364011 - DNA, 25 bp, Homo sapien
ctgctctagtctcaagatggctctc

SEQ ID NO: 3364012 - DNA, 25 bp, Homo sapien
aacaagtcacttgcattgactgctc

SEQ ID NO: 3364013 - DNA, 25 bp, Homo sapien
ttctatggcatgaaaacaagtcact

SEQ ID NO: 3364014 - DNA, 25 bp, Homo sapien
tgagaatgaacccacagctgtagtt

SEQ ID NO: 3364015 - DNA, 25 bp, Homo sapien
cctctgccaaggacaaggggtccga

SEQ ID NO: 3364016 - DNA, 25 bp, Homo sapien
ggtccgagcggtacttcctgctggc

SEQ ID NO: 3364017 - DNA, 25 bp, Homo sapien
tctgccaaggacaaggggtccgagc

SEQ ID NO: 3364018 - DNA, 25 bp, Homo sapien
caaggggtccgagcggtacttcctg

SEQ ID NO: 3364019 - DNA, 25 bp, Homo sapien
gctgagtgaatatagatctgataac

SEQ ID NO: 3364020 - DNA, 25 bp, Homo sapien
gaatgaaacccaaagcgccacatcc

SEQ ID NO: 3364021 - DNA, 25 bp, Homo sapien
gaatatagatctgataactattctc

SEQ ID NO: 3364022 - DNA, 25 bp, Homo sapien
agaaaaactcaagtccttgctgagt

SEQ ID NO: 3364023 - DNA, 25 bp, Homo sapien
tccgaactaatttgacaagtcagtc

SEQ ID NO: 3364024 - DNA, 25 bp, Homo sapien
aatgcccataccacggctctcataa

SEQ ID NO: 3364025 - DNA, 25 bp, Homo sapien
ggctctcataaggagaggaactcac

SEQ ID NO: 3364026 - DNA, 25 bp, Homo sapien
tagtagttgtcaaaaatctttccga

SEQ ID NO: 3364027 - DNA, 25 bp, Homo sapien
tcccgctggcttagaaggagcaggt

SEQ ID NO: 3364028 - DNA, 25 bp, Homo sapien
atattctctctggagggtctccatc

SEQ ID NO: 3364029 - DNA, 25 bp, Homo sapien
caggtgaagggcagatgccacttgc

SEQ ID NO: 3364030 - DNA, 25 bp, Homo sapien
gaagggcagatgccacttgcatggg

SEQ ID NO: 3364031 - DNA, 25 bp, Homo sapien
acagcagccattcccattcccgggt

SEQ ID NO: 3364032 - DNA, 25 bp, Homo sapien
ccacacagcagccattcccattccc

SEQ ID NO: 3364033 - DNA, 25 bp, Homo sapien
agcagccattcccattcccgggtga

SEQ ID NO: 3364034 - DNA, 25 bp, Homo sapien
ctctggcaaacagggccacacagca

SEQ ID NO: 3364035 - DNA, 25 bp, Homo sapien
cagcaagcagcccttgaggatgcct

SEQ ID NO: 3364036 - DNA, 25 bp, Homo sapien
tctcggtccagcgaaactgcttcca

SEQ ID NO: 3364037 - DNA, 25 bp, Homo sapien
gatcactggaggtgtagctgcagac

SEQ ID NO: 3364038 - DNA, 25 bp, Homo sapien
gctgcagacggagataaggtagcct

SEQ ID NO: 3364039 - DNA, 25 bp, Homo sapien
tctgattccatctatgtctgacctg

SEQ ID NO: 3364040 - DNA, 25 bp, Homo sapien
tcaaactctgataggtggacctgaa

SEQ ID NO: 3364041 - DNA, 25 bp, Homo sapien
tctcaaactctgataggtggacctg

SEQ ID NO: 3364042 - DNA, 25 bp, Homo sapien
aatctctcaaactctgataggtgga

SEQ ID NO: 3364043 - DNA, 25 bp, Homo sapien
tttctgatcctatacccaacagaac

SEQ ID NO: 3364044 - DNA, 25 bp, Homo sapien
tatacccaacagaacttagactctg

SEQ ID NO: 3364045 - DNA, 25 bp, Homo sapien
cccgattcttgacaatttctgatcc

SEQ ID NO: 3364046 - DNA, 25 bp, Homo sapien
agcccactacccgattcttgacaat

SEQ ID NO: 3364047 - DNA, 25 bp, Homo sapien
caggctaaaccggaacactggctaa

SEQ ID NO: 3364048 - DNA, 25 bp, Homo sapien
catacttattgtgggccaagcagac

SEQ ID NO: 3364049 - DNA, 25 bp, Homo sapien
gaaaatcctggtgaacttgcccaag

SEQ ID NO: 3364050 - DNA, 25 bp, Homo sapien
taactgcaaccacgtgtgtctgggc

SEQ ID NO: 3364051 - DNA, 25 bp, Homo sapien
tgtcggaagtcaaccagctctggca

SEQ ID NO: 3364052 - DNA, 25 bp, Homo sapien
tttgggtctcgtggcgtaccagaag

SEQ ID NO: 3364053 - DNA, 25 bp, Homo sapien
tgttggtcggaagagtacgcacgta

SEQ ID NO: 3364054 - DNA, 25 bp, Homo sapien
aaaagctccgaagcccataagcgtg

SEQ ID NO: 3364055 - DNA, 25 bp, Homo sapien
cctgtgttgatagttctctaagctg

SEQ ID NO: 3364056 - DNA, 25 bp, Homo sapien
tgtgttgatagttctctaagctgaa

SEQ ID NO: 3364057 - DNA, 25 bp, Homo sapien
tcctgtgttgatagttctctaagct

SEQ ID NO: 3364058 - DNA, 25 bp, Homo sapien
tgtcctgtgttgatagttctctaag

SEQ ID NO: 3364059 - DNA, 25 bp, Homo sapien
accaacagctgactactaggtgaca

SEQ ID NO: 3364060 - DNA, 25 bp, Homo sapien
tgtgccaccaacagctgactactag

SEQ ID NO: 3364061 - DNA, 25 bp, Homo sapien
tactaggtgacaccccactgcagac

SEQ ID NO: 3364062 - DNA, 25 bp, Homo sapien
cagctgactactaggtgacacccca

SEQ ID NO: 3364063 - DNA, 25 bp, Homo sapien
gcagggacaggcatcagtgagtgtt

SEQ ID NO: 3364064 - DNA, 25 bp, Homo sapien
ccagcagcaaagtcaccccactgct

SEQ ID NO: 3364065 - DNA, 25 bp, Homo sapien
catcagtgagtgttgctgccaggac

SEQ ID NO: 3364066 - DNA, 25 bp, Homo sapien
gcagcaaagtcaccccactgctcca

SEQ ID NO: 3364067 - DNA, 25 bp, Homo sapien
caagaaagaaacagattgcccagag

SEQ ID NO: 3364068 - DNA, 25 bp, Homo sapien
aagaaagaaacagattgcccagagc

SEQ ID NO: 3364069 - DNA, 25 bp, Homo sapien
gaaagaaacagattgcccagagcat

SEQ ID NO: 3364070 - DNA, 25 bp, Homo sapien
agaaagaaacagattgcccagagca

SEQ ID NO: 3364071 - DNA, 25 bp, Homo sapien
tacttagtacctatgtagatgcttc

SEQ ID NO: 3364072 - DNA, 25 bp, Homo sapien
cccatctgtctttatatgcccttgg

SEQ ID NO: 3364073 - DNA, 25 bp, Homo sapien
gcgaatggtacttagtacctatgta

SEQ ID NO: 3364074 - DNA, 25 bp, Homo sapien
atctgtctttatatgcccttggttc

SEQ ID NO: 3364075 - DNA, 25 bp, Homo sapien
ggcagatagcctccgtcaacagctt

SEQ ID NO: 3364076 - DNA, 25 bp, Homo sapien
aaagatccgctttttaggctgacgc

SEQ ID NO: 3364077 - DNA, 25 bp, Homo sapien
tgtacagcctttgcgtgggacagca

SEQ ID NO: 3364078 - DNA, 25 bp, Homo sapien
gacatgccccatgacgatatccagg

SEQ ID NO: 3364079 - DNA, 25 bp, Homo sapien
caagcacggcctgttattacgaaag

SEQ ID NO: 3364080 - DNA, 25 bp, Homo sapien
ggaattgtgtctctatgaccgcaag

SEQ ID NO: 3364081 - DNA, 25 bp, Homo sapien
gggtattaggcaagacaagcacggc

SEQ ID NO: 3364082 - DNA, 25 bp, Homo sapien
tcagcacaggaagagtcggaattgt

SEQ ID NO: 3364083 - DNA, 25 bp, Homo sapien
agagctggccccaagctatgcaggc

SEQ ID NO: 3364084 - DNA, 25 bp, Homo sapien
cctgaagcaagagaccacaccagga

SEQ ID NO: 3364085 - DNA, 25 bp, Homo sapien
acagcagagaggatcaaatgtcctt

SEQ ID NO: 3364086 - DNA, 25 bp, Homo sapien
tcagctaaccacaaagtaagccctg

SEQ ID NO: 3364087 - DNA, 25 bp, Homo sapien
aactgcacgcagagaaggtacctag

SEQ ID NO: 3364088 - DNA, 25 bp, Homo sapien
gcagagaaggtacctagatcctggg

SEQ ID NO: 3364089 - DNA, 25 bp, Homo sapien
cacttgtttgagaaactgcacgcag

SEQ ID NO: 3364090 - DNA, 25 bp, Homo sapien
aggaagctccacttgtttgagaaac

SEQ ID NO: 3364091 - DNA, 25 bp, Homo sapien
agatctgataaccacggcaggtagg

SEQ ID NO: 3364092 - DNA, 25 bp, Homo sapien
tgataaccacggcaggtagggccct

SEQ ID NO: 3364093 - DNA, 25 bp, Homo sapien
ctgcaagagttaacagagctacaga

SEQ ID NO: 3364094 - DNA, 25 bp, Homo sapien
gagttaacagagctacagaagacag

SEQ ID NO: 3364095 - DNA, 25 bp, Homo sapien
ggagtgggtggagaaacaccagcaa

SEQ ID NO: 3364096 - DNA, 25 bp, Homo sapien
gagtgggtggagaaacaccagcaac

SEQ ID NO: 3364097 - DNA, 25 bp, Homo sapien
gtgtttagttcacagagccctcctg

SEQ ID NO: 3364098 - DNA, 25 bp, Homo sapien
agtgggtgtttagttcacagagccc

SEQ ID NO: 3364099 - DNA, 25 bp, Homo sapien
tgggtgtttagttcacagagccctc

SEQ ID NO: 3364100 - DNA, 25 bp, Homo sapien
ccagtgggtgtttagttcacagagc

SEQ ID NO: 3364101 - DNA, 25 bp, Homo sapien
acacagagatgacaatgactaggtc

SEQ ID NO: 3364102 - DNA, 25 bp, Homo sapien
cggtaaggccctgtattaaacgctg

SEQ ID NO: 3364103 - DNA, 25 bp, Homo sapien
gagatgacaatgactaggtctccca

SEQ ID NO: 3364104 - DNA, 25 bp, Homo sapien
tgtattaaacgctgctgaaaacaca

SEQ ID NO: 3364105 - DNA, 25 bp, Homo sapien
taccgacgtccagccattctttgaa

SEQ ID NO: 3364106 - DNA, 25 bp, Homo sapien
tccacacgtgtgcatggccagaggg

SEQ ID NO: 3364107 - DNA, 25 bp, Homo sapien
gacaattctggttcacgatggcaat

SEQ ID NO: 3364108 - DNA, 25 bp, Homo sapien
taaacacctggagccttatggaggg

SEQ ID NO: 3364109 - DNA, 25 bp, Homo sapien
tctggctccaatctgatggcgagca

SEQ ID NO: 3364110 - DNA, 25 bp, Homo sapien
ctcagactagggaggtgttttccga

SEQ ID NO: 3364111 - DNA, 25 bp, Homo sapien
ttttccgagttgagtcagaacaaga

SEQ ID NO: 3364112 - DNA, 25 bp, Homo sapien
ttttccactatatcacactgcactg

SEQ ID NO: 3364113 - DNA, 25 bp, Homo sapien
cacaggttaagttgtgaaatgggtg

SEQ ID NO: 3364114 - DNA, 25 bp, Homo sapien
gacaatcacaggttaagttgtgaaa

SEQ ID NO: 3364115 - DNA, 25 bp, Homo sapien
ttctttgggacaatcacaggttaag

SEQ ID NO: 3364116 - DNA, 25 bp, Homo sapien
taattgttttctttgggacaatcac

SEQ ID NO: 3364117 - DNA, 25 bp, Homo sapien
gggcagtgagagtcgcgggacttta

SEQ ID NO: 3364118 - DNA, 25 bp, Homo sapien
cagtgagagtcgcgggactttagac

SEQ ID NO: 3364119 - DNA, 25 bp, Homo sapien
gagagtcgcgggactttagacactc

SEQ ID NO: 3364120 - DNA, 25 bp, Homo sapien
agggcagtgagagtcgcgggacttt

SEQ ID NO: 3364121 - DNA, 25 bp, Homo sapien
actctccgtctacgctgccaggtga

SEQ ID NO: 3364122 - DNA, 25 bp, Homo sapien
gggaacgcctgtccccagactcgaa

SEQ ID NO: 3364123 - DNA, 25 bp, Homo sapien
tttagaatggtcactcttaattatg

SEQ ID NO: 3364124 - DNA, 25 bp, Homo sapien
cgaatccacgtgtccattcaagtca

SEQ ID NO: 3364125 - DNA, 25 bp, Homo sapien
tagatcaatgactccacggccaagt

SEQ ID NO: 3364126 - DNA, 25 bp, Homo sapien
caccgagagaatgtctgcctctggc

SEQ ID NO: 3364127 - DNA, 25 bp, Homo sapien
gcactcctctggagtcaccgagaga

SEQ ID NO: 3364128 - DNA, 25 bp, Homo sapien
aatgccagcactccttagatcaatg

SEQ ID NO: 3364129 - DNA, 25 bp, Homo sapien
acgcgcggtccgaacgcccgcgagc

SEQ ID NO: 3364130 - DNA, 25 bp, Homo sapien
tcagcgggcgcgagtgcagtctcgc

SEQ ID NO: 3364131 - DNA, 25 bp, Homo sapien
cgagggcaacgtcagcggcccagct

SEQ ID NO: 3364132 - DNA, 25 bp, Homo sapien
acacaagggtcggtcccgcgcgcat

SEQ ID NO: 3364133 - DNA, 25 bp, Homo sapien
gctgcggcagcacgggcaccccgga

SEQ ID NO: 3364134 - DNA, 25 bp, Homo sapien
tgcggcagcacgggcaccccggagg

SEQ ID NO: 3364135 - DNA, 25 bp, Homo sapien
agctgcggcagcacgggcaccccgg

SEQ ID NO: 3364136 - DNA, 25 bp, Homo sapien
gcggcagcacgggcaccccggaggc

SEQ ID NO: 3364137 - DNA, 25 bp, Homo sapien
ccggctctggatgctatttaaggcg

SEQ ID NO: 3364138 - DNA, 25 bp, Homo sapien
cccgcgccggctctggatgctattt

SEQ ID NO: 3364139 - DNA, 25 bp, Homo sapien
gatgctatttaaggcgccgctggcg

SEQ ID NO: 3364140 - DNA, 25 bp, Homo sapien
tctggatgctatttaaggcgccgct

SEQ ID NO: 3364141 - DNA, 25 bp, Homo sapien
gcccgtgccccgctggcctcctggc

SEQ ID NO: 3364142 - DNA, 25 bp, Homo sapien
cagaattctgctgcgagggccctgg

SEQ ID NO: 3364143 - DNA, 25 bp, Homo sapien
gccctggaggcaagggccttcctct

SEQ ID NO: 3364144 - DNA, 25 bp, Homo sapien
ctcctggcaggccgggcagaattct

SEQ ID NO: 3364145 - DNA, 25 bp, Homo sapien
ttctgagggcttccgcggttctgag

SEQ ID NO: 3364146 - DNA, 25 bp, Homo sapien
gcggccacctgctgtgcggttctga

SEQ ID NO: 3364147 - DNA, 25 bp, Homo sapien
tgagggccgactgcgcgctgcacca

SEQ ID NO: 3364148 - DNA, 25 bp, Homo sapien
ctccctggccggaagaccttttctg

SEQ ID NO: 3364149 - DNA, 25 bp, Homo sapien
gatagaggtgccatcatcacacaga

SEQ ID NO: 3364150 - DNA, 25 bp, Homo sapien
catttcaagtgctcgatagcctgga

SEQ ID NO: 3364151 - DNA, 25 bp, Homo sapien
gagagcattgccaccatgtaccatg

SEQ ID NO: 3364152 - DNA, 25 bp, Homo sapien
gatgctgtagaacttggctccctga

SEQ ID NO: 3364153 - DNA, 25 bp, Homo sapien
gctgtattgcctacgttggtctcca

SEQ ID NO: 3364154 - DNA, 25 bp, Homo sapien
gtagattcttctttaggttcctgag

SEQ ID NO: 3364155 - DNA, 25 bp, Homo sapien
tgagcctggagagatggcctgcagg

SEQ ID NO: 3364156 - DNA, 25 bp, Homo sapien
ggtagattcttctttaggttcctga

SEQ ID NO: 3364157 - DNA, 25 bp, Homo sapien
tccttggctctagggaaagttcagc

SEQ ID NO: 3364158 - DNA, 25 bp, Homo sapien
taagctgtgataatctgggtcctcc

SEQ ID NO: 3364159 - DNA, 25 bp, Homo sapien
catatgacacggtggaaggtgccct

SEQ ID NO: 3364160 - DNA, 25 bp, Homo sapien
ggatgaccattagactgcagtgcaa

SEQ ID NO: 3364161 - DNA, 25 bp, Homo sapien
cagatcccagggcagtgtcactcat

SEQ ID NO: 3364162 - DNA, 25 bp, Homo sapien
taggctgtggagcaacctgttagcg

SEQ ID NO: 3364163 - DNA, 25 bp, Homo sapien
cctgttagcgatgatgggtgagttc

SEQ ID NO: 3364164 - DNA, 25 bp, Homo sapien
acaggcagaggcagtagctccaagg

SEQ ID NO: 3364165 - DNA, 25 bp, Homo sapien
aggagcctgaataaccagggcttct

SEQ ID NO: 3364166 - DNA, 25 bp, Homo sapien
gacaaaccagtcaccattcaggagc

SEQ ID NO: 3364167 - DNA, 25 bp, Homo sapien
cagcaggaggggacaaaccagtcac

SEQ ID NO: 3364168 - DNA, 25 bp, Homo sapien
gggcttctgacaccgtgggcctcag

SEQ ID NO: 3364169 - DNA, 25 bp, Homo sapien
aagaacgccgtgggatgcagtttca

SEQ ID NO: 3364170 - DNA, 25 bp, Homo sapien
taagaacgccgtgggatgcagtttc

SEQ ID NO: 3364171 - DNA, 25 bp, Homo sapien
ctaagaacgccgtgggatgcagttt

SEQ ID NO: 3364172 - DNA, 25 bp, Homo sapien
agcctgagtcgcagcagccgtcttg

SEQ ID NO: 3364173 - DNA, 25 bp, Homo sapien
ctgagtcgcagcagccgtcttgtga

SEQ ID NO: 3364174 - DNA, 25 bp, Homo sapien
tcttgctgccttgaattgggacatg

SEQ ID NO: 3364175 - DNA, 25 bp, Homo sapien
gaattgggacatgagcctgagtcgc

SEQ ID NO: 3364176 - DNA, 25 bp, Homo sapien
gagaggtggcaagcaggaggaagag

SEQ ID NO: 3364177 - DNA, 25 bp, Homo sapien
tgagaggtggcaagcaggaggaaga

SEQ ID NO: 3364178 - DNA, 25 bp, Homo sapien
agaggtggcaagcaggaggaagagg

SEQ ID NO: 3364179 - DNA, 25 bp, Homo sapien
ctgagaggtggcaagcaggaggaag

SEQ ID NO: 3364180 - DNA, 25 bp, Homo sapien
caagttgatgagtggggttagcaac

SEQ ID NO: 3364181 - DNA, 25 bp, Homo sapien
gaggatccataatgtcatgcaaaat

SEQ ID NO: 3364182 - DNA, 25 bp, Homo sapien
tgttaaagatcagaggatccataat

SEQ ID NO: 3364183 - DNA, 25 bp, Homo sapien
cagacaatcttggatggatttgtta

SEQ ID NO: 3364184 - DNA, 25 bp, Homo sapien
tgggtgccccagatgtgtcaatcct

SEQ ID NO: 3364185 - DNA, 25 bp, Homo sapien
cccaactgtgggtgccccagatgtg

SEQ ID NO: 3364186 - DNA, 25 bp, Homo sapien
tctctcccgtgtcccgctccccaac

SEQ ID NO: 3364187 - DNA, 25 bp, Homo sapien
ccgtgtcccgctccccaactgtggg

SEQ ID NO: 3364188 - DNA, 25 bp, Homo sapien
tctttatactagattctaattcacc

SEQ ID NO: 3364189 - DNA, 25 bp, Homo sapien
tctctctttatactagattctaatt

SEQ ID NO: 3364190 - DNA, 25 bp, Homo sapien
tatactagattctaattcaccttta

SEQ ID NO: 3364191 - DNA, 25 bp, Homo sapien
tactagattctaattcacctttatt

SEQ ID NO: 3364192 - DNA, 25 bp, Homo sapien
tatagcaaggctacccaaaacactc

SEQ ID NO: 3364193 - DNA, 25 bp, Homo sapien
ttcgaccatgccatatagcaaggct

SEQ ID NO: 3364194 - DNA, 25 bp, Homo sapien
aaggctacccaaaacactccagtct

SEQ ID NO: 3364195 - DNA, 25 bp, Homo sapien
tgcgaagcaccgtcttcgaccatgc

SEQ ID NO: 3364196 - DNA, 25 bp, Homo sapien
gatcatctagcatcgaccagtcagc

SEQ ID NO: 3364197 - DNA, 25 bp, Homo sapien
ccttagtccctaagagacagcatct

SEQ ID NO: 3364198 - DNA, 25 bp, Homo sapien
gaccttccacacgataattcagaga

SEQ ID NO: 3364199 - DNA, 25 bp, Homo sapien
cagtcagcaaatgtcggaagaggaa

SEQ ID NO: 3364200 - DNA, 25 bp, Homo sapien
gagatactagcaatcctacggtttg

SEQ ID NO: 3364201 - DNA, 25 bp, Homo sapien
tacggtttgtcgaaagccaggcttc

SEQ ID NO: 3364202 - DNA, 25 bp, Homo sapien
cagttcaagtccactccataaagag

SEQ ID NO: 3364203 - DNA, 25 bp, Homo sapien
tgcaggtcatgtaaggagcttgccc

SEQ ID NO: 3364204 - DNA, 25 bp, Homo sapien
gaatggggggtgcaggcggccttca

SEQ ID NO: 3364205 - DNA, 25 bp, Homo sapien
gggggtgcaggcggccttcaagtgc

SEQ ID NO: 3364206 - DNA, 25 bp, Homo sapien
ctaggaatggggggtgcaggcggcc

SEQ ID NO: 3364207 - DNA, 25 bp, Homo sapien
atggggggtgcaggcggccttcaag

SEQ ID NO: 3364208 - DNA, 25 bp, Homo sapien
ccaaaatctagctcaatgatgagag

SEQ ID NO: 3364209 - DNA, 25 bp, Homo sapien
aaaatctagctcaatgatgagagag

SEQ ID NO: 3364210 - DNA, 25 bp, Homo sapien
ttccaaaatctagctcaatgatgag

SEQ ID NO: 3364211 - DNA, 25 bp, Homo sapien
tccaaaatctagctcaatgatgaga

SEQ ID NO: 3364212 - DNA, 25 bp, Homo sapien
tttcgaatctctaggagggttatgg

SEQ ID NO: 3364213 - DNA, 25 bp, Homo sapien
gcttttcgaatctctaggagggtta

SEQ ID NO: 3364214 - DNA, 25 bp, Homo sapien
gacagcttttcgaatctctaggagg

SEQ ID NO: 3364215 - DNA, 25 bp, Homo sapien
ttcgaatctctaggagggttatggc

SEQ ID NO: 3364216 - DNA, 25 bp, Homo sapien
tcatcatcatcggacctggtcctct

SEQ ID NO: 3364217 - DNA, 25 bp, Homo sapien
cccaaagcatagtcgggagacagca

SEQ ID NO: 3364218 - DNA, 25 bp, Homo sapien
tagagtccggatgcctctggaagcc

SEQ ID NO: 3364219 - DNA, 25 bp, Homo sapien
cactctcttgctccgtaagttccga

SEQ ID NO: 3364220 - DNA, 25 bp, Homo sapien
gcttgatttctctgtgtacatcact

SEQ ID NO: 3364221 - DNA, 25 bp, Homo sapien
ccaggacactcttctctattctcaa

SEQ ID NO: 3364222 - DNA, 25 bp, Homo sapien
attggccaggacactcttctctatt

SEQ ID NO: 3364223 - DNA, 25 bp, Homo sapien
ggtgcattttatcagattcaagcag

SEQ ID NO: 3364224 - DNA, 25 bp, Homo sapien
aaattggtgacttcttgcgatggct

SEQ ID NO: 3364225 - DNA, 25 bp, Homo sapien
tgcagatctattgacaagacagtct

SEQ ID NO: 3364226 - DNA, 25 bp, Homo sapien
gccgaattactgcagatctattgac

SEQ ID NO: 3364227 - DNA, 25 bp, Homo sapien
gatctattgacaagacagtcttcca

SEQ ID NO: 3364228 - DNA, 25 bp, Homo sapien
tgctacctgccgaattactgcagat

SEQ ID NO: 3364229 - DNA, 25 bp, Homo sapien
tgcttgtttgatctacagaaccttg

SEQ ID NO: 3364230 - DNA, 25 bp, Homo sapien
ttgatctacagaaccttgctttcca

SEQ ID NO: 3364231 - DNA, 25 bp, Homo sapien
gaagatgtaagctgtctgcattgag

SEQ ID NO: 3364232 - DNA, 25 bp, Homo sapien
gagcacttggtccatgttcagtggc

SEQ ID NO: 3364233 - DNA, 25 bp, Homo sapien
caggctttggccaattccagaggat

SEQ ID NO: 3364234 - DNA, 25 bp, Homo sapien
ttccagaggatcatgtccagcttga

SEQ ID NO: 3364235 - DNA, 25 bp, Homo sapien
ggttcctgtgctggaccatggtcat

SEQ ID NO: 3364236 - DNA, 25 bp, Homo sapien
tttgagcatggccagtcccttggct

SEQ ID NO: 3364237 - DNA, 25 bp, Homo sapien
caggctctttcttaggttgggccag

SEQ ID NO: 3364238 - DNA, 25 bp, Homo sapien
ttcaggctctttcttaggttgggcc

SEQ ID NO: 3364239 - DNA, 25 bp, Homo sapien
gctctttcttaggttgggccagcat

SEQ ID NO: 3364240 - DNA, 25 bp, Homo sapien
ggctctttcttaggttgggccagca

SEQ ID NO: 3364241 - DNA, 25 bp, Homo sapien
ccaggtgccttatctgagttctgac

SEQ ID NO: 3364242 - DNA, 25 bp, Homo sapien
tgggtttcaccagcagtcgattaca

SEQ ID NO: 3364243 - DNA, 25 bp, Homo sapien
accagcagtcgattacattgcctcc

SEQ ID NO: 3364244 - DNA, 25 bp, Homo sapien
tacatagtctgaccctcccgaggga

SEQ ID NO: 3364245 - DNA, 25 bp, Homo sapien
ttcccattcggatgcctgtagcttc

SEQ ID NO: 3364246 - DNA, 25 bp, Homo sapien
cagcttcccattcggatgcctgcag

SEQ ID NO: 3364247 - DNA, 25 bp, Homo sapien
cagcttcccattcggatgcctgtag

SEQ ID NO: 3364248 - DNA, 25 bp, Homo sapien
gatgcctgtagcttccattccatgc

SEQ ID NO: 3364249 - DNA, 25 bp, Homo sapien
gcttcaaaggaacgcgcagtctcat

SEQ ID NO: 3364250 - DNA, 25 bp, Homo sapien
tttcacacttaactgcaaaggaggt

SEQ ID NO: 3364251 - DNA, 25 bp, Homo sapien
gttacacagccttcggtcagcaaaa

SEQ ID NO: 3364252 - DNA, 25 bp, Homo sapien
tcagaacaaacttcgaagacacagt

SEQ ID NO: 3364253 - DNA, 25 bp, Homo sapien
gccggatccaaaggccaaggcaaga

SEQ ID NO: 3364254 - DNA, 25 bp, Homo sapien
tcttatcccgagtttccagcttcag

SEQ ID NO: 3364255 - DNA, 25 bp, Homo sapien
gctgcaggccggctgggtattttca

SEQ ID NO: 3364256 - DNA, 25 bp, Homo sapien
cagggatgcttgctatggccggatc

SEQ ID NO: 3364257 - DNA, 25 bp, Homo sapien
agaacagacacgtcaaaggccaggg

SEQ ID NO: 3364258 - DNA, 25 bp, Homo sapien
tgactccccacaggcgaagaaggaa

SEQ ID NO: 3364259 - DNA, 25 bp, Homo sapien
gaagcagctgggttatttgcagaca

SEQ ID NO: 3364260 - DNA, 25 bp, Homo sapien
tcttatgggcttagcaggcctggac

SEQ ID NO: 3364261 - DNA, 25 bp, Homo sapien
cctgctcctgtgtgggtttgaacaa

SEQ ID NO: 3364262 - DNA, 25 bp, Homo sapien
ttggcaatcgaaagcaatgttcctg

SEQ ID NO: 3364263 - DNA, 25 bp, Homo sapien
gaaagaccgagtcccatcctacaag

SEQ ID NO: 3364264 - DNA, 25 bp, Homo sapien
tatcctcagagacgcaggccaaaaa

SEQ ID NO: 3364265 - DNA, 25 bp, Homo sapien
tcttgcccagacagataaaaagcag

SEQ ID NO: 3364266 - DNA, 25 bp, Homo sapien
ctcagtgtcacaaggtgtggcttga

SEQ ID NO: 3364267 - DNA, 25 bp, Homo sapien
gtgtaacatagtgaccccaagggac

SEQ ID NO: 3364268 - DNA, 25 bp, Homo sapien
caagggtgcccatggtttgcaagag

SEQ ID NO: 3364269 - DNA, 25 bp, Homo sapien
gaaacatgaagataggtagtgatag

SEQ ID NO: 3364270 - DNA, 25 bp, Homo sapien
gagaaacatgaagataggtagtgat

SEQ ID NO: 3364271 - DNA, 25 bp, Homo sapien
aacatgaagataggtagtgatagag

SEQ ID NO: 3364272 - DNA, 25 bp, Homo sapien
catgaagataggtagtgatagaggt

SEQ ID NO: 3364273 - DNA, 25 bp, Homo sapien
acagggaccctggacctggtaccag

SEQ ID NO: 3364274 - DNA, 25 bp, Homo sapien
cctggacctggtaccagattgaaag

SEQ ID NO: 3364275 - DNA, 25 bp, Homo sapien
ccctggacctggtaccagattgaaa

SEQ ID NO: 3364276 - DNA, 25 bp, Homo sapien
ggaccctggacctggtaccagattg

SEQ ID NO: 3364277 - DNA, 25 bp, Homo sapien
tttgtggttatcattgtaaccactg

SEQ ID NO: 3364278 - DNA, 25 bp, Homo sapien
gaatttgtggttatcattgtaacca

SEQ ID NO: 3364279 - DNA, 25 bp, Homo sapien
tgaatttgtggttatcattgtaacc

SEQ ID NO: 3364280 - DNA, 25 bp, Homo sapien
aatttgtggttatcattgtaaccac

SEQ ID NO: 3364281 - DNA, 25 bp, Homo sapien
ttccaggaactcacacgttttcagg

SEQ ID NO: 3364282 - DNA, 25 bp, Homo sapien
ccaggaactcacacgttttcaggtc

SEQ ID NO: 3364283 - DNA, 25 bp, Homo sapien
caggaactcacacgttttcaggtca

SEQ ID NO: 3364284 - DNA, 25 bp, Homo sapien
tccaggaactcacacgttttcaggt

SEQ ID NO: 3364285 - DNA, 25 bp, Homo sapien
gccccgtgccgcacagctgcagccc

SEQ ID NO: 3364286 - DNA, 25 bp, Homo sapien
ccccgtgccgcacagctgcagccca

SEQ ID NO: 3364287 - DNA, 25 bp, Homo sapien
aagaattctctaatgccctgtctct

SEQ ID NO: 3364288 - DNA, 25 bp, Homo sapien
agctggggctttgccgtcctattgc

SEQ ID NO: 3364289 - DNA, 25 bp, Homo sapien
gaaatccggccccttctctaatgcc

SEQ ID NO: 3364290 - DNA, 25 bp, Homo sapien
ggctttgccgtcctattgctgtgct

SEQ ID NO: 3364291 - DNA, 25 bp, Homo sapien
atgtgtgtttatgcgagcaatgctt

SEQ ID NO: 3364292 - DNA, 25 bp, Homo sapien
tgtgtgtttatgcgagcaatgcttg

SEQ ID NO: 3364293 - DNA, 25 bp, Homo sapien
gcatgtgtgtttatgcgagcaatgc

SEQ ID NO: 3364294 - DNA, 25 bp, Homo sapien
catgtgtgtttatgcgagcaatgct

SEQ ID NO: 3364295 - DNA, 25 bp, Homo sapien
gagttaccgctgcttcctccatgca

SEQ ID NO: 3364296 - DNA, 25 bp, Homo sapien
tctttgcctaagactagaatgttga

SEQ ID NO: 3364297 - DNA, 25 bp, Homo sapien
gcgtgtttccccttagacggattca

SEQ ID NO: 3364298 - DNA, 25 bp, Homo sapien
gatacgctgtagttcgagttaccgc

SEQ ID NO: 3364299 - DNA, 25 bp, Homo sapien
aaatgatacacacagtaggagtcac

SEQ ID NO: 3364300 - DNA, 25 bp, Homo sapien
cacagtaggagtcacgtttccttga

SEQ ID NO: 3364301 - DNA, 25 bp, Homo sapien
gagcccgagaattttcagtattccc

SEQ ID NO: 3364302 - DNA, 25 bp, Homo sapien
gtcacgtttccttgaaacagagccc

SEQ ID NO: 3364303 - DNA, 25 bp, Homo sapien
cgtaaaggtccagaccaagccatgt

SEQ ID NO: 3364304 - DNA, 25 bp, Homo sapien
ctgtgaaacgtaaaggtccagacca

SEQ ID NO: 3364305 - DNA, 25 bp, Homo sapien
cagaccaagccatgttgagatgtgg

SEQ ID NO: 3364306 - DNA, 25 bp, Homo sapien
aaggtccagaccaagccatgttgag

SEQ ID NO: 3364307 - DNA, 25 bp, Homo sapien
cttgcacctggccacggttttggca

SEQ ID NO: 3364308 - DNA, 25 bp, Homo sapien
cctctgccaagcttctattcttcct

SEQ ID NO: 3364309 - DNA, 25 bp, Homo sapien
tggcactgagtagtttgcctccatc

SEQ ID NO: 3364310 - DNA, 25 bp, Homo sapien
catcatccctatccttccaactgcc

SEQ ID NO: 3364311 - DNA, 25 bp, Homo sapien
gagtccttcttttcgtgaccctcag

SEQ ID NO: 3364312 - DNA, 25 bp, Homo sapien
cagcagagaccggtgagtacatgga

SEQ ID NO: 3364313 - DNA, 25 bp, Homo sapien
ctcttgttgccagatgcacagaggc

SEQ ID NO: 3364314 - DNA, 25 bp, Homo sapien
cacagaggcggcttgtgtcagcaga

SEQ ID NO: 3364315 - DNA, 25 bp, Homo sapien
ctacccaagcgatttttagttgtct

SEQ ID NO: 3364316 - DNA, 25 bp, Homo sapien
gaagtgatgatgtcgtgagctcaca

SEQ ID NO: 3364317 - DNA, 25 bp, Homo sapien
tggcctctttagacacaagcctgtg

SEQ ID NO: 3364318 - DNA, 25 bp, Homo sapien
tagacacaagcctgtgtctaaaaag

SEQ ID NO: 3364319 - DNA, 25 bp, Homo sapien
agtgtctctggcctctttagacaca

SEQ ID NO: 3364320 - DNA, 25 bp, Homo sapien
ccttcatgacaggtctgcccggtgg

SEQ ID NO: 3364321 - DNA, 25 bp, Homo sapien
tatctgtgttgtctccggcctctgt

SEQ ID NO: 3364322 - DNA, 25 bp, Homo sapien
caggctgcttgctggaacttccgtg

SEQ ID NO: 3364323 - DNA, 25 bp, Homo sapien
ggtactctgggacatctcgcttggc

SEQ ID NO: 3364324 - DNA, 25 bp, Homo sapien
tatggatttagctgagtagaagtac

SEQ ID NO: 3364325 - DNA, 25 bp, Homo sapien
ctatggatttagctgagtagaagta

SEQ ID NO: 3364326 - DNA, 25 bp, Homo sapien
ctggatagcggtcagcactcccact

SEQ ID NO: 3364327 - DNA, 25 bp, Homo sapien
agcggtcagcactcccactgtcaat

SEQ ID NO: 3364328 - DNA, 25 bp, Homo sapien
tcagaaatagtaaggggtgacttca

SEQ ID NO: 3364329 - DNA, 25 bp, Homo sapien
ctcttggtccacagggcacgtgtca

SEQ ID NO: 3364330 - DNA, 25 bp, Homo sapien
gaaattccccttgttcctgtcagca

SEQ ID NO: 3364331 - DNA, 25 bp, Homo sapien
catctcgtctttcactgacagtggg

SEQ ID NO: 3364332 - DNA, 25 bp, Homo sapien
cctgtcagcaccgttcaagactgat

SEQ ID NO: 3364333 - DNA, 25 bp, Homo sapien
catggagggacatcctttatgggac

SEQ ID NO: 3364334 - DNA, 25 bp, Homo sapien
ggccaggctgagtgtcgcctgcccc

SEQ ID NO: 3364335 - DNA, 25 bp, Homo sapien
gtccttcaggatcccgcatttctat

SEQ ID NO: 3364336 - DNA, 25 bp, Homo sapien
tctattttggatactgggatccctc

SEQ ID NO: 3364337 - DNA, 25 bp, Homo sapien
ctcgctcgtccccacagccagtcat

SEQ ID NO: 3364338 - DNA, 25 bp, Homo sapien
gaagcactacagatcagagcctcac

SEQ ID NO: 3364339 - DNA, 25 bp, Homo sapien
tgtattgtttaggatgaagcactac

SEQ ID NO: 3364340 - DNA, 25 bp, Homo sapien
ggatgaagcactacagatcagagcc

SEQ ID NO: 3364341 - DNA, 25 bp, Homo sapien
tgtttaggatgaagcactacagatc

SEQ ID NO: 3364342 - DNA, 25 bp, Homo sapien
cacgtgttttcgatctggtgtttct

SEQ ID NO: 3364343 - DNA, 25 bp, Homo sapien
gtttctagggaaattggctttgatc

SEQ ID NO: 3364344 - DNA, 25 bp, Homo sapien
tgttttcgatctggtgtttctaggg

SEQ ID NO: 3364345 - DNA, 25 bp, Homo sapien
tgatcgccgtttcaactgcattgga

SEQ ID NO: 3364346 - DNA, 25 bp, Homo sapien
cagggcacggttagtacttggcaaa

SEQ ID NO: 3364347 - DNA, 25 bp, Homo sapien
tgtcgtacacacaggcaaaagggat

SEQ ID NO: 3364348 - DNA, 25 bp, Homo sapien
tcagtcatgcgcagagccttggata

SEQ ID NO: 3364349 - DNA, 25 bp, Homo sapien
tcaaatatcatcttcactggaggcc

SEQ ID NO: 3364350 - DNA, 25 bp, Homo sapien
cacccagaggtttgctccgagcatt

SEQ ID NO: 3364351 - DNA, 25 bp, Homo sapien
gcaaagcgattctgccctggaggct

SEQ ID NO: 3364352 - DNA, 25 bp, Homo sapien
gctcatgtatgcagctgggtcaccc

SEQ ID NO: 3364353 - DNA, 25 bp, Homo sapien
tcggtcacagcttcctatggagaga

SEQ ID NO: 3364354 - DNA, 25 bp, Homo sapien
cagctgagccgtcgggcaaatgaga

SEQ ID NO: 3364355 - DNA, 25 bp, Homo sapien
cccgggaactggatgtgcttgctta

SEQ ID NO: 3364356 - DNA, 25 bp, Homo sapien
gagccaagcaagttggagctgcccg

SEQ ID NO: 3364357 - DNA, 25 bp, Homo sapien
tactctggaacgcttggaaaccact

SEQ ID NO: 3364358 - DNA, 25 bp, Homo sapien
tgaacctaggttttggcagcatgac

SEQ ID NO: 3364359 - DNA, 25 bp, Homo sapien
tgcaatccactgagacgtgaagcgc

SEQ ID NO: 3364360 - DNA, 25 bp, Homo sapien
cgtgataacgcttttctctctgggc

SEQ ID NO: 3364361 - DNA, 25 bp, Homo sapien
catgatccgatctgtgggacgcaaa

SEQ ID NO: 3364362 - DNA, 25 bp, Homo sapien
tgcaggcccgaaatgcggagcatga

SEQ ID NO: 3364363 - DNA, 25 bp, Homo sapien
caggcccgaaatgcggagcatgaca

SEQ ID NO: 3364364 - DNA, 25 bp, Homo sapien
ggatgcaggcccgaaatgcggagca

SEQ ID NO: 3364365 - DNA, 25 bp, Homo sapien
gcccgaaatgcggagcatgacagat

SEQ ID NO: 3364366 - DNA, 25 bp, Homo sapien
tgtgatcacaagttttgcctttctt

SEQ ID NO: 3364367 - DNA, 25 bp, Homo sapien
gtgatcacaagttttgcctttcttg

SEQ ID NO: 3364368 - DNA, 25 bp, Homo sapien
atactagaatcttttccgatggctc

SEQ ID NO: 3364369 - DNA, 25 bp, Homo sapien
ctagaatcttttccgatggctccca

SEQ ID NO: 3364370 - DNA, 25 bp, Homo sapien
gaatcttttccgatggctcccacct

SEQ ID NO: 3364371 - DNA, 25 bp, Homo sapien
ctttctccaagccatcctaccgaac

SEQ ID NO: 3364372 - DNA, 25 bp, Homo sapien
gatggatccaaatgtgcccacgtcg

SEQ ID NO: 3364373 - DNA, 25 bp, Homo sapien
tcatagaacacgaatagcttttgtc

SEQ ID NO: 3364374 - DNA, 25 bp, Homo sapien
accctcgatggatccaaatgtgccc

SEQ ID NO: 3364375 - DNA, 25 bp, Homo sapien
cagctccaccgtcatagaacacgaa

SEQ ID NO: 3364376 - DNA, 25 bp, Homo sapien
ctcttgccggcttgtactaagttcc

SEQ ID NO: 3364377 - DNA, 25 bp, Homo sapien
aagcagcgactgcattctgccctca

SEQ ID NO: 3364378 - DNA, 25 bp, Homo sapien
gcttgtactaagttcccttcctgtg

SEQ ID NO: 3364379 - DNA, 25 bp, Homo sapien
cactccataaactcctgaaaagcag

SEQ ID NO: 3364380 - DNA, 25 bp, Homo sapien
aacaggatagccaatgccacccatg

SEQ ID NO: 3364381 - DNA, 25 bp, Homo sapien
tgagcaaggaaactccagagaagct

SEQ ID NO: 3364382 - DNA, 25 bp, Homo sapien
tcttcaagcgcacatttgtaatagg

SEQ ID NO: 3364383 - DNA, 25 bp, Homo sapien
gagactgctgtactgggaccatcag

SEQ ID NO: 3364384 - DNA, 25 bp, Homo sapien
taaacaggcgatcatgtgagactca

SEQ ID NO: 3364385 - DNA, 25 bp, Homo sapien
taaaagaggcgacactgttttgtga

SEQ ID NO: 3364386 - DNA, 25 bp, Homo sapien
gagactcagcggtgggactaaaaga

SEQ ID NO: 3364387 - DNA, 25 bp, Homo sapien
ttttcccgcccgagctgttgccatg

SEQ ID NO: 3364388 - DNA, 25 bp, Homo sapien
aacgcaaagtgagtcggctgagccc

SEQ ID NO: 3364389 - DNA, 25 bp, Homo sapien
caaatggcacttgcgccctggtggt

SEQ ID NO: 3364390 - DNA, 25 bp, Homo sapien
tctggagccctagatgaccgcttta

SEQ ID NO: 3364391 - DNA, 25 bp, Homo sapien
gatgtcagacaagctcaaggaacgc

SEQ ID NO: 3364392 - DNA, 25 bp, Homo sapien
tcttgggcttcatccttgagtgggc

SEQ ID NO: 3364393 - DNA, 25 bp, Homo sapien
gttgtatagtaatggtttccaagag

SEQ ID NO: 3364394 - DNA, 25 bp, Homo sapien
tgtctgagtctcttatgcccaatcc

SEQ ID NO: 3364395 - DNA, 25 bp, Homo sapien
gtttggctggaggtaacccattgtg

SEQ ID NO: 3364396 - DNA, 25 bp, Homo sapien
aggttttctccagaagctcgaggaa

SEQ ID NO: 3364397 - DNA, 25 bp, Homo sapien
aacaaagctgatggctggtgcttgg

SEQ ID NO: 3364398 - DNA, 25 bp, Homo sapien
cagaagctcgaggaacaaagctgat

SEQ ID NO: 3364399 - DNA, 25 bp, Homo sapien
tctccagaagctcgaggaacaaagc

SEQ ID NO: 3364400 - DNA, 25 bp, Homo sapien
gaaagggcggtaatacagagctcac

SEQ ID NO: 3364401 - DNA, 25 bp, Homo sapien
ccttgccgaaagggcggtaatacag

SEQ ID NO: 3364402 - DNA, 25 bp, Homo sapien
gccgaaagggcggtaatacagagct

SEQ ID NO: 3364403 - DNA, 25 bp, Homo sapien
tccagccgcccttgccgaaagggcg

SEQ ID NO: 3364404 - DNA, 25 bp, Homo sapien
cttccaagcgttgttgaacaaagac

SEQ ID NO: 3364405 - DNA, 25 bp, Homo sapien
gcttccaagcgttgttgaacaaaga

SEQ ID NO: 3364406 - DNA, 25 bp, Homo sapien
cttctgggaacctggtagtgagtgt

SEQ ID NO: 3364407 - DNA, 25 bp, Homo sapien
catagaggcatggacttctgggaac

SEQ ID NO: 3364408 - DNA, 25 bp, Homo sapien
cctgagcccatagaggcatggactt

SEQ ID NO: 3364409 - DNA, 25 bp, Homo sapien
agctgccatgggaagtgcctgagcc

SEQ ID NO: 3364410 - DNA, 25 bp, Homo sapien
cagaaatccatggagcactccacac

SEQ ID NO: 3364411 - DNA, 25 bp, Homo sapien
gcaagtaattgtacatccacccaga

SEQ ID NO: 3364412 - DNA, 25 bp, Homo sapien
aagtaattgtacatccacccagaaa

SEQ ID NO: 3364413 - DNA, 25 bp, Homo sapien
ctagcaagtaattgtacatccaccc

SEQ ID NO: 3364414 - DNA, 25 bp, Homo sapien
ttgtcagaacgagcaacggtcttgc

SEQ ID NO: 3364415 - DNA, 25 bp, Homo sapien
cggtcttgcctttgcctggacattc

SEQ ID NO: 3364416 - DNA, 25 bp, Homo sapien
attctgaggattgtcagaacgagca

SEQ ID NO: 3364417 - DNA, 25 bp, Homo sapien
aacgagcaacggtcttgcctttgcc

SEQ ID NO: 3364418 - DNA, 25 bp, Homo sapien
tgggtaaagcagcaaactctccctg

SEQ ID NO: 3364419 - DNA, 25 bp, Homo sapien
gaactagcttgatggatttctgctc

SEQ ID NO: 3364420 - DNA, 25 bp, Homo sapien
cacgatgtagaatttggattcggaa

SEQ ID NO: 3364421 - DNA, 25 bp, Homo sapien
tgcaggtccagctcaatgcagaaca

SEQ ID NO: 3364422 - DNA, 25 bp, Homo sapien
cacatagaaaagctccagattgggc

SEQ ID NO: 3364423 - DNA, 25 bp, Homo sapien
attgggccaagtcagcttccaccct

SEQ ID NO: 3364424 - DNA, 25 bp, Homo sapien
tccagattgggccaagtcagcttcc

SEQ ID NO: 3364425 - DNA, 25 bp, Homo sapien
cagattgggccaagtcagcttccac

SEQ ID NO: 3364426 - DNA, 25 bp, Homo sapien
aatactgcgggagtatagcaaagcc

SEQ ID NO: 3364427 - DNA, 25 bp, Homo sapien
gatagccctcgcaatactgcgggag

SEQ ID NO: 3364428 - DNA, 25 bp, Homo sapien
tatgcatagccataactgcaaacca

SEQ ID NO: 3364429 - DNA, 25 bp, Homo sapien
tgcaaaccagatagccctcgcaata

SEQ ID NO: 3364430 - DNA, 25 bp, Homo sapien
tttcccttaggcgattggtcagcac

SEQ ID NO: 3364431 - DNA, 25 bp, Homo sapien
gggaaaggcgtaattgtagcgacat

SEQ ID NO: 3364432 - DNA, 25 bp, Homo sapien
cgtaattgtagcgacattgtcccca

SEQ ID NO: 3364433 - DNA, 25 bp, Homo sapien
cattgtccccattcatataaacctg

SEQ ID NO: 3364434 - DNA, 25 bp, Homo sapien
gatgttgacagccagtcaaaatcac

SEQ ID NO: 3364435 - DNA, 25 bp, Homo sapien
tttgtccaagatgttgacagccagt

SEQ ID NO: 3364436 - DNA, 25 bp, Homo sapien
gctttcccggcatttcacactcaga

SEQ ID NO: 3364437 - DNA, 25 bp, Homo sapien
cacactcagatttgtccaagatgtt

SEQ ID NO: 3364438 - DNA, 25 bp, Homo sapien
tctccccggcctttgcggagactcc

SEQ ID NO: 3364439 - DNA, 25 bp, Homo sapien
tccccggcctttgcggagactcctc

SEQ ID NO: 3364440 - DNA, 25 bp, Homo sapien
ccggcctttgcggagactcctccat

SEQ ID NO: 3364441 - DNA, 25 bp, Homo sapien
cttgccgagctctccccggcctttg

SEQ ID NO: 3364442 - DNA, 25 bp, Homo sapien
tctatctacaagtatgtctgaatca

SEQ ID NO: 3364443 - DNA, 25 bp, Homo sapien
tgtctgaatcacagatgagcgtctg

SEQ ID NO: 3364444 - DNA, 25 bp, Homo sapien
tcacagatgagcgtctgagaacgca

SEQ ID NO: 3364445 - DNA, 25 bp, Homo sapien
gctcctcctctatctacaagtatgt

SEQ ID NO: 3364446 - DNA, 25 bp, Homo sapien
cttgaaacagctgtcacctctccta

SEQ ID NO: 3364447 - DNA, 25 bp, Homo sapien
aaacagctgtcacctctcctagagg

SEQ ID NO: 3364448 - DNA, 25 bp, Homo sapien
tgaaacagctgtcacctctcctaga

SEQ ID NO: 3364449 - DNA, 25 bp, Homo sapien
aacagctgtcacctctcctagaggg

SEQ ID NO: 3364450 - DNA, 25 bp, Homo sapien
caaggctcaagaacatccaatagag

SEQ ID NO: 3364451 - DNA, 25 bp, Homo sapien
aagaacatccaatagagatttccca

SEQ ID NO: 3364452 - DNA, 25 bp, Homo sapien
ttgcaaggctcaagaacatccaata

SEQ ID NO: 3364453 - DNA, 25 bp, Homo sapien
ggctcaagaacatccaatagagatt

SEQ ID NO: 3364454 - DNA, 25 bp, Homo sapien
tgatggcaccaaattcttggagggc

SEQ ID NO: 3364455 - DNA, 25 bp, Homo sapien
caattcggcctaggtaatttgtcct

SEQ ID NO: 3364456 - DNA, 25 bp, Homo sapien
gatggcaccaaattcttggagggct

SEQ ID NO: 3364457 - DNA, 25 bp, Homo sapien
gggctttggcaattcggcctaggta

SEQ ID NO: 3364458 - DNA, 25 bp, Homo sapien
tctggtacggaagagcatgagcagt

SEQ ID NO: 3364459 - DNA, 25 bp, Homo sapien
tgagcagtgcccatgcgttgtgagg

SEQ ID NO: 3364460 - DNA, 25 bp, Homo sapien
tgaggcggcctccatggtataaggt

SEQ ID NO: 3364461 - DNA, 25 bp, Homo sapien
catggtataaggtgaggccctgccc

SEQ ID NO: 3364462 - DNA, 25 bp, Homo sapien
agaacacgagcagatgttctggttt

SEQ ID NO: 3364463 - DNA, 25 bp, Homo sapien
tttgtgagggcatcatagataggat

SEQ ID NO: 3364464 - DNA, 25 bp, Homo sapien
gataactgctcatgcagaacacgag

SEQ ID NO: 3364465 - DNA, 25 bp, Homo sapien
tgctccttagtggtgggagattcag

SEQ ID NO: 3364466 - DNA, 25 bp, Homo sapien
tgcctgcttggaccactgttcacct

SEQ ID NO: 3364467 - DNA, 25 bp, Homo sapien
gcttggaccactgttcacctttctt

SEQ ID NO: 3364468 - DNA, 25 bp, Homo sapien
ttaatgcctgcttggaccactgttc

SEQ ID NO: 3364469 - DNA, 25 bp, Homo sapien
taatatgctaacattcccatatgtt

SEQ ID NO: 3364470 - DNA, 25 bp, Homo sapien
caatgaagttacctggactaatgga

SEQ ID NO: 3364471 - DNA, 25 bp, Homo sapien
cagtggtctgtgagtgttctgtatc

SEQ ID NO: 3364472 - DNA, 25 bp, Homo sapien
cagctatgcaatcatggaaaatcac

SEQ ID NO: 3364473 - DNA, 25 bp, Homo sapien
tcagttataaaagtggtctcagtgg

SEQ ID NO: 3364474 - DNA, 25 bp, Homo sapien
gatccatgggcttgaaaggctccag

SEQ ID NO: 3364475 - DNA, 25 bp, Homo sapien
catcctgagtaatacatcttgtctt

SEQ ID NO: 3364476 - DNA, 25 bp, Homo sapien
tacccatcctgagtaatacatcttg

SEQ ID NO: 3364477 - DNA, 25 bp, Homo sapien
tcttgtactccaaagtcagatccat

SEQ ID NO: 3364478 - DNA, 25 bp, Homo sapien
taaagtttgcattcacttcgacgct

SEQ ID NO: 3364479 - DNA, 25 bp, Homo sapien
tccagacacagtgaaactcagtttc

SEQ ID NO: 3364480 - DNA, 25 bp, Homo sapien
cgacgctgcgactgaaaaaggtgaa

SEQ ID NO: 3364481 - DNA, 25 bp, Homo sapien
tcatagtatcaacaatacaattggg

SEQ ID NO: 3364482 - DNA, 25 bp, Homo sapien
catggaatgcgagggggttagggaa

SEQ ID NO: 3364483 - DNA, 25 bp, Homo sapien
tcacatggaatgcgagggggttagg

SEQ ID NO: 3364484 - DNA, 25 bp, Homo sapien
acatggaatgcgagggggttaggga

SEQ ID NO: 3364485 - DNA, 25 bp, Homo sapien
cacatggaatgcgagggggttaggg

SEQ ID NO: 3364486 - DNA, 25 bp, Homo sapien
aaggtggttaccacacgcaagcaag

SEQ ID NO: 3364487 - DNA, 25 bp, Homo sapien
cagctcccgtctgagcatgcaagtc

SEQ ID NO: 3364488 - DNA, 25 bp, Homo sapien
gtggttaccacacgcaagcaagccc

SEQ ID NO: 3364489 - DNA, 25 bp, Homo sapien
gttaccacacgcaagcaagcccttt

SEQ ID NO: 3364490 - DNA, 25 bp, Homo sapien
cactgttctaggtgttaacgatccc

SEQ ID NO: 3364491 - DNA, 25 bp, Homo sapien
tcttcgcactgttctaggtgttaac

SEQ ID NO: 3364492 - DNA, 25 bp, Homo sapien
tttcctgtggcctcttcgcactgtt

SEQ ID NO: 3364493 - DNA, 25 bp, Homo sapien
tggcctcttcgcactgttctaggtg

SEQ ID NO: 3364494 - DNA, 25 bp, Homo sapien
gaaagcactagtcctgtctaacagt

SEQ ID NO: 3364495 - DNA, 25 bp, Homo sapien
tgttgtgagcaagattcacgtcagc

SEQ ID NO: 3364496 - DNA, 25 bp, Homo sapien
gagcagttgagaaaacagggacctg

SEQ ID NO: 3364497 - DNA, 25 bp, Homo sapien
cctgttgagggactgtggaaagcac

SEQ ID NO: 3364498 - DNA, 25 bp, Homo sapien
acaaagaaatccttaactggttgtg

SEQ ID NO: 3364499 - DNA, 25 bp, Homo sapien
caaagaaatccttaactggttgtga

SEQ ID NO: 3364500 - DNA, 25 bp, Homo sapien
cagtgtccccgccttctgttaaaag

SEQ ID NO: 3364501 - DNA, 25 bp, Homo sapien
aaactttattgtgctcttggcttgg

SEQ ID NO: 3364502 - DNA, 25 bp, Homo sapien
caaacccagcaagaattccgaggga

SEQ ID NO: 3364503 - DNA, 25 bp, Homo sapien
tgaggtttatatggatctgcgaggc

SEQ ID NO: 3364504 - DNA, 25 bp, Homo sapien
tgcacatatgttgggagcagtcccc

SEQ ID NO: 3364505 - DNA, 25 bp, Homo sapien
cacagtgcacatatgttgggagcag

SEQ ID NO: 3364506 - DNA, 25 bp, Homo sapien
cagtgcacatatgttgggagcagtc

SEQ ID NO: 3364507 - DNA, 25 bp, Homo sapien
tacacagtgcacatatgttgggagc

SEQ ID NO: 3364508 - DNA, 25 bp, Homo sapien
ttctcctgcggtctcctggactgcg

SEQ ID NO: 3364509 - DNA, 25 bp, Homo sapien
ttatgtccgggcgagatcggtgtcc

SEQ ID NO: 3364510 - DNA, 25 bp, Homo sapien
ggaactcacggtccgggctgaacca

SEQ ID NO: 3364511 - DNA, 25 bp, Homo sapien
gttcggcgagtccaaaggaggctcc

SEQ ID NO: 3364512 - DNA, 25 bp, Homo sapien
agccccgcctggccctcggcgccgg

SEQ ID NO: 3364513 - DNA, 25 bp, Homo sapien
gccagccccgcctggccctcggcgc

SEQ ID NO: 3364514 - DNA, 25 bp, Homo sapien
ctgggtgtcgccagccccgcctggc

SEQ ID NO: 3364515 - DNA, 25 bp, Homo sapien
cgggaccccgacgcaccccgcgcat

SEQ ID NO: 3364516 - DNA, 25 bp, Homo sapien
tcccatggatgactaagaaggcgag

SEQ ID NO: 3364517 - DNA, 25 bp, Homo sapien
tcattttgcggactatggacacaag

SEQ ID NO: 3364518 - DNA, 25 bp, Homo sapien
tggacacaagcaaatccctcaggta

SEQ ID NO: 3364519 - DNA, 25 bp, Homo sapien
tcaagcggtggaaataatccgggtc

SEQ ID NO: 3364520 - DNA, 25 bp, Homo sapien
gagtgttcattaaaccacacatgta

SEQ ID NO: 3364521 - DNA, 25 bp, Homo sapien
gaagagatgcttcattgagtgttca

SEQ ID NO: 3364522 - DNA, 25 bp, Homo sapien
tcatacttgtacaattaactgaaga

SEQ ID NO: 3364523 - DNA, 25 bp, Homo sapien
cagatttacagtgaacttgatctac

SEQ ID NO: 3364524 - DNA, 25 bp, Homo sapien
catagcatcacttatcaagctagta

SEQ ID NO: 3364525 - DNA, 25 bp, Homo sapien
tataaactacggacttcttgtatcc

SEQ ID NO: 3364526 - DNA, 25 bp, Homo sapien
aaagagcgacagagctctctgtagt

SEQ ID NO: 3364527 - DNA, 25 bp, Homo sapien
aagatcaaggtgacactgtggtcag

SEQ ID NO: 3364528 - DNA, 25 bp, Homo sapien
tttaccacagttaccaaggtctgag

SEQ ID NO: 3364529 - DNA, 25 bp, Homo sapien
tctaggccaataaagtctaaagggc

SEQ ID NO: 3364530 - DNA, 25 bp, Homo sapien
gatggagcgtatctccaagcagggc

SEQ ID NO: 3364531 - DNA, 25 bp, Homo sapien
gcacatgtgcagttaagaggcctcc

SEQ ID NO: 3364532 - DNA, 25 bp, Homo sapien
tcatgctggaaggtctggtttacgt

SEQ ID NO: 3364533 - DNA, 25 bp, Homo sapien
agtgacaagttggaattgagcgtcc

SEQ ID NO: 3364534 - DNA, 25 bp, Homo sapien
tgctggaaggtctggtttacgtaaa

SEQ ID NO: 3364535 - DNA, 25 bp, Homo sapien
tgagcgtccgactctcgggtacctg

SEQ ID NO: 3364536 - DNA, 25 bp, Homo sapien
agttgcctgacacacatccctagct

SEQ ID NO: 3364537 - DNA, 25 bp, Homo sapien
aaaaaggccctcaagctttgtgcag

SEQ ID NO: 3364538 - DNA, 25 bp, Homo sapien
gcctcatcctgtaaacaagcatcct

SEQ ID NO: 3364539 - DNA, 25 bp, Homo sapien
cacatgtttacttcgtgctacagaa

SEQ ID NO: 3364540 - DNA, 25 bp, Homo sapien
catggaagaaaaatgttaatcaggc

SEQ ID NO: 3364541 - DNA, 25 bp, Homo sapien
gggcgcctgcagtcgcagcaactca

SEQ ID NO: 3364542 - DNA, 25 bp, Homo sapien
cgggcgcctgcagtcgcagcaactc

SEQ ID NO: 3364543 - DNA, 25 bp, Homo sapien
gaaaaatgttaatcaggccgggtgc

SEQ ID NO: 3364544 - DNA, 25 bp, Homo sapien
agagctcagatacgctactgcaggg

SEQ ID NO: 3364545 - DNA, 25 bp, Homo sapien
cctaaactgatgttttgcagcaagc

SEQ ID NO: 3364546 - DNA, 25 bp, Homo sapien
ctaattcttggtcttgtaaggcacg

SEQ ID NO: 3364547 - DNA, 25 bp, Homo sapien
taagagtctattatggtggctccag

SEQ ID NO: 3364548 - DNA, 25 bp, Homo sapien
attatgccaggctagttctaaatgc

SEQ ID NO: 3364549 - DNA, 25 bp, Homo sapien
ttctttcttcattatgccaggctag

SEQ ID NO: 3364550 - DNA, 25 bp, Homo sapien
tttcttcattatgccaggctagttc

SEQ ID NO: 3364551 - DNA, 25 bp, Homo sapien
cattatgccaggctagttctaaatg

SEQ ID NO: 3364552 - DNA, 25 bp, Homo sapien
catgaccgtcaccttcctaaagctg

SEQ ID NO: 3364553 - DNA, 25 bp, Homo sapien
tctactgtggacactcaggttagcg

SEQ ID NO: 3364554 - DNA, 25 bp, Homo sapien
aaagctgtctcgatatctactgtgg

SEQ ID NO: 3364555 - DNA, 25 bp, Homo sapien
aggcacagccgtcacttacccatga

SEQ ID NO: 3364556 - DNA, 25 bp, Homo sapien
ttggagtaatagctaagaaaacagc

SEQ ID NO: 3364557 - DNA, 25 bp, Homo sapien
tattcacgagttagaagactagctc

SEQ ID NO: 3364558 - DNA, 25 bp, Homo sapien
taggaatatgcacgagcacttcaag

SEQ ID NO: 3364559 - DNA, 25 bp, Homo sapien
ccatcttgggtacgacatgcaatga

SEQ ID NO: 3364560 - DNA, 25 bp, Homo sapien
tgaaaactatagtgaccatcttggg

SEQ ID NO: 3364561 - DNA, 25 bp, Homo sapien
taaccaagctgtacggacattaggg

SEQ ID NO: 3364562 - DNA, 25 bp, Homo sapien
taggtcttcttcgagggtggccact

SEQ ID NO: 3364563 - DNA, 25 bp, Homo sapien
gctgatcgctcactcctacaactga

SEQ ID NO: 3364564 - DNA, 25 bp, Homo sapien
tgagaccactcgtagcactggatgt

SEQ ID NO: 3364565 - DNA, 25 bp, Homo sapien
gagatagcccatattgcgatgatag

SEQ ID NO: 3364566 - DNA, 25 bp, Homo sapien
caatggtgatgagttgagatagccc

SEQ ID NO: 3364567 - DNA, 25 bp, Homo sapien
ctgaacgtttcataccaactgttgg

SEQ ID NO: 3364568 - DNA, 25 bp, Homo sapien
gatctggcccgtcttgacaatggtg

SEQ ID NO: 3364569 - DNA, 25 bp, Homo sapien
acctcctgaaatcatatcttctcta

SEQ ID NO: 3364570 - DNA, 25 bp, Homo sapien
gatgtaggtgtccaaacctcctgaa

SEQ ID NO: 3364571 - DNA, 25 bp, Homo sapien
tgactgtaaagtccacggtcttccc

SEQ ID NO: 3364572 - DNA, 25 bp, Homo sapien
tcctctttcttgcattgtggacaga

SEQ ID NO: 3364573 - DNA, 25 bp, Homo sapien
tacaaagttccagtcatgcaagatg

SEQ ID NO: 3364574 - DNA, 25 bp, Homo sapien
tgaagttactcctacaggccaggca

SEQ ID NO: 3364575 - DNA, 25 bp, Homo sapien
ttctagagcgatgaagcaaagacct

SEQ ID NO: 3364576 - DNA, 25 bp, Homo sapien
cttcaacggaaggagataacagacc

SEQ ID NO: 3364577 - DNA, 25 bp, Homo sapien
gattttcccgatcgatctgtctcac

SEQ ID NO: 3364578 - DNA, 25 bp, Homo sapien
ttttcccgggtgctactgaaggctg

SEQ ID NO: 3364579 - DNA, 25 bp, Homo sapien
gatcagccgatctaggaattgtact

SEQ ID NO: 3364580 - DNA, 25 bp, Homo sapien
tgtctgttgagagcactgtgatata

SEQ ID NO: 3364581 - DNA, 25 bp, Homo sapien
cacaggtggaccagctttgggacct

SEQ ID NO: 3364582 - DNA, 25 bp, Homo sapien
cctggaacagacttagcacaggtgg

SEQ ID NO: 3364583 - DNA, 25 bp, Homo sapien
aacagacttagcacaggtggaccag

SEQ ID NO: 3364584 - DNA, 25 bp, Homo sapien
gacttagcacaggtggaccagcttt

SEQ ID NO: 3364585 - DNA, 25 bp, Homo sapien
tgtatccattaaactctgactcccc

SEQ ID NO: 3364586 - DNA, 25 bp, Homo sapien
tataatttcgaccactccaagcatc

SEQ ID NO: 3364587 - DNA, 25 bp, Homo sapien
tctgatagtatcttctggtaagtta

SEQ ID NO: 3364588 - DNA, 25 bp, Homo sapien
tgtggcaaaatacacggaacacaaa

SEQ ID NO: 3364589 - DNA, 25 bp, Homo sapien
tgctctccaaatcggtgagattcat

SEQ ID NO: 3364590 - DNA, 25 bp, Homo sapien
tgtggtcaacgtcttcaatgctctc

SEQ ID NO: 3364591 - DNA, 25 bp, Homo sapien
tcaatgctctccaaatcggtgagat

SEQ ID NO: 3364592 - DNA, 25 bp, Homo sapien
ctttaaatctagtgtggtcaacgtc

SEQ ID NO: 3364593 - DNA, 25 bp, Homo sapien
cgtgagcaccgtgctcggccgctat

SEQ ID NO: 3364594 - DNA, 25 bp, Homo sapien
tgagcaccgtgctcggccgctatta

SEQ ID NO: 3364595 - DNA, 25 bp, Homo sapien
gttgcctaggtgggactcaagggac

SEQ ID NO: 3364596 - DNA, 25 bp, Homo sapien
agcaccgtgctcggccgctattatt

SEQ ID NO: 3364597 - DNA, 25 bp, Homo sapien
atgtttttcatcaatttggtaatta

SEQ ID NO: 3364598 - DNA, 25 bp, Homo sapien
tgaagagtcctctttagtttactct

SEQ ID NO: 3364599 - DNA, 25 bp, Homo sapien
gtcctctttagtttactctgagttc

SEQ ID NO: 3364600 - DNA, 25 bp, Homo sapien
gagtcctctttagtttactctgagt

SEQ ID NO: 3364601 - DNA, 25 bp, Homo sapien
tcagatccattgtgtcatgtaagac

SEQ ID NO: 3364602 - DNA, 25 bp, Homo sapien
gacgactttgaggagacatcaggct

SEQ ID NO: 3364603 - DNA, 25 bp, Homo sapien
gagtctaacactgaagacgactttg

SEQ ID NO: 3364604 - DNA, 25 bp, Homo sapien
tatgtctgtggtctaaactggagtc

SEQ ID NO: 3364605 - DNA, 25 bp, Homo sapien
gaagagggctaatgtctggagttga

SEQ ID NO: 3364606 - DNA, 25 bp, Homo sapien
gagggctaatgtctggagttgataa

SEQ ID NO: 3364607 - DNA, 25 bp, Homo sapien
gggctaatgtctggagttgataagg

SEQ ID NO: 3364608 - DNA, 25 bp, Homo sapien
agagggctaatgtctggagttgata

SEQ ID NO: 3364609 - DNA, 25 bp, Homo sapien
gccacattttggtgtagtacttgaa

SEQ ID NO: 3364610 - DNA, 25 bp, Homo sapien
ggtgtagtacttgaaggctgtgttt

SEQ ID NO: 3364611 - DNA, 25 bp, Homo sapien
tcctcagggtagtggccacattttg

SEQ ID NO: 3364612 - DNA, 25 bp, Homo sapien
agactcctcagggtagtggccacat

SEQ ID NO: 3364613 - DNA, 25 bp, Homo sapien
tgacaggagggttataccagataca

SEQ ID NO: 3364614 - DNA, 25 bp, Homo sapien
tgtgttttggtgacaggagggttat

SEQ ID NO: 3364615 - DNA, 25 bp, Homo sapien
caggagggttataccagatacatgt

SEQ ID NO: 3364616 - DNA, 25 bp, Homo sapien
tgttttggtgacaggagggttatac

SEQ ID NO: 3364617 - DNA, 25 bp, Homo sapien
agatagatggctatcagaccctgca

SEQ ID NO: 3364618 - DNA, 25 bp, Homo sapien
cagaccctgcatctaaacaatctgt

SEQ ID NO: 3364619 - DNA, 25 bp, Homo sapien
cttagatgacggagacgaatcagat

SEQ ID NO: 3364620 - DNA, 25 bp, Homo sapien
cggagacgaatcagatagatggcta

SEQ ID NO: 3364621 - DNA, 25 bp, Homo sapien
ctgaagatgaggaagataaagagga

SEQ ID NO: 3364622 - DNA, 25 bp, Homo sapien
cctgaagatgaggaagataaagagg

SEQ ID NO: 3364623 - DNA, 25 bp, Homo sapien
acctgaagatgaggaagataaagag

SEQ ID NO: 3364624 - DNA, 25 bp, Homo sapien
tgcaatactttttccttatgctttt

SEQ ID NO: 3364625 - DNA, 25 bp, Homo sapien
tttgcaatactttttccttatgctt

SEQ ID NO: 3364626 - DNA, 25 bp, Homo sapien
ttgcaatactttttccttatgcttt

SEQ ID NO: 3364627 - DNA, 25 bp, Homo sapien
cacatggtatttcttcccatcatca

SEQ ID NO: 3364628 - DNA, 25 bp, Homo sapien
tggtatttcttcccatcatcactgc

SEQ ID NO: 3364629 - DNA, 25 bp, Homo sapien
catggtatttcttcccatcatcact

SEQ ID NO: 3364630 - DNA, 25 bp, Homo sapien
tcacatggtatttcttcccatcatc

SEQ ID NO: 3364631 - DNA, 25 bp, Homo sapien
ttttgatcttgaagaggctggcaat

SEQ ID NO: 3364632 - DNA, 25 bp, Homo sapien
ttttttgatcttgaagaggctggca

SEQ ID NO: 3364633 - DNA, 25 bp, Homo sapien
taagtcctgttgtaacatcacacaa

SEQ ID NO: 3364634 - DNA, 25 bp, Homo sapien
tttggaatggacacgtgtattttaa

SEQ ID NO: 3364635 - DNA, 25 bp, Homo sapien
taacatcattctctacggggtgttc

SEQ ID NO: 3364636 - DNA, 25 bp, Homo sapien
catcattctctacggggtgttctgg

SEQ ID NO: 3364637 - DNA, 25 bp, Homo sapien
gcattccagtgttcgaatttacatt

SEQ ID NO: 3364638 - DNA, 25 bp, Homo sapien
gtaacatcattctctacggggtgtt

SEQ ID NO: 3364639 - DNA, 25 bp, Homo sapien
gctaggctcttgtctacatccccta

SEQ ID NO: 3364640 - DNA, 25 bp, Homo sapien
gcagataacccctcgggcctcgtgg

SEQ ID NO: 3364641 - DNA, 25 bp, Homo sapien
acctgtttccaggaacgctaggctc

SEQ ID NO: 3364642 - DNA, 25 bp, Homo sapien
ccaggaacgctaggctcttgtctac

SEQ ID NO: 3364643 - DNA, 25 bp, Homo sapien
gaacggaaaggagcgtggcgggcgc

SEQ ID NO: 3364644 - DNA, 25 bp, Homo sapien
gatgcgaacggaaaggagcgtggcg

SEQ ID NO: 3364645 - DNA, 25 bp, Homo sapien
ggcgccccgcgagcagggagccagg

SEQ ID NO: 3364646 - DNA, 25 bp, Homo sapien
agcggggagacggatgcgaacggaa

SEQ ID NO: 3364647 - DNA, 25 bp, Homo sapien
cttccggaggcggagagagcggaaa

SEQ ID NO: 3364648 - DNA, 25 bp, Homo sapien
ccgcgcttccggaggcggagagagc

SEQ ID NO: 3364649 - DNA, 25 bp, Homo sapien
cgctggcgcactcccgcggccctga

SEQ ID NO: 3364650 - DNA, 25 bp, Homo sapien
ggaggcggagagagcggaaagggaa

SEQ ID NO: 3364651 - DNA, 25 bp, Homo sapien
tagatggagataatggtatccatcg

SEQ ID NO: 3364652 - DNA, 25 bp, Homo sapien
tgtgcttcagttccccgctgtgtag

SEQ ID NO: 3364653 - DNA, 25 bp, Homo sapien
cagttccccgctgtgtagatggaga

SEQ ID NO: 3364654 - DNA, 25 bp, Homo sapien
gatggagataatggtatccatcggg

SEQ ID NO: 3364655 - DNA, 25 bp, Homo sapien
agcgccgctgacacctgcagcaaaa

SEQ ID NO: 3364656 - DNA, 25 bp, Homo sapien
cgccgctgacacctgcagcaaaatt

SEQ ID NO: 3364657 - DNA, 25 bp, Homo sapien
cagcgccgctgacacctgcagcaaa

SEQ ID NO: 3364658 - DNA, 25 bp, Homo sapien
gcgccgctgacacctgcagcaaaat

SEQ ID NO: 3364659 - DNA, 25 bp, Homo sapien
ctgctggggatcctgtttgccctcg

SEQ ID NO: 3364660 - DNA, 25 bp, Homo sapien
tggggatcctgtttgccctcgtctg

SEQ ID NO: 3364661 - DNA, 25 bp, Homo sapien
gggatcctgtttgccctcgtctgcc

SEQ ID NO: 3364662 - DNA, 25 bp, Homo sapien
tcctgtttgccctcgtctgccggag

SEQ ID NO: 3364663 - DNA, 25 bp, Homo sapien
atgcccttgtcgaagcgggaagccg

SEQ ID NO: 3364664 - DNA, 25 bp, Homo sapien
ccgcggcatgcccttgtcgaagcgg

SEQ ID NO: 3364665 - DNA, 25 bp, Homo sapien
gccctccccgcttccggtgccagct

SEQ ID NO: 3364666 - DNA, 25 bp, Homo sapien
cggcatgcccttgtcgaagcgggaa

SEQ ID NO: 3364667 - DNA, 25 bp, Homo sapien
agcgttcgctacgtgcaggctctgc

SEQ ID NO: 3364668 - DNA, 25 bp, Homo sapien
gaagaagggaatcacagcgttcgct

SEQ ID NO: 3364669 - DNA, 25 bp, Homo sapien
tgaggaaacttgcttcggtccctgg

SEQ ID NO: 3364670 - DNA, 25 bp, Homo sapien
ctttatgaccgtttgccgatgagga

SEQ ID NO: 3364671 - DNA, 25 bp, Homo sapien
cgtattatagttgtgcagtccccgc

SEQ ID NO: 3364672 - DNA, 25 bp, Homo sapien
gatacgtattatagttgtgcagtcc

SEQ ID NO: 3364673 - DNA, 25 bp, Homo sapien
gcggatacgtattatagttgtgcag

SEQ ID NO: 3364674 - DNA, 25 bp, Homo sapien
tattatagttgtgcagtccccgctg

SEQ ID NO: 3364675 - DNA, 25 bp, Homo sapien
tagcaggagctcaagaagtgttcgc

SEQ ID NO: 3364676 - DNA, 25 bp, Homo sapien
caattgagcttgtacctgttgagca

SEQ ID NO: 3364677 - DNA, 25 bp, Homo sapien
tttacttggatgagaatcactgttg

SEQ ID NO: 3364678 - DNA, 25 bp, Homo sapien
gatgatggtgaagaacgttatgtcc

SEQ ID NO: 3364679 - DNA, 25 bp, Homo sapien
cagtctgtgagaaagacgttccctg

SEQ ID NO: 3364680 - DNA, 25 bp, Homo sapien
gctatgccgccactgccagtctgtg

SEQ ID NO: 3364681 - DNA, 25 bp, Homo sapien
gagagaggtccctgtgctatgccgc

SEQ ID NO: 3364682 - DNA, 25 bp, Homo sapien
ctggagggccttggtccgtctttcg

SEQ ID NO: 3364683 - DNA, 25 bp, Homo sapien
tcttgttcattactcagttcttctt

SEQ ID NO: 3364684 - DNA, 25 bp, Homo sapien
cttgttcattactcagttcttcttc

SEQ ID NO: 3364685 - DNA, 25 bp, Homo sapien
ttgggaaattgccagacagctgcac

SEQ ID NO: 3364686 - DNA, 25 bp, Homo sapien
cagactgagtcacgtggatgtggtt

SEQ ID NO: 3364687 - DNA, 25 bp, Homo sapien
gacagctgcaccacagactgagtca

SEQ ID NO: 3364688 - DNA, 25 bp, Homo sapien
tggatgtggttaaagttgtctgcaa

SEQ ID NO: 3364689 - DNA, 25 bp, Homo sapien
catatctaaagactcagtaactgtg

SEQ ID NO: 3364690 - DNA, 25 bp, Homo sapien
aacaaacatgtatacgtaccatttc

SEQ ID NO: 3364691 - DNA, 25 bp, Homo sapien
tattgaactctcactgcggggcaga

SEQ ID NO: 3364692 - DNA, 25 bp, Homo sapien
taccatttccctagatagtacatat

SEQ ID NO: 3364693 - DNA, 25 bp, Homo sapien
tgtgcacttttgatcaagggaaagc

SEQ ID NO: 3364694 - DNA, 25 bp, Homo sapien
ggaaagcgtacaaacatcagccctc

SEQ ID NO: 3364695 - DNA, 25 bp, Homo sapien
ccgaactcagcacttgcaaagtcgt

SEQ ID NO: 3364696 - DNA, 25 bp, Homo sapien
tcctgattcttgaaccgaactcagc

SEQ ID NO: 3364697 - DNA, 25 bp, Homo sapien
cccaagggctcttgcgagggttcct

SEQ ID NO: 3364698 - DNA, 25 bp, Homo sapien
tgccccaagggctcttgcgagggtt

SEQ ID NO: 3364699 - DNA, 25 bp, Homo sapien
tgcccagtccttgaacctccagcac

SEQ ID NO: 3364700 - DNA, 25 bp, Homo sapien
tgccattgccccaagggctcttgcg

SEQ ID NO: 3364701 - DNA, 25 bp, Homo sapien
ccctgcctgaaggtctgtgggctcg

SEQ ID NO: 3364702 - DNA, 25 bp, Homo sapien
tccctgcctgaaggtctgtgggctc

SEQ ID NO: 3364703 - DNA, 25 bp, Homo sapien
tgcctgaaggtctgtgggctcgggc

SEQ ID NO: 3364704 - DNA, 25 bp, Homo sapien
attccctgcctgaaggtctgtgggc

SEQ ID NO: 3364705 - DNA, 25 bp, Homo sapien
aatggtgggtttaagtatcttgcct

SEQ ID NO: 3364706 - DNA, 25 bp, Homo sapien
aatgtgagtgctttctcactgaacc

SEQ ID NO: 3364707 - DNA, 25 bp, Homo sapien
tatgaagtaggaggcatcttctaaa

SEQ ID NO: 3364708 - DNA, 25 bp, Homo sapien
tcttgcctaataccacatagatagg

SEQ ID NO: 3364709 - DNA, 25 bp, Homo sapien
aatgtgtcctttagctacaaagagg

SEQ ID NO: 3364710 - DNA, 25 bp, Homo sapien
catactaagatagaaggaagcagcc

SEQ ID NO: 3364711 - DNA, 25 bp, Homo sapien
tgttttagccctacctcagtacctg

SEQ ID NO: 3364712 - DNA, 25 bp, Homo sapien
catacgccagggttctacagcatct

SEQ ID NO: 3364713 - DNA, 25 bp, Homo sapien
gaaacactgtaaagaacatttgcta

SEQ ID NO: 3364714 - DNA, 25 bp, Homo sapien
taataggaaacactgtaaagaacat

SEQ ID NO: 3364715 - DNA, 25 bp, Homo sapien
gtgtggtagtacacgcatgcctgtg

SEQ ID NO: 3364716 - DNA, 25 bp, Homo sapien
aataggaaacactgtaaagaacatt

SEQ ID NO: 3364717 - DNA, 25 bp, Homo sapien
tatgtacttaactacttctgcaggg

SEQ ID NO: 3364718 - DNA, 25 bp, Homo sapien
tatcaagccgtttagaccacaggga

SEQ ID NO: 3364719 - DNA, 25 bp, Homo sapien
tagaatcagggaggacgggacttat

SEQ ID NO: 3364720 - DNA, 25 bp, Homo sapien
cacagagggcttaactgagaaccgt

SEQ ID NO: 3364721 - DNA, 25 bp, Homo sapien
tgaagttcaggcaatacagacaagc

SEQ ID NO: 3364722 - DNA, 25 bp, Homo sapien
tgaggatatctcaaacccgagtctg

SEQ ID NO: 3364723 - DNA, 25 bp, Homo sapien
cagggactcgcttgtgccagagcat

SEQ ID NO: 3364724 - DNA, 25 bp, Homo sapien
taagattaggtcaggagactccgtc

SEQ ID NO: 3364725 - DNA, 25 bp, Homo sapien
aagtaaggagtgaagttcatctgcc

SEQ ID NO: 3364726 - DNA, 25 bp, Homo sapien
agttcatctgccaatgcgggattca

SEQ ID NO: 3364727 - DNA, 25 bp, Homo sapien
ccaatgcgggattcagacgacaagc

SEQ ID NO: 3364728 - DNA, 25 bp, Homo sapien
aattctttgacgaataagtaaggag

SEQ ID NO: 3364729 - DNA, 25 bp, Homo sapien
cattgccatgcctctgccgatgaac

SEQ ID NO: 3364730 - DNA, 25 bp, Homo sapien
tgaactccgggagacagtctgtgac

SEQ ID NO: 3364731 - DNA, 25 bp, Homo sapien
tgcgtggtagaaggatgccattgcc

SEQ ID NO: 3364732 - DNA, 25 bp, Homo sapien
tggtgatgcccaagccaagctgaag

SEQ ID NO: 3364733 - DNA, 25 bp, Homo sapien
tagctttctgctgtcacgtgaggac

SEQ ID NO: 3364734 - DNA, 25 bp, Homo sapien
ggacatgatggtcctcccctctgga

SEQ ID NO: 3364735 - DNA, 25 bp, Homo sapien
tatagaactgcatgaccgaggagtg

SEQ ID NO: 3364736 - DNA, 25 bp, Homo sapien
tcttaagaggcgacgaggccatgag

SEQ ID NO: 3364737 - DNA, 25 bp, Homo sapien
tcccttgagcatagacgtttccgcg

SEQ ID NO: 3364738 - DNA, 25 bp, Homo sapien
taatactccacgagattcccttgag

SEQ ID NO: 3364739 - DNA, 25 bp, Homo sapien
tatcctgccggatgccttgtccata

SEQ ID NO: 3364740 - DNA, 25 bp, Homo sapien
tacaagtacatgagcccaagtgcac

SEQ ID NO: 3364741 - DNA, 25 bp, Homo sapien
tcagagtaaggatcaggaagatgcc

SEQ ID NO: 3364742 - DNA, 25 bp, Homo sapien
taaacgctgtatgtaggctcaagca

SEQ ID NO: 3364743 - DNA, 25 bp, Homo sapien
gcagctgctgcgatcaaagacaacc

SEQ ID NO: 3364744 - DNA, 25 bp, Homo sapien
tcccggtggattctagagatagcag

SEQ ID NO: 3364745 - DNA, 25 bp, Homo sapien
tacagcccgagcatactttgagcct

SEQ ID NO: 3364746 - DNA, 25 bp, Homo sapien
ccattgtctgctgcgataagccaca

SEQ ID NO: 3364747 - DNA, 25 bp, Homo sapien
cacactagctttgggatttccattg

SEQ ID NO: 3364748 - DNA, 25 bp, Homo sapien
ttggttgagtaatacagcccgagca

SEQ ID NO: 3364749 - DNA, 25 bp, Homo sapien
gcagctgcaaattttaagtgtcttg

SEQ ID NO: 3364750 - DNA, 25 bp, Homo sapien
ctcttccgaggttgtaagcagctgc

SEQ ID NO: 3364751 - DNA, 25 bp, Homo sapien
tcctcatttgatcgtttaacacctt

SEQ ID NO: 3364752 - DNA, 25 bp, Homo sapien
gctttgggacatggagaatcaagaa

SEQ ID NO: 3364753 - DNA, 25 bp, Homo sapien
ggtaagttgcttgatggtctttctc

SEQ ID NO: 3364754 - DNA, 25 bp, Homo sapien
gcccatcatagtacatcactcctag

SEQ ID NO: 3364755 - DNA, 25 bp, Homo sapien
cactcctagctggtaagttgcttga

SEQ ID NO: 3364756 - DNA, 25 bp, Homo sapien
gttctaatgcttcttcataccatcc

SEQ ID NO: 3364757 - DNA, 25 bp, Homo sapien
tgccttatccaccaaattagcatgg

SEQ ID NO: 3364758 - DNA, 25 bp, Homo sapien
gaaatatgccagagtgtctcctttc

SEQ ID NO: 3364759 - DNA, 25 bp, Homo sapien
ccttcaagagctgcaatgccttatc

SEQ ID NO: 3364760 - DNA, 25 bp, Homo sapien
aaatatagttgacctcgtaggaaat

SEQ ID NO: 3364761 - DNA, 25 bp, Homo sapien
ctagtgctcattcctacaactggcc

SEQ ID NO: 3364762 - DNA, 25 bp, Homo sapien
ctacaactggcctccttagctcaag

SEQ ID NO: 3364763 - DNA, 25 bp, Homo sapien
catctaacactgttgacattcttgc

SEQ ID NO: 3364764 - DNA, 25 bp, Homo sapien
atccatctaacactgttgacattct

SEQ ID NO: 3364765 - DNA, 25 bp, Homo sapien
caagtagagccctaacagtgcaggg

SEQ ID NO: 3364766 - DNA, 25 bp, Homo sapien
tgagagttcctctaaccaaatgagc

SEQ ID NO: 3364767 - DNA, 25 bp, Homo sapien
taaccctgctcatggccaagtagag

SEQ ID NO: 3364768 - DNA, 25 bp, Homo sapien
gcatgtccttaagtcctgagagtaa

SEQ ID NO: 3364769 - DNA, 25 bp, Homo sapien
ggcaacttttcactggtcaacttca

SEQ ID NO: 3364770 - DNA, 25 bp, Homo sapien
tgggcaacttttcactggtcaactt

SEQ ID NO: 3364771 - DNA, 25 bp, Homo sapien
tactgagatacagaggcataaaagg

SEQ ID NO: 3364772 - DNA, 25 bp, Homo sapien
ttttagcagcatactgagatacaga

SEQ ID NO: 3364773 - DNA, 25 bp, Homo sapien
ccaccaggtgctcattaggaaaagc

SEQ ID NO: 3364774 - DNA, 25 bp, Homo sapien
ttcctccagcgaagtgcaaagagag

SEQ ID NO: 3364775 - DNA, 25 bp, Homo sapien
cccaccaggtgctcattaggaaaag

SEQ ID NO: 3364776 - DNA, 25 bp, Homo sapien
gtgcaaagagagactctattcccac

SEQ ID NO: 3364777 - DNA, 25 bp, Homo sapien
tccacagcatcgcattcaccatgag

SEQ ID NO: 3364778 - DNA, 25 bp, Homo sapien
accatgagacctgtttgcacgtcct

SEQ ID NO: 3364779 - DNA, 25 bp, Homo sapien
ccaactccaggacgtgaacattctt

SEQ ID NO: 3364780 - DNA, 25 bp, Homo sapien
gaacattctttactaggacaccaag

SEQ ID NO: 3364781 - DNA, 25 bp, Homo sapien
atacatcaagatgggtcaagtcacc

SEQ ID NO: 3364782 - DNA, 25 bp, Homo sapien
tttatacatcaagatgggtcaagtc

SEQ ID NO: 3364783 - DNA, 25 bp, Homo sapien
cacccagcacaagtgttgccactta

SEQ ID NO: 3364784 - DNA, 25 bp, Homo sapien
tgggtttatacatcaagatgggtca

SEQ ID NO: 3364785 - DNA, 25 bp, Homo sapien
ccacagtcagagctcttctgcactg

SEQ ID NO: 3364786 - DNA, 25 bp, Homo sapien
tggtgacactgcccacagtcagagc

SEQ ID NO: 3364787 - DNA, 25 bp, Homo sapien
cactgcccacagtcagagctcttct

SEQ ID NO: 3364788 - DNA, 25 bp, Homo sapien
ctggtgacactgcccacagtcagag

SEQ ID NO: 3364789 - DNA, 25 bp, Homo sapien
tgcccttgtaactgacactcatcgg

SEQ ID NO: 3364790 - DNA, 25 bp, Homo sapien
cttctctgcccttgtaactgacact

SEQ ID NO: 3364791 - DNA, 25 bp, Homo sapien
ccttgtaactgacactcatcggacg

SEQ ID NO: 3364792 - DNA, 25 bp, Homo sapien
taactgacactcatcggacgaatcc

SEQ ID NO: 3364793 - DNA, 25 bp, Homo sapien
ctgagggtagtgagacagcaaactc

SEQ ID NO: 3364794 - DNA, 25 bp, Homo sapien
tagagagacccttagtgtgattgga

SEQ ID NO: 3364795 - DNA, 25 bp, Homo sapien
catataaaatgtagcggtcacctca

SEQ ID NO: 3364796 - DNA, 25 bp, Homo sapien
tcctgattggtggtcaagagaagaa

SEQ ID NO: 3364797 - DNA, 25 bp, Homo sapien
cccaaacattctcagggataattta

SEQ ID NO: 3364798 - DNA, 25 bp, Homo sapien
ctgtcttggattggcgtcttttatt

SEQ ID NO: 3364799 - DNA, 25 bp, Homo sapien
tattggattgactagatatttatta

SEQ ID NO: 3364800 - DNA, 25 bp, Homo sapien
ctgggtatttattggattgactaga

SEQ ID NO: 3364801 - DNA, 25 bp, Homo sapien
catcttccccaagaagtttgagtta

SEQ ID NO: 3364802 - DNA, 25 bp, Homo sapien
caacagtgaagaagtgaacatttaa

SEQ ID NO: 3364803 - DNA, 25 bp, Homo sapien
cattgagaccactggacccttctga

SEQ ID NO: 3364804 - DNA, 25 bp, Homo sapien
tttaaatctagtcaccattgagacc

SEQ ID NO: 3364805 - DNA, 25 bp, Homo sapien
agtactaggtttagtattgcgggag

SEQ ID NO: 3364806 - DNA, 25 bp, Homo sapien
cgcgcctgaccctcaagagtaatta

SEQ ID NO: 3364807 - DNA, 25 bp, Homo sapien
tattgcgggagattcaattccagga

SEQ ID NO: 3364808 - DNA, 25 bp, Homo sapien
ggaacaaggctacactgacagtcat

SEQ ID NO: 3364809 - DNA, 25 bp, Homo sapien
aattagcactgcttaggagaacgcc

SEQ ID NO: 3364810 - DNA, 25 bp, Homo sapien
aaatggcatcctcgttctggaaacg

SEQ ID NO: 3364811 - DNA, 25 bp, Homo sapien
gaaaattgatcccacctgctacacg

SEQ ID NO: 3364812 - DNA, 25 bp, Homo sapien
gaaatatggaggcactttcaccaca

SEQ ID NO: 3364813 - DNA, 25 bp, Homo sapien
gggaaaagaaacactcggctggagc

SEQ ID NO: 3364814 - DNA, 25 bp, Homo sapien
tcagtagctgccatcggaagtcagg

SEQ ID NO: 3364815 - DNA, 25 bp, Homo sapien
tctggaaagacgcttagggagagtc

SEQ ID NO: 3364816 - DNA, 25 bp, Homo sapien
tatttctccgagctttcaaaggcat

SEQ ID NO: 3364817 - DNA, 25 bp, Homo sapien
ccagtgtttgtgtacgtgcggccgt

SEQ ID NO: 3364818 - DNA, 25 bp, Homo sapien
aggattaggctgctcgggcgtaacc

SEQ ID NO: 3364819 - DNA, 25 bp, Homo sapien
gagggcctgacgcatccacagctgg

SEQ ID NO: 3364820 - DNA, 25 bp, Homo sapien
cacagctggccaatcggcggatggc

SEQ ID NO: 3364821 - DNA, 25 bp, Homo sapien
ccgaggtgagattcgggctcacaga

SEQ ID NO: 3364822 - DNA, 25 bp, Homo sapien
tgctggattgcaaccccgaggtgag

SEQ ID NO: 3364823 - DNA, 25 bp, Homo sapien
tcacagagcccgagcttttgtcctg

SEQ ID NO: 3364824 - DNA, 25 bp, Homo sapien
ccttaggcgggaaatgctgttgctg

SEQ ID NO: 3364825 - DNA, 25 bp, Homo sapien
cgtgctcagacagaaacggagtctc

SEQ ID NO: 3364826 - DNA, 25 bp, Homo sapien
taagaacgggcaaacagctgaagat

SEQ ID NO: 3364827 - DNA, 25 bp, Homo sapien
gaatgattgtgttgccgtgctcaga

SEQ ID NO: 3364828 - DNA, 25 bp, Homo sapien
tcagaactggaatgcccgctctatg

SEQ ID NO: 3364829 - DNA, 25 bp, Homo sapien
tagagaccaaaaatgggactgcatg

SEQ ID NO: 3364830 - DNA, 25 bp, Homo sapien
tatacttaccagagtctagagacca

SEQ ID NO: 3364831 - DNA, 25 bp, Homo sapien
ttaaatcgtcaaactagaaccagga

SEQ ID NO: 3364832 - DNA, 25 bp, Homo sapien
cacgtgggttatgaagaagtctgaa

SEQ ID NO: 3364833 - DNA, 25 bp, Homo sapien
taccactctactgcagtctttgact

SEQ ID NO: 3364834 - DNA, 25 bp, Homo sapien
taataccactctactgcagtctttg

SEQ ID NO: 3364835 - DNA, 25 bp, Homo sapien
tttataataccactctactgcagtc

SEQ ID NO: 3364836 - DNA, 25 bp, Homo sapien
aatttataataccactctactgcag

SEQ ID NO: 3364837 - DNA, 25 bp, Homo sapien
taaatcatatttggtcgctgaggaa

SEQ ID NO: 3364838 - DNA, 25 bp, Homo sapien
tatagtatgcatccttgttccaaaa

SEQ ID NO: 3364839 - DNA, 25 bp, Homo sapien
gaagacataagttatagtatgcatc

SEQ ID NO: 3364840 - DNA, 25 bp, Homo sapien
ctgggcccttccatccgcaccagcc

SEQ ID NO: 3364841 - DNA, 25 bp, Homo sapien
cgtgacatcaggctctgtcagcagg

SEQ ID NO: 3364842 - DNA, 25 bp, Homo sapien
tgaattcctactagcatagaaaagt

SEQ ID NO: 3364843 - DNA, 25 bp, Homo sapien
ccttggaataagactctaaatggct

SEQ ID NO: 3364844 - DNA, 25 bp, Homo sapien
caagattatgtcatggaaatcgtga

SEQ ID NO: 3364845 - DNA, 25 bp, Homo sapien
gcctagctctggacgcactgatcta

SEQ ID NO: 3364846 - DNA, 25 bp, Homo sapien
tcttcgcctagctctggacgcactg

SEQ ID NO: 3364847 - DNA, 25 bp, Homo sapien
gatctacctgcagtgcggctttcac

SEQ ID NO: 3364848 - DNA, 25 bp, Homo sapien
tctggacgcactgatctacctgcag

SEQ ID NO: 3364849 - DNA, 25 bp, Homo sapien
tcagtaagatacatgcaccagtcaa

SEQ ID NO: 3364850 - DNA, 25 bp, Homo sapien
tacatgcaccagtcaaaaaaccttt

SEQ ID NO: 3364851 - DNA, 25 bp, Homo sapien
gaatattgctactatattcagtaag

SEQ ID NO: 3364852 - DNA, 25 bp, Homo sapien
ctacagaacaagaatattgctacta

SEQ ID NO: 3364853 - DNA, 25 bp, Homo sapien
ccggtataatgtggatctagaatca

SEQ ID NO: 3364854 - DNA, 25 bp, Homo sapien
caggtcttcagcaccggtataatgt

SEQ ID NO: 3364855 - DNA, 25 bp, Homo sapien
tctcattccatgcaactcctagtat

SEQ ID NO: 3364856 - DNA, 25 bp, Homo sapien
gcaactcctagtattgtgtgggcca

SEQ ID NO: 3364857 - DNA, 25 bp, Homo sapien
ccagcttctacctccatttcttaca

SEQ ID NO: 3364858 - DNA, 25 bp, Homo sapien
ggtagagacgcggtctggcccatgc

SEQ ID NO: 3364859 - DNA, 25 bp, Homo sapien
tacctccatttcttacacactagtc

SEQ ID NO: 3364860 - DNA, 25 bp, Homo sapien
gtagagacgcggtctggcccatgct

SEQ ID NO: 3364861 - DNA, 25 bp, Homo sapien
gcatattactcactctaccaaaaac

SEQ ID NO: 3364862 - DNA, 25 bp, Homo sapien
tgactgattttatgcaacattaaat

SEQ ID NO: 3364863 - DNA, 25 bp, Homo sapien
caatgataagttttgcatattactc

SEQ ID NO: 3364864 - DNA, 25 bp, Homo sapien
taaatgactgattttatgcaacatt

SEQ ID NO: 3364865 - DNA, 25 bp, Homo sapien
cgtccttgagaggcaatttctgaac

SEQ ID NO: 3364866 - DNA, 25 bp, Homo sapien
cttcactttggaaatgattagccag

SEQ ID NO: 3364867 - DNA, 25 bp, Homo sapien
ttcactttggaaatgattagccagt

SEQ ID NO: 3364868 - DNA, 25 bp, Homo sapien
ccattttctatcagatgaactactt

SEQ ID NO: 3364869 - DNA, 25 bp, Homo sapien
tttctatcagatgaactacttccaa

SEQ ID NO: 3364870 - DNA, 25 bp, Homo sapien
tctatcagatgaactacttccaaca

SEQ ID NO: 3364871 - DNA, 25 bp, Homo sapien
attttctatcagatgaactacttcc

SEQ ID NO: 3364872 - DNA, 25 bp, Homo sapien
taggagacaatgtttcctactttct

SEQ ID NO: 3364873 - DNA, 25 bp, Homo sapien
agacaatgtttcctactttcttgtt

SEQ ID NO: 3364874 - DNA, 25 bp, Homo sapien
ctaggagacaatgtttcctactttc

SEQ ID NO: 3364875 - DNA, 25 bp, Homo sapien
ggagacaatgtttcctactttcttg

SEQ ID NO: 3364876 - DNA, 25 bp, Homo sapien
tcttgaactgtataaaggaggcctg

SEQ ID NO: 3364877 - DNA, 25 bp, Homo sapien
ccaccaagtgtgctagataagacgc

SEQ ID NO: 3364878 - DNA, 25 bp, Homo sapien
caccttggtgctcagggagttctta

SEQ ID NO: 3364879 - DNA, 25 bp, Homo sapien
gagtgttaagtcctgggttcttgcc

SEQ ID NO: 3364880 - DNA, 25 bp, Homo sapien
taccgatcaattggtttagtaccag

SEQ ID NO: 3364881 - DNA, 25 bp, Homo sapien
tgccgcgatccgacaaatgttgctg

SEQ ID NO: 3364882 - DNA, 25 bp, Homo sapien
caggatttttgacgttataccgatc

SEQ ID NO: 3364883 - DNA, 25 bp, Homo sapien
accagctgcacctcaatagatccaa

SEQ ID NO: 3364884 - DNA, 25 bp, Homo sapien
tataaaacatccatacacaagacag

SEQ ID NO: 3364885 - DNA, 25 bp, Homo sapien
aatataaaacatccatacacaagac

SEQ ID NO: 3364886 - DNA, 25 bp, Homo sapien
atataaaacatccatacacaagaca

SEQ ID NO: 3364887 - DNA, 25 bp, Homo sapien
attaagggctaatgaaacatacagt

SEQ ID NO: 3364888 - DNA, 25 bp, Homo sapien
tgcagagatcgataagcacagcccc

SEQ ID NO: 3364889 - DNA, 25 bp, Homo sapien
tttgaaccaagagcagatagtctgc

SEQ ID NO: 3364890 - DNA, 25 bp, Homo sapien
tgatagccatatatgccctggacca

SEQ ID NO: 3364891 - DNA, 25 bp, Homo sapien
gacctctctgtgtatccctgatgtt

SEQ ID NO: 3364892 - DNA, 25 bp, Homo sapien
acatattctatatatgctcccgaat

SEQ ID NO: 3364893 - DNA, 25 bp, Homo sapien
tatgctcccgaattatgtttaatgt

SEQ ID NO: 3364894 - DNA, 25 bp, Homo sapien
tattaacttaggatagaagtacata

SEQ ID NO: 3364895 - DNA, 25 bp, Homo sapien
taacttaggatagaagtacatattc

SEQ ID NO: 3364896 - DNA, 25 bp, Homo sapien
tttctcttgggaatctgaactgaga

SEQ ID NO: 3364897 - DNA, 25 bp, Homo sapien
cagttggaatgaggcatacactggg

SEQ ID NO: 3364898 - DNA, 25 bp, Homo sapien
gaatctgaactgagaggtgcagagt

SEQ ID NO: 3364899 - DNA, 25 bp, Homo sapien
aactgagaggtgcagagttagccag

SEQ ID NO: 3364900 - DNA, 25 bp, Homo sapien
taaccatctttgtatggctcatctg

SEQ ID NO: 3364901 - DNA, 25 bp, Homo sapien
aagtgataagcattagaccttttga

SEQ ID NO: 3364902 - DNA, 25 bp, Homo sapien
ataccagtctccatgttaggtggat

SEQ ID NO: 3364903 - DNA, 25 bp, Homo sapien
ggattaaggtaagtatgtggatttc

SEQ ID NO: 3364904 - DNA, 25 bp, Homo sapien
tgaaggatatgaaattgttacaaga

SEQ ID NO: 3364905 - DNA, 25 bp, Homo sapien
gattatgaattgcatcaaccaggag

SEQ ID NO: 3364906 - DNA, 25 bp, Homo sapien
tccatgtcagttagttgattatgaa

SEQ ID NO: 3364907 - DNA, 25 bp, Homo sapien
tggttcagggaccacaatagatgtt

SEQ ID NO: 3364908 - DNA, 25 bp, Homo sapien
cttctggagcaacagatataactgc

SEQ ID NO: 3364909 - DNA, 25 bp, Homo sapien
tccctttcaatgatgggcgttacag

SEQ ID NO: 3364910 - DNA, 25 bp, Homo sapien
taactgcatcgacaggtaaagtcat

SEQ ID NO: 3364911 - DNA, 25 bp, Homo sapien
taacataatggtgtcctccgctttc

SEQ ID NO: 3364912 - DNA, 25 bp, Homo sapien
ccagcataagatctatatttactat

SEQ ID NO: 3364913 - DNA, 25 bp, Homo sapien
ttccagcataagatctatatttact

SEQ ID NO: 3364914 - DNA, 25 bp, Homo sapien
tccagcataagatctatatttacta

SEQ ID NO: 3364915 - DNA, 25 bp, Homo sapien
agcataagatctatatttactattt

SEQ ID NO: 3364916 - DNA, 25 bp, Homo sapien
agactagccaagtacagtagtgaaa

SEQ ID NO: 3364917 - DNA, 25 bp, Homo sapien
taactggctgtgaatgatcaactga

SEQ ID NO: 3364918 - DNA, 25 bp, Homo sapien
tgtaactggctgtgaatgatcaact

SEQ ID NO: 3364919 - DNA, 25 bp, Homo sapien
agccaagtacagtagtgaaaagggg

SEQ ID NO: 3364920 - DNA, 25 bp, Homo sapien
ccaaaccaacttcatgtcctcctca

SEQ ID NO: 3364921 - DNA, 25 bp, Homo sapien
atggcccaaaccaacttcatgtcct

SEQ ID NO: 3364922 - DNA, 25 bp, Homo sapien
gcccaaaccaacttcatgtcctcct

SEQ ID NO: 3364923 - DNA, 25 bp, Homo sapien
acatggcccaaaccaacttcatgtc

SEQ ID NO: 3364924 - DNA, 25 bp, Homo sapien
tctgataactttttgtccttctttc

SEQ ID NO: 3364925 - DNA, 25 bp, Homo sapien
tctttttatatcttcttctggctca

SEQ ID NO: 3364926 - DNA, 25 bp, Homo sapien
tttttatatcttcttctggctcaaa

SEQ ID NO: 3364927 - DNA, 25 bp, Homo sapien
ccttctttctcatgaattttctttt

SEQ ID NO: 3364928 - DNA, 25 bp, Homo sapien
tgaataaagcgcagtatgttcttac

SEQ ID NO: 3364929 - DNA, 25 bp, Homo sapien
gctaggccatatatacactgaactg

SEQ ID NO: 3364930 - DNA, 25 bp, Homo sapien
gtttatgtcactgctaggccatata

SEQ ID NO: 3364931 - DNA, 25 bp, Homo sapien
caggtcactcaacacatgtttcagt

SEQ ID NO: 3364932 - DNA, 25 bp, Homo sapien
aacacaagggcgtttgaagacagct

SEQ ID NO: 3364933 - DNA, 25 bp, Homo sapien
caaggcctcctcttattctgaagag

SEQ ID NO: 3364934 - DNA, 25 bp, Homo sapien
gagtagctagctgaaaagccaaatc

SEQ ID NO: 3364935 - DNA, 25 bp, Homo sapien
taggagtagctagctgaaaagccaa

SEQ ID NO: 3364936 - DNA, 25 bp, Homo sapien
cattaggagtagctagctgaaaagc

SEQ ID NO: 3364937 - DNA, 25 bp, Homo sapien
cgctcgtggcggctgccaaagtccg

SEQ ID NO: 3364938 - DNA, 25 bp, Homo sapien
agacaggcgaactggagagccgccc

SEQ ID NO: 3364939 - DNA, 25 bp, Homo sapien
gaccagctcctttcaggcgctgtga

SEQ ID NO: 3364940 - DNA, 25 bp, Homo sapien
cacacttgtgtagggcactttcccc

SEQ ID NO: 3364941 - DNA, 25 bp, Homo sapien
ctgacgcctgcccaaaagttccggg

SEQ ID NO: 3364942 - DNA, 25 bp, Homo sapien
cgcgacgtggcggtgacacgggcgc

SEQ ID NO: 3364943 - DNA, 25 bp, Homo sapien
gtggcggtgacacgggcgctgacgc

SEQ ID NO: 3364944 - DNA, 25 bp, Homo sapien
gggcgctgacgcctgcccaaaagtt

SEQ ID NO: 3364945 - DNA, 25 bp, Homo sapien
tgaagtggtgtcaccgcacggccca

SEQ ID NO: 3364946 - DNA, 25 bp, Homo sapien
gtggtgtcaccgcacggcccagggg

SEQ ID NO: 3364947 - DNA, 25 bp, Homo sapien
aagtggtgtcaccgcacggcccagg

SEQ ID NO: 3364948 - DNA, 25 bp, Homo sapien
ctgaagtggtgtcaccgcacggccc

SEQ ID NO: 3364949 - DNA, 25 bp, Homo sapien
tctgtgtgttcttcgatgcggattc

SEQ ID NO: 3364950 - DNA, 25 bp, Homo sapien
tcgtatcctcccacagcgtgcttgg

SEQ ID NO: 3364951 - DNA, 25 bp, Homo sapien
ctcccacagcgtgcttggaatggat

SEQ ID NO: 3364952 - DNA, 25 bp, Homo sapien
ggattcgaatctcctcgtatcctcc

SEQ ID NO: 3364953 - DNA, 25 bp, Homo sapien
catccgtaccttttgcaagggaacg

SEQ ID NO: 3364954 - DNA, 25 bp, Homo sapien
ttcttcacctctcctgacgctccat

SEQ ID NO: 3364955 - DNA, 25 bp, Homo sapien
gacgctccatccgtaccttttgcaa

SEQ ID NO: 3364956 - DNA, 25 bp, Homo sapien
taccttttgcaagggaacgtgccat

SEQ ID NO: 3364957 - DNA, 25 bp, Homo sapien
gttatctgcaccaaaccattctgtg

SEQ ID NO: 3364958 - DNA, 25 bp, Homo sapien
taacattggctatttctcgaaggga

SEQ ID NO: 3364959 - DNA, 25 bp, Homo sapien
ctcgaagggagtttcttagcaatct

SEQ ID NO: 3364960 - DNA, 25 bp, Homo sapien
tgggtgactttagacatctcagctc

SEQ ID NO: 3364961 - DNA, 25 bp, Homo sapien
gcttgagagttctgtctttaacttt

SEQ ID NO: 3364962 - DNA, 25 bp, Homo sapien
cttgagagttctgtctttaactttg

SEQ ID NO: 3364963 - DNA, 25 bp, Homo sapien
tgagagttctgtctttaactttgaa

SEQ ID NO: 3364964 - DNA, 25 bp, Homo sapien
ttgagagttctgtctttaactttga

SEQ ID NO: 3364965 - DNA, 25 bp, Homo sapien
acagtagtacatctttaacacttgg

SEQ ID NO: 3364966 - DNA, 25 bp, Homo sapien
acacttggggacagcaattataata

SEQ ID NO: 3364967 - DNA, 25 bp, Homo sapien
gaaaaagtatattatcaaggtatct

SEQ ID NO: 3364968 - DNA, 25 bp, Homo sapien
acataactataatgctttgagaaaa

SEQ ID NO: 3364969 - DNA, 25 bp, Homo sapien
gaagctagagattgtgtttcctctg

SEQ ID NO: 3364970 - DNA, 25 bp, Homo sapien
ttggaagacagagtgtctctggagc

SEQ ID NO: 3364971 - DNA, 25 bp, Homo sapien
cacagaacaggtgtgcttgcaacct

SEQ ID NO: 3364972 - DNA, 25 bp, Homo sapien
ggagcacagaacaggtgtgcttgca

SEQ ID NO: 3364973 - DNA, 25 bp, Homo sapien
tcttggatggaagcaaatgatacag

SEQ ID NO: 3364974 - DNA, 25 bp, Homo sapien
ggatggaagcaaatgatacagttta

SEQ ID NO: 3364975 - DNA, 25 bp, Homo sapien
ttatttatatatcttggatggaagc

SEQ ID NO: 3364976 - DNA, 25 bp, Homo sapien
tatatatcttggatggaagcaaatg

SEQ ID NO: 3364977 - DNA, 25 bp, Homo sapien
gcccaataggctaaaagaatcttaa

SEQ ID NO: 3364978 - DNA, 25 bp, Homo sapien
cttgctcactgccaaacttggtttg

SEQ ID NO: 3364979 - DNA, 25 bp, Homo sapien
tctgtactctgtagtgcccaatagg

SEQ ID NO: 3364980 - DNA, 25 bp, Homo sapien
gaattcttttaaggtgggagtgcta

SEQ ID NO: 3364981 - DNA, 25 bp, Homo sapien
caaaggcctactctgaggactagaa

SEQ ID NO: 3364982 - DNA, 25 bp, Homo sapien
tttcaaatccgaagccaaaggccta

SEQ ID NO: 3364983 - DNA, 25 bp, Homo sapien
taaatattctcgttgaagatgccgc

SEQ ID NO: 3364984 - DNA, 25 bp, Homo sapien
gcagaaaattctcttcggcagtaga

SEQ ID NO: 3364985 - DNA, 25 bp, Homo sapien
tttaagacactctttgctgtattct

SEQ ID NO: 3364986 - DNA, 25 bp, Homo sapien
cttgcagaacattatatttactaat

SEQ ID NO: 3364987 - DNA, 25 bp, Homo sapien
aaattctttaagacactctttgctg

SEQ ID NO: 3364988 - DNA, 25 bp, Homo sapien
ttaaattctttaagacactctttgc

SEQ ID NO: 3364989 - DNA, 25 bp, Homo sapien
gcaacacactgctcagtaacggaat

SEQ ID NO: 3364990 - DNA, 25 bp, Homo sapien
tatctgcacagattcttttaggtaa

SEQ ID NO: 3364991 - DNA, 25 bp, Homo sapien
tcaactttctgtatgagagattgtg

SEQ ID NO: 3364992 - DNA, 25 bp, Homo sapien
tgtatcttggaactctggaatggaa

SEQ ID NO: 3364993 - DNA, 25 bp, Homo sapien
tgattttatatcttcatttaagtta

SEQ ID NO: 3364994 - DNA, 25 bp, Homo sapien
ctttgattttatatcttcatttaag

SEQ ID NO: 3364995 - DNA, 25 bp, Homo sapien
gattttatatcttcatttaagttac

SEQ ID NO: 3364996 - DNA, 25 bp, Homo sapien
ttaccattcctgtgaacatctggat

SEQ ID NO: 3364997 - DNA, 25 bp, Homo sapien
gaataggggacatgtcatatttacc

SEQ ID NO: 3364998 - DNA, 25 bp, Homo sapien
cattcctgtgaacatctggatcagt

SEQ ID NO: 3364999 - DNA, 25 bp, Homo sapien
gttcattttatcctggtgaataggg

SEQ ID NO: 3365000 - DNA, 25 bp, Homo sapien
caaatgtcatctaaattttcacaaa

SEQ ID NO: 3365001 - DNA, 25 bp, Homo sapien
ggcaaatgtcatctaaattttcaca

SEQ ID NO: 3365002 - DNA, 25 bp, Homo sapien
tgtttgatagaatggcaaatgtcat

SEQ ID NO: 3365003 - DNA, 25 bp, Homo sapien
atggcaaatgtcatctaaattttca

SEQ ID NO: 3365004 - DNA, 25 bp, Homo sapien
tggatttatccagaattactgtatc

SEQ ID NO: 3365005 - DNA, 25 bp, Homo sapien
ttttggatttatccagaattactgt

SEQ ID NO: 3365006 - DNA, 25 bp, Homo sapien
taattttggatttatccagaattac

SEQ ID NO: 3365007 - DNA, 25 bp, Homo sapien
cttgagaaaaggcacagtaattttg

SEQ ID NO: 3365008 - DNA, 25 bp, Homo sapien
cctcggaatgtatctgggatggaac

SEQ ID NO: 3365009 - DNA, 25 bp, Homo sapien
gagggagactgttcacactatcacc

SEQ ID NO: 3365010 - DNA, 25 bp, Homo sapien
gaatgaagtgtcttggaatcctcaa

SEQ ID NO: 3365011 - DNA, 25 bp, Homo sapien
ggaacatttacactttgagggagac

SEQ ID NO: 3365012 - DNA, 25 bp, Homo sapien
agtttccttattttcatctctgatg

SEQ ID NO: 3365013 - DNA, 25 bp, Homo sapien
ccttattttcatctctgatggtcca

SEQ ID NO: 3365014 - DNA, 25 bp, Homo sapien
tttccttattttcatctctgatggt

SEQ ID NO: 3365015 - DNA, 25 bp, Homo sapien
cggagtttccttattttcatctctg

SEQ ID NO: 3365016 - DNA, 25 bp, Homo sapien
tgagctaaattgtgggttttctact

SEQ ID NO: 3365017 - DNA, 25 bp, Homo sapien
tccttttcaatgcgcgtgccaaaca

SEQ ID NO: 3365018 - DNA, 25 bp, Homo sapien
cttcaataatacttttgttcaatat

SEQ ID NO: 3365019 - DNA, 25 bp, Homo sapien
tttctgagctaaattgtgggttttc

SEQ ID NO: 3365020 - DNA, 25 bp, Homo sapien
attctgcaaagtctgcattcgcaaa

SEQ ID NO: 3365021 - DNA, 25 bp, Homo sapien
attcgcaaagcctgaaatgattcca

SEQ ID NO: 3365022 - DNA, 25 bp, Homo sapien
tgcaaagtctgcattcgcaaagcct

SEQ ID NO: 3365023 - DNA, 25 bp, Homo sapien
tctgcattcgcaaagcctgaaatga

SEQ ID NO: 3365024 - DNA, 25 bp, Homo sapien
caatgctgattgtggttggatttga

SEQ ID NO: 3365025 - DNA, 25 bp, Homo sapien
tttcaatgctgattgtggttggatt

SEQ ID NO: 3365026 - DNA, 25 bp, Homo sapien
tcaatgctgattgtggttggatttg

SEQ ID NO: 3365027 - DNA, 25 bp, Homo sapien
ttcaatgctgattgtggttggattt

SEQ ID NO: 3365028 - DNA, 25 bp, Homo sapien
caccttcagtcagagggcggatctt

SEQ ID NO: 3365029 - DNA, 25 bp, Homo sapien
tcagtcagagggcggatcttgctgt

SEQ ID NO: 3365030 - DNA, 25 bp, Homo sapien
ccttcagtcagagggcggatcttgc

SEQ ID NO: 3365031 - DNA, 25 bp, Homo sapien
agtcagagggcggatcttgctgtct

SEQ ID NO: 3365032 - DNA, 25 bp, Homo sapien
taaaatggcagctaaactcctggta

SEQ ID NO: 3365033 - DNA, 25 bp, Homo sapien
aaaatggcagctaaactcctggtat

SEQ ID NO: 3365034 - DNA, 25 bp, Homo sapien
gacaattcttccgttgaaatgggag

SEQ ID NO: 3365035 - DNA, 25 bp, Homo sapien
agcggccagggagaaacgtgttcaa

SEQ ID NO: 3365036 - DNA, 25 bp, Homo sapien
gaccatgttatgagtggagcggcca

SEQ ID NO: 3365037 - DNA, 25 bp, Homo sapien
agaagctgggacttgagaattccac

SEQ ID NO: 3365038 - DNA, 25 bp, Homo sapien
cctccgaagaatttaggatcttgga

SEQ ID NO: 3365039 - DNA, 25 bp, Homo sapien
ccctccgaagaatttaggatcttgg

SEQ ID NO: 3365040 - DNA, 25 bp, Homo sapien
cccctccgaagaatttaggatcttg

SEQ ID NO: 3365041 - DNA, 25 bp, Homo sapien
tccgaagaatttaggatcttggacg

SEQ ID NO: 3365042 - DNA, 25 bp, Homo sapien
gaaaggagaacggagtcaacttcat

SEQ ID NO: 3365043 - DNA, 25 bp, Homo sapien
aaggagaacggagtcaacttcatcc

SEQ ID NO: 3365044 - DNA, 25 bp, Homo sapien
gaacggagtcaacttcatcctcttc

SEQ ID NO: 3365045 - DNA, 25 bp, Homo sapien
ggagaacggagtcaacttcatcctc

SEQ ID NO: 3365046 - DNA, 25 bp, Homo sapien
ctgtcgcgggtcgtggcgtggcggg

SEQ ID NO: 3365047 - DNA, 25 bp, Homo sapien
tccggggctgttctgtcgcgggtcg

SEQ ID NO: 3365048 - DNA, 25 bp, Homo sapien
gggctgttctgtcgcgggtcgtggc

SEQ ID NO: 3365049 - DNA, 25 bp, Homo sapien
ctgtaacagaaccgtccggggctgt

SEQ ID NO: 3365050 - DNA, 25 bp, Homo sapien
tcgcaaccgccgccgcacgcacccg

SEQ ID NO: 3365051 - DNA, 25 bp, Homo sapien
caaccgccgccgcacgcacccgctc

SEQ ID NO: 3365052 - DNA, 25 bp, Homo sapien
cgcggctcatctctctcgcaaccgc

SEQ ID NO: 3365053 - DNA, 25 bp, Homo sapien
gccgcggctcatctctctcgcaacc

SEQ ID NO: 3365054 - DNA, 25 bp, Homo sapien
ccgccggaccaaagcggtgcggaga

SEQ ID NO: 3365055 - DNA, 25 bp, Homo sapien
gggacggacacacgcctgagagctt

SEQ ID NO: 3365056 - DNA, 25 bp, Homo sapien
caaagcggtgcggagaaagggaccg

SEQ ID NO: 3365057 - DNA, 25 bp, Homo sapien
ggacgggcttgctcacactcggact

SEQ ID NO: 3365058 - DNA, 25 bp, Homo sapien
ggcctgtcgtctgtacagaccctgt

SEQ ID NO: 3365059 - DNA, 25 bp, Homo sapien
gagccttatattgggcctgtcgtct

SEQ ID NO: 3365060 - DNA, 25 bp, Homo sapien
tgtcgtctgtacagaccctgttctc

SEQ ID NO: 3365061 - DNA, 25 bp, Homo sapien
tattgggcctgtcgtctgtacagac

SEQ ID NO: 3365062 - DNA, 25 bp, Homo sapien
ggctctggccaatgataccggtgct

SEQ ID NO: 3365063 - DNA, 25 bp, Homo sapien
actcctcgggctctggcattgtgca

SEQ ID NO: 3365064 - DNA, 25 bp, Homo sapien
taccggtgctccctcatgcgtggat

SEQ ID NO: 3365065 - DNA, 25 bp, Homo sapien
cctccatgtgtagaggacctcttcc

SEQ ID NO: 3365066 - DNA, 25 bp, Homo sapien
gatgggaaatcagctcttactctca

SEQ ID NO: 3365067 - DNA, 25 bp, Homo sapien
gatagctttgttggttatagactcc

SEQ ID NO: 3365068 - DNA, 25 bp, Homo sapien
tatagactcctgagttggcaatcct

SEQ ID NO: 3365069 - DNA, 25 bp, Homo sapien
tctgccgccatggtttttgatggga

SEQ ID NO: 3365070 - DNA, 25 bp, Homo sapien
ggtgactgggtaaagggctctgcgc

SEQ ID NO: 3365071 - DNA, 25 bp, Homo sapien
ggtggcgtgaacacattctctccct

SEQ ID NO: 3365072 - DNA, 25 bp, Homo sapien
tgatctcgacacattggtggcgtga

SEQ ID NO: 3365073 - DNA, 25 bp, Homo sapien
tctcaagtggagacacggtcgcatt

SEQ ID NO: 3365074 - DNA, 25 bp, Homo sapien
cagagatttgtaattggcaacccac

SEQ ID NO: 3365075 - DNA, 25 bp, Homo sapien
cagcaattgactgttgttaaccaga

SEQ ID NO: 3365076 - DNA, 25 bp, Homo sapien
caaagctgcgcttcttgatagctgt

SEQ ID NO: 3365077 - DNA, 25 bp, Homo sapien
tcttgaatcttcaggtgtgatccac

SEQ ID NO: 3365078 - DNA, 25 bp, Homo sapien
ttaaccagagtgaggtgccagttgc

SEQ ID NO: 3365079 - DNA, 25 bp, Homo sapien
taattctgtatgtaattcctctaca

SEQ ID NO: 3365080 - DNA, 25 bp, Homo sapien
cagattagaacatactacgttttgt

SEQ ID NO: 3365081 - DNA, 25 bp, Homo sapien
tcttcaaagtaatgagcatgcaatt

SEQ ID NO: 3365082 - DNA, 25 bp, Homo sapien
gcatgcaattttaggacctgcctta

SEQ ID NO: 3365083 - DNA, 25 bp, Homo sapien
ggtacacgtaccatcaactgtgctt

SEQ ID NO: 3365084 - DNA, 25 bp, Homo sapien
ccagtgtcgtggaagagaattttcc

SEQ ID NO: 3365085 - DNA, 25 bp, Homo sapien
cttttccagatagtacctagcaggg

SEQ ID NO: 3365086 - DNA, 25 bp, Homo sapien
taccctctttgcagtacggtacacg

SEQ ID NO: 3365087 - DNA, 25 bp, Homo sapien
ggtggtgaaccattgagcctaagaa

SEQ ID NO: 3365088 - DNA, 25 bp, Homo sapien
cagacagaggatccatgactccagg

SEQ ID NO: 3365089 - DNA, 25 bp, Homo sapien
ccatgtgacacaaggtggtgagaca

SEQ ID NO: 3365090 - DNA, 25 bp, Homo sapien
tattgcctggcctcaactatgtcaa

SEQ ID NO: 3365091 - DNA, 25 bp, Homo sapien
tttgtgctcataagaaagagtaatg

SEQ ID NO: 3365092 - DNA, 25 bp, Homo sapien
gactgaactacctttaactagcaaa

SEQ ID NO: 3365093 - DNA, 25 bp, Homo sapien
gctcataagaaagagtaatgagtta

SEQ ID NO: 3365094 - DNA, 25 bp, Homo sapien
tcaacgcttctatcatcagaaattt

SEQ ID NO: 3365095 - DNA, 25 bp, Homo sapien
gaattcaatgaatgccacttcatta

SEQ ID NO: 3365096 - DNA, 25 bp, Homo sapien
atttgaattcaatgaatgccacttc

SEQ ID NO: 3365097 - DNA, 25 bp, Homo sapien
ttgaattcaatgaatgccacttcat

SEQ ID NO: 3365098 - DNA, 25 bp, Homo sapien
ttatttgaattcaatgaatgccact

SEQ ID NO: 3365099 - DNA, 25 bp, Homo sapien
tattatgtttgttgcatcgagtggc

SEQ ID NO: 3365100 - DNA, 25 bp, Homo sapien
ggagttgacaatctgcacaatcctt

SEQ ID NO: 3365101 - DNA, 25 bp, Homo sapien
ggaatttctccctaacatgcactgt

SEQ ID NO: 3365102 - DNA, 25 bp, Homo sapien
gaatgtcttctcgtgtaagtgcgcg

SEQ ID NO: 3365103 - DNA, 25 bp, Homo sapien
agctttgggatacagagtgaccgtg

SEQ ID NO: 3365104 - DNA, 25 bp, Homo sapien
agtgaccgtgtcatagccctctggg

SEQ ID NO: 3365105 - DNA, 25 bp, Homo sapien
ttgaggttgcagtcggcacacacga

SEQ ID NO: 3365106 - DNA, 25 bp, Homo sapien
tcagggtgccggtacttatcccgcg

SEQ ID NO: 3365107 - DNA, 25 bp, Homo sapien
ttaaacataaggtccctgccgggca

SEQ ID NO: 3365108 - DNA, 25 bp, Homo sapien
gatcctgcactagcaagtgtggcta

SEQ ID NO: 3365109 - DNA, 25 bp, Homo sapien
gagcagggctctatctctgaataaa

SEQ ID NO: 3365110 - DNA, 25 bp, Homo sapien
tatcttggttgacttgatcctgcac

SEQ ID NO: 3365111 - DNA, 25 bp, Homo sapien
ctccgcgttccagccggacggtcat

SEQ ID NO: 3365112 - DNA, 25 bp, Homo sapien
tggactttcgtcaccggagctctca

SEQ ID NO: 3365113 - DNA, 25 bp, Homo sapien
ctgaaccgccatggactttcgtcac

SEQ ID NO: 3365114 - DNA, 25 bp, Homo sapien
cacatttgtcacagagcggcatcct

SEQ ID NO: 3365115 - DNA, 25 bp, Homo sapien
tcagtaatgcacagggttcccattt

SEQ ID NO: 3365116 - DNA, 25 bp, Homo sapien
caggtctgtggctcactggctatgt

SEQ ID NO: 3365117 - DNA, 25 bp, Homo sapien
gggttgctctatgttaccttcccat

SEQ ID NO: 3365118 - DNA, 25 bp, Homo sapien
tgtctgccacaatagccaccctaat

SEQ ID NO: 3365119 - DNA, 25 bp, Homo sapien
cgattgtcgtggagcatccggtaca

SEQ ID NO: 3365120 - DNA, 25 bp, Homo sapien
cgactggcgaggctgtgtgggctca

SEQ ID NO: 3365121 - DNA, 25 bp, Homo sapien
gcatccggtacacgtccgactcggg

SEQ ID NO: 3365122 - DNA, 25 bp, Homo sapien
cactctgaaggagcccgactggcga

SEQ ID NO: 3365123 - DNA, 25 bp, Homo sapien
cataatgtgaattcaaatggctgcc

SEQ ID NO: 3365124 - DNA, 25 bp, Homo sapien
ccactcctgaacagaggtctagtat

SEQ ID NO: 3365125 - DNA, 25 bp, Homo sapien
tactcagccattactctatgcacag

SEQ ID NO: 3365126 - DNA, 25 bp, Homo sapien
gaggcaccagacgtgcaagaggcca

SEQ ID NO: 3365127 - DNA, 25 bp, Homo sapien
gagtaaataatgacctctccacaag

SEQ ID NO: 3365128 - DNA, 25 bp, Homo sapien
ccaaaggacagacatagggtatact

SEQ ID NO: 3365129 - DNA, 25 bp, Homo sapien
cattaacagcctgagggtattcacc

SEQ ID NO: 3365130 - DNA, 25 bp, Homo sapien
tatgcccatggttcaaagagactca

SEQ ID NO: 3365131 - DNA, 25 bp, Homo sapien
gcaactttcaagtcacctgggcaaa

SEQ ID NO: 3365132 - DNA, 25 bp, Homo sapien
tgccacagtcaatcccggagggagt

SEQ ID NO: 3365133 - DNA, 25 bp, Homo sapien
tcatcaaaggtgtttcccctagggc

SEQ ID NO: 3365134 - DNA, 25 bp, Homo sapien
gctgttgaaacctgaccctggagtg

SEQ ID NO: 3365135 - DNA, 25 bp, Homo sapien
cacagagaacacgtacagagaggtt

SEQ ID NO: 3365136 - DNA, 25 bp, Homo sapien
atggcaccgggagccagacagtcca

SEQ ID NO: 3365137 - DNA, 25 bp, Homo sapien
ctgtgttaatggatacacgttacac

SEQ ID NO: 3365138 - DNA, 25 bp, Homo sapien
gacaaaagtgagaggtgaattacat

SEQ ID NO: 3365139 - DNA, 25 bp, Homo sapien
ttgtcactagaatttatttataaag

SEQ ID NO: 3365140 - DNA, 25 bp, Homo sapien
gatttgtcactagaatttatttata

SEQ ID NO: 3365141 - DNA, 25 bp, Homo sapien
tcactagaatttatttataaaggga

SEQ ID NO: 3365142 - DNA, 25 bp, Homo sapien
tgtcactagaatttatttataaagg

SEQ ID NO: 3365143 - DNA, 25 bp, Homo sapien
taaatcctgggagacttcggcctcc

SEQ ID NO: 3365144 - DNA, 25 bp, Homo sapien
gaagcacgcatctattcccaggcat

SEQ ID NO: 3365145 - DNA, 25 bp, Homo sapien
cagccggattagtctggagaactca

SEQ ID NO: 3365146 - DNA, 25 bp, Homo sapien
gtcatgcacatcgaagaactaggga

SEQ ID NO: 3365147 - DNA, 25 bp, Homo sapien
catgcccagatacgtcatttgacag

SEQ ID NO: 3365148 - DNA, 25 bp, Homo sapien
caaggccacttgtaaggttgataac

SEQ ID NO: 3365149 - DNA, 25 bp, Homo sapien
ttctcagggtcaacagtatatgcat

SEQ ID NO: 3365150 - DNA, 25 bp, Homo sapien
aaacgagttttcatggattccagtc

SEQ ID NO: 3365151 - DNA, 25 bp, Homo sapien
ggaaatgttgtgcaccctcaggatt

SEQ ID NO: 3365152 - DNA, 25 bp, Homo sapien
taatgttgagccagtcagaccaggc

SEQ ID NO: 3365153 - DNA, 25 bp, Homo sapien
gagtctcacgcttgttgcagtggca

SEQ ID NO: 3365154 - DNA, 25 bp, Homo sapien
taagggatgacctgctatccgcagc

SEQ ID NO: 3365155 - DNA, 25 bp, Homo sapien
ggatagacatactgactgcccgact

SEQ ID NO: 3365156 - DNA, 25 bp, Homo sapien
catcagtttgcaacagctgcggtaa

SEQ ID NO: 3365157 - DNA, 25 bp, Homo sapien
tgtgaaataaatccacctatgggcc

SEQ ID NO: 3365158 - DNA, 25 bp, Homo sapien
ggaatcaatccggtctaaccaccag

SEQ ID NO: 3365159 - DNA, 25 bp, Homo sapien
ggccgaatattatgcttgtgttcaa

SEQ ID NO: 3365160 - DNA, 25 bp, Homo sapien
ggtttgggccgaatattatgcttgt

SEQ ID NO: 3365161 - DNA, 25 bp, Homo sapien
cgaaaggtttgggccgaatattatg

SEQ ID NO: 3365162 - DNA, 25 bp, Homo sapien
tgggccgaatattatgcttgtgttc

SEQ ID NO: 3365163 - DNA, 25 bp, Homo sapien
cgatgacgggaccaggacgatgtct

SEQ ID NO: 3365164 - DNA, 25 bp, Homo sapien
gctaaacggtcaggcactggcggat

SEQ ID NO: 3365165 - DNA, 25 bp, Homo sapien
cataactaagaaaggcgatgacggg

SEQ ID NO: 3365166 - DNA, 25 bp, Homo sapien
tacagggaggatcatttaccaccaa

SEQ ID NO: 3365167 - DNA, 25 bp, Homo sapien
ggcccttctgttgtgcgcggtacca

SEQ ID NO: 3365168 - DNA, 25 bp, Homo sapien
ggtgagctaggaatgagaccccgca

SEQ ID NO: 3365169 - DNA, 25 bp, Homo sapien
gcagctgtccgtgaagcgcatcttg

SEQ ID NO: 3365170 - DNA, 25 bp, Homo sapien
tatattgctagttgaatagagccca

SEQ ID NO: 3365171 - DNA, 25 bp, Homo sapien
tctttacccacgacgagattgacgg

SEQ ID NO: 3365172 - DNA, 25 bp, Homo sapien
tagctgctcttaggtagaatgaccc

SEQ ID NO: 3365173 - DNA, 25 bp, Homo sapien
tgaacaacttcctgtagggacccca

SEQ ID NO: 3365174 - DNA, 25 bp, Homo sapien
gagtgtctctcttccctaggtgtaa

SEQ ID NO: 3365175 - DNA, 25 bp, Homo sapien
tctatccaaggcttacatcattgtt

SEQ ID NO: 3365176 - DNA, 25 bp, Homo sapien
tagagtcattccaaaaagcacaatg

SEQ ID NO: 3365177 - DNA, 25 bp, Homo sapien
tgtatacaccaaaggtttaccaaga

SEQ ID NO: 3365178 - DNA, 25 bp, Homo sapien
ctttgcaaagcattagtttatgggc

SEQ ID NO: 3365179 - DNA, 25 bp, Homo sapien
ttaagaggatccaaccatggacagc

SEQ ID NO: 3365180 - DNA, 25 bp, Homo sapien
gaatgtctgtcctgaagtaccaagt

SEQ ID NO: 3365181 - DNA, 25 bp, Homo sapien
gcatttcaaacaccggcctcttgga

SEQ ID NO: 3365182 - DNA, 25 bp, Homo sapien
cataaactggccgtgcagaaatctg

SEQ ID NO: 3365183 - DNA, 25 bp, Homo sapien
taagtggactctgtagatttagcca

SEQ ID NO: 3365184 - DNA, 25 bp, Homo sapien
tctgggtgaagacctcgaaggactg

SEQ ID NO: 3365185 - DNA, 25 bp, Homo sapien
tctcggagaggaatgacagacaaca

SEQ ID NO: 3365186 - DNA, 25 bp, Homo sapien
cacagtaaccgtagattggagacac

SEQ ID NO: 3365187 - DNA, 25 bp, Homo sapien
tgattttgaaaggatgggctttccc

SEQ ID NO: 3365188 - DNA, 25 bp, Homo sapien
catcttcagatacttgtggagacca

SEQ ID NO: 3365189 - DNA, 25 bp, Homo sapien
tacttgtggagaccataagtgagtt

SEQ ID NO: 3365190 - DNA, 25 bp, Homo sapien
ctgtggttctgattctaagttgatt

SEQ ID NO: 3365191 - DNA, 25 bp, Homo sapien
tatttcaccccaaggaaacggcaga

SEQ ID NO: 3365192 - DNA, 25 bp, Homo sapien
tcctaagggactgtgtgctcggcat

SEQ ID NO: 3365193 - DNA, 25 bp, Homo sapien
taaaaattgcctggagtacactgca

SEQ ID NO: 3365194 - DNA, 25 bp, Homo sapien
gattgattgatccttctgtaccaca

SEQ ID NO: 3365195 - DNA, 25 bp, Homo sapien
tgagtcatggactctgtcccaaagc

SEQ ID NO: 3365196 - DNA, 25 bp, Homo sapien
tgctgctttaatcctgtcctgcgca

SEQ ID NO: 3365197 - DNA, 25 bp, Homo sapien
tcctgtcctgcgcatcagcatgagt

SEQ ID NO: 3365198 - DNA, 25 bp, Homo sapien
caaagccgtcaatagccaggatgac

SEQ ID NO: 3365199 - DNA, 25 bp, Homo sapien
ttaaaaaccaacatcccgcagtatc

SEQ ID NO: 3365200 - DNA, 25 bp, Homo sapien
gacatttgtgtttcagcctggtaac

SEQ ID NO: 3365201 - DNA, 25 bp, Homo sapien
taaatgtttaattgggcagaaagac

SEQ ID NO: 3365202 - DNA, 25 bp, Homo sapien
cttagttggtcagttgagttaggtc

SEQ ID NO: 3365203 - DNA, 25 bp, Homo sapien
aagtgaggtgtctgcaacccagaag

SEQ ID NO: 3365204 - DNA, 25 bp, Homo sapien
aattcacgtaagaggcatgcaatgg

SEQ ID NO: 3365205 - DNA, 25 bp, Homo sapien
ggatttccggtctccagaacagtga

SEQ ID NO: 3365206 - DNA, 25 bp, Homo sapien
gtaattaggtcagaagtgaggagcc

SEQ ID NO: 3365207 - DNA, 25 bp, Homo sapien
gttttcaagttcagcgagcccagtg

SEQ ID NO: 3365208 - DNA, 25 bp, Homo sapien
ggtgtctaagtaacctgcggctttg

SEQ ID NO: 3365209 - DNA, 25 bp, Homo sapien
ggttgatagtgatggccagatccca

SEQ ID NO: 3365210 - DNA, 25 bp, Homo sapien
tcagaagtcagctaggacaggtggt

SEQ ID NO: 3365211 - DNA, 25 bp, Homo sapien
gagatcattgaacacggtactgcag

SEQ ID NO: 3365212 - DNA, 25 bp, Homo sapien
tgctttcaacaagcgcctcagatga

SEQ ID NO: 3365213 - DNA, 25 bp, Homo sapien
ttatgtggagacgtaaggcaagccc

SEQ ID NO: 3365214 - DNA, 25 bp, Homo sapien
tccagatgctcggaatcaggaacag

SEQ ID NO: 3365215 - DNA, 25 bp, Homo sapien
ggctgggaaccatcaccgtattact

SEQ ID NO: 3365216 - DNA, 25 bp, Homo sapien
tgttcagaagtcacatgggcggctt

SEQ ID NO: 3365217 - DNA, 25 bp, Homo sapien
tattagaatctctgcatgcacctgg

SEQ ID NO: 3365218 - DNA, 25 bp, Homo sapien
taagccacagttatatgcccacagt

SEQ ID NO: 3365219 - DNA, 25 bp, Homo sapien
ggctatttggattgtaaacaattac

SEQ ID NO: 3365220 - DNA, 25 bp, Homo sapien
ttggattgtaaacaattacgggcat

SEQ ID NO: 3365221 - DNA, 25 bp, Homo sapien
gattcatctggctatttggattgta

SEQ ID NO: 3365222 - DNA, 25 bp, Homo sapien
caaagattcatctggctatttggat

SEQ ID NO: 3365223 - DNA, 25 bp, Homo sapien
gcaaaagcaagaatgccgacaccta

SEQ ID NO: 3365224 - DNA, 25 bp, Homo sapien
agccacttgacggagttgccgccgc

SEQ ID NO: 3365225 - DNA, 25 bp, Homo sapien
ctttagagcggactttgtcaaatct

SEQ ID NO: 3365226 - DNA, 25 bp, Homo sapien
gactttgtcaaatctctgagccgct

SEQ ID NO: 3365227 - DNA, 25 bp, Homo sapien
aaaggctggttgaagtctatgcccc

SEQ ID NO: 3365228 - DNA, 25 bp, Homo sapien
gttgaagtctatgccccctgagagc

SEQ ID NO: 3365229 - DNA, 25 bp, Homo sapien
ggttgaagtctatgccccctgagag

SEQ ID NO: 3365230 - DNA, 25 bp, Homo sapien
ccaccgggctctaagtgtccccgcg

SEQ ID NO: 3365231 - DNA, 25 bp, Homo sapien
ggctctaagtgtccccgcgcagggc

SEQ ID NO: 3365232 - DNA, 25 bp, Homo sapien
ctcccgcccaccgggctctaagtgt

SEQ ID NO: 3365233 - DNA, 25 bp, Homo sapien
cgggctctaagtgtccccgcgcagg

SEQ ID NO: 3365234 - DNA, 25 bp, Homo sapien
cagcttgcctggaggcctcgttgtt

SEQ ID NO: 3365235 - DNA, 25 bp, Homo sapien
gcctgtcctgtgacgttatcagcaa

SEQ ID NO: 3365236 - DNA, 25 bp, Homo sapien
tggcagtggctgtgaccaattctcc

SEQ ID NO: 3365237 - DNA, 25 bp, Homo sapien
tgttgcctatgactgcctgtcctgt

SEQ ID NO: 3365238 - DNA, 25 bp, Homo sapien
tgaacagccttggacgagcttccca

SEQ ID NO: 3365239 - DNA, 25 bp, Homo sapien
aatctgtgaacagccttggacgagc

SEQ ID NO: 3365240 - DNA, 25 bp, Homo sapien
tgttctaggggaacatgtaatctgt

SEQ ID NO: 3365241 - DNA, 25 bp, Homo sapien
gtaatctgtgaacagccttggacga

SEQ ID NO: 3365242 - DNA, 25 bp, Homo sapien
cagacgtctacaaatggtggtgaga

SEQ ID NO: 3365243 - DNA, 25 bp, Homo sapien
tatcttgcagatatccgcgtgacca

SEQ ID NO: 3365244 - DNA, 25 bp, Homo sapien
tatccgcgtgaccagacgtctacaa

SEQ ID NO: 3365245 - DNA, 25 bp, Homo sapien
tcttggttatcttgcagatatccgc

SEQ ID NO: 3365246 - DNA, 25 bp, Homo sapien
tttgggtcatacgctggagtgtcat

SEQ ID NO: 3365247 - DNA, 25 bp, Homo sapien
ttgggtcatacgctggagtgtcata

SEQ ID NO: 3365248 - DNA, 25 bp, Homo sapien
tgacaggtgcagagcatacggtggg

SEQ ID NO: 3365249 - DNA, 25 bp, Homo sapien
acttctatgctggtggccatgacag

SEQ ID NO: 3365250 - DNA, 25 bp, Homo sapien
gagctggcaagaggagactgccatg

SEQ ID NO: 3365251 - DNA, 25 bp, Homo sapien
aggagactgccatgggcagtgatct

SEQ ID NO: 3365252 - DNA, 25 bp, Homo sapien
ttcgccaagagtccagtcgagacca

SEQ ID NO: 3365253 - DNA, 25 bp, Homo sapien
cagagaccggggtcgtcaggccaca

SEQ ID NO: 3365254 - DNA, 25 bp, Homo sapien
ggaggagctgtcattcgccaagagt

SEQ ID NO: 3365255 - DNA, 25 bp, Homo sapien
agtcgagaccagtcgtccttgaggg

SEQ ID NO: 3365256 - DNA, 25 bp, Homo sapien
tgccaggaggactccacgggttttc

SEQ ID NO: 3365257 - DNA, 25 bp, Homo sapien
tccacgggttttctctatccccaga

SEQ ID NO: 3365258 - DNA, 25 bp, Homo sapien
cactgccaggaggactccacgggtt

SEQ ID NO: 3365259 - DNA, 25 bp, Homo sapien
caggaggactccacgggttttctct

SEQ ID NO: 3365260 - DNA, 25 bp, Homo sapien
aggatcaccgctggctctcggcttc

SEQ ID NO: 3365261 - DNA, 25 bp, Homo sapien
ctaggatcaccgctggctctcggct

SEQ ID NO: 3365262 - DNA, 25 bp, Homo sapien
ggactaggatcaccgctggctctcg

SEQ ID NO: 3365263 - DNA, 25 bp, Homo sapien
cgggactaggatcaccgctggctct

SEQ ID NO: 3365264 - DNA, 25 bp, Homo sapien
ggaagggattgaggacagagtggaa

SEQ ID NO: 3365265 - DNA, 25 bp, Homo sapien
ggacagagtggaagtaaggaaaggc

SEQ ID NO: 3365266 - DNA, 25 bp, Homo sapien
ggaaaggcctggccagcttctggtc

SEQ ID NO: 3365267 - DNA, 25 bp, Homo sapien
acagagtggaagtaaggaaaggcct

SEQ ID NO: 3365268 - DNA, 25 bp, Homo sapien
ttacaggatagggatgcagcgttga

SEQ ID NO: 3365269 - DNA, 25 bp, Homo sapien
ccaaggatccacagcgtgcacagag

SEQ ID NO: 3365270 - DNA, 25 bp, Homo sapien
ggatccacagcgtgcacagagtggt

SEQ ID NO: 3365271 - DNA, 25 bp, Homo sapien
atccacagcgtgcacagagtggtga

SEQ ID NO: 3365272 - DNA, 25 bp, Homo sapien
cagagcctggatgcgaggctgggcc

SEQ ID NO: 3365273 - DNA, 25 bp, Homo sapien
gcagagcctggatgcgaggctgggc

SEQ ID NO: 3365274 - DNA, 25 bp, Homo sapien
attccggagtctgtagcctgcggga

SEQ ID NO: 3365275 - DNA, 25 bp, Homo sapien
agtctgtagcctgcgggagctgact

SEQ ID NO: 3365276 - DNA, 25 bp, Homo sapien
atattccggagtctgtagcctgcgg

SEQ ID NO: 3365277 - DNA, 25 bp, Homo sapien
ggcagatattccggagtctgtagcc

SEQ ID NO: 3365278 - DNA, 25 bp, Homo sapien
ccaccaccataagatgttaactgct

SEQ ID NO: 3365279 - DNA, 25 bp, Homo sapien
catcatgcccaacagcccaggtttt

SEQ ID NO: 3365280 - DNA, 25 bp, Homo sapien
gagaccagaagaggtagaggacatc

SEQ ID NO: 3365281 - DNA, 25 bp, Homo sapien
ttttcccaccaccataagatgttaa

SEQ ID NO: 3365282 - DNA, 25 bp, Homo sapien
gcaaagcaaggcgttcactctctga

SEQ ID NO: 3365283 - DNA, 25 bp, Homo sapien
tacaggagccgcgttggcaaagcaa

SEQ ID NO: 3365284 - DNA, 25 bp, Homo sapien
gaagtttgcacagcagtccttgtta

SEQ ID NO: 3365285 - DNA, 25 bp, Homo sapien
gaagcttggacccttttgaatttga

SEQ ID NO: 3365286 - DNA, 25 bp, Homo sapien
ttcttaaagccaatgattgagaacg

SEQ ID NO: 3365287 - DNA, 25 bp, Homo sapien
gagaacgtatgatgaaacaaggtag

SEQ ID NO: 3365288 - DNA, 25 bp, Homo sapien
tggaaggaaaactcgcaggctgctg

SEQ ID NO: 3365289 - DNA, 25 bp, Homo sapien
tcagtgtgcatttgagatggcttct

SEQ ID NO: 3365290 - DNA, 25 bp, Homo sapien
ggcacaatgggattccccgagcaaa

SEQ ID NO: 3365291 - DNA, 25 bp, Homo sapien
agcaaagcctgatggcgcagcctca

SEQ ID NO: 3365292 - DNA, 25 bp, Homo sapien
tgattagagggcacaatgggattcc

SEQ ID NO: 3365293 - DNA, 25 bp, Homo sapien
attgcagacgatgtgggtgattaga

SEQ ID NO: 3365294 - DNA, 25 bp, Homo sapien
caatttgtgctgatgggtacacctc

SEQ ID NO: 3365295 - DNA, 25 bp, Homo sapien
gcacagtaagatgctgctatgaggg

SEQ ID NO: 3365296 - DNA, 25 bp, Homo sapien
ctgctcaaccctgagtgcacagctt

SEQ ID NO: 3365297 - DNA, 25 bp, Homo sapien
ttcatccacaatgtgtttagcacca

SEQ ID NO: 3365298 - DNA, 25 bp, Homo sapien
caagttggaataaaatacacaattt

SEQ ID NO: 3365299 - DNA, 25 bp, Homo sapien
ttttataaagataaatgtcaagaag

SEQ ID NO: 3365300 - DNA, 25 bp, Homo sapien
tataaagataaatgtcaagaagaaa

SEQ ID NO: 3365301 - DNA, 25 bp, Homo sapien
tacacaatttttataaagataaatg

SEQ ID NO: 3365302 - DNA, 25 bp, Homo sapien
tctgacagaatcacactatctaggg

SEQ ID NO: 3365303 - DNA, 25 bp, Homo sapien
tttcggagcaggtgtaattcaggca

SEQ ID NO: 3365304 - DNA, 25 bp, Homo sapien
tcaaagtcaattacctggaagccag

SEQ ID NO: 3365305 - DNA, 25 bp, Homo sapien
gctagtctgctgaaagtgttgtcgc

SEQ ID NO: 3365306 - DNA, 25 bp, Homo sapien
gatgttgaaatggagccacgaggct

SEQ ID NO: 3365307 - DNA, 25 bp, Homo sapien
tacacactgccaagcgaagaatatg

SEQ ID NO: 3365308 - DNA, 25 bp, Homo sapien
tagagcaggaagtaggaatccacac

SEQ ID NO: 3365309 - DNA, 25 bp, Homo sapien
ttgacgtgtcaaagcttagagcagg

SEQ ID NO: 3365310 - DNA, 25 bp, Homo sapien
agggggaccagcctgccatgtcgtc

SEQ ID NO: 3365311 - DNA, 25 bp, Homo sapien
gggggaccagcctgccatgtcgtcc

SEQ ID NO: 3365312 - DNA, 25 bp, Homo sapien
ccagcctgccatgtcgtccccaggc

SEQ ID NO: 3365313 - DNA, 25 bp, Homo sapien
ggaccagcctgccatgtcgtcccca

SEQ ID NO: 3365314 - DNA, 25 bp, Homo sapien
tggtgacggcgcattggaaaccgta

SEQ ID NO: 3365315 - DNA, 25 bp, Homo sapien
ggcgcattggaaaccgtaaggcatg

SEQ ID NO: 3365316 - DNA, 25 bp, Homo sapien
cgtaaggcatgacaacgggaggccc

SEQ ID NO: 3365317 - DNA, 25 bp, Homo sapien
gcggcggctactctgctggtggttt

SEQ ID NO: 3365318 - DNA, 25 bp, Homo sapien
cgcgttgacgcaggtgcatggctgg

SEQ ID NO: 3365319 - DNA, 25 bp, Homo sapien
tcaggcgcgttgacgcaggtgcatg

SEQ ID NO: 3365320 - DNA, 25 bp, Homo sapien
ggcgcgttgacgcaggtgcatggct

SEQ ID NO: 3365321 - DNA, 25 bp, Homo sapien
caggcgcgttgacgcaggtgcatgg

SEQ ID NO: 3365322 - DNA, 25 bp, Homo sapien
acagcctcttgacgtagtttccggg

SEQ ID NO: 3365323 - DNA, 25 bp, Homo sapien
tcacagcctcttgacgtagtttccg

SEQ ID NO: 3365324 - DNA, 25 bp, Homo sapien
cacagcctcttgacgtagtttccgg

SEQ ID NO: 3365325 - DNA, 25 bp, Homo sapien
cagcctcttgacgtagtttccgggg

SEQ ID NO: 3365326 - DNA, 25 bp, Homo sapien
cgatatcagttcatacacatgggct

SEQ ID NO: 3365327 - DNA, 25 bp, Homo sapien
cccataggcagacaaaataagcagt

SEQ ID NO: 3365328 - DNA, 25 bp, Homo sapien
catttacaaggcctcggaagacagc

SEQ ID NO: 3365329 - DNA, 25 bp, Homo sapien
cagtgttagctggttgcctgacgct

SEQ ID NO: 3365330 - DNA, 25 bp, Homo sapien
tttaggcagcgcagatggaccggat

SEQ ID NO: 3365331 - DNA, 25 bp, Homo sapien
tacagaagatcatggtcagtgccac

SEQ ID NO: 3365332 - DNA, 25 bp, Homo sapien
tgtttaaccacacgcacaaatggct

SEQ ID NO: 3365333 - DNA, 25 bp, Homo sapien
cacaggtgcgacatgaagacatcat

SEQ ID NO: 3365334 - DNA, 25 bp, Homo sapien
tcctgggagtatagttatacagagc

SEQ ID NO: 3365335 - DNA, 25 bp, Homo sapien
gacatcaatgacatcactttctctg

SEQ ID NO: 3365336 - DNA, 25 bp, Homo sapien
cagccgtcatcacacttttccatga

SEQ ID NO: 3365337 - DNA, 25 bp, Homo sapien
catcttcattcctgggagtatagtt

SEQ ID NO: 3365338 - DNA, 25 bp, Homo sapien
taaacaggacaagggaatgtgttta

SEQ ID NO: 3365339 - DNA, 25 bp, Homo sapien
cttaaacaggacaagggaatgtgtt

SEQ ID NO: 3365340 - DNA, 25 bp, Homo sapien
gatagagttggcttcagagaatgcc

SEQ ID NO: 3365341 - DNA, 25 bp, Homo sapien
cacttatatccttttgagcatgggc

SEQ ID NO: 3365342 - DNA, 25 bp, Homo sapien
taataagcaacagtgacctactggc

SEQ ID NO: 3365343 - DNA, 25 bp, Homo sapien
gaatttgatttggaggctgctcagg

SEQ ID NO: 3365344 - DNA, 25 bp, Homo sapien
tcaaagccagtgttgcacaatggga

SEQ ID NO: 3365345 - DNA, 25 bp, Homo sapien
tggaaacgtaaacacaccttcagga

SEQ ID NO: 3365346 - DNA, 25 bp, Homo sapien
gactggaagccctctcgataacttg

SEQ ID NO: 3365347 - DNA, 25 bp, Homo sapien
atgcaataaacctaaacagccctgg

SEQ ID NO: 3365348 - DNA, 25 bp, Homo sapien
tgagatttcaaatgattatcactgc

SEQ ID NO: 3365349 - DNA, 25 bp, Homo sapien
gatttcaaatgattatcactgctaa

SEQ ID NO: 3365350 - DNA, 25 bp, Homo sapien
ttcagtgagatttcaaatgattatc

SEQ ID NO: 3365351 - DNA, 25 bp, Homo sapien
cagtgagatttcaaatgattatcac

SEQ ID NO: 3365352 - DNA, 25 bp, Homo sapien
gagccagtctcatccggagctgctt

SEQ ID NO: 3365353 - DNA, 25 bp, Homo sapien
aaggcaccaggtcatatgccaggac

SEQ ID NO: 3365354 - DNA, 25 bp, Homo sapien
caaggaaggacttgatggtgataaa

SEQ ID NO: 3365355 - DNA, 25 bp, Homo sapien
gcaacaagaacacttttctgcctgt

SEQ ID NO: 3365356 - DNA, 25 bp, Homo sapien
ggttaggtccatgaataagccttcc

SEQ ID NO: 3365357 - DNA, 25 bp, Homo sapien
ggtcaggatccccagtgtgtgctca

SEQ ID NO: 3365358 - DNA, 25 bp, Homo sapien
gataactcctgaacgtctctcaggg

SEQ ID NO: 3365359 - DNA, 25 bp, Homo sapien
tcgactcacagtgtgggcagaggcc

SEQ ID NO: 3365360 - DNA, 25 bp, Homo sapien
catgagtaaacacaggacgctgtgg

SEQ ID NO: 3365361 - DNA, 25 bp, Homo sapien
aaattggcatccctgttttcacaca

SEQ ID NO: 3365362 - DNA, 25 bp, Homo sapien
tatattcccaggagtaaaacttctg

SEQ ID NO: 3365363 - DNA, 25 bp, Homo sapien
tctggccaaagagtatgcattaaag

SEQ ID NO: 3365364 - DNA, 25 bp, Homo sapien
gccagactgcatatcatataccaag

SEQ ID NO: 3365365 - DNA, 25 bp, Homo sapien
tgcagcttcctggatcccacgtcca

SEQ ID NO: 3365366 - DNA, 25 bp, Homo sapien
gcagcttcctggatcccacgtccat

SEQ ID NO: 3365367 - DNA, 25 bp, Homo sapien
ctgcgcccggcccccgtccttgctt

SEQ ID NO: 3365368 - DNA, 25 bp, Homo sapien
tcactctgccaccaggctagaggtc

SEQ ID NO: 3365369 - DNA, 25 bp, Homo sapien
tctgccaccaggctagaggtcagtg

SEQ ID NO: 3365370 - DNA, 25 bp, Homo sapien
actctgccaccaggctagaggtcag

SEQ ID NO: 3365371 - DNA, 25 bp, Homo sapien
caatttctcttttcccttccttcat

SEQ ID NO: 3365372 - DNA, 25 bp, Homo sapien
cttataatggcgagttttagaactt

SEQ ID NO: 3365373 - DNA, 25 bp, Homo sapien
ctgaggccagaatcaatcaagactt

SEQ ID NO: 3365374 - DNA, 25 bp, Homo sapien
tcaagacttttcgtagcagagaagt

SEQ ID NO: 3365375 - DNA, 25 bp, Homo sapien
agttgtgtgtgtcttataatggcga

SEQ ID NO: 3365376 - DNA, 25 bp, Homo sapien
gattactatgatggactacttggcc

SEQ ID NO: 3365377 - DNA, 25 bp, Homo sapien
tgctgtgtaaaggtgtccgtcatca

SEQ ID NO: 3365378 - DNA, 25 bp, Homo sapien
caagaacagttatctaagacggctc

SEQ ID NO: 3365379 - DNA, 25 bp, Homo sapien
caaatggcaagtcgcttaagcagag

SEQ ID NO: 3365380 - DNA, 25 bp, Homo sapien
cagagaggcttacatgagctgaacc

SEQ ID NO: 3365381 - DNA, 25 bp, Homo sapien
tgatgtggaatagacagtcatctgt

SEQ ID NO: 3365382 - DNA, 25 bp, Homo sapien
gagctgaacctagaaagatggcttt

SEQ ID NO: 3365383 - DNA, 25 bp, Homo sapien
caccagcatttttggtccgtgtcca

SEQ ID NO: 3365384 - DNA, 25 bp, Homo sapien
gctttggctctggaaggccattcgg

SEQ ID NO: 3365385 - DNA, 25 bp, Homo sapien
ccacgtttatgtttctagaggctta

SEQ ID NO: 3365386 - DNA, 25 bp, Homo sapien
taccatctcgtggacccacaggagg

SEQ ID NO: 3365387 - DNA, 25 bp, Homo sapien
cacaggagggttatagatgggtcct

SEQ ID NO: 3365388 - DNA, 25 bp, Homo sapien
caaagacaactaaggaagagccagc

SEQ ID NO: 3365389 - DNA, 25 bp, Homo sapien
tggagtttggaaacctcacacacac

SEQ ID NO: 3365390 - DNA, 25 bp, Homo sapien
gatgtagaccacaaaacacacgaca

SEQ ID NO: 3365391 - DNA, 25 bp, Homo sapien
gagaatctgaccatgtctttgtgga

SEQ ID NO: 3365392 - DNA, 25 bp, Homo sapien
ggtgagccgcagaatctcctagaca

SEQ ID NO: 3365393 - DNA, 25 bp, Homo sapien
gctgagccctctgacaggtgagccg

SEQ ID NO: 3365394 - DNA, 25 bp, Homo sapien
ggaggcttacccaggacacatatct

SEQ ID NO: 3365395 - DNA, 25 bp, Homo sapien
atcactgggctacgaggaggcttac

SEQ ID NO: 3365396 - DNA, 25 bp, Homo sapien
tcatcttcgtcacacagacttcagg

SEQ ID NO: 3365397 - DNA, 25 bp, Homo sapien
tagctctcatcttcgtcacacagac

SEQ ID NO: 3365398 - DNA, 25 bp, Homo sapien
agaagttagttagctctcatcttcg

SEQ ID NO: 3365399 - DNA, 25 bp, Homo sapien
tagttagctctcatcttcgtcacac

SEQ ID NO: 3365400 - DNA, 25 bp, Homo sapien
tcgtggcagacgatgcttgatgctc

SEQ ID NO: 3365401 - DNA, 25 bp, Homo sapien
cggacaggatctggcagtgtactgc

SEQ ID NO: 3365402 - DNA, 25 bp, Homo sapien
cctgacttgtagctggatgtactca

SEQ ID NO: 3365403 - DNA, 25 bp, Homo sapien
caccgttgcttaagtgtcgtggcag

SEQ ID NO: 3365404 - DNA, 25 bp, Homo sapien
ggattgatctcctgttgataagaat

SEQ ID NO: 3365405 - DNA, 25 bp, Homo sapien
gtgtgggtgcttgctctcccgaaga

SEQ ID NO: 3365406 - DNA, 25 bp, Homo sapien
cagggctgagaaagtgtagagtcca

SEQ ID NO: 3365407 - DNA, 25 bp, Homo sapien
tgctctcccgaagaaaatgacggag

SEQ ID NO: 3365408 - DNA, 25 bp, Homo sapien
taggacaaatttctgggcatcaact

SEQ ID NO: 3365409 - DNA, 25 bp, Homo sapien
taatagctaatcatggtaaggccgg

SEQ ID NO: 3365410 - DNA, 25 bp, Homo sapien
gcaaagtgccgttatgtcaaaggta

SEQ ID NO: 3365411 - DNA, 25 bp, Homo sapien
gataatgtcacacacctcactgggt

SEQ ID NO: 3365412 - DNA, 25 bp, Homo sapien
ctcattactgggttttgctgcattg

SEQ ID NO: 3365413 - DNA, 25 bp, Homo sapien
tctccttcctgaggttctggcggcc

SEQ ID NO: 3365414 - DNA, 25 bp, Homo sapien
gagttgtcgttctgggatcctgaag

SEQ ID NO: 3365415 - DNA, 25 bp, Homo sapien
taatttccaggatggcgtcctctag

SEQ ID NO: 3365416 - DNA, 25 bp, Homo sapien
aattatcccctaggacttctggtgc

SEQ ID NO: 3365417 - DNA, 25 bp, Homo sapien
cctggagagctcctttatctgagcc

SEQ ID NO: 3365418 - DNA, 25 bp, Homo sapien
ccctggagagctcctttatctgagc

SEQ ID NO: 3365419 - DNA, 25 bp, Homo sapien
gccaggtgagactttgtgggtggga

SEQ ID NO: 3365420 - DNA, 25 bp, Homo sapien
tgtctcaaagacaggaacccatgat

SEQ ID NO: 3365421 - DNA, 25 bp, Homo sapien
cccatgatcagaatgaagctgagct

SEQ ID NO: 3365422 - DNA, 25 bp, Homo sapien
cgcctggcccttaagagatttaatg

SEQ ID NO: 3365423 - DNA, 25 bp, Homo sapien
ggatagcccaatcttttaaacgctg

SEQ ID NO: 3365424 - DNA, 25 bp, Homo sapien
taaaaaatgtagttccagaagtgcc

SEQ ID NO: 3365425 - DNA, 25 bp, Homo sapien
gctatgtgcctaaaagccttgagaa

SEQ ID NO: 3365426 - DNA, 25 bp, Homo sapien
ttaatacaggattcaggacctgggc

SEQ ID NO: 3365427 - DNA, 25 bp, Homo sapien
gagaaaatgctacctgctatgtgcc

SEQ ID NO: 3365428 - DNA, 25 bp, Homo sapien
ttgttagatgtttaatgagcttttg

SEQ ID NO: 3365429 - DNA, 25 bp, Homo sapien
tattaggacatatggaagaatttgt

SEQ ID NO: 3365430 - DNA, 25 bp, Homo sapien
caaagatgaaaacattgggatcaaa

SEQ ID NO: 3365431 - DNA, 25 bp, Homo sapien
taatgagcttttgtacatacatgct

SEQ ID NO: 3365432 - DNA, 25 bp, Homo sapien
aaacatttatgtacacaggagtaca

SEQ ID NO: 3365433 - DNA, 25 bp, Homo sapien
catttatgtacacaggagtacagat

SEQ ID NO: 3365434 - DNA, 25 bp, Homo sapien
cacaggagtacagatatatatcata

SEQ ID NO: 3365435 - DNA, 25 bp, Homo sapien
tatgtacacaggagtacagatatat

SEQ ID NO: 3365436 - DNA, 25 bp, Homo sapien
ccagttttgatcaactcttttaaga

SEQ ID NO: 3365437 - DNA, 25 bp, Homo sapien
gagctcaagctgtgaatcctatcac

SEQ ID NO: 3365438 - DNA, 25 bp, Homo sapien
tcttgacgacctccacataggaaac

SEQ ID NO: 3365439 - DNA, 25 bp, Homo sapien
gggtagtcctcagcaccttttgtgt

SEQ ID NO: 3365440 - DNA, 25 bp, Homo sapien
catttgggcaggttttataccttca

SEQ ID NO: 3365441 - DNA, 25 bp, Homo sapien
gcctgattaatgtgaacgggtttat

SEQ ID NO: 3365442 - DNA, 25 bp, Homo sapien
gagggcaagtaaggtactagtgctt

SEQ ID NO: 3365443 - DNA, 25 bp, Homo sapien
cttccctaaggatgcctgattaatg

SEQ ID NO: 3365444 - DNA, 25 bp, Homo sapien
tctagaatcacttccacctgccatg

SEQ ID NO: 3365445 - DNA, 25 bp, Homo sapien
acctgccatgaccgagccagtgctg

SEQ ID NO: 3365446 - DNA, 25 bp, Homo sapien
agcatccatctgagtagttggtgac

SEQ ID NO: 3365447 - DNA, 25 bp, Homo sapien
taaagatttgaatagaacccttggc

SEQ ID NO: 3365448 - DNA, 25 bp, Homo sapien
gcttcccagactaagccacagaggg

SEQ ID NO: 3365449 - DNA, 25 bp, Homo sapien
gaaggatcttctttacctaggacca

SEQ ID NO: 3365450 - DNA, 25 bp, Homo sapien
tgtgctcccgaatgtataagtcctt

SEQ ID NO: 3365451 - DNA, 25 bp, Homo sapien
gaaatttgggtcaattatgaggccc

SEQ ID NO: 3365452 - DNA, 25 bp, Homo sapien
ttgaaaatatacagccttttcaaac

SEQ ID NO: 3365453 - DNA, 25 bp, Homo sapien
tgaaaatatacagccttttcaaacc

SEQ ID NO: 3365454 - DNA, 25 bp, Homo sapien
ttgtgtctgcgttgaagttgtattt

SEQ ID NO: 3365455 - DNA, 25 bp, Homo sapien
tctccgatttctccgggctgggctg

SEQ ID NO: 3365456 - DNA, 25 bp, Homo sapien
gcttctccgatttctccgggctggg

SEQ ID NO: 3365457 - DNA, 25 bp, Homo sapien
cgttgaagttgtatttggctatagc

SEQ ID NO: 3365458 - DNA, 25 bp, Homo sapien
ctctacgtatgagatcgggaagatg

SEQ ID NO: 3365459 - DNA, 25 bp, Homo sapien
ccctcataccaattttgatcaattt

SEQ ID NO: 3365460 - DNA, 25 bp, Homo sapien
tcctgaggatgtagacagtatctcc

SEQ ID NO: 3365461 - DNA, 25 bp, Homo sapien
gatcgggaagatgcccactctcccg

SEQ ID NO: 3365462 - DNA, 25 bp, Homo sapien
cacgttgacatggtctttttgtgat

SEQ ID NO: 3365463 - DNA, 25 bp, Homo sapien
ctggaagagacacgttgacatggtc

SEQ ID NO: 3365464 - DNA, 25 bp, Homo sapien
catggtctttttgtgatgtacagca

SEQ ID NO: 3365465 - DNA, 25 bp, Homo sapien
gaagagacacgttgacatggtcttt

SEQ ID NO: 3365466 - DNA, 25 bp, Homo sapien
gttttaagtgcaaagacatatgcca

SEQ ID NO: 3365467 - DNA, 25 bp, Homo sapien
gatctttgaagttggttgacaggta

SEQ ID NO: 3365468 - DNA, 25 bp, Homo sapien
ccccttttgatgtactgaagcttac

SEQ ID NO: 3365469 - DNA, 25 bp, Homo sapien
atcatgtagcctcagaatagaagtg

SEQ ID NO: 3365470 - DNA, 25 bp, Homo sapien
taagtctgcttatgtgcttccgcaa

SEQ ID NO: 3365471 - DNA, 25 bp, Homo sapien
tgaaaacaccgacaccaaaagacca

SEQ ID NO: 3365472 - DNA, 25 bp, Homo sapien
taaaggtctgtgcacataggccaca

SEQ ID NO: 3365473 - DNA, 25 bp, Homo sapien
tgggcaacaccctcttatatataag

SEQ ID NO: 3365474 - DNA, 25 bp, Homo sapien
ttaaaatcataaacagcttttgcag

SEQ ID NO: 3365475 - DNA, 25 bp, Homo sapien
tagatgtctgagccttaaaatcata

SEQ ID NO: 3365476 - DNA, 25 bp, Homo sapien
ttagatgtctgagccttaaaatcat

SEQ ID NO: 3365477 - DNA, 25 bp, Homo sapien
cttcctcaccaaccaacaatccctt

SEQ ID NO: 3365478 - DNA, 25 bp, Homo sapien
cctatagctagctaggccagctctt

SEQ ID NO: 3365479 - DNA, 25 bp, Homo sapien
ccaaccaacaatcccttcactccat

SEQ ID NO: 3365480 - DNA, 25 bp, Homo sapien
tatagctagctaggccagctcttcc

SEQ ID NO: 3365481 - DNA, 25 bp, Homo sapien
cagtccaagtccagcttttagtttc

SEQ ID NO: 3365482 - DNA, 25 bp, Homo sapien
gtccaagtccagcttttagtttcca

SEQ ID NO: 3365483 - DNA, 25 bp, Homo sapien
caagtccagcttttagtttccatcc

SEQ ID NO: 3365484 - DNA, 25 bp, Homo sapien
agtccagcttttagtttccatccag

SEQ ID NO: 3365485 - DNA, 25 bp, Homo sapien
tgagtaacttctaggggactcacgg

SEQ ID NO: 3365486 - DNA, 25 bp, Homo sapien
agtggatgagtaacttctaggggac

SEQ ID NO: 3365487 - DNA, 25 bp, Homo sapien
ttctttcccttggtgcacttctccc

SEQ ID NO: 3365488 - DNA, 25 bp, Homo sapien
tggtgcacttctccccatgtcagtc

SEQ ID NO: 3365489 - DNA, 25 bp, Homo sapien
caatgaatagcaccatcgggaggca

SEQ ID NO: 3365490 - DNA, 25 bp, Homo sapien
cagatgtctttaagggcagagtcca

SEQ ID NO: 3365491 - DNA, 25 bp, Homo sapien
tccacgtcttggaaagaggcactgc

SEQ ID NO: 3365492 - DNA, 25 bp, Homo sapien
ctctcgggaacatctggcagcagct

SEQ ID NO: 3365493 - DNA, 25 bp, Homo sapien
cattgtggtaaatcgagtgtaggag

SEQ ID NO: 3365494 - DNA, 25 bp, Homo sapien
gggctcctcggtgttttcgtgtctg

SEQ ID NO: 3365495 - DNA, 25 bp, Homo sapien
caagtttagaaaggccagggtccat

SEQ ID NO: 3365496 - DNA, 25 bp, Homo sapien
tgttttcgtgtctggctctttcgtg

SEQ ID NO: 3365497 - DNA, 25 bp, Homo sapien
tggctggatccgtaaaagctttcgg

SEQ ID NO: 3365498 - DNA, 25 bp, Homo sapien
gctggatccgtaaaagctttcggag

SEQ ID NO: 3365499 - DNA, 25 bp, Homo sapien
gtggtggtggctggatccgtaaaag

SEQ ID NO: 3365500 - DNA, 25 bp, Homo sapien
tggtggctggatccgtaaaagcttt

SEQ ID NO: 3365501 - DNA, 25 bp, Homo sapien
tagggttacgggagacagcatgtca

SEQ ID NO: 3365502 - DNA, 25 bp, Homo sapien
tggtcgctgtcggaaaactccacgt

SEQ ID NO: 3365503 - DNA, 25 bp, Homo sapien
tggatcagcttttcgaattcggaga

SEQ ID NO: 3365504 - DNA, 25 bp, Homo sapien
tggaaaaccgcctcttgggacatag

SEQ ID NO: 3365505 - DNA, 25 bp, Homo sapien
gaatcctggacttcacggagcagat

SEQ ID NO: 3365506 - DNA, 25 bp, Homo sapien
cagaatcctggacttcacggagcag

SEQ ID NO: 3365507 - DNA, 25 bp, Homo sapien
ctgcagaatcctggacttcacggag

SEQ ID NO: 3365508 - DNA, 25 bp, Homo sapien
tcctggacttcacggagcagatcac

SEQ ID NO: 3365509 - DNA, 25 bp, Homo sapien
tcgtcgtttaggagatcgtcacagc

SEQ ID NO: 3365510 - DNA, 25 bp, Homo sapien
gatccttgatctgccgttactgcga

SEQ ID NO: 3365511 - DNA, 25 bp, Homo sapien
tccgggaagctatcgcagtcgtcgt

SEQ ID NO: 3365512 - DNA, 25 bp, Homo sapien
cagatttctgcgttttgccgggcca

SEQ ID NO: 3365513 - DNA, 25 bp, Homo sapien
ggacatattttgctatcatccccac

SEQ ID NO: 3365514 - DNA, 25 bp, Homo sapien
agggatggacatattttgctatcat

SEQ ID NO: 3365515 - DNA, 25 bp, Homo sapien
gcaaagggatggacatattttgcta

SEQ ID NO: 3365516 - DNA, 25 bp, Homo sapien
tggacatattttgctatcatcccca

SEQ ID NO: 3365517 - DNA, 25 bp, Homo sapien
aggagaaagcagttagtgtgtttta

SEQ ID NO: 3365518 - DNA, 25 bp, Homo sapien
tttaatctaggtgctgattgttcac

SEQ ID NO: 3365519 - DNA, 25 bp, Homo sapien
aatctaggtgctgattgttcacaca

SEQ ID NO: 3365520 - DNA, 25 bp, Homo sapien
ttagtgtgttttaatctaggtgctg

SEQ ID NO: 3365521 - DNA, 25 bp, Homo sapien
gaggtccactcggcctgggctagtc

SEQ ID NO: 3365522 - DNA, 25 bp, Homo sapien
ttgtaagagtggtgcttgatcctgg

SEQ ID NO: 3365523 - DNA, 25 bp, Homo sapien
ctagtgaaagactttgtaagagtgg

SEQ ID NO: 3365524 - DNA, 25 bp, Homo sapien
aagagctagtgaaagactttgtaag

SEQ ID NO: 3365525 - DNA, 25 bp, Homo sapien
caggcttctgtctatagaggactga

SEQ ID NO: 3365526 - DNA, 25 bp, Homo sapien
ggcttctgtctatagaggactgata

SEQ ID NO: 3365527 - DNA, 25 bp, Homo sapien
tgtctatagaggactgatacaagga

SEQ ID NO: 3365528 - DNA, 25 bp, Homo sapien
cttctgtctatagaggactgataca

SEQ ID NO: 3365529 - DNA, 25 bp, Homo sapien
gcctgagagcatcggcgtctgtgca

SEQ ID NO: 3365530 - DNA, 25 bp, Homo sapien
gatcacggctttcgtgggacaccct

SEQ ID NO: 3365531 - DNA, 25 bp, Homo sapien
tactcgtttgcagaagagcgacact

SEQ ID NO: 3365532 - DNA, 25 bp, Homo sapien
cacacacagctgatcaccaaaaagt

SEQ ID NO: 3365533 - DNA, 25 bp, Homo sapien
cttgaacatagtccagaggcttttt

SEQ ID NO: 3365534 - DNA, 25 bp, Homo sapien
gaatgatcttgaacatagtccagag

SEQ ID NO: 3365535 - DNA, 25 bp, Homo sapien
ccagaagaatgatcttgaacatagt

SEQ ID NO: 3365536 - DNA, 25 bp, Homo sapien
tgaaaacaccagaagaatgatcttg

SEQ ID NO: 3365537 - DNA, 25 bp, Homo sapien
ttgacagcaccagctacacaaacag

SEQ ID NO: 3365538 - DNA, 25 bp, Homo sapien
gtgcaacgtctgcaaatattctcaa

SEQ ID NO: 3365539 - DNA, 25 bp, Homo sapien
cacaaacagaatgacatgaatggag

SEQ ID NO: 3365540 - DNA, 25 bp, Homo sapien
tagaaattgagtgttgacagcacca

SEQ ID NO: 3365541 - DNA, 25 bp, Homo sapien
taggcgtgtagcaggctctagcatc

SEQ ID NO: 3365542 - DNA, 25 bp, Homo sapien
gaaatgaatctggactacgctgtac

SEQ ID NO: 3365543 - DNA, 25 bp, Homo sapien
tactctgcgatgtttgcacaatggc

SEQ ID NO: 3365544 - DNA, 25 bp, Homo sapien
tattatagtgagaactgcccagaga

SEQ ID NO: 3365545 - DNA, 25 bp, Homo sapien
tatgtcatctggatttatgcgatca

SEQ ID NO: 3365546 - DNA, 25 bp, Homo sapien
tgtcatctggatttatgcgatcagt

SEQ ID NO: 3365547 - DNA, 25 bp, Homo sapien
aaatctatgtcatctggatttatgc

SEQ ID NO: 3365548 - DNA, 25 bp, Homo sapien
tctatgtcatctggatttatgcgat

SEQ ID NO: 3365549 - DNA, 25 bp, Homo sapien
gatccacttacgcttgaggcatgaa

SEQ ID NO: 3365550 - DNA, 25 bp, Homo sapien
cagacaattcactcgggtgcaggca

SEQ ID NO: 3365551 - DNA, 25 bp, Homo sapien
tgtgtggcatgaaaaactcacgcgc

SEQ ID NO: 3365552 - DNA, 25 bp, Homo sapien
tcattggtggctagcagtcccagca

SEQ ID NO: 3365553 - DNA, 25 bp, Homo sapien
cgagcttggtgtgggggcgccactc

SEQ ID NO: 3365554 - DNA, 25 bp, Homo sapien
tgtgggggcgccactccggggcgga

SEQ ID NO: 3365555 - DNA, 25 bp, Homo sapien
agcttggtgtgggggcgccactccg

SEQ ID NO: 3365556 - DNA, 25 bp, Homo sapien
cttggtgtgggggcgccactccggg

SEQ ID NO: 3365557 - DNA, 25 bp, Homo sapien
tctccgagtcgggagctagaaagag

SEQ ID NO: 3365558 - DNA, 25 bp, Homo sapien
agctagaaagaggcttccggccagg

SEQ ID NO: 3365559 - DNA, 25 bp, Homo sapien
cggccaggttcccttggaacaggtg

SEQ ID NO: 3365560 - DNA, 25 bp, Homo sapien
ctaccagtgacttctccgagtcggg

SEQ ID NO: 3365561 - DNA, 25 bp, Homo sapien
taatagcagtgtgtcaaacccctcc

SEQ ID NO: 3365562 - DNA, 25 bp, Homo sapien
tgtagcccaggcacggacaattgtg

SEQ ID NO: 3365563 - DNA, 25 bp, Homo sapien
gggagagcctccaacctaatgcaga

SEQ ID NO: 3365564 - DNA, 25 bp, Homo sapien
gatctcatgaggaacacagtgtgcc

SEQ ID NO: 3365565 - DNA, 25 bp, Homo sapien
caaggcgagctaatgtgtgtttcag

SEQ ID NO: 3365566 - DNA, 25 bp, Homo sapien
tatgcctgggctcaactcctagttc

SEQ ID NO: 3365567 - DNA, 25 bp, Homo sapien
gaccaagtgcaccaggcatcagtat

SEQ ID NO: 3365568 - DNA, 25 bp, Homo sapien
tcctgtgtggtaactacttagggcc

SEQ ID NO: 3365569 - DNA, 25 bp, Homo sapien
taagaggctgtttactttgcacaaa

SEQ ID NO: 3365570 - DNA, 25 bp, Homo sapien
tcaatgtataaaccctaaagggagc

SEQ ID NO: 3365571 - DNA, 25 bp, Homo sapien
catgttcgttatcctaagagtctca

SEQ ID NO: 3365572 - DNA, 25 bp, Homo sapien
gggaagacctatgtgtgaacctgcg

SEQ ID NO: 3365573 - DNA, 25 bp, Homo sapien
actgcctgggtccatgtatattggg

SEQ ID NO: 3365574 - DNA, 25 bp, Homo sapien
tctaagtgattacctttgtgacaaa

SEQ ID NO: 3365575 - DNA, 25 bp, Homo sapien
agcgagctggcatattctgtttaat

SEQ ID NO: 3365576 - DNA, 25 bp, Homo sapien
ggcacagttagagttacatgcaaat

SEQ ID NO: 3365577 - DNA, 25 bp, Homo sapien
aatactccttggctcagaccgaaat

SEQ ID NO: 3365578 - DNA, 25 bp, Homo sapien
tgaagaattgatgacttgccaggtt

SEQ ID NO: 3365579 - DNA, 25 bp, Homo sapien
ggctcagaccgaaattttcttgtgt

SEQ ID NO: 3365580 - DNA, 25 bp, Homo sapien
gaagaattgatgacttgccaggttc

SEQ ID NO: 3365581 - DNA, 25 bp, Homo sapien
ctcaggcaatccacacaccatggct

SEQ ID NO: 3365582 - DNA, 25 bp, Homo sapien
tagcctgtaacctggtatgccaaag

SEQ ID NO: 3365583 - DNA, 25 bp, Homo sapien
cccagcagaggaggtcaatatggta

SEQ ID NO: 3365584 - DNA, 25 bp, Homo sapien
ctaagcgaaacataggccaccctgg

SEQ ID NO: 3365585 - DNA, 25 bp, Homo sapien
taatttagggcactccagtatcatg

SEQ ID NO: 3365586 - DNA, 25 bp, Homo sapien
ctgttgtcggagtggcttttggaaa

SEQ ID NO: 3365587 - DNA, 25 bp, Homo sapien
gaggacgcatccttaaaggcattgg

SEQ ID NO: 3365588 - DNA, 25 bp, Homo sapien
atctcttggtcgaagcggcgggact

SEQ ID NO: 3365589 - DNA, 25 bp, Homo sapien
tttctgttgaagaccgatctcttgg

SEQ ID NO: 3365590 - DNA, 25 bp, Homo sapien
tagccaatgattgcatagaaattat

SEQ ID NO: 3365591 - DNA, 25 bp, Homo sapien
tattctgtacctaagccctgattac

SEQ ID NO: 3365592 - DNA, 25 bp, Homo sapien
ttcagactggtactaggaatagact

SEQ ID NO: 3365593 - DNA, 25 bp, Homo sapien
tgtccccctcaaaatagccaatgat

SEQ ID NO: 3365594 - DNA, 25 bp, Homo sapien
ctgcattgtatgtataaggagtatt

SEQ ID NO: 3365595 - DNA, 25 bp, Homo sapien
gcattgtatgtataaggagtattat

SEQ ID NO: 3365596 - DNA, 25 bp, Homo sapien
taaggagtattatacatgtctgtgt

SEQ ID NO: 3365597 - DNA, 25 bp, Homo sapien
gtataaggagtattatacatgtctg

SEQ ID NO: 3365598 - DNA, 25 bp, Homo sapien
tctgctctggatcgcaaatttcctt

SEQ ID NO: 3365599 - DNA, 25 bp, Homo sapien
tcttcgtagcatgcaaagtcaggcc

SEQ ID NO: 3365600 - DNA, 25 bp, Homo sapien
gcaaactgcccttttttatctgtaa

SEQ ID NO: 3365601 - DNA, 25 bp, Homo sapien
tctgtaacatattcgtcttgctgcc

SEQ ID NO: 3365602 - DNA, 25 bp, Homo sapien
tttgcttaaacatcgtcttgtacca

SEQ ID NO: 3365603 - DNA, 25 bp, Homo sapien
atcgtcttgtaccagtccttgggcc

SEQ ID NO: 3365604 - DNA, 25 bp, Homo sapien
ttgtaccagtccttgggccggtcga

SEQ ID NO: 3365605 - DNA, 25 bp, Homo sapien
atttgcttaaacatcgtcttgtacc

SEQ ID NO: 3365606 - DNA, 25 bp, Homo sapien
gaagagagcgtccaatggttacaaa

SEQ ID NO: 3365607 - DNA, 25 bp, Homo sapien
ctgtaatgaagagagcgtccaatgg

SEQ ID NO: 3365608 - DNA, 25 bp, Homo sapien
gtccaatggttacaaactggcttcc

SEQ ID NO: 3365609 - DNA, 25 bp, Homo sapien
ttccaatcaacatcgcttctcagtg

SEQ ID NO: 3365610 - DNA, 25 bp, Homo sapien
tcctggacgtgctgatggcaacaag

SEQ ID NO: 3365611 - DNA, 25 bp, Homo sapien
aagggccacttgacttcgttatgag

SEQ ID NO: 3365612 - DNA, 25 bp, Homo sapien
gactattcagtcaaaggacgggaca

SEQ ID NO: 3365613 - DNA, 25 bp, Homo sapien
tcaccccaaatacaggttaacatga

SEQ ID NO: 3365614 - DNA, 25 bp, Homo sapien
ggtcttgctgcaaagtatatgcagc

SEQ ID NO: 3365615 - DNA, 25 bp, Homo sapien
tatcccttattgtcttggctgccca

SEQ ID NO: 3365616 - DNA, 25 bp, Homo sapien
tctttgcctctatcccttattgtct

SEQ ID NO: 3365617 - DNA, 25 bp, Homo sapien
ttggccacaccccagctttacatgg

SEQ ID NO: 3365618 - DNA, 25 bp, Homo sapien
ctcttccagtggacttggtcagcca

SEQ ID NO: 3365619 - DNA, 25 bp, Homo sapien
ttctcttccagtggacttggtcagc

SEQ ID NO: 3365620 - DNA, 25 bp, Homo sapien
tgcgttttgccggaaggggctgccc

SEQ ID NO: 3365621 - DNA, 25 bp, Homo sapien
ggctgcccagatacactgagcaatg

SEQ ID NO: 3365622 - DNA, 25 bp, Homo sapien
tccaatctcccggtgttaacacaca

SEQ ID NO: 3365623 - DNA, 25 bp, Homo sapien
acatcactgctttattcgcaatgca

SEQ ID NO: 3365624 - DNA, 25 bp, Homo sapien
ttcacttatcatcccaggagagctc

SEQ ID NO: 3365625 - DNA, 25 bp, Homo sapien
tcgcaatgcatgtgggaattcaatg

SEQ ID NO: 3365626 - DNA, 25 bp, Homo sapien
aaacagattgtgtaattctctccca

SEQ ID NO: 3365627 - DNA, 25 bp, Homo sapien
gagggcaatcctccttatataagac

SEQ ID NO: 3365628 - DNA, 25 bp, Homo sapien
cattcatgagaagtcggatggcacg

SEQ ID NO: 3365629 - DNA, 25 bp, Homo sapien
ccacacacagcataacattcatgag

SEQ ID NO: 3365630 - DNA, 25 bp, Homo sapien
ggacaatccgtcctttgtggagtct

SEQ ID NO: 3365631 - DNA, 25 bp, Homo sapien
cctaggaatgcacaaagccgtggac

SEQ ID NO: 3365632 - DNA, 25 bp, Homo sapien
cctttgtggagtctgtgcacagccc

SEQ ID NO: 3365633 - DNA, 25 bp, Homo sapien
agacgcacacgctggcatttcctac

SEQ ID NO: 3365634 - DNA, 25 bp, Homo sapien
gggattccggattcatccacgggcc

SEQ ID NO: 3365635 - DNA, 25 bp, Homo sapien
cttcctctgaggatcggtacagggg

SEQ ID NO: 3365636 - DNA, 25 bp, Homo sapien
cacgggcccgatccctgggtaatgc

SEQ ID NO: 3365637 - DNA, 25 bp, Homo sapien
taatgcggggctttgatgactgtca

SEQ ID NO: 3365638 - DNA, 25 bp, Homo sapien
tagatgaggcttatcgagttcttca

SEQ ID NO: 3365639 - DNA, 25 bp, Homo sapien
tttgatgacaaaaactgccctaagg

SEQ ID NO: 3365640 - DNA, 25 bp, Homo sapien
tccagacaaagacatgactgttgag

SEQ ID NO: 3365641 - DNA, 25 bp, Homo sapien
gcaacagagtacagacatgcagtat

SEQ ID NO: 3365642 - DNA, 25 bp, Homo sapien
tctaagcaaggagaatcaactctgc

SEQ ID NO: 3365643 - DNA, 25 bp, Homo sapien
tatggtccactagctgtcatcttag

SEQ ID NO: 3365644 - DNA, 25 bp, Homo sapien
cgcgcccggctaagctagtccttat

SEQ ID NO: 3365645 - DNA, 25 bp, Homo sapien
caaaaaggacttgagtgggcctcca

SEQ ID NO: 3365646 - DNA, 25 bp, Homo sapien
catggaaacttgtacagcctgaatt

SEQ ID NO: 3365647 - DNA, 25 bp, Homo sapien
tgtacagcctgaattcctatgatag

SEQ ID NO: 3365648 - DNA, 25 bp, Homo sapien
ttcctatgatagttcaatttcgtat

SEQ ID NO: 3365649 - DNA, 25 bp, Homo sapien
gtcgacatcatggaaacttgtacag

SEQ ID NO: 3365650 - DNA, 25 bp, Homo sapien
atagggtcatgagtgctgagcgctc

SEQ ID NO: 3365651 - DNA, 25 bp, Homo sapien
gacatggtcttggaatagcatggtg

SEQ ID NO: 3365652 - DNA, 25 bp, Homo sapien
ttggaatagcatggtgcccatttcc

SEQ ID NO: 3365653 - DNA, 25 bp, Homo sapien
tagggtcatgagtgctgagcgctcc

SEQ ID NO: 3365654 - DNA, 25 bp, Homo sapien
tgatgccgcatatctttctcctgtg

SEQ ID NO: 3365655 - DNA, 25 bp, Homo sapien
cttgatgccgcatatctttctcctg

SEQ ID NO: 3365656 - DNA, 25 bp, Homo sapien
tctcctgtggttgtacttgccgcat

SEQ ID NO: 3365657 - DNA, 25 bp, Homo sapien
ttgatgccgcatatctttctcctgt

SEQ ID NO: 3365658 - DNA, 25 bp, Homo sapien
gaaatcacggtgagtaaattactta

SEQ ID NO: 3365659 - DNA, 25 bp, Homo sapien
gggatgtgccgtgctgcatgacaat

SEQ ID NO: 3365660 - DNA, 25 bp, Homo sapien
cgagggatgtgccgtgctgcatgac

SEQ ID NO: 3365661 - DNA, 25 bp, Homo sapien
ggatgtgccgtgctgcatgacaatg

SEQ ID NO: 3365662 - DNA, 25 bp, Homo sapien
agggatgtgccgtgctgcatgacaa

SEQ ID NO: 3365663 - DNA, 25 bp, Homo sapien
cgagggggaaaacggcctctgatag

SEQ ID NO: 3365664 - DNA, 25 bp, Homo sapien
ctgggagagaatatgccgaggggga

SEQ ID NO: 3365665 - DNA, 25 bp, Homo sapien
aaaacggcctctgatagtaactcat

SEQ ID NO: 3365666 - DNA, 25 bp, Homo sapien
atgccgagggggaaaacggcctctg

SEQ ID NO: 3365667 - DNA, 25 bp, Homo sapien
gagtttccattcactgttatctggc

SEQ ID NO: 3365668 - DNA, 25 bp, Homo sapien
tcctgagtttccattcactgttatc

SEQ ID NO: 3365669 - DNA, 25 bp, Homo sapien
ggcacctcctgagtttccattcact

SEQ ID NO: 3365670 - DNA, 25 bp, Homo sapien
acctcctgagtttccattcactgtt

SEQ ID NO: 3365671 - DNA, 25 bp, Homo sapien
gcacaacaaatcagtcctttcaagg

SEQ ID NO: 3365672 - DNA, 25 bp, Homo sapien
cacaacaaatcagtcctttcaagga

SEQ ID NO: 3365673 - DNA, 25 bp, Homo sapien
tcaaggaaacggtggaggcaaagaa

SEQ ID NO: 3365674 - DNA, 25 bp, Homo sapien
tcctttcaaggaaacggtggaggca

SEQ ID NO: 3365675 - DNA, 25 bp, Homo sapien
gccgcaggggtggttaaggtggtgc

SEQ ID NO: 3365676 - DNA, 25 bp, Homo sapien
gccatctgtcacagcagacctctga

SEQ ID NO: 3365677 - DNA, 25 bp, Homo sapien
gtggttaaggtggtgccatctgtca

SEQ ID NO: 3365678 - DNA, 25 bp, Homo sapien
ttaaggtggtgccatctgtcacagc

SEQ ID NO: 3365679 - DNA, 25 bp, Homo sapien
tctcagaacggccagtggtgtcaga

SEQ ID NO: 3365680 - DNA, 25 bp, Homo sapien
ctgggagcaggtgtttgtataagca

SEQ ID NO: 3365681 - DNA, 25 bp, Homo sapien
cctgtgtcgtggctgtggatgaggc

SEQ ID NO: 3365682 - DNA, 25 bp, Homo sapien
gcatggctgtggaggactcactctc

SEQ ID NO: 3365683 - DNA, 25 bp, Homo sapien
gattatgcaggcgtgaagaccccac

SEQ ID NO: 3365684 - DNA, 25 bp, Homo sapien
tgcaggcgtgaagaccccacaccat

SEQ ID NO: 3365685 - DNA, 25 bp, Homo sapien
cctggtgagaaagtggctcggttca

SEQ ID NO: 3365686 - DNA, 25 bp, Homo sapien
tggctcggttcaaaggtaccacgga

SEQ ID NO: 3365687 - DNA, 25 bp, Homo sapien
cactggcaggtaagttctgatttcc

SEQ ID NO: 3365688 - DNA, 25 bp, Homo sapien
ccaacacactggcaggtaagttctg

SEQ ID NO: 3365689 - DNA, 25 bp, Homo sapien
aacacactggcaggtaagttctgat

SEQ ID NO: 3365690 - DNA, 25 bp, Homo sapien
ctccaacacactggcaggtaagttc

SEQ ID NO: 3365691 - DNA, 25 bp, Homo sapien
tagcaatgcaaatagaggtaccatg

SEQ ID NO: 3365692 - DNA, 25 bp, Homo sapien
gctaaacatagcgaagggatgctct

SEQ ID NO: 3365693 - DNA, 25 bp, Homo sapien
gaccacacgtgacaaataggatgat

SEQ ID NO: 3365694 - DNA, 25 bp, Homo sapien
aaccacctgtggtagcctggatgac

SEQ ID NO: 3365695 - DNA, 25 bp, Homo sapien
tgtctctaagaccaccatagtcatg

SEQ ID NO: 3365696 - DNA, 25 bp, Homo sapien
tctatagtcataagcccctaagctg

SEQ ID NO: 3365697 - DNA, 25 bp, Homo sapien
tagttcgctcataagctcagtgaca

SEQ ID NO: 3365698 - DNA, 25 bp, Homo sapien
ccctaagctgtcacttgctgacaca

SEQ ID NO: 3365699 - DNA, 25 bp, Homo sapien
cctggtggtatgaggagacctgcct

SEQ ID NO: 3365700 - DNA, 25 bp, Homo sapien
tgccccctcttttcatggcctgtcc

SEQ ID NO: 3365701 - DNA, 25 bp, Homo sapien
ctggtggtatgaggagacctgcctg

SEQ ID NO: 3365702 - DNA, 25 bp, Homo sapien
gggctgctacttcctagatcctggt

SEQ ID NO: 3365703 - DNA, 25 bp, Homo sapien
tctctggagaaagctcaggtagctg

SEQ ID NO: 3365704 - DNA, 25 bp, Homo sapien
gacggtacttcgacagatttggaga

SEQ ID NO: 3365705 - DNA, 25 bp, Homo sapien
tgttagcgaatggtgcaggatccgt

SEQ ID NO: 3365706 - DNA, 25 bp, Homo sapien
tatcaaagagctatgaaagctctct

SEQ ID NO: 3365707 - DNA, 25 bp, Homo sapien
ggtctaaaatgacaccctttgtgtg

SEQ ID NO: 3365708 - DNA, 25 bp, Homo sapien
tactctgtactggagggaatttgtg

SEQ ID NO: 3365709 - DNA, 25 bp, Homo sapien
tgtgtgactggttatcaaagagcta

SEQ ID NO: 3365710 - DNA, 25 bp, Homo sapien
ttgtaggtttggtcgaacgcttcta

SEQ ID NO: 3365711 - DNA, 25 bp, Homo sapien
cttgtaggtttggtcgaacgcttct

SEQ ID NO: 3365712 - DNA, 25 bp, Homo sapien
tgtaggtttggtcgaacgcttctaa

SEQ ID NO: 3365713 - DNA, 25 bp, Homo sapien
aggaatatgtagcatctccgttcag

SEQ ID NO: 3365714 - DNA, 25 bp, Homo sapien
tagcatctccgttcagtgtctcctg

SEQ ID NO: 3365715 - DNA, 25 bp, Homo sapien
tatgtagcatctccgttcagtgtct

SEQ ID NO: 3365716 - DNA, 25 bp, Homo sapien
gaatatgtagcatctccgttcagtg

SEQ ID NO: 3365717 - DNA, 25 bp, Homo sapien
tgagtctggtgactgagaatcacgc

SEQ ID NO: 3365718 - DNA, 25 bp, Homo sapien
gagtctggtgactgagaatcacgcc

SEQ ID NO: 3365719 - DNA, 25 bp, Homo sapien
gaagggtcttgcatcgcacagtgga

SEQ ID NO: 3365720 - DNA, 25 bp, Homo sapien
ccccaggagacggtaagtgtgagaa

SEQ ID NO: 3365721 - DNA, 25 bp, Homo sapien
gaatcagaggacagtcactccaggc

SEQ ID NO: 3365722 - DNA, 25 bp, Homo sapien
aatggccattgagtcgaacttcagg

SEQ ID NO: 3365723 - DNA, 25 bp, Homo sapien
caaggttcacgtctgagtaggttgg

SEQ ID NO: 3365724 - DNA, 25 bp, Homo sapien
aagcagtgtggcgttccctggtacg

SEQ ID NO: 3365725 - DNA, 25 bp, Homo sapien
gtttcgactctccacatgggcactg

SEQ ID NO: 3365726 - DNA, 25 bp, Homo sapien
aaattgcatgtagttcagtttcgac

SEQ ID NO: 3365727 - DNA, 25 bp, Homo sapien
tttatgttcatacgtgcatgagcca

SEQ ID NO: 3365728 - DNA, 25 bp, Homo sapien
ggcattccaattacacgatggccct

SEQ ID NO: 3365729 - DNA, 25 bp, Homo sapien
gacattcagggtattggcattccaa

SEQ ID NO: 3365730 - DNA, 25 bp, Homo sapien
cgatggccctgaactcttacggtta

SEQ ID NO: 3365731 - DNA, 25 bp, Homo sapien
taaagcgaagaacaccctgagtatt

SEQ ID NO: 3365732 - DNA, 25 bp, Homo sapien
gaagactgtgatatgcataatgaga

SEQ ID NO: 3365733 - DNA, 25 bp, Homo sapien
gatgtatgtgtgtagaagactgtga

SEQ ID NO: 3365734 - DNA, 25 bp, Homo sapien
ctggcatttaaacttggacgttgaa

SEQ ID NO: 3365735 - DNA, 25 bp, Homo sapien
ctgcagccaataggtttggagaact

SEQ ID NO: 3365736 - DNA, 25 bp, Homo sapien
cacgtttgcgagcacacccaccgct

SEQ ID NO: 3365737 - DNA, 25 bp, Homo sapien
cgtttgcgagcacacccaccgctat

SEQ ID NO: 3365738 - DNA, 25 bp, Homo sapien
ggcacgtttgcgagcacacccaccg

SEQ ID NO: 3365739 - DNA, 25 bp, Homo sapien
ggcggcacgtttgcgagcacaccca

SEQ ID NO: 3365740 - DNA, 25 bp, Homo sapien
cacatggcacatgacgcaaggctct

SEQ ID NO: 3365741 - DNA, 25 bp, Homo sapien
tctctgaggccactacggcacatgg

SEQ ID NO: 3365742 - DNA, 25 bp, Homo sapien
tgtctgcaaggtgactgcatcccca

SEQ ID NO: 3365743 - DNA, 25 bp, Homo sapien
taggtattggtcctcgccagtggct

SEQ ID NO: 3365744 - DNA, 25 bp, Homo sapien
tttcaccttggagagtttgttatta

SEQ ID NO: 3365745 - DNA, 25 bp, Homo sapien
cttggagagtttgttattaaagtct

SEQ ID NO: 3365746 - DNA, 25 bp, Homo sapien
ttcaccttggagagtttgttattaa

SEQ ID NO: 3365747 - DNA, 25 bp, Homo sapien
gagagtttgttattaaagtcttcag

SEQ ID NO: 3365748 - DNA, 25 bp, Homo sapien
tatcatgaaagtgtgtcgcattttt

SEQ ID NO: 3365749 - DNA, 25 bp, Homo sapien
aaatatcatgaaagtgtgtcgcatt

SEQ ID NO: 3365750 - DNA, 25 bp, Homo sapien
catgaaagtgtgtcgcatttttgtt

SEQ ID NO: 3365751 - DNA, 25 bp, Homo sapien
agaaaatatcatgaaagtgtgtcgc

SEQ ID NO: 3365752 - DNA, 25 bp, Homo sapien
cttgagccttagcagacaatccacg

SEQ ID NO: 3365753 - DNA, 25 bp, Homo sapien
ccttagcagacaatccacggagcaa

SEQ ID NO: 3365754 - DNA, 25 bp, Homo sapien
caatccacggagcaaagaagtctcc

SEQ ID NO: 3365755 - DNA, 25 bp, Homo sapien
gaagtctccgaacatgaaggtgtca

SEQ ID NO: 3365756 - DNA, 25 bp, Homo sapien
caatcatattaaggttatgcaccag

SEQ ID NO: 3365757 - DNA, 25 bp, Homo sapien
gaaatagtcacatgaaaactccaag

SEQ ID NO: 3365758 - DNA, 25 bp, Homo sapien
gggatcatttgtagcactctctttg

SEQ ID NO: 3365759 - DNA, 25 bp, Homo sapien
tctttggataaactgccctaagtga

SEQ ID NO: 3365760 - DNA, 25 bp, Homo sapien
tctgatgttattccaaggtctcaaa

SEQ ID NO: 3365761 - DNA, 25 bp, Homo sapien
ggtctcaaagttggtgaatcactca

SEQ ID NO: 3365762 - DNA, 25 bp, Homo sapien
tactgattagaagttgatcacctgg

SEQ ID NO: 3365763 - DNA, 25 bp, Homo sapien
tttatgagaatacgcggagtgttag

SEQ ID NO: 3365764 - DNA, 25 bp, Homo sapien
tattgtaatcttagggatcattacg

SEQ ID NO: 3365765 - DNA, 25 bp, Homo sapien
cattacggaacaacatctaagtatt

SEQ ID NO: 3365766 - DNA, 25 bp, Homo sapien
tttctaagactaagtcatttgttca

SEQ ID NO: 3365767 - DNA, 25 bp, Homo sapien
tgtgcctagccaccctactttcatg

SEQ ID NO: 3365768 - DNA, 25 bp, Homo sapien
tgtacaagtgttaagcagaatcata

SEQ ID NO: 3365769 - DNA, 25 bp, Homo sapien
gaacgagaaaataataagccaatgg

SEQ ID NO: 3365770 - DNA, 25 bp, Homo sapien
ctgcagaaggcatacacacgagagg

SEQ ID NO: 3365771 - DNA, 25 bp, Homo sapien
tcaatttgaggagtaccctgttccg

SEQ ID NO: 3365772 - DNA, 25 bp, Homo sapien
ttgttcgcatcgactctaccctggg

SEQ ID NO: 3365773 - DNA, 25 bp, Homo sapien
tgggcctcttgttcgcatcgactct

SEQ ID NO: 3365774 - DNA, 25 bp, Homo sapien
gggcctcttgttcgcatcgactcta

SEQ ID NO: 3365775 - DNA, 25 bp, Homo sapien
ctcttgttcgcatcgactctaccct

SEQ ID NO: 3365776 - DNA, 25 bp, Homo sapien
tgtgctgggccgcaaatttcttttt

SEQ ID NO: 3365777 - DNA, 25 bp, Homo sapien
gcacgggacgcatggcactgacatt

SEQ ID NO: 3365778 - DNA, 25 bp, Homo sapien
tttgcttgggttttagagaggcctc

SEQ ID NO: 3365779 - DNA, 25 bp, Homo sapien
taccttgtctaagtcaatgtgttgc

SEQ ID NO: 3365780 - DNA, 25 bp, Homo sapien
gagaaatgtcggcatcaggctcaca

SEQ ID NO: 3365781 - DNA, 25 bp, Homo sapien
taagcagactgtactcctagccaat

SEQ ID NO: 3365782 - DNA, 25 bp, Homo sapien
tatctcaatcatggaggcagcttgg

SEQ ID NO: 3365783 - DNA, 25 bp, Homo sapien
taactctaggtcaaggcaataacac

SEQ ID NO: 3365784 - DNA, 25 bp, Homo sapien
gtccctagacaccagtttacattgt

SEQ ID NO: 3365785 - DNA, 25 bp, Homo sapien
tgtcttccagcatatgtcacttgag

SEQ ID NO: 3365786 - DNA, 25 bp, Homo sapien
tcttctgagttgctattggacatct

SEQ ID NO: 3365787 - DNA, 25 bp, Homo sapien
tctattgagggcctttcttctgagt

SEQ ID NO: 3365788 - DNA, 25 bp, Homo sapien
ggagttcagctgtaattgactaagg

SEQ ID NO: 3365789 - DNA, 25 bp, Homo sapien
ttcagctgtaattgactaaggtgac

SEQ ID NO: 3365790 - DNA, 25 bp, Homo sapien
ctgtaattgactaaggtgactcact

SEQ ID NO: 3365791 - DNA, 25 bp, Homo sapien
cagctgtaattgactaaggtgactc

SEQ ID NO: 3365792 - DNA, 25 bp, Homo sapien
tgctagtggccaaaaggcatgaagt

SEQ ID NO: 3365793 - DNA, 25 bp, Homo sapien
gcagagtgtccttcagtcttgacgc

SEQ ID NO: 3365794 - DNA, 25 bp, Homo sapien
tcgtcttgcgacataaaataacagc

SEQ ID NO: 3365795 - DNA, 25 bp, Homo sapien
gaattgctctgttctcaatcgactg

SEQ ID NO: 3365796 - DNA, 25 bp, Homo sapien
caagttcaactagggctagagcggt

SEQ ID NO: 3365797 - DNA, 25 bp, Homo sapien
agtgcccacaaaaactgcagtgtaa

SEQ ID NO: 3365798 - DNA, 25 bp, Homo sapien
cagccaggtgagttctaagtgtcaa

SEQ ID NO: 3365799 - DNA, 25 bp, Homo sapien
tgtataggtctaaccaatgcttcag

SEQ ID NO: 3365800 - DNA, 25 bp, Homo sapien
tactatcctcatgttggagcagatc

SEQ ID NO: 3365801 - DNA, 25 bp, Homo sapien
agtgagaacttgtatccctctttac

SEQ ID NO: 3365802 - DNA, 25 bp, Homo sapien
tatttgactcataactcctcctact

SEQ ID NO: 3365803 - DNA, 25 bp, Homo sapien
tcctactgatatgaacagaagccag

SEQ ID NO: 3365804 - DNA, 25 bp, Homo sapien
agggacagcttgacggcgtaacttc

SEQ ID NO: 3365805 - DNA, 25 bp, Homo sapien
ttcaaggggaagactacctacctgc

SEQ ID NO: 3365806 - DNA, 25 bp, Homo sapien
cgtaacttcggagaagaatccagcc

SEQ ID NO: 3365807 - DNA, 25 bp, Homo sapien
gccaccagtgcaaatataaaaggct

SEQ ID NO: 3365808 - DNA, 25 bp, Homo sapien
tttcagcttcacgtcatcccattgc

SEQ ID NO: 3365809 - DNA, 25 bp, Homo sapien
tgaccctacacttggtctataccag

SEQ ID NO: 3365810 - DNA, 25 bp, Homo sapien
tcacaacagcaattaggtatacagg

SEQ ID NO: 3365811 - DNA, 25 bp, Homo sapien
tcagcaggctagagtgtaggatatt

SEQ ID NO: 3365812 - DNA, 25 bp, Homo sapien
ttcacttatcttcagaacacatgag

SEQ ID NO: 3365813 - DNA, 25 bp, Homo sapien
taccatggcatttttcacgacagat

SEQ ID NO: 3365814 - DNA, 25 bp, Homo sapien
tatcaacaggcatgctacctaaacc

SEQ ID NO: 3365815 - DNA, 25 bp, Homo sapien
aaaagaagaccactttaccatggca

SEQ ID NO: 3365816 - DNA, 25 bp, Homo sapien
ggaaaacagtctctgcaatttattc

SEQ ID NO: 3365817 - DNA, 25 bp, Homo sapien
gattcttcagttctaattagctatg

SEQ ID NO: 3365818 - DNA, 25 bp, Homo sapien
taatgtagtttaacacgaagcagct

SEQ ID NO: 3365819 - DNA, 25 bp, Homo sapien
tctttggatcgcaaaatgattcttc

SEQ ID NO: 3365820 - DNA, 25 bp, Homo sapien
catggtggcaacttcgctgaaaaca

SEQ ID NO: 3365821 - DNA, 25 bp, Homo sapien
gcatcatggatcatatagaacaggg

SEQ ID NO: 3365822 - DNA, 25 bp, Homo sapien
gaagaaaggacagcccgtaccagtg

SEQ ID NO: 3365823 - DNA, 25 bp, Homo sapien
gagaaggagcaccaatttagcttgc

SEQ ID NO: 3365824 - DNA, 25 bp, Homo sapien
tctattgtgaaaacccagtgcttgc

SEQ ID NO: 3365825 - DNA, 25 bp, Homo sapien
aactcatggagaataacttttgtgg

SEQ ID NO: 3365826 - DNA, 25 bp, Homo sapien
gactttcactggaatatggttggct

SEQ ID NO: 3365827 - DNA, 25 bp, Homo sapien
ctttctgagtctgcgggtctatcca

SEQ ID NO: 3365828 - DNA, 25 bp, Homo sapien
cacacgaggagccaaatgcatgttt

SEQ ID NO: 3365829 - DNA, 25 bp, Homo sapien
caaaaggatgcgcaggagcactcat

SEQ ID NO: 3365830 - DNA, 25 bp, Homo sapien
caaatgttttcacctgactgtaggg

SEQ ID NO: 3365831 - DNA, 25 bp, Homo sapien
taatcatggcgattctcagatcagg

SEQ ID NO: 3365832 - DNA, 25 bp, Homo sapien
ctggagctctcactattgtccatct

SEQ ID NO: 3365833 - DNA, 25 bp, Homo sapien
tctggccgcaccactgtcagcactg

SEQ ID NO: 3365834 - DNA, 25 bp, Homo sapien
ccctggagctctcactattgtccat

SEQ ID NO: 3365835 - DNA, 25 bp, Homo sapien
ctattgtccatctggccgcaccact

SEQ ID NO: 3365836 - DNA, 25 bp, Homo sapien
aatgaactgtaacagaatactgatg

SEQ ID NO: 3365837 - DNA, 25 bp, Homo sapien
caatgaactgtaacagaatactgat

SEQ ID NO: 3365838 - DNA, 25 bp, Homo sapien
tgaactgtaacagaatactgatgac

SEQ ID NO: 3365839 - DNA, 25 bp, Homo sapien
tcaatgaactgtaacagaatactga

SEQ ID NO: 3365840 - DNA, 25 bp, Homo sapien
ggaagtccttgagcgagtctctttg

SEQ ID NO: 3365841 - DNA, 25 bp, Homo sapien
gtccttgagcgagtctctttgtagt

SEQ ID NO: 3365842 - DNA, 25 bp, Homo sapien
tgacaggaagtccttgagcgagtct

SEQ ID NO: 3365843 - DNA, 25 bp, Homo sapien
caggaagtccttgagcgagtctctt

SEQ ID NO: 3365844 - DNA, 25 bp, Homo sapien
ggttgcagtagtaagtttgcactgg

SEQ ID NO: 3365845 - DNA, 25 bp, Homo sapien
ggccatggagaggacaaccgggttg

SEQ ID NO: 3365846 - DNA, 25 bp, Homo sapien
caaccgggttgcagtagtaagtttg

SEQ ID NO: 3365847 - DNA, 25 bp, Homo sapien
gaggacaaccgggttgcagtagtaa

SEQ ID NO: 3365848 - DNA, 25 bp, Homo sapien
gagtatgtatcagccattgtgaagc

SEQ ID NO: 3365849 - DNA, 25 bp, Homo sapien
ttgacagagtcaaatgcagaggctg

SEQ ID NO: 3365850 - DNA, 25 bp, Homo sapien
tcaaaaggctgcagcctgacgtagc

SEQ ID NO: 3365851 - DNA, 25 bp, Homo sapien
tagaacaagggaacaggtcagcccc

SEQ ID NO: 3365852 - DNA, 25 bp, Homo sapien
cagaatggtatacgagtctgtccta

SEQ ID NO: 3365853 - DNA, 25 bp, Homo sapien
tatacgagtctgtcctattctcgct

SEQ ID NO: 3365854 - DNA, 25 bp, Homo sapien
cacccagatcagaatggtatacgag

SEQ ID NO: 3365855 - DNA, 25 bp, Homo sapien
gatcagaatggtatacgagtctgtc

SEQ ID NO: 3365856 - DNA, 25 bp, Homo sapien
aagcctcttcaggtccccctcatcc

SEQ ID NO: 3365857 - DNA, 25 bp, Homo sapien
gggtgcaaggaagcctcttcaggtc

SEQ ID NO: 3365858 - DNA, 25 bp, Homo sapien
ggaagcctcttcaggtccccctcat

SEQ ID NO: 3365859 - DNA, 25 bp, Homo sapien
cagggtgcaaggaagcctcttcagg

SEQ ID NO: 3365860 - DNA, 25 bp, Homo sapien
gagagcaggtggtctcccgtctcct

SEQ ID NO: 3365861 - DNA, 25 bp, Homo sapien
ttgatagaaaagaaccgcagcagcc

SEQ ID NO: 3365862 - DNA, 25 bp, Homo sapien
ggcctgtgctgacaatacaggtgca

SEQ ID NO: 3365863 - DNA, 25 bp, Homo sapien
ctgtaccgtttagggaggcctgtgc

SEQ ID NO: 3365864 - DNA, 25 bp, Homo sapien
tgagagctcggagaccctgctttcg

SEQ ID NO: 3365865 - DNA, 25 bp, Homo sapien
accctgctttcggagcataggtggg

SEQ ID NO: 3365866 - DNA, 25 bp, Homo sapien
ctagacagcctgtgagacccatgag

SEQ ID NO: 3365867 - DNA, 25 bp, Homo sapien
tactgtctggtcaaaacctagacag

SEQ ID NO: 3365868 - DNA, 25 bp, Homo sapien
cagccacactgcttcgtgaaacgga

SEQ ID NO: 3365869 - DNA, 25 bp, Homo sapien
gtgtgggccacgctcaggtgtccct

SEQ ID NO: 3365870 - DNA, 25 bp, Homo sapien
ccgctcagctacagaaacacatttg

SEQ ID NO: 3365871 - DNA, 25 bp, Homo sapien
cacactgcttcgtgaaacggacaca

SEQ ID NO: 3365872 - DNA, 25 bp, Homo sapien
tgattggacttgtctctctggcttg

SEQ ID NO: 3365873 - DNA, 25 bp, Homo sapien
tctgaaatcggcatcttggctcctc

SEQ ID NO: 3365874 - DNA, 25 bp, Homo sapien
ttcccaacagttcatgtttgataca

SEQ ID NO: 3365875 - DNA, 25 bp, Homo sapien
tccccatccgctgatttgcctttct

SEQ ID NO: 3365876 - DNA, 25 bp, Homo sapien
caggctgagtttcgtgatggcttct

SEQ ID NO: 3365877 - DNA, 25 bp, Homo sapien
aacagacaaatagcccttcggaagc

SEQ ID NO: 3365878 - DNA, 25 bp, Homo sapien
catttgctacctgggatggtgaaga

SEQ ID NO: 3365879 - DNA, 25 bp, Homo sapien
aaagcagtcccaaaccaggctgagt

SEQ ID NO: 3365880 - DNA, 25 bp, Homo sapien
gccgctctccctgtgtgatgcaggt

SEQ ID NO: 3365881 - DNA, 25 bp, Homo sapien
ggcatacaggcagtgagtacatctc

SEQ ID NO: 3365882 - DNA, 25 bp, Homo sapien
aggtgggcatacaggcagtgagtac

SEQ ID NO: 3365883 - DNA, 25 bp, Homo sapien
tggccgctctccctgtgtgatgcag

SEQ ID NO: 3365884 - DNA, 25 bp, Homo sapien
tgtgggactaatcagggatggagag

SEQ ID NO: 3365885 - DNA, 25 bp, Homo sapien
ggtggatgtgggactaatcagggat

SEQ ID NO: 3365886 - DNA, 25 bp, Homo sapien
gatgtgggactaatcagggatggag

SEQ ID NO: 3365887 - DNA, 25 bp, Homo sapien
gggaaggtggatgtgggactaatca

SEQ ID NO: 3365888 - DNA, 25 bp, Homo sapien
tatctggttagagtttcttaggtgg

SEQ ID NO: 3365889 - DNA, 25 bp, Homo sapien
gaatggagttagcagtcccagacca

SEQ ID NO: 3365890 - DNA, 25 bp, Homo sapien
aaatgcatcctgtggttgacacatg

SEQ ID NO: 3365891 - DNA, 25 bp, Homo sapien
ccagaccaggccaagttaggacaag

SEQ ID NO: 3365892 - DNA, 25 bp, Homo sapien
caacctgcaggctttaaacgatgaa

SEQ ID NO: 3365893 - DNA, 25 bp, Homo sapien
cagagggcacaagttcatggcagtg

SEQ ID NO: 3365894 - DNA, 25 bp, Homo sapien
tgaatttcttgcaaacgcttgagtg

SEQ ID NO: 3365895 - DNA, 25 bp, Homo sapien
ttgatcttggacctcgagcctggag

SEQ ID NO: 3365896 - DNA, 25 bp, Homo sapien
cttccaggacaccaccgtcactggt

SEQ ID NO: 3365897 - DNA, 25 bp, Homo sapien
ctggcccctctgtgaagagccccat

SEQ ID NO: 3365898 - DNA, 25 bp, Homo sapien
gcccctctgtgaagagccccataga

SEQ ID NO: 3365899 - DNA, 25 bp, Homo sapien
caccaccgtcactggtcacttgctg

SEQ ID NO: 3365900 - DNA, 25 bp, Homo sapien
aagctctgcagtggatcaattgctg

SEQ ID NO: 3365901 - DNA, 25 bp, Homo sapien
tacactccttacacagttatttggt

SEQ ID NO: 3365902 - DNA, 25 bp, Homo sapien
gaagtttattgattaagctggctaa

SEQ ID NO: 3365903 - DNA, 25 bp, Homo sapien
tctgcagtggatcaattgctgctgt

SEQ ID NO: 3365904 - DNA, 25 bp, Homo sapien
ccagattaccctcctggtcttccag

SEQ ID NO: 3365905 - DNA, 25 bp, Homo sapien
aaagagttgactagtgtcacttgca

SEQ ID NO: 3365906 - DNA, 25 bp, Homo sapien
tttgcttcccatcgcaagcacagcc

SEQ ID NO: 3365907 - DNA, 25 bp, Homo sapien
attcactgaaaagagttgactagtg

SEQ ID NO: 3365908 - DNA, 25 bp, Homo sapien
tttcccgtggcatgctcctaaaaca

SEQ ID NO: 3365909 - DNA, 25 bp, Homo sapien
tctttcccgtggcatgctcctaaaa

SEQ ID NO: 3365910 - DNA, 25 bp, Homo sapien
tcccgtggcatgctcctaaaacaac

SEQ ID NO: 3365911 - DNA, 25 bp, Homo sapien
gtctttcccgtggcatgctcctaaa

SEQ ID NO: 3365912 - DNA, 25 bp, Homo sapien
catttctgggtaagggaaaaagcat

SEQ ID NO: 3365913 - DNA, 25 bp, Homo sapien
aaagcattttggtccattaattcac

SEQ ID NO: 3365914 - DNA, 25 bp, Homo sapien
tcatttctgggtaagggaaaaagca

SEQ ID NO: 3365915 - DNA, 25 bp, Homo sapien
aaaagcattttggtccattaattca

SEQ ID NO: 3365916 - DNA, 25 bp, Homo sapien
cgtgagtggcatcaatgtcttgcat

SEQ ID NO: 3365917 - DNA, 25 bp, Homo sapien
aattctgctatcacaaagacgtgag

SEQ ID NO: 3365918 - DNA, 25 bp, Homo sapien
ggaggacgttaaccaattctgctat

SEQ ID NO: 3365919 - DNA, 25 bp, Homo sapien
ccgctcgctcctggaggacgttaac

SEQ ID NO: 3365920 - DNA, 25 bp, Homo sapien
cactttgggatggttttcctgtcga

SEQ ID NO: 3365921 - DNA, 25 bp, Homo sapien
tgttcactttgggatggttttcctg

SEQ ID NO: 3365922 - DNA, 25 bp, Homo sapien
tccatttttgttcactttgggatgg

SEQ ID NO: 3365923 - DNA, 25 bp, Homo sapien
cttcgcaggcttccatttttgttca

SEQ ID NO: 3365924 - DNA, 25 bp, Homo sapien
taattagcttctgaaatggacagga

SEQ ID NO: 3365925 - DNA, 25 bp, Homo sapien
cagaaacatccagttgtgtggccat

SEQ ID NO: 3365926 - DNA, 25 bp, Homo sapien
gatatttagatgttgcaagcccctc

SEQ ID NO: 3365927 - DNA, 25 bp, Homo sapien
tgtcaagtttagtccacttctttgg

SEQ ID NO: 3365928 - DNA, 25 bp, Homo sapien
gtctcaactccttccaggtgacata

SEQ ID NO: 3365929 - DNA, 25 bp, Homo sapien
gctagatctatacaactggatggag

SEQ ID NO: 3365930 - DNA, 25 bp, Homo sapien
gacaagggtatacattagttcagca

SEQ ID NO: 3365931 - DNA, 25 bp, Homo sapien
tagcatttatcattaaggccacttg

SEQ ID NO: 3365932 - DNA, 25 bp, Homo sapien
ctagtgacacagttaatgaggctgg

SEQ ID NO: 3365933 - DNA, 25 bp, Homo sapien
cagtttcattgatagggttctcctc

SEQ ID NO: 3365934 - DNA, 25 bp, Homo sapien
gactgatgaccagattacaggtgca

SEQ ID NO: 3365935 - DNA, 25 bp, Homo sapien
tatctagagttgtgtggaggctgct

SEQ ID NO: 3365936 - DNA, 25 bp, Homo sapien
gccaacgttagcaatccattaaggt

SEQ ID NO: 3365937 - DNA, 25 bp, Homo sapien
tagactccacgttggctccttgaaa

SEQ ID NO: 3365938 - DNA, 25 bp, Homo sapien
ggcaaatttccatcgtagactccac

SEQ ID NO: 3365939 - DNA, 25 bp, Homo sapien
cgttattctattgcctgtaacaggg

SEQ ID NO: 3365940 - DNA, 25 bp, Homo sapien
gatgcgagagtcagcagcatgtaat

SEQ ID NO: 3365941 - DNA, 25 bp, Homo sapien
taatgccagtaatctaaaagacttg

SEQ ID NO: 3365942 - DNA, 25 bp, Homo sapien
tttctcagctttagtaacaatgaca

SEQ ID NO: 3365943 - DNA, 25 bp, Homo sapien
aagacttgtctccacatttgtttcc

SEQ ID NO: 3365944 - DNA, 25 bp, Homo sapien
gaatgtagacaagtaggcatcatca

SEQ ID NO: 3365945 - DNA, 25 bp, Homo sapien
taaattaataagcacagctgagggt

SEQ ID NO: 3365946 - DNA, 25 bp, Homo sapien
taaacataccaaatagtcttctgcc

SEQ ID NO: 3365947 - DNA, 25 bp, Homo sapien
tggttattaagaggtggatctcacc

SEQ ID NO: 3365948 - DNA, 25 bp, Homo sapien
cggatagtctcccattcttaaccat

SEQ ID NO: 3365949 - DNA, 25 bp, Homo sapien
ggtttcggatagtctcccattctta

SEQ ID NO: 3365950 - DNA, 25 bp, Homo sapien
ccatattgggtttcggatagtctcc

SEQ ID NO: 3365951 - DNA, 25 bp, Homo sapien
catttagatggccatattgggtttc

SEQ ID NO: 3365952 - DNA, 25 bp, Homo sapien
tcatagtcaagcgtgtactgcaggt

SEQ ID NO: 3365953 - DNA, 25 bp, Homo sapien
gccagcagatgtacccagcaaaaga

SEQ ID NO: 3365954 - DNA, 25 bp, Homo sapien
caaaatgtcaagtgcaagcgtaacg

SEQ ID NO: 3365955 - DNA, 25 bp, Homo sapien
tcacgttagagaaacctgccagcag

SEQ ID NO: 3365956 - DNA, 25 bp, Homo sapien
ggcagctgagttcaacagttgctct

SEQ ID NO: 3365957 - DNA, 25 bp, Homo sapien
cagttgctctatacagaggaagtag

SEQ ID NO: 3365958 - DNA, 25 bp, Homo sapien
gagtcagtggccttttacatgtaga

SEQ ID NO: 3365959 - DNA, 25 bp, Homo sapien
ccagaggtttaagattaagtccaat

SEQ ID NO: 3365960 - DNA, 25 bp, Homo sapien
tgagagagggaaagaatcccagctg

SEQ ID NO: 3365961 - DNA, 25 bp, Homo sapien
tcagcattaacagcagccggggttg

SEQ ID NO: 3365962 - DNA, 25 bp, Homo sapien
ggtggtgctactgttctgagagcat

SEQ ID NO: 3365963 - DNA, 25 bp, Homo sapien
ctgttctgagagcatttgagctatt

SEQ ID NO: 3365964 - DNA, 25 bp, Homo sapien
tgtgtcatcagaccaacttcaggct

SEQ ID NO: 3365965 - DNA, 25 bp, Homo sapien
gacatgaggcagacaaacagtgacc

SEQ ID NO: 3365966 - DNA, 25 bp, Homo sapien
tcttaagaaatagttgagagccctc

SEQ ID NO: 3365967 - DNA, 25 bp, Homo sapien
gatttcttaaaagagcccgcaccta

SEQ ID NO: 3365968 - DNA, 25 bp, Homo sapien
ggcatgcatcaccacacccggttaa

SEQ ID NO: 3365969 - DNA, 25 bp, Homo sapien
gatccacgcacctcagcctcccaaa

SEQ ID NO: 3365970 - DNA, 25 bp, Homo sapien
atgcatcaccacacccggttaattt

SEQ ID NO: 3365971 - DNA, 25 bp, Homo sapien
gtgatccacgcacctcagcctccca

SEQ ID NO: 3365972 - DNA, 25 bp, Homo sapien
taatgcatgcatcgggctggaaact

SEQ ID NO: 3365973 - DNA, 25 bp, Homo sapien
ggtatgccacctgctgaacaatgta

SEQ ID NO: 3365974 - DNA, 25 bp, Homo sapien
tagctctgggcacgtagcaagcatc

SEQ ID NO: 3365975 - DNA, 25 bp, Homo sapien
gcatccgtcgggtcatctacaggaa

SEQ ID NO: 3365976 - DNA, 25 bp, Homo sapien
tgactgtattgaggtcatctgttcc

SEQ ID NO: 3365977 - DNA, 25 bp, Homo sapien
tcttgttatttgaggcaaacccaac

SEQ ID NO: 3365978 - DNA, 25 bp, Homo sapien
cccaacctggtgaaatgactgtatt

SEQ ID NO: 3365979 - DNA, 25 bp, Homo sapien
gaggcaaacccaacctggtgaaatg

SEQ ID NO: 3365980 - DNA, 25 bp, Homo sapien
taatagcttcctccaatgaataagg

SEQ ID NO: 3365981 - DNA, 25 bp, Homo sapien
tattaacccatactgattagtggcc

SEQ ID NO: 3365982 - DNA, 25 bp, Homo sapien
gagctgggcgactctacagttggaa

SEQ ID NO: 3365983 - DNA, 25 bp, Homo sapien
aaccaccctggctctacaagtacaa

SEQ ID NO: 3365984 - DNA, 25 bp, Homo sapien
tgttgacatcctagactgttttttt

SEQ ID NO: 3365985 - DNA, 25 bp, Homo sapien
ctccctctttttattgtcgtgctat

SEQ ID NO: 3365986 - DNA, 25 bp, Homo sapien
ttgacatcctagactgttttttttc

SEQ ID NO: 3365987 - DNA, 25 bp, Homo sapien
actgatgagtgtctgagccatgggc

SEQ ID NO: 3365988 - DNA, 25 bp, Homo sapien
gccatgggcgcttggtgctattcag

SEQ ID NO: 3365989 - DNA, 25 bp, Homo sapien
ttcagggaggcaaggtcctatgttc

SEQ ID NO: 3365990 - DNA, 25 bp, Homo sapien
cataaataatgtactacagggacag

SEQ ID NO: 3365991 - DNA, 25 bp, Homo sapien
gaaatgtctcacagttgccctgcca

SEQ ID NO: 3365992 - DNA, 25 bp, Homo sapien
caaatgccagctgagaactgttggt

SEQ ID NO: 3365993 - DNA, 25 bp, Homo sapien
ggtgattaaaccatagcctgcttct

SEQ ID NO: 3365994 - DNA, 25 bp, Homo sapien
tcagtggtgctctcacaacagagaa

SEQ ID NO: 3365995 - DNA, 25 bp, Homo sapien
agttctacatgtctaaacgtttttg

SEQ ID NO: 3365996 - DNA, 25 bp, Homo sapien
catgtctaaacgtttttgccctgat

SEQ ID NO: 3365997 - DNA, 25 bp, Homo sapien
tactcatgtgctttatttgtataaa

SEQ ID NO: 3365998 - DNA, 25 bp, Homo sapien
tggcctgatccacccagaagcctgt

SEQ ID NO: 3365999 - DNA, 25 bp, Homo sapien
agctgggctgtcctcggtccctggg

SEQ ID NO: 3366000 - DNA, 25 bp, Homo sapien
gatcttgcccctggggtagccctgc

SEQ ID NO: 3366001 - DNA, 25 bp, Homo sapien
cagggctgtgcatgggcttagctct

SEQ ID NO: 3366002 - DNA, 25 bp, Homo sapien
cctgggcctatctctttgctgtcct

SEQ ID NO: 3366003 - DNA, 25 bp, Homo sapien
ccatatgatgtgttgcatttgagct

SEQ ID NO: 3366004 - DNA, 25 bp, Homo sapien
tgagctttatctatgcttctggtaa

SEQ ID NO: 3366005 - DNA, 25 bp, Homo sapien
taattgttaaagtataatgcttctc

SEQ ID NO: 3366006 - DNA, 25 bp, Homo sapien
gaatgtgactgtaccaagaggcttt

SEQ ID NO: 3366007 - DNA, 25 bp, Homo sapien
gcagccgaaggcttaatgaagcaca

SEQ ID NO: 3366008 - DNA, 25 bp, Homo sapien
tcagcgagaagtaagtacagggact

SEQ ID NO: 3366009 - DNA, 25 bp, Homo sapien
gacccagtgaggcagaagtcgctga

SEQ ID NO: 3366010 - DNA, 25 bp, Homo sapien
gaagaggattctccatgcagccgaa

SEQ ID NO: 3366011 - DNA, 25 bp, Homo sapien
cccggcctagaatcctgtttttgct

SEQ ID NO: 3366012 - DNA, 25 bp, Homo sapien
gcagctatattagtctctgagggat

SEQ ID NO: 3366013 - DNA, 25 bp, Homo sapien
tgagggatgctgaattgaatagaac

SEQ ID NO: 3366014 - DNA, 25 bp, Homo sapien
gactccttgcggctaatccttgcag

SEQ ID NO: 3366015 - DNA, 25 bp, Homo sapien
ctttctttccttggattctgagccg

SEQ ID NO: 3366016 - DNA, 25 bp, Homo sapien
aatgcagaggcttcgcttcctttct

SEQ ID NO: 3366017 - DNA, 25 bp, Homo sapien
caaggcatgcagatactcggaaagg

SEQ ID NO: 3366018 - DNA, 25 bp, Homo sapien
tcagctgtcctagaactcaatgcag

SEQ ID NO: 3366019 - DNA, 25 bp, Homo sapien
tcagcgtgcagacatatgccctggg

SEQ ID NO: 3366020 - DNA, 25 bp, Homo sapien
gaagcaggtaaacccgagagcgtcc

SEQ ID NO: 3366021 - DNA, 25 bp, Homo sapien
taattggaacggcagtcaacagcct

SEQ ID NO: 3366022 - DNA, 25 bp, Homo sapien
cgttttcagggtaagcagctaggga

SEQ ID NO: 3366023 - DNA, 25 bp, Homo sapien
tgcagacagctcattgggttccact

SEQ ID NO: 3366024 - DNA, 25 bp, Homo sapien
cactggcttttcgtagccatagcaa

SEQ ID NO: 3366025 - DNA, 25 bp, Homo sapien
gccatagcaacaaccaacagacaga

SEQ ID NO: 3366026 - DNA, 25 bp, Homo sapien
cataagtaaaatggctggtcctctc

SEQ ID NO: 3366027 - DNA, 25 bp, Homo sapien
tgggacccaccaaaggatctggtcc

SEQ ID NO: 3366028 - DNA, 25 bp, Homo sapien
catcactgcttgaagcaataggttc

SEQ ID NO: 3366029 - DNA, 25 bp, Homo sapien
acagctgggacccaccaaaggatct

SEQ ID NO: 3366030 - DNA, 25 bp, Homo sapien
tcatcactgcttgaagcaataggtt

SEQ ID NO: 3366031 - DNA, 25 bp, Homo sapien
gatcacttttgttgcagtttctgta

SEQ ID NO: 3366032 - DNA, 25 bp, Homo sapien
ctaggataaatcattttgatcactt

SEQ ID NO: 3366033 - DNA, 25 bp, Homo sapien
tcattttgatcacttttgttgcagt

SEQ ID NO: 3366034 - DNA, 25 bp, Homo sapien
ggataaatcattttgatcacttttg

SEQ ID NO: 3366035 - DNA, 25 bp, Homo sapien
tcagaatactggtattatatttttt

SEQ ID NO: 3366036 - DNA, 25 bp, Homo sapien
cagaatactggtattatattttttg

SEQ ID NO: 3366037 - DNA, 25 bp, Homo sapien
agaatactggtattatattttttgt

SEQ ID NO: 3366038 - DNA, 25 bp, Homo sapien
aatactggtattatattttttgttg

SEQ ID NO: 3366039 - DNA, 25 bp, Homo sapien
agctgggtgagtggacaccttagtt

SEQ ID NO: 3366040 - DNA, 25 bp, Homo sapien
ttgtgagccctcagcaatgcacact

SEQ ID NO: 3366041 - DNA, 25 bp, Homo sapien
ctcagcaatgcacactctgggagct

SEQ ID NO: 3366042 - DNA, 25 bp, Homo sapien
gagctgggtgagtggacaccttagt

SEQ ID NO: 3366043 - DNA, 25 bp, Homo sapien
ttggaactgcgctttttttgaaatg

SEQ ID NO: 3366044 - DNA, 25 bp, Homo sapien
ttcctcttcaattgcgaagattgct

SEQ ID NO: 3366045 - DNA, 25 bp, Homo sapien
tattttggaactgcgctttttttga

SEQ ID NO: 3366046 - DNA, 25 bp, Homo sapien
ttgcgaagattgctccaagtttttt

SEQ ID NO: 3366047 - DNA, 25 bp, Homo sapien
ggcgtcagaaccctggaaattctcc

SEQ ID NO: 3366048 - DNA, 25 bp, Homo sapien
ctcctcaactcacggatgcgctggt

SEQ ID NO: 3366049 - DNA, 25 bp, Homo sapien
tcacggatgcgctggttgccccaag

SEQ ID NO: 3366050 - DNA, 25 bp, Homo sapien
gtcagaaccctggaaattctccacc

SEQ ID NO: 3366051 - DNA, 25 bp, Homo sapien
catccacgtattctgcagtcagagt

SEQ ID NO: 3366052 - DNA, 25 bp, Homo sapien
agtcagagttcccaagaacaagccg

SEQ ID NO: 3366053 - DNA, 25 bp, Homo sapien
acaagccggagcacactgagcgctc

SEQ ID NO: 3366054 - DNA, 25 bp, Homo sapien
tcggtccagtaggagggctgcaagg

SEQ ID NO: 3366055 - DNA, 25 bp, Homo sapien
gatatcgtcagcctctcagcatgag

SEQ ID NO: 3366056 - DNA, 25 bp, Homo sapien
taggatatcgtcagcctctcagcat

SEQ ID NO: 3366057 - DNA, 25 bp, Homo sapien
tatcgtcagcctctcagcatgagtc

SEQ ID NO: 3366058 - DNA, 25 bp, Homo sapien
gatgtaggatatcgtcagcctctca

SEQ ID NO: 3366059 - DNA, 25 bp, Homo sapien
gagtgatagcgagattccacggtca

SEQ ID NO: 3366060 - DNA, 25 bp, Homo sapien
tccacggtcatttgtggatgaacag

SEQ ID NO: 3366061 - DNA, 25 bp, Homo sapien
agaggtcaccagtagcaaagagtga

SEQ ID NO: 3366062 - DNA, 25 bp, Homo sapien
gtgtaaatacagctctacagcctgg

SEQ ID NO: 3366063 - DNA, 25 bp, Homo sapien
caggatgagtaagcgacatatggca

SEQ ID NO: 3366064 - DNA, 25 bp, Homo sapien
aagtccaagccagatctcgcaggat

SEQ ID NO: 3366065 - DNA, 25 bp, Homo sapien
gtatcatccagacatacatcctcct

SEQ ID NO: 3366066 - DNA, 25 bp, Homo sapien
agaatccatcctcgcaggatctggg

SEQ ID NO: 3366067 - DNA, 25 bp, Homo sapien
gaagactgagagacgacagacagga

SEQ ID NO: 3366068 - DNA, 25 bp, Homo sapien
ggcttcaccccttgttgcagaataa

SEQ ID NO: 3366069 - DNA, 25 bp, Homo sapien
tgcttctgcctaaaccctgtcctgt

SEQ ID NO: 3366070 - DNA, 25 bp, Homo sapien
gcaggcctgggactttgcctataaa

SEQ ID NO: 3366071 - DNA, 25 bp, Homo sapien
cttgttatgaaacgaagctctttca

SEQ ID NO: 3366072 - DNA, 25 bp, Homo sapien
tggtctctggcttgttatgaaacga

SEQ ID NO: 3366073 - DNA, 25 bp, Homo sapien
caggcctgtgcagatactgatttag

SEQ ID NO: 3366074 - DNA, 25 bp, Homo sapien
tgactgctattgcataagccttcaa

SEQ ID NO: 3366075 - DNA, 25 bp, Homo sapien
tgagacctatattctcatcctgccc

SEQ ID NO: 3366076 - DNA, 25 bp, Homo sapien
tggagcagaggcgaacctggtttga

SEQ ID NO: 3366077 - DNA, 25 bp, Homo sapien
agatgcctatgagacctatattctc

SEQ ID NO: 3366078 - DNA, 25 bp, Homo sapien
gagcagaggcgaacctggtttgaag

SEQ ID NO: 3366079 - DNA, 25 bp, Homo sapien
gagaacgtatctaaacaatccccac

SEQ ID NO: 3366080 - DNA, 25 bp, Homo sapien
tattgtgtactagaacctaagactg

SEQ ID NO: 3366081 - DNA, 25 bp, Homo sapien
caattatcagccattatcctagagg

SEQ ID NO: 3366082 - DNA, 25 bp, Homo sapien
tacaagaacacaggttaggagaatg

SEQ ID NO: 3366083 - DNA, 25 bp, Homo sapien
tggcccccagggaacttgcagaaca

SEQ ID NO: 3366084 - DNA, 25 bp, Homo sapien
ttgactgattttccaacaaattggt

SEQ ID NO: 3366085 - DNA, 25 bp, Homo sapien
gcccccagggaacttgcagaacatc

SEQ ID NO: 3366086 - DNA, 25 bp, Homo sapien
caaaattagattttgactgattttc

SEQ ID NO: 3366087 - DNA, 25 bp, Homo sapien
gggaatgaataagccaaggaggtga

SEQ ID NO: 3366088 - DNA, 25 bp, Homo sapien
ctgctgcagcagatgcagcggtcat

SEQ ID NO: 3366089 - DNA, 25 bp, Homo sapien
ccagtgggaatgaataagccaagga

SEQ ID NO: 3366090 - DNA, 25 bp, Homo sapien
gcagcggcgtgagcatccgttctgc

SEQ ID NO: 3366091 - DNA, 25 bp, Homo sapien
tcttctcaagagatactaaaagctg

SEQ ID NO: 3366092 - DNA, 25 bp, Homo sapien
tctacaggtgcggtcttactaagtt

SEQ ID NO: 3366093 - DNA, 25 bp, Homo sapien
agtagtctgtcttactccagtggag

SEQ ID NO: 3366094 - DNA, 25 bp, Homo sapien
agaaagaaacagtgccagcctacca

SEQ ID NO: 3366095 - DNA, 25 bp, Homo sapien
taactggagaccgtcaaggtacaat

SEQ ID NO: 3366096 - DNA, 25 bp, Homo sapien
tgcatttgcggcaagtccagtcata

SEQ ID NO: 3366097 - DNA, 25 bp, Homo sapien
caatttaccgtagcacaaggtgtct

SEQ ID NO: 3366098 - DNA, 25 bp, Homo sapien
tgtctctgtcccaaggtttgtgtac

SEQ ID NO: 3366099 - DNA, 25 bp, Homo sapien
gatgtgtattactccactagaatgg

SEQ ID NO: 3366100 - DNA, 25 bp, Homo sapien
caatgagcattcgtttgcacgtgat

SEQ ID NO: 3366101 - DNA, 25 bp, Homo sapien
taaatgaccattcctttgcgatgtg

SEQ ID NO: 3366102 - DNA, 25 bp, Homo sapien
tgcacgtgatgattactctggaagt

SEQ ID NO: 3366103 - DNA, 25 bp, Homo sapien
ggaaaatcgctgtcttgtcggctgc

SEQ ID NO: 3366104 - DNA, 25 bp, Homo sapien
ggcatgtacgtggtgttcatccaca

SEQ ID NO: 3366105 - DNA, 25 bp, Homo sapien
tgtcggctgctgtgcagaatgagtt

SEQ ID NO: 3366106 - DNA, 25 bp, Homo sapien
ctagggagcatttacggcatgtacg

SEQ ID NO: 3366107 - DNA, 25 bp, Homo sapien
tgccgtccatcctcacataaatgga

SEQ ID NO: 3366108 - DNA, 25 bp, Homo sapien
ttaatccaattgccgtccatcctca

SEQ ID NO: 3366109 - DNA, 25 bp, Homo sapien
ttcttatggccttagctgctgcctg

SEQ ID NO: 3366110 - DNA, 25 bp, Homo sapien
tcctcatccttttgtggaattccac

SEQ ID NO: 3366111 - DNA, 25 bp, Homo sapien
cccagagcctaagcaaatgaagtta

SEQ ID NO: 3366112 - DNA, 25 bp, Homo sapien
ccactgtgtacactctgggattctg

SEQ ID NO: 3366113 - DNA, 25 bp, Homo sapien
aagataaacagttcgagagtcagcg

SEQ ID NO: 3366114 - DNA, 25 bp, Homo sapien
gagtcagcgagttctgggttccagt

SEQ ID NO: 3366115 - DNA, 25 bp, Homo sapien
tgaagccaatctggtaactagccgt

SEQ ID NO: 3366116 - DNA, 25 bp, Homo sapien
caaagggcggatctctgatggtccc

SEQ ID NO: 3366117 - DNA, 25 bp, Homo sapien
tcttctgcatgatgggaaccgggtc

SEQ ID NO: 3366118 - DNA, 25 bp, Homo sapien
ctctcaggttatcacagggcacagt

SEQ ID NO: 3366119 - DNA, 25 bp, Homo sapien
tgtgaagatgacaccggaacatgca

SEQ ID NO: 3366120 - DNA, 25 bp, Homo sapien
taatgactgaaggttgaagggctcg

SEQ ID NO: 3366121 - DNA, 25 bp, Homo sapien
cactatcagaaggacgatggagctt

SEQ ID NO: 3366122 - DNA, 25 bp, Homo sapien
gaagggctcgttttacgcacagatg

SEQ ID NO: 3366123 - DNA, 25 bp, Homo sapien
cacctccagacttgcattctctggg

SEQ ID NO: 3366124 - DNA, 25 bp, Homo sapien
tcctggaaacgaggtcacctccaga

SEQ ID NO: 3366125 - DNA, 25 bp, Homo sapien
ggccactcgcgtggggaagaaaaca

SEQ ID NO: 3366126 - DNA, 25 bp, Homo sapien
cagagcctgtgctggccactcgcgt

SEQ ID NO: 3366127 - DNA, 25 bp, Homo sapien
gaaatcatgccagtgcttctctata

SEQ ID NO: 3366128 - DNA, 25 bp, Homo sapien
gagcccacaaactatcccgacaata

SEQ ID NO: 3366129 - DNA, 25 bp, Homo sapien
tctccataggcgagcccacaaacta

SEQ ID NO: 3366130 - DNA, 25 bp, Homo sapien
tatattttatgtcgaaatcatgcca

SEQ ID NO: 3366131 - DNA, 25 bp, Homo sapien
caatgcagtctgtcgcttgcagcat

SEQ ID NO: 3366132 - DNA, 25 bp, Homo sapien
gcaatgcagtctgtcgcttgcagca

SEQ ID NO: 3366133 - DNA, 25 bp, Homo sapien
ctaaatttcgcagttgggaaccctg

SEQ ID NO: 3366134 - DNA, 25 bp, Homo sapien
actgttttctgcaatcgcttgccgt

SEQ ID NO: 3366135 - DNA, 25 bp, Homo sapien
ctgttttctgcaatcgcttgccgta

SEQ ID NO: 3366136 - DNA, 25 bp, Homo sapien
gaactgtgtgactcagtctcggtcc

SEQ ID NO: 3366137 - DNA, 25 bp, Homo sapien
acagaatggccagtgcgggaactgt

SEQ ID NO: 3366138 - DNA, 25 bp, Homo sapien
tgggctaagggagccacagaatggc

SEQ ID NO: 3366139 - DNA, 25 bp, Homo sapien
tctcggtcccatctcctcgtctctg

SEQ ID NO: 3366140 - DNA, 25 bp, Homo sapien
gagtgcctgagacaaccgctaggga

SEQ ID NO: 3366141 - DNA, 25 bp, Homo sapien
acaaccgctagggaggagacttcct

SEQ ID NO: 3366142 - DNA, 25 bp, Homo sapien
taaggaaggcttcacgtaggccatg

SEQ ID NO: 3366143 - DNA, 25 bp, Homo sapien
ggacgtcctgcgctgtcacttttaa

SEQ ID NO: 3366144 - DNA, 25 bp, Homo sapien
tgagacgtcccaaggcttccaggaa

SEQ ID NO: 3366145 - DNA, 25 bp, Homo sapien
gcaggtgtgcagaaccgaacatgga

SEQ ID NO: 3366146 - DNA, 25 bp, Homo sapien
ttccaggaatagctgcaaagagcac

SEQ ID NO: 3366147 - DNA, 25 bp, Homo sapien
gacttgccgggattcagctccctgg

SEQ ID NO: 3366148 - DNA, 25 bp, Homo sapien
tgttggaggtgctcagcttactgag

SEQ ID NO: 3366149 - DNA, 25 bp, Homo sapien
gttggaggtgctcagcttactgagc

SEQ ID NO: 3366150 - DNA, 25 bp, Homo sapien
ttggaggtgctcagcttactgagct

SEQ ID NO: 3366151 - DNA, 25 bp, Homo sapien
tgtttgggctgcaccgttcctgtct

SEQ ID NO: 3366152 - DNA, 25 bp, Homo sapien
tcccgtgggcgtctgactgtagtga

SEQ ID NO: 3366153 - DNA, 25 bp, Homo sapien
tgtagtcgaccgtccaggtgaggcc

SEQ ID NO: 3366154 - DNA, 25 bp, Homo sapien
gctttggcagcggtgaagcctctcc

SEQ ID NO: 3366155 - DNA, 25 bp, Homo sapien
tatgatacagccactgcagagagct

SEQ ID NO: 3366156 - DNA, 25 bp, Homo sapien
attggctatgatacagccactgcag

SEQ ID NO: 3366157 - DNA, 25 bp, Homo sapien
ctatgatacagccactgcagagagc

SEQ ID NO: 3366158 - DNA, 25 bp, Homo sapien
ggctatgatacagccactgcagaga

SEQ ID NO: 3366159 - DNA, 25 bp, Homo sapien
tgtgagccaccgcacccagcctata

SEQ ID NO: 3366160 - DNA, 25 bp, Homo sapien
tacaggcgcctgccaggaccggcta

SEQ ID NO: 3366161 - DNA, 25 bp, Homo sapien
tcctgattccaggtgatccactcgc

SEQ ID NO: 3366162 - DNA, 25 bp, Homo sapien
ggtgtgagccaccgcacccagccta

SEQ ID NO: 3366163 - DNA, 25 bp, Homo sapien
ccttgggtctctcttggccaaactc

SEQ ID NO: 3366164 - DNA, 25 bp, Homo sapien
tcttggccaaactcttcgagacctc

SEQ ID NO: 3366165 - DNA, 25 bp, Homo sapien
gtgctggaccttgggtctctcttgg

SEQ ID NO: 3366166 - DNA, 25 bp, Homo sapien
cttggccaaactcttcgagacctcg

SEQ ID NO: 3366167 - DNA, 25 bp, Homo sapien
tacgctgcctgacatcggcgaggag

SEQ ID NO: 3366168 - DNA, 25 bp, Homo sapien
tggtccgggcgcgtgtaccttttgc

SEQ ID NO: 3366169 - DNA, 25 bp, Homo sapien
ccttcgcaggtgcacttcaggaaat

SEQ ID NO: 3366170 - DNA, 25 bp, Homo sapien
tactccttggctttgcgggctttca

SEQ ID NO: 3366171 - DNA, 25 bp, Homo sapien
tcaggccctcagcttgttgttttgt

SEQ ID NO: 3366172 - DNA, 25 bp, Homo sapien
caggccctcagcttgttgttttgtg

SEQ ID NO: 3366173 - DNA, 25 bp, Homo sapien
cttgttgttttgtgatatgtgccag

SEQ ID NO: 3366174 - DNA, 25 bp, Homo sapien
ttgttttgtgatatgtgccagccac

SEQ ID NO: 3366175 - DNA, 25 bp, Homo sapien
cagtaatgacgctgcctctcgggag

SEQ ID NO: 3366176 - DNA, 25 bp, Homo sapien
tcccctgcggaggtctcttgatgat

SEQ ID NO: 3366177 - DNA, 25 bp, Homo sapien
tctcgggagctgatcagagcacgct

SEQ ID NO: 3366178 - DNA, 25 bp, Homo sapien
tatctttctcgttggatgaacacag

SEQ ID NO: 3366179 - DNA, 25 bp, Homo sapien
gatagtccgtccgtcagccagccag

SEQ ID NO: 3366180 - DNA, 25 bp, Homo sapien
gaggaagatagtccgtccgtcagcc

SEQ ID NO: 3366181 - DNA, 25 bp, Homo sapien
ggaagatagtccgtccgtcagccag

SEQ ID NO: 3366182 - DNA, 25 bp, Homo sapien
ctgaggaagatagtccgtccgtcag

SEQ ID NO: 3366183 - DNA, 25 bp, Homo sapien
tttgctccacactgaccaatatggc

SEQ ID NO: 3366184 - DNA, 25 bp, Homo sapien
ccaatatggccaatattggtcaagg

SEQ ID NO: 3366185 - DNA, 25 bp, Homo sapien
tggccaatattggtcaaggattgac

SEQ ID NO: 3366186 - DNA, 25 bp, Homo sapien
caaggattgaccaaaggagagagca

SEQ ID NO: 3366187 - DNA, 25 bp, Homo sapien
tgaaataggaagaaagctgcatgtg

SEQ ID NO: 3366188 - DNA, 25 bp, Homo sapien
gaaagacagcgagaacacagtcatc

SEQ ID NO: 3366189 - DNA, 25 bp, Homo sapien
catcctgagagtgtctggcagcctg

SEQ ID NO: 3366190 - DNA, 25 bp, Homo sapien
gactctgtactaggtgccgcagcaa

SEQ ID NO: 3366191 - DNA, 25 bp, Homo sapien
ctcccaaatgtcttcgttagtcaga

SEQ ID NO: 3366192 - DNA, 25 bp, Homo sapien
aatgtcttcgttagtcagacctagg

SEQ ID NO: 3366193 - DNA, 25 bp, Homo sapien
caaatgtcttcgttagtcagaccta

SEQ ID NO: 3366194 - DNA, 25 bp, Homo sapien
cccaaatgtcttcgttagtcagacc

SEQ ID NO: 3366195 - DNA, 25 bp, Homo sapien
tgcaggaatctggattctggtccct

SEQ ID NO: 3366196 - DNA, 25 bp, Homo sapien
cagcctcgtgtgctgcaggtttgca

SEQ ID NO: 3366197 - DNA, 25 bp, Homo sapien
aagctgttgagggaaagcctagcag

SEQ ID NO: 3366198 - DNA, 25 bp, Homo sapien
agcagcaggcctgcccttctgagac

SEQ ID NO: 3366199 - DNA, 25 bp, Homo sapien
cattagttcctctactccttcaaac

SEQ ID NO: 3366200 - DNA, 25 bp, Homo sapien
ttagttcctctactccttcaaacat

SEQ ID NO: 3366201 - DNA, 25 bp, Homo sapien
tttcattagttcctctactccttca

SEQ ID NO: 3366202 - DNA, 25 bp, Homo sapien
aggctttcattagttcctctactcc

SEQ ID NO: 3366203 - DNA, 25 bp, Homo sapien
tcctggtataatcctgggcctccaa

SEQ ID NO: 3366204 - DNA, 25 bp, Homo sapien
tgctctgctcctggtataatcctgg

SEQ ID NO: 3366205 - DNA, 25 bp, Homo sapien
ctggtataatcctgggcctccaaaa

SEQ ID NO: 3366206 - DNA, 25 bp, Homo sapien
ctgctcctggtataatcctgggcct

SEQ ID NO: 3366207 - DNA, 25 bp, Homo sapien
gcgatgtgcgcggtgttctccgccc

SEQ ID NO: 3366208 - DNA, 25 bp, Homo sapien
ttcgtcactgcggtcgctcctggga

SEQ ID NO: 3366209 - DNA, 25 bp, Homo sapien
gctgatcgtaatcgggtgagtctca

SEQ ID NO: 3366210 - DNA, 25 bp, Homo sapien
tgttccgtgctgaggagcggcttcc

SEQ ID NO: 3366211 - DNA, 25 bp, Homo sapien
ctcagagttacctggttgtccgtaa

SEQ ID NO: 3366212 - DNA, 25 bp, Homo sapien
ttgtcagcataaagcgtgtccttta

SEQ ID NO: 3366213 - DNA, 25 bp, Homo sapien
ctaaaggtaaagcagtttgtcagca

SEQ ID NO: 3366214 - DNA, 25 bp, Homo sapien
gagttacctggttgtccgtaagata

SEQ ID NO: 3366215 - DNA, 25 bp, Homo sapien
caaaatgcccgtaacaaatgtggga

SEQ ID NO: 3366216 - DNA, 25 bp, Homo sapien
ttatttccagaagaggactgtcaga

SEQ ID NO: 3366217 - DNA, 25 bp, Homo sapien
tcagaaggacgtagaaggcacggtt

SEQ ID NO: 3366218 - DNA, 25 bp, Homo sapien
agtgaagccacttagccatccaagc

SEQ ID NO: 3366219 - DNA, 25 bp, Homo sapien
taaacccgcgatctttgtgagactg

SEQ ID NO: 3366220 - DNA, 25 bp, Homo sapien
ggatcataagtcctctgggagtcag

SEQ ID NO: 3366221 - DNA, 25 bp, Homo sapien
gtagggtaagatatgaaccaagccc

SEQ ID NO: 3366222 - DNA, 25 bp, Homo sapien
tggcgtgggagcttctaaacccgcg

SEQ ID NO: 3366223 - DNA, 25 bp, Homo sapien
catggagctcatcataagcaggatc

SEQ ID NO: 3366224 - DNA, 25 bp, Homo sapien
tgtgcaagagacatccccatgcaaa

SEQ ID NO: 3366225 - DNA, 25 bp, Homo sapien
agccttgatagcacctgatctcagg

SEQ ID NO: 3366226 - DNA, 25 bp, Homo sapien
gatctcaggccggatgttggctccg

SEQ ID NO: 3366227 - DNA, 25 bp, Homo sapien
tataagtcttgatatttcttggtat

SEQ ID NO: 3366228 - DNA, 25 bp, Homo sapien
catatgatctgttttattgctgttt

SEQ ID NO: 3366229 - DNA, 25 bp, Homo sapien
cttggtataagttatctaacttgtt

SEQ ID NO: 3366230 - DNA, 25 bp, Homo sapien
ccatttgtgtgccaattacatgatt

SEQ ID NO: 3366231 - DNA, 25 bp, Homo sapien
gagaaaggccctatctggtaacaaa

SEQ ID NO: 3366232 - DNA, 25 bp, Homo sapien
catgaagctgacaacccgcagagtt

SEQ ID NO: 3366233 - DNA, 25 bp, Homo sapien
tgttaaatttgcctgacgctgaggt

SEQ ID NO: 3366234 - DNA, 25 bp, Homo sapien
gataaagcgtctaagcctggcagtg

SEQ ID NO: 3366235 - DNA, 25 bp, Homo sapien
gaaactaaagcccatgagacttgct

SEQ ID NO: 3366236 - DNA, 25 bp, Homo sapien
ctttgtaagaagcatcgagcgtgga

SEQ ID NO: 3366237 - DNA, 25 bp, Homo sapien
tatttcacgtcagcccatgcagatg

SEQ ID NO: 3366238 - DNA, 25 bp, Homo sapien
tagtggagccgtagagaaagaaacc

SEQ ID NO: 3366239 - DNA, 25 bp, Homo sapien
ttttctctgcactaaagaggccctg

SEQ ID NO: 3366240 - DNA, 25 bp, Homo sapien
gctacgcgcggaaatggcagcagat

SEQ ID NO: 3366241 - DNA, 25 bp, Homo sapien
taagagactagagattcactggacg

SEQ ID NO: 3366242 - DNA, 25 bp, Homo sapien
cagttctagtcgttgccccttggca

SEQ ID NO: 3366243 - DNA, 25 bp, Homo sapien
gcacaggatgcggtatttccaaacc

SEQ ID NO: 3366244 - DNA, 25 bp, Homo sapien
tccctgtcagggagggcgaactcga

SEQ ID NO: 3366245 - DNA, 25 bp, Homo sapien
tacaggctgagcattaactaactcc

SEQ ID NO: 3366246 - DNA, 25 bp, Homo sapien
catcagggattacgttgaggtaccc

SEQ ID NO: 3366247 - DNA, 25 bp, Homo sapien
caacttcacaagatgaggcctcatg

SEQ ID NO: 3366248 - DNA, 25 bp, Homo sapien
ttcaccttgaagattgcagttggct

SEQ ID NO: 3366249 - DNA, 25 bp, Homo sapien
ggctaatgtccaaacgctggcctca

SEQ ID NO: 3366250 - DNA, 25 bp, Homo sapien
caatcaagcatttagtaaggccctg

SEQ ID NO: 3366251 - DNA, 25 bp, Homo sapien
tctttcacatacaagaggtgttgcg

SEQ ID NO: 3366252 - DNA, 25 bp, Homo sapien
cctagtgttaatagaagttggtgtg

SEQ ID NO: 3366253 - DNA, 25 bp, Homo sapien
ggcagacaggatttctgccgctgtt

SEQ ID NO: 3366254 - DNA, 25 bp, Homo sapien
gcttctccagaatcctggctcagag

SEQ ID NO: 3366255 - DNA, 25 bp, Homo sapien
tcttgcttctccagaatcctggctc

SEQ ID NO: 3366256 - DNA, 25 bp, Homo sapien
tgttcaggaagactcaggaggtcct

SEQ ID NO: 3366257 - DNA, 25 bp, Homo sapien
gtggtattcaatagcgactgtcgcc

SEQ ID NO: 3366258 - DNA, 25 bp, Homo sapien
tagcaggactgttctctcagaaagg

SEQ ID NO: 3366259 - DNA, 25 bp, Homo sapien
catggcttggcctaggacttcttac

SEQ ID NO: 3366260 - DNA, 25 bp, Homo sapien
cttagatatcatgaatgaacaagca

SEQ ID NO: 3366261 - DNA, 25 bp, Homo sapien
aaaacacattaaccaagaagcattt

SEQ ID NO: 3366262 - DNA, 25 bp, Homo sapien
agatatcatgaatgaacaagcaaat

SEQ ID NO: 3366263 - DNA, 25 bp, Homo sapien
aaacacattaaccaagaagcattta

SEQ ID NO: 3366264 - DNA, 25 bp, Homo sapien
taaaaatcacgtgtcatatggcccc

SEQ ID NO: 3366265 - DNA, 25 bp, Homo sapien
gatgagcaacggcacagaagtggaa

SEQ ID NO: 3366266 - DNA, 25 bp, Homo sapien
tggtcttccaaaagctcacaagttc

SEQ ID NO: 3366267 - DNA, 25 bp, Homo sapien
tgagttagccaagcaacaagtggta

SEQ ID NO: 3366268 - DNA, 25 bp, Homo sapien
taatcatgccttttggagctagaag

SEQ ID NO: 3366269 - DNA, 25 bp, Homo sapien
cagtgcctcacagagttaatcatgc

SEQ ID NO: 3366270 - DNA, 25 bp, Homo sapien
gctagaaggactttagaacttatct

SEQ ID NO: 3366271 - DNA, 25 bp, Homo sapien
taaaggtattcatggtgactcagga

SEQ ID NO: 3366272 - DNA, 25 bp, Homo sapien
aagatgatcaaggtttgtgtgccca

SEQ ID NO: 3366273 - DNA, 25 bp, Homo sapien
tcctctgcctgaaagacgtgtctca

SEQ ID NO: 3366274 - DNA, 25 bp, Homo sapien
cctcacagggttggtcaatggcttt

SEQ ID NO: 3366275 - DNA, 25 bp, Homo sapien
acccaggccctaagttgatgaagaa

SEQ ID NO: 3366276 - DNA, 25 bp, Homo sapien
acttcaggtcatctagatgtatacg

SEQ ID NO: 3366277 - DNA, 25 bp, Homo sapien
atgtatacgtgcaggcctgggccca

SEQ ID NO: 3366278 - DNA, 25 bp, Homo sapien
tctctggcgggcagcggtggggggt

SEQ ID NO: 3366279 - DNA, 25 bp, Homo sapien
tggcgggcagcggtggggggtcaca

SEQ ID NO: 3366280 - DNA, 25 bp, Homo sapien
tccaggaggcttctaaggtgatcgg

SEQ ID NO: 3366281 - DNA, 25 bp, Homo sapien
tggtccaggaggcttctaaggtgat

SEQ ID NO: 3366282 - DNA, 25 bp, Homo sapien
gaggcttctaaggtgatcgggcagc

SEQ ID NO: 3366283 - DNA, 25 bp, Homo sapien
caggaggcttctaaggtgatcgggc

SEQ ID NO: 3366284 - DNA, 25 bp, Homo sapien
tctgaaagtggcacaccaagttcct

SEQ ID NO: 3366285 - DNA, 25 bp, Homo sapien
ggatatagccttttaacctgcaaaa

SEQ ID NO: 3366286 - DNA, 25 bp, Homo sapien
caacagtgatgaaacaatcctcaag

SEQ ID NO: 3366287 - DNA, 25 bp, Homo sapien
gtttataattgacacagaaccctgc

SEQ ID NO: 3366288 - DNA, 25 bp, Homo sapien
caaagatgattcgctgtcagttttt

SEQ ID NO: 3366289 - DNA, 25 bp, Homo sapien
cacaaagatgattcgctgtcagttt

SEQ ID NO: 3366290 - DNA, 25 bp, Homo sapien
ttgcacaaagatgattcgctgtcag

SEQ ID NO: 3366291 - DNA, 25 bp, Homo sapien
tgcacaaagatgattcgctgtcagt

SEQ ID NO: 3366292 - DNA, 25 bp, Homo sapien
tgtcacttcctagctctccattcgg

SEQ ID NO: 3366293 - DNA, 25 bp, Homo sapien
ttccttcagggatgtgacgtgctgt

SEQ ID NO: 3366294 - DNA, 25 bp, Homo sapien
cgttgacagtcatgcagctgctaga

SEQ ID NO: 3366295 - DNA, 25 bp, Homo sapien
gacgtgctgtgctttcgttgacagt

SEQ ID NO: 3366296 - DNA, 25 bp, Homo sapien
gccaggctcttaggagctgtctgta

SEQ ID NO: 3366297 - DNA, 25 bp, Homo sapien
actttgcttcccatccgtccgctct

SEQ ID NO: 3366298 - DNA, 25 bp, Homo sapien
tcaatgaatccattagactttccat

SEQ ID NO: 3366299 - DNA, 25 bp, Homo sapien
agggaaactgactgggcaagagcca

SEQ ID NO: 3366300 - DNA, 25 bp, Homo sapien
ccaaccagaataacgaagctcgata

SEQ ID NO: 3366301 - DNA, 25 bp, Homo sapien
aagtggtgtctggattttcactgaa

SEQ ID NO: 3366302 - DNA, 25 bp, Homo sapien
gaagctcgataaagtggtgtctgga

SEQ ID NO: 3366303 - DNA, 25 bp, Homo sapien
ccaaacagggacaccaaccagaata

SEQ ID NO: 3366304 - DNA, 25 bp, Homo sapien
cctttgtaagggaattatcgatcag

SEQ ID NO: 3366305 - DNA, 25 bp, Homo sapien
tcagcactttggttagtcaaattac

SEQ ID NO: 3366306 - DNA, 25 bp, Homo sapien
gccacaactggcatttcctaatgag

SEQ ID NO: 3366307 - DNA, 25 bp, Homo sapien
tgttatcaaggccagtaatctttcc

SEQ ID NO: 3366308 - DNA, 25 bp, Homo sapien
gaaattccagaatagatggccctcc

SEQ ID NO: 3366309 - DNA, 25 bp, Homo sapien
tatgacgcttcccaccttgcagaaa

SEQ ID NO: 3366310 - DNA, 25 bp, Homo sapien
cctaatgtgaaagggaatagctgcg

SEQ ID NO: 3366311 - DNA, 25 bp, Homo sapien
gcataggatgaacctcaaggcctct

SEQ ID NO: 3366312 - DNA, 25 bp, Homo sapien
ggatgaaggattgaaggttagaaca

SEQ ID NO: 3366313 - DNA, 25 bp, Homo sapien
gcacatgtgcgatatcgtgctgaac

SEQ ID NO: 3366314 - DNA, 25 bp, Homo sapien
cttgtgcaggatcaaagtgagttgg

SEQ ID NO: 3366315 - DNA, 25 bp, Homo sapien
gaacaattaagcaacttgtgcagga

SEQ ID NO: 3366316 - DNA, 25 bp, Homo sapien
caagatgtgctgaagatgggaagcg

SEQ ID NO: 3366317 - DNA, 25 bp, Homo sapien
tcaaaagcaaggagattgactggat

SEQ ID NO: 3366318 - DNA, 25 bp, Homo sapien
ctggatgaacgcaagcacccaggtt

SEQ ID NO: 3366319 - DNA, 25 bp, Homo sapien
acattttaggcaaaatcagcctgag

SEQ ID NO: 3366320 - DNA, 25 bp, Homo sapien
cacaatgaggtctggcatctggtag

SEQ ID NO: 3366321 - DNA, 25 bp, Homo sapien
ctcccctcgttctagggagattcgg

SEQ ID NO: 3366322 - DNA, 25 bp, Homo sapien
ttgtctcccctcgttctagggagat

SEQ ID NO: 3366323 - DNA, 25 bp, Homo sapien
ctgcaaacacaatgaggtctggcat

SEQ ID NO: 3366324 - DNA, 25 bp, Homo sapien
agggagcggccaggtgtttacacca

SEQ ID NO: 3366325 - DNA, 25 bp, Homo sapien
tcaagcagtgtgaatgggttcccag

SEQ ID NO: 3366326 - DNA, 25 bp, Homo sapien
tacaccaacgtggtcgagtacgtgg

SEQ ID NO: 3366327 - DNA, 25 bp, Homo sapien
tggattctggagaaaactcaagcag

SEQ ID NO: 3366328 - DNA, 25 bp, Homo sapien
caaaactcccgttctatgatcgttg

SEQ ID NO: 3366329 - DNA, 25 bp, Homo sapien
gatcacgcttctatggagtccaaga

SEQ ID NO: 3366330 - DNA, 25 bp, Homo sapien
tgtcacaagttgttatgtccaaaac

SEQ ID NO: 3366331 - DNA, 25 bp, Homo sapien
cagaagaactggtaaaagaagccac

SEQ ID NO: 3366332 - DNA, 25 bp, Homo sapien
catgctgagctttgaagatacagtg

SEQ ID NO: 3366333 - DNA, 25 bp, Homo sapien
taaaatgacggtaggacatgacggg

SEQ ID NO: 3366334 - DNA, 25 bp, Homo sapien
ggctgcaccagattctatgagataa

SEQ ID NO: 3366335 - DNA, 25 bp, Homo sapien
actgcgtctggccatggaaaatatt

SEQ ID NO: 3366336 - DNA, 25 bp, Homo sapien
tttcctgagaagcatattatttgag

SEQ ID NO: 3366337 - DNA, 25 bp, Homo sapien
tagtagactggaagcaacacttcac

SEQ ID NO: 3366338 - DNA, 25 bp, Homo sapien
cagagtgcgttcaagagtatcaaac

SEQ ID NO: 3366339 - DNA, 25 bp, Homo sapien
gatgtaatttcggataagaagagat

SEQ ID NO: 3366340 - DNA, 25 bp, Homo sapien
gggatatttctgatgggtaccgaga

SEQ ID NO: 3366341 - DNA, 25 bp, Homo sapien
tgattgacacgcagagggctctctc

SEQ ID NO: 3366342 - DNA, 25 bp, Homo sapien
tgatgggtaccgagagagcttcctc

SEQ ID NO: 3366343 - DNA, 25 bp, Homo sapien
tgggcacacttctgattgacacgca

SEQ ID NO: 3366344 - DNA, 25 bp, Homo sapien
tatggaaggctggtgttcactgcag

SEQ ID NO: 3366345 - DNA, 25 bp, Homo sapien
ctgtccattatggaaggctggtgtt

SEQ ID NO: 3366346 - DNA, 25 bp, Homo sapien
tctttcatacacacgcaggaacatt

SEQ ID NO: 3366347 - DNA, 25 bp, Homo sapien
cagagtccccgtggacggacacttg

SEQ ID NO: 3366348 - DNA, 25 bp, Homo sapien
tgctcttggacagccggcaacgaag

SEQ ID NO: 3366349 - DNA, 25 bp, Homo sapien
tttctgacatgagcggtgctcttgg

SEQ ID NO: 3366350 - DNA, 25 bp, Homo sapien
gacacagcggttctcacctgtggca

SEQ ID NO: 3366351 - DNA, 25 bp, Homo sapien
gaagccacgcttgtgaaggacacag

SEQ ID NO: 3366352 - DNA, 25 bp, Homo sapien
cacaggtagagattttcacaggctg

SEQ ID NO: 3366353 - DNA, 25 bp, Homo sapien
aaccaccggtaactttcaaatgctg

SEQ ID NO: 3366354 - DNA, 25 bp, Homo sapien
catgagcacgctttgtaaccaccgg

SEQ ID NO: 3366355 - DNA, 25 bp, Homo sapien
tggtgactgcgtgggttccttccat

SEQ ID NO: 3366356 - DNA, 25 bp, Homo sapien
cacagcgtctaggagtagtggctgt

SEQ ID NO: 3366357 - DNA, 25 bp, Homo sapien
agcctagttaacagccccacagagg

SEQ ID NO: 3366358 - DNA, 25 bp, Homo sapien
gccagcacagcgtctaggagtagtg

SEQ ID NO: 3366359 - DNA, 25 bp, Homo sapien
aggagtttcttgagcagcctagtta

SEQ ID NO: 3366360 - DNA, 25 bp, Homo sapien
cctggacagtgtctagccggggcct

SEQ ID NO: 3366361 - DNA, 25 bp, Homo sapien
ggagcccaccccgataggtcagtgt

SEQ ID NO: 3366362 - DNA, 25 bp, Homo sapien
tcagtactgcagtgttccagccctg

SEQ ID NO: 3366363 - DNA, 25 bp, Homo sapien
caccccgataggtcagtgtgcaatg

SEQ ID NO: 3366364 - DNA, 25 bp, Homo sapien
gcagtcacagcccaacataaagcac

SEQ ID NO: 3366365 - DNA, 25 bp, Homo sapien
gggcaccttgctccaacaaagtcag

SEQ ID NO: 3366366 - DNA, 25 bp, Homo sapien
tcttcgtgaaatgtgacagggatga

SEQ ID NO: 3366367 - DNA, 25 bp, Homo sapien
aagcacagcttcaattcttcgtgaa

SEQ ID NO: 3366368 - DNA, 25 bp, Homo sapien
aggagccagaagacagcatgaggac

SEQ ID NO: 3366369 - DNA, 25 bp, Homo sapien
ggtttggctggcatggctctgagga

SEQ ID NO: 3366370 - DNA, 25 bp, Homo sapien
atggctctgaggagccagaagacag

SEQ ID NO: 3366371 - DNA, 25 bp, Homo sapien
cctgtgaggacaggtttggctggca

SEQ ID NO: 3366372 - DNA, 25 bp, Homo sapien
ggtcatcagtcagcgcctttttggg

SEQ ID NO: 3366373 - DNA, 25 bp, Homo sapien
agctgccactctttgtagaagttgc

SEQ ID NO: 3366374 - DNA, 25 bp, Homo sapien
tcctcaatgctccacggtcatcagt

SEQ ID NO: 3366375 - DNA, 25 bp, Homo sapien
gcattgaaaccaagataatttggtt

SEQ ID NO: 3366376 - DNA, 25 bp, Homo sapien
cctgcatgcggcaggtgtgcccagc

SEQ ID NO: 3366377 - DNA, 25 bp, Homo sapien
ggtgtgcccagcttggactggccaa

SEQ ID NO: 3366378 - DNA, 25 bp, Homo sapien
ctgcagtttgtgatcgtgctcccac

SEQ ID NO: 3366379 - DNA, 25 bp, Homo sapien
ttgcgttcactggaaggattgcctt

SEQ ID NO: 3366380 - DNA, 25 bp, Homo sapien
cacccttattgatgtggacttgaat

SEQ ID NO: 3366381 - DNA, 25 bp, Homo sapien
gtctgctcacccttattgatgtgga

SEQ ID NO: 3366382 - DNA, 25 bp, Homo sapien
caagccgtctgctcacccttattga

SEQ ID NO: 3366383 - DNA, 25 bp, Homo sapien
aatatctgggcatgactctcaagca

SEQ ID NO: 3366384 - DNA, 25 bp, Homo sapien
tccgtggcgaacagcgtcaaatgga

SEQ ID NO: 3366385 - DNA, 25 bp, Homo sapien
tgcatcatcattccgtggcgaacag

SEQ ID NO: 3366386 - DNA, 25 bp, Homo sapien
tcatcattccgtggcgaacagcgtc

SEQ ID NO: 3366387 - DNA, 25 bp, Homo sapien
tcattccgtggcgaacagcgtcaaa

SEQ ID NO: 3366388 - DNA, 25 bp, Homo sapien
attctccttgcagtgtcatagacac

SEQ ID NO: 3366389 - DNA, 25 bp, Homo sapien
cattctccttgcagtgtcatagaca

SEQ ID NO: 3366390 - DNA, 25 bp, Homo sapien
acagacctgttagagccttggtaca

SEQ ID NO: 3366391 - DNA, 25 bp, Homo sapien
cagacctgttagagccttggtacag

SEQ ID NO: 3366392 - DNA, 25 bp, Homo sapien
cacagacctgttagagccttggtac

SEQ ID NO: 3366393 - DNA, 25 bp, Homo sapien
gacctgttagagccttggtacaggc

SEQ ID NO: 3366394 - DNA, 25 bp, Homo sapien
tcacaccccccgggaagatctgctt

SEQ ID NO: 3366395 - DNA, 25 bp, Homo sapien
aaagttgagagcgtgggtagggaag

SEQ ID NO: 3366396 - DNA, 25 bp, Homo sapien
gcaaagttgagagcgtgggtaggga

SEQ ID NO: 3366397 - DNA, 25 bp, Homo sapien
cttgtcacaccccccgggaagatct

SEQ ID NO: 3366398 - DNA, 25 bp, Homo sapien
ctccgtgggtgccaccgccatcttg

SEQ ID NO: 3366399 - DNA, 25 bp, Homo sapien
tgggaatgcggaccatgcagtctac

SEQ ID NO: 3366400 - DNA, 25 bp, Homo sapien
acaacgcccgtgtattgcttatctg

SEQ ID NO: 3366401 - DNA, 25 bp, Homo sapien
agcagcttgacccctccgtgggtgc

SEQ ID NO: 3366402 - DNA, 25 bp, Homo sapien
tgtacccacctccatttcatcacta

SEQ ID NO: 3366403 - DNA, 25 bp, Homo sapien
gtacccacctccatttcatcactag

SEQ ID NO: 3366404 - DNA, 25 bp, Homo sapien
ccacctccatttcatcactagaaga

SEQ ID NO: 3366405 - DNA, 25 bp, Homo sapien
cctccatttcatcactagaagagtt

SEQ ID NO: 3366406 - DNA, 25 bp, Homo sapien
tgtttgcaaaccggggcagactgcc

SEQ ID NO: 3366407 - DNA, 25 bp, Homo sapien
cgatcatcacgagatttgctgtttg

SEQ ID NO: 3366408 - DNA, 25 bp, Homo sapien
cactcgatcatcacgagatttgctg

SEQ ID NO: 3366409 - DNA, 25 bp, Homo sapien
ctaaatcactcgatcatcacgagat

SEQ ID NO: 3366410 - DNA, 25 bp, Homo sapien
ctcatccaggaccaaggtttcctag

SEQ ID NO: 3366411 - DNA, 25 bp, Homo sapien
tgcccttccatagctttcagtccgg

SEQ ID NO: 3366412 - DNA, 25 bp, Homo sapien
taatcatctactataagactataca

SEQ ID NO: 3366413 - DNA, 25 bp, Homo sapien
ttcatagagttgtctactatgcaaa

SEQ ID NO: 3366414 - DNA, 25 bp, Homo sapien
taagactatacattgaggatatgct

SEQ ID NO: 3366415 - DNA, 25 bp, Homo sapien
cagtttgcacctcgttggcttgtgc

SEQ ID NO: 3366416 - DNA, 25 bp, Homo sapien
ccagggctttgagaattggctctca

SEQ ID NO: 3366417 - DNA, 25 bp, Homo sapien
tttctgtacctccactctgcaactg

SEQ ID NO: 3366418 - DNA, 25 bp, Homo sapien
tgaaaggacggtcttcagctctcta

SEQ ID NO: 3366419 - DNA, 25 bp, Homo sapien
tatccttattgacataacaaccagt

SEQ ID NO: 3366420 - DNA, 25 bp, Homo sapien
tagcatttcaattccgttgagttgg

SEQ ID NO: 3366421 - DNA, 25 bp, Homo sapien
cataacaaccagtactgaagtgatg

SEQ ID NO: 3366422 - DNA, 25 bp, Homo sapien
tgagttggagacagcagtccctcct

SEQ ID NO: 3366423 - DNA, 25 bp, Homo sapien
gcatccactcgggagtgacgtgcat

SEQ ID NO: 3366424 - DNA, 25 bp, Homo sapien
acagcatccactcgggagtgacgtg

SEQ ID NO: 3366425 - DNA, 25 bp, Homo sapien
tggtgaataacacaccggccagtac

SEQ ID NO: 3366426 - DNA, 25 bp, Homo sapien
acagcatccactcgggagtgacgcg

SEQ ID NO: 3366427 - DNA, 25 bp, Homo sapien
aaagcaggcctgtgctatcgctgtg

SEQ ID NO: 3366428 - DNA, 25 bp, Homo sapien
tcggatgctccacatcaaagcaggc

SEQ ID NO: 3366429 - DNA, 25 bp, Homo sapien
ctgtgaagacctgcctgcgaagcca

SEQ ID NO: 3366430 - DNA, 25 bp, Homo sapien
gcgaagccaggatggtgagttgagg

SEQ ID NO: 3366431 - DNA, 25 bp, Homo sapien
tccatgtgccaattccaaaacgaaa

SEQ ID NO: 3366432 - DNA, 25 bp, Homo sapien
cagggacctctcagccagattcgag

SEQ ID NO: 3366433 - DNA, 25 bp, Homo sapien
aatgaccaggatacaggagttcgac

SEQ ID NO: 3366434 - DNA, 25 bp, Homo sapien
gattcgagatataaaaatgaccagg

SEQ ID NO: 3366435 - DNA, 25 bp, Homo sapien
tatctaagagtcctgaagatcagct

SEQ ID NO: 3366436 - DNA, 25 bp, Homo sapien
catgctgctcttggattggagcacc

SEQ ID NO: 3366437 - DNA, 25 bp, Homo sapien
gggtaatcatagtccctcagggctt

SEQ ID NO: 3366438 - DNA, 25 bp, Homo sapien
ctttgcttttgaggtgacatgctgc

SEQ ID NO: 3366439 - DNA, 25 bp, Homo sapien
tttcttgagcgctacgtcaggatca

SEQ ID NO: 3366440 - DNA, 25 bp, Homo sapien
cacactttgtatagaggagctctgg

SEQ ID NO: 3366441 - DNA, 25 bp, Homo sapien
tatgaagccatctgaagagaaacgt

SEQ ID NO: 3366442 - DNA, 25 bp, Homo sapien
tatacaacatcgttctcaggagacg

SEQ ID NO: 3366443 - DNA, 25 bp, Homo sapien
gggaagggcatctttcacaggaatg

SEQ ID NO: 3366444 - DNA, 25 bp, Homo sapien
gaattatcttcgctatggctcctgg

SEQ ID NO: 3366445 - DNA, 25 bp, Homo sapien
taggcattattttaccacggtctgt

SEQ ID NO: 3366446 - DNA, 25 bp, Homo sapien
cacaggagcctgaataagaaaatga

SEQ ID NO: 3366447 - DNA, 25 bp, Homo sapien
aatgacatgcacttcttctatctgc

SEQ ID NO: 3366448 - DNA, 25 bp, Homo sapien
gagaatgacatgcacttcttctatc

SEQ ID NO: 3366449 - DNA, 25 bp, Homo sapien
gaaaaggggagaatgacatgcactt

SEQ ID NO: 3366450 - DNA, 25 bp, Homo sapien
gggagaatgacatgcacttcttcta

SEQ ID NO: 3366451 - DNA, 25 bp, Homo sapien
taatctccagcatagcaaggtttat

SEQ ID NO: 3366452 - DNA, 25 bp, Homo sapien
tggcccacctaagtaatctccagca

SEQ ID NO: 3366453 - DNA, 25 bp, Homo sapien
tcagcaaatgcacggcatacagatg

SEQ ID NO: 3366454 - DNA, 25 bp, Homo sapien
tttggtttcaagaaatcctggccca

SEQ ID NO: 3366455 - DNA, 25 bp, Homo sapien
aacctatggattctctgccagtggc

SEQ ID NO: 3366456 - DNA, 25 bp, Homo sapien
ttagcaaacctatggattctctgcc

SEQ ID NO: 3366457 - DNA, 25 bp, Homo sapien
ccagtggcagaatagagacagttgc

SEQ ID NO: 3366458 - DNA, 25 bp, Homo sapien
gctctgtatccttagcaaacctatg

SEQ ID NO: 3366459 - DNA, 25 bp, Homo sapien
cacgggcttcagttgatcaacacag

SEQ ID NO: 3366460 - DNA, 25 bp, Homo sapien
ccaactgcaaggatgagacgtcacg

SEQ ID NO: 3366461 - DNA, 25 bp, Homo sapien
caaatagtctatagccaaggtggta

SEQ ID NO: 3366462 - DNA, 25 bp, Homo sapien
caaggtggtatgttttagggcttct

SEQ ID NO: 3366463 - DNA, 25 bp, Homo sapien
gaagatctgtaactacagtcgccag

SEQ ID NO: 3366464 - DNA, 25 bp, Homo sapien
gagctcctgaaaagcaatctccttc

SEQ ID NO: 3366465 - DNA, 25 bp, Homo sapien
cagtttgccgccaggtgggaacacc

SEQ ID NO: 3366466 - DNA, 25 bp, Homo sapien
tgggaacaccagttgggaacaacac

SEQ ID NO: 3366467 - DNA, 25 bp, Homo sapien
gcacatctgggcttcgcaattttat

SEQ ID NO: 3366468 - DNA, 25 bp, Homo sapien
gaagctggacgaagtctcacctcag

SEQ ID NO: 3366469 - DNA, 25 bp, Homo sapien
caagctccatttaggtcagtgattt

SEQ ID NO: 3366470 - DNA, 25 bp, Homo sapien
gattagtgacacagacagaagctgg

SEQ ID NO: 3366471 - DNA, 25 bp, Homo sapien
tataacgattggtgagattcagcca

SEQ ID NO: 3366472 - DNA, 25 bp, Homo sapien
gtatacatctcctcctgattccgca

SEQ ID NO: 3366473 - DNA, 25 bp, Homo sapien
ctttggagactgagctgtatacatc

SEQ ID NO: 3366474 - DNA, 25 bp, Homo sapien
ctgttgataaaacgcgcaaagttgg

SEQ ID NO: 3366475 - DNA, 25 bp, Homo sapien
ttgtagtgctgagccagtttctgca

SEQ ID NO: 3366476 - DNA, 25 bp, Homo sapien
ctccttgtagtgctgagccagtttc

SEQ ID NO: 3366477 - DNA, 25 bp, Homo sapien
cagataatctaatatgcatatttcc

SEQ ID NO: 3366478 - DNA, 25 bp, Homo sapien
tttctgcagataatctaatatgcat

SEQ ID NO: 3366479 - DNA, 25 bp, Homo sapien
cgctcatcgagtaatcgccaaggag

SEQ ID NO: 3366480 - DNA, 25 bp, Homo sapien
gaaggacaggcgctcatcgagtaat

SEQ ID NO: 3366481 - DNA, 25 bp, Homo sapien
tcgagtaatcgccaaggagaggcat

SEQ ID NO: 3366482 - DNA, 25 bp, Homo sapien
caggcgctcatcgagtaatcgccaa

SEQ ID NO: 3366483 - DNA, 25 bp, Homo sapien
tgggaagggagcctcggcacccact

SEQ ID NO: 3366484 - DNA, 25 bp, Homo sapien
tctgggccagtggaatggcagtggg

SEQ ID NO: 3366485 - DNA, 25 bp, Homo sapien
cttctcgaggaagagtgcctgccca

SEQ ID NO: 3366486 - DNA, 25 bp, Homo sapien
gcctgcccatctgaacacaacagaa

SEQ ID NO: 3366487 - DNA, 25 bp, Homo sapien
catacttcctaacgccgcacacacg

SEQ ID NO: 3366488 - DNA, 25 bp, Homo sapien
tcatacttcctaacgccgcacacac

SEQ ID NO: 3366489 - DNA, 25 bp, Homo sapien
cgcacacacggcattacccagctca

SEQ ID NO: 3366490 - DNA, 25 bp, Homo sapien
aacgccgcacacacggcattaccca

SEQ ID NO: 3366491 - DNA, 25 bp, Homo sapien
tcatttcgcaagctcttgtgggcta

SEQ ID NO: 3366492 - DNA, 25 bp, Homo sapien
ggagggtgaatctgacgttctggag

SEQ ID NO: 3366493 - DNA, 25 bp, Homo sapien
ttgtgggctattctgctctgtggaa

SEQ ID NO: 3366494 - DNA, 25 bp, Homo sapien
gctctcaactggttttggtgtaagg

SEQ ID NO: 3366495 - DNA, 25 bp, Homo sapien
tctgggtagcctcaaaaacgtgcac

SEQ ID NO: 3366496 - DNA, 25 bp, Homo sapien
ccttacagttacaaagagatcaggc

SEQ ID NO: 3366497 - DNA, 25 bp, Homo sapien
ggctggctgggataactcattctgc

SEQ ID NO: 3366498 - DNA, 25 bp, Homo sapien
tatcttgctcatgaatcagacctgg

SEQ ID NO: 3366499 - DNA, 25 bp, Homo sapien
gattgtcgtggtcaacaacacccca

SEQ ID NO: 3366500 - DNA, 25 bp, Homo sapien
tcctgacttggaacctttgagatgt

SEQ ID NO: 3366501 - DNA, 25 bp, Homo sapien
ttgatgtccacagatcctaccctcg

SEQ ID NO: 3366502 - DNA, 25 bp, Homo sapien
gaagcagtccttcgctcttccgtgt

SEQ ID NO: 3366503 - DNA, 25 bp, Homo sapien
cagcctcacgggtagctaggaccac

SEQ ID NO: 3366504 - DNA, 25 bp, Homo sapien
acacatgccaccgtgcctagctgat

SEQ ID NO: 3366505 - DNA, 25 bp, Homo sapien
ctcccaaagtgtcgggattataagc

SEQ ID NO: 3366506 - DNA, 25 bp, Homo sapien
ctggccttaagtgatactcctcagc

SEQ ID NO: 3366507 - DNA, 25 bp, Homo sapien
gatctctagactcctgaaccatgga

SEQ ID NO: 3366508 - DNA, 25 bp, Homo sapien
ccagagagagaagaacgactagatc

SEQ ID NO: 3366509 - DNA, 25 bp, Homo sapien
tacagggagtctcagctaagaaggt

SEQ ID NO: 3366510 - DNA, 25 bp, Homo sapien
tcttactcggtctttgttacaggga

SEQ ID NO: 3366511 - DNA, 25 bp, Homo sapien
aacaggacacgtgggcgcggtagtg

SEQ ID NO: 3366512 - DNA, 25 bp, Homo sapien
ggcgcggtagtgagcagggccggct

SEQ ID NO: 3366513 - DNA, 25 bp, Homo sapien
aagcacaacaggacacgtgggcgcg

SEQ ID NO: 3366514 - DNA, 25 bp, Homo sapien
cacaacaggacacgtgggcgcggta

SEQ ID NO: 3366515 - DNA, 25 bp, Homo sapien
gtgacgtccagcaagctcgccatgt

SEQ ID NO: 3366516 - DNA, 25 bp, Homo sapien
ttgagaaggtaacacggcgaagccc

SEQ ID NO: 3366517 - DNA, 25 bp, Homo sapien
ctgaggaggtcggtgagcagagtcc

SEQ ID NO: 3366518 - DNA, 25 bp, Homo sapien
aaaggcgaaggcgacgtgacgtcca

SEQ ID NO: 3366519 - DNA, 25 bp, Homo sapien
cacactcgactccattgttcttctg

SEQ ID NO: 3366520 - DNA, 25 bp, Homo sapien
tacactttcaaacaaggtggccaca

SEQ ID NO: 3366521 - DNA, 25 bp, Homo sapien
tagggatgccccaacaggcattaag

SEQ ID NO: 3366522 - DNA, 25 bp, Homo sapien
gacagcacaagagcttccatcgcaa

SEQ ID NO: 3366523 - DNA, 25 bp, Homo sapien
gatggaaaaaccatattttataaga

SEQ ID NO: 3366524 - DNA, 25 bp, Homo sapien
gaatatagtatatgtagtacgtccc

SEQ ID NO: 3366525 - DNA, 25 bp, Homo sapien
tattgtaccaacatacatatgttgg

SEQ ID NO: 3366526 - DNA, 25 bp, Homo sapien
ttttataagactatgaagcttacag

SEQ ID NO: 3366527 - DNA, 25 bp, Homo sapien
cacgttagctcagaaactatggcag

SEQ ID NO: 3366528 - DNA, 25 bp, Homo sapien
taagttggaatgtactggcgcgatc

SEQ ID NO: 3366529 - DNA, 25 bp, Homo sapien
cagacatctgtcaagagcgaggcct

SEQ ID NO: 3366530 - DNA, 25 bp, Homo sapien
gtgtccatctcacccggaacgtggt

SEQ ID NO: 3366531 - DNA, 25 bp, Homo sapien
gcagctgttgaaatacgccatgtag

SEQ ID NO: 3366532 - DNA, 25 bp, Homo sapien
ggtcatcagtggagacggtttccat

SEQ ID NO: 3366533 - DNA, 25 bp, Homo sapien
catttaaccctatcggccacgtcgt

SEQ ID NO: 3366534 - DNA, 25 bp, Homo sapien
ccacgtcgttagagctgtccacaaa

SEQ ID NO: 3366535 - DNA, 25 bp, Homo sapien
ggtttcaccctctgtctgacctgga

SEQ ID NO: 3366536 - DNA, 25 bp, Homo sapien
cactctgggatcctaggcaccatgc

SEQ ID NO: 3366537 - DNA, 25 bp, Homo sapien
cagaggagcccagcaaatggcaaaa

SEQ ID NO: 3366538 - DNA, 25 bp, Homo sapien
acaaacatggtgacaaaattcctga

SEQ ID NO: 3366539 - DNA, 25 bp, Homo sapien
gaagtggaaaaccaccacggcgatg

SEQ ID NO: 3366540 - DNA, 25 bp, Homo sapien
tagatcctcgggtcgtactggagag

SEQ ID NO: 3366541 - DNA, 25 bp, Homo sapien
tatcgacatcagcaccaacgggtac

SEQ ID NO: 3366542 - DNA, 25 bp, Homo sapien
tcaggagccatatgaggagcacgta

SEQ ID NO: 3366543 - DNA, 25 bp, Homo sapien
tgaaagagaatcgtttagaaaatac

SEQ ID NO: 3366544 - DNA, 25 bp, Homo sapien
ctgaaagagaatcgtttagaaaata

SEQ ID NO: 3366545 - DNA, 25 bp, Homo sapien
gacacatcgaatccgctgttcacac

SEQ ID NO: 3366546 - DNA, 25 bp, Homo sapien
ggccagtccactgccgctcctgaca

SEQ ID NO: 3366547 - DNA, 25 bp, Homo sapien
aaatgaagtggaggccgtttcccag

SEQ ID NO: 3366548 - DNA, 25 bp, Homo sapien
gctcctgacacatcgaatccgctgt

SEQ ID NO: 3366549 - DNA, 25 bp, Homo sapien
tgtggctacgtcctggcttacagcc

SEQ ID NO: 3366550 - DNA, 25 bp, Homo sapien
tcctgtgctcctacagatacgagac

SEQ ID NO: 3366551 - DNA, 25 bp, Homo sapien
gaagaagcgtatttgaactagaaca

SEQ ID NO: 3366552 - DNA, 25 bp, Homo sapien
aatgttatttccctgagaaagctcc

SEQ ID NO: 3366553 - DNA, 25 bp, Homo sapien
gtcaacttcgcgaagctgaaaagac

SEQ ID NO: 3366554 - DNA, 25 bp, Homo sapien
gggttaatcgatgcacagtgggttt

SEQ ID NO: 3366555 - DNA, 25 bp, Homo sapien
ctggccgagggttaatcgatgcaca

SEQ ID NO: 3366556 - DNA, 25 bp, Homo sapien
cacagtgggtttatattgtgtcaac

SEQ ID NO: 3366557 - DNA, 25 bp, Homo sapien
ctttccttctgcgtgtgggttagca

SEQ ID NO: 3366558 - DNA, 25 bp, Homo sapien
tgctggcgcatttctccccaaagtg

SEQ ID NO: 3366559 - DNA, 25 bp, Homo sapien
tgttgtcgtagacgctgctggcgca

SEQ ID NO: 3366560 - DNA, 25 bp, Homo sapien
tgtgcaatgattaaccctgcggaca

SEQ ID NO: 3366561 - DNA, 25 bp, Homo sapien
cttcatttggcaaggactggatcct

SEQ ID NO: 3366562 - DNA, 25 bp, Homo sapien
ccttcatttggcaaggactggatcc

SEQ ID NO: 3366563 - DNA, 25 bp, Homo sapien
ttcatttggcaaggactggatcctt

SEQ ID NO: 3366564 - DNA, 25 bp, Homo sapien
tcatttggcaaggactggatccttc

SEQ ID NO: 3366565 - DNA, 25 bp, Homo sapien
gtaggagttacaggctgtagctgcc

SEQ ID NO: 3366566 - DNA, 25 bp, Homo sapien
cgagccaaccataccgggtaggagt

SEQ ID NO: 3366567 - DNA, 25 bp, Homo sapien
taccgggtaggagttacaggctgta

SEQ ID NO: 3366568 - DNA, 25 bp, Homo sapien
gttacaggctgtagctgcccaccgg

SEQ ID NO: 3366569 - DNA, 25 bp, Homo sapien
tagaggccccctgaatagtactgtt

SEQ ID NO: 3366570 - DNA, 25 bp, Homo sapien
tcagcctggactttaaccacgtgga

SEQ ID NO: 3366571 - DNA, 25 bp, Homo sapien
ggaaagcaagattagaggccccctg

SEQ ID NO: 3366572 - DNA, 25 bp, Homo sapien
tgctcatatccactaagatgttggt

SEQ ID NO: 3366573 - DNA, 25 bp, Homo sapien
ctaaaaggaactgagtgtgcctgag

SEQ ID NO: 3366574 - DNA, 25 bp, Homo sapien
cacaccctgttcgtgggacacaccg

SEQ ID NO: 3366575 - DNA, 25 bp, Homo sapien
cacaccacaccctgttcgtgggaca

SEQ ID NO: 3366576 - DNA, 25 bp, Homo sapien
acaccacaccctgttcgtgggacac

SEQ ID NO: 3366577 - DNA, 25 bp, Homo sapien
acaccctgttcgtgggacacaccgt

SEQ ID NO: 3366578 - DNA, 25 bp, Homo sapien
accacaccctgttcgtgggacacac

SEQ ID NO: 3366579 - DNA, 25 bp, Homo sapien
caccacaccctgttcgtgggacaca

SEQ ID NO: 3366580 - DNA, 25 bp, Homo sapien
ccacaccacaccctgttcgtgggac

SEQ ID NO: 3366581 - DNA, 25 bp, Homo sapien
cacaccacaccctgttcgtgggaca

SEQ ID NO: 3366582 - DNA, 25 bp, Homo sapien
cacaccctgttcgtgggacacactg

SEQ ID NO: 3366583 - DNA, 25 bp, Homo sapien
caccctgttcgtgggacacactgtc

SEQ ID NO: 3366584 - DNA, 25 bp, Homo sapien
acaccctgttcgtgggacacactgt

SEQ ID NO: 3366585 - DNA, 25 bp, Homo sapien
tcacaccctgttcatgggacacact

SEQ ID NO: 3366586 - DNA, 25 bp, Homo sapien
tgtcctcacaccctgttcatgggac

SEQ ID NO: 3366587 - DNA, 25 bp, Homo sapien
ccctgttcatgggacacactgtcct

SEQ ID NO: 3366588 - DNA, 25 bp, Homo sapien
acacactgtcctcacaccctgttca

SEQ ID NO: 3366589 - DNA, 25 bp, Homo sapien
tgaacaccctgttccatctgagcac

SEQ ID NO: 3366590 - DNA, 25 bp, Homo sapien
tctgagcacctcagggctccgttgc

SEQ ID NO: 3366591 - DNA, 25 bp, Homo sapien
ctggttcatggtactcgcggttgtc

SEQ ID NO: 3366592 - DNA, 25 bp, Homo sapien
gcctcctggattccacgtgtcctcc

SEQ ID NO: 3366593 - DNA, 25 bp, Homo sapien
ttgaaccagatctctgaggcccaaa

SEQ ID NO: 3366594 - DNA, 25 bp, Homo sapien
aaagtccacattcactccgtactct

SEQ ID NO: 3366595 - DNA, 25 bp, Homo sapien
attcactccgtactctatgcatcct

SEQ ID NO: 3366596 - DNA, 25 bp, Homo sapien
gccgtggtacatccgagacttgaac

SEQ ID NO: 3366597 - DNA, 25 bp, Homo sapien
ttccactgtaggctcgtaactgcag

SEQ ID NO: 3366598 - DNA, 25 bp, Homo sapien
cacggcggctgctccatcattttgc

SEQ ID NO: 3366599 - DNA, 25 bp, Homo sapien
gtaactgcagactactcccgaacaa

SEQ ID NO: 3366600 - DNA, 25 bp, Homo sapien
cctgccggacacagcacgtttggga

SEQ ID NO: 3366601 - DNA, 25 bp, Homo sapien
ttccgatacaccgacaggatgacca

SEQ ID NO: 3366602 - DNA, 25 bp, Homo sapien
ctgagcttcttgttccgatacaccg

SEQ ID NO: 3366603 - DNA, 25 bp, Homo sapien
tggtgaagatgaggacgcaggccag

SEQ ID NO: 3366604 - DNA, 25 bp, Homo sapien
ttcttgttccgatacaccgacagga

SEQ ID NO: 3366605 - DNA, 25 bp, Homo sapien
ggtccctgtgcgcgtcccggccgcg

SEQ ID NO: 3366606 - DNA, 25 bp, Homo sapien
cgaccacttgttaaggctccgcccg

SEQ ID NO: 3366607 - DNA, 25 bp, Homo sapien
gtccctgtgcgcgtcccggccgcgg

SEQ ID NO: 3366608 - DNA, 25 bp, Homo sapien
ctcgtccgcccgcccgaccacttgt

SEQ ID NO: 3366609 - DNA, 25 bp, Homo sapien
gcactgctgcaaagaacagcgcgga

SEQ ID NO: 3366610 - DNA, 25 bp, Homo sapien
taaacaggtatgcagaaggtccccg

SEQ ID NO: 3366611 - DNA, 25 bp, Homo sapien
ggaaatggctagcacgtccagaggc

SEQ ID NO: 3366612 - DNA, 25 bp, Homo sapien
tggcacagccgatgaaaacctcacg

SEQ ID NO: 3366613 - DNA, 25 bp, Homo sapien
caaactgattgctgaattcgggcgg

SEQ ID NO: 3366614 - DNA, 25 bp, Homo sapien
tatgtccggcagaggaacgcttggc

SEQ ID NO: 3366615 - DNA, 25 bp, Homo sapien
gatcgtcacctcttcgaagtggccg

SEQ ID NO: 3366616 - DNA, 25 bp, Homo sapien
cggtaacggtggtagctcatcagct

SEQ ID NO: 3366617 - DNA, 25 bp, Homo sapien
cgacccagcgtagtcagtcagcact

SEQ ID NO: 3366618 - DNA, 25 bp, Homo sapien
gaaggttaggcaatccgtgcttcaa

SEQ ID NO: 3366619 - DNA, 25 bp, Homo sapien
gcttcaaatgcaatgcgcacacaca

SEQ ID NO: 3366620 - DNA, 25 bp, Homo sapien
catgcagccgtgtacttagttactg

SEQ ID NO: 3366621 - DNA, 25 bp, Homo sapien
ttgctgaggtcaggagcagccaaag

SEQ ID NO: 3366622 - DNA, 25 bp, Homo sapien
ctcttggtttgctgaggtcaggagc

SEQ ID NO: 3366623 - DNA, 25 bp, Homo sapien
tcttggtttgctgaggtcaggagca

SEQ ID NO: 3366624 - DNA, 25 bp, Homo sapien
ctgaggtcaggagcagccaaagatt

SEQ ID NO: 3366625 - DNA, 25 bp, Homo sapien
gcaataaaggtaagtacacagaaca

SEQ ID NO: 3366626 - DNA, 25 bp, Homo sapien
attaaaacagtcggctgaaaaggca

SEQ ID NO: 3366627 - DNA, 25 bp, Homo sapien
aaacagtcggctgaaaaggcaataa

SEQ ID NO: 3366628 - DNA, 25 bp, Homo sapien
aaaggcaataaaggtaagtacacag

SEQ ID NO: 3366629 - DNA, 25 bp, Homo sapien
aaagtgactgcggaatgaggaacca

SEQ ID NO: 3366630 - DNA, 25 bp, Homo sapien
cgccagtatctatgacaattccaaa

SEQ ID NO: 3366631 - DNA, 25 bp, Homo sapien
gaggcccaatcagccatacagcatg

SEQ ID NO: 3366632 - DNA, 25 bp, Homo sapien
aatgtatgtaccacaaataaaatgg

SEQ ID NO: 3366633 - DNA, 25 bp, Homo sapien
tcagttacaggttaattatgaaagc

SEQ ID NO: 3366634 - DNA, 25 bp, Homo sapien
ttattcctgtacatacgaagaagaa

SEQ ID NO: 3366635 - DNA, 25 bp, Homo sapien
tacagataagctctccagatctcat

SEQ ID NO: 3366636 - DNA, 25 bp, Homo sapien
aactttttcttgattgcaccaccta

SEQ ID NO: 3366637 - DNA, 25 bp, Homo sapien
acagacacaagcacgagcacttaca

SEQ ID NO: 3366638 - DNA, 25 bp, Homo sapien
agctctacgacacggctgctgcaag

SEQ ID NO: 3366639 - DNA, 25 bp, Homo sapien
cacaagcacgagcacttacaactgt

SEQ ID NO: 3366640 - DNA, 25 bp, Homo sapien
attgcaatagcaatgcggccgagct

SEQ ID NO: 3366641 - DNA, 25 bp, Homo sapien
aaccacagcattgacaaggtgcatt

SEQ ID NO: 3366642 - DNA, 25 bp, Homo sapien
tctgtgctcaccgtgtcaaccacag

SEQ ID NO: 3366643 - DNA, 25 bp, Homo sapien
caaggtgcattacggtcactatgga

SEQ ID NO: 3366644 - DNA, 25 bp, Homo sapien
gctcaccgtgtcaaccacagcattg

SEQ ID NO: 3366645 - DNA, 25 bp, Homo sapien
aacatcttcagttagttagaaaaca

SEQ ID NO: 3366646 - DNA, 25 bp, Homo sapien
tcttcagttagttagaaaacagtgc

SEQ ID NO: 3366647 - DNA, 25 bp, Homo sapien
caaaagcagtcaattaggaacatct

SEQ ID NO: 3366648 - DNA, 25 bp, Homo sapien
gcagtcaattaggaacatcttcagt

SEQ ID NO: 3366649 - DNA, 25 bp, Homo sapien
tataggaggagactctgtccgtctg

SEQ ID NO: 3366650 - DNA, 25 bp, Homo sapien
tacaggcaagactcgacattccaag

SEQ ID NO: 3366651 - DNA, 25 bp, Homo sapien
taatcgctggtgagctaatgtacga

SEQ ID NO: 3366652 - DNA, 25 bp, Homo sapien
catgccaggccaaaacgattcttat

SEQ ID NO: 3366653 - DNA, 25 bp, Homo sapien
tcgcacgattcggactggaaggagc

SEQ ID NO: 3366654 - DNA, 25 bp, Homo sapien
cctctagaggcttcttggaaagaca

SEQ ID NO: 3366655 - DNA, 25 bp, Homo sapien
tttcccgggcactgtatggctggga

SEQ ID NO: 3366656 - DNA, 25 bp, Homo sapien
gagctcagagactgcacttcagaca

SEQ ID NO: 3366657 - DNA, 25 bp, Homo sapien
tacttgtctctaatgaagagtacac

SEQ ID NO: 3366658 - DNA, 25 bp, Homo sapien
ccagcaatcgggacatccaaaaaag

SEQ ID NO: 3366659 - DNA, 25 bp, Homo sapien
taacatcaaagccacaatgctaacc

SEQ ID NO: 3366660 - DNA, 25 bp, Homo sapien
catcatacggatttcagtctgagca

SEQ ID NO: 3366661 - DNA, 25 bp, Homo sapien
tgcaagaaagccgtagcgggtccca

SEQ ID NO: 3366662 - DNA, 25 bp, Homo sapien
caacccaatgttccacggcgtggac

SEQ ID NO: 3366663 - DNA, 25 bp, Homo sapien
cgggtcccaggtgcttgtctttagg

SEQ ID NO: 3366664 - DNA, 25 bp, Homo sapien
tttcggtgcccgtgcacagactcgg

SEQ ID NO: 3366665 - DNA, 25 bp, Homo sapien
tggttgggcgcagcatcctcgcagt

SEQ ID NO: 3366666 - DNA, 25 bp, Homo sapien
taggagccgtgcgtgttctcacaga

SEQ ID NO: 3366667 - DNA, 25 bp, Homo sapien
ctgcagttgcagtgataggagccgt

SEQ ID NO: 3366668 - DNA, 25 bp, Homo sapien
tcgcagtgacgtcccctgtactcgt

SEQ ID NO: 3366669 - DNA, 25 bp, Homo sapien
gagacctctgtagcatacgccagcg

SEQ ID NO: 3366670 - DNA, 25 bp, Homo sapien
gagactgaagactaatccctccttg

SEQ ID NO: 3366671 - DNA, 25 bp, Homo sapien
aaatgtaacgtcgacaaccacgaga

SEQ ID NO: 3366672 - DNA, 25 bp, Homo sapien
tacgccagcgtatgtcaggctcaat

SEQ ID NO: 3366673 - DNA, 25 bp, Homo sapien
aacggcgccatccaaactgtcaaag

SEQ ID NO: 3366674 - DNA, 25 bp, Homo sapien
gcatgttccgccattcttacagggt

SEQ ID NO: 3366675 - DNA, 25 bp, Homo sapien
gaatcacactgacaaacggcgccat

SEQ ID NO: 3366676 - DNA, 25 bp, Homo sapien
tctttgcagtatggactaagctgac

SEQ ID NO: 3366677 - DNA, 25 bp, Homo sapien
gcttggaggaacacggattgacgct

SEQ ID NO: 3366678 - DNA, 25 bp, Homo sapien
cactggcaaacaaagcctccgttgt

SEQ ID NO: 3366679 - DNA, 25 bp, Homo sapien
gattgacgcttatctcacagtgggt

SEQ ID NO: 3366680 - DNA, 25 bp, Homo sapien
acagtgggtccctatgtacaaggca

SEQ ID NO: 3366681 - DNA, 25 bp, Homo sapien
cctctcaaacatgtaaagatttaag

SEQ ID NO: 3366682 - DNA, 25 bp, Homo sapien
aacgcccaggctgcctcacttctag

SEQ ID NO: 3366683 - DNA, 25 bp, Homo sapien
tttccctgtaacgcccaggctgcct

SEQ ID NO: 3366684 - DNA, 25 bp, Homo sapien
cagcctctcaaacatgtaaagattt

SEQ ID NO: 3366685 - DNA, 25 bp, Homo sapien
tgagggatgctgctcgcttccaaca

SEQ ID NO: 3366686 - DNA, 25 bp, Homo sapien
tgctgctcgcttccaacactgactg

SEQ ID NO: 3366687 - DNA, 25 bp, Homo sapien
ggatgctgctcgcttccaacactga

SEQ ID NO: 3366688 - DNA, 25 bp, Homo sapien
agggatgctgctcgcttccaacact

SEQ ID NO: 3366689 - DNA, 25 bp, Homo sapien
tgtgcccgatgcagtatgaacttgg

SEQ ID NO: 3366690 - DNA, 25 bp, Homo sapien
tgttccctgctgacggatgtggcca

SEQ ID NO: 3366691 - DNA, 25 bp, Homo sapien
caggtgacggattgcaaacgcctcc

SEQ ID NO: 3366692 - DNA, 25 bp, Homo sapien
tggtctagaaccaagcgagcatagt

SEQ ID NO: 3366693 - DNA, 25 bp, Homo sapien
aagatgctatagtcagttcctcgag

SEQ ID NO: 3366694 - DNA, 25 bp, Homo sapien
gttcctcgagcatacatgacaaccg

SEQ ID NO: 3366695 - DNA, 25 bp, Homo sapien
caaccgcatgcgtggaatatgttct

SEQ ID NO: 3366696 - DNA, 25 bp, Homo sapien
tccgtcagacggtatttcacgtagc

SEQ ID NO: 3366697 - DNA, 25 bp, Homo sapien
tttaaagtatgactcccctgcaccc

SEQ ID NO: 3366698 - DNA, 25 bp, Homo sapien
taaatttgacgactgcatcacagag

SEQ ID NO: 3366699 - DNA, 25 bp, Homo sapien
tatttgcttaatgaaaagcccagca

SEQ ID NO: 3366700 - DNA, 25 bp, Homo sapien
ccaattctgtgggaaaacgtctatt

SEQ ID NO: 3366701 - DNA, 25 bp, Homo sapien
taaactgctacataatggcactgcg

SEQ ID NO: 3366702 - DNA, 25 bp, Homo sapien
taaaggtactggctcggaaccatac

SEQ ID NO: 3366703 - DNA, 25 bp, Homo sapien
taccatactgctaagtggagggaaa

SEQ ID NO: 3366704 - DNA, 25 bp, Homo sapien
tatacaccgtatagaaatgaacgca

SEQ ID NO: 3366705 - DNA, 25 bp, Homo sapien
gatccctcagggcacggatcatctt

SEQ ID NO: 3366706 - DNA, 25 bp, Homo sapien
tcagacacacattcggatccctcag

SEQ ID NO: 3366707 - DNA, 25 bp, Homo sapien
acacattcggatccctcagggcacg

SEQ ID NO: 3366708 - DNA, 25 bp, Homo sapien
cagggatcagacacacattcggatc

SEQ ID NO: 3366709 - DNA, 25 bp, Homo sapien
tgacaccgactttcatacactcatg

SEQ ID NO: 3366710 - DNA, 25 bp, Homo sapien
tcaaaggcttcaaaggccgtctgaa

SEQ ID NO: 3366711 - DNA, 25 bp, Homo sapien
ctttcatgtatagccatcaaaggct

SEQ ID NO: 3366712 - DNA, 25 bp, Homo sapien
tctgaaaccatctgtgacaccgact

SEQ ID NO: 3366713 - DNA, 25 bp, Homo sapien
taaagctcgctggaagttgcgccag

SEQ ID NO: 3366714 - DNA, 25 bp, Homo sapien
aaatcgcaggcggatagatgctctc

SEQ ID NO: 3366715 - DNA, 25 bp, Homo sapien
agtagtcaccaacgaattcttccgg

SEQ ID NO: 3366716 - DNA, 25 bp, Homo sapien
tgtgatgtcggccaccgtcgtgaac

SEQ ID NO: 3366717 - DNA, 25 bp, Homo sapien
gtggaccgttatgggaagaatcctc

SEQ ID NO: 3366718 - DNA, 25 bp, Homo sapien
gaagaatcctcatctgttactacca

SEQ ID NO: 3366719 - DNA, 25 bp, Homo sapien
tacaatagtaaagaagaagggtgga

SEQ ID NO: 3366720 - DNA, 25 bp, Homo sapien
cagcacgctgaagcccactggctta

SEQ ID NO: 3366721 - DNA, 25 bp, Homo sapien
ctgcacaagattagaaacaaaatta

SEQ ID NO: 3366722 - DNA, 25 bp, Homo sapien
tgcacaagattagaaacaaaattaa

SEQ ID NO: 3366723 - DNA, 25 bp, Homo sapien
gcacaagattagaaacaaaattaaa

SEQ ID NO: 3366724 - DNA, 25 bp, Homo sapien
tcgtgttgactctgggtggactgcc

SEQ ID NO: 3366725 - DNA, 25 bp, Homo sapien
gaagcttgaaccgtgagcgtgtaac

SEQ ID NO: 3366726 - DNA, 25 bp, Homo sapien
ggactgccattatcagaagcttgaa

SEQ ID NO: 3366727 - DNA, 25 bp, Homo sapien
gacacatcgatgttcacggtcgtcg

SEQ ID NO: 3366728 - DNA, 25 bp, Homo sapien
ggcaaaagacagaatgcacgttcat

SEQ ID NO: 3366729 - DNA, 25 bp, Homo sapien
ttcaggcaaaagacagaatgcacgt

SEQ ID NO: 3366730 - DNA, 25 bp, Homo sapien
tttcacaaggccgacagagctccaa

SEQ ID NO: 3366731 - DNA, 25 bp, Homo sapien
aatgaggagtgtcctcctgagagtc

SEQ ID NO: 3366732 - DNA, 25 bp, Homo sapien
ccagcagacaagagcacaaggcatt

SEQ ID NO: 3366733 - DNA, 25 bp, Homo sapien
cctgtgtccatgcaattcctcgctg

SEQ ID NO: 3366734 - DNA, 25 bp, Homo sapien
gcttctatctgcatgcctgtgtcca

SEQ ID NO: 3366735 - DNA, 25 bp, Homo sapien
cgtcagttcttgaggcggtcagtcc

SEQ ID NO: 3366736 - DNA, 25 bp, Homo sapien
tgaacgagcttccttggttgccatc

SEQ ID NO: 3366737 - DNA, 25 bp, Homo sapien
tcactttgacttctcccctgacggg

SEQ ID NO: 3366738 - DNA, 25 bp, Homo sapien
tggaaggtccatcggcatcatcggc

SEQ ID NO: 3366739 - DNA, 25 bp, Homo sapien
ttctcggtcgagaagtttggtcact

SEQ ID NO: 3366740 - DNA, 25 bp, Homo sapien
caagaacggcatcttcactgatgac

SEQ ID NO: 3366741 - DNA, 25 bp, Homo sapien
actgtcgtgtaggtgtcttggctga

SEQ ID NO: 3366742 - DNA, 25 bp, Homo sapien
gtcgctcagtgaaggcgtgcctcca

SEQ ID NO: 3366743 - DNA, 25 bp, Homo sapien
gttcacagtggcaacgtcgctcagt

SEQ ID NO: 3366744 - DNA, 25 bp, Homo sapien
atcaaaattacttccagcattctgc

SEQ ID NO: 3366745 - DNA, 25 bp, Homo sapien
ctttcaaagagagggtgtatactgc

SEQ ID NO: 3366746 - DNA, 25 bp, Homo sapien
aagaatgtcctcagacacggtggca

SEQ ID NO: 3366747 - DNA, 25 bp, Homo sapien
atattcacggtactcaaacacaggg

SEQ ID NO: 3366748 - DNA, 25 bp, Homo sapien
taattcgttaatggagaactgccca

SEQ ID NO: 3366749 - DNA, 25 bp, Homo sapien
cataaggatcggcagagaattcggg

SEQ ID NO: 3366750 - DNA, 25 bp, Homo sapien
tcttctagcgtgagcacaatactgg

SEQ ID NO: 3366751 - DNA, 25 bp, Homo sapien
tggccctgacgagaagatgataaac

SEQ ID NO: 3366752 - DNA, 25 bp, Homo sapien
caaacacggtgatggcataaggatc

SEQ ID NO: 3366753 - DNA, 25 bp, Homo sapien
taagtaatttcagcgttagagcgga

SEQ ID NO: 3366754 - DNA, 25 bp, Homo sapien
tagagcggatgtctgcgtctgtagc

SEQ ID NO: 3366755 - DNA, 25 bp, Homo sapien
tctgcacctgaacccaataacgtgt

SEQ ID NO: 3366756 - DNA, 25 bp, Homo sapien
attttccaggaaggacgtcttcagg

SEQ ID NO: 3366757 - DNA, 25 bp, Homo sapien
gagaaggtgccatcagttgccgtga

SEQ ID NO: 3366758 - DNA, 25 bp, Homo sapien
cattctgtatagtttcaacggcaaa

SEQ ID NO: 3366759 - DNA, 25 bp, Homo sapien
cgtgatagtaagaaggtaattgtcc

SEQ ID NO: 3366760 - DNA, 25 bp, Homo sapien
caacggcaaactgtcctaaaggatc

SEQ ID NO: 3366761 - DNA, 25 bp, Homo sapien
cgataacttccgctgaaaaggccgg

SEQ ID NO: 3366762 - DNA, 25 bp, Homo sapien
aaaaatcgtgtgctgccgggactgc

SEQ ID NO: 3366763 - DNA, 25 bp, Homo sapien
tatggactagattcaaagaccgggc

SEQ ID NO: 3366764 - DNA, 25 bp, Homo sapien
tatcattgaggtcggtaacgtccac

SEQ ID NO: 3366765 - DNA, 25 bp, Homo sapien
cactacttgtcggaagagggtgctc

SEQ ID NO: 3366766 - DNA, 25 bp, Homo sapien
ttttttagagaccagatccagcctg

SEQ ID NO: 3366767 - DNA, 25 bp, Homo sapien
ggataaatgtgtgtaacccacccca

SEQ ID NO: 3366768 - DNA, 25 bp, Homo sapien
aatcagggtggcgttgcaggttctc

SEQ ID NO: 3366769 - DNA, 25 bp, Homo sapien
agggaccaacatggcacctggcaca

SEQ ID NO: 3366770 - DNA, 25 bp, Homo sapien
ggaccaacatggcacctggcacata

SEQ ID NO: 3366771 - DNA, 25 bp, Homo sapien
atgagggaccaacatggcacctggc

SEQ ID NO: 3366772 - DNA, 25 bp, Homo sapien
gaccaacatggcacctggcacataa

SEQ ID NO: 3366773 - DNA, 25 bp, Homo sapien
gaccaacatggcacctggcacataa

SEQ ID NO: 3366774 - DNA, 25 bp, Homo sapien
tgagggaccaacatggcacctggca

SEQ ID NO: 3366775 - DNA, 25 bp, Homo sapien
ggaccaacatggcacctggcacata

SEQ ID NO: 3366776 - DNA, 25 bp, Homo sapien
atgagggaccaacatggcacctggc

SEQ ID NO: 3366777 - DNA, 25 bp, Homo sapien
tgcaaagttgcgttttacaggcaca

SEQ ID NO: 3366778 - DNA, 25 bp, Homo sapien
tgccgattcataaacccgccctttg

SEQ ID NO: 3366779 - DNA, 25 bp, Homo sapien
gactcgatcgagtacagcacttcag

SEQ ID NO: 3366780 - DNA, 25 bp, Homo sapien
ctttgtaggaggaagcggtgaacca

SEQ ID NO: 3366781 - DNA, 25 bp, Homo sapien
ggaccaaatggtgggaggagagcgg

SEQ ID NO: 3366782 - DNA, 25 bp, Homo sapien
caggaccaaatggtgggaggagagc

SEQ ID NO: 3366783 - DNA, 25 bp, Homo sapien
ctcaggaccaaatggtgggaggaga

SEQ ID NO: 3366784 - DNA, 25 bp, Homo sapien
tcaggaccaaatggtgggaggagag

SEQ ID NO: 3366785 - DNA, 25 bp, Homo sapien
tgtttctggcgctgtatcttcagga

SEQ ID NO: 3366786 - DNA, 25 bp, Homo sapien
agtggatctctactgctctgcagag

SEQ ID NO: 3366787 - DNA, 25 bp, Homo sapien
ctttgatgtagaaaactgaggacga

SEQ ID NO: 3366788 - DNA, 25 bp, Homo sapien
cagaagtatagagagagccggttgc

SEQ ID NO: 3366789 - DNA, 25 bp, Homo sapien
ggatagtggtggttccatctgtagc

SEQ ID NO: 3366790 - DNA, 25 bp, Homo sapien
gaggtttggcaacaatgatggttcc

SEQ ID NO: 3366791 - DNA, 25 bp, Homo sapien
tggcaacaatgatggttccagttcc

SEQ ID NO: 3366792 - DNA, 25 bp, Homo sapien
gactgtgaggttgtagtttgacttc

SEQ ID NO: 3366793 - DNA, 25 bp, Homo sapien
tctcttttcaaatccatcgacctag

SEQ ID NO: 3366794 - DNA, 25 bp, Homo sapien
taatgtcatgatgaaattctactac

SEQ ID NO: 3366795 - DNA, 25 bp, Homo sapien
cacacgacgtcttaagagaaaccta

SEQ ID NO: 3366796 - DNA, 25 bp, Homo sapien
taaaaccacggagctaggtgagcat

SEQ ID NO: 3366797 - DNA, 25 bp, Homo sapien
agtgggatgggtgaccatgcgcaca

SEQ ID NO: 3366798 - DNA, 25 bp, Homo sapien
gtggcaacacgctggcgagtgggat

SEQ ID NO: 3366799 - DNA, 25 bp, Homo sapien
caacacgctggcgagtgggatgggt

SEQ ID NO: 3366800 - DNA, 25 bp, Homo sapien
gctggcgagtgggatgggtgaccat

SEQ ID NO: 3366801 - DNA, 25 bp, Homo sapien
aatctgaggcaaattatgtgatctc

SEQ ID NO: 3366802 - DNA, 25 bp, Homo sapien
cagcgatggaagatagtcactggaa

SEQ ID NO: 3366803 - DNA, 25 bp, Homo sapien
aaaaaacagcgatggaagatagtca

SEQ ID NO: 3366804 - DNA, 25 bp, Homo sapien
tattttagatctcataatctgaggc

SEQ ID NO: 3366805 - DNA, 25 bp, Homo sapien
cttctgctgtacaggtcgggtcaca

SEQ ID NO: 3366806 - DNA, 25 bp, Homo sapien
tctgctgtacaggtcgggtcacaag

SEQ ID NO: 3366807 - DNA, 25 bp, Homo sapien
ctgtacaggtcgggtcacaagtcat

SEQ ID NO: 3366808 - DNA, 25 bp, Homo sapien
tgctgtacaggtcgggtcacaagtc

SEQ ID NO: 3366809 - DNA, 25 bp, Homo sapien
aaaacttctctagcaagcgtgtctc

SEQ ID NO: 3366810 - DNA, 25 bp, Homo sapien
ctgaaagatgtaaaaaacttctcta

SEQ ID NO: 3366811 - DNA, 25 bp, Homo sapien
tgtaaaaaacttctctagcaagcgt

SEQ ID NO: 3366812 - DNA, 25 bp, Homo sapien
gaaagatgtaaaaaacttctctagc

SEQ ID NO: 3366813 - DNA, 25 bp, Homo sapien
taagggtttcacaggtgctgatgac

SEQ ID NO: 3366814 - DNA, 25 bp, Homo sapien
gggtccatcagctgcaacttttggg

SEQ ID NO: 3366815 - DNA, 25 bp, Homo sapien
gcatgaaagttccaaaggtaaggcc

SEQ ID NO: 3366816 - DNA, 25 bp, Homo sapien
gagatgaatcgcaacagagactctt

SEQ ID NO: 3366817 - DNA, 25 bp, Homo sapien
tcagtgtaacccatacggacaacga

SEQ ID NO: 3366818 - DNA, 25 bp, Homo sapien
actcatcaaaccgtatgcaggttct

SEQ ID NO: 3366819 - DNA, 25 bp, Homo sapien
cccatacggacaacgaaaatgaggg

SEQ ID NO: 3366820 - DNA, 25 bp, Homo sapien
tatgcaggttctcctcagtgtaacc

SEQ ID NO: 3366821 - DNA, 25 bp, Homo sapien
gatccattcaatatggagtctggtg

SEQ ID NO: 3366822 - DNA, 25 bp, Homo sapien
gcaacggggtcactttccatcacag

SEQ ID NO: 3366823 - DNA, 25 bp, Homo sapien
gagtctggtggttgatgacttttga

SEQ ID NO: 3366824 - DNA, 25 bp, Homo sapien
ttactccaatcatgtgagcaacggg

SEQ ID NO: 3366825 - DNA, 25 bp, Homo sapien
tgtagaacttttgcagaaactgagg

SEQ ID NO: 3366826 - DNA, 25 bp, Homo sapien
cggtctggcttttcccgctcaggga

SEQ ID NO: 3366827 - DNA, 25 bp, Homo sapien
gctatgacgtgatagagcggctccc

SEQ ID NO: 3366828 - DNA, 25 bp, Homo sapien
gctcattcccgtcttcgatgctgta

SEQ ID NO: 3366829 - DNA, 25 bp, Homo sapien
tcttcccaactgaattaccaaaaca

SEQ ID NO: 3366830 - DNA, 25 bp, Homo sapien
tcggtctagcttccttgacgtagtt

SEQ ID NO: 3366831 - DNA, 25 bp, Homo sapien
tgttctcggtctagcttccttgacg

SEQ ID NO: 3366832 - DNA, 25 bp, Homo sapien
atcttgctgttctcggtctagcttc

SEQ ID NO: 3366833 - DNA, 25 bp, Homo sapien
gctgttctcggtctagcttccttga

SEQ ID NO: 3366834 - DNA, 25 bp, Homo sapien
cactagtctcttttgtttgggactc

SEQ ID NO: 3366835 - DNA, 25 bp, Homo sapien
caaggctccaatctgagttctatgc

SEQ ID NO: 3366836 - DNA, 25 bp, Homo sapien
ggctccaatctgagttctatgctcc

SEQ ID NO: 3366837 - DNA, 25 bp, Homo sapien
aaggctccaatctgagttctatgct

SEQ ID NO: 3366838 - DNA, 25 bp, Homo sapien
taaaggttgtaagaagacgaggcat

SEQ ID NO: 3366839 - DNA, 25 bp, Homo sapien
aagacgaggcatgtgtacttcaggc

SEQ ID NO: 3366840 - DNA, 25 bp, Homo sapien
tactgacctacctgggaacagtctg

SEQ ID NO: 3366841 - DNA, 25 bp, Homo sapien
gccttcacaatcaggccgccatgat

SEQ ID NO: 3366842 - DNA, 25 bp, Homo sapien
caataatgggaggtcgattcacggt

SEQ ID NO: 3366843 - DNA, 25 bp, Homo sapien
gattcacggtccagtcgatctgacg

SEQ ID NO: 3366844 - DNA, 25 bp, Homo sapien
tgaacgatgaaagaggcacgacacc

SEQ ID NO: 3366845 - DNA, 25 bp, Homo sapien
ccctgatcggttgcaaagactgtta

SEQ ID NO: 3366846 - DNA, 25 bp, Homo sapien
agcaatatccttgtcagtcctacgg

SEQ ID NO: 3366847 - DNA, 25 bp, Homo sapien
tcttcagcgccagcaatatccttgt

SEQ ID NO: 3366848 - DNA, 25 bp, Homo sapien
tcagcgccagcaatatccttgtcag

SEQ ID NO: 3366849 - DNA, 25 bp, Homo sapien
aatctcatcttcagcgccagcaata

SEQ ID NO: 3366850 - DNA, 25 bp, Homo sapien
tccctcctgtcttcggcatctcctc

SEQ ID NO: 3366851 - DNA, 25 bp, Homo sapien
ctttttgggcacctatgtatatcca

SEQ ID NO: 3366852 - DNA, 25 bp, Homo sapien
ttgggcacctatgtatatccacccc

SEQ ID NO: 3366853 - DNA, 25 bp, Homo sapien
aaactcttctctgcggtctccctcc

SEQ ID NO: 3366854 - DNA, 25 bp, Homo sapien
catgcggccagaaggtgcctgcgcc

SEQ ID NO: 3366855 - DNA, 25 bp, Homo sapien
agcatgcggccagaaggtgcctgcg

SEQ ID NO: 3366856 - DNA, 25 bp, Homo sapien
tgcggccagaaggtgcctgcgccca

SEQ ID NO: 3366857 - DNA, 25 bp, Homo sapien
caaacacagcatgcggccagaaggt

SEQ ID NO: 3366858 - DNA, 25 bp, Homo sapien
cacacgcagtgagagcggtcgtgat

SEQ ID NO: 3366859 - DNA, 25 bp, Homo sapien
cgtcaggaggttgccgtgcacacgc

SEQ ID NO: 3366860 - DNA, 25 bp, Homo sapien
gacagggaaactctgtcgccactcc

SEQ ID NO: 3366861 - DNA, 25 bp, Homo sapien
cagatgccgggagcaacagagccgt

SEQ ID NO: 3366862 - DNA, 25 bp, Homo sapien
tcacggctttacctgaatgaagcat

SEQ ID NO: 3366863 - DNA, 25 bp, Homo sapien
gaaatcacggctttacctgaatgaa

SEQ ID NO: 3366864 - DNA, 25 bp, Homo sapien
tcagcagtgccatcagaaatcacgg

SEQ ID NO: 3366865 - DNA, 25 bp, Homo sapien
ccatcagaaatcacggctttacctg

SEQ ID NO: 3366866 - DNA, 25 bp, Homo sapien
ggatgctttagaagggccaggacag

SEQ ID NO: 3366867 - DNA, 25 bp, Homo sapien
gctctcgtaggagacgtaggaccat

SEQ ID NO: 3366868 - DNA, 25 bp, Homo sapien
agtgcttccgtgctggaccctggga

SEQ ID NO: 3366869 - DNA, 25 bp, Homo sapien
gggctgaaggtactcttgcagattt

SEQ ID NO: 3366870 - DNA, 25 bp, Homo sapien
catccttgataatgtgttctcagat

SEQ ID NO: 3366871 - DNA, 25 bp, Homo sapien
tgtttggatccaatcactacactgc

SEQ ID NO: 3366872 - DNA, 25 bp, Homo sapien
tgaaacagtctatctgtttggatcc

SEQ ID NO: 3366873 - DNA, 25 bp, Homo sapien
atgtgttctcagatgatcccatgaa

SEQ ID NO: 3366874 - DNA, 25 bp, Homo sapien
gagggctgcatgaaacctaaagata

SEQ ID NO: 3366875 - DNA, 25 bp, Homo sapien
tattctctcctcatttcggtgtcta

SEQ ID NO: 3366876 - DNA, 25 bp, Homo sapien
taaagataccaaatcaacactccta

SEQ ID NO: 3366877 - DNA, 25 bp, Homo sapien
gaaacctaaagataccaaatcaaca

SEQ ID NO: 3366878 - DNA, 25 bp, Homo sapien
tgagacagagtaatgtcaagcagcc

SEQ ID NO: 3366879 - DNA, 25 bp, Homo sapien
tgtgataagaggaacacggacgtct

SEQ ID NO: 3366880 - DNA, 25 bp, Homo sapien
tgagcaggcagctactcggtaccag

SEQ ID NO: 3366881 - DNA, 25 bp, Homo sapien
tcagctgggcaacaaatcgaaagaa

SEQ ID NO: 3366882 - DNA, 25 bp, Homo sapien
tttgtgaggactgacaaccctggaa

SEQ ID NO: 3366883 - DNA, 25 bp, Homo sapien
ccgctggtcctcctttatgagaatt

SEQ ID NO: 3366884 - DNA, 25 bp, Homo sapien
cagaggatctcaaaaccaggattcc

SEQ ID NO: 3366885 - DNA, 25 bp, Homo sapien
cacaggttcggcacttcactgagcc

SEQ ID NO: 3366886 - DNA, 25 bp, Homo sapien
caggcatgtgcccttgaacggcaat

SEQ ID NO: 3366887 - DNA, 25 bp, Homo sapien
aactgccaattcaacaagtacaggc

SEQ ID NO: 3366888 - DNA, 25 bp, Homo sapien
ccaattcaacaagtacaggcatgtg

SEQ ID NO: 3366889 - DNA, 25 bp, Homo sapien
gaacggcaatctttccaagtccatt

SEQ ID NO: 3366890 - DNA, 25 bp, Homo sapien
ctggattcacccacgccttcgctgg

SEQ ID NO: 3366891 - DNA, 25 bp, Homo sapien
cacgccttcgctggcctgatcttga

SEQ ID NO: 3366892 - DNA, 25 bp, Homo sapien
gactgccaccgcgacggaattcaaa

SEQ ID NO: 3366893 - DNA, 25 bp, Homo sapien
cgcgacggaattcaaactcctgtcc

SEQ ID NO: 3366894 - DNA, 25 bp, Homo sapien
tgacgtaagctgtttccaccccaca

SEQ ID NO: 3366895 - DNA, 25 bp, Homo sapien
gccggcctgtctgacgtaagctgtt

SEQ ID NO: 3366896 - DNA, 25 bp, Homo sapien
gacaaagccggcctgtctgacgtaa

SEQ ID NO: 3366897 - DNA, 25 bp, Homo sapien
tgtctgacgtaagctgtttccaccc

SEQ ID NO: 3366898 - DNA, 25 bp, Homo sapien
caggagccggcctccacacaggtga

SEQ ID NO: 3366899 - DNA, 25 bp, Homo sapien
acacaggtgacacagggatggtgct

SEQ ID NO: 3366900 - DNA, 25 bp, Homo sapien
acatgaggccaggagccggcctcca

SEQ ID NO: 3366901 - DNA, 25 bp, Homo sapien
ggtgacacagggatggtgctccaac

SEQ ID NO: 3366902 - DNA, 25 bp, Homo sapien
taattagcgcaatattaaatgcccc

SEQ ID NO: 3366903 - DNA, 25 bp, Homo sapien
gttaggcaaagaagaccctggtgga

SEQ ID NO: 3366904 - DNA, 25 bp, Homo sapien
gcacaggctcatattaattagcgca

SEQ ID NO: 3366905 - DNA, 25 bp, Homo sapien
gcaatgggcaaggagcgaagttcca

SEQ ID NO: 3366906 - DNA, 25 bp, Homo sapien
agcccccacgggtgttcctcaactg

SEQ ID NO: 3366907 - DNA, 25 bp, Homo sapien
tccatctcttcacctgacacgcatc

SEQ ID NO: 3366908 - DNA, 25 bp, Homo sapien
gggtgttcctcaactgcccctccat

SEQ ID NO: 3366909 - DNA, 25 bp, Homo sapien
gacacgcatctttccacacttcctt

SEQ ID NO: 3366910 - DNA, 25 bp, Homo sapien
caatatctgcgcagcaagactgagg

SEQ ID NO: 3366911 - DNA, 25 bp, Homo sapien
tctcagagggcaggacatgaaaagc

SEQ ID NO: 3366912 - DNA, 25 bp, Homo sapien
caattaccaactagaagagccagga

SEQ ID NO: 3366913 - DNA, 25 bp, Homo sapien
caggtcttctcagttcagcatgcca

SEQ ID NO: 3366914 - DNA, 25 bp, Homo sapien
caaatgagagcaataaaaacatatt

SEQ ID NO: 3366915 - DNA, 25 bp, Homo sapien
atgagagcaataaaaacatatttac

SEQ ID NO: 3366916 - DNA, 25 bp, Homo sapien
tcaaatgagagcaataaaaacatat

SEQ ID NO: 3366917 - DNA, 25 bp, Homo sapien
aatgagagcaataaaaacatattta

SEQ ID NO: 3366918 - DNA, 25 bp, Homo sapien
gtctcttcacctattttgaaaacac

SEQ ID NO: 3366919 - DNA, 25 bp, Homo sapien
tgtctcttcacctattttgaaaaca

SEQ ID NO: 3366920 - DNA, 25 bp, Homo sapien
ctgtctcttcacctattttgaaaac

SEQ ID NO: 3366921 - DNA, 25 bp, Homo sapien
gaagtttccttctccgtggtccaga

SEQ ID NO: 3366922 - DNA, 25 bp, Homo sapien
caggttttctgacgtactcacggca

SEQ ID NO: 3366923 - DNA, 25 bp, Homo sapien
tagctctcctgtaaaaactcgggtg

SEQ ID NO: 3366924 - DNA, 25 bp, Homo sapien
cagagggcgtgcgatgttaacaaca

SEQ ID NO: 3366925 - DNA, 25 bp, Homo sapien
cccgaagtggcgacggcgctctcgt

SEQ ID NO: 3366926 - DNA, 25 bp, Homo sapien
agttggcccgaagtggcgacggcgc

SEQ ID NO: 3366927 - DNA, 25 bp, Homo sapien
tggcgacggcgctctcgtggagctc

SEQ ID NO: 3366928 - DNA, 25 bp, Homo sapien
gtggcgacggcgctctcgtggagct

SEQ ID NO: 3366929 - DNA, 25 bp, Homo sapien
ccgagcagggaccgggcctgccggg

SEQ ID NO: 3366930 - DNA, 25 bp, Homo sapien
ccccgagcagggaccgggcctgccg

SEQ ID NO: 3366931 - DNA, 25 bp, Homo sapien
cccgagcagggaccgggcctgccgg

SEQ ID NO: 3366932 - DNA, 25 bp, Homo sapien
acctgccgcacgagccgctcccgcg

SEQ ID NO: 3366933 - DNA, 25 bp, Homo sapien
ctgccgcacgagccgctcccgcgcc

SEQ ID NO: 3366934 - DNA, 25 bp, Homo sapien
ggtacctgccgcacgagccgctccc

SEQ ID NO: 3366935 - DNA, 25 bp, Homo sapien
gtacctgccgcacgagccgctcccg

SEQ ID NO: 3366936 - DNA, 25 bp, Homo sapien
tcagcatgtccctaaccagagtgcc

SEQ ID NO: 3366937 - DNA, 25 bp, Homo sapien
tgcctccccgggatcttcagcatgt

SEQ ID NO: 3366938 - DNA, 25 bp, Homo sapien
tgggctctaaagtcctcggcagctc

SEQ ID NO: 3366939 - DNA, 25 bp, Homo sapien
gatcccctcgcggtgtagatatgtg

SEQ ID NO: 3366940 - DNA, 25 bp, Homo sapien
cagccagccgccgagttgaggagtt

SEQ ID NO: 3366941 - DNA, 25 bp, Homo sapien
caagtttgtcaggacgtgcccaggc

SEQ ID NO: 3366942 - DNA, 25 bp, Homo sapien
ccaaacgcaggcgaaaagagagtgc

SEQ ID NO: 3366943 - DNA, 25 bp, Homo sapien
ttccgaccagggcaaacttaagcac

SEQ ID NO: 3366944 - DNA, 25 bp, Homo sapien
ctaagtaggcttgactgactcctgg

SEQ ID NO: 3366945 - DNA, 25 bp, Homo sapien
tctgcctgtgtgcccattgcggcct

SEQ ID NO: 3366946 - DNA, 25 bp, Homo sapien
tgtgtgcccattgcggcctcccctt

SEQ ID NO: 3366947 - DNA, 25 bp, Homo sapien
agtaggcttgactgactcctggcat

SEQ ID NO: 3366948 - DNA, 25 bp, Homo sapien
tttcgagtcgaaaagtgaagtcagc

SEQ ID NO: 3366949 - DNA, 25 bp, Homo sapien
taaatagtcagctggaaacaccgac

SEQ ID NO: 3366950 - DNA, 25 bp, Homo sapien
tgtacctgtaactgtcaatatcaaa

SEQ ID NO: 3366951 - DNA, 25 bp, Homo sapien
tgtcagcaaatctatgaacatttgg

SEQ ID NO: 3366952 - DNA, 25 bp, Homo sapien
ttattttaggctcagatctgactct

SEQ ID NO: 3366953 - DNA, 25 bp, Homo sapien
ttttaggctcagatctgactcttgc

SEQ ID NO: 3366954 - DNA, 25 bp, Homo sapien
tcccgtcttcggtaccatggtgtgg

SEQ ID NO: 3366955 - DNA, 25 bp, Homo sapien
tatgaatagaatagctgcaacctca

SEQ ID NO: 3366956 - DNA, 25 bp, Homo sapien
catccacgtgcaagttaagtaagct

SEQ ID NO: 3366957 - DNA, 25 bp, Homo sapien
agtagagcagctgtgtcccgtcttc

SEQ ID NO: 3366958 - DNA, 25 bp, Homo sapien
ggccttgttgagctgaaacatttga

SEQ ID NO: 3366959 - DNA, 25 bp, Homo sapien
agaaataggaaccacctcacaggcc

SEQ ID NO: 3366960 - DNA, 25 bp, Homo sapien
ggagaaataggaaccacctcacagg

SEQ ID NO: 3366961 - DNA, 25 bp, Homo sapien
ccttgttgagctgaaacatttgagt

SEQ ID NO: 3366962 - DNA, 25 bp, Homo sapien
cagctccgcgtcatctgtgattctg

SEQ ID NO: 3366963 - DNA, 25 bp, Homo sapien
cttccgggccgcttgcttttcatct

SEQ ID NO: 3366964 - DNA, 25 bp, Homo sapien
gtgggactcgcccagagacgccttc

SEQ ID NO: 3366965 - DNA, 25 bp, Homo sapien
gattctgtagcttcggggatcctct

SEQ ID NO: 3366966 - DNA, 25 bp, Homo sapien
cttctacctgtccaaaagtcctttg

SEQ ID NO: 3366967 - DNA, 25 bp, Homo sapien
ttctacctgtccaaaagtcctttga

SEQ ID NO: 3366968 - DNA, 25 bp, Homo sapien
tctacctgtccaaaagtcctttgaa

SEQ ID NO: 3366969 - DNA, 25 bp, Homo sapien
ctacctgtccaaaagtcctttgaag

SEQ ID NO: 3366970 - DNA, 25 bp, Homo sapien
tagaagggtctatggacctggacat

SEQ ID NO: 3366971 - DNA, 25 bp, Homo sapien
tgtagcagtagaagggtctatggac

SEQ ID NO: 3366972 - DNA, 25 bp, Homo sapien
cagtagaagggtctatggacctgga

SEQ ID NO: 3366973 - DNA, 25 bp, Homo sapien
tatgtttcaagtaggagtgtagcag

SEQ ID NO: 3366974 - DNA, 25 bp, Homo sapien
tggcgaatagtgctatcatgttctt

SEQ ID NO: 3366975 - DNA, 25 bp, Homo sapien
cgaatagtgctatcatgttctttac

SEQ ID NO: 3366976 - DNA, 25 bp, Homo sapien
cacattggcgaatagtgctatcatg

SEQ ID NO: 3366977 - DNA, 25 bp, Homo sapien
aagcacattggcgaatagtgctatc

SEQ ID NO: 3366978 - DNA, 25 bp, Homo sapien
taagtgaacaatgcgaagcccagaa

SEQ ID NO: 3366979 - DNA, 25 bp, Homo sapien
aagacgtacacagagagaccaccaa

SEQ ID NO: 3366980 - DNA, 25 bp, Homo sapien
ccagaaacgtgacgtcaatgaagta

SEQ ID NO: 3366981 - DNA, 25 bp, Homo sapien
acatgactcagggtccaggaacaat

SEQ ID NO: 3366982 - DNA, 25 bp, Homo sapien
ttttgttctacttctttgaccattc

SEQ ID NO: 3366983 - DNA, 25 bp, Homo sapien
ttcttactccacatatctgtggagc

SEQ ID NO: 3366984 - DNA, 25 bp, Homo sapien
ggaaattgcgttcttctcacccaca

SEQ ID NO: 3366985 - DNA, 25 bp, Homo sapien
tactccacatatctgtggagcaggc

SEQ ID NO: 3366986 - DNA, 25 bp, Homo sapien
catccccgaaatggaaattgcgttc

SEQ ID NO: 3366987 - DNA, 25 bp, Homo sapien
tgggcttttgccatattcctctcat

SEQ ID NO: 3366988 - DNA, 25 bp, Homo sapien
tttctcccactaacacttccaggca

SEQ ID NO: 3366989 - DNA, 25 bp, Homo sapien
tcctgggcttttgccatattcctct

SEQ ID NO: 3366990 - DNA, 25 bp, Homo sapien
actaacacttccaggcaggtcttca

SEQ ID NO: 3366991 - DNA, 25 bp, Homo sapien
cagggagacggttgttcctcttcct

SEQ ID NO: 3366992 - DNA, 25 bp, Homo sapien
ggagcagggagacggttgttcctct

SEQ ID NO: 3366993 - DNA, 25 bp, Homo sapien
tcttcctcagcagttctagaggaaa

SEQ ID NO: 3366994 - DNA, 25 bp, Homo sapien
cctcttcctcagcagttctagagga

SEQ ID NO: 3366995 - DNA, 25 bp, Homo sapien
ccatcagggacaaagcacaagaaag

SEQ ID NO: 3366996 - DNA, 25 bp, Homo sapien
ttttctgagagtttgcttctctgca

SEQ ID NO: 3366997 - DNA, 25 bp, Homo sapien
tctgagagtttgcttctctgcaatc

SEQ ID NO: 3366998 - DNA, 25 bp, Homo sapien
caaccatcagggacaaagcacaaga

SEQ ID NO: 3366999 - DNA, 25 bp, Homo sapien
tcaggttaagatctggatatgacag

SEQ ID NO: 3367000 - DNA, 25 bp, Homo sapien
aatcccaaccagctccaattctttt

SEQ ID NO: 3367001 - DNA, 25 bp, Homo sapien
aaatcccaaccagctccaattcttt

SEQ ID NO: 3367002 - DNA, 25 bp, Homo sapien
gaaatcccaaccagctccaattctt

SEQ ID NO: 3367003 - DNA, 25 bp, Homo sapien
gagtccagatttgcatgacgatgtg

SEQ ID NO: 3367004 - DNA, 25 bp, Homo sapien
aaatgtgagtccagatttgcatgac

SEQ ID NO: 3367005 - DNA, 25 bp, Homo sapien
tccagatttgcatgacgatgtgtct

SEQ ID NO: 3367006 - DNA, 25 bp, Homo sapien
tgtgagtccagatttgcatgacgat

SEQ ID NO: 3367007 - DNA, 25 bp, Homo sapien
tgaagtttataatccatgttttgcc

SEQ ID NO: 3367008 - DNA, 25 bp, Homo sapien
agggccacacacagacggcgttcat

SEQ ID NO: 3367009 - DNA, 25 bp, Homo sapien
cacagacggcgttcatgtatgacag

SEQ ID NO: 3367010 - DNA, 25 bp, Homo sapien
tatgacagtgtcttttacggagtgg

SEQ ID NO: 3367011 - DNA, 25 bp, Homo sapien
ctgctgtctctcgaccccgctccat

SEQ ID NO: 3367012 - DNA, 25 bp, Homo sapien
tctcctactgctgtctctcgacccc

SEQ ID NO: 3367013 - DNA, 25 bp, Homo sapien
tcctactgctgtctctcgaccccgc

SEQ ID NO: 3367014 - DNA, 25 bp, Homo sapien
ctactgctgtctctcgaccccgctc

SEQ ID NO: 3367015 - DNA, 25 bp, Homo sapien
ttcatatccttcacctacttgttga

SEQ ID NO: 3367016 - DNA, 25 bp, Homo sapien
tgttcatatccttcacctacttgtt

SEQ ID NO: 3367017 - DNA, 25 bp, Homo sapien
catatccttcacctacttgttgatg

SEQ ID NO: 3367018 - DNA, 25 bp, Homo sapien
atccttcacctacttgttgatgggg

SEQ ID NO: 3367019 - DNA, 25 bp, Homo sapien
ccgattgtgtagacaccacagcaaa

SEQ ID NO: 3367020 - DNA, 25 bp, Homo sapien
gcttctctgttaagtcctccgtcag

SEQ ID NO: 3367021 - DNA, 25 bp, Homo sapien
ggagcacttatgagggctcagcgtt

SEQ ID NO: 3367022 - DNA, 25 bp, Homo sapien
ggaagagaaagtgcccgattgtgta

SEQ ID NO: 3367023 - DNA, 25 bp, Homo sapien
ccagatgacggaagcactaatgtga

SEQ ID NO: 3367024 - DNA, 25 bp, Homo sapien
tatttgggttgaatgatagcaccag

SEQ ID NO: 3367025 - DNA, 25 bp, Homo sapien
taatgtgattccatgcaggcagaac

SEQ ID NO: 3367026 - DNA, 25 bp, Homo sapien
ctataattaatgaggaatctggtgc

SEQ ID NO: 3367027 - DNA, 25 bp, Homo sapien
tagcttacttaaatgtgcacagaac

SEQ ID NO: 3367028 - DNA, 25 bp, Homo sapien
ggactatctgtatgtcccgataaca

SEQ ID NO: 3367029 - DNA, 25 bp, Homo sapien
gctttctcaccattcgaaaagttga

SEQ ID NO: 3367030 - DNA, 25 bp, Homo sapien
tatggaacattatcgcttagcttac

SEQ ID NO: 3367031 - DNA, 25 bp, Homo sapien
tgattgatacattaagagtttgctc

SEQ ID NO: 3367032 - DNA, 25 bp, Homo sapien
cagtacttggacagtaaaagcagga

SEQ ID NO: 3367033 - DNA, 25 bp, Homo sapien
ggatgttgacagcagctattgaaaa

SEQ ID NO: 3367034 - DNA, 25 bp, Homo sapien
taagagtttgctcaatctgcagtac

SEQ ID NO: 3367035 - DNA, 25 bp, Homo sapien
taatccgctttggtatcatggtccc

SEQ ID NO: 3367036 - DNA, 25 bp, Homo sapien
tgaatttctggagcacgcagcaaga

SEQ ID NO: 3367037 - DNA, 25 bp, Homo sapien
tgtgaccaaatacagcacaggattc

SEQ ID NO: 3367038 - DNA, 25 bp, Homo sapien
caagatcatgattttgaaagccagg

SEQ ID NO: 3367039 - DNA, 25 bp, Homo sapien
tgaaatgttgttgtcttcacagttc

SEQ ID NO: 3367040 - DNA, 25 bp, Homo sapien
tctgttctaggtgctccttttagcc

SEQ ID NO: 3367041 - DNA, 25 bp, Homo sapien
taggtgctccttttagcctcttgta

SEQ ID NO: 3367042 - DNA, 25 bp, Homo sapien
tgctcttctgttctaggtgctcctt

SEQ ID NO: 3367043 - DNA, 25 bp, Homo sapien
gcaaatgaacttccagctttagatg

SEQ ID NO: 3367044 - DNA, 25 bp, Homo sapien
tgctctaaacaacgctggcaaatga

SEQ ID NO: 3367045 - DNA, 25 bp, Homo sapien
tagatgtggcgaagatgggcttttt

SEQ ID NO: 3367046 - DNA, 25 bp, Homo sapien
ggtcagacacagcagactccaagaa

SEQ ID NO: 3367047 - DNA, 25 bp, Homo sapien
aagcagctattgcaagttccagaga

SEQ ID NO: 3367048 - DNA, 25 bp, Homo sapien
cagctctaaggaccatgacatcgtt

SEQ ID NO: 3367049 - DNA, 25 bp, Homo sapien
tctaaggaccatgacatcgttctgc

SEQ ID NO: 3367050 - DNA, 25 bp, Homo sapien
aggaccatgacatcgttctgctggg

SEQ ID NO: 3367051 - DNA, 25 bp, Homo sapien
ggttgctcctgatacaatttttaga

SEQ ID NO: 3367052 - DNA, 25 bp, Homo sapien
caaatctttacgatgctctcttccc

SEQ ID NO: 3367053 - DNA, 25 bp, Homo sapien
ccgtgctgccatcgccaaatcttta

SEQ ID NO: 3367054 - DNA, 25 bp, Homo sapien
cttccaagccaaacatctctagatt

SEQ ID NO: 3367055 - DNA, 25 bp, Homo sapien
agtatccttaggctcgttcccacag

SEQ ID NO: 3367056 - DNA, 25 bp, Homo sapien
ttaagtcacaaagctacccttggag

SEQ ID NO: 3367057 - DNA, 25 bp, Homo sapien
gcccggccgaaactatcagtgcttt

SEQ ID NO: 3367058 - DNA, 25 bp, Homo sapien
gaccggctgtgaggaaaaatccttc

SEQ ID NO: 3367059 - DNA, 25 bp, Homo sapien
taatcactgttcctctaatgttggt

SEQ ID NO: 3367060 - DNA, 25 bp, Homo sapien
agccaatgcgtttgcttacagctgg

SEQ ID NO: 3367061 - DNA, 25 bp, Homo sapien
tgcagtaggctacgtttttcccgaa

SEQ ID NO: 3367062 - DNA, 25 bp, Homo sapien
aattgacttatttgcaaaccctgcc

SEQ ID NO: 3367063 - DNA, 25 bp, Homo sapien
ggccttgtgtcttaagcagtgtctg

SEQ ID NO: 3367064 - DNA, 25 bp, Homo sapien
gtcttgtatcgaaaatggccttgtg

SEQ ID NO: 3367065 - DNA, 25 bp, Homo sapien
atggccttgtgtcttaagcagtgtc

SEQ ID NO: 3367066 - DNA, 25 bp, Homo sapien
ttaaggtcttgtatcgaaaatggcc

SEQ ID NO: 3367067 - DNA, 25 bp, Homo sapien
gagagcaggctacgacatgccttta

SEQ ID NO: 3367068 - DNA, 25 bp, Homo sapien
gagagagcaggctacgacatgcctt

SEQ ID NO: 3367069 - DNA, 25 bp, Homo sapien
tagagagagcaggctacgacatgcc

SEQ ID NO: 3367070 - DNA, 25 bp, Homo sapien
agcaggctacgacatgcctttagag

SEQ ID NO: 3367071 - DNA, 25 bp, Homo sapien
cagggatacctcagtgtgcttctct

SEQ ID NO: 3367072 - DNA, 25 bp, Homo sapien
gtctttgctgcagggatacctcagt

SEQ ID NO: 3367073 - DNA, 25 bp, Homo sapien
cttccacgctcacatctctggtcat

SEQ ID NO: 3367074 - DNA, 25 bp, Homo sapien
tcagtgtgcttctcttccacgctca

SEQ ID NO: 3367075 - DNA, 25 bp, Homo sapien
aaaggcgcacattgagtttctgata

SEQ ID NO: 3367076 - DNA, 25 bp, Homo sapien
gatgtgcaacaatgctctatgaagg

SEQ ID NO: 3367077 - DNA, 25 bp, Homo sapien
cctggaaatagttttcagggtgagt

SEQ ID NO: 3367078 - DNA, 25 bp, Homo sapien
tatagagtgtcatcacccagattcc

SEQ ID NO: 3367079 - DNA, 25 bp, Homo sapien
gggaggaaatctaccagtgatcaca

SEQ ID NO: 3367080 - DNA, 25 bp, Homo sapien
gaacacccagaatgtaattgtaatt

SEQ ID NO: 3367081 - DNA, 25 bp, Homo sapien
ggtccaaggtttatcaggatttcca

SEQ ID NO: 3367082 - DNA, 25 bp, Homo sapien
tccacttgtggtgatatggtccaag

SEQ ID NO: 3367083 - DNA, 25 bp, Homo sapien
ttcgtaccctaccacatccagactg

SEQ ID NO: 3367084 - DNA, 25 bp, Homo sapien
gattttcatcattgtactcgcttcc

SEQ ID NO: 3367085 - DNA, 25 bp, Homo sapien
tctcagtgtgtctgaaacggtcctg

SEQ ID NO: 3367086 - DNA, 25 bp, Homo sapien
tcaggggtcaccatcaggattttca

SEQ ID NO: 3367087 - DNA, 25 bp, Homo sapien
caggcgacatgcgagtgctgaggag

SEQ ID NO: 3367088 - DNA, 25 bp, Homo sapien
catggaagaggcaggcgacatgcga

SEQ ID NO: 3367089 - DNA, 25 bp, Homo sapien
acatgaagaggcaggcgacatgcga

SEQ ID NO: 3367090 - DNA, 25 bp, Homo sapien
ggcgacatgcgagtgctgaggagga

SEQ ID NO: 3367091 - DNA, 25 bp, Homo sapien
aggaaccctggacgccaccatttca

SEQ ID NO: 3367092 - DNA, 25 bp, Homo sapien
caggcgacatgcgagtgctgaggag

SEQ ID NO: 3367093 - DNA, 25 bp, Homo sapien
catggaagaggcaggcgacatgcga

SEQ ID NO: 3367094 - DNA, 25 bp, Homo sapien
acatgaagaggcaggcgacatgcga

SEQ ID NO: 3367095 - DNA, 25 bp, Homo sapien
aaccccggacgccaccatttcacat

SEQ ID NO: 3367096 - DNA, 25 bp, Homo sapien
catggaagaggcaggcgacatgcga

SEQ ID NO: 3367097 - DNA, 25 bp, Homo sapien
gcgacatgcgagtgctggagaggaa

SEQ ID NO: 3367098 - DNA, 25 bp, Homo sapien
ccccggacgccaccatttcacatga

SEQ ID NO: 3367099 - DNA, 25 bp, Homo sapien
atgaagaggcaggcgacatgcgatt

SEQ ID NO: 3367100 - DNA, 25 bp, Homo sapien
catgaagaggcaggcgacatgcgat

SEQ ID NO: 3367101 - DNA, 25 bp, Homo sapien
agaatcagacatggaaaataggcag

SEQ ID NO: 3367102 - DNA, 25 bp, Homo sapien
aatcagacatggaaaataggcaggc

SEQ ID NO: 3367103 - DNA, 25 bp, Homo sapien
atcagacatggaaaataggcaggct

SEQ ID NO: 3367104 - DNA, 25 bp, Homo sapien
gaatcagacatggaaaataggcagg

SEQ ID NO: 3367105 - DNA, 25 bp, Homo sapien
cagtctggcggggtctttcttgtgt

SEQ ID NO: 3367106 - DNA, 25 bp, Homo sapien
ttcttgtgtcctggaatgatgacgg

SEQ ID NO: 3367107 - DNA, 25 bp, Homo sapien
ggaatgatgacggccagtgcaggtc

SEQ ID NO: 3367108 - DNA, 25 bp, Homo sapien
gccaaacttccatcggggacagtct

SEQ ID NO: 3367109 - DNA, 25 bp, Homo sapien
gcagctgccgtggacccagtcagca

SEQ ID NO: 3367110 - DNA, 25 bp, Homo sapien
ggacccagtcagcacctctggtcaa

SEQ ID NO: 3367111 - DNA, 25 bp, Homo sapien
cgtggacccagtcagcacctctggt

SEQ ID NO: 3367112 - DNA, 25 bp, Homo sapien
ctgaagaatgcagctgccgtggacc

SEQ ID NO: 3367113 - DNA, 25 bp, Homo sapien
ttctgggccagaccctacgactgac

SEQ ID NO: 3367114 - DNA, 25 bp, Homo sapien
gagtgcgtgaacatgtggcctaaac

SEQ ID NO: 3367115 - DNA, 25 bp, Homo sapien
tcttaacagcttggtagagttggga

SEQ ID NO: 3367116 - DNA, 25 bp, Homo sapien
tcctttgttccgagtactggtgcca

SEQ ID NO: 3367117 - DNA, 25 bp, Homo sapien
gccccatcacccgtgctgtgggttt

SEQ ID NO: 3367118 - DNA, 25 bp, Homo sapien
cacccgtgctgtgggtttgtgtcat

SEQ ID NO: 3367119 - DNA, 25 bp, Homo sapien
atggccccatcacccgtgctgtggg

SEQ ID NO: 3367120 - DNA, 25 bp, Homo sapien
catcacccgtgctgtgggtttgtgt

SEQ ID NO: 3367121 - DNA, 25 bp, Homo sapien
agaccactgtgaggccattcaacaa

SEQ ID NO: 3367122 - DNA, 25 bp, Homo sapien
aaataccacagaccactgtgaggcc

SEQ ID NO: 3367123 - DNA, 25 bp, Homo sapien
cacagaccactgtgaggccattcaa

SEQ ID NO: 3367124 - DNA, 25 bp, Homo sapien
ctgtgaggccattcaacaaagaaca

SEQ ID NO: 3367125 - DNA, 25 bp, Homo sapien
tccaaagcacacgtgtttcggtgcc

SEQ ID NO: 3367126 - DNA, 25 bp, Homo sapien
gcacacgtgtttcggtgccaccacg

SEQ ID NO: 3367127 - DNA, 25 bp, Homo sapien
ccttgcccatcatgtgagcctcctc

SEQ ID NO: 3367128 - DNA, 25 bp, Homo sapien
gtgccaccacgtttcccttgcccat

SEQ ID NO: 3367129 - DNA, 25 bp, Homo sapien
gcactgattccgtcctctttgcctg

SEQ ID NO: 3367130 - DNA, 25 bp, Homo sapien
ggccctgaaggcgacagcactgatt

SEQ ID NO: 3367131 - DNA, 25 bp, Homo sapien
gaaggcgacagcactgattccgtcc

SEQ ID NO: 3367132 - DNA, 25 bp, Homo sapien
ttccatcacatcaggggccctgaag

SEQ ID NO: 3367133 - DNA, 25 bp, Homo sapien
gaaagccagtggattagagtgcagt

SEQ ID NO: 3367134 - DNA, 25 bp, Homo sapien
agtgggaatcgcagggaaacgcctc

SEQ ID NO: 3367135 - DNA, 25 bp, Homo sapien
tctcaaagtgcgttctgatggtcct

SEQ ID NO: 3367136 - DNA, 25 bp, Homo sapien
gagctgcccttgtgcggaaagccag

SEQ ID NO: 3367137 - DNA, 25 bp, Homo sapien
ggcaggctcttgacagggaattata

SEQ ID NO: 3367138 - DNA, 25 bp, Homo sapien
ttctatggagcgtgaagaaagggca

SEQ ID NO: 3367139 - DNA, 25 bp, Homo sapien
ttatatagggtgtaggacacttggc

SEQ ID NO: 3367140 - DNA, 25 bp, Homo sapien
tgaagaaagggcaggctcttgacag

SEQ ID NO: 3367141 - DNA, 25 bp, Homo sapien
gatacagatgggcctcctggaagaa

SEQ ID NO: 3367142 - DNA, 25 bp, Homo sapien
ctggatacagatgggcctcctggaa

SEQ ID NO: 3367143 - DNA, 25 bp, Homo sapien
tggatacagatgggcctcctggaag

SEQ ID NO: 3367144 - DNA, 25 bp, Homo sapien
ggatacagatgggcctcctggaaga

SEQ ID NO: 3367145 - DNA, 25 bp, Homo sapien
tgctgacggcagctaatctgacatt

SEQ ID NO: 3367146 - DNA, 25 bp, Homo sapien
ggtcttccgttctgaaggctgcact

SEQ ID NO: 3367147 - DNA, 25 bp, Homo sapien
ccttgatcaccctgagtttgctgca

SEQ ID NO: 3367148 - DNA, 25 bp, Homo sapien
aagtggaagagcagatgtgttgcac

SEQ ID NO: 3367149 - DNA, 25 bp, Homo sapien
cagactttgcaaccttagtttgaca

SEQ ID NO: 3367150 - DNA, 25 bp, Homo sapien
tgacatttattgcaactgtcaccaa

SEQ ID NO: 3367151 - DNA, 25 bp, Homo sapien
ttcatttccctctatccatggggct

SEQ ID NO: 3367152 - DNA, 25 bp, Homo sapien
tccctctatccatggggcttctttg

SEQ ID NO: 3367153 - DNA, 25 bp, Homo sapien
cgagggcttgcatatgagctttcaa

SEQ ID NO: 3367154 - DNA, 25 bp, Homo sapien
gaaactcctcttctattgtctgcga

SEQ ID NO: 3367155 - DNA, 25 bp, Homo sapien
aaagtcaatccagcagcgtgcctga

SEQ ID NO: 3367156 - DNA, 25 bp, Homo sapien
tagcaattcccctactgtgagtgtt

SEQ ID NO: 3367157 - DNA, 25 bp, Homo sapien
gtccaacggattgccttattgccct

SEQ ID NO: 3367158 - DNA, 25 bp, Homo sapien
aaaattctatcagcatgccaacttc

SEQ ID NO: 3367159 - DNA, 25 bp, Homo sapien
agcatgccaacttcatttccagtcc

SEQ ID NO: 3367160 - DNA, 25 bp, Homo sapien
ttcatttccagtccaacggattgcc

SEQ ID NO: 3367161 - DNA, 25 bp, Homo sapien
cttcgtcgttctcaaggctgtcctg

SEQ ID NO: 3367162 - DNA, 25 bp, Homo sapien
ttccttcatggtacccagggcttcc

SEQ ID NO: 3367163 - DNA, 25 bp, Homo sapien
ttcgtggtactcaaggcttcctggg

SEQ ID NO: 3367164 - DNA, 25 bp, Homo sapien
tcttagagctctagaacttccttcg

SEQ ID NO: 3367165 - DNA, 25 bp, Homo sapien
tttccaagtgagcaaacgctttctc

SEQ ID NO: 3367166 - DNA, 25 bp, Homo sapien
tgtcctgggcacacggtttctgtgc

SEQ ID NO: 3367167 - DNA, 25 bp, Homo sapien
tcccgggacttcttcgtggtactca

SEQ ID NO: 3367168 - DNA, 25 bp, Homo sapien
gacacccaatgcctgaactcagcat

SEQ ID NO: 3367169 - DNA, 25 bp, Homo sapien
ctgagagccagaagttttatccata

SEQ ID NO: 3367170 - DNA, 25 bp, Homo sapien
gagccagaagttttatccataatac

SEQ ID NO: 3367171 - DNA, 25 bp, Homo sapien
gctgagagccagaagttttatccat

SEQ ID NO: 3367172 - DNA, 25 bp, Homo sapien
gagagccagaagttttatccataat

SEQ ID NO: 3367173 - DNA, 25 bp, Homo sapien
tcttattattcaataagccatccag

SEQ ID NO: 3367174 - DNA, 25 bp, Homo sapien
cactgcctgcgaacaactcaagaaa

SEQ ID NO: 3367175 - DNA, 25 bp, Homo sapien
ccacaggagattggaagtaagtcac

SEQ ID NO: 3367176 - DNA, 25 bp, Homo sapien
actggctcccagatgttctcacagc

SEQ ID NO: 3367177 - DNA, 25 bp, Homo sapien
agcatcttggggttctaggggcacc

SEQ ID NO: 3367178 - DNA, 25 bp, Homo sapien
cttggggttctaggggcacctccag

SEQ ID NO: 3367179 - DNA, 25 bp, Homo sapien
tcttggggttctaggggcacctcca

SEQ ID NO: 3367180 - DNA, 25 bp, Homo sapien
gagcatcttggggttctaggggcac

SEQ ID NO: 3367181 - DNA, 25 bp, Homo sapien
gctcttgggctgcatttcatcagac

SEQ ID NO: 3367182 - DNA, 25 bp, Homo sapien
tcagtcactgctcttgggctgcatt

SEQ ID NO: 3367183 - DNA, 25 bp, Homo sapien
tcactgctcttgggctgcatttcat

SEQ ID NO: 3367184 - DNA, 25 bp, Homo sapien
actgctcttgggctgcatttcatca

SEQ ID NO: 3367185 - DNA, 25 bp, Homo sapien
gagaccagggaagccgtcctactgg

SEQ ID NO: 3367186 - DNA, 25 bp, Homo sapien
agccgtcctactgggtggagcttct

SEQ ID NO: 3367187 - DNA, 25 bp, Homo sapien
agtgacccgatcctaggatggctgt

SEQ ID NO: 3367188 - DNA, 25 bp, Homo sapien
ttttggaggagtgacccgatcctag

SEQ ID NO: 3367189 - DNA, 25 bp, Homo sapien
tcatcaatacacttcacagcgctct

SEQ ID NO: 3367190 - DNA, 25 bp, Homo sapien
tactctggtttgcatggtctcttcc

SEQ ID NO: 3367191 - DNA, 25 bp, Homo sapien
tctgtttcaatgataggagaccata

SEQ ID NO: 3367192 - DNA, 25 bp, Homo sapien
tcattgatctggatttcccaggtac

SEQ ID NO: 3367193 - DNA, 25 bp, Homo sapien
cagggaaggcgctgaaccctggtca

SEQ ID NO: 3367194 - DNA, 25 bp, Homo sapien
gaagagacaactggtttggagagca

SEQ ID NO: 3367195 - DNA, 25 bp, Homo sapien
acatgatggttagtttcaaggcgga

SEQ ID NO: 3367196 - DNA, 25 bp, Homo sapien
caccaggcctgaatgtgagccaagg

SEQ ID NO: 3367197 - DNA, 25 bp, Homo sapien
atgaacttgcaagtcgttcacaaac

SEQ ID NO: 3367198 - DNA, 25 bp, Homo sapien
gaacttgcaagtcgttcacaaacat

SEQ ID NO: 3367199 - DNA, 25 bp, Homo sapien
tgaacttgcaagtcgttcacaaaca

SEQ ID NO: 3367200 - DNA, 25 bp, Homo sapien
gattggagatatgcaaacttgcatg

SEQ ID NO: 3367201 - DNA, 25 bp, Homo sapien
gatatgcaaacttgcatgcctttat

SEQ ID NO: 3367202 - DNA, 25 bp, Homo sapien
tggaagattggagatatgcaaactt

SEQ ID NO: 3367203 - DNA, 25 bp, Homo sapien
gagatatgcaaacttgcatgccttt

SEQ ID NO: 3367204 - DNA, 25 bp, Homo sapien
tgacttggagtttggcaaaaacttc

SEQ ID NO: 3367205 - DNA, 25 bp, Homo sapien
tatgacttggagtttggcaaaaact

SEQ ID NO: 3367206 - DNA, 25 bp, Homo sapien
cttggagtttggcaaaaacttccat

SEQ ID NO: 3367207 - DNA, 25 bp, Homo sapien
ttatgacttggagtttggcaaaaac

SEQ ID NO: 3367208 - DNA, 25 bp, Homo sapien
cccaaggattggttgagcagagaca

SEQ ID NO: 3367209 - DNA, 25 bp, Homo sapien
cctgcacattaaaggcccaaggatt

SEQ ID NO: 3367210 - DNA, 25 bp, Homo sapien
gagacagacgtctcctctgcacaca

SEQ ID NO: 3367211 - DNA, 25 bp, Homo sapien
tgagcagagacagacgtctcctctg

SEQ ID NO: 3367212 - DNA, 25 bp, Homo sapien
catttgctggcgatagaaaagcggt

SEQ ID NO: 3367213 - DNA, 25 bp, Homo sapien
cagagtcatgaaagcagggaggaca

SEQ ID NO: 3367214 - DNA, 25 bp, Homo sapien
aagtctcagctggaagtggcggtcc

SEQ ID NO: 3367215 - DNA, 25 bp, Homo sapien
tctggacccacggtagcatttgctg

SEQ ID NO: 3367216 - DNA, 25 bp, Homo sapien
cgccaaagaaaccgatttagaacag

SEQ ID NO: 3367217 - DNA, 25 bp, Homo sapien
taaagctttccgcttggacttgacc

SEQ ID NO: 3367218 - DNA, 25 bp, Homo sapien
accgtgggtgtgtctgaatgtttct

SEQ ID NO: 3367219 - DNA, 25 bp, Homo sapien
tccgcttggacttgaccgtgggtgt

SEQ ID NO: 3367220 - DNA, 25 bp, Homo sapien
taagtgccacgctcaaaggtactgg

SEQ ID NO: 3367221 - DNA, 25 bp, Homo sapien
gaatgttaattacccgaggatgctg

SEQ ID NO: 3367222 - DNA, 25 bp, Homo sapien
tgtgtcatccgcacagtatccggga

SEQ ID NO: 3367223 - DNA, 25 bp, Homo sapien
taacaaggacaactcccttcatctg

SEQ ID NO: 3367224 - DNA, 25 bp, Homo sapien
ttcattcatgacgtcttcaaagcgt

SEQ ID NO: 3367225 - DNA, 25 bp, Homo sapien
gaatactagtctgtttgaaaggcca

SEQ ID NO: 3367226 - DNA, 25 bp, Homo sapien
cacatttgggtgacttcagggtctc

SEQ ID NO: 3367227 - DNA, 25 bp, Homo sapien
agcgttgcccggaatgcaaaatgac

SEQ ID NO: 3367228 - DNA, 25 bp, Homo sapien
tctgttttacagttgcattcaagtg

SEQ ID NO: 3367229 - DNA, 25 bp, Homo sapien
gttgcattcaagtggggtgtatctg

SEQ ID NO: 3367230 - DNA, 25 bp, Homo sapien
cagttgcattcaagtggggtgtatc

SEQ ID NO: 3367231 - DNA, 25 bp, Homo sapien
tgttttacagttgcattcaagtggg

SEQ ID NO: 3367232 - DNA, 25 bp, Homo sapien
ggtgtgatccctggctatactctgc

SEQ ID NO: 3367233 - DNA, 25 bp, Homo sapien
gaaatctagctgcttgtagggagca

SEQ ID NO: 3367234 - DNA, 25 bp, Homo sapien
gactgaaggttggaccatgtaacca

SEQ ID NO: 3367235 - DNA, 25 bp, Homo sapien
tctcctgggtgatagaatctttctc

SEQ ID NO: 3367236 - DNA, 25 bp, Homo sapien
caccttccaagttaggagcatcagc

SEQ ID NO: 3367237 - DNA, 25 bp, Homo sapien
ttccaagttaggagcatcagctttc

SEQ ID NO: 3367238 - DNA, 25 bp, Homo sapien
cttccaagttaggagcatcagcttt

SEQ ID NO: 3367239 - DNA, 25 bp, Homo sapien
ccttccaagttaggagcatcagctt

SEQ ID NO: 3367240 - DNA, 25 bp, Homo sapien
gagaccaccctctgaaaccaggttc

SEQ ID NO: 3367241 - DNA, 25 bp, Homo sapien
gaaacacgggtgctttgatttggca

SEQ ID NO: 3367242 - DNA, 25 bp, Homo sapien
ccctgaatgaaaactccagcgaggc

SEQ ID NO: 3367243 - DNA, 25 bp, Homo sapien
gatttggcagcggtcagcagccaga

SEQ ID NO: 3367244 - DNA, 25 bp, Homo sapien
cacgggctttaaagaggtcatcgag

SEQ ID NO: 3367245 - DNA, 25 bp, Homo sapien
tgaagttactgtgtaccgggcactg

SEQ ID NO: 3367246 - DNA, 25 bp, Homo sapien
aagaaagatcgcaccagaagccaac

SEQ ID NO: 3367247 - DNA, 25 bp, Homo sapien
cagtctgtggttgttaccgtagcac

SEQ ID NO: 3367248 - DNA, 25 bp, Homo sapien
ttggatcatagaaaatggtgcagct

SEQ ID NO: 3367249 - DNA, 25 bp, Homo sapien
cacatggcgtttttggatcatagaa

SEQ ID NO: 3367250 - DNA, 25 bp, Homo sapien
ggcccagtaggggtagtgacacaag

SEQ ID NO: 3367251 - DNA, 25 bp, Homo sapien
ccttcaacacatggcgtttttggat

SEQ ID NO: 3367252 - DNA, 25 bp, Homo sapien
catttcctttctaacttgcttgtag

SEQ ID NO: 3367253 - DNA, 25 bp, Homo sapien
tgtactgaatcagagattcaatgtt

SEQ ID NO: 3367254 - DNA, 25 bp, Homo sapien
gcatttcctttctaacttgcttgta

SEQ ID NO: 3367255 - DNA, 25 bp, Homo sapien
tcatctgtactgaatcagagattca

SEQ ID NO: 3367256 - DNA, 25 bp, Homo sapien
cagaacatcagcctaggtggaacag

SEQ ID NO: 3367257 - DNA, 25 bp, Homo sapien
catcagcctaggtggaacaggcact

SEQ ID NO: 3367258 - DNA, 25 bp, Homo sapien
tggaacaggcactgcgacaggctca

SEQ ID NO: 3367259 - DNA, 25 bp, Homo sapien
gaacatcagcctaggtggaacaggc

SEQ ID NO: 3367260 - DNA, 25 bp, Homo sapien
gcctcgttttctcctatgcttatgg

SEQ ID NO: 3367261 - DNA, 25 bp, Homo sapien
ccagtccgtggatcaccagagcaaa

SEQ ID NO: 3367262 - DNA, 25 bp, Homo sapien
cttatggctatctggaaggccatcc

SEQ ID NO: 3367263 - DNA, 25 bp, Homo sapien
catccacgggtatggcagtgatctg

SEQ ID NO: 3367264 - DNA, 25 bp, Homo sapien
ctggctccgggagtgaagagtagaa

SEQ ID NO: 3367265 - DNA, 25 bp, Homo sapien
tgctggctccgggagtgaagagtag

SEQ ID NO: 3367266 - DNA, 25 bp, Homo sapien
ggctccgggagtgaagagtagaaag

SEQ ID NO: 3367267 - DNA, 25 bp, Homo sapien
tctctgctggctccgggagtgaaga

SEQ ID NO: 3367268 - DNA, 25 bp, Homo sapien
tattatctgcgtcacagctacctgc

SEQ ID NO: 3367269 - DNA, 25 bp, Homo sapien
tcttcagtattatctgcgtcacagc

SEQ ID NO: 3367270 - DNA, 25 bp, Homo sapien
gcctaaatagagctgtttggtacat

SEQ ID NO: 3367271 - DNA, 25 bp, Homo sapien
tccctgtgagatccattacagcaga

SEQ ID NO: 3367272 - DNA, 25 bp, Homo sapien
tgatgagaaaaatccatttgcagtt

SEQ ID NO: 3367273 - DNA, 25 bp, Homo sapien
tgagaaaaatccatttgcagttgag

SEQ ID NO: 3367274 - DNA, 25 bp, Homo sapien
gatgagaaaaatccatttgcagttg

SEQ ID NO: 3367275 - DNA, 25 bp, Homo sapien
ttgatgagaaaaatccatttgcagt

SEQ ID NO: 3367276 - DNA, 25 bp, Homo sapien
attcatcccactggattgtaaggat

SEQ ID NO: 3367277 - DNA, 25 bp, Homo sapien
atcccactggattgtaaggatatct

SEQ ID NO: 3367278 - DNA, 25 bp, Homo sapien
tcatcccactggattgtaaggatat

SEQ ID NO: 3367279 - DNA, 25 bp, Homo sapien
catcccactggattgtaaggatatc

SEQ ID NO: 3367280 - DNA, 25 bp, Homo sapien
tttttccttagatctaactatgtgg

SEQ ID NO: 3367281 - DNA, 25 bp, Homo sapien
ccttagatctaactatgtggtcttt

SEQ ID NO: 3367282 - DNA, 25 bp, Homo sapien
tttccttagatctaactatgtggtc

SEQ ID NO: 3367283 - DNA, 25 bp, Homo sapien
ccctttttccttagatctaactatg

SEQ ID NO: 3367284 - DNA, 25 bp, Homo sapien
gcattcgtgctaggctcctactggg

SEQ ID NO: 3367285 - DNA, 25 bp, Homo sapien
cctcgccacgaacaaattgaaaggg

SEQ ID NO: 3367286 - DNA, 25 bp, Homo sapien
tagaaaattccgcacatctggaaag

SEQ ID NO: 3367287 - DNA, 25 bp, Homo sapien
tgaacaggaacttgtgcattcgtgc

SEQ ID NO: 3367288 - DNA, 25 bp, Homo sapien
agctttgcctgacagctggatgcaa

SEQ ID NO: 3367289 - DNA, 25 bp, Homo sapien
cacatatttacgatatgcaagtgca

SEQ ID NO: 3367290 - DNA, 25 bp, Homo sapien
tatgcaagtgcatttcaaagctttg

SEQ ID NO: 3367291 - DNA, 25 bp, Homo sapien
tcaaagctttgcctgacagctggat

SEQ ID NO: 3367292 - DNA, 25 bp, Homo sapien
tgacagtgtcatcacatgtgagaga

SEQ ID NO: 3367293 - DNA, 25 bp, Homo sapien
gagagaggctgtgggggtgacagtg

SEQ ID NO: 3367294 - DNA, 25 bp, Homo sapien
ggtgacagtgtcatcacatgtgaga

SEQ ID NO: 3367295 - DNA, 25 bp, Homo sapien
tcatcacatgtgagagaggctgtgg

SEQ ID NO: 3367296 - DNA, 25 bp, Homo sapien
gacagtgtcatcacatgtgtgagag

SEQ ID NO: 3367297 - DNA, 25 bp, Homo sapien
gtgacagtgtcatcacatgtgtgag

SEQ ID NO: 3367298 - DNA, 25 bp, Homo sapien
ggtgacagtgtcatcacatgtgtga

SEQ ID NO: 3367299 - DNA, 25 bp, Homo sapien
tgacagtgtcatcacatgtgtgaga

SEQ ID NO: 3367300 - DNA, 25 bp, Homo sapien
gacagtgtcatcacatgtgtgagag

SEQ ID NO: 3367301 - DNA, 25 bp, Homo sapien
ggtgacagtgtcatcacatgtgtga

SEQ ID NO: 3367302 - DNA, 25 bp, Homo sapien
gtgacagtgtcatcacatgtgtgag

SEQ ID NO: 3367303 - DNA, 25 bp, Homo sapien
tgacagtgtcatcacatgtgtgaga

SEQ ID NO: 3367304 - DNA, 25 bp, Homo sapien
ggagtagcttggccgtaaagaccat

SEQ ID NO: 3367305 - DNA, 25 bp, Homo sapien
caagtggctgccgcgagatgaacgc

SEQ ID NO: 3367306 - DNA, 25 bp, Homo sapien
ccgcgagatgaacgcggagtagctt

SEQ ID NO: 3367307 - DNA, 25 bp, Homo sapien
cggagtagcttggccgtaaagacca

SEQ ID NO: 3367308 - DNA, 25 bp, Homo sapien
ttgatgtcagaaatctacacccaat

SEQ ID NO: 3367309 - DNA, 25 bp, Homo sapien
aaatgggaagatatagtgacatttt

SEQ ID NO: 3367310 - DNA, 25 bp, Homo sapien
taaatgggaagatatagtgacattt

SEQ ID NO: 3367311 - DNA, 25 bp, Homo sapien
ttttgatgtcagaaatctacaccca

SEQ ID NO: 3367312 - DNA, 25 bp, Homo sapien
tgcacagtgctccattttagccccg

SEQ ID NO: 3367313 - DNA, 25 bp, Homo sapien
cctccaggaggtgccgggtcttcgg

SEQ ID NO: 3367314 - DNA, 25 bp, Homo sapien
catagcttgcaagtttactgcacag

SEQ ID NO: 3367315 - DNA, 25 bp, Homo sapien
ggtcttcggcgatgaaattattcaa

SEQ ID NO: 3367316 - DNA, 25 bp, Homo sapien
cccaaatctgggccatagtggacag

SEQ ID NO: 3367317 - DNA, 25 bp, Homo sapien
ctgggccatagtggacagttttcca

SEQ ID NO: 3367318 - DNA, 25 bp, Homo sapien
gggccatagtggacagttttccatg

SEQ ID NO: 3367319 - DNA, 25 bp, Homo sapien
caaatctgggccatagtggacagtt

SEQ ID NO: 3367320 - DNA, 25 bp, Homo sapien
cctctagcctagcttgctgcaccat

SEQ ID NO: 3367321 - DNA, 25 bp, Homo sapien
ccgagccctctagcctagcttgctg

SEQ ID NO: 3367322 - DNA, 25 bp, Homo sapien
gccctctagcctagcttgctgcacc

SEQ ID NO: 3367323 - DNA, 25 bp, Homo sapien
gagccctctagcctagcttgctgca

SEQ ID NO: 3367324 - DNA, 25 bp, Homo sapien
gacttcctcgggagcgcagatctgt

SEQ ID NO: 3367325 - DNA, 25 bp, Homo sapien
aggaagtctgtgacgtgcgctgcca

SEQ ID NO: 3367326 - DNA, 25 bp, Homo sapien
tgtgtcctcgcggagatcatcgttc

SEQ ID NO: 3367327 - DNA, 25 bp, Homo sapien
atatagagtcattaggacaggtggg

SEQ ID NO: 3367328 - DNA, 25 bp, Homo sapien
aagatagcatccgtaatgtcgcaac

SEQ ID NO: 3367329 - DNA, 25 bp, Homo sapien
gcgagtgacatgcagagccacacca

SEQ ID NO: 3367330 - DNA, 25 bp, Homo sapien
ccagagaggagaggtaatccacagg

SEQ ID NO: 3367331 - DNA, 25 bp, Homo sapien
tgtcagcaccaactccttcgactgg

SEQ ID NO: 3367332 - DNA, 25 bp, Homo sapien
gaagcataagaagtccccatgcaga

SEQ ID NO: 3367333 - DNA, 25 bp, Homo sapien
ttttctagcccttcttcacgcttcc

SEQ ID NO: 3367334 - DNA, 25 bp, Homo sapien
ttctagcccttcttcacgcttcccc

SEQ ID NO: 3367335 - DNA, 25 bp, Homo sapien
aagcataagaagtccccatgcagag

SEQ ID NO: 3367336 - DNA, 25 bp, Homo sapien
atagctcagtccgtcaatatcttgt

SEQ ID NO: 3367337 - DNA, 25 bp, Homo sapien
catatagctcagtccgtcaatatct

SEQ ID NO: 3367338 - DNA, 25 bp, Homo sapien
gctcagtccgtcaatatcttgtctc

SEQ ID NO: 3367339 - DNA, 25 bp, Homo sapien
tccttcatatagctcagtccgtcaa

SEQ ID NO: 3367340 - DNA, 25 bp, Homo sapien
ttccaccctcattcgctcatgcccc

SEQ ID NO: 3367341 - DNA, 25 bp, Homo sapien
tgctcaaggaggattttcctgatcc

SEQ ID NO: 3367342 - DNA, 25 bp, Homo sapien
ctgctcaaggaggattttcctgatc

SEQ ID NO: 3367343 - DNA, 25 bp, Homo sapien
ttgtggtgtgtttgctccccattca

SEQ ID NO: 3367344 - DNA, 25 bp, Homo sapien
tggtcgtttaaaggagcctggtgcc

SEQ ID NO: 3367345 - DNA, 25 bp, Homo sapien
ggactaagaccatggcataattttc

SEQ ID NO: 3367346 - DNA, 25 bp, Homo sapien
tgagatccttactgaaagcaaatgc

SEQ ID NO: 3367347 - DNA, 25 bp, Homo sapien
ccaacaaacttgagatcaaggatct

SEQ ID NO: 3367348 - DNA, 25 bp, Homo sapien
gagatcaaggatctaatcttaggaa

SEQ ID NO: 3367349 - DNA, 25 bp, Homo sapien
atttttaccaacaaacttgagatca

SEQ ID NO: 3367350 - DNA, 25 bp, Homo sapien
caaacttgagatcaaggatctaatc

SEQ ID NO: 3367351 - DNA, 25 bp, Homo sapien
ggtaaagtcacatctggtaccttta

SEQ ID NO: 3367352 - DNA, 25 bp, Homo sapien
ctggtaaagtcacatctggtacctt

SEQ ID NO: 3367353 - DNA, 25 bp, Homo sapien
tctggtaaagtcacatctggtacct

SEQ ID NO: 3367354 - DNA, 25 bp, Homo sapien
ttctggtaaagtcacatctggtacc

SEQ ID NO: 3367355 - DNA, 25 bp, Homo sapien
taggacaggaaaggaagttgcccga

SEQ ID NO: 3367356 - DNA, 25 bp, Homo sapien
caggaaaggaagttgcccgaattat

SEQ ID NO: 3367357 - DNA, 25 bp, Homo sapien
tgctgatgtcccctgcggttcaaag

SEQ ID NO: 3367358 - DNA, 25 bp, Homo sapien
tggctgctttcgattctgctgtgat

SEQ ID NO: 3367359 - DNA, 25 bp, Homo sapien
ggttcaaaggataattcagtttcac

SEQ ID NO: 3367360 - DNA, 25 bp, Homo sapien
gctgctttcgattctgctgtgattg

SEQ ID NO: 3367361 - DNA, 25 bp, Homo sapien
tacactggctgtgcttttgcagatc

SEQ ID NO: 3367362 - DNA, 25 bp, Homo sapien
gacaagttgaatccgacaaagttct

SEQ ID NO: 3367363 - DNA, 25 bp, Homo sapien
gcttctctcgccaaatttggtcctc

SEQ ID NO: 3367364 - DNA, 25 bp, Homo sapien
tctattgcacgtggaagaagacaag

SEQ ID NO: 3367365 - DNA, 25 bp, Homo sapien
tattaagggagataacagggacaca

SEQ ID NO: 3367366 - DNA, 25 bp, Homo sapien
agggagataacagggacacaggtaa

SEQ ID NO: 3367367 - DNA, 25 bp, Homo sapien
ctattaagggagataacagggacac

SEQ ID NO: 3367368 - DNA, 25 bp, Homo sapien
ggagataacagggacacaggtaaat

SEQ ID NO: 3367369 - DNA, 25 bp, Homo sapien
ctcccgatgcagatattgcaaggcc

SEQ ID NO: 3367370 - DNA, 25 bp, Homo sapien
tgcaaggccaaagtaaaagcaccaa

SEQ ID NO: 3367371 - DNA, 25 bp, Homo sapien
gtctcagagactgggtcacactgtg

SEQ ID NO: 3367372 - DNA, 25 bp, Homo sapien
tgggtcacactgtgccccacatcac

SEQ ID NO: 3367373 - DNA, 25 bp, Homo sapien
ggctttttgctaccatcattctcca

SEQ ID NO: 3367374 - DNA, 25 bp, Homo sapien
gaccaggttctcttgttttgtgttg

SEQ ID NO: 3367375 - DNA, 25 bp, Homo sapien
tgaaaggctttttgctaccatcatt

SEQ ID NO: 3367376 - DNA, 25 bp, Homo sapien
agaccaggttctcttgttttgtgtt

SEQ ID NO: 3367377 - DNA, 25 bp, Homo sapien
caggtgtcagcaggccgcgctctct

SEQ ID NO: 3367378 - DNA, 25 bp, Homo sapien
tgctaggtctgctgcaagaaattac

SEQ ID NO: 3367379 - DNA, 25 bp, Homo sapien
cgcgctctctcggaaggctcagcgg

SEQ ID NO: 3367380 - DNA, 25 bp, Homo sapien
gagcttattctgacagtctgcaggc

SEQ ID NO: 3367381 - DNA, 25 bp, Homo sapien
catatcttttggaggtcaccgttca

SEQ ID NO: 3367382 - DNA, 25 bp, Homo sapien
tactgacatctacaaagactattcc

SEQ ID NO: 3367383 - DNA, 25 bp, Homo sapien
tgaggttccaggtggacatatcttt

SEQ ID NO: 3367384 - DNA, 25 bp, Homo sapien
ctgagaagcacacctgccagtggac

SEQ ID NO: 3367385 - DNA, 25 bp, Homo sapien
tagcaattgcggaacccgttggaaa

SEQ ID NO: 3367386 - DNA, 25 bp, Homo sapien
tcattttcttggccctcctctcgcc

SEQ ID NO: 3367387 - DNA, 25 bp, Homo sapien
aaaatagcaattgcggaacccgttg

SEQ ID NO: 3367388 - DNA, 25 bp, Homo sapien
attttcttggccctcctctcgcctt

SEQ ID NO: 3367389 - DNA, 25 bp, Homo sapien
ggacagtggctaacctctgcctcat

SEQ ID NO: 3367390 - DNA, 25 bp, Homo sapien
ggttaagcttctgtcatggatccca

SEQ ID NO: 3367391 - DNA, 25 bp, Homo sapien
aagagaacccttacacttacatgcg

SEQ ID NO: 3367392 - DNA, 25 bp, Homo sapien
cagcctgtgtcagcttaggacagaa

SEQ ID NO: 3367393 - DNA, 25 bp, Homo sapien
tttggtggccttacgaggaaatgaa

SEQ ID NO: 3367394 - DNA, 25 bp, Homo sapien
ggccttacgaggaaatgaagagaga

SEQ ID NO: 3367395 - DNA, 25 bp, Homo sapien
ctgacgggtttggtggccttacgag

SEQ ID NO: 3367396 - DNA, 25 bp, Homo sapien
gtttggtggccttacgaggaaatga

SEQ ID NO: 3367397 - DNA, 25 bp, Homo sapien
tacgtgagatgtagaccaagggcca

SEQ ID NO: 3367398 - DNA, 25 bp, Homo sapien
gaatcgaagtctgtcatgcctgcta

SEQ ID NO: 3367399 - DNA, 25 bp, Homo sapien
cagctactagagattgcaagaaggc

SEQ ID NO: 3367400 - DNA, 25 bp, Homo sapien
tgacactctagcacagggcattgag

SEQ ID NO: 3367401 - DNA, 25 bp, Homo sapien
gctgctattatcttgctgctctggg

SEQ ID NO: 3367402 - DNA, 25 bp, Homo sapien
tacacctattgatactggagcctcc

SEQ ID NO: 3367403 - DNA, 25 bp, Homo sapien
cagcagttacacctattgatactgg

SEQ ID NO: 3367404 - DNA, 25 bp, Homo sapien
gaggtagcttctgctgctattatct

SEQ ID NO: 3367405 - DNA, 25 bp, Homo sapien
cagatagctcaatatatagttattc

SEQ ID NO: 3367406 - DNA, 25 bp, Homo sapien
gcaaacagatagctcaatatatagt

SEQ ID NO: 3367407 - DNA, 25 bp, Homo sapien
aataagcaaacagatagctcaatat

SEQ ID NO: 3367408 - DNA, 25 bp, Homo sapien
taagcaaacagatagctcaatatat

SEQ ID NO: 3367409 - DNA, 25 bp, Homo sapien
ttaagcgacgttgtagaagcaaaga

SEQ ID NO: 3367410 - DNA, 25 bp, Homo sapien
tgaagttttccttgtgcctggcccc

SEQ ID NO: 3367411 - DNA, 25 bp, Homo sapien
gaagcaaagaaggtctagttttatc

SEQ ID NO: 3367412 - DNA, 25 bp, Homo sapien
tcaggcaccatagacccatcagact

SEQ ID NO: 3367413 - DNA, 25 bp, Homo sapien
tggccgtgtgtttggctcggcacat

SEQ ID NO: 3367414 - DNA, 25 bp, Homo sapien
tgggcatggccgtgtgtttggctcg

SEQ ID NO: 3367415 - DNA, 25 bp, Homo sapien
gcatggccgtgtgtttggctcggca

SEQ ID NO: 3367416 - DNA, 25 bp, Homo sapien
ctgggcatggccgtgtgtttggctc

SEQ ID NO: 3367417 - DNA, 25 bp, Homo sapien
gggtgttagtcacagtgtgccagct

SEQ ID NO: 3367418 - DNA, 25 bp, Homo sapien
gtcagtggatgggtgttagtcacag

SEQ ID NO: 3367419 - DNA, 25 bp, Homo sapien
tcagtggatgggtgttagtcacagt

SEQ ID NO: 3367420 - DNA, 25 bp, Homo sapien
gatgggtgttagtcacagtgtgcca

SEQ ID NO: 3367421 - DNA, 25 bp, Homo sapien
cctttactcccacccattcctcatc

SEQ ID NO: 3367422 - DNA, 25 bp, Homo sapien
attgtgcatctgctgtgacccagac

SEQ ID NO: 3367423 - DNA, 25 bp, Homo sapien
tttactcccacccattcctcatcac

SEQ ID NO: 3367424 - DNA, 25 bp, Homo sapien
tcatagctcctgtgaattgtgcatc

SEQ ID NO: 3367425 - DNA, 25 bp, Homo sapien
aacaaatctggctcaggcctagggt

SEQ ID NO: 3367426 - DNA, 25 bp, Homo sapien
cacatgggcctacttgggaaattac

SEQ ID NO: 3367427 - DNA, 25 bp, Homo sapien
atagcagagcaaaccttctaaatac

SEQ ID NO: 3367428 - DNA, 25 bp, Homo sapien
catatcatgatgtaaggtgctggta

SEQ ID NO: 3367429 - DNA, 25 bp, Homo sapien
gacaggtttggaacaatgacccata

SEQ ID NO: 3367430 - DNA, 25 bp, Homo sapien
tactaatgaagagcaatactggtcc

SEQ ID NO: 3367431 - DNA, 25 bp, Homo sapien
cactaaaaataagagggtgcatcct

SEQ ID NO: 3367432 - DNA, 25 bp, Homo sapien
gcttatacaatagcaggtatcttca

SEQ ID NO: 3367433 - DNA, 25 bp, Homo sapien
caaaggctttggaactgccgccagt

SEQ ID NO: 3367434 - DNA, 25 bp, Homo sapien
ggttacatattttgccgctctaagt

SEQ ID NO: 3367435 - DNA, 25 bp, Homo sapien
taattgcagataaaatccgggaact

SEQ ID NO: 3367436 - DNA, 25 bp, Homo sapien
tccgggaactacatttgagcagagc

SEQ ID NO: 3367437 - DNA, 25 bp, Homo sapien
ttgtcagtgtgcttttaggcttttg

SEQ ID NO: 3367438 - DNA, 25 bp, Homo sapien
ttccaatttgtagtttataagatgt

SEQ ID NO: 3367439 - DNA, 25 bp, Homo sapien
gtcagtgtgcttttaggcttttgca

SEQ ID NO: 3367440 - DNA, 25 bp, Homo sapien
ttgttgtcagtgtgcttttaggctt

SEQ ID NO: 3367441 - DNA, 25 bp, Homo sapien
gagatcttaataagcggtttgggaa

SEQ ID NO: 3367442 - DNA, 25 bp, Homo sapien
ggtatccactgtagtttgatgccag

SEQ ID NO: 3367443 - DNA, 25 bp, Homo sapien
tattaatggtaatggtgtgaaactg

SEQ ID NO: 3367444 - DNA, 25 bp, Homo sapien
tttacaggcaagaaaggcaaactag

SEQ ID NO: 3367445 - DNA, 25 bp, Homo sapien
gcgagtcagtgccagaacgttctaa

SEQ ID NO: 3367446 - DNA, 25 bp, Homo sapien
taagtgttgcttcctgcgagtcagt

SEQ ID NO: 3367447 - DNA, 25 bp, Homo sapien
gttgcttcctgcgagtcagtgccag

SEQ ID NO: 3367448 - DNA, 25 bp, Homo sapien
tgaataacctttaagtgttgcttcc

SEQ ID NO: 3367449 - DNA, 25 bp, Homo sapien
ctggtagaccaagaagcctgtcagc

SEQ ID NO: 3367450 - DNA, 25 bp, Homo sapien
gtagaccaagaagcctgtcagcatt

SEQ ID NO: 3367451 - DNA, 25 bp, Homo sapien
gaccaagaagcctgtcagcatttcc

SEQ ID NO: 3367452 - DNA, 25 bp, Homo sapien
accaagaagcctgtcagcatttcca

SEQ ID NO: 3367453 - DNA, 25 bp, Homo sapien
ctttttgtaccactggtagacttcg

SEQ ID NO: 3367454 - DNA, 25 bp, Homo sapien
tttttcattgtgaagttacggtgtg

SEQ ID NO: 3367455 - DNA, 25 bp, Homo sapien
cattgtgaagttacggtgtggattt

SEQ ID NO: 3367456 - DNA, 25 bp, Homo sapien
tttgtaccactggtagacttcgact

SEQ ID NO: 3367457 - DNA, 25 bp, Homo sapien
tgttcctgcagcaattaccgagcag

SEQ ID NO: 3367458 - DNA, 25 bp, Homo sapien
agtacaactcctaacctggtgggct

SEQ ID NO: 3367459 - DNA, 25 bp, Homo sapien
tggaatggccactttacaggaggga

SEQ ID NO: 3367460 - DNA, 25 bp, Homo sapien
gaagccgtttccaatactcacgaag

SEQ ID NO: 3367461 - DNA, 25 bp, Homo sapien
taatgagagcagttaaatgagcagc

SEQ ID NO: 3367462 - DNA, 25 bp, Homo sapien
tgctgccaaccatgtcaaggtaatg

SEQ ID NO: 3367463 - DNA, 25 bp, Homo sapien
tagcttctagcactgtcgcgcatag

SEQ ID NO: 3367464 - DNA, 25 bp, Homo sapien
cattccatttgcttagcttctagca

SEQ ID NO: 3367465 - DNA, 25 bp, Homo sapien
tgttctttgtactgtcaccaaatca

SEQ ID NO: 3367466 - DNA, 25 bp, Homo sapien
tcatttgaaattctcagaggcccct

SEQ ID NO: 3367467 - DNA, 25 bp, Homo sapien
ctttttcatggatccatttgtgggt

SEQ ID NO: 3367468 - DNA, 25 bp, Homo sapien
cttctttagacaagaccaaaatgca

SEQ ID NO: 3367469 - DNA, 25 bp, Homo sapien
gaagcagttaccagcttggcagtgc

SEQ ID NO: 3367470 - DNA, 25 bp, Homo sapien
gggtgagggattcaccgggattcag

SEQ ID NO: 3367471 - DNA, 25 bp, Homo sapien
cccctttggtctgatgacagtcatg

SEQ ID NO: 3367472 - DNA, 25 bp, Homo sapien
tgagggattcaccgggattcaggta

SEQ ID NO: 3367473 - DNA, 25 bp, Homo sapien
ctgagttgacagttttggtggtagt

SEQ ID NO: 3367474 - DNA, 25 bp, Homo sapien
gagttgacagttttggtggtagtga

SEQ ID NO: 3367475 - DNA, 25 bp, Homo sapien
tgacagttttggtggtagtgaactg

SEQ ID NO: 3367476 - DNA, 25 bp, Homo sapien
gttgacagttttggtggtagtgaac

SEQ ID NO: 3367477 - DNA, 25 bp, Homo sapien
gagtcaacatatccattcctgcaat

SEQ ID NO: 3367478 - DNA, 25 bp, Homo sapien
ctgcaatgttactgagggaaggccc

SEQ ID NO: 3367479 - DNA, 25 bp, Homo sapien
tcactgtgacaatgctggtgcaata

SEQ ID NO: 3367480 - DNA, 25 bp, Homo sapien
gtttgatgaactaatatcccctatt

SEQ ID NO: 3367481 - DNA, 25 bp, Homo sapien
cagcatctcccgatcagtgttatga

SEQ ID NO: 3367482 - DNA, 25 bp, Homo sapien
tctcccgatcagtgttatgacgcat

SEQ ID NO: 3367483 - DNA, 25 bp, Homo sapien
ttcactgcagtctcttggtccacgg

SEQ ID NO: 3367484 - DNA, 25 bp, Homo sapien
cttgggtattcactgcagtctcttg

SEQ ID NO: 3367485 - DNA, 25 bp, Homo sapien
tcaaaaggtgttcctgtacatcagg

SEQ ID NO: 3367486 - DNA, 25 bp, Homo sapien
tggcaaagcccatcacaagtactga

SEQ ID NO: 3367487 - DNA, 25 bp, Homo sapien
cacgtcaggaacagtaggcatagaa

SEQ ID NO: 3367488 - DNA, 25 bp, Homo sapien
tgagaatagtgtttccacgtcagga

SEQ ID NO: 3367489 - DNA, 25 bp, Homo sapien
acaacccaagcggtagaggcagctc

SEQ ID NO: 3367490 - DNA, 25 bp, Homo sapien
cagctcaggcaggactaggtggcca

SEQ ID NO: 3367491 - DNA, 25 bp, Homo sapien
tcccagatacaacccaagcggtaga

SEQ ID NO: 3367492 - DNA, 25 bp, Homo sapien
gctcaggcaggactaggtggccact

SEQ ID NO: 3367493 - DNA, 25 bp, Homo sapien
catagcacacttttttgagaagtcc

SEQ ID NO: 3367494 - DNA, 25 bp, Homo sapien
ttgagaagtccttgataagactcat

SEQ ID NO: 3367495 - DNA, 25 bp, Homo sapien
ttttgagaagtccttgataagactc

SEQ ID NO: 3367496 - DNA, 25 bp, Homo sapien
cgttttcatagcacacttttttgag

SEQ ID NO: 3367497 - DNA, 25 bp, Homo sapien
cccagaggtgccagaagtgacattc

SEQ ID NO: 3367498 - DNA, 25 bp, Homo sapien
ggtaactctttgtcgtggcagctca

SEQ ID NO: 3367499 - DNA, 25 bp, Homo sapien
tgacattcaagctgagggagggcac

SEQ ID NO: 3367500 - DNA, 25 bp, Homo sapien
tagggttaaatgctctcgccacaaa

SEQ ID NO: 3367501 - DNA, 25 bp, Homo sapien
tctgggtgtttgaatggagagtcca

SEQ ID NO: 3367502 - DNA, 25 bp, Homo sapien
ccacatttggtggtggaagtggctc

SEQ ID NO: 3367503 - DNA, 25 bp, Homo sapien
tggctctgtgctggtttttggtccc

SEQ ID NO: 3367504 - DNA, 25 bp, Homo sapien
gccatgctgttggaagtctgggtgt

SEQ ID NO: 3367505 - DNA, 25 bp, Homo sapien
gagagtgctccgttcaaatctctgc

SEQ ID NO: 3367506 - DNA, 25 bp, Homo sapien
ccttaatctgctgcattgagactct

SEQ ID NO: 3367507 - DNA, 25 bp, Homo sapien
acaaggcttcggcaccagagagtgc

SEQ ID NO: 3367508 - DNA, 25 bp, Homo sapien
tccgttcaaatctctgcttttccat

SEQ ID NO: 3367509 - DNA, 25 bp, Homo sapien
ctggaaaatcacatgcccctgtcat

SEQ ID NO: 3367510 - DNA, 25 bp, Homo sapien
ctgcatttgctttgggatgctttaa

SEQ ID NO: 3367511 - DNA, 25 bp, Homo sapien
ctttgggatgctttaaaaccagcat

SEQ ID NO: 3367512 - DNA, 25 bp, Homo sapien
tgctttgggatgctttaaaaccagc

SEQ ID NO: 3367513 - DNA, 25 bp, Homo sapien
catctgcatttgctttgggatgctt

SEQ ID NO: 3367514 - DNA, 25 bp, Homo sapien
tccaggtaacctgacttagcatcca

SEQ ID NO: 3367515 - DNA, 25 bp, Homo sapien
ggaaagagaacacattggctaggca

SEQ ID NO: 3367516 - DNA, 25 bp, Homo sapien
ctagctcctggcctttggtccttct

SEQ ID NO: 3367517 - DNA, 25 bp, Homo sapien
cttctgattgtgagttgtgttggta

SEQ ID NO: 3367518 - DNA, 25 bp, Homo sapien
ttggtggatcttttacctggaccat

SEQ ID NO: 3367519 - DNA, 25 bp, Homo sapien
tttggtggatcttttacctggacca

SEQ ID NO: 3367520 - DNA, 25 bp, Homo sapien
aagtaggtcgcagaccctgccaaga

SEQ ID NO: 3367521 - DNA, 25 bp, Homo sapien
tgccaagatactgaccctggatgcc

SEQ ID NO: 3367522 - DNA, 25 bp, Homo sapien
tgcccttctgaagtaggtcgcagac

SEQ ID NO: 3367523 - DNA, 25 bp, Homo sapien
ttggacttctgctcgggctcccggg

SEQ ID NO: 3367524 - DNA, 25 bp, Homo sapien
ccaggtaaaggtagggagaatgcct

SEQ ID NO: 3367525 - DNA, 25 bp, Homo sapien
gtaaaggtagggagaatgcctcctc

SEQ ID NO: 3367526 - DNA, 25 bp, Homo sapien
aaaggtagggagaatgcctcctctc

SEQ ID NO: 3367527 - DNA, 25 bp, Homo sapien
agaatctctggagtccaggtaaagg

SEQ ID NO: 3367528 - DNA, 25 bp, Homo sapien
tctcagggctcttgctaaataattt

SEQ ID NO: 3367529 - DNA, 25 bp, Homo sapien
tttattagattgaccagccagacct

SEQ ID NO: 3367530 - DNA, 25 bp, Homo sapien
ataatttattagattgaccagccag

SEQ ID NO: 3367531 - DNA, 25 bp, Homo sapien
tttctcagggctcttgctaaataat

SEQ ID NO: 3367532 - DNA, 25 bp, Homo sapien
tccaggctgcgcaacggccttcccc

SEQ ID NO: 3367533 - DNA, 25 bp, Homo sapien
gcggccttccttgtgagaggtgaca

SEQ ID NO: 3367534 - DNA, 25 bp, Homo sapien
gcccgggagcgcttcctccacgctc

SEQ ID NO: 3367535 - DNA, 25 bp, Homo sapien
tccagtctccacagcggccttcccg

SEQ ID NO: 3367536 - DNA, 25 bp, Homo sapien
caaagccttgatcaagtggcgcaat

SEQ ID NO: 3367537 - DNA, 25 bp, Homo sapien
gtggcgcaatattactgaagacaga

SEQ ID NO: 3367538 - DNA, 25 bp, Homo sapien
ggtcacaagacggaggccagtcgtt

SEQ ID NO: 3367539 - DNA, 25 bp, Homo sapien
gccagtcgttagcaggagagccatg

SEQ ID NO: 3367540 - DNA, 25 bp, Homo sapien
cctcagacacctatgcataattgga

SEQ ID NO: 3367541 - DNA, 25 bp, Homo sapien
tcagacacctatgcataattggagc

SEQ ID NO: 3367542 - DNA, 25 bp, Homo sapien
ttgccctcagacacctatgcataat

SEQ ID NO: 3367543 - DNA, 25 bp, Homo sapien
agacacctatgcataattggagcag

SEQ ID NO: 3367544 - DNA, 25 bp, Homo sapien
aaaacacacgtgctggaccggattt

SEQ ID NO: 3367545 - DNA, 25 bp, Homo sapien
taaagacagactcatttgtgggccg

SEQ ID NO: 3367546 - DNA, 25 bp, Homo sapien
gctacatgtagttcgccgactgccg

SEQ ID NO: 3367547 - DNA, 25 bp, Homo sapien
tcagctctctgttgtgaatcgccag

SEQ ID NO: 3367548 - DNA, 25 bp, Homo sapien
caatttccatatttatatagtggca

SEQ ID NO: 3367549 - DNA, 25 bp, Homo sapien
tttccatatttatatagtggcaaaa

SEQ ID NO: 3367550 - DNA, 25 bp, Homo sapien
ttcaatttccatatttatatagtgg

SEQ ID NO: 3367551 - DNA, 25 bp, Homo sapien
aatttccatatttatatagtggcaa

SEQ ID NO: 3367552 - DNA, 25 bp, Homo sapien
tgacatgcgtgagttggtgcaatta

SEQ ID NO: 3367553 - DNA, 25 bp, Homo sapien
gagttggtgcaattaagactgcaac

SEQ ID NO: 3367554 - DNA, 25 bp, Homo sapien
tctgatcctgtcctgcctggatcca

SEQ ID NO: 3367555 - DNA, 25 bp, Homo sapien
actcggctggtgacatgcgtgagtt

SEQ ID NO: 3367556 - DNA, 25 bp, Homo sapien
caatgtcccttcctttatgctcatg

SEQ ID NO: 3367557 - DNA, 25 bp, Homo sapien
gctaagtctggcaagacacatagca

SEQ ID NO: 3367558 - DNA, 25 bp, Homo sapien
taaccaaacttgtaagctaagtctg

SEQ ID NO: 3367559 - DNA, 25 bp, Homo sapien
tcctttgatgggtgggataaaagga

SEQ ID NO: 3367560 - DNA, 25 bp, Homo sapien
tcaagaagtcaataaacatttagcc

SEQ ID NO: 3367561 - DNA, 25 bp, Homo sapien
aagaagtcaataaacatttagccct

SEQ ID NO: 3367562 - DNA, 25 bp, Homo sapien
caagaagtcaataaacatttagccc

SEQ ID NO: 3367563 - DNA, 25 bp, Homo sapien
ttcaagaagtcaataaacatttagc

SEQ ID NO: 3367564 - DNA, 25 bp, Homo sapien
ctggaaacggagctcagagaaaatc

SEQ ID NO: 3367565 - DNA, 25 bp, Homo sapien
taccctgtgatgaatagcagagcat

SEQ ID NO: 3367566 - DNA, 25 bp, Homo sapien
cccctcacaaaagcaacgtattctg

SEQ ID NO: 3367567 - DNA, 25 bp, Homo sapien
tgtcagtacctcctatagtcagaat

SEQ ID NO: 3367568 - DNA, 25 bp, Homo sapien
ctctgtattgcgttttttgcaaaac

SEQ ID NO: 3367569 - DNA, 25 bp, Homo sapien
tttctggactatttctttcgctggg

SEQ ID NO: 3367570 - DNA, 25 bp, Homo sapien
agacactctgtattgcgttttttgc

SEQ ID NO: 3367571 - DNA, 25 bp, Homo sapien
tttcgctgggaggttttacataaca

SEQ ID NO: 3367572 - DNA, 25 bp, Homo sapien
tattaaggacatattcaaagtggcc

SEQ ID NO: 3367573 - DNA, 25 bp, Homo sapien
cggtgaacatatgggccctggaaca

SEQ ID NO: 3367574 - DNA, 25 bp, Homo sapien
caagggagtgcctgcccactgaagg

SEQ ID NO: 3367575 - DNA, 25 bp, Homo sapien
taaatgcacgacgttgccaagggag

SEQ ID NO: 3367576 - DNA, 25 bp, Homo sapien
ttctcttctgtggactgcattgcca

SEQ ID NO: 3367577 - DNA, 25 bp, Homo sapien
tcttctgtggactgcattgccacat

SEQ ID NO: 3367578 - DNA, 25 bp, Homo sapien
tctcttctgtggactgcattgccac

SEQ ID NO: 3367579 - DNA, 25 bp, Homo sapien
tttctcttctgtggactgcattgcc

SEQ ID NO: 3367580 - DNA, 25 bp, Homo sapien
ctgattatagactgctcatgttctc

SEQ ID NO: 3367581 - DNA, 25 bp, Homo sapien
ttctgattatagactgctcatgttc

SEQ ID NO: 3367582 - DNA, 25 bp, Homo sapien
gattatagactgctcatgttctcac

SEQ ID NO: 3367583 - DNA, 25 bp, Homo sapien
atatttttgtcaatttatcccaaag

SEQ ID NO: 3367584 - DNA, 25 bp, Homo sapien
atcctgctgtccaagtttcctacta

SEQ ID NO: 3367585 - DNA, 25 bp, Homo sapien
cctgctgtccaagtttcctactact

SEQ ID NO: 3367586 - DNA, 25 bp, Homo sapien
tcctgctgtccaagtttcctactac

SEQ ID NO: 3367587 - DNA, 25 bp, Homo sapien
taggaaatgaatcccttcttggaac

SEQ ID NO: 3367588 - DNA, 25 bp, Homo sapien
gatgtagcgggcactagtgactagc

SEQ ID NO: 3367589 - DNA, 25 bp, Homo sapien
tatcttaagggtacctgggcagagc

SEQ ID NO: 3367590 - DNA, 25 bp, Homo sapien
taaatacgcggcacctgttaggatg

SEQ ID NO: 3367591 - DNA, 25 bp, Homo sapien
cttctttcctcgtcttctagcttct

SEQ ID NO: 3367592 - DNA, 25 bp, Homo sapien
tcttctttcctcgtcttctagcttc

SEQ ID NO: 3367593 - DNA, 25 bp, Homo sapien
tttcctcgtcttctagcttctggct

SEQ ID NO: 3367594 - DNA, 25 bp, Homo sapien
cctcgtcttctagcttctggctttt

SEQ ID NO: 3367595 - DNA, 25 bp, Homo sapien
tgaacttctgtctaacccacgtggt

SEQ ID NO: 3367596 - DNA, 25 bp, Homo sapien
taaatatccagtggttaaacctcca

SEQ ID NO: 3367597 - DNA, 25 bp, Homo sapien
cagggtaatacaggcataaatatcc

SEQ ID NO: 3367598 - DNA, 25 bp, Homo sapien
tagttaaagtctatcacctccagag

SEQ ID NO: 3367599 - DNA, 25 bp, Homo sapien
tgaccgctggtaattctctattgga

SEQ ID NO: 3367600 - DNA, 25 bp, Homo sapien
gcatttccgcacattgctgtgtaaa

SEQ ID NO: 3367601 - DNA, 25 bp, Homo sapien
catgagtgcaggtgaccgctggtaa

SEQ ID NO: 3367602 - DNA, 25 bp, Homo sapien
ctccacgtggctccgaagccctgct

SEQ ID NO: 3367603 - DNA, 25 bp, Homo sapien
gaactgtagagggttttctgctgct

SEQ ID NO: 3367604 - DNA, 25 bp, Homo sapien
cacaaatttgagaggcacggatgct

SEQ ID NO: 3367605 - DNA, 25 bp, Homo sapien
cgtgggaactatgtcactctggcct

SEQ ID NO: 3367606 - DNA, 25 bp, Homo sapien
tgcttaaaaactgtcgaacttctgg

SEQ ID NO: 3367607 - DNA, 25 bp, Homo sapien
tataataggtttggcgaggatctca

SEQ ID NO: 3367608 - DNA, 25 bp, Homo sapien
tcaaagctgatctaggtgtccctct

SEQ ID NO: 3367609 - DNA, 25 bp, Homo sapien
tgtagctcacttaggaatccatgcc

SEQ ID NO: 3367610 - DNA, 25 bp, Homo sapien
cagtgtttttctcaggaggcccaca

SEQ ID NO: 3367611 - DNA, 25 bp, Homo sapien
tgctatagaagtcacatctgcatca

SEQ ID NO: 3367612 - DNA, 25 bp, Homo sapien
ccataacagctctacatgtgccagt

SEQ ID NO: 3367613 - DNA, 25 bp, Homo sapien
tgtgacctcacaggcgttggaccct

SEQ ID NO: 3367614 - DNA, 25 bp, Homo sapien
tagagcaatggttgctccacacaaa

SEQ ID NO: 3367615 - DNA, 25 bp, Homo sapien
acatccaaccagtaacattatcatg

SEQ ID NO: 3367616 - DNA, 25 bp, Homo sapien
ccaattgtttcggtaaatggacaag

SEQ ID NO: 3367617 - DNA, 25 bp, Homo sapien
gtatagtgcccagggtttcatgcca

SEQ ID NO: 3367618 - DNA, 25 bp, Homo sapien
tcatgccagtagatgacccatccag

SEQ ID NO: 3367619 - DNA, 25 bp, Homo sapien
aatggacaagtgtagcggccccagc

SEQ ID NO: 3367620 - DNA, 25 bp, Homo sapien
gacgcagtttagcagaaacatttat

SEQ ID NO: 3367621 - DNA, 25 bp, Homo sapien
catttattgttcgtattattccatg

SEQ ID NO: 3367622 - DNA, 25 bp, Homo sapien
ggttcacattgacgcagtttagcag

SEQ ID NO: 3367623 - DNA, 25 bp, Homo sapien
cagtcatctttcttggttcacattg

SEQ ID NO: 3367624 - DNA, 25 bp, Homo sapien
ctgacacttgtcaccagcaggagat

SEQ ID NO: 3367625 - DNA, 25 bp, Homo sapien
gcaggagatgtggtctagccattcc

SEQ ID NO: 3367626 - DNA, 25 bp, Homo sapien
tctgacacttgtcaccagcaggaga

SEQ ID NO: 3367627 - DNA, 25 bp, Homo sapien
tgtgttttagcaagcgaacgagtcg

SEQ ID NO: 3367628 - DNA, 25 bp, Homo sapien
gatggcagcattgcacaagatggaa

SEQ ID NO: 3367629 - DNA, 25 bp, Homo sapien
gcagcattgcacaagatggaaaatg

SEQ ID NO: 3367630 - DNA, 25 bp, Homo sapien
gcgaacgagtcgttggaaataaata

SEQ ID NO: 3367631 - DNA, 25 bp, Homo sapien
aaagccatcatgtcccgtgaggctt

SEQ ID NO: 3367632 - DNA, 25 bp, Homo sapien
tgcagcccaacttttctcaagaaaa

SEQ ID NO: 3367633 - DNA, 25 bp, Homo sapien
gtgcagcccaacttttctcaagaaa

SEQ ID NO: 3367634 - DNA, 25 bp, Homo sapien
agtgcagcccaacttttctcaagaa

SEQ ID NO: 3367635 - DNA, 25 bp, Homo sapien
tgagcccctagcaccggaatgcctg

SEQ ID NO: 3367636 - DNA, 25 bp, Homo sapien
ctagcaccggaatgcctggagtccc

SEQ ID NO: 3367637 - DNA, 25 bp, Homo sapien
gtctgtgcagttcacgagctgctca

SEQ ID NO: 3367638 - DNA, 25 bp, Homo sapien
gcagttcacgagctgctcagaagat

SEQ ID NO: 3367639 - DNA, 25 bp, Homo sapien
aatacagacggtaaactacactcct

SEQ ID NO: 3367640 - DNA, 25 bp, Homo sapien
cacatacacgtgaaagatgatagct

SEQ ID NO: 3367641 - DNA, 25 bp, Homo sapien
gacggtaaactacactccttctgga

SEQ ID NO: 3367642 - DNA, 25 bp, Homo sapien
gaataaaatccagcacatacacgtg

SEQ ID NO: 3367643 - DNA, 25 bp, Homo sapien
ccatgaagaactggggagattctgt

SEQ ID NO: 3367644 - DNA, 25 bp, Homo sapien
gcttcgtctgaaaagtctttgattt

SEQ ID NO: 3367645 - DNA, 25 bp, Homo sapien
caagatgatactcctttggtgagct

SEQ ID NO: 3367646 - DNA, 25 bp, Homo sapien
cctaagacattgtggtatcttcttg

SEQ ID NO: 3367647 - DNA, 25 bp, Homo sapien
ttcttctgcttcgtctgaaaagtct

SEQ ID NO: 3367648 - DNA, 25 bp, Homo sapien
gtggagaataaggtacttcattaca

SEQ ID NO: 3367649 - DNA, 25 bp, Homo sapien
gagaataaggtacttcattacaaac

SEQ ID NO: 3367650 - DNA, 25 bp, Homo sapien
ggagaataaggtacttcattacaaa

SEQ ID NO: 3367651 - DNA, 25 bp, Homo sapien
cagagtccagtttctaacccgtagg

SEQ ID NO: 3367652 - DNA, 25 bp, Homo sapien
ctcttgggagcactgggtaccgagc

SEQ ID NO: 3367653 - DNA, 25 bp, Homo sapien
ttaaccgtccaacattgagacagga

SEQ ID NO: 3367654 - DNA, 25 bp, Homo sapien
tgacaggaacagttgaccagagtcc

SEQ ID NO: 3367655 - DNA, 25 bp, Homo sapien
tcatccttgttaattaaccgtccaa

SEQ ID NO: 3367656 - DNA, 25 bp, Homo sapien
ctttcgtttctgtattgttgctgct

SEQ ID NO: 3367657 - DNA, 25 bp, Homo sapien
gttgctgctgttgtaacttttatta

SEQ ID NO: 3367658 - DNA, 25 bp, Homo sapien
ctgttgtaacttttattatctgacc

SEQ ID NO: 3367659 - DNA, 25 bp, Homo sapien
gctgctgttgtaacttttattatct

SEQ ID NO: 3367660 - DNA, 25 bp, Homo sapien
cacgtgcaggactaaatggtttatg

SEQ ID NO: 3367661 - DNA, 25 bp, Homo sapien
cccacgtgcaggactaaatggttta

SEQ ID NO: 3367662 - DNA, 25 bp, Homo sapien
caggcccacgtgcaggactaaatgg

SEQ ID NO: 3367663 - DNA, 25 bp, Homo sapien
ggcccacgtgcaggactaaatggtt

SEQ ID NO: 3367664 - DNA, 25 bp, Homo sapien
tcctcctttgactctttgtggtcag

SEQ ID NO: 3367665 - DNA, 25 bp, Homo sapien
cttgaacaagcctgcagtgcaaaaa

SEQ ID NO: 3367666 - DNA, 25 bp, Homo sapien
tcagtgctaatgtaagtctttgctt

SEQ ID NO: 3367667 - DNA, 25 bp, Homo sapien
gaacaagcctgcagtgcaaaaatgg

SEQ ID NO: 3367668 - DNA, 25 bp, Homo sapien
tcatgccaactgcacatcgtctgtg

SEQ ID NO: 3367669 - DNA, 25 bp, Homo sapien
tcaacgcaaggaagcaattataggc

SEQ ID NO: 3367670 - DNA, 25 bp, Homo sapien
aattataggcctcatgccaactgca

SEQ ID NO: 3367671 - DNA, 25 bp, Homo sapien
gtctgtgtgagtccacgtctccagg

SEQ ID NO: 3367672 - DNA, 25 bp, Homo sapien
gaggcacaagtcctgatagatctcc

SEQ ID NO: 3367673 - DNA, 25 bp, Homo sapien
gcttctggcacggatttctctgcag

SEQ ID NO: 3367674 - DNA, 25 bp, Homo sapien
agcctctgcggaggcacaagtcctg

SEQ ID NO: 3367675 - DNA, 25 bp, Homo sapien
tctggcacggatttctctgcaggcc

SEQ ID NO: 3367676 - DNA, 25 bp, Homo sapien
agttggaattcaggcttcctttgcc

SEQ ID NO: 3367677 - DNA, 25 bp, Homo sapien
ttcttcacttgccctctgggatctg

SEQ ID NO: 3367678 - DNA, 25 bp, Homo sapien
ccagttggaattcaggcttcctttg

SEQ ID NO: 3367679 - DNA, 25 bp, Homo sapien
ggttctctcctgttagcatcgtttc

SEQ ID NO: 3367680 - DNA, 25 bp, Homo sapien
tgccagtcccaagtgtattagcaaa

SEQ ID NO: 3367681 - DNA, 25 bp, Homo sapien
gtttgccagtcccaagtgtattagc

SEQ ID NO: 3367682 - DNA, 25 bp, Homo sapien
ccagtcccaagtgtattagcaaaat

SEQ ID NO: 3367683 - DNA, 25 bp, Homo sapien
caggtttgccagtcccaagtgtatt

SEQ ID NO: 3367684 - DNA, 25 bp, Homo sapien
catattacaggtcacgggcaaacag

SEQ ID NO: 3367685 - DNA, 25 bp, Homo sapien
caatgaagtgagtccggtgcagagt

SEQ ID NO: 3367686 - DNA, 25 bp, Homo sapien
gcatacagacgtgttctgaaccaca

SEQ ID NO: 3367687 - DNA, 25 bp, Homo sapien
cgatagccggtatcccagcaggtga

SEQ ID NO: 3367688 - DNA, 25 bp, Homo sapien
aaaagggggatttcttgcatgttct

SEQ ID NO: 3367689 - DNA, 25 bp, Homo sapien
tcaaaagggggatttcttgcatgtt

SEQ ID NO: 3367690 - DNA, 25 bp, Homo sapien
ctcaaaagggggatttcttgcatgt

SEQ ID NO: 3367691 - DNA, 25 bp, Homo sapien
caaaagggggatttcttgcatgttc

SEQ ID NO: 3367692 - DNA, 25 bp, Homo sapien
cacacaagatatctgtgacctcaca

SEQ ID NO: 3367693 - DNA, 25 bp, Homo sapien
cccacacaagatatctgtgacctca

SEQ ID NO: 3367694 - DNA, 25 bp, Homo sapien
ctcccacacaagatatctgtgacct

SEQ ID NO: 3367695 - DNA, 25 bp, Homo sapien
acacaagatatctgtgacctcacat

SEQ ID NO: 3367696 - DNA, 25 bp, Homo sapien
gaagtcccgttgaaccactctggaa

SEQ ID NO: 3367697 - DNA, 25 bp, Homo sapien
cacttcgaccgatggcatgatctgg

SEQ ID NO: 3367698 - DNA, 25 bp, Homo sapien
catctcttttcgtagcagtggccac

SEQ ID NO: 3367699 - DNA, 25 bp, Homo sapien
tctgcacactcatgcgaagtcccgt

SEQ ID NO: 3367700 - DNA, 25 bp, Homo sapien
ttcacacgatggtaagtttccgcgg

SEQ ID NO: 3367701 - DNA, 25 bp, Homo sapien
catgattctatctcgatttggtgaa

SEQ ID NO: 3367702 - DNA, 25 bp, Homo sapien
gcggtcatactcttcttctaccgca

SEQ ID NO: 3367703 - DNA, 25 bp, Homo sapien
gtgtcatgattctatctcgatttgg

SEQ ID NO: 3367704 - DNA, 25 bp, Homo sapien
tgaccaagctcaggtgctgctacga

SEQ ID NO: 3367705 - DNA, 25 bp, Homo sapien
tacagtgacaattggcacccagtgg

SEQ ID NO: 3367706 - DNA, 25 bp, Homo sapien
taccataggagcgttttacaataag

SEQ ID NO: 3367707 - DNA, 25 bp, Homo sapien
gctgctacgagtgcaaaagatccca

SEQ ID NO: 3367708 - DNA, 25 bp, Homo sapien
ctgccagttcaacaaacaatttatg

SEQ ID NO: 3367709 - DNA, 25 bp, Homo sapien
aatgtggctgaaacccttttgggct

SEQ ID NO: 3367710 - DNA, 25 bp, Homo sapien
tcaacaaacaatttatgggtccacc

SEQ ID NO: 3367711 - DNA, 25 bp, Homo sapien
tctcatgggtgggaattgtgtctcc

SEQ ID NO: 3367712 - DNA, 25 bp, Homo sapien
ataactgtgatagtagcagtcatcc

SEQ ID NO: 3367713 - DNA, 25 bp, Homo sapien
cccaaacagctgctaagagcaacca

SEQ ID NO: 3367714 - DNA, 25 bp, Homo sapien
catcctggacaaaagttggtcctca

SEQ ID NO: 3367715 - DNA, 25 bp, Homo sapien
tcctggacaaaagttggtcctcaaa

SEQ ID NO: 3367716 - DNA, 25 bp, Homo sapien
cagccagccttgagtgtccgtgcct

SEQ ID NO: 3367717 - DNA, 25 bp, Homo sapien
gctttggtgttgacagagcccaatc

SEQ ID NO: 3367718 - DNA, 25 bp, Homo sapien
ctgtcagcaccagttatcctcaggg

SEQ ID NO: 3367719 - DNA, 25 bp, Homo sapien
aacttgcaggccataggacagccag

SEQ ID NO: 3367720 - DNA, 25 bp, Homo sapien
tgtgatccacccacctcagcctccc

SEQ ID NO: 3367721 - DNA, 25 bp, Homo sapien
cgcccgccaccacacgtggccaatt

SEQ ID NO: 3367722 - DNA, 25 bp, Homo sapien
ttgtgatccacccacctcagcctcc

SEQ ID NO: 3367723 - DNA, 25 bp, Homo sapien
gcgcccgccaccacacgtggccaat

SEQ ID NO: 3367724 - DNA, 25 bp, Homo sapien
tcatgtatttgaatcatgtgtctca

SEQ ID NO: 3367725 - DNA, 25 bp, Homo sapien
catgtatttgaatcatgtgtctcac

SEQ ID NO: 3367726 - DNA, 25 bp, Homo sapien
gattcaggtacaggcctaaaactcc

SEQ ID NO: 3367727 - DNA, 25 bp, Homo sapien
tcaacatcgcatttcacaggatgcc

SEQ ID NO: 3367728 - DNA, 25 bp, Homo sapien
cacatgcacagacacgctccatttg

SEQ ID NO: 3367729 - DNA, 25 bp, Homo sapien
tctgcgattcaggtacaggcctaaa

SEQ ID NO: 3367730 - DNA, 25 bp, Homo sapien
ttctgttaggctgggttctccgtgg

SEQ ID NO: 3367731 - DNA, 25 bp, Homo sapien
gccttctgttaggctgggttctccg

SEQ ID NO: 3367732 - DNA, 25 bp, Homo sapien
ccttctgttaggctgggttctccgt

SEQ ID NO: 3367733 - DNA, 25 bp, Homo sapien
cctgccttctgttaggctgggttct

SEQ ID NO: 3367734 - DNA, 25 bp, Homo sapien
cccaaaaaactgacagtgtgtctgc

SEQ ID NO: 3367735 - DNA, 25 bp, Homo sapien
gccacatacaatatttatgcaagcc

SEQ ID NO: 3367736 - DNA, 25 bp, Homo sapien
tgtctgccaataatagccacataca

SEQ ID NO: 3367737 - DNA, 25 bp, Homo sapien
atacaatatttatgcaagcctggct

SEQ ID NO: 3367738 - DNA, 25 bp, Homo sapien
tgcagcgtgatgtttgtcctcctcc

SEQ ID NO: 3367739 - DNA, 25 bp, Homo sapien
gcagcgtgatgtttgtcctcctcca

SEQ ID NO: 3367740 - DNA, 25 bp, Homo sapien
aggtctgcagcgtgatgtttgtcct

SEQ ID NO: 3367741 - DNA, 25 bp, Homo sapien
tctgcagcgtgatgtttgtcctcct

SEQ ID NO: 3367742 - DNA, 25 bp, Homo sapien
caggacatccacaattttcattccc

SEQ ID NO: 3367743 - DNA, 25 bp, Homo sapien
atgtggggtcgcagccacgcggcgt

SEQ ID NO: 3367744 - DNA, 25 bp, Homo sapien
tggcccgcactgctaacttccagga

SEQ ID NO: 3367745 - DNA, 25 bp, Homo sapien
gcggccccatgccagcggccagcag

SEQ ID NO: 3367746 - DNA, 25 bp, Homo sapien
tgtcaggagccgagtccacatctct

SEQ ID NO: 3367747 - DNA, 25 bp, Homo sapien
tccaggttagtaaagtggtcagtga

SEQ ID NO: 3367748 - DNA, 25 bp, Homo sapien
tcccttcacagtcgcatgagagctg

SEQ ID NO: 3367749 - DNA, 25 bp, Homo sapien
ggtgtctccttacaacaccatggtg

SEQ ID NO: 3367750 - DNA, 25 bp, Homo sapien
tgtggatgccgttgaatagctgcag

SEQ ID NO: 3367751 - DNA, 25 bp, Homo sapien
tgttcttccctagccaatgaccggg

SEQ ID NO: 3367752 - DNA, 25 bp, Homo sapien
tagctgcagcaatatctaccagatg

SEQ ID NO: 3367753 - DNA, 25 bp, Homo sapien
tacaataaggttgggttagcaagca

SEQ ID NO: 3367754 - DNA, 25 bp, Homo sapien
ctcactgcacaaatgaggcccacag

SEQ ID NO: 3367755 - DNA, 25 bp, Homo sapien
atacacaacacatcagccctcactg

SEQ ID NO: 3367756 - DNA, 25 bp, Homo sapien
catcagccctcactgcacaaatgag

SEQ ID NO: 3367757 - DNA, 25 bp, Homo sapien
actgcacaaatgaggcccacagctt

SEQ ID NO: 3367758 - DNA, 25 bp, Homo sapien
catccttgtgggtacagacgcgctt

SEQ ID NO: 3367759 - DNA, 25 bp, Homo sapien
tgtgggtacagacgcgcttccactg

SEQ ID NO: 3367760 - DNA, 25 bp, Homo sapien
gactgctgagcagaaacatccttgt

SEQ ID NO: 3367761 - DNA, 25 bp, Homo sapien
gcagaaacatccttgtgggtacaga

SEQ ID NO: 3367762 - DNA, 25 bp, Homo sapien
ttgtttgcttgtttggtttgcttct

SEQ ID NO: 3367763 - DNA, 25 bp, Homo sapien
tttgcttgtttggtttgcttctttc

SEQ ID NO: 3367764 - DNA, 25 bp, Homo sapien
gcttgtttggtttgcttctttcttc

SEQ ID NO: 3367765 - DNA, 25 bp, Homo sapien
tgtttgcttgtttggtttgcttctt

SEQ ID NO: 3367766 - DNA, 25 bp, Homo sapien
ttccgcagaccctggcctgtaatag

SEQ ID NO: 3367767 - DNA, 25 bp, Homo sapien
tccgcagaccctggcctgtaatagg

SEQ ID NO: 3367768 - DNA, 25 bp, Homo sapien
gcagaccctggcctgtaataggtgc

SEQ ID NO: 3367769 - DNA, 25 bp, Homo sapien
gaccctggcctgtaataggtgccat

SEQ ID NO: 3367770 - DNA, 25 bp, Homo sapien
gacatctggtctgccggcatctgag

SEQ ID NO: 3367771 - DNA, 25 bp, Homo sapien
gacaagctgagaggccgtcagcgtt

SEQ ID NO: 3367772 - DNA, 25 bp, Homo sapien
agcgttgcacgaagccttgctgcct

SEQ ID NO: 3367773 - DNA, 25 bp, Homo sapien
gggaagaggctgaacaaagtatttc

SEQ ID NO: 3367774 - DNA, 25 bp, Homo sapien
ttctgcgaagtggctacttcctata

SEQ ID NO: 3367775 - DNA, 25 bp, Homo sapien
tctgcgaagtggctacttcctatac

SEQ ID NO: 3367776 - DNA, 25 bp, Homo sapien
ggttcgcagttgtcacctccaaggc

SEQ ID NO: 3367777 - DNA, 25 bp, Homo sapien
catgagaagcgcacgatttagttca

SEQ ID NO: 3367778 - DNA, 25 bp, Homo sapien
ttagttcagtgttctccgtcctcca

SEQ ID NO: 3367779 - DNA, 25 bp, Homo sapien
gtcgtgtgcgtaacccaacatgaga

SEQ ID NO: 3367780 - DNA, 25 bp, Homo sapien
cgccctcttccattgagtgctgccg

SEQ ID NO: 3367781 - DNA, 25 bp, Homo sapien
ccgccctcttccattgagtgctgcc

SEQ ID NO: 3367782 - DNA, 25 bp, Homo sapien
gccctcttccattgagtgctgccgc

SEQ ID NO: 3367783 - DNA, 25 bp, Homo sapien
agagccgaaacgtcatctgcccctg

SEQ ID NO: 3367784 - DNA, 25 bp, Homo sapien
gatttccgtggctgttctgagtccc

SEQ ID NO: 3367785 - DNA, 25 bp, Homo sapien
ggctgttctgagtcccacacattca

SEQ ID NO: 3367786 - DNA, 25 bp, Homo sapien
gcccctgggatttccgtggctgttc

SEQ ID NO: 3367787 - DNA, 25 bp, Homo sapien
taaggcacatttggtggattctttc

SEQ ID NO: 3367788 - DNA, 25 bp, Homo sapien
tcacctaagtcaacctgttctaagg

SEQ ID NO: 3367789 - DNA, 25 bp, Homo sapien
ggtttctttatatcgactacatcac

SEQ ID NO: 3367790 - DNA, 25 bp, Homo sapien
gacagcacggcatgcctgaagagct

SEQ ID NO: 3367791 - DNA, 25 bp, Homo sapien
gaagatcgaagttcttcccatggcc

SEQ ID NO: 3367792 - DNA, 25 bp, Homo sapien
tcccatggcctacggggtcccagag

SEQ ID NO: 3367793 - DNA, 25 bp, Homo sapien
ctgcatagcctctccacactcgcct

SEQ ID NO: 3367794 - DNA, 25 bp, Homo sapien
atggcctacggggtcccagagtctg

SEQ ID NO: 3367795 - DNA, 25 bp, Homo sapien
actattccctctcctgtcagggagg

SEQ ID NO: 3367796 - DNA, 25 bp, Homo sapien
tcagggaggctctgccgtccacgct

SEQ ID NO: 3367797 - DNA, 25 bp, Homo sapien
tctcctgtcagggaggctctgccgt

SEQ ID NO: 3367798 - DNA, 25 bp, Homo sapien
ttccctctcctgtcagggaggctct

SEQ ID NO: 3367799 - DNA, 25 bp, Homo sapien
gcccttcgcgggattcccaaatcta

SEQ ID NO: 3367800 - DNA, 25 bp, Homo sapien
gcagcccttcgcgggattcccaaat

SEQ ID NO: 3367801 - DNA, 25 bp, Homo sapien
ccccgcgcctgggcctcgccccagc

SEQ ID NO: 3367802 - DNA, 25 bp, Homo sapien
cccgcgcctgggcctcgccccagcc

SEQ ID NO: 3367803 - DNA, 25 bp, Homo sapien
tcaaagcactgagggctagagcagc

SEQ ID NO: 3367804 - DNA, 25 bp, Homo sapien
ttgtagtgaagtgccttcaaccact

SEQ ID NO: 3367805 - DNA, 25 bp, Homo sapien
caaagacggcttcgtttgtagtgaa

SEQ ID NO: 3367806 - DNA, 25 bp, Homo sapien
ctgcttcgtaggcatacctcttcag

SEQ ID NO: 3367807 - DNA, 25 bp, Homo sapien
ggccactgcttgtatagcttacgag

SEQ ID NO: 3367808 - DNA, 25 bp, Homo sapien
cccacatgtagggttttagctatgt

SEQ ID NO: 3367809 - DNA, 25 bp, Homo sapien
cactgcttgtatagcttacgaggtt

SEQ ID NO: 3367810 - DNA, 25 bp, Homo sapien
cttgtatagcttacgaggtttaatc

SEQ ID NO: 3367811 - DNA, 25 bp, Homo sapien
gcaactcctcacaagtgaatggtat

SEQ ID NO: 3367812 - DNA, 25 bp, Homo sapien
gccagcaactcctcacaagtgaatg

SEQ ID NO: 3367813 - DNA, 25 bp, Homo sapien
cagcaactcctcacaagtgaatggt

SEQ ID NO: 3367814 - DNA, 25 bp, Homo sapien
actcctcacaagtgaatggtattaa

SEQ ID NO: 3367815 - DNA, 25 bp, Homo sapien
cagctaaataaacatagtttttgtg

SEQ ID NO: 3367816 - DNA, 25 bp, Homo sapien
ttccgcggcgtcctggcatccttaa

SEQ ID NO: 3367817 - DNA, 25 bp, Homo sapien
cggcgtcctggcatccttaaaatat

SEQ ID NO: 3367818 - DNA, 25 bp, Homo sapien
tttttgtgtggccagcacgtactgc

SEQ ID NO: 3367819 - DNA, 25 bp, Homo sapien
tttcagaacagtctcccccatgtgt

SEQ ID NO: 3367820 - DNA, 25 bp, Homo sapien
ctaagtggacagctgtttagtttca

SEQ ID NO: 3367821 - DNA, 25 bp, Homo sapien
tagtttcagaacagtctcccccatg

SEQ ID NO: 3367822 - DNA, 25 bp, Homo sapien
tggacagctgtttagtttcagaaca

SEQ ID NO: 3367823 - DNA, 25 bp, Homo sapien
catgcatcgcgcctttccctttggg

SEQ ID NO: 3367824 - DNA, 25 bp, Homo sapien
tccctttgggaagcacttaatgagc

SEQ ID NO: 3367825 - DNA, 25 bp, Homo sapien
ctcccagccatgcatcgcgcctttc

SEQ ID NO: 3367826 - DNA, 25 bp, Homo sapien
gcatcgcgcctttccctttgggaag

SEQ ID NO: 3367827 - DNA, 25 bp, Homo sapien
tgttcattcagcttcataaaacccg

SEQ ID NO: 3367828 - DNA, 25 bp, Homo sapien
ctggggctgtctttgttcctcctgc

SEQ ID NO: 3367829 - DNA, 25 bp, Homo sapien
gccattttgttcattcagcttcata

SEQ ID NO: 3367830 - DNA, 25 bp, Homo sapien
ctgctttccctgcactgccattttg

SEQ ID NO: 3367831 - DNA, 25 bp, Homo sapien
cacctcgacggctttgcatgtgtaa

SEQ ID NO: 3367832 - DNA, 25 bp, Homo sapien
tgtaattctctgttttggaattgcc

SEQ ID NO: 3367833 - DNA, 25 bp, Homo sapien
tgttttggaattgcctctctccagc

SEQ ID NO: 3367834 - DNA, 25 bp, Homo sapien
ccacttcttcacctcgacggctttg

SEQ ID NO: 3367835 - DNA, 25 bp, Homo sapien
cttcaattggaatcttaattccata

SEQ ID NO: 3367836 - DNA, 25 bp, Homo sapien
cagaatagctccaagtggtagtgga

SEQ ID NO: 3367837 - DNA, 25 bp, Homo sapien
tggaatcttaattccatatgcacag

SEQ ID NO: 3367838 - DNA, 25 bp, Homo sapien
tatgcacagaatagctccaagtggt

SEQ ID NO: 3367839 - DNA, 25 bp, Homo sapien
ccacgattcgggtcagagctctcca

SEQ ID NO: 3367840 - DNA, 25 bp, Homo sapien
ggcgtccacgattcgggtcagagct

SEQ ID NO: 3367841 - DNA, 25 bp, Homo sapien
cggaatgtccgtggtgcagtgacgg

SEQ ID NO: 3367842 - DNA, 25 bp, Homo sapien
tgcagtgacggcgtccacgattcgg

SEQ ID NO: 3367843 - DNA, 25 bp, Homo sapien
ctcttgtatctctgagtatctggaa

SEQ ID NO: 3367844 - DNA, 25 bp, Homo sapien
ttcaaatacaaagttctcttgtatc

SEQ ID NO: 3367845 - DNA, 25 bp, Homo sapien
tggaatgaccacatagttctcctat

SEQ ID NO: 3367846 - DNA, 25 bp, Homo sapien
tatctctgagtatctggaatgacca

SEQ ID NO: 3367847 - DNA, 25 bp, Homo sapien
tgtctcgtggtcttggattttacac

SEQ ID NO: 3367848 - DNA, 25 bp, Homo sapien
caaagtcttgttctccaactttctg

SEQ ID NO: 3367849 - DNA, 25 bp, Homo sapien
tgtaaatgagggacatctcggtcac

SEQ ID NO: 3367850 - DNA, 25 bp, Homo sapien
ccttggaaggcgcaatgggagaaat

SEQ ID NO: 3367851 - DNA, 25 bp, Homo sapien
ctgagagctccttggaaggcgcaat

SEQ ID NO: 3367852 - DNA, 25 bp, Homo sapien
gaaggaccatgttgtaagatggtga

SEQ ID NO: 3367853 - DNA, 25 bp, Homo sapien
tagaatgatatctgcccgtgttcgc

SEQ ID NO: 3367854 - DNA, 25 bp, Homo sapien
tctgcagagccgtggtatatgccca

SEQ ID NO: 3367855 - DNA, 25 bp, Homo sapien
accgaccccgtgagcaagactttct

SEQ ID NO: 3367856 - DNA, 25 bp, Homo sapien
tgttcgcagtcaaggaaaacgccaa

SEQ ID NO: 3367857 - DNA, 25 bp, Homo sapien
aatctcatagttctcaggtcctcag

SEQ ID NO: 3367858 - DNA, 25 bp, Homo sapien
ttctcaggtcctcagatagtgccag

SEQ ID NO: 3367859 - DNA, 25 bp, Homo sapien
gtttcaggatccaatgttaaatgtc

SEQ ID NO: 3367860 - DNA, 25 bp, Homo sapien
tcatagttctcaggtcctcagatag

SEQ ID NO: 3367861 - DNA, 25 bp, Homo sapien
cccaggtaactgtgcatagcttcag

SEQ ID NO: 3367862 - DNA, 25 bp, Homo sapien
tctaactattgtgatctttcagggc

SEQ ID NO: 3367863 - DNA, 25 bp, Homo sapien
tcacacctgcatgaatacgtcttct

SEQ ID NO: 3367864 - DNA, 25 bp, Homo sapien
gctgagaacacgcaggctcaatgaa

SEQ ID NO: 3367865 - DNA, 25 bp, Homo sapien
gatatgagcgggctccagatgctca

SEQ ID NO: 3367866 - DNA, 25 bp, Homo sapien
gctgctgagtcctcttatgtggcat

SEQ ID NO: 3367867 - DNA, 25 bp, Homo sapien
caggtctgtgatatgagcgggctcc

SEQ ID NO: 3367868 - DNA, 25 bp, Homo sapien
ggctccagatgctcaagcagcagtg

SEQ ID NO: 3367869 - DNA, 25 bp, Homo sapien
gttcagaagccctggcttcactctc

SEQ ID NO: 3367870 - DNA, 25 bp, Homo sapien
cttgagcaatgccaaggtgccttcc

SEQ ID NO: 3367871 - DNA, 25 bp, Homo sapien
gctttaggaggctgcggacctgttc

SEQ ID NO: 3367872 - DNA, 25 bp, Homo sapien
ggtgccttccccacactttttctca

SEQ ID NO: 3367873 - DNA, 25 bp, Homo sapien
tctctctccccacacggcccagtct

SEQ ID NO: 3367874 - DNA, 25 bp, Homo sapien
gttctctctccccacacggcccagt

SEQ ID NO: 3367875 - DNA, 25 bp, Homo sapien
ttctctctccccacacggcccagtc

SEQ ID NO: 3367876 - DNA, 25 bp, Homo sapien
tcaagttcaggaacaagagttcggt

SEQ ID NO: 3367877 - DNA, 25 bp, Homo sapien
ctgcagaagcatttcttcgttacta

SEQ ID NO: 3367878 - DNA, 25 bp, Homo sapien
tactattcaacaacctcaagttcag

SEQ ID NO: 3367879 - DNA, 25 bp, Homo sapien
tcaggaacaagagttcggtaacttc

SEQ ID NO: 3367880 - DNA, 25 bp, Homo sapien
ctctcaggttcaagtcagatatgca

SEQ ID NO: 3367881 - DNA, 25 bp, Homo sapien
gattcagaagggtttctctcaggtt

SEQ ID NO: 3367882 - DNA, 25 bp, Homo sapien
caacaaccggagtctcatactatac

SEQ ID NO: 3367883 - DNA, 25 bp, Homo sapien
catctcctctagctcggtggcaagc

SEQ ID NO: 3367884 - DNA, 25 bp, Homo sapien
catcagtcaatatgcttttagctgc

SEQ ID NO: 3367885 - DNA, 25 bp, Homo sapien
tctccctcgatgtgttcaatatttc

SEQ ID NO: 3367886 - DNA, 25 bp, Homo sapien
ctgaatcatcgccattctttcttgc

SEQ ID NO: 3367887 - DNA, 25 bp, Homo sapien
tgcttcaagtttctccctcgatgtg

SEQ ID NO: 3367888 - DNA, 25 bp, Homo sapien
ctgtaattctcagcagcctcttgta

SEQ ID NO: 3367889 - DNA, 25 bp, Homo sapien
cagcagcctcttgtatcccacacac

SEQ ID NO: 3367890 - DNA, 25 bp, Homo sapien
tctcagcagcctcttgtatcccaca

SEQ ID NO: 3367891 - DNA, 25 bp, Homo sapien
attctcagcagcctcttgtatccca

SEQ ID NO: 3367892 - DNA, 25 bp, Homo sapien
ccaggtgtgtttcacaataggcatc

SEQ ID NO: 3367893 - DNA, 25 bp, Homo sapien
cacagaacagccgtgttggttccag

SEQ ID NO: 3367894 - DNA, 25 bp, Homo sapien
gtgatttggtcaacatcacagaaca

SEQ ID NO: 3367895 - DNA, 25 bp, Homo sapien
gagtgtgatttggtcaacatcacag

SEQ ID NO: 3367896 - DNA, 25 bp, Homo sapien
ggctgagccttttggacatcctggt

SEQ ID NO: 3367897 - DNA, 25 bp, Homo sapien
tgatgttgtgctgtaactgagggct

SEQ ID NO: 3367898 - DNA, 25 bp, Homo sapien
gagccttttggacatcctggtaggg

SEQ ID NO: 3367899 - DNA, 25 bp, Homo sapien
tggactgtatgcttctactgaggta

SEQ ID NO: 3367900 - DNA, 25 bp, Homo sapien
ctgtgaatgagaaaaaatggtggct

SEQ ID NO: 3367901 - DNA, 25 bp, Homo sapien
cctttgttttctggagcaggcacac

SEQ ID NO: 3367902 - DNA, 25 bp, Homo sapien
tgttttctggagcaggcacacacac

SEQ ID NO: 3367903 - DNA, 25 bp, Homo sapien
tgagaaaaaatggtggcttcctttg

SEQ ID NO: 3367904 - DNA, 25 bp, Homo sapien
agcgggtcggcgctctggactcctc

SEQ ID NO: 3367905 - DNA, 25 bp, Homo sapien
tcaaatccaacaaatttctggcagc

SEQ ID NO: 3367906 - DNA, 25 bp, Homo sapien
aataagtccacgcagacagagcggg

SEQ ID NO: 3367907 - DNA, 25 bp, Homo sapien
tcagagtccacgaagatccaaggaa

SEQ ID NO: 3367908 - DNA, 25 bp, Homo sapien
acctcagcttccggagtagctggga

SEQ ID NO: 3367909 - DNA, 25 bp, Homo sapien
cgatcctcccacctcagcttccgga

SEQ ID NO: 3367910 - DNA, 25 bp, Homo sapien
agcctctggaactcccaggctccag

SEQ ID NO: 3367911 - DNA, 25 bp, Homo sapien
cagcctctggaactcccaggctcca

SEQ ID NO: 3367912 - DNA, 25 bp, Homo sapien
gctgcccgcggtctggccgtgagcg

SEQ ID NO: 3367913 - DNA, 25 bp, Homo sapien
cggtctggccgtgagcgccctcgct

SEQ ID NO: 3367914 - DNA, 25 bp, Homo sapien
gtctggccgtgagcgccctcgctcc

SEQ ID NO: 3367915 - DNA, 25 bp, Homo sapien
tgacgcgctgcccgcggtctggccg

SEQ ID NO: 3367916 - DNA, 25 bp, Homo sapien
atgagtcaccacaccgaaccaaggt

SEQ ID NO: 3367917 - DNA, 25 bp, Homo sapien
ggaatgagtcaccacaccgaaccaa

SEQ ID NO: 3367918 - DNA, 25 bp, Homo sapien
acaggcgctgcacgaccacacccgg

SEQ ID NO: 3367919 - DNA, 25 bp, Homo sapien
tttcataactcttgagcttactcat

SEQ ID NO: 3367920 - DNA, 25 bp, Homo sapien
gctttcataactcttgagcttactc

SEQ ID NO: 3367921 - DNA, 25 bp, Homo sapien
tgagctttcataactcttgagctta

SEQ ID NO: 3367922 - DNA, 25 bp, Homo sapien
gagctttcataactcttgagcttac

SEQ ID NO: 3367923 - DNA, 25 bp, Homo sapien
caggccttctcaaaaccaccttggg

SEQ ID NO: 3367924 - DNA, 25 bp, Homo sapien
tcaggccttctcaaaaccaccttgg

SEQ ID NO: 3367925 - DNA, 25 bp, Homo sapien
ggtgtcatcctcgcacaggggcctt

SEQ ID NO: 3367926 - DNA, 25 bp, Homo sapien
gccttgctaatctctgtatagttcc

SEQ ID NO: 3367927 - DNA, 25 bp, Homo sapien
acgaatttgggtgtcatcctcgcac

SEQ ID NO: 3367928 - DNA, 25 bp, Homo sapien
aggggccttgctaatctctgtatag

SEQ ID NO: 3367929 - DNA, 25 bp, Homo sapien
cagatacgtttgtgaggatgctgac

SEQ ID NO: 3367930 - DNA, 25 bp, Homo sapien
taggcccactgaattcttaccgtac

SEQ ID NO: 3367931 - DNA, 25 bp, Homo sapien
tgaagtgacataatgaccagatacg

SEQ ID NO: 3367932 - DNA, 25 bp, Homo sapien
taaaataatagtgcttccgtaagag

SEQ ID NO: 3367933 - DNA, 25 bp, Homo sapien
tacgtaataatggtgccctctgagc

SEQ ID NO: 3367934 - DNA, 25 bp, Homo sapien
ctacgtaataatggtgccctctgag

SEQ ID NO: 3367935 - DNA, 25 bp, Homo sapien
attttctggcctttatatagtttgg

SEQ ID NO: 3367936 - DNA, 25 bp, Homo sapien
tccttgaggcaagaactcgctatat

SEQ ID NO: 3367937 - DNA, 25 bp, Homo sapien
gcaagaactcgctatattttctggc

SEQ ID NO: 3367938 - DNA, 25 bp, Homo sapien
tgaggcaagaactcgctatattttc

SEQ ID NO: 3367939 - DNA, 25 bp, Homo sapien
agctgcagcctgtgaccctggactc

SEQ ID NO: 3367940 - DNA, 25 bp, Homo sapien
gtttacactgtggtgaggagaagct

SEQ ID NO: 3367941 - DNA, 25 bp, Homo sapien
atttggccaaattggtgtttacact

SEQ ID NO: 3367942 - DNA, 25 bp, Homo sapien
aattggtgtttacactgtggtgagg

SEQ ID NO: 3367943 - DNA, 25 bp, Homo sapien
gactcctcgttaatcaagcggccat

SEQ ID NO: 3367944 - DNA, 25 bp, Homo sapien
caagcggccatccttattcggaaga

SEQ ID NO: 3367945 - DNA, 25 bp, Homo sapien
tgaagactcctcgttaatcaagcgg

SEQ ID NO: 3367946 - DNA, 25 bp, Homo sapien
tccttattcggaagagccccaagca

SEQ ID NO: 3367947 - DNA, 25 bp, Homo sapien
ccgaggcagttgtccgcttgtgaga

SEQ ID NO: 3367948 - DNA, 25 bp, Homo sapien
cattgccttgtgtagagaattccgg

SEQ ID NO: 3367949 - DNA, 25 bp, Homo sapien
gagaattccggatttcttgggcctc

SEQ ID NO: 3367950 - DNA, 25 bp, Homo sapien
tcatttttctctgccgaggcagttg

SEQ ID NO: 3367951 - DNA, 25 bp, Homo sapien
agcttttgtctggtgtgtctcctca

SEQ ID NO: 3367952 - DNA, 25 bp, Homo sapien
gaggaccttggagggcccgcatttc

SEQ ID NO: 3367953 - DNA, 25 bp, Homo sapien
gctgggaggaacataacacaccttt

SEQ ID NO: 3367954 - DNA, 25 bp, Homo sapien
cagcccagtgaccaccgagtgtggg

SEQ ID NO: 3367955 - DNA, 25 bp, Homo sapien
ggcagctacgggaggatgcccacca

SEQ ID NO: 3367956 - DNA, 25 bp, Homo sapien
gtggaagcgccttcgtagcccagag

SEQ ID NO: 3367957 - DNA, 25 bp, Homo sapien
caggtgctgcagagcgaggatgagc

SEQ ID NO: 3367958 - DNA, 25 bp, Homo sapien
ctctccgatgacgagcagggtggaa

SEQ ID NO: 3367959 - DNA, 25 bp, Homo sapien
ggtgcaaacagagtgcatctctcca

SEQ ID NO: 3367960 - DNA, 25 bp, Homo sapien
aggagcatcacagagtaagacagct

SEQ ID NO: 3367961 - DNA, 25 bp, Homo sapien
tcacagagtaagacagctgctcagc

SEQ ID NO: 3367962 - DNA, 25 bp, Homo sapien
cagagtgcatctctccagcgaggct

SEQ ID NO: 3367963 - DNA, 25 bp, Homo sapien
cgctgtggcttcctctatgatggct

SEQ ID NO: 3367964 - DNA, 25 bp, Homo sapien
ctagacaacgctgtggcttcctcta

SEQ ID NO: 3367965 - DNA, 25 bp, Homo sapien
agacaacgctgtggcttcctctatg

SEQ ID NO: 3367966 - DNA, 25 bp, Homo sapien
aacgctgtggcttcctctatgatgg

SEQ ID NO: 3367967 - DNA, 25 bp, Homo sapien
tgctgcattcttcaggacctttttt

SEQ ID NO: 3367968 - DNA, 25 bp, Homo sapien
tggtctactgcccttctaggctgct

SEQ ID NO: 3367969 - DNA, 25 bp, Homo sapien
tgtggtactaacgagatctgcccgc

SEQ ID NO: 3367970 - DNA, 25 bp, Homo sapien
ccgcctgatagttaatagacaggag

SEQ ID NO: 3367971 - DNA, 25 bp, Homo sapien
ccatttccccgggagatagctattc

SEQ ID NO: 3367972 - DNA, 25 bp, Homo sapien
gatagctattccaagcggaatctgc

SEQ ID NO: 3367973 - DNA, 25 bp, Homo sapien
tattccaagcggaatctgcttctcc

SEQ ID NO: 3367974 - DNA, 25 bp, Homo sapien
ttatcctcccttgttaattcctctc

SEQ ID NO: 3367975 - DNA, 25 bp, Homo sapien
ctaaacagtgaacgcctccgcatcg

SEQ ID NO: 3367976 - DNA, 25 bp, Homo sapien
gtctaaacagtgaacgcctccgcat

SEQ ID NO: 3367977 - DNA, 25 bp, Homo sapien
ccggtctaaacagtgaacgcctccg

SEQ ID NO: 3367978 - DNA, 25 bp, Homo sapien
cttccggtctaaacagtgaacgcct

SEQ ID NO: 3367979 - DNA, 25 bp, Homo sapien
tcctccgcatggactcacgggttca

SEQ ID NO: 3367980 - DNA, 25 bp, Homo sapien
aactcctccgcatggactcacgggt

SEQ ID NO: 3367981 - DNA, 25 bp, Homo sapien
gaacagtgaactcctccgcatggac

SEQ ID NO: 3367982 - DNA, 25 bp, Homo sapien
ctgaacagtgaactcctccgcatgg

SEQ ID NO: 3367983 - DNA, 25 bp, Homo sapien
ccttccggtctgaacagtgaactcc

SEQ ID NO: 3367984 - DNA, 25 bp, Homo sapien
tccttccggtctgaacagtgaactc

SEQ ID NO: 3367985 - DNA, 25 bp, Homo sapien
cctccttccggtctgaacagtgaac

SEQ ID NO: 3367986 - DNA, 25 bp, Homo sapien
acctccttccggtctgaacagtgaa

SEQ ID NO: 3367987 - DNA, 25 bp, Homo sapien
tccttccggtctgaacagtgaactc

SEQ ID NO: 3367988 - DNA, 25 bp, Homo sapien
cctccttccggtctgaacagtgaac

SEQ ID NO: 3367989 - DNA, 25 bp, Homo sapien
ccttccggtctgaacagtgaactcc

SEQ ID NO: 3367990 - DNA, 25 bp, Homo sapien
acctccttccggtctgaacagtgaa

SEQ ID NO: 3367991 - DNA, 25 bp, Homo sapien
ccggatgacgcagaagcttcagcat

SEQ ID NO: 3367992 - DNA, 25 bp, Homo sapien
atgacgcagaagcttcagcatctcc

SEQ ID NO: 3367993 - DNA, 25 bp, Homo sapien
ttacccggatgacgcagaagcttca

SEQ ID NO: 3367994 - DNA, 25 bp, Homo sapien
tccttgcctcaggttccactgctca

SEQ ID NO: 3367995 - DNA, 25 bp, Homo sapien
tttctcttcgggtagctgggccctg

SEQ ID NO: 3367996 - DNA, 25 bp, Homo sapien
tagagccgactgcattccaagtcct

SEQ ID NO: 3367997 - DNA, 25 bp, Homo sapien
tggaagtcaggtagagccgactgca

SEQ ID NO: 3367998 - DNA, 25 bp, Homo sapien
tgaaggttgccttttgtctggtcct

SEQ ID NO: 3367999 - DNA, 25 bp, Homo sapien
tgggcagtgactggcccaatagtag

SEQ ID NO: 3368000 - DNA, 25 bp, Homo sapien
agcccttagccactgacatctggaa

SEQ ID NO: 3368001 - DNA, 25 bp, Homo sapien
gaacaggcttaaggctggtgagtct

SEQ ID NO: 3368002 - DNA, 25 bp, Homo sapien
tggcccaatagtaggagcccttagc

SEQ ID NO: 3368003 - DNA, 25 bp, Homo sapien
ttctgcacggcagcatctcagactc

SEQ ID NO: 3368004 - DNA, 25 bp, Homo sapien
gaagccttgagctccacttctgcac

SEQ ID NO: 3368005 - DNA, 25 bp, Homo sapien
agctggctgcatgccgcgtgctcgg

SEQ ID NO: 3368006 - DNA, 25 bp, Homo sapien
ttgagctccacttctgcacggcagc

SEQ ID NO: 3368007 - DNA, 25 bp, Homo sapien
tccttggtcccctctcaggaagccc

SEQ ID NO: 3368008 - DNA, 25 bp, Homo sapien
ctgctctccttggtcccctctcagg

SEQ ID NO: 3368009 - DNA, 25 bp, Homo sapien
ttggtcccctctcaggaagcccatg

SEQ ID NO: 3368010 - DNA, 25 bp, Homo sapien
agccctgctctccttggtcccctct

SEQ ID NO: 3368011 - DNA, 25 bp, Homo sapien
tcaagtggagtctgctctttctcat

SEQ ID NO: 3368012 - DNA, 25 bp, Homo sapien
tgaaaccttcctagaatctgtacca

SEQ ID NO: 3368013 - DNA, 25 bp, Homo sapien
tttctcataatcactactcacaccg

SEQ ID NO: 3368014 - DNA, 25 bp, Homo sapien
gtcaccatggccactccacaaaata

SEQ ID NO: 3368015 - DNA, 25 bp, Homo sapien
tcttggataattacatctttcccca

SEQ ID NO: 3368016 - DNA, 25 bp, Homo sapien
taaccagcattctgatctcttggat

SEQ ID NO: 3368017 - DNA, 25 bp, Homo sapien
gtggttggttctttggataaccagc

SEQ ID NO: 3368018 - DNA, 25 bp, Homo sapien
ggttctttggataaccagcattctg

SEQ ID NO: 3368019 - DNA, 25 bp, Homo sapien
gagtggatttggaccattcccggtg

SEQ ID NO: 3368020 - DNA, 25 bp, Homo sapien
tcagctgtagatgcttaagaccgtc

SEQ ID NO: 3368021 - DNA, 25 bp, Homo sapien
tatcttgccctgttcgagtggaggc

SEQ ID NO: 3368022 - DNA, 25 bp, Homo sapien
taagaccgtcaagctctctatcttg

SEQ ID NO: 3368023 - DNA, 25 bp, Homo sapien
gatcctgtttgtgacttgtccatat

SEQ ID NO: 3368024 - DNA, 25 bp, Homo sapien
tagtagagtgtagcagatcctgttt

SEQ ID NO: 3368025 - DNA, 25 bp, Homo sapien
actgtggaggtctgatgcagcttgg

SEQ ID NO: 3368026 - DNA, 25 bp, Homo sapien
gcagcttggtgacaactccttcttc

SEQ ID NO: 3368027 - DNA, 25 bp, Homo sapien
gagtggagtctgttcccgccatgaa

SEQ ID NO: 3368028 - DNA, 25 bp, Homo sapien
aggcggtccctccaagctgattgcg

SEQ ID NO: 3368029 - DNA, 25 bp, Homo sapien
ttgagccccagatcgggacctgctc

SEQ ID NO: 3368030 - DNA, 25 bp, Homo sapien
gccatgaagctgtcgaggcggtccc

SEQ ID NO: 3368031 - DNA, 25 bp, Homo sapien
aaaaccaaaatcaggagtgcttttg

SEQ ID NO: 3368032 - DNA, 25 bp, Homo sapien
gagtgcttttggaagcagagtcagc

SEQ ID NO: 3368033 - DNA, 25 bp, Homo sapien
aagcagagtcagcctccaggtcttt

SEQ ID NO: 3368034 - DNA, 25 bp, Homo sapien
ggtctttgctccacattcggcttac

SEQ ID NO: 3368035 - DNA, 25 bp, Homo sapien
ctccaggtgttcattcgcctgttcg

SEQ ID NO: 3368036 - DNA, 25 bp, Homo sapien
gcctgttcgcaaatccctagaggaa

SEQ ID NO: 3368037 - DNA, 25 bp, Homo sapien
gcaaatccctagaggaatatccagg

SEQ ID NO: 3368038 - DNA, 25 bp, Homo sapien
tgttcattcgcctgttcgcaaatcc

SEQ ID NO: 3368039 - DNA, 25 bp, Homo sapien
ttccttagcgaaccggagcttcagc

SEQ ID NO: 3368040 - DNA, 25 bp, Homo sapien
gagtcagcagcacagaaacgctccc

SEQ ID NO: 3368041 - DNA, 25 bp, Homo sapien
caaagtgggagaggccagacctgac

SEQ ID NO: 3368042 - DNA, 25 bp, Homo sapien
tggcttggccataaaacttttcttc

SEQ ID NO: 3368043 - DNA, 25 bp, Homo sapien
ggccatgccaaggtttctccagtgc

SEQ ID NO: 3368044 - DNA, 25 bp, Homo sapien
ccttccagcatcgttcccatgattg

SEQ ID NO: 3368045 - DNA, 25 bp, Homo sapien
gttcccatgattggagccacagtct

SEQ ID NO: 3368046 - DNA, 25 bp, Homo sapien
tcaaagctgcctgaaggagcaacat

SEQ ID NO: 3368047 - DNA, 25 bp, Homo sapien
atagccaccatccaagattccaagt

SEQ ID NO: 3368048 - DNA, 25 bp, Homo sapien
aacaagctggtcctcatagccacca

SEQ ID NO: 3368049 - DNA, 25 bp, Homo sapien
ttaaacaagctggtcctcatagcca

SEQ ID NO: 3368050 - DNA, 25 bp, Homo sapien
gattccaagtttcaactgccccatc

SEQ ID NO: 3368051 - DNA, 25 bp, Homo sapien
gacacctagctgtgactggcgaaag

SEQ ID NO: 3368052 - DNA, 25 bp, Homo sapien
tgtattggcgggaatgacacctagc

SEQ ID NO: 3368053 - DNA, 25 bp, Homo sapien
gtcctgggcccgtacatgctgaaca

SEQ ID NO: 3368054 - DNA, 25 bp, Homo sapien
tggcgaaagattctcagtcctgggc

SEQ ID NO: 3368055 - DNA, 25 bp, Homo sapien
gcttgtcacctgctcctcgtaagaa

SEQ ID NO: 3368056 - DNA, 25 bp, Homo sapien
tgtcacctgctcctcgtaagaacaa

SEQ ID NO: 3368057 - DNA, 25 bp, Homo sapien
cattgaagctcctgtctaatgaaga

SEQ ID NO: 3368058 - DNA, 25 bp, Homo sapien
tgtctaatgaagattgtggcatcag

SEQ ID NO: 3368059 - DNA, 25 bp, Homo sapien
agtgattaaacaggtgatggctgag

SEQ ID NO: 3368060 - DNA, 25 bp, Homo sapien
agcacctgccagggcgccggcggtg

SEQ ID NO: 3368061 - DNA, 25 bp, Homo sapien
cagtgattaaacaggtgatggctga

SEQ ID NO: 3368062 - DNA, 25 bp, Homo sapien
gcacctgccagggcgccggcggtgt

SEQ ID NO: 3368063 - DNA, 25 bp, Homo sapien
tgtgcccttgcttaatcctcggacc

SEQ ID NO: 3368064 - DNA, 25 bp, Homo sapien
ttctcctccgcagtaggaagcaggg

SEQ ID NO: 3368065 - DNA, 25 bp, Homo sapien
cgttctcctccgcagtaggaagcag

SEQ ID NO: 3368066 - DNA, 25 bp, Homo sapien
agacactcctctgcgagtctgacga

SEQ ID NO: 3368067 - DNA, 25 bp, Homo sapien
ctggaagatgcagtgtcctgtgaca

SEQ ID NO: 3368068 - DNA, 25 bp, Homo sapien
tagcctaatcaaaatgcggcatctt

SEQ ID NO: 3368069 - DNA, 25 bp, Homo sapien
tctttttcctaaggcaatgccatat

SEQ ID NO: 3368070 - DNA, 25 bp, Homo sapien
tcatgacacttaatttaaaggtggc

SEQ ID NO: 3368071 - DNA, 25 bp, Homo sapien
ctgaatggcaatgcggagacagatg

SEQ ID NO: 3368072 - DNA, 25 bp, Homo sapien
tgagagctgaatggcaatgcggaga

SEQ ID NO: 3368073 - DNA, 25 bp, Homo sapien
ttctttgctcttagactttctgaga

SEQ ID NO: 3368074 - DNA, 25 bp, Homo sapien
ttgctcttagactttctgagagctg

SEQ ID NO: 3368075 - DNA, 25 bp, Homo sapien
accacgaaagtaagggtcatgtggt

SEQ ID NO: 3368076 - DNA, 25 bp, Homo sapien
cacgaaagtaagggtcatgtggttg

SEQ ID NO: 3368077 - DNA, 25 bp, Homo sapien
tcagtctttacaccacgaaagtaag

SEQ ID NO: 3368078 - DNA, 25 bp, Homo sapien
gctcagtctttacaccacgaaagta

SEQ ID NO: 3368079 - DNA, 25 bp, Homo sapien
tcattcacggtccttcctcttcagg

SEQ ID NO: 3368080 - DNA, 25 bp, Homo sapien
tccttcctcttcagggatgcagcca

SEQ ID NO: 3368081 - DNA, 25 bp, Homo sapien
attcacggtccttcctcttcaggga

SEQ ID NO: 3368082 - DNA, 25 bp, Homo sapien
cacggtccttcctcttcagggatgc

SEQ ID NO: 3368083 - DNA, 25 bp, Homo sapien
ttactgccgatggataggcctgcca

SEQ ID NO: 3368084 - DNA, 25 bp, Homo sapien
catctctttgagttggaccactctc

SEQ ID NO: 3368085 - DNA, 25 bp, Homo sapien
taggaagtaccaggctctctgctcc

SEQ ID NO: 3368086 - DNA, 25 bp, Homo sapien
ggcactggccttgacatcgaagcct

SEQ ID NO: 3368087 - DNA, 25 bp, Homo sapien
aacataccttagcttcagatcctgt

SEQ ID NO: 3368088 - DNA, 25 bp, Homo sapien
aaacataccttagcttcagatcctg

SEQ ID NO: 3368089 - DNA, 25 bp, Homo sapien
aacccttgcttctgacaatatccaa

SEQ ID NO: 3368090 - DNA, 25 bp, Homo sapien
gcgggtaactgcctagacagagtga

SEQ ID NO: 3368091 - DNA, 25 bp, Homo sapien
cagagtgaggccagttggtcctcca

SEQ ID NO: 3368092 - DNA, 25 bp, Homo sapien
catggtgaagtacgaagcgggtaac

SEQ ID NO: 3368093 - DNA, 25 bp, Homo sapien
cagaaatgtttagatctcgggacca

SEQ ID NO: 3368094 - DNA, 25 bp, Homo sapien
gagctgtcgatttacattgccctgg

SEQ ID NO: 3368095 - DNA, 25 bp, Homo sapien
ccacatctgtgaaaacgagctgtcg

SEQ ID NO: 3368096 - DNA, 25 bp, Homo sapien
caggtttgcaggacccagttttcac

SEQ ID NO: 3368097 - DNA, 25 bp, Homo sapien
cctttttgagctttggtgcaggtct

SEQ ID NO: 3368098 - DNA, 25 bp, Homo sapien
tgcctttttgagctttggtgcaggt

SEQ ID NO: 3368099 - DNA, 25 bp, Homo sapien
tttttgagctttggtgcaggtcttc

SEQ ID NO: 3368100 - DNA, 25 bp, Homo sapien
tttgcctttttgagctttggtgcag

SEQ ID NO: 3368101 - DNA, 25 bp, Homo sapien
caggcagaaaggtaaccagctcgat

SEQ ID NO: 3368102 - DNA, 25 bp, Homo sapien
agcagggccgtttcacaaggtgggc

SEQ ID NO: 3368103 - DNA, 25 bp, Homo sapien
agggccgtttcacaaggtgggcgag

SEQ ID NO: 3368104 - DNA, 25 bp, Homo sapien
gccgtttcacaaggtgggcgaggtc

SEQ ID NO: 3368105 - DNA, 25 bp, Homo sapien
ccgtttcacaaggtgggcgaggtct

SEQ ID NO: 3368106 - DNA, 25 bp, Homo sapien
ctcctgcttcttcatgaccgcaggg

SEQ ID NO: 3368107 - DNA, 25 bp, Homo sapien
cctcctgcttcttcatgaccgcagg

SEQ ID NO: 3368108 - DNA, 25 bp, Homo sapien
tgcttcttcatgaccgcaggggccg

SEQ ID NO: 3368109 - DNA, 25 bp, Homo sapien
ccttggccttctttcctttcggcat

SEQ ID NO: 3368110 - DNA, 25 bp, Homo sapien
tggttgaaagcacactcacggcctc

SEQ ID NO: 3368111 - DNA, 25 bp, Homo sapien
catggacttttggtaggtgcactag

SEQ ID NO: 3368112 - DNA, 25 bp, Homo sapien
tgcactagatagcacacacggtttt

SEQ ID NO: 3368113 - DNA, 25 bp, Homo sapien
tttctagactctcgctcccatggac

SEQ ID NO: 3368114 - DNA, 25 bp, Homo sapien
tcttatccacattggccgctgtgcc

SEQ ID NO: 3368115 - DNA, 25 bp, Homo sapien
tcttgctggcactaaggtagcccct

SEQ ID NO: 3368116 - DNA, 25 bp, Homo sapien
tctcaaggaaaaggtctgtctcctc

SEQ ID NO: 3368117 - DNA, 25 bp, Homo sapien
ctagctcaaggcttgtcaggatgcc

SEQ ID NO: 3368118 - DNA, 25 bp, Homo sapien
gtagcacagtcagagtgacactgtt

SEQ ID NO: 3368119 - DNA, 25 bp, Homo sapien
ttctgtctcaggtttatttacaatt

SEQ ID NO: 3368120 - DNA, 25 bp, Homo sapien
gatgtagtttttatgtggttctgtc

SEQ ID NO: 3368121 - DNA, 25 bp, Homo sapien
cactgttgttacctgtctgatgtag

SEQ ID NO: 3368122 - DNA, 25 bp, Homo sapien
gccagctgatggctttagccaatgt

SEQ ID NO: 3368123 - DNA, 25 bp, Homo sapien
ggctttgctaggactcaggccagct

SEQ ID NO: 3368124 - DNA, 25 bp, Homo sapien
agaccccgtgttgtggagcctgtgc

SEQ ID NO: 3368125 - DNA, 25 bp, Homo sapien
tcagggtgctccctttagttacaaa

SEQ ID NO: 3368126 - DNA, 25 bp, Homo sapien
ctcttctccacgtagatcctgttga

SEQ ID NO: 3368127 - DNA, 25 bp, Homo sapien
ttctccacgtagatcctgttgactt

SEQ ID NO: 3368128 - DNA, 25 bp, Homo sapien
gatcctgttgactttggcttacact

SEQ ID NO: 3368129 - DNA, 25 bp, Homo sapien
acctctgttacatctcttgtattca

SEQ ID NO: 3368130 - DNA, 25 bp, Homo sapien
ggctacacgtggaaatgcgcttaaa

SEQ ID NO: 3368131 - DNA, 25 bp, Homo sapien
tgtctactggtacaaaacatagtgt

SEQ ID NO: 3368132 - DNA, 25 bp, Homo sapien
tattcggagccagccagtgctgtgt

SEQ ID NO: 3368133 - DNA, 25 bp, Homo sapien
catagtgttgtaaggctacacgtgg

SEQ ID NO: 3368134 - DNA, 25 bp, Homo sapien
caacaggtcttgcaggctaaataac

SEQ ID NO: 3368135 - DNA, 25 bp, Homo sapien
aggtcttgcaggctaaataacttat

SEQ ID NO: 3368136 - DNA, 25 bp, Homo sapien
gagtaacaacaggtcttgcaggcta

SEQ ID NO: 3368137 - DNA, 25 bp, Homo sapien
gttcactttcagtcagagcttcaac

SEQ ID NO: 3368138 - DNA, 25 bp, Homo sapien
tgcagaaggccatccaatttcggcc

SEQ ID NO: 3368139 - DNA, 25 bp, Homo sapien
ctgaaatgcagaaggccatccaatt

SEQ ID NO: 3368140 - DNA, 25 bp, Homo sapien
aatgcagaaggccatccaatttcgg

SEQ ID NO: 3368141 - DNA, 25 bp, Homo sapien
cagaaggccatccaatttcggccaa

SEQ ID NO: 3368142 - DNA, 25 bp, Homo sapien
gaccgttgctcagaaacagagggct

SEQ ID NO: 3368143 - DNA, 25 bp, Homo sapien
agaccgttgctcagaaacagagggc

SEQ ID NO: 3368144 - DNA, 25 bp, Homo sapien
accgttgctcagaaacagagggctg

SEQ ID NO: 3368145 - DNA, 25 bp, Homo sapien
atgacagctgtctttccgtcactat

SEQ ID NO: 3368146 - DNA, 25 bp, Homo sapien
gaatttaagttggaacccatgacag

SEQ ID NO: 3368147 - DNA, 25 bp, Homo sapien
caagaatttaagttggaacccatga

SEQ ID NO: 3368148 - DNA, 25 bp, Homo sapien
cagaacattgggtctttcagcatca

SEQ ID NO: 3368149 - DNA, 25 bp, Homo sapien
tcaagttttgtaacatcaccatcaa

SEQ ID NO: 3368150 - DNA, 25 bp, Homo sapien
gcctcgaagacttgtcagtatttga

SEQ ID NO: 3368151 - DNA, 25 bp, Homo sapien
caagagtctcagtgttttggcactc

SEQ ID NO: 3368152 - DNA, 25 bp, Homo sapien
gcgactgttcaatgagaatctgaga

SEQ ID NO: 3368153 - DNA, 25 bp, Homo sapien
catgtgcccgtgttggcgctgacgc

SEQ ID NO: 3368154 - DNA, 25 bp, Homo sapien
tgtagctttacccaccttgaggcag

SEQ ID NO: 3368155 - DNA, 25 bp, Homo sapien
gatggagcaaaggtgaatatctccc

SEQ ID NO: 3368156 - DNA, 25 bp, Homo sapien
tgttgaacgtgtagctttacccacc

SEQ ID NO: 3368157 - DNA, 25 bp, Homo sapien
tgggagccacgggaacggtcttgtg

SEQ ID NO: 3368158 - DNA, 25 bp, Homo sapien
tggagataacgtctgaccgcagcct

SEQ ID NO: 3368159 - DNA, 25 bp, Homo sapien
gagataacgtctgaccgcagccttc

SEQ ID NO: 3368160 - DNA, 25 bp, Homo sapien
ctccttggagataacgtctgaccgc

SEQ ID NO: 3368161 - DNA, 25 bp, Homo sapien
ttctgaatttaagcctcacccagtc

SEQ ID NO: 3368162 - DNA, 25 bp, Homo sapien
cacacgtaatcactttatttctgaa

SEQ ID NO: 3368163 - DNA, 25 bp, Homo sapien
atttctgaatttaagcctcacccag

SEQ ID NO: 3368164 - DNA, 25 bp, Homo sapien
ctgcaattagaacacacgtaatcac

SEQ ID NO: 3368165 - DNA, 25 bp, Homo sapien
ccattcactttggtagtgcaggcag

SEQ ID NO: 3368166 - DNA, 25 bp, Homo sapien
tgttatcaggaattaggcaaaggct

SEQ ID NO: 3368167 - DNA, 25 bp, Homo sapien
tacacagacgctgggattggaaacc

SEQ ID NO: 3368168 - DNA, 25 bp, Homo sapien
aagtggtgctctacggatatgcagg

SEQ ID NO: 3368169 - DNA, 25 bp, Homo sapien
gggcatttccaattctgcgtcaaca

SEQ ID NO: 3368170 - DNA, 25 bp, Homo sapien
tcaaatggttggttgcaggtccctt

SEQ ID NO: 3368171 - DNA, 25 bp, Homo sapien
acatcattgtttacacagctgcaga

SEQ ID NO: 3368172 - DNA, 25 bp, Homo sapien
ttctgggcttcgtttgtttggaatc

SEQ ID NO: 3368173 - DNA, 25 bp, Homo sapien
ctgaaaagaatgtcctcaggaaata

SEQ ID NO: 3368174 - DNA, 25 bp, Homo sapien
tcttatgagaattactccacagaaa

SEQ ID NO: 3368175 - DNA, 25 bp, Homo sapien
tctcttatgagaattactccacaga

SEQ ID NO: 3368176 - DNA, 25 bp, Homo sapien
ttatgagaattactccacagaaagt

SEQ ID NO: 3368177 - DNA, 25 bp, Homo sapien
tatgagaattactccacagaaagtc

SEQ ID NO: 3368178 - DNA, 25 bp, Homo sapien
gaaaatatctatgagaccactgggt

SEQ ID NO: 3368179 - DNA, 25 bp, Homo sapien
ggagacgcaaggaagccatcacggt

SEQ ID NO: 3368180 - DNA, 25 bp, Homo sapien
tcactgctgactggcctgagggaac

SEQ ID NO: 3368181 - DNA, 25 bp, Homo sapien
tgggtcagtttcatttacccagggc

SEQ ID NO: 3368182 - DNA, 25 bp, Homo sapien
caatctgcacgtggttgaacccatg

SEQ ID NO: 3368183 - DNA, 25 bp, Homo sapien
taagcaagcctttaacactcagcac

SEQ ID NO: 3368184 - DNA, 25 bp, Homo sapien
tgctagggattgcttccaggaaccc

SEQ ID NO: 3368185 - DNA, 25 bp, Homo sapien
tagactgcctataatacctaacgtg

SEQ ID NO: 3368186 - DNA, 25 bp, Homo sapien
gatggatgatgcaactttggataag

SEQ ID NO: 3368187 - DNA, 25 bp, Homo sapien
tatgcccgagaataatgatggatga

SEQ ID NO: 3368188 - DNA, 25 bp, Homo sapien
aagtcacggctttaatatgcccgag

SEQ ID NO: 3368189 - DNA, 25 bp, Homo sapien
acagatgtttaatttcctgagggca

SEQ ID NO: 3368190 - DNA, 25 bp, Homo sapien
tcttctaacatgacctgttctttcg

SEQ ID NO: 3368191 - DNA, 25 bp, Homo sapien
catgagtcatagaaatgtaagctaa

SEQ ID NO: 3368192 - DNA, 25 bp, Homo sapien
agaagtcccttgcttggtagatgtg

SEQ ID NO: 3368193 - DNA, 25 bp, Homo sapien
cccttgcttggtagatgtgttcctg

SEQ ID NO: 3368194 - DNA, 25 bp, Homo sapien
agggtctctgtgtagttatctgtgt

SEQ ID NO: 3368195 - DNA, 25 bp, Homo sapien
cgatagggaaaatcagggtctctgt

SEQ ID NO: 3368196 - DNA, 25 bp, Homo sapien
tgtagttatctgtgtgactcaacat

SEQ ID NO: 3368197 - DNA, 25 bp, Homo sapien
gagacgatagggaaaatcagggtct

SEQ ID NO: 3368198 - DNA, 25 bp, Homo sapien
ttaagcaagtgctgggaagactcga

SEQ ID NO: 3368199 - DNA, 25 bp, Homo sapien
gctgcacgcctcttgccactggtat

SEQ ID NO: 3368200 - DNA, 25 bp, Homo sapien
gagtctgtacaaacatctggaatca

SEQ ID NO: 3368201 - DNA, 25 bp, Homo sapien
tttgccccgaaagaggacagagact

SEQ ID NO: 3368202 - DNA, 25 bp, Homo sapien
ggtgctggtattcagagaatgctct

SEQ ID NO: 3368203 - DNA, 25 bp, Homo sapien
gatctgtttcccattgacttttcaa

SEQ ID NO: 3368204 - DNA, 25 bp, Homo sapien
ggcgatgctgcacattttaaaaccg

SEQ ID NO: 3368205 - DNA, 25 bp, Homo sapien
tcagagtatctctagggcgatgctg

SEQ ID NO: 3368206 - DNA, 25 bp, Homo sapien
tgaagttttcatgcgcaggagcaca

SEQ ID NO: 3368207 - DNA, 25 bp, Homo sapien
taactgccgtgtccagtgtggccca

SEQ ID NO: 3368208 - DNA, 25 bp, Homo sapien
ggagcacagctaggatgaaacgaga

SEQ ID NO: 3368209 - DNA, 25 bp, Homo sapien
gcctggcaaaatcaaggaagctgca

SEQ ID NO: 3368210 - DNA, 25 bp, Homo sapien
catgagactgttaggtccagaggaa

SEQ ID NO: 3368211 - DNA, 25 bp, Homo sapien
gaggaagtacgctcgattcgcttga

SEQ ID NO: 3368212 - DNA, 25 bp, Homo sapien
ggtgtgccatgagactgttaggtcc

SEQ ID NO: 3368213 - DNA, 25 bp, Homo sapien
ttaggtccagaggaagtacgctcga

SEQ ID NO: 3368214 - DNA, 25 bp, Homo sapien
aatggcattgcagttcacacacact

SEQ ID NO: 3368215 - DNA, 25 bp, Homo sapien
agtaaagcaaataggcttgaatggc

SEQ ID NO: 3368216 - DNA, 25 bp, Homo sapien
atagtaaagcaaataggcttgaatg

SEQ ID NO: 3368217 - DNA, 25 bp, Homo sapien
taaagcaaataggcttgaatggcat

SEQ ID NO: 3368218 - DNA, 25 bp, Homo sapien
tgaagaccagaatgaagattcttgg

SEQ ID NO: 3368219 - DNA, 25 bp, Homo sapien
agaattacagccttagcatggagca

SEQ ID NO: 3368220 - DNA, 25 bp, Homo sapien
gttgctgagtgtcttcaaaatcatt

SEQ ID NO: 3368221 - DNA, 25 bp, Homo sapien
ctgttgctgagtgtcttcaaaatca

SEQ ID NO: 3368222 - DNA, 25 bp, Homo sapien
tgctgagtgtcttcaaaatcatttt

SEQ ID NO: 3368223 - DNA, 25 bp, Homo sapien
gctgagtgtcttcaaaatcatttta

SEQ ID NO: 3368224 - DNA, 25 bp, Homo sapien
ctcattagacagcaatagagaggcc

SEQ ID NO: 3368225 - DNA, 25 bp, Homo sapien
tagcgagtgtgataagttatactca

SEQ ID NO: 3368226 - DNA, 25 bp, Homo sapien
cattagacagcaatagagaggcccc

SEQ ID NO: 3368227 - DNA, 25 bp, Homo sapien
agtcaaaaccaaatagcgagtgtga

SEQ ID NO: 3368228 - DNA, 25 bp, Homo sapien
atccccgtgacagtggactcctgca

SEQ ID NO: 3368229 - DNA, 25 bp, Homo sapien
tatctgaatgatatccccgtgacag

SEQ ID NO: 3368230 - DNA, 25 bp, Homo sapien
ggaagtccataaaagacaaacgcat

SEQ ID NO: 3368231 - DNA, 25 bp, Homo sapien
gcagtccccgagaaagcattgttgt

SEQ ID NO: 3368232 - DNA, 25 bp, Homo sapien
tcaggaaatcaagtattgcttccat

SEQ ID NO: 3368233 - DNA, 25 bp, Homo sapien
ttccccaggaactgagtaagccacg

SEQ ID NO: 3368234 - DNA, 25 bp, Homo sapien
ctggtgtcacatagagcatatgctc

SEQ ID NO: 3368235 - DNA, 25 bp, Homo sapien
cgatgctcaactccagtgactgttg

SEQ ID NO: 3368236 - DNA, 25 bp, Homo sapien
catgtcttagaagcacactcattag

SEQ ID NO: 3368237 - DNA, 25 bp, Homo sapien
tctttgataaggtaaggctccctgg

SEQ ID NO: 3368238 - DNA, 25 bp, Homo sapien
tcattagataaagtgtcgcatactc

SEQ ID NO: 3368239 - DNA, 25 bp, Homo sapien
ctggacgagatgttttacaggtacc

SEQ ID NO: 3368240 - DNA, 25 bp, Homo sapien
ccgggaccctcattctgggaatgga

SEQ ID NO: 3368241 - DNA, 25 bp, Homo sapien
gctgccgggaccctcattctgggaa

SEQ ID NO: 3368242 - DNA, 25 bp, Homo sapien
cagtcagtcaccctacaggtgacac

SEQ ID NO: 3368243 - DNA, 25 bp, Homo sapien
tgccgggaccctcattctgggaatg

SEQ ID NO: 3368244 - DNA, 25 bp, Homo sapien
ctgataaatcgtcttctcgtctgac

SEQ ID NO: 3368245 - DNA, 25 bp, Homo sapien
tgataaatcgtcttctcgtctgaca

SEQ ID NO: 3368246 - DNA, 25 bp, Homo sapien
gataaatcgtcttctcgtctgacag

SEQ ID NO: 3368247 - DNA, 25 bp, Homo sapien
gatggagtgggagcaaggtcacttc

SEQ ID NO: 3368248 - DNA, 25 bp, Homo sapien
cctactaagatatttagttggcaat

SEQ ID NO: 3368249 - DNA, 25 bp, Homo sapien
aacggagaagcatgtagtaacatac

SEQ ID NO: 3368250 - DNA, 25 bp, Homo sapien
ctgattttaaggaacctatgctaac

SEQ ID NO: 3368251 - DNA, 25 bp, Homo sapien
gataattactatttggcatcctact

SEQ ID NO: 3368252 - DNA, 25 bp, Homo sapien
tcctttgagcgggggagcactgtct

SEQ ID NO: 3368253 - DNA, 25 bp, Homo sapien
aatcctttgagcgggggagcactgt

SEQ ID NO: 3368254 - DNA, 25 bp, Homo sapien
aaaatcctttgagcgggggagcact

SEQ ID NO: 3368255 - DNA, 25 bp, Homo sapien
agaaaatcctttgagcgggggagca

SEQ ID NO: 3368256 - DNA, 25 bp, Homo sapien
agaatactggggaatgtgaaaggtc

SEQ ID NO: 3368257 - DNA, 25 bp, Homo sapien
gaagaatactggggaatgtgaaagg

SEQ ID NO: 3368258 - DNA, 25 bp, Homo sapien
aagaatactggggaatgtgaaaggt

SEQ ID NO: 3368259 - DNA, 25 bp, Homo sapien
ctgatgtccaaataggaggtaatag

SEQ ID NO: 3368260 - DNA, 25 bp, Homo sapien
tgatgtccaaataggaggtaatagc

SEQ ID NO: 3368261 - DNA, 25 bp, Homo sapien
gctttagattacccgatgtccagat

SEQ ID NO: 3368262 - DNA, 25 bp, Homo sapien
ctttagattacccgatgtccagata

SEQ ID NO: 3368263 - DNA, 25 bp, Homo sapien
gggctttagattacccgatgtccag

SEQ ID NO: 3368264 - DNA, 25 bp, Homo sapien
ggctttagattacccgatgtccaga

SEQ ID NO: 3368265 - DNA, 25 bp, Homo sapien
gggttgtagattacatgatgtccaa

SEQ ID NO: 3368266 - DNA, 25 bp, Homo sapien
tacatgatgtccaaataggaggtaa

SEQ ID NO: 3368267 - DNA, 25 bp, Homo sapien
agagagggttgtagattacatgatg

SEQ ID NO: 3368268 - DNA, 25 bp, Homo sapien
tagattacatgatgtccaaatagga

SEQ ID NO: 3368269 - DNA, 25 bp, Homo sapien
ctggaagacaaaggtgttgtagatt

SEQ ID NO: 3368270 - DNA, 25 bp, Homo sapien
tggaagacaaaggtgttgtagatta

SEQ ID NO: 3368271 - DNA, 25 bp, Homo sapien
ggaagacaaaggtgttgtagattac

SEQ ID NO: 3368272 - DNA, 25 bp, Homo sapien
catggaagagagagcgttgtagatt

SEQ ID NO: 3368273 - DNA, 25 bp, Homo sapien
aatagcataaggtcatggaagagag

SEQ ID NO: 3368274 - DNA, 25 bp, Homo sapien
taggacgaaatagcataaggtcatg

SEQ ID NO: 3368275 - DNA, 25 bp, Homo sapien
tccaaataggacgaaatagcataag

SEQ ID NO: 3368276 - DNA, 25 bp, Homo sapien
ctgatgtccaaataggagggaatac

SEQ ID NO: 3368277 - DNA, 25 bp, Homo sapien
gatgtccaaataggagggaatacca

SEQ ID NO: 3368278 - DNA, 25 bp, Homo sapien
caaataggagggaataccataaggt

SEQ ID NO: 3368279 - DNA, 25 bp, Homo sapien
tgtccaaataggagggaataccata

SEQ ID NO: 3368280 - DNA, 25 bp, Homo sapien
aaataggaggtaatagcataaggtc

SEQ ID NO: 3368281 - DNA, 25 bp, Homo sapien
tgatgtccaaataggaggtaatagc

SEQ ID NO: 3368282 - DNA, 25 bp, Homo sapien
gtgttgtagattacctgatgtccaa

SEQ ID NO: 3368283 - DNA, 25 bp, Homo sapien
gatgtccaaataggaggtaatagta

SEQ ID NO: 3368284 - DNA, 25 bp, Homo sapien
ctgatgtccaaagaggagggaatag

SEQ ID NO: 3368285 - DNA, 25 bp, Homo sapien
aaagaggagggaatagcataaagtc

SEQ ID NO: 3368286 - DNA, 25 bp, Homo sapien
gatgtccaaagaggagggaatagca

SEQ ID NO: 3368287 - DNA, 25 bp, Homo sapien
gtccaaagaggagggaatagcataa

SEQ ID NO: 3368288 - DNA, 25 bp, Homo sapien
gacaaaggtcttgtagactacctga

SEQ ID NO: 3368289 - DNA, 25 bp, Homo sapien
aaataggaggtaatagcataaggtc

SEQ ID NO: 3368290 - DNA, 25 bp, Homo sapien
ctgatgtccaaataggaggtaatag

SEQ ID NO: 3368291 - DNA, 25 bp, Homo sapien
ggtcttgtagactacctgatgtcca

SEQ ID NO: 3368292 - DNA, 25 bp, Homo sapien
aagtaggaggtaatagcataaggtc

SEQ ID NO: 3368293 - DNA, 25 bp, Homo sapien
tccaagtaggaggtaatagcataag

SEQ ID NO: 3368294 - DNA, 25 bp, Homo sapien
caagtaggaggtaatagcataaggt

SEQ ID NO: 3368295 - DNA, 25 bp, Homo sapien
tgtccaagtaggaggtaatagcata

SEQ ID NO: 3368296 - DNA, 25 bp, Homo sapien
ccaaataggaggtaatagcataaag

SEQ ID NO: 3368297 - DNA, 25 bp, Homo sapien
aaataggaggtaatagcataaagtc

SEQ ID NO: 3368298 - DNA, 25 bp, Homo sapien
ctgatgtccaaataggaggtaatag

SEQ ID NO: 3368299 - DNA, 25 bp, Homo sapien
tgtccaaataggaggtaatagcata

SEQ ID NO: 3368300 - DNA, 25 bp, Homo sapien
taggaggcaacagcataaggtcctc

SEQ ID NO: 3368301 - DNA, 25 bp, Homo sapien
ttgtagattacctgatgtccaaata

SEQ ID NO: 3368302 - DNA, 25 bp, Homo sapien
gtccaaataggagggaatagcataa

SEQ ID NO: 3368303 - DNA, 25 bp, Homo sapien
tgttgtagattacctgatgtccaaa

SEQ ID NO: 3368304 - DNA, 25 bp, Homo sapien
ggtgttgtagattacctgatgtcca

SEQ ID NO: 3368305 - DNA, 25 bp, Homo sapien
tagcataaggtcctcgaagacaaag

SEQ ID NO: 3368306 - DNA, 25 bp, Homo sapien
tgatgtccaaataggaggtaatagc

SEQ ID NO: 3368307 - DNA, 25 bp, Homo sapien
gatatccaaataggagataatagca

SEQ ID NO: 3368308 - DNA, 25 bp, Homo sapien
aagagagagggcttaagataacctg

SEQ ID NO: 3368309 - DNA, 25 bp, Homo sapien
gagagggttgtagattacatgatgt

SEQ ID NO: 3368310 - DNA, 25 bp, Homo sapien
agagagggttgtagattacatgatg

SEQ ID NO: 3368311 - DNA, 25 bp, Homo sapien
aaataggaggtaatagcataaagtc

SEQ ID NO: 3368312 - DNA, 25 bp, Homo sapien
ctgatgtccaaataggaggtaatag

SEQ ID NO: 3368313 - DNA, 25 bp, Homo sapien
tgtccaaataggaggtaatagcata

SEQ ID NO: 3368314 - DNA, 25 bp, Homo sapien
ccaaataggaggtaatagcataaag

SEQ ID NO: 3368315 - DNA, 25 bp, Homo sapien
gacaaacttgttgtagattacctga

SEQ ID NO: 3368316 - DNA, 25 bp, Homo sapien
tgttgtagattacctgatgtccaaa

SEQ ID NO: 3368317 - DNA, 25 bp, Homo sapien
tgtccaaataggagggaatagcata

SEQ ID NO: 3368318 - DNA, 25 bp, Homo sapien
taggaggcaacagcataaggtcctc

SEQ ID NO: 3368319 - DNA, 25 bp, Homo sapien
ctggaagataaaggttttgttagat

SEQ ID NO: 3368320 - DNA, 25 bp, Homo sapien
tgatgtccaaataggaggtaatagc

SEQ ID NO: 3368321 - DNA, 25 bp, Homo sapien
tagcataaggtcctcgaagacaaag

SEQ ID NO: 3368322 - DNA, 25 bp, Homo sapien
gatatccaaataggagataatagca

SEQ ID NO: 3368323 - DNA, 25 bp, Homo sapien
ggtgttgtagattacctgatgtcca

SEQ ID NO: 3368324 - DNA, 25 bp, Homo sapien
ctggaagacaaaggtgttgtagatt

SEQ ID NO: 3368325 - DNA, 25 bp, Homo sapien
tggaagacaaaggtgttgtagatta

SEQ ID NO: 3368326 - DNA, 25 bp, Homo sapien
ggaagacaaaggtgttgtagattac

SEQ ID NO: 3368327 - DNA, 25 bp, Homo sapien
gttccaaataggagttaatagcata

SEQ ID NO: 3368328 - DNA, 25 bp, Homo sapien
tccaaataggagttaatagcataag

SEQ ID NO: 3368329 - DNA, 25 bp, Homo sapien
ctgagttccaaataggagttaatag

SEQ ID NO: 3368330 - DNA, 25 bp, Homo sapien
caaataggagttaatagcataaggt

SEQ ID NO: 3368331 - DNA, 25 bp, Homo sapien
gggtagtacattaccggatgtccaa

SEQ ID NO: 3368332 - DNA, 25 bp, Homo sapien
aaagagggtagtacattaccggatg

SEQ ID NO: 3368333 - DNA, 25 bp, Homo sapien
tggaagaaagagggtagtacattac

SEQ ID NO: 3368334 - DNA, 25 bp, Homo sapien
gagggtagtacattaccggatgtcc

SEQ ID NO: 3368335 - DNA, 25 bp, Homo sapien
ctggaacagagagggttgtatacta

SEQ ID NO: 3368336 - DNA, 25 bp, Homo sapien
aggtaatcacataaggttctggaac

SEQ ID NO: 3368337 - DNA, 25 bp, Homo sapien
tggaacagagagggttgtatactac

SEQ ID NO: 3368338 - DNA, 25 bp, Homo sapien
ggttgtagattatccggtgtccaag

SEQ ID NO: 3368339 - DNA, 25 bp, Homo sapien
ggtgtccaagtaggcggtaatcgca

SEQ ID NO: 3368340 - DNA, 25 bp, Homo sapien
tagattatccggtgtccaagtaggc

SEQ ID NO: 3368341 - DNA, 25 bp, Homo sapien
tatccggtgtccaagtaggcggtaa

SEQ ID NO: 3368342 - DNA, 25 bp, Homo sapien
atgacctgatgtccaaatgggaggt

SEQ ID NO: 3368343 - DNA, 25 bp, Homo sapien
tgacctgatgtccaaatgggaggta

SEQ ID NO: 3368344 - DNA, 25 bp, Homo sapien
gtccaaataggaggtaatagcataa

SEQ ID NO: 3368345 - DNA, 25 bp, Homo sapien
aaataggaggtaatagcataaggtc

SEQ ID NO: 3368346 - DNA, 25 bp, Homo sapien
tccaaataggaggtaatagcataag

SEQ ID NO: 3368347 - DNA, 25 bp, Homo sapien
caaataggaggtaatagcataaggt

SEQ ID NO: 3368348 - DNA, 25 bp, Homo sapien
aaataggaggtaatagcataaggtc

SEQ ID NO: 3368349 - DNA, 25 bp, Homo sapien
gttgtagattacttgatgtccaaat

SEQ ID NO: 3368350 - DNA, 25 bp, Homo sapien
gattacttgatgtccaaataggagg

SEQ ID NO: 3368351 - DNA, 25 bp, Homo sapien
tgatgtccaaataggaggtaatagc

SEQ ID NO: 3368352 - DNA, 25 bp, Homo sapien
gacaaaggtgttgtagattacctga

SEQ ID NO: 3368353 - DNA, 25 bp, Homo sapien
caaaggtgttgtagattacctgatg

SEQ ID NO: 3368354 - DNA, 25 bp, Homo sapien
acaaaggtgttgtagattacctgat

SEQ ID NO: 3368355 - DNA, 25 bp, Homo sapien
caaataggaggtaatatcataaggt

SEQ ID NO: 3368356 - DNA, 25 bp, Homo sapien
ctgatgtccaaataggaggtaatat

SEQ ID NO: 3368357 - DNA, 25 bp, Homo sapien
gatgtccaaataggaggtaatagaa

SEQ ID NO: 3368358 - DNA, 25 bp, Homo sapien
gagagggctgtagattacctgatgt

SEQ ID NO: 3368359 - DNA, 25 bp, Homo sapien
ctgatgtccaaataggaggtaatac

SEQ ID NO: 3368360 - DNA, 25 bp, Homo sapien
gatgtccaaataggaggtaataccg

SEQ ID NO: 3368361 - DNA, 25 bp, Homo sapien
tgtccaaataggaggtaataccgta

SEQ ID NO: 3368362 - DNA, 25 bp, Homo sapien
tgatgtccaaataggaggtaatacc

SEQ ID NO: 3368363 - DNA, 25 bp, Homo sapien
aagacaaagttgttgtagattacct

SEQ ID NO: 3368364 - DNA, 25 bp, Homo sapien
ggtgttgtagattacctgatgtcca

SEQ ID NO: 3368365 - DNA, 25 bp, Homo sapien
gtccaaataggagggaatagcataa

SEQ ID NO: 3368366 - DNA, 25 bp, Homo sapien
tgttgtagattacctgatgtccaaa

SEQ ID NO: 3368367 - DNA, 25 bp, Homo sapien
caaataggaggtaatagcataaggt

SEQ ID NO: 3368368 - DNA, 25 bp, Homo sapien
tgatgtccaaataggaggtaatagc

SEQ ID NO: 3368369 - DNA, 25 bp, Homo sapien
tatccaaataggaggtaatagcata

SEQ ID NO: 3368370 - DNA, 25 bp, Homo sapien
aaggtcctcgaagacaaaggtgttg

SEQ ID NO: 3368371 - DNA, 25 bp, Homo sapien
ggaagacaaaggtgttgtagattac

SEQ ID NO: 3368372 - DNA, 25 bp, Homo sapien
tggaagacaaaggtgttgtagatta

SEQ ID NO: 3368373 - DNA, 25 bp, Homo sapien
ctggaagacaaaggtgttgtagatt

SEQ ID NO: 3368374 - DNA, 25 bp, Homo sapien
tccaagtaggaggtaatagcataag

SEQ ID NO: 3368375 - DNA, 25 bp, Homo sapien
caagtaggaggtaatagcataaggt

SEQ ID NO: 3368376 - DNA, 25 bp, Homo sapien
gtccaagtaggaggtaatagcataa

SEQ ID NO: 3368377 - DNA, 25 bp, Homo sapien
tgtccaagtaggaggtaatagcata

SEQ ID NO: 3368378 - DNA, 25 bp, Homo sapien
ctggaagcgagagggctatagatta

SEQ ID NO: 3368379 - DNA, 25 bp, Homo sapien
tggaagcgagagggctatagattac

SEQ ID NO: 3368380 - DNA, 25 bp, Homo sapien
ctgatatccaaataggaggtaatac

SEQ ID NO: 3368381 - DNA, 25 bp, Homo sapien
tatccaaataggaggtaataccata

SEQ ID NO: 3368382 - DNA, 25 bp, Homo sapien
gatatccaaataggaggtaatacca

SEQ ID NO: 3368383 - DNA, 25 bp, Homo sapien
caaataggaggtaataccataaggt

SEQ ID NO: 3368384 - DNA, 25 bp, Homo sapien
gtgttgtagattacctgatgtccaa

SEQ ID NO: 3368385 - DNA, 25 bp, Homo sapien
tgatgtccaaataggaggtaatagc

SEQ ID NO: 3368386 - DNA, 25 bp, Homo sapien
aaataggaggtaatagcataaggtc

SEQ ID NO: 3368387 - DNA, 25 bp, Homo sapien
gaggtaatagcataaggtgctggaa

SEQ ID NO: 3368388 - DNA, 25 bp, Homo sapien
gttgtagattacttgatgtccaaat

SEQ ID NO: 3368389 - DNA, 25 bp, Homo sapien
caaataggaggtaatagcataaggt

SEQ ID NO: 3368390 - DNA, 25 bp, Homo sapien
tatccaaataggaggtaatagcata

SEQ ID NO: 3368391 - DNA, 25 bp, Homo sapien
tagcataaggtcctggaagagaggg

SEQ ID NO: 3368392 - DNA, 25 bp, Homo sapien
gagagggctgtagattacctgatgt

SEQ ID NO: 3368393 - DNA, 25 bp, Homo sapien
cctggtgtccaaataggaggtaata

SEQ ID NO: 3368394 - DNA, 25 bp, Homo sapien
tgtagattacctggtgtccaaatag

SEQ ID NO: 3368395 - DNA, 25 bp, Homo sapien
agagagggctgtagattacctgatg

SEQ ID NO: 3368396 - DNA, 25 bp, Homo sapien
tgacctgatgtccaaatgggaggta

SEQ ID NO: 3368397 - DNA, 25 bp, Homo sapien
atgacctgatgtccaaatgggaggt

SEQ ID NO: 3368398 - DNA, 25 bp, Homo sapien
atagcataaggtcctcgaagacaaa

SEQ ID NO: 3368399 - DNA, 25 bp, Homo sapien
ataaggtcctcgaagacaaaggtgt

SEQ ID NO: 3368400 - DNA, 25 bp, Homo sapien
gcataaggtcctcgaagacaaaggt

SEQ ID NO: 3368401 - DNA, 25 bp, Homo sapien
aaggtcctcgaagacaaaggtgttg

SEQ ID NO: 3368402 - DNA, 25 bp, Homo sapien
ttccaaataagaggtcatagcataa

SEQ ID NO: 3368403 - DNA, 25 bp, Homo sapien
gatttccaaataagaggtcatagca

SEQ ID NO: 3368404 - DNA, 25 bp, Homo sapien
aaataagaggtcatagcataaggtc

SEQ ID NO: 3368405 - DNA, 25 bp, Homo sapien
ctgatttccaaataagaggtcatag

SEQ ID NO: 3368406 - DNA, 25 bp, Homo sapien
tctggatgacaaagttgttgtaggt

SEQ ID NO: 3368407 - DNA, 25 bp, Homo sapien
atgacaaagttgttgtaggttaccg

SEQ ID NO: 3368408 - DNA, 25 bp, Homo sapien
ttctggatgacaaagttgttgtagg

SEQ ID NO: 3368409 - DNA, 25 bp, Homo sapien
atataggaggtaatatcgtaaggta

SEQ ID NO: 3368410 - DNA, 25 bp, Homo sapien
catgtccatataggaggtaatatcg

SEQ ID NO: 3368411 - DNA, 25 bp, Homo sapien
aagtaggaggtaatagcataaggtc

SEQ ID NO: 3368412 - DNA, 25 bp, Homo sapien
ctgatgtccaaataggaggtaatag

SEQ ID NO: 3368413 - DNA, 25 bp, Homo sapien
ccaaataggaggtaatagtataagg

SEQ ID NO: 3368414 - DNA, 25 bp, Homo sapien
tgtccaagtaggaggtaatagcata

SEQ ID NO: 3368415 - DNA, 25 bp, Homo sapien
tttccaaataggaggtagtagcaga

SEQ ID NO: 3368416 - DNA, 25 bp, Homo sapien
caaataggaggtagtagcagaaggt

SEQ ID NO: 3368417 - DNA, 25 bp, Homo sapien
aaataggaggtagtagcagaaggtc

SEQ ID NO: 3368418 - DNA, 25 bp, Homo sapien
ctgatttccaaataggaggtagtag

SEQ ID NO: 3368419 - DNA, 25 bp, Homo sapien
tggaagacaaaggtgttttagatta

SEQ ID NO: 3368420 - DNA, 25 bp, Homo sapien
ctggaagacaaaggtgttttagatt

SEQ ID NO: 3368421 - DNA, 25 bp, Homo sapien
gaggtactagcataaggtcctggaa

SEQ ID NO: 3368422 - DNA, 25 bp, Homo sapien
agtaggaggtactagcataaggtcc

SEQ ID NO: 3368423 - DNA, 25 bp, Homo sapien
tgtccaagtaggaggtactagcata

SEQ ID NO: 3368424 - DNA, 25 bp, Homo sapien
gtactagcataaggtcctggaagac

SEQ ID NO: 3368425 - DNA, 25 bp, Homo sapien
aaataggaggtaatagcagaaggtc

SEQ ID NO: 3368426 - DNA, 25 bp, Homo sapien
caaataggaggtaatagcagaaggt

SEQ ID NO: 3368427 - DNA, 25 bp, Homo sapien
tggaagacaaaggtgttttagatta

SEQ ID NO: 3368428 - DNA, 25 bp, Homo sapien
ctggaagacaaaggtgttttagatt

SEQ ID NO: 3368429 - DNA, 25 bp, Homo sapien
agacaaagttgttgtagattacctg

SEQ ID NO: 3368430 - DNA, 25 bp, Homo sapien
tgtagattacctggtgtccaaatag

SEQ ID NO: 3368431 - DNA, 25 bp, Homo sapien
cctggtgtccaaataggaggtaata

SEQ ID NO: 3368432 - DNA, 25 bp, Homo sapien
aaataggaggtaatagcataaggtc

SEQ ID NO: 3368433 - DNA, 25 bp, Homo sapien
aagtaggaggtaatagcataaggtc

SEQ ID NO: 3368434 - DNA, 25 bp, Homo sapien
tgttgtagattacctgatgtccaag

SEQ ID NO: 3368435 - DNA, 25 bp, Homo sapien
gtgttgtagattacctgatgtccaa

SEQ ID NO: 3368436 - DNA, 25 bp, Homo sapien
tgtccaagtaggaggtaatagcata

SEQ ID NO: 3368437 - DNA, 25 bp, Homo sapien
caaataggaggtaatagcagaaggt

SEQ ID NO: 3368438 - DNA, 25 bp, Homo sapien
aaataggaggtaatagcagaaggtc

SEQ ID NO: 3368439 - DNA, 25 bp, Homo sapien
ctgatgtccaaataggaggtaatag

SEQ ID NO: 3368440 - DNA, 25 bp, Homo sapien
gatgtccaaataggaggtaatagaa

SEQ ID NO: 3368441 - DNA, 25 bp, Homo sapien
tgatgtccaaataggaggtaataga

SEQ ID NO: 3368442 - DNA, 25 bp, Homo sapien
tatcataaggtgctggaaaagagag

SEQ ID NO: 3368443 - DNA, 25 bp, Homo sapien
tggaaaagagagggctgtagattac

SEQ ID NO: 3368444 - DNA, 25 bp, Homo sapien
aggtaatatcataaggtgctggaaa

SEQ ID NO: 3368445 - DNA, 25 bp, Homo sapien
tgatgtccaaatgggaggtaatatc

SEQ ID NO: 3368446 - DNA, 25 bp, Homo sapien
tgtccaataggtggtaatagcataa

SEQ ID NO: 3368447 - DNA, 25 bp, Homo sapien
gatgtccaataggtggtaatagcat

SEQ ID NO: 3368448 - DNA, 25 bp, Homo sapien
tccaataggtggtaatagcataaag

SEQ ID NO: 3368449 - DNA, 25 bp, Homo sapien
ctgatgtccaataggtggtaatagc

SEQ ID NO: 3368450 - DNA, 25 bp, Homo sapien
tgtagattacgtgatgtgcaactgg

SEQ ID NO: 3368451 - DNA, 25 bp, Homo sapien
agattacgtgatgtgcaactgggag

SEQ ID NO: 3368452 - DNA, 25 bp, Homo sapien
tgttgtagattacgtgatgtgcaac

SEQ ID NO: 3368453 - DNA, 25 bp, Homo sapien
ttacgtgatgtgcaactgggaggta

SEQ ID NO: 3368454 - DNA, 25 bp, Homo sapien
agtgtgtgttccagtcagaaggagc

SEQ ID NO: 3368455 - DNA, 25 bp, Homo sapien
tgtgtgttccagtcagaaggagcta

SEQ ID NO: 3368456 - DNA, 25 bp, Homo sapien
gtgtgtgttccagtcagaaggagct

SEQ ID NO: 3368457 - DNA, 25 bp, Homo sapien
tcagcactgaccagcagagtctggt

SEQ ID NO: 3368458 - DNA, 25 bp, Homo sapien
agcactgaccagcagagtctggtgg

SEQ ID NO: 3368459 - DNA, 25 bp, Homo sapien
ggtcagcactgaccagcagagtctg

SEQ ID NO: 3368460 - DNA, 25 bp, Homo sapien
gctgggtcagcactgaccagcagag

SEQ ID NO: 3368461 - DNA, 25 bp, Homo sapien
ccctcactctggttcaaacgcaaac

SEQ ID NO: 3368462 - DNA, 25 bp, Homo sapien
ctacgttctttctacacctgagtta

SEQ ID NO: 3368463 - DNA, 25 bp, Homo sapien
ttctacacctgagttagtgctggtg

SEQ ID NO: 3368464 - DNA, 25 bp, Homo sapien
tttcagtcatgtacccccccgtgac

SEQ ID NO: 3368465 - DNA, 25 bp, Homo sapien
acttgccaacttccataccgtctgt

SEQ ID NO: 3368466 - DNA, 25 bp, Homo sapien
gcacaccaaggccattggcggcgtg

SEQ ID NO: 3368467 - DNA, 25 bp, Homo sapien
tcatgcctcagacgccactgagggc

SEQ ID NO: 3368468 - DNA, 25 bp, Homo sapien
caccaaggccattggcggcgtggcc

SEQ ID NO: 3368469 - DNA, 25 bp, Homo sapien
cctctttgtctgtccccagacttaa

SEQ ID NO: 3368470 - DNA, 25 bp, Homo sapien
ctctttgtctgtccccagacttaaa

SEQ ID NO: 3368471 - DNA, 25 bp, Homo sapien
ctttgtctgtccccagacttaaatc

SEQ ID NO: 3368472 - DNA, 25 bp, Homo sapien
tgtctgtccccagacttaaatcttt

SEQ ID NO: 3368473 - DNA, 25 bp, Homo sapien
tctaaatccaatccagtggacctcc

SEQ ID NO: 3368474 - DNA, 25 bp, Homo sapien
cctctaaatccaatccagtggacct

SEQ ID NO: 3368475 - DNA, 25 bp, Homo sapien
taaatccaatccagtggacctccac

SEQ ID NO: 3368476 - DNA, 25 bp, Homo sapien
accctctaaatccaatccagtggac

SEQ ID NO: 3368477 - DNA, 25 bp, Homo sapien
gttaatgtcatcttaaaggagcccc

SEQ ID NO: 3368478 - DNA, 25 bp, Homo sapien
gatcactgaagcttcgttgggagaa

SEQ ID NO: 3368479 - DNA, 25 bp, Homo sapien
ccccaggactgttagccattggtaa

SEQ ID NO: 3368480 - DNA, 25 bp, Homo sapien
cgcataagaattggaataaattgac

SEQ ID NO: 3368481 - DNA, 25 bp, Homo sapien
tgaaggatggatatgacttcttaag

SEQ ID NO: 3368482 - DNA, 25 bp, Homo sapien
tgggtgaaggatggatatgacttct

SEQ ID NO: 3368483 - DNA, 25 bp, Homo sapien
tggatatgacttcttaagtgaaaaa

SEQ ID NO: 3368484 - DNA, 25 bp, Homo sapien
ggatggatatgacttcttaagtgaa

SEQ ID NO: 3368485 - DNA, 25 bp, Homo sapien
cacatgcggtgtgtccataggagct

SEQ ID NO: 3368486 - DNA, 25 bp, Homo sapien
tgttctgacggctttccacagctgt

SEQ ID NO: 3368487 - DNA, 25 bp, Homo sapien
agctgccacagatcctgccagatgc

SEQ ID NO: 3368488 - DNA, 25 bp, Homo sapien
ttattccacagaagtgctgtcgcca

SEQ ID NO: 3368489 - DNA, 25 bp, Homo sapien
tggagtctccgaagatcatcttgac

SEQ ID NO: 3368490 - DNA, 25 bp, Homo sapien
tgttcagcctgtttatggagtctcc

SEQ ID NO: 3368491 - DNA, 25 bp, Homo sapien
tattcgcttgctctctacttgaggg

SEQ ID NO: 3368492 - DNA, 25 bp, Homo sapien
tgggcatttctgtcgcgccgtgttt

SEQ ID NO: 3368493 - DNA, 25 bp, Homo sapien
ccggcggatacgcaggtgcagcaga

SEQ ID NO: 3368494 - DNA, 25 bp, Homo sapien
tgtggagagagccggcggatacgca

SEQ ID NO: 3368495 - DNA, 25 bp, Homo sapien
agagagccggcggatacgcaggtgc

SEQ ID NO: 3368496 - DNA, 25 bp, Homo sapien
cagcagagcaggacggacggaggag

SEQ ID NO: 3368497 - DNA, 25 bp, Homo sapien
cagtcagcgtctgcaaaaactttgc

SEQ ID NO: 3368498 - DNA, 25 bp, Homo sapien
taggcatcagtcagcgtctgcaaaa

SEQ ID NO: 3368499 - DNA, 25 bp, Homo sapien
ttgcacacatgtaaagctgttgctg

SEQ ID NO: 3368500 - DNA, 25 bp, Homo sapien
catgtaaagctgttgctgaaatctt

SEQ ID NO: 3368501 - DNA, 25 bp, Homo sapien
gtgacaccggaactgctctcgttaa

SEQ ID NO: 3368502 - DNA, 25 bp, Homo sapien
tgtgagtgacaccggaactgctctc

SEQ ID NO: 3368503 - DNA, 25 bp, Homo sapien
tgagtgacaccggaactgctctcgt

SEQ ID NO: 3368504 - DNA, 25 bp, Homo sapien
caccggaactgctctcgttaacctt

SEQ ID NO: 3368505 - DNA, 25 bp, Homo sapien
ctgttggcacattgagagtaatgtc

SEQ ID NO: 3368506 - DNA, 25 bp, Homo sapien
cagacttctctgttggcacattgag

SEQ ID NO: 3368507 - DNA, 25 bp, Homo sapien
cctgttccagacttctctgttggca

SEQ ID NO: 3368508 - DNA, 25 bp, Homo sapien
tgttggcacattgagagtaatgtca

SEQ ID NO: 3368509 - DNA, 25 bp, Homo sapien
caatgtgggttacttgctcgccgca

SEQ ID NO: 3368510 - DNA, 25 bp, Homo sapien
catggatatgaatggcctgtgcagc

SEQ ID NO: 3368511 - DNA, 25 bp, Homo sapien
ctatcccgagagagttgagcatccc

SEQ ID NO: 3368512 - DNA, 25 bp, Homo sapien
cataaggcaagagactcgtcgggca

SEQ ID NO: 3368513 - DNA, 25 bp, Homo sapien
gacacggggacttcttccgggctgc

SEQ ID NO: 3368514 - DNA, 25 bp, Homo sapien
ctcctcctcgtcctttcggatcccg

SEQ ID NO: 3368515 - DNA, 25 bp, Homo sapien
cgcgcttccgcttcagaccccgcat

SEQ ID NO: 3368516 - DNA, 25 bp, Homo sapien
agaccccgcatcaggacccgggaca

SEQ ID NO: 3368517 - DNA, 25 bp, Homo sapien
ccgcgtggttccttcgcaggggaca

SEQ ID NO: 3368518 - DNA, 25 bp, Homo sapien
aaggacgcaagggagccgcgcaggt

SEQ ID NO: 3368519 - DNA, 25 bp, Homo sapien
ttcaatgcgactccggaaggacgca

SEQ ID NO: 3368520 - DNA, 25 bp, Homo sapien
ggcgcgcgatctgccgtctgagttc

SEQ ID NO: 3368521 - DNA, 25 bp, Homo sapien
agcttcctgcaggttcgcgccagct

SEQ ID NO: 3368522 - DNA, 25 bp, Homo sapien
gcttttcctggacgactgctgaagt

SEQ ID NO: 3368523 - DNA, 25 bp, Homo sapien
ctgagcggtccgcacacacagtcct

SEQ ID NO: 3368524 - DNA, 25 bp, Homo sapien
aagcggctccaaactgcccactgag

SEQ ID NO: 3368525 - DNA, 25 bp, Homo sapien
ttccacagccaaaaacatggaacac

SEQ ID NO: 3368526 - DNA, 25 bp, Homo sapien
ctagtcgattccacagccaaaaaca

SEQ ID NO: 3368527 - DNA, 25 bp, Homo sapien
gattccacagccaaaaacatggaac

SEQ ID NO: 3368528 - DNA, 25 bp, Homo sapien
agtcgattccacagccaaaaacatg

SEQ ID NO: 3368529 - DNA, 25 bp, Homo sapien
cttctctctagctgtaaatcaatgt

SEQ ID NO: 3368530 - DNA, 25 bp, Homo sapien
tcttctctctagctgtaaatcaatg

SEQ ID NO: 3368531 - DNA, 25 bp, Homo sapien
tctctctagctgtaaatcaatgttc

SEQ ID NO: 3368532 - DNA, 25 bp, Homo sapien
ctctctagctgtaaatcaatgttct

SEQ ID NO: 3368533 - DNA, 25 bp, Homo sapien
aaccaagaagataccaatatgaacc

SEQ ID NO: 3368534 - DNA, 25 bp, Homo sapien
gaagagaaacgtcaaccaagaagat

SEQ ID NO: 3368535 - DNA, 25 bp, Homo sapien
ggctaccgacaacgtcccagggctg

SEQ ID NO: 3368536 - DNA, 25 bp, Homo sapien
taccgacaacgtcccagggctgaag

SEQ ID NO: 3368537 - DNA, 25 bp, Homo sapien
taccagctatcacacgatgccccat

SEQ ID NO: 3368538 - DNA, 25 bp, Homo sapien
cacgatgccctatttttctaccagc

SEQ ID NO: 3368539 - DNA, 25 bp, Homo sapien
tcacacgatgccctatttttctacc

SEQ ID NO: 3368540 - DNA, 25 bp, Homo sapien
cagctatcacacgatgccctatttt

SEQ ID NO: 3368541 - DNA, 25 bp, Homo sapien
tgccctgtgcaatgagcatcatcaa

SEQ ID NO: 3368542 - DNA, 25 bp, Homo sapien
ccctgccctgtgcaatgagcatcat

SEQ ID NO: 3368543 - DNA, 25 bp, Homo sapien
cccctgccctgtgcaatgagcatca

SEQ ID NO: 3368544 - DNA, 25 bp, Homo sapien
cctgccctgtgcaatgagcatcatc

SEQ ID NO: 3368545 - DNA, 25 bp, Homo sapien
gagcgtagatgagaaaggcagtcac

SEQ ID NO: 3368546 - DNA, 25 bp, Homo sapien
cagtgaagtatgatgtgggacagca

SEQ ID NO: 3368547 - DNA, 25 bp, Homo sapien
ggcaggctctccttttgacaggcat

SEQ ID NO: 3368548 - DNA, 25 bp, Homo sapien
tcacttttctcaactccggcaggct

SEQ ID NO: 3368549 - DNA, 25 bp, Homo sapien
tagtaataattgtaagaagtgtagc

SEQ ID NO: 3368550 - DNA, 25 bp, Homo sapien
ttttcttgtcgaggccacagatcaa

SEQ ID NO: 3368551 - DNA, 25 bp, Homo sapien
gccatctctgtgaagacatcaagaa

SEQ ID NO: 3368552 - DNA, 25 bp, Homo sapien
cacagatcaacccatttattaacaa

SEQ ID NO: 3368553 - DNA, 25 bp, Homo sapien
aggaaagcctgcatgttaaatcgaa

SEQ ID NO: 3368554 - DNA, 25 bp, Homo sapien
tgttaaatcgaagatagtcttttga

SEQ ID NO: 3368555 - DNA, 25 bp, Homo sapien
gaaagcctgcatgttaaatcgaaga

SEQ ID NO: 3368556 - DNA, 25 bp, Homo sapien
cctgcatgttaaatcgaagatagtc

SEQ ID NO: 3368557 - DNA, 25 bp, Homo sapien
taggtcctttgcaccgctgctactg

SEQ ID NO: 3368558 - DNA, 25 bp, Homo sapien
gctgctactgtaggaggcactccca

SEQ ID NO: 3368559 - DNA, 25 bp, Homo sapien
catggacccacgtatatcagaggca

SEQ ID NO: 3368560 - DNA, 25 bp, Homo sapien
gaagttggccgtactgttcctccac

SEQ ID NO: 3368561 - DNA, 25 bp, Homo sapien
ttatctactggatgaacttgtacag

SEQ ID NO: 3368562 - DNA, 25 bp, Homo sapien
tctactggatgaacttgtacagtca

SEQ ID NO: 3368563 - DNA, 25 bp, Homo sapien
tgtacagtcattgaaggaatacgcc

SEQ ID NO: 3368564 - DNA, 25 bp, Homo sapien
tgaacttgtacagtcattgaaggaa

SEQ ID NO: 3368565 - DNA, 25 bp, Homo sapien
ctaacatcgaggaggacagtctgca

SEQ ID NO: 3368566 - DNA, 25 bp, Homo sapien
aagaagcccctttatcctgcagtgc

SEQ ID NO: 3368567 - DNA, 25 bp, Homo sapien
cctaatggagagagtggctacagcc

SEQ ID NO: 3368568 - DNA, 25 bp, Homo sapien
ggtgcaaggtccagtccaaaggtat

SEQ ID NO: 3368569 - DNA, 25 bp, Homo sapien
tgtaaacttagcagaggccgggtgc

SEQ ID NO: 3368570 - DNA, 25 bp, Homo sapien
caggttgtaaacttagcagaggccg

SEQ ID NO: 3368571 - DNA, 25 bp, Homo sapien
gaatttgcaggttgtaaacttagca

SEQ ID NO: 3368572 - DNA, 25 bp, Homo sapien
tttgcaggttgtaaacttagcagag

SEQ ID NO: 3368573 - DNA, 25 bp, Homo sapien
taggcaacagtagctactcaagtat

SEQ ID NO: 3368574 - DNA, 25 bp, Homo sapien
tatggatgactagcaaaaccttgaa

SEQ ID NO: 3368575 - DNA, 25 bp, Homo sapien
tcctgaaattcactagcctgtgtga

SEQ ID NO: 3368576 - DNA, 25 bp, Homo sapien
tcctgcaggattatagaagctgttc

SEQ ID NO: 3368577 - DNA, 25 bp, Homo sapien
gaggttgcattcaagcctgcattca

SEQ ID NO: 3368578 - DNA, 25 bp, Homo sapien
aatagaaatggcagttaagaaacag

SEQ ID NO: 3368579 - DNA, 25 bp, Homo sapien
caaaactagaggttgcattcaagcc

SEQ ID NO: 3368580 - DNA, 25 bp, Homo sapien
ttatcactgaactgaggtcttgttg

SEQ ID NO: 3368581 - DNA, 25 bp, Homo sapien
cctcagaaagggcttggtgccgtcc

SEQ ID NO: 3368582 - DNA, 25 bp, Homo sapien
taaatatgagtgttggccacagctc

SEQ ID NO: 3368583 - DNA, 25 bp, Homo sapien
taaatggcctttgcacctcacagac

SEQ ID NO: 3368584 - DNA, 25 bp, Homo sapien
ttacggtgcaccctgtaaacggcgc

SEQ ID NO: 3368585 - DNA, 25 bp, Homo sapien
gcgccctacgtcacagacgccgcgc

SEQ ID NO: 3368586 - DNA, 25 bp, Homo sapien
tgcgccctacgtcacagacgccgcg

SEQ ID NO: 3368587 - DNA, 25 bp, Homo sapien
tcaacttcttgctgcgtgtccacac

SEQ ID NO: 3368588 - DNA, 25 bp, Homo sapien
cttctctgtcacacttagccagcat

SEQ ID NO: 3368589 - DNA, 25 bp, Homo sapien
ctattaatcacgttatttttggcca

SEQ ID NO: 3368590 - DNA, 25 bp, Homo sapien
gcagaaacattattcttatcactat

SEQ ID NO: 3368591 - DNA, 25 bp, Homo sapien
tcaactgcaaatgccatccctctac

SEQ ID NO: 3368592 - DNA, 25 bp, Homo sapien
ggcatgttactctctcaactgcaaa

SEQ ID NO: 3368593 - DNA, 25 bp, Homo sapien
gctttgttgtaaaggtggcatgtta

SEQ ID NO: 3368594 - DNA, 25 bp, Homo sapien
atccctctactctgagccctcacgg

SEQ ID NO: 3368595 - DNA, 25 bp, Homo sapien
gtattaatacttcgctgtgcttcac

SEQ ID NO: 3368596 - DNA, 25 bp, Homo sapien
aatacttcgctgtgcttcacactcc

SEQ ID NO: 3368597 - DNA, 25 bp, Homo sapien
ttaatacttcgctgtgcttcacact

SEQ ID NO: 3368598 - DNA, 25 bp, Homo sapien
tacagtattaatacttcgctgtgct

SEQ ID NO: 3368599 - DNA, 25 bp, Homo sapien
ctcaccaccagaaagggcaatgttt

SEQ ID NO: 3368600 - DNA, 25 bp, Homo sapien
tctgcgactagggaactgcttgagc

SEQ ID NO: 3368601 - DNA, 25 bp, Homo sapien
aagggacctcttctgtaccccacag

SEQ ID NO: 3368602 - DNA, 25 bp, Homo sapien
tgagctttgcttctgcgactaggga

SEQ ID NO: 3368603 - DNA, 25 bp, Homo sapien
ctcaaacatgcacagggcgctatcc

SEQ ID NO: 3368604 - DNA, 25 bp, Homo sapien
ccccgtgggcttctcggatgtgtac

SEQ ID NO: 3368605 - DNA, 25 bp, Homo sapien
ggatgtgtactcgattccatctaag

SEQ ID NO: 3368606 - DNA, 25 bp, Homo sapien
catctaagttttggccattggccca

SEQ ID NO: 3368607 - DNA, 25 bp, Homo sapien
cagaattcttacctactttgttctc

SEQ ID NO: 3368608 - DNA, 25 bp, Homo sapien
tcagaattcttacctactttgttct

SEQ ID NO: 3368609 - DNA, 25 bp, Homo sapien
ctgggacagtgcttgatcaatgatg

SEQ ID NO: 3368610 - DNA, 25 bp, Homo sapien
tcagtgtatccaaaaccattgcgga

SEQ ID NO: 3368611 - DNA, 25 bp, Homo sapien
taaacaacgcttttcatgagtgaaa

SEQ ID NO: 3368612 - DNA, 25 bp, Homo sapien
tgtcatatggataaagaatcaccga

SEQ ID NO: 3368613 - DNA, 25 bp, Homo sapien
tcttatgaactacgtggatttatcc

SEQ ID NO: 3368614 - DNA, 25 bp, Homo sapien
cactggaaacatgtctcaatgacac

SEQ ID NO: 3368615 - DNA, 25 bp, Homo sapien
tctaacgccttaagaggaggcggat

SEQ ID NO: 3368616 - DNA, 25 bp, Homo sapien
cattttgatccatcgcttcatgtga

SEQ ID NO: 3368617 - DNA, 25 bp, Homo sapien
ttacatagtccttgacactggaaac

SEQ ID NO: 3368618 - DNA, 25 bp, Homo sapien
ggctctgatcttacagtgcgcactg

SEQ ID NO: 3368619 - DNA, 25 bp, Homo sapien
tctcctgtgagatatttgcctgtcg

SEQ ID NO: 3368620 - DNA, 25 bp, Homo sapien
tgcctgtcgtgcaatcagcccaatt

SEQ ID NO: 3368621 - DNA, 25 bp, Homo sapien
tatctcctctggcaatagctgctcg

SEQ ID NO: 3368622 - DNA, 25 bp, Homo sapien
aagaatttcaccacgtacttcaggg

SEQ ID NO: 3368623 - DNA, 25 bp, Homo sapien
tttcctggaggcaacacttgtgaca

SEQ ID NO: 3368624 - DNA, 25 bp, Homo sapien
cacttgtgacaagaatttcaccacg

SEQ ID NO: 3368625 - DNA, 25 bp, Homo sapien
aaaatgtcgattgaagcctgtttcc

SEQ ID NO: 3368626 - DNA, 25 bp, Homo sapien
agaccgtgtgggcaatgctgcactt

SEQ ID NO: 3368627 - DNA, 25 bp, Homo sapien
tctggatatcattttaggtagaaaa

SEQ ID NO: 3368628 - DNA, 25 bp, Homo sapien
cgatcaatgctgtcttttgaggctt

SEQ ID NO: 3368629 - DNA, 25 bp, Homo sapien
cattttaggtagaaaaatccgatca

SEQ ID NO: 3368630 - DNA, 25 bp, Homo sapien
agtcgatcaactcggcagctgcttc

SEQ ID NO: 3368631 - DNA, 25 bp, Homo sapien
ttagcactgttctccaagtcgatca

SEQ ID NO: 3368632 - DNA, 25 bp, Homo sapien
gcacctgcgtgactattagcactgt

SEQ ID NO: 3368633 - DNA, 25 bp, Homo sapien
gctgcttctgggatatgcttactcc

SEQ ID NO: 3368634 - DNA, 25 bp, Homo sapien
tcccaaatgctttcggtcttccagg

SEQ ID NO: 3368635 - DNA, 25 bp, Homo sapien
catgctgcaatattacccacaaggg

SEQ ID NO: 3368636 - DNA, 25 bp, Homo sapien
cactacaggataaacggagctgtct

SEQ ID NO: 3368637 - DNA, 25 bp, Homo sapien
tattggattcaccaacactacagga

SEQ ID NO: 3368638 - DNA, 25 bp, Homo sapien
taacccgtggaaagatgcagtgtgc

SEQ ID NO: 3368639 - DNA, 25 bp, Homo sapien
ggtacccttgccatgagaggcccaa

SEQ ID NO: 3368640 - DNA, 25 bp, Homo sapien
ggcccaacccatgtggagaagtcaa

SEQ ID NO: 3368641 - DNA, 25 bp, Homo sapien
tgtaatgtaactcgccactaacccg

SEQ ID NO: 3368642 - DNA, 25 bp, Homo sapien
ccatttggaagccgccaaggcttgc

SEQ ID NO: 3368643 - DNA, 25 bp, Homo sapien
ttggaagccgccaaggcttgcagct

SEQ ID NO: 3368644 - DNA, 25 bp, Homo sapien
tctgtgaacccgcaggttcaatacc

SEQ ID NO: 3368645 - DNA, 25 bp, Homo sapien
aacccgcaggttcaataccatttgg

SEQ ID NO: 3368646 - DNA, 25 bp, Homo sapien
caatgaatagttgttccaatatgga

SEQ ID NO: 3368647 - DNA, 25 bp, Homo sapien
tgaatgctcatataggacagcccac

SEQ ID NO: 3368648 - DNA, 25 bp, Homo sapien
agcctaatttgtgttctaaagtaca

SEQ ID NO: 3368649 - DNA, 25 bp, Homo sapien
ctagaaattaagaactggtgaatgc

SEQ ID NO: 3368650 - DNA, 25 bp, Homo sapien
ttaaaaagtgtcattatttacaagc

SEQ ID NO: 3368651 - DNA, 25 bp, Homo sapien
gagcttgtcaacactatataatgaa

SEQ ID NO: 3368652 - DNA, 25 bp, Homo sapien
tggggttagatttaagtcaaagaca

SEQ ID NO: 3368653 - DNA, 25 bp, Homo sapien
ttatttgtttgcaactgagcttgtc

SEQ ID NO: 3368654 - DNA, 25 bp, Homo sapien
aataattatgttgcagtttggggtt

SEQ ID NO: 3368655 - DNA, 25 bp, Homo sapien
catagacctttagaatatcatcata

SEQ ID NO: 3368656 - DNA, 25 bp, Homo sapien
ggaccatagacctttagaatatcat

SEQ ID NO: 3368657 - DNA, 25 bp, Homo sapien
gcatctatagatctaggaccataga

SEQ ID NO: 3368658 - DNA, 25 bp, Homo sapien
tctatagatctaggaccatagacct

SEQ ID NO: 3368659 - DNA, 25 bp, Homo sapien
tcttactccagtagacaatgtcagg

SEQ ID NO: 3368660 - DNA, 25 bp, Homo sapien
gctcatgggatttgactcttactcc

SEQ ID NO: 3368661 - DNA, 25 bp, Homo sapien
gcctaattggtatctgctagagaaa

SEQ ID NO: 3368662 - DNA, 25 bp, Homo sapien
tctgaattataggacgcctaattgg

SEQ ID NO: 3368663 - DNA, 25 bp, Homo sapien
tcggtgctctttccagttaagcccc

SEQ ID NO: 3368664 - DNA, 25 bp, Homo sapien
cctgtaggctagtcagtgaacgttt

SEQ ID NO: 3368665 - DNA, 25 bp, Homo sapien
ttccataagggaaacacattgaggg

SEQ ID NO: 3368666 - DNA, 25 bp, Homo sapien
taagccccttcttcggtgctcagca

SEQ ID NO: 3368667 - DNA, 25 bp, Homo sapien
ttccccttagatcccacttggtaga

SEQ ID NO: 3368668 - DNA, 25 bp, Homo sapien
tgtcaagctttggagtaagttgaaa

SEQ ID NO: 3368669 - DNA, 25 bp, Homo sapien
gtcagtcatgaagctttcctcaaag

SEQ ID NO: 3368670 - DNA, 25 bp, Homo sapien
ggaggcaccgtactgctcagcagca

SEQ ID NO: 3368671 - DNA, 25 bp, Homo sapien
aactcacccatctagggatgcacag

SEQ ID NO: 3368672 - DNA, 25 bp, Homo sapien
gttacaactcacccatctagggatg

SEQ ID NO: 3368673 - DNA, 25 bp, Homo sapien
caactcacccatctagggatgcaca

SEQ ID NO: 3368674 - DNA, 25 bp, Homo sapien
tacaactcacccatctagggatgca

SEQ ID NO: 3368675 - DNA, 25 bp, Homo sapien
gaagatgtccttgatttatatgaag

SEQ ID NO: 3368676 - DNA, 25 bp, Homo sapien
gcaattccaagctgctgtcattttg

SEQ ID NO: 3368677 - DNA, 25 bp, Homo sapien
ggtttcttactgtgatcagctccta

SEQ ID NO: 3368678 - DNA, 25 bp, Homo sapien
ctctggaggtgtatgaagatgtcct

SEQ ID NO: 3368679 - DNA, 25 bp, Homo sapien
agacacatctgtaatgcattgttcc

SEQ ID NO: 3368680 - DNA, 25 bp, Homo sapien
gacacatctgtaatgcattgttcca

SEQ ID NO: 3368681 - DNA, 25 bp, Homo sapien
aatacattgcagactctaacggtga

SEQ ID NO: 3368682 - DNA, 25 bp, Homo sapien
cattgcagactctaacggtgaaggc

SEQ ID NO: 3368683 - DNA, 25 bp, Homo sapien
ccccacagtgcaggtgtttctgtcc

SEQ ID NO: 3368684 - DNA, 25 bp, Homo sapien
cccacagtgcaggtgtttctgtcct

SEQ ID NO: 3368685 - DNA, 25 bp, Homo sapien
tcttctccagcattgcttaagcccc

SEQ ID NO: 3368686 - DNA, 25 bp, Homo sapien
cagcattgcttaagccccacagtgc

SEQ ID NO: 3368687 - DNA, 25 bp, Homo sapien
agcattgcttaagccccacagtgca

SEQ ID NO: 3368688 - DNA, 25 bp, Homo sapien
ctccagcattgcttaagccccacag

SEQ ID NO: 3368689 - DNA, 25 bp, Homo sapien
cgaagcggttcaggaaacctaagcg

SEQ ID NO: 3368690 - DNA, 25 bp, Homo sapien
ccagcattgctttgggttttacgaa

SEQ ID NO: 3368691 - DNA, 25 bp, Homo sapien
ctaagcgctgactggacttttctga

SEQ ID NO: 3368692 - DNA, 25 bp, Homo sapien
gcctccgcgttttgtgtaaagtcaa

SEQ ID NO: 3368693 - DNA, 25 bp, Homo sapien
agatgggcatttacagttccttgaa

SEQ ID NO: 3368694 - DNA, 25 bp, Homo sapien
gaagatgggcatttacagttccttg

SEQ ID NO: 3368695 - DNA, 25 bp, Homo sapien
atgggcatttacagttccttgaaca

SEQ ID NO: 3368696 - DNA, 25 bp, Homo sapien
ggaagatgggcatttacagttcctt

SEQ ID NO: 3368697 - DNA, 25 bp, Homo sapien
tctcctagatctgtaacggttccca

SEQ ID NO: 3368698 - DNA, 25 bp, Homo sapien
gcagagcatcaagcagaataacgtg

SEQ ID NO: 3368699 - DNA, 25 bp, Homo sapien
ggttcccacatcacagacatttttg

SEQ ID NO: 3368700 - DNA, 25 bp, Homo sapien
ccaatgaattcaggtcggtaaagtg

SEQ ID NO: 3368701 - DNA, 25 bp, Homo sapien
ccttgtgtcaatggctgagggtttg

SEQ ID NO: 3368702 - DNA, 25 bp, Homo sapien
gaacgacataagaattggctttacc

SEQ ID NO: 3368703 - DNA, 25 bp, Homo sapien
aacccgaccctgcaatcatcatctg

SEQ ID NO: 3368704 - DNA, 25 bp, Homo sapien
ggctttaccttgtgtcaatggctga

SEQ ID NO: 3368705 - DNA, 25 bp, Homo sapien
caacaaccttaatttcctcattaga

SEQ ID NO: 3368706 - DNA, 25 bp, Homo sapien
caaccttaatttcctcattagaatt

SEQ ID NO: 3368707 - DNA, 25 bp, Homo sapien
gacaacaaccttaatttcctcatta

SEQ ID NO: 3368708 - DNA, 25 bp, Homo sapien
cgacaacaaccttaatttcctcatt

SEQ ID NO: 3368709 - DNA, 25 bp, Homo sapien
tttcacaaggaaagagaagcaggat

SEQ ID NO: 3368710 - DNA, 25 bp, Homo sapien
aggaaagagaagcaggatgctcctc

SEQ ID NO: 3368711 - DNA, 25 bp, Homo sapien
gaaagagaagcaggatgctcctcac

SEQ ID NO: 3368712 - DNA, 25 bp, Homo sapien
cacaaggaaagagaagcaggatgct

SEQ ID NO: 3368713 - DNA, 25 bp, Homo sapien
tctggaggcttcgcctaaagccttc

SEQ ID NO: 3368714 - DNA, 25 bp, Homo sapien
tggaggcttcgcctaaagccttcat

SEQ ID NO: 3368715 - DNA, 25 bp, Homo sapien
ctggaggcttcgcctaaagccttca

SEQ ID NO: 3368716 - DNA, 25 bp, Homo sapien
ttaacacgcgacaaaggagggaagc

SEQ ID NO: 3368717 - DNA, 25 bp, Homo sapien
aggtgcctctctccgatccacttaa

SEQ ID NO: 3368718 - DNA, 25 bp, Homo sapien
gcccgactgtgtctgaagtatgaga

SEQ ID NO: 3368719 - DNA, 25 bp, Homo sapien
gaaggacaaaggtccaacaggtgcc

SEQ ID NO: 3368720 - DNA, 25 bp, Homo sapien
tgtaacatgctgaggcgcggcctct

SEQ ID NO: 3368721 - DNA, 25 bp, Homo sapien
tatcagggtcgcatttaaagaagca

SEQ ID NO: 3368722 - DNA, 25 bp, Homo sapien
tggtctctccaaagctcgcaggctg

SEQ ID NO: 3368723 - DNA, 25 bp, Homo sapien
ctttccgcaacagaacacaggcagg

SEQ ID NO: 3368724 - DNA, 25 bp, Homo sapien
cactcctgcttgaaagctctctctg

SEQ ID NO: 3368725 - DNA, 25 bp, Homo sapien
tcatccctcgttgtgtaactgcatc

SEQ ID NO: 3368726 - DNA, 25 bp, Homo sapien
catccctcgttgtgtaactgcatcc

SEQ ID NO: 3368727 - DNA, 25 bp, Homo sapien
tccctcgttgtgtaactgcatccag

SEQ ID NO: 3368728 - DNA, 25 bp, Homo sapien
aggattgtttcatcattgttccatc

SEQ ID NO: 3368729 - DNA, 25 bp, Homo sapien
attgtttcatcattgttccatctac

SEQ ID NO: 3368730 - DNA, 25 bp, Homo sapien
gattgtttcatcattgttccatcta

SEQ ID NO: 3368731 - DNA, 25 bp, Homo sapien
ttaggattgtttcatcattgttcca

SEQ ID NO: 3368732 - DNA, 25 bp, Homo sapien
gggtccagtgagagcaaaaccagga

SEQ ID NO: 3368733 - DNA, 25 bp, Homo sapien
tcgtactgggtatggaaaagaagct

SEQ ID NO: 3368734 - DNA, 25 bp, Homo sapien
taccaggcattgctatggccataga

SEQ ID NO: 3368735 - DNA, 25 bp, Homo sapien
gacagcaatcatatgaccacaagga

SEQ ID NO: 3368736 - DNA, 25 bp, Homo sapien
gcagtgacctgatggcttgcagtaa

SEQ ID NO: 3368737 - DNA, 25 bp, Homo sapien
tacaaggtcctccaaaatcgtggca

SEQ ID NO: 3368738 - DNA, 25 bp, Homo sapien
cttgcagtaagtagagcgtccgggc

SEQ ID NO: 3368739 - DNA, 25 bp, Homo sapien
taattttacgcactggcaatccagg

SEQ ID NO: 3368740 - DNA, 25 bp, Homo sapien
tgtaggcagtctacgcgtggcagca

SEQ ID NO: 3368741 - DNA, 25 bp, Homo sapien
taagactgtaggcagtctacgcgtg

SEQ ID NO: 3368742 - DNA, 25 bp, Homo sapien
agactgtaggcagtctacgcgtggc

SEQ ID NO: 3368743 - DNA, 25 bp, Homo sapien
actgtaggcagtctacgcgtggcag

SEQ ID NO: 3368744 - DNA, 25 bp, Homo sapien
gcattttatgaagattgcctccgca

SEQ ID NO: 3368745 - DNA, 25 bp, Homo sapien
ttcacatggaaacccactgagtggg

SEQ ID NO: 3368746 - DNA, 25 bp, Homo sapien
gcttgcttctaggaaatgctctaca

SEQ ID NO: 3368747 - DNA, 25 bp, Homo sapien
tcccaaaggctgcaagagcatgatt

SEQ ID NO: 3368748 - DNA, 25 bp, Homo sapien
ccagctgccttattcaaagtccagg

SEQ ID NO: 3368749 - DNA, 25 bp, Homo sapien
aaagcccacgagtgtattccacaag

SEQ ID NO: 3368750 - DNA, 25 bp, Homo sapien
ctcctccaaagtgtaccttccatga

SEQ ID NO: 3368751 - DNA, 25 bp, Homo sapien
tcccagaaggcgtctcacactgaaa

SEQ ID NO: 3368752 - DNA, 25 bp, Homo sapien
tatgccctgtctacacagccaaact

SEQ ID NO: 3368753 - DNA, 25 bp, Homo sapien
ctgaatccatatgccctgtctacac

SEQ ID NO: 3368754 - DNA, 25 bp, Homo sapien
tgctcatcacccagttgcatcgcca

SEQ ID NO: 3368755 - DNA, 25 bp, Homo sapien
cagttgcatcgccagcctgctctct

SEQ ID NO: 3368756 - DNA, 25 bp, Homo sapien
tggatatctgcagtgacaaatttca

SEQ ID NO: 3368757 - DNA, 25 bp, Homo sapien
tatctgcagtgacaaatttcatgtc

SEQ ID NO: 3368758 - DNA, 25 bp, Homo sapien
cagtgacaaatttcatgtcactgac

SEQ ID NO: 3368759 - DNA, 25 bp, Homo sapien
agctctctggatatctgcagtgaca

SEQ ID NO: 3368760 - DNA, 25 bp, Homo sapien
gaatgagataaaccggcgttcacgc

SEQ ID NO: 3368761 - DNA, 25 bp, Homo sapien
tgaacttgaaagtcccgggattcca

SEQ ID NO: 3368762 - DNA, 25 bp, Homo sapien
ttaagttcaaacacacccagattgg

SEQ ID NO: 3368763 - DNA, 25 bp, Homo sapien
tcacgctggcacatgaaatgaactt

SEQ ID NO: 3368764 - DNA, 25 bp, Homo sapien
ttcgaaggtctttttgttcagtcat

SEQ ID NO: 3368765 - DNA, 25 bp, Homo sapien
cattgagtcttttgtataatacaat

SEQ ID NO: 3368766 - DNA, 25 bp, Homo sapien
gcttcagtgagcacattgagtcttt

SEQ ID NO: 3368767 - DNA, 25 bp, Homo sapien
tttcgaaggtctttttgttcagtca

SEQ ID NO: 3368768 - DNA, 25 bp, Homo sapien
ctttggataagagctgttcatctgg

SEQ ID NO: 3368769 - DNA, 25 bp, Homo sapien
tggataagagctgttcatctgggat

SEQ ID NO: 3368770 - DNA, 25 bp, Homo sapien
tttggataagagctgttcatctggg

SEQ ID NO: 3368771 - DNA, 25 bp, Homo sapien
ggataagagctgttcatctgggatg

SEQ ID NO: 3368772 - DNA, 25 bp, Homo sapien
aaacacagctgcagcggctctccca

SEQ ID NO: 3368773 - DNA, 25 bp, Homo sapien
gagcaaacacagctgcagcggctct

SEQ ID NO: 3368774 - DNA, 25 bp, Homo sapien
cagctgcagcggctctcccaggcag

SEQ ID NO: 3368775 - DNA, 25 bp, Homo sapien
acagagcaaacacagctgcagcggc

SEQ ID NO: 3368776 - DNA, 25 bp, Homo sapien
cgttgtctccacgtgtgtcatcaca

SEQ ID NO: 3368777 - DNA, 25 bp, Homo sapien
gagaagtccgccacggcgttgtctc

SEQ ID NO: 3368778 - DNA, 25 bp, Homo sapien
gccacggcgttgtctccacgtgtgt

SEQ ID NO: 3368779 - DNA, 25 bp, Homo sapien
aacagcacagagaagtccgccacgg

SEQ ID NO: 3368780 - DNA, 25 bp, Homo sapien
tcatgtaattgacagtggtgaggac

SEQ ID NO: 3368781 - DNA, 25 bp, Homo sapien
tgaattctgagaaaacgactgtcat

SEQ ID NO: 3368782 - DNA, 25 bp, Homo sapien
catgtaattgacagtggtgaggact

SEQ ID NO: 3368783 - DNA, 25 bp, Homo sapien
gagaaaacgactgtcatgtaattga

SEQ ID NO: 3368784 - DNA, 25 bp, Homo sapien
acggtgcgcagtgagcgattccgcc

SEQ ID NO: 3368785 - DNA, 25 bp, Homo sapien
ccgtatttgtattgaggagtcagga

SEQ ID NO: 3368786 - DNA, 25 bp, Homo sapien
agtcaggacggtgcgcagtgagcga

SEQ ID NO: 3368787 - DNA, 25 bp, Homo sapien
gcgattccgccgtcgctggcggaca

SEQ ID NO: 3368788 - DNA, 25 bp, Homo sapien
agacacgtaaacttccaaaatgcaa

SEQ ID NO: 3368789 - DNA, 25 bp, Homo sapien
ttagacacgtaaacttccaaaatgc

SEQ ID NO: 3368790 - DNA, 25 bp, Homo sapien
cttaatatgcaaacttttagacacg

SEQ ID NO: 3368791 - DNA, 25 bp, Homo sapien
tatgcaaacttttagacacgtaaac

SEQ ID NO: 3368792 - DNA, 25 bp, Homo sapien
aaccttcgaaaactgtgtggccttg

SEQ ID NO: 3368793 - DNA, 25 bp, Homo sapien
gatccacgtatctgactcttctcta

SEQ ID NO: 3368794 - DNA, 25 bp, Homo sapien
tgttccataatccatcagtaggtgc

SEQ ID NO: 3368795 - DNA, 25 bp, Homo sapien
catgatggcttagatgatccacgta

SEQ ID NO: 3368796 - DNA, 25 bp, Homo sapien
acagcacccgtttgagtaacagaag

SEQ ID NO: 3368797 - DNA, 25 bp, Homo sapien
gtgcttctgcacaggagccggagag

SEQ ID NO: 3368798 - DNA, 25 bp, Homo sapien
gttgtaactcgtaccttctgactga

SEQ ID NO: 3368799 - DNA, 25 bp, Homo sapien
ttctggatatgaggacgacttggtc

SEQ ID NO: 3368800 - DNA, 25 bp, Homo sapien
tccacatcgctgcaacgatgaagga

SEQ ID NO: 3368801 - DNA, 25 bp, Homo sapien
catcgctgcaacgatgaaggagcgc

SEQ ID NO: 3368802 - DNA, 25 bp, Homo sapien
ctgcaacgatgaaggagcgctgcca

SEQ ID NO: 3368803 - DNA, 25 bp, Homo sapien
tccagtgcatttcaatccacatcgc

SEQ ID NO: 3368804 - DNA, 25 bp, Homo sapien
cctgttgatccgggaagagggtggg

SEQ ID NO: 3368805 - DNA, 25 bp, Homo sapien
tagtccaggtattcaattccacttt

SEQ ID NO: 3368806 - DNA, 25 bp, Homo sapien
ttagtccaggtattcaattccactt

SEQ ID NO: 3368807 - DNA, 25 bp, Homo sapien
ctgttgatccgggaagagggtgggc

SEQ ID NO: 3368808 - DNA, 25 bp, Homo sapien
ctgggcggcctgtccacgcattcat

SEQ ID NO: 3368809 - DNA, 25 bp, Homo sapien
actgggcggcctgtccacgcattca

SEQ ID NO: 3368810 - DNA, 25 bp, Homo sapien
attgttttgataactgggcggcctg

SEQ ID NO: 3368811 - DNA, 25 bp, Homo sapien
aactgggcggcctgtccacgcattc

SEQ ID NO: 3368812 - DNA, 25 bp, Homo sapien
cagtgaagttttccctgatagcctg

SEQ ID NO: 3368813 - DNA, 25 bp, Homo sapien
gtgaagttttccctgatagcctgtt

SEQ ID NO: 3368814 - DNA, 25 bp, Homo sapien
tgaagttttccctgatagcctgttt

SEQ ID NO: 3368815 - DNA, 25 bp, Homo sapien
ctcagtgaagttttccctgatagcc

SEQ ID NO: 3368816 - DNA, 25 bp, Homo sapien
cagcaccgctcacacacagtcgtgc

SEQ ID NO: 3368817 - DNA, 25 bp, Homo sapien
acagtctctccgaatccaacatttt

SEQ ID NO: 3368818 - DNA, 25 bp, Homo sapien
accgctcacacacagtcgtgctcca

SEQ ID NO: 3368819 - DNA, 25 bp, Homo sapien
tccacagtctctccgaatccaacat

SEQ ID NO: 3368820 - DNA, 25 bp, Homo sapien
cagagctgtagcacgcagctgtcta

SEQ ID NO: 3368821 - DNA, 25 bp, Homo sapien
gctccggacagagctgtagcacgca

SEQ ID NO: 3368822 - DNA, 25 bp, Homo sapien
cacgcagctgtctatgctttggata

SEQ ID NO: 3368823 - DNA, 25 bp, Homo sapien
ttccgcgctgctccggacagagctg

SEQ ID NO: 3368824 - DNA, 25 bp, Homo sapien
tgcatgcgcactgttgggggaatct

SEQ ID NO: 3368825 - DNA, 25 bp, Homo sapien
ccatgaccaggtggaataaaatcaa

SEQ ID NO: 3368826 - DNA, 25 bp, Homo sapien
atctaccatgaccaggtggaataaa

SEQ ID NO: 3368827 - DNA, 25 bp, Homo sapien
acatgcatgcgcactgttgggggaa

SEQ ID NO: 3368828 - DNA, 25 bp, Homo sapien
tgacttccctcaacagcacttgcaa

SEQ ID NO: 3368829 - DNA, 25 bp, Homo sapien
tcttgcgtatgagcttatgtggaac

SEQ ID NO: 3368830 - DNA, 25 bp, Homo sapien
gagcttgctaaccacacttgccttg

SEQ ID NO: 3368831 - DNA, 25 bp, Homo sapien
tagtggactcaggtgacagaaaggc

SEQ ID NO: 3368832 - DNA, 25 bp, Homo sapien
gggtgtcttccatcaatatagtgac

SEQ ID NO: 3368833 - DNA, 25 bp, Homo sapien
gaaacctccaaattcatgcatcttg

SEQ ID NO: 3368834 - DNA, 25 bp, Homo sapien
tgacaggatgagtggaaacctccaa

SEQ ID NO: 3368835 - DNA, 25 bp, Homo sapien
ccattatcaagtactggacccagtg

SEQ ID NO: 3368836 - DNA, 25 bp, Homo sapien
tattctttactaatcttgctagcgg

SEQ ID NO: 3368837 - DNA, 25 bp, Homo sapien
tgcatctaattgtttctactctctt

SEQ ID NO: 3368838 - DNA, 25 bp, Homo sapien
ttttttgttgtctctgcaccaggct

SEQ ID NO: 3368839 - DNA, 25 bp, Homo sapien
ttgctagcggtctattttgattttt

SEQ ID NO: 3368840 - DNA, 25 bp, Homo sapien
tcatgtcttttaatggcattgtgtc

SEQ ID NO: 3368841 - DNA, 25 bp, Homo sapien
ttcactttcaactagatcatgcttc

SEQ ID NO: 3368842 - DNA, 25 bp, Homo sapien
aatgatgaccctcaatgcctttgaa

SEQ ID NO: 3368843 - DNA, 25 bp, Homo sapien
caagaatgagcttgtagtcattcac

SEQ ID NO: 3368844 - DNA, 25 bp, Homo sapien
ccactaagatactctgggatgggtg

SEQ ID NO: 3368845 - DNA, 25 bp, Homo sapien
gattccactaagatactctgggatg

SEQ ID NO: 3368846 - DNA, 25 bp, Homo sapien
ctaagatactctgggatgggtgttg

SEQ ID NO: 3368847 - DNA, 25 bp, Homo sapien
tgatgagattccactaagatactct

SEQ ID NO: 3368848 - DNA, 25 bp, Homo sapien
aatccaggtggagatgctatgaaca

SEQ ID NO: 3368849 - DNA, 25 bp, Homo sapien
gccttaagatgagatgaaattgctg

SEQ ID NO: 3368850 - DNA, 25 bp, Homo sapien
tagagagggtttactccaattttga

SEQ ID NO: 3368851 - DNA, 25 bp, Homo sapien
taaactcatgatgcaacttgaacaa

SEQ ID NO: 3368852 - DNA, 25 bp, Homo sapien
ttaagaaattgccacaggcacccaa

SEQ ID NO: 3368853 - DNA, 25 bp, Homo sapien
aagaaattgccacaggcacccaacc

SEQ ID NO: 3368854 - DNA, 25 bp, Homo sapien
ccacaggcacccaaccttcagcagc

SEQ ID NO: 3368855 - DNA, 25 bp, Homo sapien
aattgccacaggcacccaaccttca

SEQ ID NO: 3368856 - DNA, 25 bp, Homo sapien
tagaggcaagatccgcaccaaggaa

SEQ ID NO: 3368857 - DNA, 25 bp, Homo sapien
gcaagatccgcaccaaggaaaagat

SEQ ID NO: 3368858 - DNA, 25 bp, Homo sapien
gatccgcaccaaggaaaagattatg

SEQ ID NO: 3368859 - DNA, 25 bp, Homo sapien
catcaatatagaggcaagatccgca

SEQ ID NO: 3368860 - DNA, 25 bp, Homo sapien
ctgtggtgaaacagagccctccctc

SEQ ID NO: 3368861 - DNA, 25 bp, Homo sapien
gccctgtggtgaaacagagccctcc

SEQ ID NO: 3368862 - DNA, 25 bp, Homo sapien
gtgccctgtggtgaaacagagccct

SEQ ID NO: 3368863 - DNA, 25 bp, Homo sapien
cctgtggtgaaacagagccctccct

SEQ ID NO: 3368864 - DNA, 25 bp, Homo sapien
atacacatgtgtaaccacaagggca

SEQ ID NO: 3368865 - DNA, 25 bp, Homo sapien
tttactggcgtttgaataagccaag

SEQ ID NO: 3368866 - DNA, 25 bp, Homo sapien
tattttactggcgtttgaataagcc

SEQ ID NO: 3368867 - DNA, 25 bp, Homo sapien
gataaatacacatgtgtaaccacaa

SEQ ID NO: 3368868 - DNA, 25 bp, Homo sapien
taaactaatgagagtcttactgagg

SEQ ID NO: 3368869 - DNA, 25 bp, Homo sapien
tgaacacgttactctgacaggcttt

SEQ ID NO: 3368870 - DNA, 25 bp, Homo sapien
tcacatttccccaaaggtaggctac

SEQ ID NO: 3368871 - DNA, 25 bp, Homo sapien
gaatgatttaccaatgcacttagac

SEQ ID NO: 3368872 - DNA, 25 bp, Homo sapien
atatgtgacaggctctcatagtcac

SEQ ID NO: 3368873 - DNA, 25 bp, Homo sapien
gggaatcttgcacatgttacaggga

SEQ ID NO: 3368874 - DNA, 25 bp, Homo sapien
tatgtgacaggctctcatagtcacc

SEQ ID NO: 3368875 - DNA, 25 bp, Homo sapien
gaagcactgtcctacatcatatgtg

SEQ ID NO: 3368876 - DNA, 25 bp, Homo sapien
atcaagggaatcttgcacgttacag

SEQ ID NO: 3368877 - DNA, 25 bp, Homo sapien
catcaagggaatcttgcacgttaca

SEQ ID NO: 3368878 - DNA, 25 bp, Homo sapien
tcatcaagggaatcttgcacgttac

SEQ ID NO: 3368879 - DNA, 25 bp, Homo sapien
catcatcaagggaatcttgcacgtt

SEQ ID NO: 3368880 - DNA, 25 bp, Homo sapien
acagtcctacatcgtatctgacagg

SEQ ID NO: 3368881 - DNA, 25 bp, Homo sapien
cagtcctacatcgtatctgacaggc

SEQ ID NO: 3368882 - DNA, 25 bp, Homo sapien
agtcctacatcgtatctgacaggct

SEQ ID NO: 3368883 - DNA, 25 bp, Homo sapien
agcatttaactgtatgggctctgaa

SEQ ID NO: 3368884 - DNA, 25 bp, Homo sapien
ttgggcttgcctctacttcttacta

SEQ ID NO: 3368885 - DNA, 25 bp, Homo sapien
cacgggaagctgcatttagagcatt

SEQ ID NO: 3368886 - DNA, 25 bp, Homo sapien
agtcaccatcatcacgggaagctgc

SEQ ID NO: 3368887 - DNA, 25 bp, Homo sapien
aaataaaataatacacaagaagctt

SEQ ID NO: 3368888 - DNA, 25 bp, Homo sapien
ataaaataatacacaagaagcttct

SEQ ID NO: 3368889 - DNA, 25 bp, Homo sapien
aataaaataatacacaagaagcttc

SEQ ID NO: 3368890 - DNA, 25 bp, Homo sapien
gaggaaaccatgtcgttgctgctag

SEQ ID NO: 3368891 - DNA, 25 bp, Homo sapien
aggaggaaaccatgtcgttgctgct

SEQ ID NO: 3368892 - DNA, 25 bp, Homo sapien
gaaaccatgtcgttgctgctaggga

SEQ ID NO: 3368893 - DNA, 25 bp, Homo sapien
accatgtcgttgctgctagggaaat

SEQ ID NO: 3368894 - DNA, 25 bp, Homo sapien
tgcggaagccgatgcaaagctactg

SEQ ID NO: 3368895 - DNA, 25 bp, Homo sapien
cactgtaataagtgcttgggcatga

SEQ ID NO: 3368896 - DNA, 25 bp, Homo sapien
taggaagaccacagttacgagtaat

SEQ ID NO: 3368897 - DNA, 25 bp, Homo sapien
gagagaaggctgtagagacactgta

SEQ ID NO: 3368898 - DNA, 25 bp, Homo sapien
aagcgtgttcgtaaatatttgggtg

SEQ ID NO: 3368899 - DNA, 25 bp, Homo sapien
aagcgtgttcgtaaatatctgggtg

SEQ ID NO: 3368900 - DNA, 25 bp, Homo sapien
tgacgtcatgcattccccatgcatt

SEQ ID NO: 3368901 - DNA, 25 bp, Homo sapien
tgttcgtaaatatctgggtgacgtc

SEQ ID NO: 3368902 - DNA, 25 bp, Homo sapien
tatctgggtgacgtcatgcattccc

SEQ ID NO: 3368903 - DNA, 25 bp, Homo sapien
tggcatccattcagacggaggacaa

SEQ ID NO: 3368904 - DNA, 25 bp, Homo sapien
tgtccctgtgagatccgtactgtgt

SEQ ID NO: 3368905 - DNA, 25 bp, Homo sapien
tagagtaatcaaaggctgtggcaac

SEQ ID NO: 3368906 - DNA, 25 bp, Homo sapien
catctcaagtttggccggtcgtgct

SEQ ID NO: 3368907 - DNA, 25 bp, Homo sapien
aaggaggccagtaccagcaccacag

SEQ ID NO: 3368908 - DNA, 25 bp, Homo sapien
aggaggccagtaccagcaccacagc

SEQ ID NO: 3368909 - DNA, 25 bp, Homo sapien
ttgtgtgcagtgacgaggctgccga

SEQ ID NO: 3368910 - DNA, 25 bp, Homo sapien
gaagattgtgtgcagtgacgaggct

SEQ ID NO: 3368911 - DNA, 25 bp, Homo sapien
ctgtgaagattgtgtgcagtgacga

SEQ ID NO: 3368912 - DNA, 25 bp, Homo sapien
gtctgtgaagattgtgtgcagtgac

SEQ ID NO: 3368913 - DNA, 25 bp, Homo sapien
catcagtgctggagccgtcggccac

SEQ ID NO: 3368914 - DNA, 25 bp, Homo sapien
ccaccatgcatgtggaatttgacat

SEQ ID NO: 3368915 - DNA, 25 bp, Homo sapien
tgctggagccgtcggccaccatgca

SEQ ID NO: 3368916 - DNA, 25 bp, Homo sapien
accatgcatgtggaatttgacatcc

SEQ ID NO: 3368917 - DNA, 25 bp, Homo sapien
tgtggttaactcagctctagtgtca

SEQ ID NO: 3368918 - DNA, 25 bp, Homo sapien
ggtggctgtggttaactcagctcta

SEQ ID NO: 3368919 - DNA, 25 bp, Homo sapien
caaatgagttatttagccaacatag

SEQ ID NO: 3368920 - DNA, 25 bp, Homo sapien
tatttagccaacatagtccctgtcc

SEQ ID NO: 3368921 - DNA, 25 bp, Homo sapien
ttggataacagaggcgttttcccca

SEQ ID NO: 3368922 - DNA, 25 bp, Homo sapien
ttgtgattgtgattgaattatcatg

SEQ ID NO: 3368923 - DNA, 25 bp, Homo sapien
aggtgattggataacagaggcgttt

SEQ ID NO: 3368924 - DNA, 25 bp, Homo sapien
taacagaggcgttttccccatgctg

SEQ ID NO: 3368925 - DNA, 25 bp, Homo sapien
atttcggctaatttttgttgtatct

SEQ ID NO: 3368926 - DNA, 25 bp, Homo sapien
cacacccggctaatttcggctaatt

SEQ ID NO: 3368927 - DNA, 25 bp, Homo sapien
taaagatcacattgagtaacaattt

SEQ ID NO: 3368928 - DNA, 25 bp, Homo sapien
aaagccacactctgtggacaattgc

SEQ ID NO: 3368929 - DNA, 25 bp, Homo sapien
taaaagccacactctgtggacaatt

SEQ ID NO: 3368930 - DNA, 25 bp, Homo sapien
tccttaaaagccacactctgtggac

SEQ ID NO: 3368931 - DNA, 25 bp, Homo sapien
ccacaggccacatagtggactgcgt

SEQ ID NO: 3368932 - DNA, 25 bp, Homo sapien
tagtggactgcgttttcatctccag

SEQ ID NO: 3368933 - DNA, 25 bp, Homo sapien
gcagcttcctgcgttcgaccgtatt

SEQ ID NO: 3368934 - DNA, 25 bp, Homo sapien
tccttcccgtgaattcccaccacca

SEQ ID NO: 3368935 - DNA, 25 bp, Homo sapien
aggattgggaatagtaggcaggaac

SEQ ID NO: 3368936 - DNA, 25 bp, Homo sapien
ttaggattgggaatagtaggcagga

SEQ ID NO: 3368937 - DNA, 25 bp, Homo sapien
gttaggattgggaatagtaggcagg

SEQ ID NO: 3368938 - DNA, 25 bp, Homo sapien
taggattgggaatagtaggcaggaa

SEQ ID NO: 3368939 - DNA, 25 bp, Homo sapien
tccccagaaactgcccaggaggcat

SEQ ID NO: 3368940 - DNA, 25 bp, Homo sapien
cttccccagaaactgcccaggaggc

SEQ ID NO: 3368941 - DNA, 25 bp, Homo sapien
ttccccagaaactgcccaggaggca

SEQ ID NO: 3368942 - DNA, 25 bp, Homo sapien
taaaaattgctcaagtcttcctcaa

SEQ ID NO: 3368943 - DNA, 25 bp, Homo sapien
tcaactaatccatgccaaggtcttc

SEQ ID NO: 3368944 - DNA, 25 bp, Homo sapien
gggtcatgttgaaagagactggaat

SEQ ID NO: 3368945 - DNA, 25 bp, Homo sapien
agaaaggcaagcctcaaaatctgtg

SEQ ID NO: 3368946 - DNA, 25 bp, Homo sapien
tagttcactccgatattccacgttc

SEQ ID NO: 3368947 - DNA, 25 bp, Homo sapien
ttgatataggcctccactgggtctc

SEQ ID NO: 3368948 - DNA, 25 bp, Homo sapien
tataccaaggcatagacggagtctc

SEQ ID NO: 3368949 - DNA, 25 bp, Homo sapien
tggtgatagagtcatacgtgcctag

SEQ ID NO: 3368950 - DNA, 25 bp, Homo sapien
gtggctggatataacattaggagaa

SEQ ID NO: 3368951 - DNA, 25 bp, Homo sapien
taaagtcgaggacagttttatcaga

SEQ ID NO: 3368952 - DNA, 25 bp, Homo sapien
tgaggtgtggctggatataacatta

SEQ ID NO: 3368953 - DNA, 25 bp, Homo sapien
aggtggccacagagttttcagtaaa

SEQ ID NO: 3368954 - DNA, 25 bp, Homo sapien
gttacagagacaccgcacttctttt

SEQ ID NO: 3368955 - DNA, 25 bp, Homo sapien
ttccccaaccaatagtctgactctg

SEQ ID NO: 3368956 - DNA, 25 bp, Homo sapien
tccaacagtgtcagacatagccagc

SEQ ID NO: 3368957 - DNA, 25 bp, Homo sapien
tctttagagataggagatactacca

SEQ ID NO: 3368958 - DNA, 25 bp, Homo sapien
gccattccgcgtgcctttcgtaggg

SEQ ID NO: 3368959 - DNA, 25 bp, Homo sapien
taggggtctgtaattgcagtgacac

SEQ ID NO: 3368960 - DNA, 25 bp, Homo sapien
tttaggagtcccactctatgccaga

SEQ ID NO: 3368961 - DNA, 25 bp, Homo sapien
caatttgccacttcatgttacagac

SEQ ID NO: 3368962 - DNA, 25 bp, Homo sapien
tctggtctagagttcaccttgatgc

SEQ ID NO: 3368963 - DNA, 25 bp, Homo sapien
gcttttggtacatctcttaggttta

SEQ ID NO: 3368964 - DNA, 25 bp, Homo sapien
gatacttttatctctgaggtgtcag

SEQ ID NO: 3368965 - DNA, 25 bp, Homo sapien
tctttgtcaggaggattttgtcttc

SEQ ID NO: 3368966 - DNA, 25 bp, Homo sapien
gaactatccttacatccctgcacga

SEQ ID NO: 3368967 - DNA, 25 bp, Homo sapien
cctgcacgaatacttgatcataatg

SEQ ID NO: 3368968 - DNA, 25 bp, Homo sapien
gaaaaatgtgtttggaagtactctc

SEQ ID NO: 3368969 - DNA, 25 bp, Homo sapien
ggtatcaggagccttgaaaaatgtg

SEQ ID NO: 3368970 - DNA, 25 bp, Homo sapien
ggacagggcgtgtatgaattcagca

SEQ ID NO: 3368971 - DNA, 25 bp, Homo sapien
actgtgttggcctccactgtgcagg

SEQ ID NO: 3368972 - DNA, 25 bp, Homo sapien
gcaactgtatggcagactttccagg

SEQ ID NO: 3368973 - DNA, 25 bp, Homo sapien
aatatgttggcagcttagttttgct

SEQ ID NO: 3368974 - DNA, 25 bp, Homo sapien
tctcctttacccgaataactgctga

SEQ ID NO: 3368975 - DNA, 25 bp, Homo sapien
tttacccgaataactgctgagtccc

SEQ ID NO: 3368976 - DNA, 25 bp, Homo sapien
gctgagtcccaatctgtatcccaca

SEQ ID NO: 3368977 - DNA, 25 bp, Homo sapien
aggcatgccgccaacattccggctt

SEQ ID NO: 3368978 - DNA, 25 bp, Homo sapien
gctggactgtaagtgctgtgacaaa

SEQ ID NO: 3368979 - DNA, 25 bp, Homo sapien
tccacatttgggatcagaaaaacca

SEQ ID NO: 3368980 - DNA, 25 bp, Homo sapien
ggacatgggtctaaaggtgcagaca

SEQ ID NO: 3368981 - DNA, 25 bp, Homo sapien
ggtgcagacacaattggatgttcca

SEQ ID NO: 3368982 - DNA, 25 bp, Homo sapien
ctagcagagcgtgtaggacagagaa

SEQ ID NO: 3368983 - DNA, 25 bp, Homo sapien
tgaaaagagactcttgaacacttct

SEQ ID NO: 3368984 - DNA, 25 bp, Homo sapien
aaaagagactcttgaacacttctga

SEQ ID NO: 3368985 - DNA, 25 bp, Homo sapien
gcagagcgtgtaggacagagaaggg

SEQ ID NO: 3368986 - DNA, 25 bp, Homo sapien
gcggcgaggatggattcaacagtaa

SEQ ID NO: 3368987 - DNA, 25 bp, Homo sapien
catgacggacacttgagaatactgc

SEQ ID NO: 3368988 - DNA, 25 bp, Homo sapien
catttaatgcctacgatgccagagt

SEQ ID NO: 3368989 - DNA, 25 bp, Homo sapien
tccacttgagggaatggtgcaaaaa

SEQ ID NO: 3368990 - DNA, 25 bp, Homo sapien
ttcctgctctcccagtcccgagtgg

SEQ ID NO: 3368991 - DNA, 25 bp, Homo sapien
ccatcatagcgtctaaccttacatg

SEQ ID NO: 3368992 - DNA, 25 bp, Homo sapien
tgttgccgacccctggaaggttggc

SEQ ID NO: 3368993 - DNA, 25 bp, Homo sapien
ccagtcccgagtggccgcatccctg

SEQ ID NO: 3368994 - DNA, 25 bp, Homo sapien
gattttgaatccatctggagctcga

SEQ ID NO: 3368995 - DNA, 25 bp, Homo sapien
cgcaggtctctgacaagtgacaaga

SEQ ID NO: 3368996 - DNA, 25 bp, Homo sapien
gctgaatcctcagcaggatctgaga

SEQ ID NO: 3368997 - DNA, 25 bp, Homo sapien
gcaggatctgagacctattagggat

SEQ ID NO: 3368998 - DNA, 25 bp, Homo sapien
aagctagacactctcttgtgtcctg

SEQ ID NO: 3368999 - DNA, 25 bp, Homo sapien
tgtgccgcttccagcagcaaagagt

SEQ ID NO: 3369000 - DNA, 25 bp, Homo sapien
tcaagctagacactctcttgtgtcc

SEQ ID NO: 3369001 - DNA, 25 bp, Homo sapien
gtcctgtgccgcttccagcagcaaa

SEQ ID NO: 3369002 - DNA, 25 bp, Homo sapien
ctcctcgtttgagtgtgggaagctg

SEQ ID NO: 3369003 - DNA, 25 bp, Homo sapien
cgctttccgctcctcgtttgagtgt

SEQ ID NO: 3369004 - DNA, 25 bp, Homo sapien
tccgctcctcgtttgagtgtgggaa

SEQ ID NO: 3369005 - DNA, 25 bp, Homo sapien
tttccgctcctcgtttgagtgtggg

SEQ ID NO: 3369006 - DNA, 25 bp, Homo sapien
ggagcctgagggagaacaagcatta

SEQ ID NO: 3369007 - DNA, 25 bp, Homo sapien
ctgagggagaacaagcattaatgac

SEQ ID NO: 3369008 - DNA, 25 bp, Homo sapien
gggccagcaaggacttgttgagatc

SEQ ID NO: 3369009 - DNA, 25 bp, Homo sapien
gatcagcggtaagaactgtggataa

SEQ ID NO: 3369010 - DNA, 25 bp, Homo sapien
gacctgattcttcaaaggaggacca

SEQ ID NO: 3369011 - DNA, 25 bp, Homo sapien
tcctgtagctttcatgggattcagc

SEQ ID NO: 3369012 - DNA, 25 bp, Homo sapien
tcagctgcagcaaatgtatgacctg

SEQ ID NO: 3369013 - DNA, 25 bp, Homo sapien
ctgggttctttgtggagggttcact

SEQ ID NO: 3369014 - DNA, 25 bp, Homo sapien
gcgtggttggtggagaggtacacac

SEQ ID NO: 3369015 - DNA, 25 bp, Homo sapien
ctcttctgtgaatctaatgcacgtc

SEQ ID NO: 3369016 - DNA, 25 bp, Homo sapien
tctaatgcacgtcacctcctgtttc

SEQ ID NO: 3369017 - DNA, 25 bp, Homo sapien
tgtgaatctaatgcacgtcacctcc

SEQ ID NO: 3369018 - DNA, 25 bp, Homo sapien
atgctgtccattaccggaatctggg

SEQ ID NO: 3369019 - DNA, 25 bp, Homo sapien
ccaagatactgaccattggttacaa

SEQ ID NO: 3369020 - DNA, 25 bp, Homo sapien
tgaagtcatgttcgactcccgccag

SEQ ID NO: 3369021 - DNA, 25 bp, Homo sapien
cataacagagtccaagatactgacc

SEQ ID NO: 3369022 - DNA, 25 bp, Homo sapien
gacttaggcatctgcagaagctcca

SEQ ID NO: 3369023 - DNA, 25 bp, Homo sapien
ataaccagagacttaggcatctgca

SEQ ID NO: 3369024 - DNA, 25 bp, Homo sapien
cagaaggtacaataaccagagactt

SEQ ID NO: 3369025 - DNA, 25 bp, Homo sapien
agcaccaacgccattttactgaatg

SEQ ID NO: 3369026 - DNA, 25 bp, Homo sapien
agatctgaccgcaggaacaaccttc

SEQ ID NO: 3369027 - DNA, 25 bp, Homo sapien
cagcttcggttctgaagatctgacc

SEQ ID NO: 3369028 - DNA, 25 bp, Homo sapien
tcacccgtgtacgtgcgtagatgga

SEQ ID NO: 3369029 - DNA, 25 bp, Homo sapien
tctccaaggtattggagctttccag

SEQ ID NO: 3369030 - DNA, 25 bp, Homo sapien
gagcggaaagggcacagtccagtaa

SEQ ID NO: 3369031 - DNA, 25 bp, Homo sapien
gaaagggcacagtccagtaagtgat

SEQ ID NO: 3369032 - DNA, 25 bp, Homo sapien
gggcacagtccagtaagtgatcaga

SEQ ID NO: 3369033 - DNA, 25 bp, Homo sapien
cacagtccagtaagtgatcagaaaa

SEQ ID NO: 3369034 - DNA, 25 bp, Homo sapien
tgcggatcccatctatgcagcgact

SEQ ID NO: 3369035 - DNA, 25 bp, Homo sapien
cttcactctgcggatcccatctatg

SEQ ID NO: 3369036 - DNA, 25 bp, Homo sapien
tctatgcagcgactactcccattca

SEQ ID NO: 3369037 - DNA, 25 bp, Homo sapien
attcaacctgcgtctgccctgctga

SEQ ID NO: 3369038 - DNA, 25 bp, Homo sapien
ggctgtggctgaccctcgatggtgt

SEQ ID NO: 3369039 - DNA, 25 bp, Homo sapien
tgaccctcggtggtgtaggtgggct

SEQ ID NO: 3369040 - DNA, 25 bp, Homo sapien
tgaccctcggtggtataggtgggct

SEQ ID NO: 3369041 - DNA, 25 bp, Homo sapien
ctgtggctgaccctcggtggtatag

SEQ ID NO: 3369042 - DNA, 25 bp, Homo sapien
ctgaccctcggtggtataggtgggc

SEQ ID NO: 3369043 - DNA, 25 bp, Homo sapien
ccctcggtggtataggtgggctgtg

SEQ ID NO: 3369044 - DNA, 25 bp, Homo sapien
ctgtggctgaccctcggtggtatag

SEQ ID NO: 3369045 - DNA, 25 bp, Homo sapien
tgggctgtggctgaccctcggtggt

SEQ ID NO: 3369046 - DNA, 25 bp, Homo sapien
cataaacttccataagttggtgagg

SEQ ID NO: 3369047 - DNA, 25 bp, Homo sapien
gaccaaagcatcgatgagtccgtca

SEQ ID NO: 3369048 - DNA, 25 bp, Homo sapien
tctctcctagtcatctgtgcaaaca

SEQ ID NO: 3369049 - DNA, 25 bp, Homo sapien
tggtgaggtgtataatgtgaagacc

SEQ ID NO: 3369050 - DNA, 25 bp, Homo sapien
tgtggccggcctagatgtgtgcact

SEQ ID NO: 3369051 - DNA, 25 bp, Homo sapien
agcttgtgccggttcctggtcctgg

SEQ ID NO: 3369052 - DNA, 25 bp, Homo sapien
tgtgttccggtcagaaagtccctgg

SEQ ID NO: 3369053 - DNA, 25 bp, Homo sapien
gaaccaggtgattgctgctctgctg

SEQ ID NO: 3369054 - DNA, 25 bp, Homo sapien
ctagtcatcagggattccaagatat

SEQ ID NO: 3369055 - DNA, 25 bp, Homo sapien
tacactggaatttcatgtctaaata

SEQ ID NO: 3369056 - DNA, 25 bp, Homo sapien
tgggttccagtcagtccttctttag

SEQ ID NO: 3369057 - DNA, 25 bp, Homo sapien
ctttagggattaacattatacactg

SEQ ID NO: 3369058 - DNA, 25 bp, Homo sapien
agccgtcctggacagccgtgctggg

SEQ ID NO: 3369059 - DNA, 25 bp, Homo sapien
ctggctggcagagccgcccacgaga

SEQ ID NO: 3369060 - DNA, 25 bp, Homo sapien
cctcgtgaaggatttggaatggaga

SEQ ID NO: 3369061 - DNA, 25 bp, Homo sapien
cctggcatcagggagttgggaagcc

SEQ ID NO: 3369062 - DNA, 25 bp, Homo sapien
tgaaaaccaccttcttaagtactga

SEQ ID NO: 3369063 - DNA, 25 bp, Homo sapien
caggcgaacaggcaggcaaatggca

SEQ ID NO: 3369064 - DNA, 25 bp, Homo sapien
tctgtggtggcttccgagtgctctg

SEQ ID NO: 3369065 - DNA, 25 bp, Homo sapien
agtgtcagttttctggatctgtgac

SEQ ID NO: 3369066 - DNA, 25 bp, Homo sapien
gacgacctcatgtcataatcatcgt

SEQ ID NO: 3369067 - DNA, 25 bp, Homo sapien
tgcctcttgcctgcataagcatcag

SEQ ID NO: 3369068 - DNA, 25 bp, Homo sapien
gggttctgagttgcgtctagaattc

SEQ ID NO: 3369069 - DNA, 25 bp, Homo sapien
gaaaaaccacatcgttggcacagtg

SEQ ID NO: 3369070 - DNA, 25 bp, Homo sapien
cacagcttcccacggcactgggagg

SEQ ID NO: 3369071 - DNA, 25 bp, Homo sapien
tccctgtcacagcttcccacggcac

SEQ ID NO: 3369072 - DNA, 25 bp, Homo sapien
ctgtcacagcttcccacggcactgg

SEQ ID NO: 3369073 - DNA, 25 bp, Homo sapien
tcattccctgtcacagcttcccacg

SEQ ID NO: 3369074 - DNA, 25 bp, Homo sapien
cagggatgctcgaggagaaggcact

SEQ ID NO: 3369075 - DNA, 25 bp, Homo sapien
catgtgaatgcacagggatgctcga

SEQ ID NO: 3369076 - DNA, 25 bp, Homo sapien
tggctcccacaacccatgtgaatgc

SEQ ID NO: 3369077 - DNA, 25 bp, Homo sapien
cacaacccatgtgaatgcacaggga

SEQ ID NO: 3369078 - DNA, 25 bp, Homo sapien
taatattcacgtatttaaagcccag

SEQ ID NO: 3369079 - DNA, 25 bp, Homo sapien
gtccggtgtccagcttcgccttggc

SEQ ID NO: 3369080 - DNA, 25 bp, Homo sapien
gaaggcttttgtccacgtggagatg

SEQ ID NO: 3369081 - DNA, 25 bp, Homo sapien
aggtgtccacactttgctccgtccg

SEQ ID NO: 3369082 - DNA, 25 bp, Homo sapien
cggtggttcttgtatccatgtctct

SEQ ID NO: 3369083 - DNA, 25 bp, Homo sapien
gtggttcttgtatccatgtctctgt

SEQ ID NO: 3369084 - DNA, 25 bp, Homo sapien
ggtggttcttgtatccatgtctctg

SEQ ID NO: 3369085 - DNA, 25 bp, Homo sapien
gcctgtcggctgctggctcacggct

SEQ ID NO: 3369086 - DNA, 25 bp, Homo sapien
agtctcctgtgagtgatggctgccg

SEQ ID NO: 3369087 - DNA, 25 bp, Homo sapien
cagcctgcggtttccagtgcctgtg

SEQ ID NO: 3369088 - DNA, 25 bp, Homo sapien
tcatttccgctcagtttgcaagctg

SEQ ID NO: 3369089 - DNA, 25 bp, Homo sapien
ctgcaaaattctgcatgtacgtttg

SEQ ID NO: 3369090 - DNA, 25 bp, Homo sapien
attcccactgcaaaattctgcatgt

SEQ ID NO: 3369091 - DNA, 25 bp, Homo sapien
caaaattctgcatgtacgtttgaca

SEQ ID NO: 3369092 - DNA, 25 bp, Homo sapien
cccactgcaaaattctgcatgtacg

SEQ ID NO: 3369093 - DNA, 25 bp, Homo sapien
ctgatatatcgtggcagtgcctgga

SEQ ID NO: 3369094 - DNA, 25 bp, Homo sapien
ccacagcaatgttaatggtcaggtg

SEQ ID NO: 3369095 - DNA, 25 bp, Homo sapien
caggtggaaatgagtgactgggaac

SEQ ID NO: 3369096 - DNA, 25 bp, Homo sapien
agtgcctggagacctcctagatcca

SEQ ID NO: 3369097 - DNA, 25 bp, Homo sapien
caaattcacagccatctaccaacga

SEQ ID NO: 3369098 - DNA, 25 bp, Homo sapien
gccatctaccaacgagtcaaagcca

SEQ ID NO: 3369099 - DNA, 25 bp, Homo sapien
tctaccaacgagtcaaagccaaagc

SEQ ID NO: 3369100 - DNA, 25 bp, Homo sapien
tcacagccatctaccaacgagtcaa

SEQ ID NO: 3369101 - DNA, 25 bp, Homo sapien
tactcctgagcttgctgggggagct

SEQ ID NO: 3369102 - DNA, 25 bp, Homo sapien
tcctgagcttgctgggggagctgca

SEQ ID NO: 3369103 - DNA, 25 bp, Homo sapien
ctactcctgagcttgctgggggagc

SEQ ID NO: 3369104 - DNA, 25 bp, Homo sapien
actcctgagcttgctgggggagctg

SEQ ID NO: 3369105 - DNA, 25 bp, Homo sapien
aggcttgcacgctgtgagctgaagg

SEQ ID NO: 3369106 - DNA, 25 bp, Homo sapien
ggcttgcacgctgtgagctgaaggt

SEQ ID NO: 3369107 - DNA, 25 bp, Homo sapien
caggcttgcacgctgtgagctgaag

SEQ ID NO: 3369108 - DNA, 25 bp, Homo sapien
gcttcttccaagattcactcgctga

SEQ ID NO: 3369109 - DNA, 25 bp, Homo sapien
tccacagggactgtaaaataggctt

SEQ ID NO: 3369110 - DNA, 25 bp, Homo sapien
ggctcaatgagatgccagggaccaa

SEQ ID NO: 3369111 - DNA, 25 bp, Homo sapien
tcgatggtgacttgggcactcgcct

SEQ ID NO: 3369112 - DNA, 25 bp, Homo sapien
ggaggcatcatataatccgacttca

SEQ ID NO: 3369113 - DNA, 25 bp, Homo sapien
taacccgacgtcaaaatgcaataag

SEQ ID NO: 3369114 - DNA, 25 bp, Homo sapien
caaaatgcaataagccgcaggcacc

SEQ ID NO: 3369115 - DNA, 25 bp, Homo sapien
tcatacaacccgacggcaacatgca

SEQ ID NO: 3369116 - DNA, 25 bp, Homo sapien
aagccgcaggcatcatataacccaa

SEQ ID NO: 3369117 - DNA, 25 bp, Homo sapien
cttcaaaatgcaccaagccgcaggc

SEQ ID NO: 3369118 - DNA, 25 bp, Homo sapien
aaaatgcaccaagccgcaggcatca

SEQ ID NO: 3369119 - DNA, 25 bp, Homo sapien
tgcaccaagccgcaggcatcatata

SEQ ID NO: 3369120 - DNA, 25 bp, Homo sapien
gcaaatgtactggccctctggaaga

SEQ ID NO: 3369121 - DNA, 25 bp, Homo sapien
cagcaaatgtactggccctctggaa

SEQ ID NO: 3369122 - DNA, 25 bp, Homo sapien
gcagcaaatgtactggccctctgga

SEQ ID NO: 3369123 - DNA, 25 bp, Homo sapien
agcaaatgtactggccctctggaag

SEQ ID NO: 3369124 - DNA, 25 bp, Homo sapien
tgacccggagatggtatcagacaag

SEQ ID NO: 3369125 - DNA, 25 bp, Homo sapien
gagatggtatcagacaagtagagag

SEQ ID NO: 3369126 - DNA, 25 bp, Homo sapien
gtctctgacccggagatggtatcag

SEQ ID NO: 3369127 - DNA, 25 bp, Homo sapien
tctgcgtctctgacccggagatggt

SEQ ID NO: 3369128 - DNA, 25 bp, Homo sapien
aacagtggttgcctctaggaatgaa

SEQ ID NO: 3369129 - DNA, 25 bp, Homo sapien
tggttgcctctaggaatgaaatggg

SEQ ID NO: 3369130 - DNA, 25 bp, Homo sapien
gcctctaggaatgaaatgggatgac

SEQ ID NO: 3369131 - DNA, 25 bp, Homo sapien
ggaatgaaatgggatgacggaagac

SEQ ID NO: 3369132 - DNA, 25 bp, Homo sapien
catgggataagcctttgagtggaga

SEQ ID NO: 3369133 - DNA, 25 bp, Homo sapien
tgtaagaaatgccgcgtgggccagt

SEQ ID NO: 3369134 - DNA, 25 bp, Homo sapien
ggccttccctgctcgggccatggga

SEQ ID NO: 3369135 - DNA, 25 bp, Homo sapien
tgccgaaagcgctcagtgctcctga

SEQ ID NO: 3369136 - DNA, 25 bp, Homo sapien
tttctgccgtatttcaatcacacta

SEQ ID NO: 3369137 - DNA, 25 bp, Homo sapien
gcaattggctttctgccgtatttca

SEQ ID NO: 3369138 - DNA, 25 bp, Homo sapien
ggctttctgccgtatttcaatcaca

SEQ ID NO: 3369139 - DNA, 25 bp, Homo sapien
caattggctttctgccgtatttcaa

SEQ ID NO: 3369140 - DNA, 25 bp, Homo sapien
gacatgtcgagttgaagtgttttac

SEQ ID NO: 3369141 - DNA, 25 bp, Homo sapien
tgttttactccaaacagctgtctcc

SEQ ID NO: 3369142 - DNA, 25 bp, Homo sapien
caagagagacatcagacgtttaaaa

SEQ ID NO: 3369143 - DNA, 25 bp, Homo sapien
ctctggaccaaaaccgagggcaggg

SEQ ID NO: 3369144 - DNA, 25 bp, Homo sapien
gtccacgagtctggccgcagcgcac

SEQ ID NO: 3369145 - DNA, 25 bp, Homo sapien
ctgtccacgagtctggccgcagcgc

SEQ ID NO: 3369146 - DNA, 25 bp, Homo sapien
tgtccacgagtctggccgcagcgca

SEQ ID NO: 3369147 - DNA, 25 bp, Homo sapien
taaggcagtgttcttcaacacgcac

SEQ ID NO: 3369148 - DNA, 25 bp, Homo sapien
gtccacctctaaggcagtgttcttc

SEQ ID NO: 3369149 - DNA, 25 bp, Homo sapien
agtgttcttcaacacgcaccacgcg

SEQ ID NO: 3369150 - DNA, 25 bp, Homo sapien
tgtccacaagtgtccacctctaagg

SEQ ID NO: 3369151 - DNA, 25 bp, Homo sapien
gggcatttccagagggagcaagtct

SEQ ID NO: 3369152 - DNA, 25 bp, Homo sapien
gctgggcatttccagagggagcaag

SEQ ID NO: 3369153 - DNA, 25 bp, Homo sapien
cctcagctgggcatttccagaggga

SEQ ID NO: 3369154 - DNA, 25 bp, Homo sapien
ctcagctgggcatttccagagggag

SEQ ID NO: 3369155 - DNA, 25 bp, Homo sapien
actgcagttcatggagtaatttaca

SEQ ID NO: 3369156 - DNA, 25 bp, Homo sapien
ttatgatgacatccctttcagtgca

SEQ ID NO: 3369157 - DNA, 25 bp, Homo sapien
gggttatgatgacatccctttcagt

SEQ ID NO: 3369158 - DNA, 25 bp, Homo sapien
catggagtaatttacactctgtggg

SEQ ID NO: 3369159 - DNA, 25 bp, Homo sapien
tgtgagtttgaagtcaccgccagcg

SEQ ID NO: 3369160 - DNA, 25 bp, Homo sapien
gtctcaggtgacttcataatgttct

SEQ ID NO: 3369161 - DNA, 25 bp, Homo sapien
gagtttgaagtcaccgccagcgtct

SEQ ID NO: 3369162 - DNA, 25 bp, Homo sapien
agcgtctgcccattgcactgtgccc

SEQ ID NO: 3369163 - DNA, 25 bp, Homo sapien
ctgattccctaacagcattgatgtt

SEQ ID NO: 3369164 - DNA, 25 bp, Homo sapien
ccctaacagcattgatgtttataat

SEQ ID NO: 3369165 - DNA, 25 bp, Homo sapien
caaggaagccggacttttctagatt

SEQ ID NO: 3369166 - DNA, 25 bp, Homo sapien
tataataaactcaaggaagccggac

SEQ ID NO: 3369167 - DNA, 25 bp, Homo sapien
agaatcctctagctgtgatggagcc

SEQ ID NO: 3369168 - DNA, 25 bp, Homo sapien
ttatgtcccagaatcctctagctgt

SEQ ID NO: 3369169 - DNA, 25 bp, Homo sapien
cccagaatcctctagctgtgatgga

SEQ ID NO: 3369170 - DNA, 25 bp, Homo sapien
tatgtcccagaatcctctagctgtg

SEQ ID NO: 3369171 - DNA, 25 bp, Homo sapien
tgtggtctccgcacctccgcagtgc

SEQ ID NO: 3369172 - DNA, 25 bp, Homo sapien
agccctgctgtctgcgaccgtaaaa

SEQ ID NO: 3369173 - DNA, 25 bp, Homo sapien
tgctgtctgcgaccgtaaaagcaca

SEQ ID NO: 3369174 - DNA, 25 bp, Homo sapien
tctgcgaccgtaaaagcacagcctc

SEQ ID NO: 3369175 - DNA, 25 bp, Homo sapien
tctggcatcccaatgacgaggactt

SEQ ID NO: 3369176 - DNA, 25 bp, Homo sapien
tgatcatcagatggacttttcccca

SEQ ID NO: 3369177 - DNA, 25 bp, Homo sapien
tgcacgcaacactcacaaacaaatg

SEQ ID NO: 3369178 - DNA, 25 bp, Homo sapien
tgtatgttttgtgacccagatccct

SEQ ID NO: 3369179 - DNA, 25 bp, Homo sapien
gcaagttactcttcgacgcagccgt

SEQ ID NO: 3369180 - DNA, 25 bp, Homo sapien
tatctatcctgtgaatccctatgcg

SEQ ID NO: 3369181 - DNA, 25 bp, Homo sapien
ctgatactgtagaccttgctggcac

SEQ ID NO: 3369182 - DNA, 25 bp, Homo sapien
ggtgctgaagcaccacccttgggct

SEQ ID NO: 3369183 - DNA, 25 bp, Homo sapien
cactctgagataagggtgagcaggc

SEQ ID NO: 3369184 - DNA, 25 bp, Homo sapien
agaaacgggacgtccttcaattctg

SEQ ID NO: 3369185 - DNA, 25 bp, Homo sapien
cttgcatcatgttcccccgtggtgt

SEQ ID NO: 3369186 - DNA, 25 bp, Homo sapien
aagatgtcctgggaatgcaacactc

SEQ ID NO: 3369187 - DNA, 25 bp, Homo sapien
gacaatactacccactacagagagt

SEQ ID NO: 3369188 - DNA, 25 bp, Homo sapien
gaagatgttaaagggcatgcactaa

SEQ ID NO: 3369189 - DNA, 25 bp, Homo sapien
tctcccgcatgtggatgcctgtaaa

SEQ ID NO: 3369190 - DNA, 25 bp, Homo sapien
tctaaagacagtgcatccggaggtt

SEQ ID NO: 3369191 - DNA, 25 bp, Homo sapien
taatatactcagttgagtgtaaatc

SEQ ID NO: 3369192 - DNA, 25 bp, Homo sapien
gatccagagttccaccacagtattg

SEQ ID NO: 3369193 - DNA, 25 bp, Homo sapien
aatagcagcactgattactgtaccg

SEQ ID NO: 3369194 - DNA, 25 bp, Homo sapien
tctcaagtcatcctcaatagcagca

SEQ ID NO: 3369195 - DNA, 25 bp, Homo sapien
gataattaagcaatatgttctgcca

SEQ ID NO: 3369196 - DNA, 25 bp, Homo sapien
tcatttggaatagtactcgatcata

SEQ ID NO: 3369197 - DNA, 25 bp, Homo sapien
cataggaacgtgactgtaagctggt

SEQ ID NO: 3369198 - DNA, 25 bp, Homo sapien
tgtaagctggtactaaaagaagata

SEQ ID NO: 3369199 - DNA, 25 bp, Homo sapien
catcatcccacgtggagagttaata

SEQ ID NO: 3369200 - DNA, 25 bp, Homo sapien
catccatcatcccacgtggagagtt

SEQ ID NO: 3369201 - DNA, 25 bp, Homo sapien
tccatcatcccacgtggagagttaa

SEQ ID NO: 3369202 - DNA, 25 bp, Homo sapien
tcatcccacgtggagagttaataat

SEQ ID NO: 3369203 - DNA, 25 bp, Homo sapien
tcatgttgccgtgacattgtaatga

SEQ ID NO: 3369204 - DNA, 25 bp, Homo sapien
agcgcctttgtcaactggacctgtt

SEQ ID NO: 3369205 - DNA, 25 bp, Homo sapien
tctttcatatcctgcagcgcctttg

SEQ ID NO: 3369206 - DNA, 25 bp, Homo sapien
ttgccgtgacattgtaatgagaatc

SEQ ID NO: 3369207 - DNA, 25 bp, Homo sapien
ccatttcgtctcatctgtgactctc

SEQ ID NO: 3369208 - DNA, 25 bp, Homo sapien
tctccatcccaaacacaatgcttgg

SEQ ID NO: 3369209 - DNA, 25 bp, Homo sapien
caatgcttggcagtgtgatcgatat

SEQ ID NO: 3369210 - DNA, 25 bp, Homo sapien
gtgtccagccccgaatttcatcggc

SEQ ID NO: 3369211 - DNA, 25 bp, Homo sapien
gatatggtcacgtgccccatgacgt

SEQ ID NO: 3369212 - DNA, 25 bp, Homo sapien
ccatgacgtctcagtcgatgacaga

SEQ ID NO: 3369213 - DNA, 25 bp, Homo sapien
cccaagaacaaagccatggacagtt

SEQ ID NO: 3369214 - DNA, 25 bp, Homo sapien
tatgggaaagttccacattgtggct

SEQ ID NO: 3369215 - DNA, 25 bp, Homo sapien
gactttgaccgagaagacgacgtcg

SEQ ID NO: 3369216 - DNA, 25 bp, Homo sapien
gagggccgtccaaacacaacagttg

SEQ ID NO: 3369217 - DNA, 25 bp, Homo sapien
tcactcttggagattatggaggccg

SEQ ID NO: 3369218 - DNA, 25 bp, Homo sapien
gaaggacgacgtcactcttggagaa

SEQ ID NO: 3369219 - DNA, 25 bp, Homo sapien
cttccagctttttagaacccaagag

SEQ ID NO: 3369220 - DNA, 25 bp, Homo sapien
ttggatgttttccactctagttggg

SEQ ID NO: 3369221 - DNA, 25 bp, Homo sapien
tctccacattctttagctctctgtt

SEQ ID NO: 3369222 - DNA, 25 bp, Homo sapien
cattcctgtcgacaaaacaagctgg

SEQ ID NO: 3369223 - DNA, 25 bp, Homo sapien
tggttgagaaaggggagaggggagc

SEQ ID NO: 3369224 - DNA, 25 bp, Homo sapien
tgagaaaggggagaggggagcctca

SEQ ID NO: 3369225 - DNA, 25 bp, Homo sapien
gagaaaggggagaggggagcctcat

SEQ ID NO: 3369226 - DNA, 25 bp, Homo sapien
ttgagaaaggggagaggggagcctc

SEQ ID NO: 3369227 - DNA, 25 bp, Homo sapien
tgtgtctgcgagtttcatcaccagc

SEQ ID NO: 3369228 - DNA, 25 bp, Homo sapien
ggaaaggtatctcccctcagcttca

SEQ ID NO: 3369229 - DNA, 25 bp, Homo sapien
cggacaatcccgagctaaggatctg

SEQ ID NO: 3369230 - DNA, 25 bp, Homo sapien
catcaccagcatgatcggaaaggta

SEQ ID NO: 3369231 - DNA, 25 bp, Homo sapien
gaactcgacctcacaagacagactg

SEQ ID NO: 3369232 - DNA, 25 bp, Homo sapien
cacaagcagcatggagcatagagtc

SEQ ID NO: 3369233 - DNA, 25 bp, Homo sapien
gactgtcacgtagagacaactgcta

SEQ ID NO: 3369234 - DNA, 25 bp, Homo sapien
tatctaccgtacaggcaattgtgag

SEQ ID NO: 3369235 - DNA, 25 bp, Homo sapien
ttaccaggtgtgtcagtctcgatgc

SEQ ID NO: 3369236 - DNA, 25 bp, Homo sapien
taagctagttagaccatttgggcat

SEQ ID NO: 3369237 - DNA, 25 bp, Homo sapien
ccattgtgtctgtgagagcggtgct

SEQ ID NO: 3369238 - DNA, 25 bp, Homo sapien
tgagcttgacacagcctggacttga

SEQ ID NO: 3369239 - DNA, 25 bp, Homo sapien
cctagtctaaggtacattgcagcag

SEQ ID NO: 3369240 - DNA, 25 bp, Homo sapien
tactgctgccttgagcttggacctc

SEQ ID NO: 3369241 - DNA, 25 bp, Homo sapien
gcagaaatggactgagagagacatc

SEQ ID NO: 3369242 - DNA, 25 bp, Homo sapien
cagaagactccatccatgaattggc

SEQ ID NO: 3369243 - DNA, 25 bp, Homo sapien
cagataacgggtgaatctctctgta

SEQ ID NO: 3369244 - DNA, 25 bp, Homo sapien
tttgacagagcattcccactttggg

SEQ ID NO: 3369245 - DNA, 25 bp, Homo sapien
taagcttttactacctctatcgagg

SEQ ID NO: 3369246 - DNA, 25 bp, Homo sapien
tatcgagggcaattagtatctatca

SEQ ID NO: 3369247 - DNA, 25 bp, Homo sapien
gcaagccaaaatgtcaacaccaact

SEQ ID NO: 3369248 - DNA, 25 bp, Homo sapien
ctttccatgtaagcaagcagcatta

SEQ ID NO: 3369249 - DNA, 25 bp, Homo sapien
tgtaagcaagcagcattagcatttc

SEQ ID NO: 3369250 - DNA, 25 bp, Homo sapien
acagcaagccaaaatgtcaacacca

SEQ ID NO: 3369251 - DNA, 25 bp, Homo sapien
tgagtaccacttgttccccaataac

SEQ ID NO: 3369252 - DNA, 25 bp, Homo sapien
tttttgttcttattgcgtttgctta

SEQ ID NO: 3369253 - DNA, 25 bp, Homo sapien
ttgtcttggatttaagtccttcatc

SEQ ID NO: 3369254 - DNA, 25 bp, Homo sapien
gtttgcttatgggttcttgttcgtg

SEQ ID NO: 3369255 - DNA, 25 bp, Homo sapien
taatgccatcgctcactaccaaaaa

SEQ ID NO: 3369256 - DNA, 25 bp, Homo sapien
ctaccaaaaattttgcagtagagct

SEQ ID NO: 3369257 - DNA, 25 bp, Homo sapien
cccctataatggatccagagtggaa

SEQ ID NO: 3369258 - DNA, 25 bp, Homo sapien
ttaagatcatggtatctgccctgcc

SEQ ID NO: 3369259 - DNA, 25 bp, Homo sapien
aagatataagttgagactgagatca

SEQ ID NO: 3369260 - DNA, 25 bp, Homo sapien
taaccgtgccatgatttaagttcct

SEQ ID NO: 3369261 - DNA, 25 bp, Homo sapien
catcgtgttggctctcttgaagaaa

SEQ ID NO: 3369262 - DNA, 25 bp, Homo sapien
gagatcatatactgcattatttccc

SEQ ID NO: 3369263 - DNA, 25 bp, Homo sapien
tcttgatccgtgatgagagaacagc

SEQ ID NO: 3369264 - DNA, 25 bp, Homo sapien
gcaggcgtgtgaccagaccatggct

SEQ ID NO: 3369265 - DNA, 25 bp, Homo sapien
ttatcgcagcaccagtgcgctgagc

SEQ ID NO: 3369266 - DNA, 25 bp, Homo sapien
ggctcccgtgcagctctcaggcagg

SEQ ID NO: 3369267 - DNA, 25 bp, Homo sapien
tgagccttgctctcattgctaccac

SEQ ID NO: 3369268 - DNA, 25 bp, Homo sapien
taaagagcactaagcaacactctcc

SEQ ID NO: 3369269 - DNA, 25 bp, Homo sapien
attttcagatggttgcaactaaaga

SEQ ID NO: 3369270 - DNA, 25 bp, Homo sapien
tgcccagagacgaatgcagggtcct

SEQ ID NO: 3369271 - DNA, 25 bp, Homo sapien
gtacagtagagccaccaaattgcag

SEQ ID NO: 3369272 - DNA, 25 bp, Homo sapien
agtagagccaccaaattgcagtcag

SEQ ID NO: 3369273 - DNA, 25 bp, Homo sapien
acctcttcgctggatgctgtcctcg

SEQ ID NO: 3369274 - DNA, 25 bp, Homo sapien
caggagccaggacctcttcgctgga

SEQ ID NO: 3369275 - DNA, 25 bp, Homo sapien
cagctcttgcaaatggcacacccaa

SEQ ID NO: 3369276 - DNA, 25 bp, Homo sapien
accgcaaggattggttggctgcctg

SEQ ID NO: 3369277 - DNA, 25 bp, Homo sapien
gctcttgcaaatggcacacccaatt

SEQ ID NO: 3369278 - DNA, 25 bp, Homo sapien
cacagctcttgcaaatggcacaccc

SEQ ID NO: 3369279 - DNA, 25 bp, Homo sapien
gcctcacatgcagagattcctctgg

SEQ ID NO: 3369280 - DNA, 25 bp, Homo sapien
attcctctggatccgcagttgcacg

SEQ ID NO: 3369281 - DNA, 25 bp, Homo sapien
cagttgcacggtgagaaagtgagtt

SEQ ID NO: 3369282 - DNA, 25 bp, Homo sapien
gtgagttggaggcagaagttctgct

SEQ ID NO: 3369283 - DNA, 25 bp, Homo sapien
caggctctggtctgccgcagtaaca

SEQ ID NO: 3369284 - DNA, 25 bp, Homo sapien
tggtcacatgctccccggagcgcaa

SEQ ID NO: 3369285 - DNA, 25 bp, Homo sapien
tataccgggggtgacccaggctctg

SEQ ID NO: 3369286 - DNA, 25 bp, Homo sapien
agcgcaatggtagctggttgagcat

SEQ ID NO: 3369287 - DNA, 25 bp, Homo sapien
cctcaccaagtatggttacctgctt

SEQ ID NO: 3369288 - DNA, 25 bp, Homo sapien
caagtatggttacctgcttctcatt

SEQ ID NO: 3369289 - DNA, 25 bp, Homo sapien
tctcacggacacaggcttctaacaa

SEQ ID NO: 3369290 - DNA, 25 bp, Homo sapien
tcattctcacggacacaggcttcta

SEQ ID NO: 3369291 - DNA, 25 bp, Homo sapien
taaaaattcaatgcagctcaataca

SEQ ID NO: 3369292 - DNA, 25 bp, Homo sapien
cagaaaggtggtaatggctgacagc

SEQ ID NO: 3369293 - DNA, 25 bp, Homo sapien
ccgctctcatttagaaaggtttcca

SEQ ID NO: 3369294 - DNA, 25 bp, Homo sapien
tgcagctcaatacatgaaagttgtt

SEQ ID NO: 3369295 - DNA, 25 bp, Homo sapien
ctgtgagtcgagacgaacaagatgg

SEQ ID NO: 3369296 - DNA, 25 bp, Homo sapien
gagacgaacaagatggtgcaccagc

SEQ ID NO: 3369297 - DNA, 25 bp, Homo sapien
gagtcgagacgaacaagatggtgca

SEQ ID NO: 3369298 - DNA, 25 bp, Homo sapien
aacaagatggtgcaccagctcttgg

SEQ ID NO: 3369299 - DNA, 25 bp, Homo sapien
aaacgtgcccaagccggcggcaaag

SEQ ID NO: 3369300 - DNA, 25 bp, Homo sapien
gccagagacgctgaggaaacgtgcc

SEQ ID NO: 3369301 - DNA, 25 bp, Homo sapien
cattgtgttgaagacaagaatacgg

SEQ ID NO: 3369302 - DNA, 25 bp, Homo sapien
cacactgtgctggagactttcttag

SEQ ID NO: 3369303 - DNA, 25 bp, Homo sapien
acttcatgtgctcgcaccagggtga

SEQ ID NO: 3369304 - DNA, 25 bp, Homo sapien
cacactgttaggtgtcccgtttact

SEQ ID NO: 3369305 - DNA, 25 bp, Homo sapien
agggaatccgagccgctggcacaga

SEQ ID NO: 3369306 - DNA, 25 bp, Homo sapien
ccccaaaacgcagaaatgctggcat

SEQ ID NO: 3369307 - DNA, 25 bp, Homo sapien
tttcacactttcgagaagcaggcag

SEQ ID NO: 3369308 - DNA, 25 bp, Homo sapien
tcaaagccagaacctggacatgcga

SEQ ID NO: 3369309 - DNA, 25 bp, Homo sapien
ggcctaacgaagtagacccgattga

SEQ ID NO: 3369310 - DNA, 25 bp, Homo sapien
tcagggcaggtaagcagctccgctg

SEQ ID NO: 3369311 - DNA, 25 bp, Homo sapien
tgtcttcttagtctctgccaatccg

SEQ ID NO: 3369312 - DNA, 25 bp, Homo sapien
ccagtctcccctaattgtagcgtgt

SEQ ID NO: 3369313 - DNA, 25 bp, Homo sapien
tgccaatccgtgacagcgtcgctgt

SEQ ID NO: 3369314 - DNA, 25 bp, Homo sapien
gatagtataaagtgttccaggaagc

SEQ ID NO: 3369315 - DNA, 25 bp, Homo sapien
ttctttgggttataactcagtagta

SEQ ID NO: 3369316 - DNA, 25 bp, Homo sapien
ctatttggaaatcttccacaaggaa

SEQ ID NO: 3369317 - DNA, 25 bp, Homo sapien
tcagagccattattcaattacctcc

SEQ ID NO: 3369318 - DNA, 25 bp, Homo sapien
gccaaaccacatcaagtggtgtctt

SEQ ID NO: 3369319 - DNA, 25 bp, Homo sapien
agagctctcgccagctctaggctct

SEQ ID NO: 3369320 - DNA, 25 bp, Homo sapien
tcgccagctctaggctctttgccaa

SEQ ID NO: 3369321 - DNA, 25 bp, Homo sapien
tttgccaatcagagctctagccagt

SEQ ID NO: 3369322 - DNA, 25 bp, Homo sapien
cagttctaggatcttgagaaagcaa

SEQ ID NO: 3369323 - DNA, 25 bp, Homo sapien
catggtctcgaaagccttgtgctcc

SEQ ID NO: 3369324 - DNA, 25 bp, Homo sapien
cacctcctgtcacgtatcttcttaa

SEQ ID NO: 3369325 - DNA, 25 bp, Homo sapien
taaatcctcatccacacgactgtga

SEQ ID NO: 3369326 - DNA, 25 bp, Homo sapien
aactcatggtctcgaaagccttgtg

SEQ ID NO: 3369327 - DNA, 25 bp, Homo sapien
gggcagcttacacaacacgaatata

SEQ ID NO: 3369328 - DNA, 25 bp, Homo sapien
cctgtaggccctgtattgatttgct

SEQ ID NO: 3369329 - DNA, 25 bp, Homo sapien
tgtcgacagggttggtgccttccaa

SEQ ID NO: 3369330 - DNA, 25 bp, Homo sapien
gaatatactgtctcacaggtctgag

SEQ ID NO: 3369331 - DNA, 25 bp, Homo sapien
cagacgcttgcagttaggcagagcc

SEQ ID NO: 3369332 - DNA, 25 bp, Homo sapien
cacagaccatttggactatgccggt

SEQ ID NO: 3369333 - DNA, 25 bp, Homo sapien
aaagccgcgaaaagtctctccacag

SEQ ID NO: 3369334 - DNA, 25 bp, Homo sapien
ggagactatgcttcccagacgcttg

SEQ ID NO: 3369335 - DNA, 25 bp, Homo sapien
tattcccgcagtgttccaggctgag

SEQ ID NO: 3369336 - DNA, 25 bp, Homo sapien
tctcatcataaaggtggaaccgtgc

SEQ ID NO: 3369337 - DNA, 25 bp, Homo sapien
cggctatcgcggagtgaaaccctca

SEQ ID NO: 3369338 - DNA, 25 bp, Homo sapien
tagccgctgtgcagagactcgggta

SEQ ID NO: 3369339 - DNA, 25 bp, Homo sapien
gctgaggccgggcgtgttcttccgg

SEQ ID NO: 3369340 - DNA, 25 bp, Homo sapien
ggctgaggccgggcgtgttcttccg

SEQ ID NO: 3369341 - DNA, 25 bp, Homo sapien
tgaggccgggcgtgttcttccggtg

SEQ ID NO: 3369342 - DNA, 25 bp, Homo sapien
ctgaggccgggcgtgttcttccggt

SEQ ID NO: 3369343 - DNA, 25 bp, Homo sapien
gggacaagcaatcgaatccgataag

SEQ ID NO: 3369344 - DNA, 25 bp, Homo sapien
atcgaatccgataagaaaggttttg

SEQ ID NO: 3369345 - DNA, 25 bp, Homo sapien
caagcaatcgaatccgataagaaag

SEQ ID NO: 3369346 - DNA, 25 bp, Homo sapien
ttaataaggggggacaagcaatcga

SEQ ID NO: 3369347 - DNA, 25 bp, Homo sapien
tatactatgcgatatgtaataaggt

SEQ ID NO: 3369348 - DNA, 25 bp, Homo sapien
ctttgtacataatcaacgttcaata

SEQ ID NO: 3369349 - DNA, 25 bp, Homo sapien
ttatactatgcgatatgtaataagg

SEQ ID NO: 3369350 - DNA, 25 bp, Homo sapien
tgtacataatcaacgttcaatattt

SEQ ID NO: 3369351 - DNA, 25 bp, Homo sapien
tgatggaagtttgtagatatcaccc

SEQ ID NO: 3369352 - DNA, 25 bp, Homo sapien
tatatcccacagaacaagaccgaaa

SEQ ID NO: 3369353 - DNA, 25 bp, Homo sapien
ccaccagtgaagcagtgatggaagt

SEQ ID NO: 3369354 - DNA, 25 bp, Homo sapien
ggaagtttgtagatatcaccccaaa

SEQ ID NO: 3369355 - DNA, 25 bp, Homo sapien
ttgtctctgtggacccgtcagactg

SEQ ID NO: 3369356 - DNA, 25 bp, Homo sapien
ttcaccatcctgacttgctcagtgc

SEQ ID NO: 3369357 - DNA, 25 bp, Homo sapien
ttagtgacacaagaccaacagtggt

SEQ ID NO: 3369358 - DNA, 25 bp, Homo sapien
gacttgctcagtgcgaccttgggaa

SEQ ID NO: 3369359 - DNA, 25 bp, Homo sapien
catgtcctgtctcggtgtgatgtac

SEQ ID NO: 3369360 - DNA, 25 bp, Homo sapien
accaagtggacttctgatgttcaga

SEQ ID NO: 3369361 - DNA, 25 bp, Homo sapien
tacctgagtgacctgaatctttaag

SEQ ID NO: 3369362 - DNA, 25 bp, Homo sapien
tggtggcttgggagaaatacacacc

SEQ ID NO: 3369363 - DNA, 25 bp, Homo sapien
tcagagcctactgtttggagtaagt

SEQ ID NO: 3369364 - DNA, 25 bp, Homo sapien
gagtaagttaattataactagagtc

SEQ ID NO: 3369365 - DNA, 25 bp, Homo sapien
tcacagaagttgcagcagcttgtgc

SEQ ID NO: 3369366 - DNA, 25 bp, Homo sapien
cagcttgtgcacattcagagcctac

SEQ ID NO: 3369367 - DNA, 25 bp, Homo sapien
cctcgtaacacagcgtgggcgatgg

SEQ ID NO: 3369368 - DNA, 25 bp, Homo sapien
aactgtatgactttcgggtttgcaa

SEQ ID NO: 3369369 - DNA, 25 bp, Homo sapien
taaaaatgcatacatgggactctcc

SEQ ID NO: 3369370 - DNA, 25 bp, Homo sapien
tgggactctccacggagcctcgtaa

SEQ ID NO: 3369371 - DNA, 25 bp, Homo sapien
tgccttgtgcggctgtgggcccttt

SEQ ID NO: 3369372 - DNA, 25 bp, Homo sapien
ccacctcaccccagatctcttctgt

SEQ ID NO: 3369373 - DNA, 25 bp, Homo sapien
tttctgggacagtgccttgtgcggc

SEQ ID NO: 3369374 - DNA, 25 bp, Homo sapien
ttgtgcggctgtgggccctttcccc

SEQ ID NO: 3369375 - DNA, 25 bp, Homo sapien
cgaaatccttgagtaaagcaaagtc

SEQ ID NO: 3369376 - DNA, 25 bp, Homo sapien
attatcaatccatattcctccagtg

SEQ ID NO: 3369377 - DNA, 25 bp, Homo sapien
tgtgtattaaaattctcctgtgtgt

SEQ ID NO: 3369378 - DNA, 25 bp, Homo sapien
tagactgggagctgttaaatcaaag

SEQ ID NO: 3369379 - DNA, 25 bp, Homo sapien
ttaccttattagaggaaacaggaca

SEQ ID NO: 3369380 - DNA, 25 bp, Homo sapien
tacgggcaaagctcaatttgtgaag

SEQ ID NO: 3369381 - DNA, 25 bp, Homo sapien
ggaggcttatattgcattttcaggc

SEQ ID NO: 3369382 - DNA, 25 bp, Homo sapien
tgcttccctgaaagaaatacgggca

SEQ ID NO: 3369383 - DNA, 25 bp, Homo sapien
ataaataggctgtcctgactaatga

SEQ ID NO: 3369384 - DNA, 25 bp, Homo sapien
tcttctgtggtctttaaaactcctc

SEQ ID NO: 3369385 - DNA, 25 bp, Homo sapien
taaaaaatgtgcctctggaatcaaa

SEQ ID NO: 3369386 - DNA, 25 bp, Homo sapien
actagtaaagaaatgtactcttctg

SEQ ID NO: 3369387 - DNA, 25 bp, Homo sapien
ttatgcttaagtcttcgacccattt

SEQ ID NO: 3369388 - DNA, 25 bp, Homo sapien
tttatgcttaagtcttcgacccatt

SEQ ID NO: 3369389 - DNA, 25 bp, Homo sapien
tgcccaaaccaatttcatgtagttt

SEQ ID NO: 3369390 - DNA, 25 bp, Homo sapien
attgcccaaaccaatttcatgtagt

SEQ ID NO: 3369391 - DNA, 25 bp, Homo sapien
aactcgctgactagcggttcttcac

SEQ ID NO: 3369392 - DNA, 25 bp, Homo sapien
tgcctgtctctaactcgctgactag

SEQ ID NO: 3369393 - DNA, 25 bp, Homo sapien
tctctaactcgctgactagcggttc

SEQ ID NO: 3369394 - DNA, 25 bp, Homo sapien
gctgactagcggttcttcaccctct

SEQ ID NO: 3369395 - DNA, 25 bp, Homo sapien
taaagatcaggtagaaatgacggga

SEQ ID NO: 3369396 - DNA, 25 bp, Homo sapien
aaagatcaggtagaaatgacgggat

SEQ ID NO: 3369397 - DNA, 25 bp, Homo sapien
ctaaagatcaggtagaaatgacggg

SEQ ID NO: 3369398 - DNA, 25 bp, Homo sapien
tgtcagcattccatcctacgggctg

SEQ ID NO: 3369399 - DNA, 25 bp, Homo sapien
tacgggctgtaattcagagctgctg

SEQ ID NO: 3369400 - DNA, 25 bp, Homo sapien
gacttgtcaggtctatggcattcag

SEQ ID NO: 3369401 - DNA, 25 bp, Homo sapien
caagtcacacgctgttcttatcaga

SEQ ID NO: 3369402 - DNA, 25 bp, Homo sapien
tctttgattactgaaactggaagat

SEQ ID NO: 3369403 - DNA, 25 bp, Homo sapien
aggatggatgcagccaccccaagac

SEQ ID NO: 3369404 - DNA, 25 bp, Homo sapien
caagtcagccagacatgtgtccctg

SEQ ID NO: 3369405 - DNA, 25 bp, Homo sapien
aatggcccctctgctgattggcatt

SEQ ID NO: 3369406 - DNA, 25 bp, Homo sapien
tatttggcttatgtttcactgtctg

SEQ ID NO: 3369407 - DNA, 25 bp, Homo sapien
tcactgtctgtttcttaagaggagt

SEQ ID NO: 3369408 - DNA, 25 bp, Homo sapien
ttcactgtctgtttcttaagaggag

SEQ ID NO: 3369409 - DNA, 25 bp, Homo sapien
agccatccgatatttggcttatgtt

SEQ ID NO: 3369410 - DNA, 25 bp, Homo sapien
tgggatgcaaccctggtacagctcc

SEQ ID NO: 3369411 - DNA, 25 bp, Homo sapien
ttgggatgcaaccctggtacagctc

SEQ ID NO: 3369412 - DNA, 25 bp, Homo sapien
ggaatttagttcaatcacgcgtttg

SEQ ID NO: 3369413 - DNA, 25 bp, Homo sapien
gctccaacgccagaggcggccggtt

SEQ ID NO: 3369414 - DNA, 25 bp, Homo sapien
tgaaaactctgacaagcttcagctc

SEQ ID NO: 3369415 - DNA, 25 bp, Homo sapien
atgcactgaggtgccgtaaggctcc

SEQ ID NO: 3369416 - DNA, 25 bp, Homo sapien
acctcctcagtgacacctttcctgt

SEQ ID NO: 3369417 - DNA, 25 bp, Homo sapien
aagcgtagtctctcacccagaacac

SEQ ID NO: 3369418 - DNA, 25 bp, Homo sapien
acagggcaccttatacagggggctc

SEQ ID NO: 3369419 - DNA, 25 bp, Homo sapien
ggctctatgctttgacaggaactgt

SEQ ID NO: 3369420 - DNA, 25 bp, Homo sapien
gctctgtctacagggggctctatgc

SEQ ID NO: 3369421 - DNA, 25 bp, Homo sapien
cccctgtgactaggcgataactgcc

SEQ ID NO: 3369422 - DNA, 25 bp, Homo sapien
ccctgtgactaggcgataactgccg

SEQ ID NO: 3369423 - DNA, 25 bp, Homo sapien
ctgcccctgtgactaggcgataact

SEQ ID NO: 3369424 - DNA, 25 bp, Homo sapien
tgcccctgtgactaggcgataactg

SEQ ID NO: 3369425 - DNA, 25 bp, Homo sapien
tggctcagcactaaagtgccttgag

SEQ ID NO: 3369426 - DNA, 25 bp, Homo sapien
ccaaatggctcagcactaaagtgcc

SEQ ID NO: 3369427 - DNA, 25 bp, Homo sapien
taaagtgccttgagcaggctccagc

SEQ ID NO: 3369428 - DNA, 25 bp, Homo sapien
cagcactaaagtgccttgagcaggc

SEQ ID NO: 3369429 - DNA, 25 bp, Homo sapien
cacattatctgttgcgtatctacta

SEQ ID NO: 3369430 - DNA, 25 bp, Homo sapien
ccacattatctgttgcgtatctact

SEQ ID NO: 3369431 - DNA, 25 bp, Homo sapien
tggcccaaaatgaagggactgcagg

SEQ ID NO: 3369432 - DNA, 25 bp, Homo sapien
ggatagaagggacgtgattcaaaga

SEQ ID NO: 3369433 - DNA, 25 bp, Homo sapien
cgtgattcaaagagatggcggcaca

SEQ ID NO: 3369434 - DNA, 25 bp, Homo sapien
aagggacgtgattcaaagagatggc

SEQ ID NO: 3369435 - DNA, 25 bp, Homo sapien
gcacaggacccatgacctaaggaag

SEQ ID NO: 3369436 - DNA, 25 bp, Homo sapien
atctggtgtttggagcccagaggtc

SEQ ID NO: 3369437 - DNA, 25 bp, Homo sapien
cagaggtcttctctaaggcctcgga

SEQ ID NO: 3369438 - DNA, 25 bp, Homo sapien
cttgctcccggcatctggtgtttgg

SEQ ID NO: 3369439 - DNA, 25 bp, Homo sapien
tctaaggcctcggagaagcttccaa

SEQ ID NO: 3369440 - DNA, 25 bp, Homo sapien
ggcatgggcagcgtttggagaaagc

SEQ ID NO: 3369441 - DNA, 25 bp, Homo sapien
ctgtttaattccatcaggcatgggc

SEQ ID NO: 3369442 - DNA, 25 bp, Homo sapien
tctggtgtggatcaagaaagctagg

SEQ ID NO: 3369443 - DNA, 25 bp, Homo sapien
aagctaggcaaattgcccctgaggg

SEQ ID NO: 3369444 - DNA, 25 bp, Homo sapien
taaaagatccttaagcttgaccaac

SEQ ID NO: 3369445 - DNA, 25 bp, Homo sapien
tcacctacagttaggaagatttcac

SEQ ID NO: 3369446 - DNA, 25 bp, Homo sapien
caccattagctgtggcccataaaag

SEQ ID NO: 3369447 - DNA, 25 bp, Homo sapien
tcttgtacaagatagtctccaaatg

SEQ ID NO: 3369448 - DNA, 25 bp, Homo sapien
gagaagatacttggcattatatcaa

SEQ ID NO: 3369449 - DNA, 25 bp, Homo sapien
ttggcattatatcaaacttcttaaa

SEQ ID NO: 3369450 - DNA, 25 bp, Homo sapien
tttgtaggatgccttgtgacctaag

SEQ ID NO: 3369451 - DNA, 25 bp, Homo sapien
gccttgtgacctaagatttgatcta

SEQ ID NO: 3369452 - DNA, 25 bp, Homo sapien
caaattgggctcaaacggggcaagc

SEQ ID NO: 3369453 - DNA, 25 bp, Homo sapien
tcaaacggggcaagctccaacacag

SEQ ID NO: 3369454 - DNA, 25 bp, Homo sapien
aacggggcaagctccaacacagtgg

SEQ ID NO: 3369455 - DNA, 25 bp, Homo sapien
gcaagctccaacacagtggagcctg

SEQ ID NO: 3369456 - DNA, 25 bp, Homo sapien
gatgtttaggatggccaaagcgcac

SEQ ID NO: 3369457 - DNA, 25 bp, Homo sapien
caaccatgaatgtagtatccagaac

SEQ ID NO: 3369458 - DNA, 25 bp, Homo sapien
tacataatgtgcctggcagcagact

SEQ ID NO: 3369459 - DNA, 25 bp, Homo sapien
gtcaaaaacaaagagtaggtcctga

SEQ ID NO: 3369460 - DNA, 25 bp, Homo sapien
tggacgcgagtgaaatttggtaccg

SEQ ID NO: 3369461 - DNA, 25 bp, Homo sapien
ctttaggttgccaaatctaacaaga

SEQ ID NO: 3369462 - DNA, 25 bp, Homo sapien
actttaggttgccaaatctaacaag

SEQ ID NO: 3369463 - DNA, 25 bp, Homo sapien
tatgaaatggtttggaaggtggccc

SEQ ID NO: 3369464 - DNA, 25 bp, Homo sapien
aaggtggcccctataaatctcatga

SEQ ID NO: 3369465 - DNA, 25 bp, Homo sapien
tcatggcctgatgccgtccttgtga

SEQ ID NO: 3369466 - DNA, 25 bp, Homo sapien
attccgtggtgtatgaaatggtttg

SEQ ID NO: 3369467 - DNA, 25 bp, Homo sapien
tccacaggcgccatgcagatgccat

SEQ ID NO: 3369468 - DNA, 25 bp, Homo sapien
tgatgtgcctactccctctgtgcct

SEQ ID NO: 3369469 - DNA, 25 bp, Homo sapien
tcctcctcggaccatgtgatgtgcc

SEQ ID NO: 3369470 - DNA, 25 bp, Homo sapien
tcttgctcctcctcggaccatgtga

SEQ ID NO: 3369471 - DNA, 25 bp, Homo sapien
gtctacttctctatcggaaatggag

SEQ ID NO: 3369472 - DNA, 25 bp, Homo sapien
ttctctatcggaaatggagcttccc

SEQ ID NO: 3369473 - DNA, 25 bp, Homo sapien
ttcacctagtccctgcttcaagctg

SEQ ID NO: 3369474 - DNA, 25 bp, Homo sapien
atttccccatgcgaccagccaacag

SEQ ID NO: 3369475 - DNA, 25 bp, Homo sapien
gattaggaagcgcagcactgtgaaa

SEQ ID NO: 3369476 - DNA, 25 bp, Homo sapien
tctcctttgttaatgactccgggca

SEQ ID NO: 3369477 - DNA, 25 bp, Homo sapien
tggaaagccaacgtgaggagcccct

SEQ ID NO: 3369478 - DNA, 25 bp, Homo sapien
cacattgtatgagacgaggaaacag

SEQ ID NO: 3369479 - DNA, 25 bp, Homo sapien
aaattcttcagcgaccacaggaccc

SEQ ID NO: 3369480 - DNA, 25 bp, Homo sapien
tcaaattcttcagcgaccacaggac

SEQ ID NO: 3369481 - DNA, 25 bp, Homo sapien
gactcacatactcgtccagaaccgg

SEQ ID NO: 3369482 - DNA, 25 bp, Homo sapien
accaagacgaagaggtgggtcctgc

SEQ ID NO: 3369483 - DNA, 25 bp, Homo sapien
aacccggaagtggaactctgagcca

SEQ ID NO: 3369484 - DNA, 25 bp, Homo sapien
gagccatggccgagtactcctacgt

SEQ ID NO: 3369485 - DNA, 25 bp, Homo sapien
tagacgggcaggtgacccgtgaccc

SEQ ID NO: 3369486 - DNA, 25 bp, Homo sapien
gtttgggtcccctgaggcatctctc

SEQ ID NO: 3369487 - DNA, 25 bp, Homo sapien
gggtctgcattagtctgatctcgta

SEQ ID NO: 3369488 - DNA, 25 bp, Homo sapien
ctggaaacaggatagacgggcaggt

SEQ ID NO: 3369489 - DNA, 25 bp, Homo sapien
tcgaggagtctggcctcatgaagat

SEQ ID NO: 3369490 - DNA, 25 bp, Homo sapien
cgaggagtctggcctcatgaagatg

SEQ ID NO: 3369491 - DNA, 25 bp, Homo sapien
aagaagatgaagaaacccagcttga

SEQ ID NO: 3369492 - DNA, 25 bp, Homo sapien
gaagatgaagaaacccagcttgata

SEQ ID NO: 3369493 - DNA, 25 bp, Homo sapien
gaagaagatgaagaaacccagcttg

SEQ ID NO: 3369494 - DNA, 25 bp, Homo sapien
gagaagaagatgaagaaacccagct

SEQ ID NO: 3369495 - DNA, 25 bp, Homo sapien
catgcactcgacaatggtcttttta

SEQ ID NO: 3369496 - DNA, 25 bp, Homo sapien
gataagggaacctatatacatgcac

SEQ ID NO: 3369497 - DNA, 25 bp, Homo sapien
tctggtggacagtaacaaactttgg

SEQ ID NO: 3369498 - DNA, 25 bp, Homo sapien
ggaaccatagccattgaaatggata

SEQ ID NO: 3369499 - DNA, 25 bp, Homo sapien
gaatcacaggttgcatccagtctga

SEQ ID NO: 3369500 - DNA, 25 bp, Homo sapien
caggatgtgtctaaagaataactcc

SEQ ID NO: 3369501 - DNA, 25 bp, Homo sapien
aattttttagactcacagaagccac

SEQ ID NO: 3369502 - DNA, 25 bp, Homo sapien
gaataactccccacttcttgacaca

SEQ ID NO: 3369503 - DNA, 25 bp, Homo sapien
taagacaggatgtgtacccaggccc

SEQ ID NO: 3369504 - DNA, 25 bp, Homo sapien
gaggccactctcaatatttcatagc

SEQ ID NO: 3369505 - DNA, 25 bp, Homo sapien
gtcagtcagttcatggaaatcacag

SEQ ID NO: 3369506 - DNA, 25 bp, Homo sapien
ggtaagacaggatgtgtacccaggc

SEQ ID NO: 3369507 - DNA, 25 bp, Homo sapien
tatgaccttgccttatctaccagaa

SEQ ID NO: 3369508 - DNA, 25 bp, Homo sapien
tcaagtacctggaagctctgaacag

SEQ ID NO: 3369509 - DNA, 25 bp, Homo sapien
ggatatcatcacaaaagtgttactg

SEQ ID NO: 3369510 - DNA, 25 bp, Homo sapien
caaagatacttacacaaagattgcc

SEQ ID NO: 3369511 - DNA, 25 bp, Homo sapien
cactttctaagcagccctggaactg

SEQ ID NO: 3369512 - DNA, 25 bp, Homo sapien
tcaggtctgggacccctctaatcag

SEQ ID NO: 3369513 - DNA, 25 bp, Homo sapien
ccttgtgttacaggccctagcaggg

SEQ ID NO: 3369514 - DNA, 25 bp, Homo sapien
aatgatcgctttatttcctagcagg

SEQ ID NO: 3369515 - DNA, 25 bp, Homo sapien
gccagcatgccctaatagaagtggg

SEQ ID NO: 3369516 - DNA, 25 bp, Homo sapien
agccagcatgccctaatagaagtgg

SEQ ID NO: 3369517 - DNA, 25 bp, Homo sapien
atctctctattcattcatagaatgg

SEQ ID NO: 3369518 - DNA, 25 bp, Homo sapien
tgtaaattgtgctgttgtatcttct

SEQ ID NO: 3369519 - DNA, 25 bp, Homo sapien
agaaaaggagagttctaggccacct

SEQ ID NO: 3369520 - DNA, 25 bp, Homo sapien
tagaaaaggagagttctaggccacc

SEQ ID NO: 3369521 - DNA, 25 bp, Homo sapien
tcatactcctcctccctcggccgtg

SEQ ID NO: 3369522 - DNA, 25 bp, Homo sapien
ggccgtggcatcctgatattgctga

SEQ ID NO: 3369523 - DNA, 25 bp, Homo sapien
cctgatattgctgatattcagacac

SEQ ID NO: 3369524 - DNA, 25 bp, Homo sapien
ctcggccgtggcatcctgatattgc

SEQ ID NO: 3369525 - DNA, 25 bp, Homo sapien
gacggctgtgttgttcccagtgaag

SEQ ID NO: 3369526 - DNA, 25 bp, Homo sapien
cattcagctggtcggggaagcacag

SEQ ID NO: 3369527 - DNA, 25 bp, Homo sapien
ctctgagacccgcttgagttcctgg

SEQ ID NO: 3369528 - DNA, 25 bp, Homo sapien
gcttgagttcctggacggctgtgtt

SEQ ID NO: 3369529 - DNA, 25 bp, Homo sapien
gccaggtatacggtcatcagtggtc

SEQ ID NO: 3369530 - DNA, 25 bp, Homo sapien
ctgtaagacagcacagccggtcact

SEQ ID NO: 3369531 - DNA, 25 bp, Homo sapien
cagtggtcaccaccataatgcagaa

SEQ ID NO: 3369532 - DNA, 25 bp, Homo sapien
taagacagcacagccggtcactcga

SEQ ID NO: 3369533 - DNA, 25 bp, Homo sapien
cggagttacaggacagcagcttccc

SEQ ID NO: 3369534 - DNA, 25 bp, Homo sapien
cccggagttacaggacagcagcttc

SEQ ID NO: 3369535 - DNA, 25 bp, Homo sapien
cctcccccggagttacaggacagca

SEQ ID NO: 3369536 - DNA, 25 bp, Homo sapien
agttacaggacagcagcttcccctc

SEQ ID NO: 3369537 - DNA, 25 bp, Homo sapien
actcgctgcaggtggaacaaatgaa

SEQ ID NO: 3369538 - DNA, 25 bp, Homo sapien
tcgctgcaggtggaacaaatgaaac

SEQ ID NO: 3369539 - DNA, 25 bp, Homo sapien
gaactcgctgcaggtggaacaaatg

SEQ ID NO: 3369540 - DNA, 25 bp, Homo sapien
agaactcgctgcaggtggaacaaat

SEQ ID NO: 3369541 - DNA, 25 bp, Homo sapien
aagcccgtttaggaggcagatggag

SEQ ID NO: 3369542 - DNA, 25 bp, Homo sapien
cgttcctggatttcgagctgccctg

SEQ ID NO: 3369543 - DNA, 25 bp, Homo sapien
atggagcgactcgactcggaggaca

SEQ ID NO: 3369544 - DNA, 25 bp, Homo sapien
accttggagcgttcctggatttcga

SEQ ID NO: 3369545 - DNA, 25 bp, Homo sapien
ctaaggagccgcaccccagtcctcg

SEQ ID NO: 3369546 - DNA, 25 bp, Homo sapien
agccgcaccccagtcctcgcccgca

SEQ ID NO: 3369547 - DNA, 25 bp, Homo sapien
taaggagccgcaccccagtcctcgc

SEQ ID NO: 3369548 - DNA, 25 bp, Homo sapien
ggagccgcaccccagtcctcgcccg

SEQ ID NO: 3369549 - DNA, 25 bp, Homo sapien
aaatgaagttgtctggcctgaagac

SEQ ID NO: 3369550 - DNA, 25 bp, Homo sapien
gaaatgaagttgtctggcctgaaga

SEQ ID NO: 3369551 - DNA, 25 bp, Homo sapien
ggaaatgaagttgtctggcctgaag

SEQ ID NO: 3369552 - DNA, 25 bp, Homo sapien
gggaaatgaagttgtctggcctgaa

SEQ ID NO: 3369553 - DNA, 25 bp, Homo sapien
atccacgagcacagcgcgggacacg

SEQ ID NO: 3369554 - DNA, 25 bp, Homo sapien
ccagatccacgagcacagcgcggga

SEQ ID NO: 3369555 - DNA, 25 bp, Homo sapien
tccacgagcacagcgcgggacacgt

SEQ ID NO: 3369556 - DNA, 25 bp, Homo sapien
agatccacgagcacagcgcgggaca

SEQ ID NO: 3369557 - DNA, 25 bp, Homo sapien
cgggagggcatgagcgaggggaggg

SEQ ID NO: 3369558 - DNA, 25 bp, Homo sapien
gggagggcatgagcgaggggagggc

SEQ ID NO: 3369559 - DNA, 25 bp, Homo sapien
gggcgggagggcatgagcgagggga

SEQ ID NO: 3369560 - DNA, 25 bp, Homo sapien
gagggcatgagcgaggggagggccg

SEQ ID NO: 3369561 - DNA, 25 bp, Homo sapien
cgctggcctcgtggtggtgcacgtt

SEQ ID NO: 3369562 - DNA, 25 bp, Homo sapien
tcgtggtggtgcacgttgatgcgct

SEQ ID NO: 3369563 - DNA, 25 bp, Homo sapien
ctggcctcgtggtggtgcacgttga

SEQ ID NO: 3369564 - DNA, 25 bp, Homo sapien
gcctcgtggtggtgcacgttgatgc

SEQ ID NO: 3369565 - DNA, 25 bp, Homo sapien
ccgccgcctcgccagccacccggtt

SEQ ID NO: 3369566 - DNA, 25 bp, Homo sapien
gccgcctcgccagccacccggttcc

SEQ ID NO: 3369567 - DNA, 25 bp, Homo sapien
ccccgccgcctcgccagccacccgg

SEQ ID NO: 3369568 - DNA, 25 bp, Homo sapien
cgcctcgccagccacccggttccac

SEQ ID NO: 3369569 - DNA, 25 bp, Homo sapien
ggccgcaatgcaggggcaccgcccc

SEQ ID NO: 3369570 - DNA, 25 bp, Homo sapien
cccaggggccgcaatgcaggggcac

SEQ ID NO: 3369571 - DNA, 25 bp, Homo sapien
ggggccgcaatgcaggggcaccgcc

SEQ ID NO: 3369572 - DNA, 25 bp, Homo sapien
gcaatgcaggggcaccgcccccgcc

SEQ ID NO: 3369573 - DNA, 25 bp, Homo sapien
ccggccacccggcaggcccgggctg

SEQ ID NO: 3369574 - DNA, 25 bp, Homo sapien
ggctgggccctcagagccccggctg

SEQ ID NO: 3369575 - DNA, 25 bp, Homo sapien
ggccctcagagccccggctgccaac

SEQ ID NO: 3369576 - DNA, 25 bp, Homo sapien
tgggccctcagagccccggctgcca

SEQ ID NO: 3369577 - DNA, 25 bp, Homo sapien
cttggcgccgatctggttcccgcac

SEQ ID NO: 3369578 - DNA, 25 bp, Homo sapien
ggcgccgatctggttcccgcactgc

SEQ ID NO: 3369579 - DNA, 25 bp, Homo sapien
cgccgatctggttcccgcactgccc

SEQ ID NO: 3369580 - DNA, 25 bp, Homo sapien
cgatctggttcccgcactgcccggt

SEQ ID NO: 3369581 - DNA, 25 bp, Homo sapien
gttgaacgtctgttggagaactcag

SEQ ID NO: 3369582 - DNA, 25 bp, Homo sapien
ggcgttgaacgtctgttggagaact

SEQ ID NO: 3369583 - DNA, 25 bp, Homo sapien
cgttgaacgtctgttggagaactca

SEQ ID NO: 3369584 - DNA, 25 bp, Homo sapien
ttgaacgtctgttggagaactcagg

SEQ ID NO: 3369585 - DNA, 25 bp, Homo sapien
ccaggagggatgaaacacttgcatt

SEQ ID NO: 3369586 - DNA, 25 bp, Homo sapien
tggtttagaaagcatagttctgagt

SEQ ID NO: 3369587 - DNA, 25 bp, Homo sapien
cttagagagaaagaggaccacgcgt

SEQ ID NO: 3369588 - DNA, 25 bp, Homo sapien
tgtcgcgttagatattcttagagag

SEQ ID NO: 3369589 - DNA, 25 bp, Homo sapien
gagcgtgggcggaagggaggccgcc

SEQ ID NO: 3369590 - DNA, 25 bp, Homo sapien
gtcctgagccggccgatgtggtgga

SEQ ID NO: 3369591 - DNA, 25 bp, Homo sapien
gaggtcccgggtgtctttcacgctc

SEQ ID NO: 3369592 - DNA, 25 bp, Homo sapien
gcgcaggcgcgggttccctgaggtc

SEQ ID NO: 3369593 - DNA, 25 bp, Homo sapien
tccctgaggtcccgggtgtctttca

SEQ ID NO: 3369594 - DNA, 25 bp, Homo sapien
caggcggactggaccgaccccgagg

SEQ ID NO: 3369595 - DNA, 25 bp, Homo sapien
ctcgccagccgtgaggaaatccgtc

SEQ ID NO: 3369596 - DNA, 25 bp, Homo sapien
cgccagacggatgggcgcatctaca

SEQ ID NO: 3369597 - DNA, 25 bp, Homo sapien
gctccggaacccgtgggctgcttta

SEQ ID NO: 3369598 - DNA, 25 bp, Homo sapien
atctacaaatctggggggccaccgc

SEQ ID NO: 3369599 - DNA, 25 bp, Homo sapien
cctgagcaggccccaagtgttggaa

SEQ ID NO: 3369600 - DNA, 25 bp, Homo sapien
cggcgactggtgcttgggcgtatag

SEQ ID NO: 3369601 - DNA, 25 bp, Homo sapien
cctggagtgtcagctaaagggaggc

SEQ ID NO: 3369602 - DNA, 25 bp, Homo sapien
aatcagacgcgcgtagctggaccgg

SEQ ID NO: 3369603 - DNA, 25 bp, Homo sapien
cgtcagtacctttgtcctgggatca

SEQ ID NO: 3369604 - DNA, 25 bp, Homo sapien
caactctattgccagcgcgtgggtg

SEQ ID NO: 3369605 - DNA, 25 bp, Homo sapien
ccaactctattgccagcgcgtgggt

SEQ ID NO: 3369606 - DNA, 25 bp, Homo sapien
gtcagtacctttgtcctgggatcag

SEQ ID NO: 3369607 - DNA, 25 bp, Homo sapien
cgcaggtgtgtggatctcgttcatt

SEQ ID NO: 3369608 - DNA, 25 bp, Homo sapien
acacgcaggtgtgtggatctcgttc

SEQ ID NO: 3369609 - DNA, 25 bp, Homo sapien
cacgcaggtgtgtggatctcgttca

SEQ ID NO: 3369610 - DNA, 25 bp, Homo sapien
gcaggtgtgtggatctcgttcattt

SEQ ID NO: 3369611 - DNA, 25 bp, Homo sapien
tcatgtagacaacgagatcgaaacc

SEQ ID NO: 3369612 - DNA, 25 bp, Homo sapien
tgtagacaacgagatcgaaaccaca

SEQ ID NO: 3369613 - DNA, 25 bp, Homo sapien
agacaacgagatcgaaaccacagag

SEQ ID NO: 3369614 - DNA, 25 bp, Homo sapien
tagacaacgagatcgaaaccacaga

SEQ ID NO: 3369615 - DNA, 25 bp, Homo sapien
tgctggtgttccacgcattcctgga

SEQ ID NO: 3369616 - DNA, 25 bp, Homo sapien
aatggggggtctgcaatatagcctg

SEQ ID NO: 3369617 - DNA, 25 bp, Homo sapien
gagagcaccgacacgatgctggtgt

SEQ ID NO: 3369618 - DNA, 25 bp, Homo sapien
tcctggaagtttctgggtccccaca

SEQ ID NO: 3369619 - DNA, 25 bp, Homo sapien
gcgggggcagagacttgagcaacag

SEQ ID NO: 3369620 - DNA, 25 bp, Homo sapien
catggtcacactttcggggggcggg

SEQ ID NO: 3369621 - DNA, 25 bp, Homo sapien
gcagagacttgagcaacaggcacct

SEQ ID NO: 3369622 - DNA, 25 bp, Homo sapien
ctcgggaaacaaacagtcaacatgg

SEQ ID NO: 3369623 - DNA, 25 bp, Homo sapien
gttggcctgagcgtgattcctgtgt

SEQ ID NO: 3369624 - DNA, 25 bp, Homo sapien
tagttggcctgagcgtgattcctgt

SEQ ID NO: 3369625 - DNA, 25 bp, Homo sapien
ctttagttggcctgagcgtgattcc

SEQ ID NO: 3369626 - DNA, 25 bp, Homo sapien
gctttagttggcctgagcgtgattc

SEQ ID NO: 3369627 - DNA, 25 bp, Homo sapien
gggtctcgggtctacatttagttgc

SEQ ID NO: 3369628 - DNA, 25 bp, Homo sapien
catttagttgcaaggcgctccatgg

SEQ ID NO: 3369629 - DNA, 25 bp, Homo sapien
gagccacggaaaggagaactggcct

SEQ ID NO: 3369630 - DNA, 25 bp, Homo sapien
agggcagcaccctggtttgcacggg

SEQ ID NO: 3369631 - DNA, 25 bp, Homo sapien
atctaggaaaggtcgtgccttttgc

SEQ ID NO: 3369632 - DNA, 25 bp, Homo sapien
cagtggcgccggatctaggaaaggt

SEQ ID NO: 3369633 - DNA, 25 bp, Homo sapien
tccagcagagcgggctcttccacgt

SEQ ID NO: 3369634 - DNA, 25 bp, Homo sapien
agtggttccagcagagcgggctctt

SEQ ID NO: 3369635 - DNA, 25 bp, Homo sapien
gcttttgcccgggtgcggaggccac

SEQ ID NO: 3369636 - DNA, 25 bp, Homo sapien
ggcggcgtaggcgaaatccccgcgc

SEQ ID NO: 3369637 - DNA, 25 bp, Homo sapien
ttccccacgcgccggtgtgggcgaa

SEQ ID NO: 3369638 - DNA, 25 bp, Homo sapien
agagcgccccgtccggaggagccgg

SEQ ID NO: 3369639 - DNA, 25 bp, Homo sapien
gcctgcctgcgcgggcgccctgcca

SEQ ID NO: 3369640 - DNA, 25 bp, Homo sapien
aggccgcctgcctgcgcgggcgccc

SEQ ID NO: 3369641 - DNA, 25 bp, Homo sapien
ccaggggccgcgctgcacaggccgc

SEQ ID NO: 3369642 - DNA, 25 bp, Homo sapien
cgccaggggccgcgctgcacaggcc

SEQ ID NO: 3369643 - DNA, 25 bp, Homo sapien
ggtgctgcctcagctggcgtgacct

SEQ ID NO: 3369644 - DNA, 25 bp, Homo sapien
ggtgcctggcccttcgattctgaaa

SEQ ID NO: 3369645 - DNA, 25 bp, Homo sapien
cgatgcctggaaagcgatccttctc

SEQ ID NO: 3369646 - DNA, 25 bp, Homo sapien
gatccttctcaaaggctcggaggag

SEQ ID NO: 3369647 - DNA, 25 bp, Homo sapien
acgagtctccgtcgccgtcctcgtc

SEQ ID NO: 3369648 - DNA, 25 bp, Homo sapien
gtccaaacgagtctccgtcgccgtc

SEQ ID NO: 3369649 - DNA, 25 bp, Homo sapien
aaacgagtctccgtcgccgtcctcg

SEQ ID NO: 3369650 - DNA, 25 bp, Homo sapien
ccaaacgagtctccgtcgccgtcct

SEQ ID NO: 3369651 - DNA, 25 bp, Homo sapien
ctgtccgagggtgtcgggagggcca

SEQ ID NO: 3369652 - DNA, 25 bp, Homo sapien
tgtccgagggtgtcgggagggccat

SEQ ID NO: 3369653 - DNA, 25 bp, Homo sapien
cttgactcagttttcaggcagaaac

SEQ ID NO: 3369654 - DNA, 25 bp, Homo sapien
tctgaggttctccagtaattctatg

SEQ ID NO: 3369655 - DNA, 25 bp, Homo sapien
tctccagtaattctatggaaactgg

SEQ ID NO: 3369656 - DNA, 25 bp, Homo sapien
aactggaagccgctgtcttgactca

SEQ ID NO: 3369657 - DNA, 25 bp, Homo sapien
agtgtggaactgagcttccgtgacg

SEQ ID NO: 3369658 - DNA, 25 bp, Homo sapien
tggaactgagcttccgtgacggtct

SEQ ID NO: 3369659 - DNA, 25 bp, Homo sapien
gcttccgtgacggtcttgagttttc

SEQ ID NO: 3369660 - DNA, 25 bp, Homo sapien
aactgagcttccgtgacggtcttga

SEQ ID NO: 3369661 - DNA, 25 bp, Homo sapien
ggaaacagccaacgtggtcgcgctt

SEQ ID NO: 3369662 - DNA, 25 bp, Homo sapien
gggagacacgcgagcaacaggtccc

SEQ ID NO: 3369663 - DNA, 25 bp, Homo sapien
aaggagcgtggaacccggaatcacg

SEQ ID NO: 3369664 - DNA, 25 bp, Homo sapien
ggaatcacggttcactcggcccgag

SEQ ID NO: 3369665 - DNA, 25 bp, Homo sapien
gtgggcgccccgcaagcagacgcgg

SEQ ID NO: 3369666 - DNA, 25 bp, Homo sapien
ccgggccggcgatccggagggctgg

SEQ ID NO: 3369667 - DNA, 25 bp, Homo sapien
cggctgtgggccgagctctcggcct

SEQ ID NO: 3369668 - DNA, 25 bp, Homo sapien
ccggcgatccggagggctggtgagc

SEQ ID NO: 3369669 - DNA, 25 bp, Homo sapien
cggaagtgacgataagacattctct

SEQ ID NO: 3369670 - DNA, 25 bp, Homo sapien
gataggatgacacggaagtgacgat

SEQ ID NO: 3369671 - DNA, 25 bp, Homo sapien
gatgacacggaagtgacgataagac

SEQ ID NO: 3369672 - DNA, 25 bp, Homo sapien
agggataggatgacacggaagtgac

SEQ ID NO: 3369673 - DNA, 25 bp, Homo sapien
agcttagcctcatctgatccactga

SEQ ID NO: 3369674 - DNA, 25 bp, Homo sapien
ggtggccatggaatacaaggtctgc

SEQ ID NO: 3369675 - DNA, 25 bp, Homo sapien
gaagacataagctgcctgggtggcc

SEQ ID NO: 3369676 - DNA, 25 bp, Homo sapien
gtctcagttatctcctgcccaggga

SEQ ID NO: 3369677 - DNA, 25 bp, Homo sapien
gggcttctctatccagggctgattc

SEQ ID NO: 3369678 - DNA, 25 bp, Homo sapien
gagtgagcagtgtcagctgctcaca

SEQ ID NO: 3369679 - DNA, 25 bp, Homo sapien
agccgagtgagcagtgtcagctgct

SEQ ID NO: 3369680 - DNA, 25 bp, Homo sapien
cccccggagccgagtgagcagtgtc

SEQ ID NO: 3369681 - DNA, 25 bp, Homo sapien
ccccggagccgagtgagcagtgtca

SEQ ID NO: 3369682 - DNA, 25 bp, Homo sapien
tttattcaatgacaagctgcactcc

SEQ ID NO: 3369683 - DNA, 25 bp, Homo sapien
tattcaatgacaagctgcactcctt

SEQ ID NO: 3369684 - DNA, 25 bp, Homo sapien
tcaatgacaagctgcactccttttc

SEQ ID NO: 3369685 - DNA, 25 bp, Homo sapien
tgacaagctgcactccttttctgga

SEQ ID NO: 3369686 - DNA, 25 bp, Homo sapien
tcctgcagttttcccgatatgagct

SEQ ID NO: 3369687 - DNA, 25 bp, Homo sapien
cagttttcccgatatgagctggact

SEQ ID NO: 3369688 - DNA, 25 bp, Homo sapien
tcccgatatgagctggactctggtt

SEQ ID NO: 3369689 - DNA, 25 bp, Homo sapien
tttcccgatatgagctggactctgg

SEQ ID NO: 3369690 - DNA, 25 bp, Homo sapien
gcagtgctgttcccggccttgagct

SEQ ID NO: 3369691 - DNA, 25 bp, Homo sapien
cagtgctgttcccggccttgagctt

SEQ ID NO: 3369692 - DNA, 25 bp, Homo sapien
ctgtaaaggagatctgttggaaagg

SEQ ID NO: 3369693 - DNA, 25 bp, Homo sapien
actgggtctccgacacgaccctctc

SEQ ID NO: 3369694 - DNA, 25 bp, Homo sapien
tccacactgaccttcgggtctgctg

SEQ ID NO: 3369695 - DNA, 25 bp, Homo sapien
gaatctccgggctcccacggggtgc

SEQ ID NO: 3369696 - DNA, 25 bp, Homo sapien
aacgctgggcagagacgaaggaacc

SEQ ID NO: 3369697 - DNA, 25 bp, Homo sapien
cgcagctcaactcgggaacggccgg

SEQ ID NO: 3369698 - DNA, 25 bp, Homo sapien
gcttggccgctgttcgcagctcaac

SEQ ID NO: 3369699 - DNA, 25 bp, Homo sapien
ggccggagcgcttctggcccctgga

SEQ ID NO: 3369700 - DNA, 25 bp, Homo sapien
tgttcgcagctcaactcgggaacgg

SEQ ID NO: 3369701 - DNA, 25 bp, Homo sapien
ccggattccaggcacgcagatccgg

SEQ ID NO: 3369702 - DNA, 25 bp, Homo sapien
ggattccaggcacgcagatccggca

SEQ ID NO: 3369703 - DNA, 25 bp, Homo sapien
gaaggcgcagtcgttccccggattc

SEQ ID NO: 3369704 - DNA, 25 bp, Homo sapien
ggcgcagtcgttccccggattccag

SEQ ID NO: 3369705 - DNA, 25 bp, Homo sapien
gctcttgccgcagccccgtcaggct

SEQ ID NO: 3369706 - DNA, 25 bp, Homo sapien
gtcaggctccgcgtttcggggcctc

SEQ ID NO: 3369707 - DNA, 25 bp, Homo sapien
cgcagccccgtcaggctccgcgttt

SEQ ID NO: 3369708 - DNA, 25 bp, Homo sapien
ctgctcttgccgcagccccgtcagg

SEQ ID NO: 3369709 - DNA, 25 bp, Homo sapien
aggacggctgctcagagcgacacga

SEQ ID NO: 3369710 - DNA, 25 bp, Homo sapien
tcagtaacgtactccgctgtgggag

SEQ ID NO: 3369711 - DNA, 25 bp, Homo sapien
cacgcagctggaagaactcagtaac

SEQ ID NO: 3369712 - DNA, 25 bp, Homo sapien
gaacgggagaagctatggcctcgcc

SEQ ID NO: 3369713 - DNA, 25 bp, Homo sapien
ctcagtagcttcaggttgcattttg

SEQ ID NO: 3369714 - DNA, 25 bp, Homo sapien
tactcagtagcttcaggttgcattt

SEQ ID NO: 3369715 - DNA, 25 bp, Homo sapien
ctaaatactcagtagcttcaggttg

SEQ ID NO: 3369716 - DNA, 25 bp, Homo sapien
aaatactcagtagcttcaggttgca

SEQ ID NO: 3369717 - DNA, 25 bp, Homo sapien
gcgccattgaaagtgacctttccaa

SEQ ID NO: 3369718 - DNA, 25 bp, Homo sapien
ggaaagttctcacgcagtttaggaa

SEQ ID NO: 3369719 - DNA, 25 bp, Homo sapien
gcagaagacgtactcctctggaaag

SEQ ID NO: 3369720 - DNA, 25 bp, Homo sapien
tcaaaaacggttgagtgcgtgctct

SEQ ID NO: 3369721 - DNA, 25 bp, Homo sapien
ggattatagctctgaagcttaccga

SEQ ID NO: 3369722 - DNA, 25 bp, Homo sapien
ggtgcacctctgtactcactctcct

SEQ ID NO: 3369723 - DNA, 25 bp, Homo sapien
aggatagggccaagcgggtgaggac

SEQ ID NO: 3369724 - DNA, 25 bp, Homo sapien
aacaggctgagagtaggtaacggac

SEQ ID NO: 3369725 - DNA, 25 bp, Homo sapien
aaaatggccaactgtcctctgcagg

SEQ ID NO: 3369726 - DNA, 25 bp, Homo sapien
tattccagggtaattgtgccctgac

SEQ ID NO: 3369727 - DNA, 25 bp, Homo sapien
cctgattttgtctgctagtttagac

SEQ ID NO: 3369728 - DNA, 25 bp, Homo sapien
cctgactgtgctgcatgtcagtctg

SEQ ID NO: 3369729 - DNA, 25 bp, Homo sapien
ggacaggaagccacccggggccata

SEQ ID NO: 3369730 - DNA, 25 bp, Homo sapien
gacaggaagccacccggggccatag

SEQ ID NO: 3369731 - DNA, 25 bp, Homo sapien
gaagccacccggggccatagggatc

SEQ ID NO: 3369732 - DNA, 25 bp, Homo sapien
ttcaaacacaagtagcatgaggtag

SEQ ID NO: 3369733 - DNA, 25 bp, Homo sapien
tttcaaacacaagtagcatgaggta

SEQ ID NO: 3369734 - DNA, 25 bp, Homo sapien
ctggagaagcagcacagggcaggca

SEQ ID NO: 3369735 - DNA, 25 bp, Homo sapien
ggagaagcagcacagggcaggcaca

SEQ ID NO: 3369736 - DNA, 25 bp, Homo sapien
gagaagcagcacagggcaggcacat

SEQ ID NO: 3369737 - DNA, 25 bp, Homo sapien
tggagaagcagcacagggcaggcac

SEQ ID NO: 3369738 - DNA, 25 bp, Homo sapien
tcagatcttcccggatagtattggg

SEQ ID NO: 3369739 - DNA, 25 bp, Homo sapien
tcactcccctgcttattagcactgc

SEQ ID NO: 3369740 - DNA, 25 bp, Homo sapien
ttcagatcttcccggatagtattgg

SEQ ID NO: 3369741 - DNA, 25 bp, Homo sapien
tcccctgcttattagcactgccttg

SEQ ID NO: 3369742 - DNA, 25 bp, Homo sapien
gggagcagtgctcagatgagcaggc

SEQ ID NO: 3369743 - DNA, 25 bp, Homo sapien
ggagcagtgctcagatgagcaggca

SEQ ID NO: 3369744 - DNA, 25 bp, Homo sapien
gagcagtgctcagatgagcaggcag

SEQ ID NO: 3369745 - DNA, 25 bp, Homo sapien
gatgttgtaaatcacctcctggctc

SEQ ID NO: 3369746 - DNA, 25 bp, Homo sapien
cccaggatgatctgttccactttgc

SEQ ID NO: 3369747 - DNA, 25 bp, Homo sapien
agtgaatgttgaagggcatagagct

SEQ ID NO: 3369748 - DNA, 25 bp, Homo sapien
catagagctgatggggctgactgcc

SEQ ID NO: 3369749 - DNA, 25 bp, Homo sapien
aggccggttattgcagagcagttcc

SEQ ID NO: 3369750 - DNA, 25 bp, Homo sapien
caggccggttattgcagagcagttc

SEQ ID NO: 3369751 - DNA, 25 bp, Homo sapien
ctgctcaggccggttattgcagagc

SEQ ID NO: 3369752 - DNA, 25 bp, Homo sapien
gctcaggccggttattgcagagcag

SEQ ID NO: 3369753 - DNA, 25 bp, Homo sapien
ctgctctgagatatctctttttgtt

SEQ ID NO: 3369754 - DNA, 25 bp, Homo sapien
tgagaggctgccctgaagtcaaaca

SEQ ID NO: 3369755 - DNA, 25 bp, Homo sapien
agtcaaacagaagcacgtgggcctc

SEQ ID NO: 3369756 - DNA, 25 bp, Homo sapien
cagcaaagagggagatgttcagcca

SEQ ID NO: 3369757 - DNA, 25 bp, Homo sapien
tcatgaatgggtggttctgggcccc

SEQ ID NO: 3369758 - DNA, 25 bp, Homo sapien
gtccatagacgcagaatgagtggca

SEQ ID NO: 3369759 - DNA, 25 bp, Homo sapien
tgtctgtccatagacgcagaatgag

SEQ ID NO: 3369760 - DNA, 25 bp, Homo sapien
tctgtccatagacgcagaatgagtg

SEQ ID NO: 3369761 - DNA, 25 bp, Homo sapien
ggttgtctgtccatagacgcagaat

SEQ ID NO: 3369762 - DNA, 25 bp, Homo sapien
ttcctctgttcaatcctggcgccaa

SEQ ID NO: 3369763 - DNA, 25 bp, Homo sapien
tttcctctgttcaatcctggcgcca

SEQ ID NO: 3369764 - DNA, 25 bp, Homo sapien
tggacatggaacatgtggatacagg

SEQ ID NO: 3369765 - DNA, 25 bp, Homo sapien
catggaacatgtggatacaggcttt

SEQ ID NO: 3369766 - DNA, 25 bp, Homo sapien
tcgtcttggacatggaacatgtgga

SEQ ID NO: 3369767 - DNA, 25 bp, Homo sapien
tcttggacatggaacatgtggatac

SEQ ID NO: 3369768 - DNA, 25 bp, Homo sapien
acaagcagagcgcagctccaatccc

SEQ ID NO: 3369769 - DNA, 25 bp, Homo sapien
ctgacaagcagagcgcagctccaat

SEQ ID NO: 3369770 - DNA, 25 bp, Homo sapien
aagcagagcgcagctccaatcccac

SEQ ID NO: 3369771 - DNA, 25 bp, Homo sapien
gcctgacaagcagagcgcagctcca

SEQ ID NO: 3369772 - DNA, 25 bp, Homo sapien
aagtggtccagcatgttgctgtcca

SEQ ID NO: 3369773 - DNA, 25 bp, Homo sapien
agaaagccccaacaactgatggcat

SEQ ID NO: 3369774 - DNA, 25 bp, Homo sapien
ggagaaagccccaacaactgatggc

SEQ ID NO: 3369775 - DNA, 25 bp, Homo sapien
gagaaagccccaacaactgatggca

SEQ ID NO: 3369776 - DNA, 25 bp, Homo sapien
tcctcggtggcctccgcacccgggc

SEQ ID NO: 3369777 - DNA, 25 bp, Homo sapien
gcgcgcggggatttcgcctacgccg

SEQ ID NO: 3369778 - DNA, 25 bp, Homo sapien
accccacgtgccctgcgcgcctggg

SEQ ID NO: 3369779 - DNA, 25 bp, Homo sapien
gcagatgcaaggcatcccggcgccc

SEQ ID NO: 3369780 - DNA, 25 bp, Homo sapien
gccttcgcccacaccggcgcgtggg

SEQ ID NO: 3369781 - DNA, 25 bp, Homo sapien
accccacgtgccctgcgcgcctggg

SEQ ID NO: 3369782 - DNA, 25 bp, Homo sapien
ctgctccctcgtgggtcgccttcgc

SEQ ID NO: 3369783 - DNA, 25 bp, Homo sapien
cagatgcaaggcatcccggcgccct

SEQ ID NO: 3369784 - DNA, 25 bp, Homo sapien
cagatgcaaggcatcccggcgccct

SEQ ID NO: 3369785 - DNA, 25 bp, Homo sapien
gccttcgcccacaccggcgcgtggg

SEQ ID NO: 3369786 - DNA, 25 bp, Homo sapien
accccacgtgccctgcgcgcctggg

SEQ ID NO: 3369787 - DNA, 25 bp, Homo sapien
ctgctccctcgtgggtcgccttcgc

SEQ ID NO: 3369788 - DNA, 25 bp, Homo sapien
tggcgagcccggagtttctgcagca

SEQ ID NO: 3369789 - DNA, 25 bp, Homo sapien
ctgctccctcgtgggtcgccttcgc

SEQ ID NO: 3369790 - DNA, 25 bp, Homo sapien
cagatgcaaggcatcccggcgccct

SEQ ID NO: 3369791 - DNA, 25 bp, Homo sapien
agctcctggcgagcccggagtttct

SEQ ID NO: 3369792 - DNA, 25 bp, Homo sapien
taagctgaggagattcttgacagga

SEQ ID NO: 3369793 - DNA, 25 bp, Homo sapien
aaaccaaggtaagctgaggagattc

SEQ ID NO: 3369794 - DNA, 25 bp, Homo sapien
gcagttccccaacgggacagcaggt

SEQ ID NO: 3369795 - DNA, 25 bp, Homo sapien
acccagctggggtgaatctccgcag

SEQ ID NO: 3369796 - DNA, 25 bp, Homo sapien
acaccatcatcattagtcttttcca

SEQ ID NO: 3369797 - DNA, 25 bp, Homo sapien
gacaccatcatcattagtcttttcc

SEQ ID NO: 3369798 - DNA, 25 bp, Homo sapien
accatcatcattagtcttttccacc

SEQ ID NO: 3369799 - DNA, 25 bp, Homo sapien
tcagacaccatcatcattagtcttt

SEQ ID NO: 3369800 - DNA, 25 bp, Homo sapien
gtgaggcaaaagcttcctgtctgct

SEQ ID NO: 3369801 - DNA, 25 bp, Homo sapien
gaaggtgaggcaaaagcttcctgtc

SEQ ID NO: 3369802 - DNA, 25 bp, Homo sapien
ctgggcagacgtggctgctggccat

SEQ ID NO: 3369803 - DNA, 25 bp, Homo sapien
aggaaggtgaggcaaaagcttcctg

SEQ ID NO: 3369804 - DNA, 25 bp, Homo sapien
agacaggggaaatgcttagagccac

SEQ ID NO: 3369805 - DNA, 25 bp, Homo sapien
ggaaatgcttagagccaccatcaga

SEQ ID NO: 3369806 - DNA, 25 bp, Homo sapien
gagccaccatcagaagagttgggat

SEQ ID NO: 3369807 - DNA, 25 bp, Homo sapien
ccaccatcagaagagttgggatgaa

SEQ ID NO: 3369808 - DNA, 25 bp, Homo sapien
tcacttcagggagttcaagggcttc

SEQ ID NO: 3369809 - DNA, 25 bp, Homo sapien
ccgctgagggtgatacaattgacat

SEQ ID NO: 3369810 - DNA, 25 bp, Homo sapien
tctgaaaaactgtctccgctgaggg

SEQ ID NO: 3369811 - DNA, 25 bp, Homo sapien
tatttcattagctgcactcgtgctg

SEQ ID NO: 3369812 - DNA, 25 bp, Homo sapien
cccagatggttgccaaaattcctga

SEQ ID NO: 3369813 - DNA, 25 bp, Homo sapien
tacccagatggttgccaaaattcct

SEQ ID NO: 3369814 - DNA, 25 bp, Homo sapien
ttacccagatggttgccaaaattcc

SEQ ID NO: 3369815 - DNA, 25 bp, Homo sapien
gttacccagatggttgccaaaattc

SEQ ID NO: 3369816 - DNA, 25 bp, Homo sapien
tatcactacagtgggttgccaagga

SEQ ID NO: 3369817 - DNA, 25 bp, Homo sapien
gagaagaaacacaccgcatatcaag

SEQ ID NO: 3369818 - DNA, 25 bp, Homo sapien
taaaacgcctgaagtctgaagtgca

SEQ ID NO: 3369819 - DNA, 25 bp, Homo sapien
tgcaaggtctggaaggatgctagct

SEQ ID NO: 3369820 - DNA, 25 bp, Homo sapien
ccggcaggcattcggcatttctgtg

SEQ ID NO: 3369821 - DNA, 25 bp, Homo sapien
caccggcaggcattcggcatttctg

SEQ ID NO: 3369822 - DNA, 25 bp, Homo sapien
ttcaccggcaggcattcggcatttc

SEQ ID NO: 3369823 - DNA, 25 bp, Homo sapien
atttcaccggcaggcattcggcatt

SEQ ID NO: 3369824 - DNA, 25 bp, Homo sapien
taaaacacagaacgagcctgaagga

SEQ ID NO: 3369825 - DNA, 25 bp, Homo sapien
gaggttgcgttcatgtaaaacacag

SEQ ID NO: 3369826 - DNA, 25 bp, Homo sapien
cacagaacgagcctgaaggaaacca

SEQ ID NO: 3369827 - DNA, 25 bp, Homo sapien
tgtaaaacacagaacgagcctgaag

SEQ ID NO: 3369828 - DNA, 25 bp, Homo sapien
caatctttatcagggatagtgcccc

SEQ ID NO: 3369829 - DNA, 25 bp, Homo sapien
ctctgtgacgacatgcaagtcttgc

SEQ ID NO: 3369830 - DNA, 25 bp, Homo sapien
catgtgatcgatgctgtaggaagcc

SEQ ID NO: 3369831 - DNA, 25 bp, Homo sapien
ccatcttgctcgtgggttaaagcca

SEQ ID NO: 3369832 - DNA, 25 bp, Homo sapien
gcaatctggctggtttccaagaccg

SEQ ID NO: 3369833 - DNA, 25 bp, Homo sapien
gaggtggctgaactgcccatatcca

SEQ ID NO: 3369834 - DNA, 25 bp, Homo sapien
tccaagaccgctctcaaaagagagt

SEQ ID NO: 3369835 - DNA, 25 bp, Homo sapien
cattgggatagtctcttgggtagct

SEQ ID NO: 3369836 - DNA, 25 bp, Homo sapien
ggctggagcagcatgtaaattgtca

SEQ ID NO: 3369837 - DNA, 25 bp, Homo sapien
gcagatttggcaaaccagctgtctt

SEQ ID NO: 3369838 - DNA, 25 bp, Homo sapien
gagccagttgtacagccaaatgtgc

SEQ ID NO: 3369839 - DNA, 25 bp, Homo sapien
aatattgctagcctgaagctaccaa

SEQ ID NO: 3369840 - DNA, 25 bp, Homo sapien
tatgagaacttaatgcttcagctgt

SEQ ID NO: 3369841 - DNA, 25 bp, Homo sapien
cttcagctgttagtatggccacaca

SEQ ID NO: 3369842 - DNA, 25 bp, Homo sapien
aggcatccacggtgcttcgcacggg

SEQ ID NO: 3369843 - DNA, 25 bp, Homo sapien
caaactcgttctggcaaggcatcca

SEQ ID NO: 3369844 - DNA, 25 bp, Homo sapien
actgcagaagccctgtcagatctaa

SEQ ID NO: 3369845 - DNA, 25 bp, Homo sapien
cctgtcagatctaaagccaatttca

SEQ ID NO: 3369846 - DNA, 25 bp, Homo sapien
ggactagcagtaatgtgaaactgca

SEQ ID NO: 3369847 - DNA, 25 bp, Homo sapien
cattttctctattggactagcagta

SEQ ID NO: 3369848 - DNA, 25 bp, Homo sapien
cacacaggtcgccaatctgcttttc

SEQ ID NO: 3369849 - DNA, 25 bp, Homo sapien
gatggtttcactcggttcatgttgc

SEQ ID NO: 3369850 - DNA, 25 bp, Homo sapien
ctccccgatggtttcactcggttca

SEQ ID NO: 3369851 - DNA, 25 bp, Homo sapien
ttcactcggttcatgttgcacacac

SEQ ID NO: 3369852 - DNA, 25 bp, Homo sapien
cagggtccggtaagctctgggcgga

SEQ ID NO: 3369853 - DNA, 25 bp, Homo sapien
tgggcggatccagggagggtctcgc

SEQ ID NO: 3369854 - DNA, 25 bp, Homo sapien
aaggctggagccgttctggctggca

SEQ ID NO: 3369855 - DNA, 25 bp, Homo sapien
cgctggctctctggccgcgggaagg

SEQ ID NO: 3369856 - DNA, 25 bp, Homo sapien
ccacccgagagagggcggagatcta

SEQ ID NO: 3369857 - DNA, 25 bp, Homo sapien
gcttcctttccataacgagtggacc

SEQ ID NO: 3369858 - DNA, 25 bp, Homo sapien
gtgtgctccgtcgactgaccccgag

SEQ ID NO: 3369859 - DNA, 25 bp, Homo sapien
cagcgccggcacgagagatgccagc

SEQ ID NO: 3369860 - DNA, 25 bp, Homo sapien
tctctgggttttcgtgctccccaac

SEQ ID NO: 3369861 - DNA, 25 bp, Homo sapien
ggtccatggattccccgctccaggc

SEQ ID NO: 3369862 - DNA, 25 bp, Homo sapien
caggctggcggcattttcggaaccc

SEQ ID NO: 3369863 - DNA, 25 bp, Homo sapien
cccacaaccccacggtccatggatt

SEQ ID NO: 3369864 - DNA, 25 bp, Homo sapien
aattaatcactttctccgtgctgcc

SEQ ID NO: 3369865 - DNA, 25 bp, Homo sapien
cagcgagcccggagagtgggaacgg

SEQ ID NO: 3369866 - DNA, 25 bp, Homo sapien
gagacactgtggctcgcagcgagcc

SEQ ID NO: 3369867 - DNA, 25 bp, Homo sapien
agaggaagaagggaccatccgcgac

SEQ ID NO: 3369868 - DNA, 25 bp, Homo sapien
ctgcaaggcagagcttcgtaggagt

SEQ ID NO: 3369869 - DNA, 25 bp, Homo sapien
tcatcggcagttgatcagtttctct

SEQ ID NO: 3369870 - DNA, 25 bp, Homo sapien
tcggcagttgatcagtttctctctt

SEQ ID NO: 3369871 - DNA, 25 bp, Homo sapien
tgcaaggcagagcttcgtaggagtt

SEQ ID NO: 3369872 - DNA, 25 bp, Homo sapien
tgggatagctgcagaattacctcca

SEQ ID NO: 3369873 - DNA, 25 bp, Homo sapien
gagttagttgtgaaccccaccctca

SEQ ID NO: 3369874 - DNA, 25 bp, Homo sapien
taatacttttggacatgggatagct

SEQ ID NO: 3369875 - DNA, 25 bp, Homo sapien
ccaaaacggatactggaatgcaatc

SEQ ID NO: 3369876 - DNA, 25 bp, Homo sapien
cacctagcatgtagtcaagaaatag

SEQ ID NO: 3369877 - DNA, 25 bp, Homo sapien
tggctttcgcatatccgtctcctga

SEQ ID NO: 3369878 - DNA, 25 bp, Homo sapien
tccttgatacattccggagtcacta

SEQ ID NO: 3369879 - DNA, 25 bp, Homo sapien
tacacacatctatggagtacatcat

SEQ ID NO: 3369880 - DNA, 25 bp, Homo sapien
actactgtcaaagatagtataccga

SEQ ID NO: 3369881 - DNA, 25 bp, Homo sapien
tgtcaaagatagtataccgaaagaa

SEQ ID NO: 3369882 - DNA, 25 bp, Homo sapien
caaagatagtataccgaaagaaatc

SEQ ID NO: 3369883 - DNA, 25 bp, Homo sapien
actgtcaaagatagtataccgaaag

SEQ ID NO: 3369884 - DNA, 25 bp, Homo sapien
cttctggaggtgctagtcctctgtt

SEQ ID NO: 3369885 - DNA, 25 bp, Homo sapien
tctggaggtgctagtcctctgtttc

SEQ ID NO: 3369886 - DNA, 25 bp, Homo sapien
ctcttctggaggtgctagtcctctg

SEQ ID NO: 3369887 - DNA, 25 bp, Homo sapien
ctggaggtgctagtcctctgtttcc

SEQ ID NO: 3369888 - DNA, 25 bp, Homo sapien
ccagctatagccaattcatcacagt

SEQ ID NO: 3369889 - DNA, 25 bp, Homo sapien
gacaaagctcctgggaaaccagcta

SEQ ID NO: 3369890 - DNA, 25 bp, Homo sapien
tagaatatcaagcaggcggagcagg

SEQ ID NO: 3369891 - DNA, 25 bp, Homo sapien
tccagcatgtagcacaaaacaggtc

SEQ ID NO: 3369892 - DNA, 25 bp, Homo sapien
gggccatgggattcacacagaggaa

SEQ ID NO: 3369893 - DNA, 25 bp, Homo sapien
gcactacattatttaagaggctggg

SEQ ID NO: 3369894 - DNA, 25 bp, Homo sapien
gaaacattagaaatctttagtgtgg

SEQ ID NO: 3369895 - DNA, 25 bp, Homo sapien
gaaataaaatgttaagggccacaga

SEQ ID NO: 3369896 - DNA, 25 bp, Homo sapien
tttggccttattccaaaagctgttg

SEQ ID NO: 3369897 - DNA, 25 bp, Homo sapien
gattgcaatgcctccggagagaacc

SEQ ID NO: 3369898 - DNA, 25 bp, Homo sapien
aacagattgcaatgcctccggagag

SEQ ID NO: 3369899 - DNA, 25 bp, Homo sapien
aagctgttgccaagtagttagaaac

SEQ ID NO: 3369900 - DNA, 25 bp, Homo sapien
gattatggtttgcagtttacagcac

SEQ ID NO: 3369901 - DNA, 25 bp, Homo sapien
tattaagacaggattatggtttgca

SEQ ID NO: 3369902 - DNA, 25 bp, Homo sapien
taagttccccttagttccactatga

SEQ ID NO: 3369903 - DNA, 25 bp, Homo sapien
gtttgcagtattaagacaggattat

SEQ ID NO: 3369904 - DNA, 25 bp, Homo sapien
ttacaaagcgtctaatatgccccag

SEQ ID NO: 3369905 - DNA, 25 bp, Homo sapien
taagtaccatcaagcagtctcggca

SEQ ID NO: 3369906 - DNA, 25 bp, Homo sapien
agtctcggcacattacccaaggtga

SEQ ID NO: 3369907 - DNA, 25 bp, Homo sapien
gccaagccctggtgtaactaagcat

SEQ ID NO: 3369908 - DNA, 25 bp, Homo sapien
ctgagttagagtatctgtccaggga

SEQ ID NO: 3369909 - DNA, 25 bp, Homo sapien
tgggctccatccactgagttagagt

SEQ ID NO: 3369910 - DNA, 25 bp, Homo sapien
tccatccactgagttagagtatctg

SEQ ID NO: 3369911 - DNA, 25 bp, Homo sapien
tagagtatctgtccagggatcctta

SEQ ID NO: 3369912 - DNA, 25 bp, Homo sapien
gacatctgaggtcttgttgcctgaa

SEQ ID NO: 3369913 - DNA, 25 bp, Homo sapien
ttgaggctcctacaaacatgactcc

SEQ ID NO: 3369914 - DNA, 25 bp, Homo sapien
cccaagagtggttgaagtgaaggac

SEQ ID NO: 3369915 - DNA, 25 bp, Homo sapien
tccaagcttggacttgaaagcccca

SEQ ID NO: 3369916 - DNA, 25 bp, Homo sapien
gtagatctgggcttaaatatactca

SEQ ID NO: 3369917 - DNA, 25 bp, Homo sapien
ctgtgtagatctgggcttaaatata

SEQ ID NO: 3369918 - DNA, 25 bp, Homo sapien
agatctgggcttaaatatactcaag

SEQ ID NO: 3369919 - DNA, 25 bp, Homo sapien
gtgtagatctgggcttaaatatact

SEQ ID NO: 3369920 - DNA, 25 bp, Homo sapien
tagatctgggcttaaacgtgtgaat

SEQ ID NO: 3369921 - DNA, 25 bp, Homo sapien
gatctgggcttaaacgtgtgaatcc

SEQ ID NO: 3369922 - DNA, 25 bp, Homo sapien
gaatcctgccctgtgagtactgtgt

SEQ ID NO: 3369923 - DNA, 25 bp, Homo sapien
tgtgtagatctaggcttaaacgtgt

SEQ ID NO: 3369924 - DNA, 25 bp, Homo sapien
ccctgttgtcttatacctctcctga

SEQ ID NO: 3369925 - DNA, 25 bp, Homo sapien
acaatcctgtttttcagtgtaccag

SEQ ID NO: 3369926 - DNA, 25 bp, Homo sapien
tctgacaagactagttctgctttgg

SEQ ID NO: 3369927 - DNA, 25 bp, Homo sapien
ctgatacctcatcccttagcattta

SEQ ID NO: 3369928 - DNA, 25 bp, Homo sapien
ttgctaaatcaccagcagtctcggg

SEQ ID NO: 3369929 - DNA, 25 bp, Homo sapien
taaacaaggtcattaggaagctgtc

SEQ ID NO: 3369930 - DNA, 25 bp, Homo sapien
gccttgcctgcgatggagcttcagt

SEQ ID NO: 3369931 - DNA, 25 bp, Homo sapien
aattagctcttacaactggcaagga

SEQ ID NO: 3369932 - DNA, 25 bp, Homo sapien
tgtatcgctttccttgttaaagaaa

SEQ ID NO: 3369933 - DNA, 25 bp, Homo sapien
gaaatgtctccatttgtcgctcgct

SEQ ID NO: 3369934 - DNA, 25 bp, Homo sapien
tccatttgtcgctcgctggtgcatc

SEQ ID NO: 3369935 - DNA, 25 bp, Homo sapien
cttcccatgtagaaattgtatcgct

SEQ ID NO: 3369936 - DNA, 25 bp, Homo sapien
gaaaggagtcagtttgctcataatt

SEQ ID NO: 3369937 - DNA, 25 bp, Homo sapien
taaatctaagtaagaacatgatgcc

SEQ ID NO: 3369938 - DNA, 25 bp, Homo sapien
cagaccttcaaaatgagtccccagc

SEQ ID NO: 3369939 - DNA, 25 bp, Homo sapien
catgatgcctgttgtgcagccagac

SEQ ID NO: 3369940 - DNA, 25 bp, Homo sapien
gcacaggtctcaggtacttccacct

SEQ ID NO: 3369941 - DNA, 25 bp, Homo sapien
actgggtcaggttctgcacaggtct

SEQ ID NO: 3369942 - DNA, 25 bp, Homo sapien
tgggtcaggttctgcacaggtctca

SEQ ID NO: 3369943 - DNA, 25 bp, Homo sapien
ctgggtcaggttctgcacaggtctc

SEQ ID NO: 3369944 - DNA, 25 bp, Homo sapien
tattggtaacgtgtcagcctacagc

SEQ ID NO: 3369945 - DNA, 25 bp, Homo sapien
tagtaagctacatgcgtccaccaga

SEQ ID NO: 3369946 - DNA, 25 bp, Homo sapien
gataatgagccacactgcgactaag

SEQ ID NO: 3369947 - DNA, 25 bp, Homo sapien
tagaatatccctaacccacaggctg

SEQ ID NO: 3369948 - DNA, 25 bp, Homo sapien
aatcactagttcttatcacacagga

SEQ ID NO: 3369949 - DNA, 25 bp, Homo sapien
gaacaatcactagttcttatcacac

SEQ ID NO: 3369950 - DNA, 25 bp, Homo sapien
cactagttcttatcacacaggatat

SEQ ID NO: 3369951 - DNA, 25 bp, Homo sapien
ttcagtgaacaatcactagttctta

SEQ ID NO: 3369952 - DNA, 25 bp, Homo sapien
cttttaaatgtatcaggccaggatt

SEQ ID NO: 3369953 - DNA, 25 bp, Homo sapien
ttttaaatgtatcaggccaggattt

SEQ ID NO: 3369954 - DNA, 25 bp, Homo sapien
tctccttgatcacccttcgcattgt

SEQ ID NO: 3369955 - DNA, 25 bp, Homo sapien
ttgatcacccttcgcattgtcattt

SEQ ID NO: 3369956 - DNA, 25 bp, Homo sapien
gatcacccttcgcattgtcatttga

SEQ ID NO: 3369957 - DNA, 25 bp, Homo sapien
tccttgatcacccttcgcattgtca

SEQ ID NO: 3369958 - DNA, 25 bp, Homo sapien
caatggtaagaatctgcagcacccc

SEQ ID NO: 3369959 - DNA, 25 bp, Homo sapien
aaagggaaccaatggtaagaatctg

SEQ ID NO: 3369960 - DNA, 25 bp, Homo sapien
cagcattttcctagatcaacatcca

SEQ ID NO: 3369961 - DNA, 25 bp, Homo sapien
ttccagcattttcctagatcaacat

SEQ ID NO: 3369962 - DNA, 25 bp, Homo sapien
actctcacaaagtcatcagaaccca

SEQ ID NO: 3369963 - DNA, 25 bp, Homo sapien
tgccattgaatgtgctttcccattc

SEQ ID NO: 3369964 - DNA, 25 bp, Homo sapien
ttcttgccattgaatgtgctttccc

SEQ ID NO: 3369965 - DNA, 25 bp, Homo sapien
cacaaagtcatcagaacccaaatcc

SEQ ID NO: 3369966 - DNA, 25 bp, Homo sapien
cagttccagcagggcgagcttctgt

SEQ ID NO: 3369967 - DNA, 25 bp, Homo sapien
caaacagcagtcttctggaggagca

SEQ ID NO: 3369968 - DNA, 25 bp, Homo sapien
cagcagggcgagcttctgtcgtgca

SEQ ID NO: 3369969 - DNA, 25 bp, Homo sapien
aggaaaatgaatgccgcaaacagca

SEQ ID NO: 3369970 - DNA, 25 bp, Homo sapien
caacagcagtgcgagctccactgtg

SEQ ID NO: 3369971 - DNA, 25 bp, Homo sapien
gctccactgtgcaccgtccgggcca

SEQ ID NO: 3369972 - DNA, 25 bp, Homo sapien
ttggcaacagcagtgcgagctccac

SEQ ID NO: 3369973 - DNA, 25 bp, Homo sapien
actgtgcaccgtccgggccacaaga

SEQ ID NO: 3369974 - DNA, 25 bp, Homo sapien
tggctgggagtgttgcactcgcaaa

SEQ ID NO: 3369975 - DNA, 25 bp, Homo sapien
tctgaggctggacccgggaacttct

SEQ ID NO: 3369976 - DNA, 25 bp, Homo sapien
gctgccacaagaagcgggagtctga

SEQ ID NO: 3369977 - DNA, 25 bp, Homo sapien
gaggccgtgggaaatactgggctct

SEQ ID NO: 3369978 - DNA, 25 bp, Homo sapien
atcttaatgtctcctctcacttttg

SEQ ID NO: 3369979 - DNA, 25 bp, Homo sapien
cctctcacttttggtttacagctga

SEQ ID NO: 3369980 - DNA, 25 bp, Homo sapien
acagctgagaccttagttaacctgg

SEQ ID NO: 3369981 - DNA, 25 bp, Homo sapien
tcaggaagaagacaacccggtaaga

SEQ ID NO: 3369982 - DNA, 25 bp, Homo sapien
gaagatggtatttcaattgcttttg

SEQ ID NO: 3369983 - DNA, 25 bp, Homo sapien
ctcttccaagtaaaagcggctccat

SEQ ID NO: 3369984 - DNA, 25 bp, Homo sapien
gaggaacattagatatacgattagt

SEQ ID NO: 3369985 - DNA, 25 bp, Homo sapien
gatatacgattagtcctcttccaag

SEQ ID NO: 3369986 - DNA, 25 bp, Homo sapien
ggacttttgactgttttatgattgt

SEQ ID NO: 3369987 - DNA, 25 bp, Homo sapien
cttggacttttgactgttttatgat

SEQ ID NO: 3369988 - DNA, 25 bp, Homo sapien
ctggatttcctttagcttcacattc

SEQ ID NO: 3369989 - DNA, 25 bp, Homo sapien
tttgaaaatactcatcgaagggaaa

SEQ ID NO: 3369990 - DNA, 25 bp, Homo sapien
gatatgtgcccctcgtttgggatcc

SEQ ID NO: 3369991 - DNA, 25 bp, Homo sapien
tgaagcaaagcagcggtatttccct

SEQ ID NO: 3369992 - DNA, 25 bp, Homo sapien
gggttgccatccttagtccacgaaa

SEQ ID NO: 3369993 - DNA, 25 bp, Homo sapien
tttcttctgacatagcgattcccag

SEQ ID NO: 3369994 - DNA, 25 bp, Homo sapien
cattggaacccaatctaactcctat

SEQ ID NO: 3369995 - DNA, 25 bp, Homo sapien
tatttcattggaacccaatctaact

SEQ ID NO: 3369996 - DNA, 25 bp, Homo sapien
tggaacccaatctaactcctattta

SEQ ID NO: 3369997 - DNA, 25 bp, Homo sapien
aatctaactcctatttaacacttca

SEQ ID NO: 3369998 - DNA, 25 bp, Homo sapien
gcagaacatcccattaatccactta

SEQ ID NO: 3369999 - DNA, 25 bp, Homo sapien
gaacatcccattaatccacttagga

SEQ ID NO: 3370000 - DNA, 25 bp, Homo sapien
cagaacatcccattaatccacttag

SEQ ID NO: 3370001 - DNA, 25 bp, Homo sapien
agaacatcccattaatccacttagg

SEQ ID NO: 3370002 - DNA, 25 bp, Homo sapien
attctctatctctcgctttattggg

SEQ ID NO: 3370003 - DNA, 25 bp, Homo sapien
tgattggcaaatattccagccagtg

SEQ ID NO: 3370004 - DNA, 25 bp, Homo sapien
ttctctatctctcgctttattggga

SEQ ID NO: 3370005 - DNA, 25 bp, Homo sapien
tctgagcagagatataaacccagag

SEQ ID NO: 3370006 - DNA, 25 bp, Homo sapien
agtcacaggattttcttgctttagc

SEQ ID NO: 3370007 - DNA, 25 bp, Homo sapien
tctctgagcagagatataaacccag

SEQ ID NO: 3370008 - DNA, 25 bp, Homo sapien
ctgagcagagatataaacccagagt

SEQ ID NO: 3370009 - DNA, 25 bp, Homo sapien
caataaatgtgtaaaggtgggaggc

SEQ ID NO: 3370010 - DNA, 25 bp, Homo sapien
ctcctccacttcaagagggtcaatt

SEQ ID NO: 3370011 - DNA, 25 bp, Homo sapien
tcctccacttcaagagggtcaattt

SEQ ID NO: 3370012 - DNA, 25 bp, Homo sapien
tattcatccaataaatgtgtaaagg

SEQ ID NO: 3370013 - DNA, 25 bp, Homo sapien
gccattgaaaagggcaattgtccct

SEQ ID NO: 3370014 - DNA, 25 bp, Homo sapien
ggcattttctgtacaatagtcctta

SEQ ID NO: 3370015 - DNA, 25 bp, Homo sapien
aactgttagtttcattggcattttc

SEQ ID NO: 3370016 - DNA, 25 bp, Homo sapien
gcaacagtagtcattgcgactgtcc

SEQ ID NO: 3370017 - DNA, 25 bp, Homo sapien
cacgtttgcgaagtatagatctccc

SEQ ID NO: 3370018 - DNA, 25 bp, Homo sapien
gaacttgagtcattagcatgcttta

SEQ ID NO: 3370019 - DNA, 25 bp, Homo sapien
ttctgtggatgaacttgagtcatta

SEQ ID NO: 3370020 - DNA, 25 bp, Homo sapien
ctgtggatgaacttgagtcattagc

SEQ ID NO: 3370021 - DNA, 25 bp, Homo sapien
gatgaacttgagtcattagcatgct

SEQ ID NO: 3370022 - DNA, 25 bp, Homo sapien
attttccatagaacacaagttctgg

SEQ ID NO: 3370023 - DNA, 25 bp, Homo sapien
tcttctcattatagagaactagcct

SEQ ID NO: 3370024 - DNA, 25 bp, Homo sapien
gaactagcctgctatacaactcaga

SEQ ID NO: 3370025 - DNA, 25 bp, Homo sapien
catagaacacaagttctggtagacg

SEQ ID NO: 3370026 - DNA, 25 bp, Homo sapien
aagactcactgccactctcagtggg

SEQ ID NO: 3370027 - DNA, 25 bp, Homo sapien
gaggcaacagcagtttgggttttct

SEQ ID NO: 3370028 - DNA, 25 bp, Homo sapien
agcagcaagatttcccctttgagga

SEQ ID NO: 3370029 - DNA, 25 bp, Homo sapien
tgaggatggtaattgaagactcact

SEQ ID NO: 3370030 - DNA, 25 bp, Homo sapien
tccactaactagagtccccaaagcc

SEQ ID NO: 3370031 - DNA, 25 bp, Homo sapien
ccagtcgttcagaatgtactctaaa

SEQ ID NO: 3370032 - DNA, 25 bp, Homo sapien
ttctaaaccagtcgttcagaatgta

SEQ ID NO: 3370033 - DNA, 25 bp, Homo sapien
cagaatgtactctaaattatgaatg

SEQ ID NO: 3370034 - DNA, 25 bp, Homo sapien
tctactataacgtgaaaatcgtgag

SEQ ID NO: 3370035 - DNA, 25 bp, Homo sapien
aaaatcgtgagtggctgttcccaag

SEQ ID NO: 3370036 - DNA, 25 bp, Homo sapien
tgttccaatcaacctgtggagttgg

SEQ ID NO: 3370037 - DNA, 25 bp, Homo sapien
gctggctgtgcagcgataatttcct

SEQ ID NO: 3370038 - DNA, 25 bp, Homo sapien
ctatgtcaaaaagtccaaaaatgtt

SEQ ID NO: 3370039 - DNA, 25 bp, Homo sapien
agtccaaaaatgttaaggcctgtat

SEQ ID NO: 3370040 - DNA, 25 bp, Homo sapien
tatgtcaaaaagtccaaaaatgtta

SEQ ID NO: 3370041 - DNA, 25 bp, Homo sapien
ctggatgtaaagtgaagagctcatg

SEQ ID NO: 3370042 - DNA, 25 bp, Homo sapien
gtgaagagctcatgagagatgttat

SEQ ID NO: 3370043 - DNA, 25 bp, Homo sapien
ggatgtaaagtgaagagctcatgag

SEQ ID NO: 3370044 - DNA, 25 bp, Homo sapien
taaagtgaagagctcatgagagatg

SEQ ID NO: 3370045 - DNA, 25 bp, Homo sapien
tccttcagcctcacataacaagatg

SEQ ID NO: 3370046 - DNA, 25 bp, Homo sapien
gagccattgactctccacttgattg

SEQ ID NO: 3370047 - DNA, 25 bp, Homo sapien
cattgcttccggtgctatacacagc

SEQ ID NO: 3370048 - DNA, 25 bp, Homo sapien
tgaggcttctttgtccagcgaggag

SEQ ID NO: 3370049 - DNA, 25 bp, Homo sapien
catttgaggcttcacactggtacac

SEQ ID NO: 3370050 - DNA, 25 bp, Homo sapien
tggggaagacaacatcaccagcaaa

SEQ ID NO: 3370051 - DNA, 25 bp, Homo sapien
ggatagttccatggacatttgaggc

SEQ ID NO: 3370052 - DNA, 25 bp, Homo sapien
tattggcattggcaaggatagttcc

SEQ ID NO: 3370053 - DNA, 25 bp, Homo sapien
gaactcgcaatgtaagaaagcactg

SEQ ID NO: 3370054 - DNA, 25 bp, Homo sapien
cctcaggtgaagcaaagaactcgca

SEQ ID NO: 3370055 - DNA, 25 bp, Homo sapien
ctttggtttgtatcaatggacggac

SEQ ID NO: 3370056 - DNA, 25 bp, Homo sapien
gaaagcactgtacccaaccactgta

SEQ ID NO: 3370057 - DNA, 25 bp, Homo sapien
acagggtgccaaacatctcagtaag

SEQ ID NO: 3370058 - DNA, 25 bp, Homo sapien
taatgtctttggacttatgatacca

SEQ ID NO: 3370059 - DNA, 25 bp, Homo sapien
tgtaggatcatacaggacagggact

SEQ ID NO: 3370060 - DNA, 25 bp, Homo sapien
ggcttgccccagatgcaaaatttaa

SEQ ID NO: 3370061 - DNA, 25 bp, Homo sapien
ctatggacaaagaaagcgtacatcc

SEQ ID NO: 3370062 - DNA, 25 bp, Homo sapien
tatggacaaagaaagcgtacatcca

SEQ ID NO: 3370063 - DNA, 25 bp, Homo sapien
atggacaaagaaagcgtacatccat

SEQ ID NO: 3370064 - DNA, 25 bp, Homo sapien
aaattggctgtgactgcagtttttc

SEQ ID NO: 3370065 - DNA, 25 bp, Homo sapien
tctaatatccaaattggctgtgact

SEQ ID NO: 3370066 - DNA, 25 bp, Homo sapien
tcatagatatgataccgcctgccct

SEQ ID NO: 3370067 - DNA, 25 bp, Homo sapien
ttttcatagatatgataccgcctgc

SEQ ID NO: 3370068 - DNA, 25 bp, Homo sapien
cccatgtgacaattcatgcaaagta

SEQ ID NO: 3370069 - DNA, 25 bp, Homo sapien
caattcatgcaaagtaacagtgaaa

SEQ ID NO: 3370070 - DNA, 25 bp, Homo sapien
ctggtactccaacttaaatggtatt

SEQ ID NO: 3370071 - DNA, 25 bp, Homo sapien
gaacccatgtgacaattcatgcaaa

SEQ ID NO: 3370072 - DNA, 25 bp, Homo sapien
taggagaaactctaagttttgtagc

SEQ ID NO: 3370073 - DNA, 25 bp, Homo sapien
gggatacgaggattcttaggagaaa

SEQ ID NO: 3370074 - DNA, 25 bp, Homo sapien
tgtaattcaagcatatgcaatttgg

SEQ ID NO: 3370075 - DNA, 25 bp, Homo sapien
tactccaggacaacttcaaactgtg

SEQ ID NO: 3370076 - DNA, 25 bp, Homo sapien
cagcaaacatgtgggagaagaacaa

SEQ ID NO: 3370077 - DNA, 25 bp, Homo sapien
taaagacatgaaaccgataccaagg

SEQ ID NO: 3370078 - DNA, 25 bp, Homo sapien
agaggtgaatcacacataccaggga

SEQ ID NO: 3370079 - DNA, 25 bp, Homo sapien
aaccgataccaaggcccatcagtgg

SEQ ID NO: 3370080 - DNA, 25 bp, Homo sapien
cgagctcctggtggaggggcggcca

SEQ ID NO: 3370081 - DNA, 25 bp, Homo sapien
gagctcctggtggaggggcggccag

SEQ ID NO: 3370082 - DNA, 25 bp, Homo sapien
gggcggccagccccacagctgcagc

SEQ ID NO: 3370083 - DNA, 25 bp, Homo sapien
gccagccccacagctgcagctgcct

SEQ ID NO: 3370084 - DNA, 25 bp, Homo sapien
gcagtaaataccttggtcctctaaa

SEQ ID NO: 3370085 - DNA, 25 bp, Homo sapien
gagttatatcggcagcactgtctag

SEQ ID NO: 3370086 - DNA, 25 bp, Homo sapien
tagagcagtatgagctgaacagcag

SEQ ID NO: 3370087 - DNA, 25 bp, Homo sapien
cattagatatggtcaaattagctcc

SEQ ID NO: 3370088 - DNA, 25 bp, Homo sapien
cccaggtcagccgaacactcctgtt

SEQ ID NO: 3370089 - DNA, 25 bp, Homo sapien
ggtcagccgaacactcctgttctgt

SEQ ID NO: 3370090 - DNA, 25 bp, Homo sapien
tgtctttcagacaagtgaaggtttt

SEQ ID NO: 3370091 - DNA, 25 bp, Homo sapien
aggttttctggtggatccggaacat

SEQ ID NO: 3370092 - DNA, 25 bp, Homo sapien
caaatggagccaaaggtaagataac

SEQ ID NO: 3370093 - DNA, 25 bp, Homo sapien
tctcacaaatggagccaaaggtaag

SEQ ID NO: 3370094 - DNA, 25 bp, Homo sapien
ctggtatctcacaaatggagccaaa

SEQ ID NO: 3370095 - DNA, 25 bp, Homo sapien
ggtatctcacaaatggagccaaagg

SEQ ID NO: 3370096 - DNA, 25 bp, Homo sapien
tgacggctggctaggctgacttctc

SEQ ID NO: 3370097 - DNA, 25 bp, Homo sapien
tggtgtttcatgatggtctgacggc

SEQ ID NO: 3370098 - DNA, 25 bp, Homo sapien
tcatgatggtctgacggctggctag

SEQ ID NO: 3370099 - DNA, 25 bp, Homo sapien
gctggtggtgtttcatgatggtctg

SEQ ID NO: 3370100 - DNA, 25 bp, Homo sapien
acccttatgttttgtggattcctat

SEQ ID NO: 3370101 - DNA, 25 bp, Homo sapien
ggttgagaggcttgaacccttatgt

SEQ ID NO: 3370102 - DNA, 25 bp, Homo sapien
ttccttgggttgagaggcttgaacc

SEQ ID NO: 3370103 - DNA, 25 bp, Homo sapien
ggcttgaacccttatgttttgtgga

SEQ ID NO: 3370104 - DNA, 25 bp, Homo sapien
tcatacataaatcctagctttgcgg

SEQ ID NO: 3370105 - DNA, 25 bp, Homo sapien
aaaattatctgggtagatgggcatt

SEQ ID NO: 3370106 - DNA, 25 bp, Homo sapien
ctagaataaggcgttcatgatgctt

SEQ ID NO: 3370107 - DNA, 25 bp, Homo sapien
catttaaccgagatatgtaaaggag

SEQ ID NO: 3370108 - DNA, 25 bp, Homo sapien
gaacatgatgtgcttctctgaggaa

SEQ ID NO: 3370109 - DNA, 25 bp, Homo sapien
tcaagataataggagacaccatggg

SEQ ID NO: 3370110 - DNA, 25 bp, Homo sapien
tctgattgtgaaactgggaaaaacc

SEQ ID NO: 3370111 - DNA, 25 bp, Homo sapien
gagtctaactcctttccgcaggatg

SEQ ID NO: 3370112 - DNA, 25 bp, Homo sapien
taggagttaactatcttggatgcga

SEQ ID NO: 3370113 - DNA, 25 bp, Homo sapien
cctagtctctcaacaattttcaaga

SEQ ID NO: 3370114 - DNA, 25 bp, Homo sapien
tataaccaggtaattaaagatgttc

SEQ ID NO: 3370115 - DNA, 25 bp, Homo sapien
aagccagtaggtcttcttattatac

SEQ ID NO: 3370116 - DNA, 25 bp, Homo sapien
ataatgtggtttaaactgcctgttt

SEQ ID NO: 3370117 - DNA, 25 bp, Homo sapien
tctagtatgggaaattgtttatttc

SEQ ID NO: 3370118 - DNA, 25 bp, Homo sapien
ctgcctgtttagctttcaaagataa

SEQ ID NO: 3370119 - DNA, 25 bp, Homo sapien
atgtggtttaaactgcctgtttagc

SEQ ID NO: 3370120 - DNA, 25 bp, Homo sapien
aataatatggccacgaattctttgg

SEQ ID NO: 3370121 - DNA, 25 bp, Homo sapien
gaaaaagttttgtcatcatatgagc

SEQ ID NO: 3370122 - DNA, 25 bp, Homo sapien
aatcagatgcctggattatgtcctc

SEQ ID NO: 3370123 - DNA, 25 bp, Homo sapien
taacgagaagcctacaatcagatgc

SEQ ID NO: 3370124 - DNA, 25 bp, Homo sapien
tagttgattgatagcctggaccttg

SEQ ID NO: 3370125 - DNA, 25 bp, Homo sapien
tctccagaatagagagtcactgact

SEQ ID NO: 3370126 - DNA, 25 bp, Homo sapien
gcaggcgtcatcacccgcaatgtgt

SEQ ID NO: 3370127 - DNA, 25 bp, Homo sapien
gagggtcaggcccagatcctagttg

SEQ ID NO: 3370128 - DNA, 25 bp, Homo sapien
actgtttataacgtccaccccatgg

SEQ ID NO: 3370129 - DNA, 25 bp, Homo sapien
tagcctttcagacgtccatgtactc

SEQ ID NO: 3370130 - DNA, 25 bp, Homo sapien
tgtactctgtcctttggaactgttg

SEQ ID NO: 3370131 - DNA, 25 bp, Homo sapien
ccaggtaactttaactaatgtactg

SEQ ID NO: 3370132 - DNA, 25 bp, Homo sapien
atcttagaatgttcacttctttggg

SEQ ID NO: 3370133 - DNA, 25 bp, Homo sapien
ttagaatgttcacttctttgggatg

SEQ ID NO: 3370134 - DNA, 25 bp, Homo sapien
cttagaatgttcacttctttgggat

SEQ ID NO: 3370135 - DNA, 25 bp, Homo sapien
tcttagaatgttcacttctttggga

SEQ ID NO: 3370136 - DNA, 25 bp, Homo sapien
ggtgtttgaaatatataaggctcac

SEQ ID NO: 3370137 - DNA, 25 bp, Homo sapien
ggaccagctcctttagagttatagg

SEQ ID NO: 3370138 - DNA, 25 bp, Homo sapien
gttataggctaagactgttaaatga

SEQ ID NO: 3370139 - DNA, 25 bp, Homo sapien
taaggctcactttcaggaccagctc

SEQ ID NO: 3370140 - DNA, 25 bp, Homo sapien
gtccccaagataaagtggcagtgtc

SEQ ID NO: 3370141 - DNA, 25 bp, Homo sapien
aagatagccagttaagtttccattt

SEQ ID NO: 3370142 - DNA, 25 bp, Homo sapien
gcagtgtctttatcaactttgatga

SEQ ID NO: 3370143 - DNA, 25 bp, Homo sapien
taaagtggcagtgtctttatcaact

SEQ ID NO: 3370144 - DNA, 25 bp, Homo sapien
catctagaattggactgatcttgct

SEQ ID NO: 3370145 - DNA, 25 bp, Homo sapien
atataaggttaagagctcaacatct

SEQ ID NO: 3370146 - DNA, 25 bp, Homo sapien
ctcggcctcccacttaacacttatt

SEQ ID NO: 3370147 - DNA, 25 bp, Homo sapien
tcaacatctagaattggactgatct

SEQ ID NO: 3370148 - DNA, 25 bp, Homo sapien
cgtgatcggttttccacagccctgt

SEQ ID NO: 3370149 - DNA, 25 bp, Homo sapien
ggtggagctttcctccgtgatcggt

SEQ ID NO: 3370150 - DNA, 25 bp, Homo sapien
cattcaggtttgagaggtgccagct

SEQ ID NO: 3370151 - DNA, 25 bp, Homo sapien
tctccaatctcgtaggtgtcattta

SEQ ID NO: 3370152 - DNA, 25 bp, Homo sapien
gaaagatgcatagcagtaggttcct

SEQ ID NO: 3370153 - DNA, 25 bp, Homo sapien
gaatgcaaccaagcccaaatttcgc

SEQ ID NO: 3370154 - DNA, 25 bp, Homo sapien
taaattcctgacacatacgacagtg

SEQ ID NO: 3370155 - DNA, 25 bp, Homo sapien
gaaatcagtgtcaactcgggaaggg

SEQ ID NO: 3370156 - DNA, 25 bp, Homo sapien
tcccggctcaaatacctctattggg

SEQ ID NO: 3370157 - DNA, 25 bp, Homo sapien
gcgaactatatgttcagctcccggc

SEQ ID NO: 3370158 - DNA, 25 bp, Homo sapien
gatttactcctgatatcttcccgat

SEQ ID NO: 3370159 - DNA, 25 bp, Homo sapien
tcattatcgccccaattcttagtca

SEQ ID NO: 3370160 - DNA, 25 bp, Homo sapien
ccttggttagaagcagatgaccatg

SEQ ID NO: 3370161 - DNA, 25 bp, Homo sapien
gagcaaacaaaagcgcaagctgcct

SEQ ID NO: 3370162 - DNA, 25 bp, Homo sapien
tacaggacatagattgactaagact

SEQ ID NO: 3370163 - DNA, 25 bp, Homo sapien
ggacacaggcaacactaagtattct

SEQ ID NO: 3370164 - DNA, 25 bp, Homo sapien
gtccaataaaccagccttgagtgga

SEQ ID NO: 3370165 - DNA, 25 bp, Homo sapien
agtccaataaaccagccttgagtgg

SEQ ID NO: 3370166 - DNA, 25 bp, Homo sapien
tccaataaaccagccttgagtggag

SEQ ID NO: 3370167 - DNA, 25 bp, Homo sapien
cagtccaataaaccagccttgagtg

SEQ ID NO: 3370168 - DNA, 25 bp, Homo sapien
gtgtgagaagagcaatcgcacacat

SEQ ID NO: 3370169 - DNA, 25 bp, Homo sapien
ttctgggtctggatgcaaatcttcc

SEQ ID NO: 3370170 - DNA, 25 bp, Homo sapien
tttctgggtctggatgcaaatcttc

SEQ ID NO: 3370171 - DNA, 25 bp, Homo sapien
cgagccaaagatttaaagccagtgc

SEQ ID NO: 3370172 - DNA, 25 bp, Homo sapien
catcaagtatgtcaggtttctagga

SEQ ID NO: 3370173 - DNA, 25 bp, Homo sapien
tactctgtgttatatgccaccatgg

SEQ ID NO: 3370174 - DNA, 25 bp, Homo sapien
aagggcaatctctgtgggacacata

SEQ ID NO: 3370175 - DNA, 25 bp, Homo sapien
taagctgtcagcactttcagtaggc

SEQ ID NO: 3370176 - DNA, 25 bp, Homo sapien
ggaccgaaggcttcctttgagaggc

SEQ ID NO: 3370177 - DNA, 25 bp, Homo sapien
taggctgcatatccctattaaggga

SEQ ID NO: 3370178 - DNA, 25 bp, Homo sapien
tctccttagatccagcgtaggcacc

SEQ ID NO: 3370179 - DNA, 25 bp, Homo sapien
tgaccaccgcttccatgcagttgaa

SEQ ID NO: 3370180 - DNA, 25 bp, Homo sapien
aagtcaccaagccagttctcagaga

SEQ ID NO: 3370181 - DNA, 25 bp, Homo sapien
ccaatgtgcatacggagaaaaaccc

SEQ ID NO: 3370182 - DNA, 25 bp, Homo sapien
catctctgggcaaataggagctcaa

SEQ ID NO: 3370183 - DNA, 25 bp, Homo sapien
cattcacacagggtagggaccacac

SEQ ID NO: 3370184 - DNA, 25 bp, Homo sapien
gatgactgtccctccagaaaactgg

SEQ ID NO: 3370185 - DNA, 25 bp, Homo sapien
tataattaccattgcacgccgtgga

SEQ ID NO: 3370186 - DNA, 25 bp, Homo sapien
tttgaaatgcttactcccgggactg

SEQ ID NO: 3370187 - DNA, 25 bp, Homo sapien
cagtgggacatttgaccagcacaat

SEQ ID NO: 3370188 - DNA, 25 bp, Homo sapien
cctgtcctccattataaggagtgga

SEQ ID NO: 3370189 - DNA, 25 bp, Homo sapien
tgaccagcacaatgtatcgaagcat

SEQ ID NO: 3370190 - DNA, 25 bp, Homo sapien
agtggacatgagaacagtgggacat

SEQ ID NO: 3370191 - DNA, 25 bp, Homo sapien
gagcagcagtaagtaagctcacaac

SEQ ID NO: 3370192 - DNA, 25 bp, Homo sapien
ggtacatcccgctgagcagcagtaa

SEQ ID NO: 3370193 - DNA, 25 bp, Homo sapien
taagctcacaacagagataaaagaa

SEQ ID NO: 3370194 - DNA, 25 bp, Homo sapien
ttctgtcactgatggtacatcccgc

SEQ ID NO: 3370195 - DNA, 25 bp, Homo sapien
taacttcagcgctgacatatggcag

SEQ ID NO: 3370196 - DNA, 25 bp, Homo sapien
gacatatggcagcagtacaatgaca

SEQ ID NO: 3370197 - DNA, 25 bp, Homo sapien
tgccagtccgatgattaaagccttt

SEQ ID NO: 3370198 - DNA, 25 bp, Homo sapien
gatttaatactgtgatgccgcactg

SEQ ID NO: 3370199 - DNA, 25 bp, Homo sapien
ctattaagcatttcctccaaagctg

SEQ ID NO: 3370200 - DNA, 25 bp, Homo sapien
gcatttcctccaaagctgtaatcca

SEQ ID NO: 3370201 - DNA, 25 bp, Homo sapien
aagcatttcctccaaagctgtaatc

SEQ ID NO: 3370202 - DNA, 25 bp, Homo sapien
atttcctccaaagctgtaatccagg

SEQ ID NO: 3370203 - DNA, 25 bp, Homo sapien
cattattaggttacactttagctca

SEQ ID NO: 3370204 - DNA, 25 bp, Homo sapien
tgcaccgaggctttctaagagatag

SEQ ID NO: 3370205 - DNA, 25 bp, Homo sapien
tcaacgcaggttgaatggcctcgag

SEQ ID NO: 3370206 - DNA, 25 bp, Homo sapien
cctcgagtgtgtttgggcttccagc

SEQ ID NO: 3370207 - DNA, 25 bp, Homo sapien
tcaagttgactttctctctgcccca

SEQ ID NO: 3370208 - DNA, 25 bp, Homo sapien
ctcaagttgactttctctctgcccc

SEQ ID NO: 3370209 - DNA, 25 bp, Homo sapien
tctaaatcacaaaaagtcctcgaag

SEQ ID NO: 3370210 - DNA, 25 bp, Homo sapien
taaatcacaaaaagtcctcgaagtg

SEQ ID NO: 3370211 - DNA, 25 bp, Homo sapien
ctcacagtgccaaggtaccactggg

SEQ ID NO: 3370212 - DNA, 25 bp, Homo sapien
taccactggggacctgtggtttctg

SEQ ID NO: 3370213 - DNA, 25 bp, Homo sapien
tcaggtgactctcacagtgccaagg

SEQ ID NO: 3370214 - DNA, 25 bp, Homo sapien
gactctcacagtgccaaggtaccac

SEQ ID NO: 3370215 - DNA, 25 bp, Homo sapien
tataaatcaggcaattccagaccac

SEQ ID NO: 3370216 - DNA, 25 bp, Homo sapien
tagcactatattattggcaagccac

SEQ ID NO: 3370217 - DNA, 25 bp, Homo sapien
ccaacaggagtatgagttacaggct

SEQ ID NO: 3370218 - DNA, 25 bp, Homo sapien
gcttagatagaacccagagtgctgg

SEQ ID NO: 3370219 - DNA, 25 bp, Homo sapien
caaaaccttgttctgtctaagacac

SEQ ID NO: 3370220 - DNA, 25 bp, Homo sapien
catgattccatgcagagtaagccaa

SEQ ID NO: 3370221 - DNA, 25 bp, Homo sapien
catgagtgttggaattacccgttaa

SEQ ID NO: 3370222 - DNA, 25 bp, Homo sapien
cagtcaatcttatactaggaaccaa

SEQ ID NO: 3370223 - DNA, 25 bp, Homo sapien
ggaaaggacccagataacaagcagt

SEQ ID NO: 3370224 - DNA, 25 bp, Homo sapien
ccccggaagtgtctgctaaggaaga

SEQ ID NO: 3370225 - DNA, 25 bp, Homo sapien
taaaaccggtgaagttgcatggctg

SEQ ID NO: 3370226 - DNA, 25 bp, Homo sapien
aacaagcagtagtagccccggaagt

SEQ ID NO: 3370227 - DNA, 25 bp, Homo sapien
tccatttacacgacatatctgaagt

SEQ ID NO: 3370228 - DNA, 25 bp, Homo sapien
tagttaagagggcagatttcatatt

SEQ ID NO: 3370229 - DNA, 25 bp, Homo sapien
gaacattgagggcactatgctaagt

SEQ ID NO: 3370230 - DNA, 25 bp, Homo sapien
aaagttctagagatgtgctattcaa

SEQ ID NO: 3370231 - DNA, 25 bp, Homo sapien
aactggctagcagctctcactcgct

SEQ ID NO: 3370232 - DNA, 25 bp, Homo sapien
gacaactggctagcagctctcactc

SEQ ID NO: 3370233 - DNA, 25 bp, Homo sapien
ggctagcagctctcactcgctctcg

SEQ ID NO: 3370234 - DNA, 25 bp, Homo sapien
ctggctagcagctctcactcgctct

SEQ ID NO: 3370235 - DNA, 25 bp, Homo sapien
gaataatgtaacgtccttgttcaaa

SEQ ID NO: 3370236 - DNA, 25 bp, Homo sapien
taacgacttatttccttcccagatg

SEQ ID NO: 3370237 - DNA, 25 bp, Homo sapien
catccatttgtaacgacttatttcc

SEQ ID NO: 3370238 - DNA, 25 bp, Homo sapien
ttttgctgtgtagccgtaagtacca

SEQ ID NO: 3370239 - DNA, 25 bp, Homo sapien
ctcctcttcaccatcaacattctgt

SEQ ID NO: 3370240 - DNA, 25 bp, Homo sapien
tcctcttcaccatcaacattctgta

SEQ ID NO: 3370241 - DNA, 25 bp, Homo sapien
tttcaccacctgttactccatctgt

SEQ ID NO: 3370242 - DNA, 25 bp, Homo sapien
tcaccacctgttactccatctgttt

SEQ ID NO: 3370243 - DNA, 25 bp, Homo sapien
gcagcctaattcatgagacacaaca

SEQ ID NO: 3370244 - DNA, 25 bp, Homo sapien
gttggcagcctaattcatgagacac

SEQ ID NO: 3370245 - DNA, 25 bp, Homo sapien
tggcagcctaattcatgagacacaa

SEQ ID NO: 3370246 - DNA, 25 bp, Homo sapien
ttgttggcagcctaattcatgagac

SEQ ID NO: 3370247 - DNA, 25 bp, Homo sapien
gtctttggctttggacgtggccaca

SEQ ID NO: 3370248 - DNA, 25 bp, Homo sapien
gcctcagtgtcggtggaatgtatct

SEQ ID NO: 3370249 - DNA, 25 bp, Homo sapien
aattactgcatgttatgttggtggc

SEQ ID NO: 3370250 - DNA, 25 bp, Homo sapien
ggttgatcacattgctgtttcacca

SEQ ID NO: 3370251 - DNA, 25 bp, Homo sapien
gatataggagtgataaactgtcagt

SEQ ID NO: 3370252 - DNA, 25 bp, Homo sapien
aactgtcagtattgttcctggaaca

SEQ ID NO: 3370253 - DNA, 25 bp, Homo sapien
ggtcaagtgaagctttgacaatttt

SEQ ID NO: 3370254 - DNA, 25 bp, Homo sapien
ctgtgaagatataggagtgataaac

SEQ ID NO: 3370255 - DNA, 25 bp, Homo sapien
ctctggacattgctcaagttacaat

SEQ ID NO: 3370256 - DNA, 25 bp, Homo sapien
caactttgggtccatagcaacttgt

SEQ ID NO: 3370257 - DNA, 25 bp, Homo sapien
tcggacacatgtactgattagcaac

SEQ ID NO: 3370258 - DNA, 25 bp, Homo sapien
taggaagagatcctgttcggacaca

SEQ ID NO: 3370259 - DNA, 25 bp, Homo sapien
cctcagatgatatatcaaattcctt

SEQ ID NO: 3370260 - DNA, 25 bp, Homo sapien
tcagatgatatatcaaattccttgg

SEQ ID NO: 3370261 - DNA, 25 bp, Homo sapien
gatgatatatcaaattccttggtct

SEQ ID NO: 3370262 - DNA, 25 bp, Homo sapien
ttcctcagatgatatatcaaattcc

SEQ ID NO: 3370263 - DNA, 25 bp, Homo sapien
caatgcacactcagtgagttgtgga

SEQ ID NO: 3370264 - DNA, 25 bp, Homo sapien
tgtctctggcagaacaatgcacact

SEQ ID NO: 3370265 - DNA, 25 bp, Homo sapien
agtgataaggcttcgtgtaaaggca

SEQ ID NO: 3370266 - DNA, 25 bp, Homo sapien
gcaaagaagtgataaggcttcgtgt

SEQ ID NO: 3370267 - DNA, 25 bp, Homo sapien
agaagtggtgtttttgctgtgccct

SEQ ID NO: 3370268 - DNA, 25 bp, Homo sapien
ggtgttcagaagtggtgtttttgct

SEQ ID NO: 3370269 - DNA, 25 bp, Homo sapien
ttctgtagtcctctagatgtggtcc

SEQ ID NO: 3370270 - DNA, 25 bp, Homo sapien
tgtagtcctctagatgtggtccagg

SEQ ID NO: 3370271 - DNA, 25 bp, Homo sapien
ctcctttccttttgtccatattcca

SEQ ID NO: 3370272 - DNA, 25 bp, Homo sapien
tttccttttgtccatattccagaac

SEQ ID NO: 3370273 - DNA, 25 bp, Homo sapien
tccttttgtccatattccagaacca

SEQ ID NO: 3370274 - DNA, 25 bp, Homo sapien
cctttccttttgtccatattccaga

SEQ ID NO: 3370275 - DNA, 25 bp, Homo sapien
ggaatgcaggctgctttgggaattt

SEQ ID NO: 3370276 - DNA, 25 bp, Homo sapien
ctgctttgggaatttcctctggcac

SEQ ID NO: 3370277 - DNA, 25 bp, Homo sapien
agggaatgcaggctgctttgggaat

SEQ ID NO: 3370278 - DNA, 25 bp, Homo sapien
atgcaggctgctttgggaatttcct

SEQ ID NO: 3370279 - DNA, 25 bp, Homo sapien
ttgttgcctggatcccttttctttg

SEQ ID NO: 3370280 - DNA, 25 bp, Homo sapien
ctaccctccatcctcttgttgcctg

SEQ ID NO: 3370281 - DNA, 25 bp, Homo sapien
ctcttgttgcctggatcccttttct

SEQ ID NO: 3370282 - DNA, 25 bp, Homo sapien
tcttgttgcctggatcccttttctt

SEQ ID NO: 3370283 - DNA, 25 bp, Homo sapien
cagaaagaacgatgatttcctagtg

SEQ ID NO: 3370284 - DNA, 25 bp, Homo sapien
ctagtgaagttcatcactcccagtg

SEQ ID NO: 3370285 - DNA, 25 bp, Homo sapien
agtgaagttcatcactcccagtgca

SEQ ID NO: 3370286 - DNA, 25 bp, Homo sapien
tcctagtgaagttcatcactcccag

SEQ ID NO: 3370287 - DNA, 25 bp, Homo sapien
tcctccatacacaaatgtctgtggt

SEQ ID NO: 3370288 - DNA, 25 bp, Homo sapien
cctttctgtgtcctccatacacaaa

SEQ ID NO: 3370289 - DNA, 25 bp, Homo sapien
tctgtgtcctccatacacaaatgtc

SEQ ID NO: 3370290 - DNA, 25 bp, Homo sapien
tgtcctccatacacaaatgtctgtg

SEQ ID NO: 3370291 - DNA, 25 bp, Homo sapien
tcattacctatgaggaaataaagca

SEQ ID NO: 3370292 - DNA, 25 bp, Homo sapien
cattcagtgtggctggtcagaagag

SEQ ID NO: 3370293 - DNA, 25 bp, Homo sapien
ttttcagtattctcatcatcacaca

SEQ ID NO: 3370294 - DNA, 25 bp, Homo sapien
tttgcaaaagtgttaggctaaggat

SEQ ID NO: 3370295 - DNA, 25 bp, Homo sapien
tctctagcgcaaagggttagacctt

SEQ ID NO: 3370296 - DNA, 25 bp, Homo sapien
attcaatggtgggtgagggtcctct

SEQ ID NO: 3370297 - DNA, 25 bp, Homo sapien
cgtctcctttggttgaaccctcata

SEQ ID NO: 3370298 - DNA, 25 bp, Homo sapien
tatgagggttaaaactctcccttca

SEQ ID NO: 3370299 - DNA, 25 bp, Homo sapien
cacccgtattataaagaatgccctt

SEQ ID NO: 3370300 - DNA, 25 bp, Homo sapien
aagtgttgatgccacagatgggcga

SEQ ID NO: 3370301 - DNA, 25 bp, Homo sapien
tgccagctgaatccccaagtgttga

SEQ ID NO: 3370302 - DNA, 25 bp, Homo sapien
tctcttcagatcttgcacccgtatt

SEQ ID NO: 3370303 - DNA, 25 bp, Homo sapien
gtgttacattattgaacaggcctct

SEQ ID NO: 3370304 - DNA, 25 bp, Homo sapien
ttaatccctttgtgttacattattg

SEQ ID NO: 3370305 - DNA, 25 bp, Homo sapien
cattattgaacaggcctcttggctt

SEQ ID NO: 3370306 - DNA, 25 bp, Homo sapien
tcctcatcactggtgcgtccatcac

SEQ ID NO: 3370307 - DNA, 25 bp, Homo sapien
ccacttttgaattcagatgaagcaa

SEQ ID NO: 3370308 - DNA, 25 bp, Homo sapien
ttgaattcagatgaagcaagtttct

SEQ ID NO: 3370309 - DNA, 25 bp, Homo sapien
ttccacttttgaattcagatgaagc

SEQ ID NO: 3370310 - DNA, 25 bp, Homo sapien
cttttgaattcagatgaagcaagtt

SEQ ID NO: 3370311 - DNA, 25 bp, Homo sapien
tgaaccccatccacgtaagcttctg

SEQ ID NO: 3370312 - DNA, 25 bp, Homo sapien
tattgtatagcatatctcttgaact

SEQ ID NO: 3370313 - DNA, 25 bp, Homo sapien
ttctccagtctaactaaaatatcat

SEQ ID NO: 3370314 - DNA, 25 bp, Homo sapien
aacactgaaaatgtacacccaaggc

SEQ ID NO: 3370315 - DNA, 25 bp, Homo sapien
ggatttccctcaacatagcactcag

SEQ ID NO: 3370316 - DNA, 25 bp, Homo sapien
taacaacaagtgtaccaagcagtca

SEQ ID NO: 3370317 - DNA, 25 bp, Homo sapien
ccatatgtgttgtgtgactgactgc

SEQ ID NO: 3370318 - DNA, 25 bp, Homo sapien
aaagactcgggatgcaaacacctgg

SEQ ID NO: 3370319 - DNA, 25 bp, Homo sapien
tgcactcgttgcagggaggtcagct

SEQ ID NO: 3370320 - DNA, 25 bp, Homo sapien
gaaaccacggtctagtgtaagctct

SEQ ID NO: 3370321 - DNA, 25 bp, Homo sapien
gtcagcttgaagtagttaaacctct

SEQ ID NO: 3370322 - DNA, 25 bp, Homo sapien
gaacacatagtaattggaaggagga

SEQ ID NO: 3370323 - DNA, 25 bp, Homo sapien
taaatttggctacttcaaggatgag

SEQ ID NO: 3370324 - DNA, 25 bp, Homo sapien
agggtctcctagtgaaagctgtgca

SEQ ID NO: 3370325 - DNA, 25 bp, Homo sapien
tgagcacatatgttgaagaagcaag

SEQ ID NO: 3370326 - DNA, 25 bp, Homo sapien
ctgttaaagcgaagtgccatgacat

SEQ ID NO: 3370327 - DNA, 25 bp, Homo sapien
gatgcagacaatcctattgtttcct

SEQ ID NO: 3370328 - DNA, 25 bp, Homo sapien
gacaatcctattgtttcctactgtc

SEQ ID NO: 3370329 - DNA, 25 bp, Homo sapien
gttctttcttgatgcagacaatcct

SEQ ID NO: 3370330 - DNA, 25 bp, Homo sapien
ttcttgatgcagacaatcctattgt

SEQ ID NO: 3370331 - DNA, 25 bp, Homo sapien
taaaggataaagtgcctaatacata

SEQ ID NO: 3370332 - DNA, 25 bp, Homo sapien
aaaggataaagtgcctaatacatat

SEQ ID NO: 3370333 - DNA, 25 bp, Homo sapien
gaggcttgagtccccctaaaggata

SEQ ID NO: 3370334 - DNA, 25 bp, Homo sapien
cagaggcttgagtccccctaaagga

SEQ ID NO: 3370335 - DNA, 25 bp, Homo sapien
catgatctgctgattcctgaggtgc

SEQ ID NO: 3370336 - DNA, 25 bp, Homo sapien
acttgactggtttcacctctttgtg

SEQ ID NO: 3370337 - DNA, 25 bp, Homo sapien
ttttgttcaccaaacactattgaca

SEQ ID NO: 3370338 - DNA, 25 bp, Homo sapien
tgagaaatcgtctccactgtacact

SEQ ID NO: 3370339 - DNA, 25 bp, Homo sapien
ttcgaatatccggatttcttcacat

SEQ ID NO: 3370340 - DNA, 25 bp, Homo sapien
tgtctttcgaatatccggatttctt

SEQ ID NO: 3370341 - DNA, 25 bp, Homo sapien
cgaatatccggatttcttcacattg

SEQ ID NO: 3370342 - DNA, 25 bp, Homo sapien
tctttcgaatatccggatttcttca

SEQ ID NO: 3370343 - DNA, 25 bp, Homo sapien
agcccaacatcatactacaaactac

SEQ ID NO: 3370344 - DNA, 25 bp, Homo sapien
gagcccaacatcatactacaaacta

SEQ ID NO: 3370345 - DNA, 25 bp, Homo sapien
ggagcccaacatcatactacaaact

SEQ ID NO: 3370346 - DNA, 25 bp, Homo sapien
tgcaaattatgagggcaaaggccat

SEQ ID NO: 3370347 - DNA, 25 bp, Homo sapien
ctacattgtgttgtagaaactgatg

SEQ ID NO: 3370348 - DNA, 25 bp, Homo sapien
cctctcttcaatgattacattgcaa

SEQ ID NO: 3370349 - DNA, 25 bp, Homo sapien
gtgttgtagaaactgatgtacctgc

SEQ ID NO: 3370350 - DNA, 25 bp, Homo sapien
tctgagctgcagcttatatcgtcta

SEQ ID NO: 3370351 - DNA, 25 bp, Homo sapien
attctgagctgcagcttatatcgtc

SEQ ID NO: 3370352 - DNA, 25 bp, Homo sapien
agctgcagcttatatcgtctaattc

SEQ ID NO: 3370353 - DNA, 25 bp, Homo sapien
tgagctgcagcttatatcgtctaat

SEQ ID NO: 3370354 - DNA, 25 bp, Homo sapien
catcttatagtattaaatagcctga

SEQ ID NO: 3370355 - DNA, 25 bp, Homo sapien
tagtattaaatagcctgagatcaaa

SEQ ID NO: 3370356 - DNA, 25 bp, Homo sapien
gcacacaacatcttatagtattaaa

SEQ ID NO: 3370357 - DNA, 25 bp, Homo sapien
tgtgcacacaacatcttatagtatt

SEQ ID NO: 3370358 - DNA, 25 bp, Homo sapien
aagccactgaataatgctgagtttg

SEQ ID NO: 3370359 - DNA, 25 bp, Homo sapien
gaataatgctgagtttggtagatga

SEQ ID NO: 3370360 - DNA, 25 bp, Homo sapien
gaagataaacaagcctcatgtattt

SEQ ID NO: 3370361 - DNA, 25 bp, Homo sapien
cactgaataatgctgagtttggtag

SEQ ID NO: 3370362 - DNA, 25 bp, Homo sapien
gacattgaaaatcccactggcatct

SEQ ID NO: 3370363 - DNA, 25 bp, Homo sapien
caaggtgaccgtttctactgagata

SEQ ID NO: 3370364 - DNA, 25 bp, Homo sapien
tttctccggtgtccaaaacatgatc

SEQ ID NO: 3370365 - DNA, 25 bp, Homo sapien
gctaacagaggttgctagccaagca

SEQ ID NO: 3370366 - DNA, 25 bp, Homo sapien
gccgggctccaagctgtgccattgg

SEQ ID NO: 3370367 - DNA, 25 bp, Homo sapien
tctcagtgctggttgttgaatccat

SEQ ID NO: 3370368 - DNA, 25 bp, Homo sapien
tgctgatcattgcaggtcttctcag

SEQ ID NO: 3370369 - DNA, 25 bp, Homo sapien
gaatgaactagtatgaacacaaaga

SEQ ID NO: 3370370 - DNA, 25 bp, Homo sapien
gaaaactgagcatagttttgtatgg

SEQ ID NO: 3370371 - DNA, 25 bp, Homo sapien
atggaagcttcacacttgaaaactg

SEQ ID NO: 3370372 - DNA, 25 bp, Homo sapien
agagaggaggtacaaagttatcagc

SEQ ID NO: 3370373 - DNA, 25 bp, Homo sapien
tcagctgtcaaaagccttgatgtgt

SEQ ID NO: 3370374 - DNA, 25 bp, Homo sapien
tattgcctgcacgatgaacatgccg

SEQ ID NO: 3370375 - DNA, 25 bp, Homo sapien
ttggccagggtgtcagatttacgac

SEQ ID NO: 3370376 - DNA, 25 bp, Homo sapien
tgaataaaatgaggccggcactgat

SEQ ID NO: 3370377 - DNA, 25 bp, Homo sapien
atttacgactccgacacgaggctgc

SEQ ID NO: 3370378 - DNA, 25 bp, Homo sapien
ggtcttacttaaaatgacactggga

SEQ ID NO: 3370379 - DNA, 25 bp, Homo sapien
ccaagtgcaacacacaatagctttg

SEQ ID NO: 3370380 - DNA, 25 bp, Homo sapien
ggctctgattaagtccaaggatgaa

SEQ ID NO: 3370381 - DNA, 25 bp, Homo sapien
tatagactctccttcttgaaaggaa

SEQ ID NO: 3370382 - DNA, 25 bp, Homo sapien
gtgccaaatatgactttgaggtaca

SEQ ID NO: 3370383 - DNA, 25 bp, Homo sapien
gtgtgccaaatatgactttgaggta

SEQ ID NO: 3370384 - DNA, 25 bp, Homo sapien
gactttgaggtacagctgattgaga

SEQ ID NO: 3370385 - DNA, 25 bp, Homo sapien
ttgaggtacagctgattgagatcaa

SEQ ID NO: 3370386 - DNA, 25 bp, Homo sapien
aatctgcttggtattgtagagcctt

SEQ ID NO: 3370387 - DNA, 25 bp, Homo sapien
tggtattgtagagccttcttgtact

SEQ ID NO: 3370388 - DNA, 25 bp, Homo sapien
tgcttggtattgtagagccttcttg

SEQ ID NO: 3370389 - DNA, 25 bp, Homo sapien
tctgcttggtattgtagagccttct

SEQ ID NO: 3370390 - DNA, 25 bp, Homo sapien
gagtctgcattgtaatattctgcat

SEQ ID NO: 3370391 - DNA, 25 bp, Homo sapien
gacaagcttcttctacctgatcttt

SEQ ID NO: 3370392 - DNA, 25 bp, Homo sapien
tttcatacaatcctcagaacaagag

SEQ ID NO: 3370393 - DNA, 25 bp, Homo sapien
caagagttacagtaccatgtctagt

SEQ ID NO: 3370394 - DNA, 25 bp, Homo sapien
atagtatgttctcaaaaaatggttt

SEQ ID NO: 3370395 - DNA, 25 bp, Homo sapien
tttagcctttcaaaattatcatctt

SEQ ID NO: 3370396 - DNA, 25 bp, Homo sapien
tagcctttcaaaattatcatcttct

SEQ ID NO: 3370397 - DNA, 25 bp, Homo sapien
gcttttagcctttcaaaattatcat

SEQ ID NO: 3370398 - DNA, 25 bp, Homo sapien
tagcttttagcctttcaaaattatc

SEQ ID NO: 3370399 - DNA, 25 bp, Homo sapien
gcgaaaacttacttgatgcagctgc

SEQ ID NO: 3370400 - DNA, 25 bp, Homo sapien
tccaagttactctagttaatgatgc

SEQ ID NO: 3370401 - DNA, 25 bp, Homo sapien
aaattatatccactcattcccaggg

SEQ ID NO: 3370402 - DNA, 25 bp, Homo sapien
gttcacagagctgaattgccttcta

SEQ ID NO: 3370403 - DNA, 25 bp, Homo sapien
ctatgcataaagagtctattctcct

SEQ ID NO: 3370404 - DNA, 25 bp, Homo sapien
tctgtcccttttcctggataattga

SEQ ID NO: 3370405 - DNA, 25 bp, Homo sapien
tatgcataaagagtctattctcctt

SEQ ID NO: 3370406 - DNA, 25 bp, Homo sapien
tgattatgatcactgaaaagaagca

SEQ ID NO: 3370407 - DNA, 25 bp, Homo sapien
tgtactccaagaatgtgcagcgtga

SEQ ID NO: 3370408 - DNA, 25 bp, Homo sapien
tttcaagatgggaggcaattggctc

SEQ ID NO: 3370409 - DNA, 25 bp, Homo sapien
tgtattgaatcccaaccacctgggc

SEQ ID NO: 3370410 - DNA, 25 bp, Homo sapien
gagaccactctctaggtaactcagg

SEQ ID NO: 3370411 - DNA, 25 bp, Homo sapien
gaagtttcggtgctgttactgatat

SEQ ID NO: 3370412 - DNA, 25 bp, Homo sapien
gggcagctgagtccattcgcacagc

SEQ ID NO: 3370413 - DNA, 25 bp, Homo sapien
tgtgaagtttcggtgctgttactga

SEQ ID NO: 3370414 - DNA, 25 bp, Homo sapien
gagcccctgggatgagtttgtactg

SEQ ID NO: 3370415 - DNA, 25 bp, Homo sapien
agcccctgggatgagtttgtactgc

SEQ ID NO: 3370416 - DNA, 25 bp, Homo sapien
gatagattgacattcagagatagca

SEQ ID NO: 3370417 - DNA, 25 bp, Homo sapien
gcatgtcaagaactgagctctctga

SEQ ID NO: 3370418 - DNA, 25 bp, Homo sapien
tctgatgaaccaaggtagtaacaaa

SEQ ID NO: 3370419 - DNA, 25 bp, Homo sapien
ggtctttctgcaagacagatcgaca

SEQ ID NO: 3370420 - DNA, 25 bp, Homo sapien
ctcgaagagtctttagtttggtcca

SEQ ID NO: 3370421 - DNA, 25 bp, Homo sapien
gatagcttgccaatcatacctgctg

SEQ ID NO: 3370422 - DNA, 25 bp, Homo sapien
gagttttaagtcacatgcctcagcc

SEQ ID NO: 3370423 - DNA, 25 bp, Homo sapien
tgcaaacctgatactcctaggataa

SEQ ID NO: 3370424 - DNA, 25 bp, Homo sapien
catgcaaggatcctgggcagccaag

SEQ ID NO: 3370425 - DNA, 25 bp, Homo sapien
ctaaaccgttcaatttcaagttcat

SEQ ID NO: 3370426 - DNA, 25 bp, Homo sapien
tctaaaccgttcaatttcaagttca

SEQ ID NO: 3370427 - DNA, 25 bp, Homo sapien
tgtaattctaaaccgttcaatttca

SEQ ID NO: 3370428 - DNA, 25 bp, Homo sapien
acaagtggaagtgttggaataatac

SEQ ID NO: 3370429 - DNA, 25 bp, Homo sapien
tcaacaagtggaagtgttggaataa

SEQ ID NO: 3370430 - DNA, 25 bp, Homo sapien
aagtggaagtgttggaataatacgg

SEQ ID NO: 3370431 - DNA, 25 bp, Homo sapien
cgattcaacaagtggaagtgttgga

SEQ ID NO: 3370432 - DNA, 25 bp, Homo sapien
gtcccaatgaagcaacataggccat

SEQ ID NO: 3370433 - DNA, 25 bp, Homo sapien
tttatggtcaagacctggttctgcc

SEQ ID NO: 3370434 - DNA, 25 bp, Homo sapien
aagacctggttctgccgtcccaatg

SEQ ID NO: 3370435 - DNA, 25 bp, Homo sapien
tggttctgccgtcccaatgaagcaa

SEQ ID NO: 3370436 - DNA, 25 bp, Homo sapien
ccagatggcatgttctcccttcaca

SEQ ID NO: 3370437 - DNA, 25 bp, Homo sapien
tctcaaatcctggacgacgactcct

SEQ ID NO: 3370438 - DNA, 25 bp, Homo sapien
cctggacgacgactcctcaaagcag

SEQ ID NO: 3370439 - DNA, 25 bp, Homo sapien
tcaaagcagaggcatttcccggtgc

SEQ ID NO: 3370440 - DNA, 25 bp, Homo sapien
cgccccttcttctgtggctaagagc

SEQ ID NO: 3370441 - DNA, 25 bp, Homo sapien
tcgccccttcttctgtggctaagag

SEQ ID NO: 3370442 - DNA, 25 bp, Homo sapien
ctcgccccttcttctgtggctaaga

SEQ ID NO: 3370443 - DNA, 25 bp, Homo sapien
tcctcgccccttcttctgtggctaa

SEQ ID NO: 3370444 - DNA, 25 bp, Homo sapien
ccaccatacgtctgctgactgtttc

SEQ ID NO: 3370445 - DNA, 25 bp, Homo sapien
tctgtgtattgatcctgtcctttct

SEQ ID NO: 3370446 - DNA, 25 bp, Homo sapien
tcattccccactaccttctgtgtat

SEQ ID NO: 3370447 - DNA, 25 bp, Homo sapien
gagtttccaccatacgtctgctgac

SEQ ID NO: 3370448 - DNA, 25 bp, Homo sapien
tgagtacatctacgcaccaatcttt

SEQ ID NO: 3370449 - DNA, 25 bp, Homo sapien
cgcaccaatctttatcgttgttatt

SEQ ID NO: 3370450 - DNA, 25 bp, Homo sapien
cgttgttattgaaattattctcttg

SEQ ID NO: 3370451 - DNA, 25 bp, Homo sapien
tcttgtgcccccattaacctgagta

SEQ ID NO: 3370452 - DNA, 25 bp, Homo sapien
tattgccattcctcattggcagctg

SEQ ID NO: 3370453 - DNA, 25 bp, Homo sapien
ttttgacctccaattggccaatgaa

SEQ ID NO: 3370454 - DNA, 25 bp, Homo sapien
tggcagctgatgcagaccacttcac

SEQ ID NO: 3370455 - DNA, 25 bp, Homo sapien
caccctctgtactttaatttgactt

SEQ ID NO: 3370456 - DNA, 25 bp, Homo sapien
tgactctaaagtgggttacctcagg

SEQ ID NO: 3370457 - DNA, 25 bp, Homo sapien
gactactcaaggtgactctaaagtg

SEQ ID NO: 3370458 - DNA, 25 bp, Homo sapien
gggtctccttgactactcaaggtga

SEQ ID NO: 3370459 - DNA, 25 bp, Homo sapien
tatgggtctccttgactactcaagg

SEQ ID NO: 3370460 - DNA, 25 bp, Homo sapien
tttataatactgtagctcttgccaa

SEQ ID NO: 3370461 - DNA, 25 bp, Homo sapien
aaacattcttatcctcgcacaccat

SEQ ID NO: 3370462 - DNA, 25 bp, Homo sapien
aagggccttcgatgactagcatatc

SEQ ID NO: 3370463 - DNA, 25 bp, Homo sapien
tcttgccaaacattcttatcctcgc

SEQ ID NO: 3370464 - DNA, 25 bp, Homo sapien
tccctcatgtgcacttccgaaacat

SEQ ID NO: 3370465 - DNA, 25 bp, Homo sapien
tcctctccctcatgtgcacttccga

SEQ ID NO: 3370466 - DNA, 25 bp, Homo sapien
tcatgtgcacttccgaaacattccc

SEQ ID NO: 3370467 - DNA, 25 bp, Homo sapien
atgtgcacttccgaaacattccctc

SEQ ID NO: 3370468 - DNA, 25 bp, Homo sapien
atctgtagacttattacctgggaga

SEQ ID NO: 3370469 - DNA, 25 bp, Homo sapien
tagacttattacctgggagatgtct

SEQ ID NO: 3370470 - DNA, 25 bp, Homo sapien
ctgtagacttattacctgggagatg

SEQ ID NO: 3370471 - DNA, 25 bp, Homo sapien
tgtagacttattacctgggagatgt

SEQ ID NO: 3370472 - DNA, 25 bp, Homo sapien
gacagcttttataacatggacagca

SEQ ID NO: 3370473 - DNA, 25 bp, Homo sapien
gaaagaggcttcttagtgacgctgc

SEQ ID NO: 3370474 - DNA, 25 bp, Homo sapien
gtgacgctgccttggatttttgaca

SEQ ID NO: 3370475 - DNA, 25 bp, Homo sapien
tgtcataagtccaattccctcatag

SEQ ID NO: 3370476 - DNA, 25 bp, Homo sapien
ggctgcattcttggtactccatcca

SEQ ID NO: 3370477 - DNA, 25 bp, Homo sapien
attcttggtactccatccagggcct

SEQ ID NO: 3370478 - DNA, 25 bp, Homo sapien
cattcttggtactccatccagggcc

SEQ ID NO: 3370479 - DNA, 25 bp, Homo sapien
tgcattcttggtactccatccaggg

SEQ ID NO: 3370480 - DNA, 25 bp, Homo sapien
gaactgaatctaccaccaccatttt

SEQ ID NO: 3370481 - DNA, 25 bp, Homo sapien
gtatttcacgaggtagaagattgtg

SEQ ID NO: 3370482 - DNA, 25 bp, Homo sapien
gattttagaactgaatctaccacca

SEQ ID NO: 3370483 - DNA, 25 bp, Homo sapien
tttaagttctgcagtatttcacgag

SEQ ID NO: 3370484 - DNA, 25 bp, Homo sapien
caaacttcttgagccaccaggacaa

SEQ ID NO: 3370485 - DNA, 25 bp, Homo sapien
caattgaaacctacactggaatggg

SEQ ID NO: 3370486 - DNA, 25 bp, Homo sapien
tctatgggactcaaaaagctgtgct

SEQ ID NO: 3370487 - DNA, 25 bp, Homo sapien
ccaggacaaggagcaagttacaagt

SEQ ID NO: 3370488 - DNA, 25 bp, Homo sapien
tccatgaatagagtacttgtttgtg

SEQ ID NO: 3370489 - DNA, 25 bp, Homo sapien
tatccagggttagcaaaatttccat

SEQ ID NO: 3370490 - DNA, 25 bp, Homo sapien
tgtggccatttggaatgcataggga

SEQ ID NO: 3370491 - DNA, 25 bp, Homo sapien
gaatgcatagggatctgtcatcaag

SEQ ID NO: 3370492 - DNA, 25 bp, Homo sapien
tctaacataatgacatgcaagaatg

SEQ ID NO: 3370493 - DNA, 25 bp, Homo sapien
agaaaaggctccatcaccgcttgga

SEQ ID NO: 3370494 - DNA, 25 bp, Homo sapien
tggtttagaggtttcaatttgctga

SEQ ID NO: 3370495 - DNA, 25 bp, Homo sapien
gatgacagttggaatacaaagagag

SEQ ID NO: 3370496 - DNA, 25 bp, Homo sapien
caagccgtatggaatgtctatgcag

SEQ ID NO: 3370497 - DNA, 25 bp, Homo sapien
aatcagttcttgaggcacatgtgca

SEQ ID NO: 3370498 - DNA, 25 bp, Homo sapien
tcctgtcggagccagacaatcagtt

SEQ ID NO: 3370499 - DNA, 25 bp, Homo sapien
gactgcaagccttttatccactgag

SEQ ID NO: 3370500 - DNA, 25 bp, Homo sapien
catttgactgtgtgcagattacatt

SEQ ID NO: 3370501 - DNA, 25 bp, Homo sapien
tggtttgaacctgcataatactcac

SEQ ID NO: 3370502 - DNA, 25 bp, Homo sapien
ctggtttgaacctgcataatactca

SEQ ID NO: 3370503 - DNA, 25 bp, Homo sapien
gataatattcagcaccaatgggaaa

SEQ ID NO: 3370504 - DNA, 25 bp, Homo sapien
ttcttcaatcatgtaggaagttcct

SEQ ID NO: 3370505 - DNA, 25 bp, Homo sapien
tcttcaatcatgtaggaagttcctt

SEQ ID NO: 3370506 - DNA, 25 bp, Homo sapien
atgtgttaactctccagatgacttt

SEQ ID NO: 3370507 - DNA, 25 bp, Homo sapien
ccctgagctcacatatccaagacag

SEQ ID NO: 3370508 - DNA, 25 bp, Homo sapien
ggccctgagctcacatatccaagac

SEQ ID NO: 3370509 - DNA, 25 bp, Homo sapien
aggagtttatcttgcatggccctga

SEQ ID NO: 3370510 - DNA, 25 bp, Homo sapien
ctaggagtttatcttgcatggccct

SEQ ID NO: 3370511 - DNA, 25 bp, Homo sapien
aataggcagccataatagatgatag

SEQ ID NO: 3370512 - DNA, 25 bp, Homo sapien
gtttaatgtgatcatagaagaagca

SEQ ID NO: 3370513 - DNA, 25 bp, Homo sapien
tagtagaaagacgtaacacagcgtg

SEQ ID NO: 3370514 - DNA, 25 bp, Homo sapien
tatgccaagctctcaaaataggcag

SEQ ID NO: 3370515 - DNA, 25 bp, Homo sapien
aaaatttctcccatacaatcaggtg

SEQ ID NO: 3370516 - DNA, 25 bp, Homo sapien
ggaacaaaacagtctatcttccagt

SEQ ID NO: 3370517 - DNA, 25 bp, Homo sapien
aacagtctatcttccagtcagtatc

SEQ ID NO: 3370518 - DNA, 25 bp, Homo sapien
tctcccatacaatcaggtggaacaa

SEQ ID NO: 3370519 - DNA, 25 bp, Homo sapien
gaagagtttatgagtggcagcagaa

SEQ ID NO: 3370520 - DNA, 25 bp, Homo sapien
tatgagtggcagcagaattaccagt

SEQ ID NO: 3370521 - DNA, 25 bp, Homo sapien
tgcagaagagtttatgagtggcagc

SEQ ID NO: 3370522 - DNA, 25 bp, Homo sapien
gtttatgagtggcagcagaattacc

SEQ ID NO: 3370523 - DNA, 25 bp, Homo sapien
tccccttgctcccaactccccaata

SEQ ID NO: 3370524 - DNA, 25 bp, Homo sapien
cccttgctcccaactccccaatagg

SEQ ID NO: 3370525 - DNA, 25 bp, Homo sapien
ctcccaactccccaataggccctgg

SEQ ID NO: 3370526 - DNA, 25 bp, Homo sapien
ttgctcccaactccccaataggccc

SEQ ID NO: 3370527 - DNA, 25 bp, Homo sapien
caagtggcatttataagtacaggca

SEQ ID NO: 3370528 - DNA, 25 bp, Homo sapien
aagaagtagacatttaagcccaggg

SEQ ID NO: 3370529 - DNA, 25 bp, Homo sapien
cgaaggtacttttgctccagtggat

SEQ ID NO: 3370530 - DNA, 25 bp, Homo sapien
tccagtggatttgggagtcaagcca

SEQ ID NO: 3370531 - DNA, 25 bp, Homo sapien
aagccagagacgaagtccagttagc

SEQ ID NO: 3370532 - DNA, 25 bp, Homo sapien
cacttagcataagaggtagatttcc

SEQ ID NO: 3370533 - DNA, 25 bp, Homo sapien
ccgccaggtgatataagggcactta

SEQ ID NO: 3370534 - DNA, 25 bp, Homo sapien
cagttagcagcagaattggactgat

SEQ ID NO: 3370535 - DNA, 25 bp, Homo sapien
tgatcttatcagtcaaagaaaatag

SEQ ID NO: 3370536 - DNA, 25 bp, Homo sapien
aaagaaaatagtactgcttcacaga

SEQ ID NO: 3370537 - DNA, 25 bp, Homo sapien
cttcaatgatcttatcagtcaaaga

SEQ ID NO: 3370538 - DNA, 25 bp, Homo sapien
caatgatcttatcagtcaaagaaaa

SEQ ID NO: 3370539 - DNA, 25 bp, Homo sapien
tcatttcttattactgtctcaggga

SEQ ID NO: 3370540 - DNA, 25 bp, Homo sapien
gatttgccctttgtgaaactagcct

SEQ ID NO: 3370541 - DNA, 25 bp, Homo sapien
ctctctggatgtttggtaacctcat

SEQ ID NO: 3370542 - DNA, 25 bp, Homo sapien
gcaaaaatgccaccaaattcgtcag

SEQ ID NO: 3370543 - DNA, 25 bp, Homo sapien
aattctatcccgcattcctgtcacg

SEQ ID NO: 3370544 - DNA, 25 bp, Homo sapien
ttcagttgaattctatcccgcattc

SEQ ID NO: 3370545 - DNA, 25 bp, Homo sapien
ttctatcccgcattcctgtcacgta

SEQ ID NO: 3370546 - DNA, 25 bp, Homo sapien
gttgaattctatcccgcattcctgt

SEQ ID NO: 3370547 - DNA, 25 bp, Homo sapien
aagtgaatatgttcttcttgggctc

SEQ ID NO: 3370548 - DNA, 25 bp, Homo sapien
ccttgggccatggctgactggatga

SEQ ID NO: 3370549 - DNA, 25 bp, Homo sapien
ctgctggttgcttgagcagagatga

SEQ ID NO: 3370550 - DNA, 25 bp, Homo sapien
tattaagagatgctagtctctgctg

SEQ ID NO: 3370551 - DNA, 25 bp, Homo sapien
agggtctgcctccagtgtggatgtc

SEQ ID NO: 3370552 - DNA, 25 bp, Homo sapien
tccttcaccccactcgggctctgac

SEQ ID NO: 3370553 - DNA, 25 bp, Homo sapien
ctccagtgtggatgtcctccttcac

SEQ ID NO: 3370554 - DNA, 25 bp, Homo sapien
tctgcctccagtgtggatgtcctcc

SEQ ID NO: 3370555 - DNA, 25 bp, Homo sapien
ataggacggcttaaaagaccatcac

SEQ ID NO: 3370556 - DNA, 25 bp, Homo sapien
aataggacggcttaaaagaccatca

SEQ ID NO: 3370557 - DNA, 25 bp, Homo sapien
aggatgacctcagattttgataaat

SEQ ID NO: 3370558 - DNA, 25 bp, Homo sapien
ctataatgaggcgaagggtaaccat

SEQ ID NO: 3370559 - DNA, 25 bp, Homo sapien
aggcgaagggtaaccattagcagca

SEQ ID NO: 3370560 - DNA, 25 bp, Homo sapien
ttagcagcacaattcaggatgacct

SEQ ID NO: 3370561 - DNA, 25 bp, Homo sapien
aatcaatgtctgtgccattttgctt

SEQ ID NO: 3370562 - DNA, 25 bp, Homo sapien
aatgtctgtgccattttgcttccac

SEQ ID NO: 3370563 - DNA, 25 bp, Homo sapien
agtaaaatcaatgtctgtgccattt

SEQ ID NO: 3370564 - DNA, 25 bp, Homo sapien
caatgtctgtgccattttgcttcca

SEQ ID NO: 3370565 - DNA, 25 bp, Homo sapien
tggtacatgccaatatcttgatctg

SEQ ID NO: 3370566 - DNA, 25 bp, Homo sapien
tgcaaattggagctttgccttccga

SEQ ID NO: 3370567 - DNA, 25 bp, Homo sapien
gctattgattgcaagactgcctcca

SEQ ID NO: 3370568 - DNA, 25 bp, Homo sapien
cccagaagattggtggccaggcact

SEQ ID NO: 3370569 - DNA, 25 bp, Homo sapien
ccagggtaattacttggatgacatt

SEQ ID NO: 3370570 - DNA, 25 bp, Homo sapien
tgatgcagctggacattgttacagt

SEQ ID NO: 3370571 - DNA, 25 bp, Homo sapien
gtcaccagggtaattacttggatga

SEQ ID NO: 3370572 - DNA, 25 bp, Homo sapien
ttggcaaccactttatttccaccta

SEQ ID NO: 3370573 - DNA, 25 bp, Homo sapien
gaaaggttgttcataaggccattca

SEQ ID NO: 3370574 - DNA, 25 bp, Homo sapien
cattctgaaggtcaaagtgacattt

SEQ ID NO: 3370575 - DNA, 25 bp, Homo sapien
tctgccatggacagggtagattctg

SEQ ID NO: 3370576 - DNA, 25 bp, Homo sapien
ctagaggtatgtccctgcagcgttt

SEQ ID NO: 3370577 - DNA, 25 bp, Homo sapien
gaagggtcaattaggaggctccagc

SEQ ID NO: 3370578 - DNA, 25 bp, Homo sapien
ctttaggacctagtgtagtacttga

SEQ ID NO: 3370579 - DNA, 25 bp, Homo sapien
gatgggtataaattaggtgttctcc

SEQ ID NO: 3370580 - DNA, 25 bp, Homo sapien
tgttctccggttgcttggaggatga

SEQ ID NO: 3370581 - DNA, 25 bp, Homo sapien
gagaattaggttcagtgataaggac

SEQ ID NO: 3370582 - DNA, 25 bp, Homo sapien
ctaaggagaattaggttcagtgata

SEQ ID NO: 3370583 - DNA, 25 bp, Homo sapien
ttaggttcagtgataaggacccttg

SEQ ID NO: 3370584 - DNA, 25 bp, Homo sapien
ggttcagtgataaggacccttgcat

SEQ ID NO: 3370585 - DNA, 25 bp, Homo sapien
ttctttgtagctttctccagctcag

SEQ ID NO: 3370586 - DNA, 25 bp, Homo sapien
ctttgtagctttctccagctcagca

SEQ ID NO: 3370587 - DNA, 25 bp, Homo sapien
tttctttgtagctttctccagctca

SEQ ID NO: 3370588 - DNA, 25 bp, Homo sapien
tctttgtagctttctccagctcagc

SEQ ID NO: 3370589 - DNA, 25 bp, Homo sapien
attttcttagtccaagcaaggtctt

SEQ ID NO: 3370590 - DNA, 25 bp, Homo sapien
ttcttagtccaagcaaggtctttgg

SEQ ID NO: 3370591 - DNA, 25 bp, Homo sapien
tttcttagtccaagcaaggtctttg

SEQ ID NO: 3370592 - DNA, 25 bp, Homo sapien
ctgcagggttgatggtaaatactga

SEQ ID NO: 3370593 - DNA, 25 bp, Homo sapien
ctggaattcgggagagtgactgcag

SEQ ID NO: 3370594 - DNA, 25 bp, Homo sapien
actgcagggttgatggtaaatactg

SEQ ID NO: 3370595 - DNA, 25 bp, Homo sapien
aaacattttgcggggcaaagaaatg

SEQ ID NO: 3370596 - DNA, 25 bp, Homo sapien
aacattttgcggggcaaagaaatgc

SEQ ID NO: 3370597 - DNA, 25 bp, Homo sapien
acattttgcggggcaaagaaatgcc

SEQ ID NO: 3370598 - DNA, 25 bp, Homo sapien
cacttgttcaccttcacgatgcggt

SEQ ID NO: 3370599 - DNA, 25 bp, Homo sapien
tgctttctggtttccgtcaaccaaa

SEQ ID NO: 3370600 - DNA, 25 bp, Homo sapien
gcggttcccatgttgaaggtatgta

SEQ ID NO: 3370601 - DNA, 25 bp, Homo sapien
gctggttctggagtaaacaagatgt

SEQ ID NO: 3370602 - DNA, 25 bp, Homo sapien
ggccatggcttatcatgtcctgtgg

SEQ ID NO: 3370603 - DNA, 25 bp, Homo sapien
tcacgaataaggctctgttccaaag

SEQ ID NO: 3370604 - DNA, 25 bp, Homo sapien
cattaagccattctgatggccatgg

SEQ ID NO: 3370605 - DNA, 25 bp, Homo sapien
gaagcatttggcaggagtataagca

SEQ ID NO: 3370606 - DNA, 25 bp, Homo sapien
tgagaacccacatggaaggatcggc

SEQ ID NO: 3370607 - DNA, 25 bp, Homo sapien
cctgaagggtgataatgagaaccca

SEQ ID NO: 3370608 - DNA, 25 bp, Homo sapien
aataaggtccttgtaaagcctgaag

SEQ ID NO: 3370609 - DNA, 25 bp, Homo sapien
gattcaggacacagataaaataagg

SEQ ID NO: 3370610 - DNA, 25 bp, Homo sapien
gaccttctcggacagatactgtgct

SEQ ID NO: 3370611 - DNA, 25 bp, Homo sapien
cttctcggacagatactgtgcttct

SEQ ID NO: 3370612 - DNA, 25 bp, Homo sapien
cttgaccttctcggacagatactgt

SEQ ID NO: 3370613 - DNA, 25 bp, Homo sapien
tgaccttctcggacagatactgtgc

SEQ ID NO: 3370614 - DNA, 25 bp, Homo sapien
ggcggtgggccacagagaagcacca

SEQ ID NO: 3370615 - DNA, 25 bp, Homo sapien
aaatgtggcggtgggccacagagaa

SEQ ID NO: 3370616 - DNA, 25 bp, Homo sapien
cggtgggccacagagaagcaccaca

SEQ ID NO: 3370617 - DNA, 25 bp, Homo sapien
ctccaaaatgtggcggtgggccaca

SEQ ID NO: 3370618 - DNA, 25 bp, Homo sapien
ggtccatggaagtttattgattgct

SEQ ID NO: 3370619 - DNA, 25 bp, Homo sapien
cagatagtttgtgccgacatttttt

SEQ ID NO: 3370620 - DNA, 25 bp, Homo sapien
caagggcgttatatctgttccaaaa

SEQ ID NO: 3370621 - DNA, 25 bp, Homo sapien
tttgtgccgacattttttgtgacga

SEQ ID NO: 3370622 - DNA, 25 bp, Homo sapien
tttggcaatgtacaagtttcccgtc

SEQ ID NO: 3370623 - DNA, 25 bp, Homo sapien
cacatctgatggttccactttggca

SEQ ID NO: 3370624 - DNA, 25 bp, Homo sapien
aaatcgcctattgtcctcttggacg

SEQ ID NO: 3370625 - DNA, 25 bp, Homo sapien
cgtctcttgagatacaaatcgccta

SEQ ID NO: 3370626 - DNA, 25 bp, Homo sapien
aggaaaacgcacttcaatctttggt

SEQ ID NO: 3370627 - DNA, 25 bp, Homo sapien
tgtatagtttcaggaaaacgcactt

SEQ ID NO: 3370628 - DNA, 25 bp, Homo sapien
cagcttgtatagtttcaggaaaacg

SEQ ID NO: 3370629 - DNA, 25 bp, Homo sapien
cttcaatctttggttcatattcccc

SEQ ID NO: 3370630 - DNA, 25 bp, Homo sapien
cctaattgctcctttctctcttata

SEQ ID NO: 3370631 - DNA, 25 bp, Homo sapien
tttctctcttatactgtcatcaatc

SEQ ID NO: 3370632 - DNA, 25 bp, Homo sapien
tcctttctctcttatactgtcatca

SEQ ID NO: 3370633 - DNA, 25 bp, Homo sapien
ctaattgctcctttctctcttatac

SEQ ID NO: 3370634 - DNA, 25 bp, Homo sapien
tctttcaggtgagacatggatgtgt

SEQ ID NO: 3370635 - DNA, 25 bp, Homo sapien
gcaatcagacagtgctctccaaact

SEQ ID NO: 3370636 - DNA, 25 bp, Homo sapien
catctagtaccatttcagtagggaa

SEQ ID NO: 3370637 - DNA, 25 bp, Homo sapien
cctagctgctatggagatacaacct

SEQ ID NO: 3370638 - DNA, 25 bp, Homo sapien
gatgaagacaaaccaaccagagaca

SEQ ID NO: 3370639 - DNA, 25 bp, Homo sapien
tagggcatagccaccttgactagac

SEQ ID NO: 3370640 - DNA, 25 bp, Homo sapien
taattcaggtcttgccataagaggc

SEQ ID NO: 3370641 - DNA, 25 bp, Homo sapien
tgagacagtgaggtataaacgccaa

SEQ ID NO: 3370642 - DNA, 25 bp, Homo sapien
ctaaacagttacacctcattagaat

SEQ ID NO: 3370643 - DNA, 25 bp, Homo sapien
aaacagttacacctcattagaatag

SEQ ID NO: 3370644 - DNA, 25 bp, Homo sapien
ctcattagaatagaagacggtttaa

SEQ ID NO: 3370645 - DNA, 25 bp, Homo sapien
cacctcattagaatagaagacggtt

SEQ ID NO: 3370646 - DNA, 25 bp, Homo sapien
ttcaaggatagcttgggatttgctg

SEQ ID NO: 3370647 - DNA, 25 bp, Homo sapien
gatttgctgtacttgactttccctg

SEQ ID NO: 3370648 - DNA, 25 bp, Homo sapien
ttggaagttcgggatttcaaggata

SEQ ID NO: 3370649 - DNA, 25 bp, Homo sapien
ttgactttccctggcaacgggctcc

SEQ ID NO: 3370650 - DNA, 25 bp, Homo sapien
ctttgcaaggtttcttcctcgaagg

SEQ ID NO: 3370651 - DNA, 25 bp, Homo sapien
tcttcctcgaaggttgcttgcaatg

SEQ ID NO: 3370652 - DNA, 25 bp, Homo sapien
tcctcgaaggttgcttgcaatgcac

SEQ ID NO: 3370653 - DNA, 25 bp, Homo sapien
cctttgcaaggtttcttcctcgaag

SEQ ID NO: 3370654 - DNA, 25 bp, Homo sapien
aaaggcagttatccaagacattatg

SEQ ID NO: 3370655 - DNA, 25 bp, Homo sapien
ctgtttggtaaaaggcagttatcca

SEQ ID NO: 3370656 - DNA, 25 bp, Homo sapien
tgtttggtaaaaggcagttatccaa

SEQ ID NO: 3370657 - DNA, 25 bp, Homo sapien
gtaaaaggcagttatccaagacatt

SEQ ID NO: 3370658 - DNA, 25 bp, Homo sapien
ctctgggttgagtcgttcaccattt

SEQ ID NO: 3370659 - DNA, 25 bp, Homo sapien
agcaagttgtcatagatagagaggt

SEQ ID NO: 3370660 - DNA, 25 bp, Homo sapien
taaccatgtataccaagggtttggc

SEQ ID NO: 3370661 - DNA, 25 bp, Homo sapien
ttggctttccactagctttacattc

SEQ ID NO: 3370662 - DNA, 25 bp, Homo sapien
tgacacattcagcatcgttatgatg

SEQ ID NO: 3370663 - DNA, 25 bp, Homo sapien
cagcatcgttatgatgagtgtccca

SEQ ID NO: 3370664 - DNA, 25 bp, Homo sapien
gcacattggtacacaccagaatctg

SEQ ID NO: 3370665 - DNA, 25 bp, Homo sapien
ttggtacacaccagaatctgacaca

SEQ ID NO: 3370666 - DNA, 25 bp, Homo sapien
tttgcatccgataacaatatcccca

SEQ ID NO: 3370667 - DNA, 25 bp, Homo sapien
tatccccaccaacttgaacaaaaga

SEQ ID NO: 3370668 - DNA, 25 bp, Homo sapien
tcttttccaagagatagctgccctg

SEQ ID NO: 3370669 - DNA, 25 bp, Homo sapien
tagctgccctgggaaaagcatttgg

SEQ ID NO: 3370670 - DNA, 25 bp, Homo sapien
ctgagaatgccttgcagagataaac

SEQ ID NO: 3370671 - DNA, 25 bp, Homo sapien
taatcaaacttagcagatgtggaat

SEQ ID NO: 3370672 - DNA, 25 bp, Homo sapien
catcctgattttccgtggttgttcc

SEQ ID NO: 3370673 - DNA, 25 bp, Homo sapien
gaattgattccctcagttgcctgag

SEQ ID NO: 3370674 - DNA, 25 bp, Homo sapien
gcatatcactattttcagaagattt

SEQ ID NO: 3370675 - DNA, 25 bp, Homo sapien
tgcatatcactattttcagaagatt

SEQ ID NO: 3370676 - DNA, 25 bp, Homo sapien
cactattttcagaagatttttttag

SEQ ID NO: 3370677 - DNA, 25 bp, Homo sapien
cttgcatatcactattttcagaaga

SEQ ID NO: 3370678 - DNA, 25 bp, Homo sapien
tgcatgtatatgatccagcatctga

SEQ ID NO: 3370679 - DNA, 25 bp, Homo sapien
ggctatgcatgtatatgatccagca

SEQ ID NO: 3370680 - DNA, 25 bp, Homo sapien
catgtatatgatccagcatctgacc

SEQ ID NO: 3370681 - DNA, 25 bp, Homo sapien
atttgtggctatgcatgtatatgat

SEQ ID NO: 3370682 - DNA, 25 bp, Homo sapien
gtgttcattcagactattctccaat

SEQ ID NO: 3370683 - DNA, 25 bp, Homo sapien
tggctgtagcgaattatacaataga

SEQ ID NO: 3370684 - DNA, 25 bp, Homo sapien
ttctccaatagtaacttcatgctgg

SEQ ID NO: 3370685 - DNA, 25 bp, Homo sapien
taaatagatagtgttcattcagact

SEQ ID NO: 3370686 - DNA, 25 bp, Homo sapien
tgtgcagatggctgtctaatagcca

SEQ ID NO: 3370687 - DNA, 25 bp, Homo sapien
gtgcagatggctgtctaatagccat

SEQ ID NO: 3370688 - DNA, 25 bp, Homo sapien
tcatgggacacctggcatggtagca

SEQ ID NO: 3370689 - DNA, 25 bp, Homo sapien
ggtgggacggtaatgacagttctct

SEQ ID NO: 3370690 - DNA, 25 bp, Homo sapien
catggtagcactatactctcgccaa

SEQ ID NO: 3370691 - DNA, 25 bp, Homo sapien
taagtctatgacatctccattgaaa

SEQ ID NO: 3370692 - DNA, 25 bp, Homo sapien
gctactgcagataaactttctaggg

SEQ ID NO: 3370693 - DNA, 25 bp, Homo sapien
ctttctagggttgtttgtactgtgc

SEQ ID NO: 3370694 - DNA, 25 bp, Homo sapien
tactgtgcagagatattttcctgaa

SEQ ID NO: 3370695 - DNA, 25 bp, Homo sapien
cctgaatgatgtaactgaatattcc

SEQ ID NO: 3370696 - DNA, 25 bp, Homo sapien
aaaatggtgtccgagtctgaatagt

SEQ ID NO: 3370697 - DNA, 25 bp, Homo sapien
gggcctgctctccaacttagttgag

SEQ ID NO: 3370698 - DNA, 25 bp, Homo sapien
ggtgtccgagtctgaatagtaaata

SEQ ID NO: 3370699 - DNA, 25 bp, Homo sapien
gtcttccacttgcacatcctcagga

SEQ ID NO: 3370700 - DNA, 25 bp, Homo sapien
gcattgtatgtcttaccattgagaa

SEQ ID NO: 3370701 - DNA, 25 bp, Homo sapien
cccaatgctgttgccggcaacaaca

SEQ ID NO: 3370702 - DNA, 25 bp, Homo sapien
tgccggcaacaacacgaaattcata

SEQ ID NO: 3370703 - DNA, 25 bp, Homo sapien
gatggttcacttggttctccaatcc

SEQ ID NO: 3370704 - DNA, 25 bp, Homo sapien
ccacacttttagaacacattgattc

SEQ ID NO: 3370705 - DNA, 25 bp, Homo sapien
aatcttccacacttttagaacacat

SEQ ID NO: 3370706 - DNA, 25 bp, Homo sapien
cttttagaacacattgattctttac

SEQ ID NO: 3370707 - DNA, 25 bp, Homo sapien
catacgaaatcttccacacttttag

SEQ ID NO: 3370708 - DNA, 25 bp, Homo sapien
ggatgtttactggtgccacaacagg

SEQ ID NO: 3370709 - DNA, 25 bp, Homo sapien
atgtttactggtgccacaacaggga

SEQ ID NO: 3370710 - DNA, 25 bp, Homo sapien
gacgagttcagaccgacttcctcca

SEQ ID NO: 3370711 - DNA, 25 bp, Homo sapien
ctcccacgtaatgacgagttcagac

SEQ ID NO: 3370712 - DNA, 25 bp, Homo sapien
aatccaggaactgatacccttcagc

SEQ ID NO: 3370713 - DNA, 25 bp, Homo sapien
accaaaatccaggaactgataccct

SEQ ID NO: 3370714 - DNA, 25 bp, Homo sapien
tgatacccttcagcagccagttggg

SEQ ID NO: 3370715 - DNA, 25 bp, Homo sapien
ggaactgatacccttcagcagccag

SEQ ID NO: 3370716 - DNA, 25 bp, Homo sapien
aaatccctccccattctgcagttct

SEQ ID NO: 3370717 - DNA, 25 bp, Homo sapien
tatatccaaatccctccccattctg

SEQ ID NO: 3370718 - DNA, 25 bp, Homo sapien
gatgatatatccaaatccctcccca

SEQ ID NO: 3370719 - DNA, 25 bp, Homo sapien
tgatatatccaaatccctccccatt

SEQ ID NO: 3370720 - DNA, 25 bp, Homo sapien
tccccagagtagacaatggtcacag

SEQ ID NO: 3370721 - DNA, 25 bp, Homo sapien
ttctccttggaccaggttgtcgagc

SEQ ID NO: 3370722 - DNA, 25 bp, Homo sapien
cagtgggatgatgctttcatttctg

SEQ ID NO: 3370723 - DNA, 25 bp, Homo sapien
ccttgatgattccacagatgacact

SEQ ID NO: 3370724 - DNA, 25 bp, Homo sapien
ctaccatccagagaaagacataacc

SEQ ID NO: 3370725 - DNA, 25 bp, Homo sapien
ccatgaaacctccatttcagaagca

SEQ ID NO: 3370726 - DNA, 25 bp, Homo sapien
aaactctggagagaagttccccttg

SEQ ID NO: 3370727 - DNA, 25 bp, Homo sapien
tattccaggcaatagcattccatga

SEQ ID NO: 3370728 - DNA, 25 bp, Homo sapien
tcttccagtgtttctattccaggca

SEQ ID NO: 3370729 - DNA, 25 bp, Homo sapien
aagtagatggtattagctttcagcc

SEQ ID NO: 3370730 - DNA, 25 bp, Homo sapien
ccccgtgatgtttttggttgtgaca

SEQ ID NO: 3370731 - DNA, 25 bp, Homo sapien
gccccgtgatgtttttggttgtgac

SEQ ID NO: 3370732 - DNA, 25 bp, Homo sapien
tagatggtattagctttcagccccg

SEQ ID NO: 3370733 - DNA, 25 bp, Homo sapien
gtggtaacattgactggggggcttg

SEQ ID NO: 3370734 - DNA, 25 bp, Homo sapien
gactttttggtggtaacattgactg

SEQ ID NO: 3370735 - DNA, 25 bp, Homo sapien
cctgtcccagcagtgttgtaagctc

SEQ ID NO: 3370736 - DNA, 25 bp, Homo sapien
ttgagggccctgtcccagcagtgtt

SEQ ID NO: 3370737 - DNA, 25 bp, Homo sapien
ttccaagtaagctgtagtaataagg

SEQ ID NO: 3370738 - DNA, 25 bp, Homo sapien
gatttcagggacttccaagtaagct

SEQ ID NO: 3370739 - DNA, 25 bp, Homo sapien
gggacttccaagtaagctgtagtaa

SEQ ID NO: 3370740 - DNA, 25 bp, Homo sapien
ttagatttcagggacttccaagtaa

SEQ ID NO: 3370741 - DNA, 25 bp, Homo sapien
catgggtaatttgggaaggagtgag

SEQ ID NO: 3370742 - DNA, 25 bp, Homo sapien
atgggtaatttgggaaggagtgagg

SEQ ID NO: 3370743 - DNA, 25 bp, Homo sapien
cttgtttgtgcttcatgggtaattt

SEQ ID NO: 3370744 - DNA, 25 bp, Homo sapien
aaggagcagttctcctatgtagctg

SEQ ID NO: 3370745 - DNA, 25 bp, Homo sapien
gaggcctgggcctctcagtactcca

SEQ ID NO: 3370746 - DNA, 25 bp, Homo sapien
cagtactccaatgagaccgtgtggg

SEQ ID NO: 3370747 - DNA, 25 bp, Homo sapien
tctcctatgtagctgaggcctgggc

SEQ ID NO: 3370748 - DNA, 25 bp, Homo sapien
tgctatcatcttggtcctctgattc

SEQ ID NO: 3370749 - DNA, 25 bp, Homo sapien
atcatcttggtcctctgattcctgg

SEQ ID NO: 3370750 - DNA, 25 bp, Homo sapien
ctgattcctggctgtcttgttcctg

SEQ ID NO: 3370751 - DNA, 25 bp, Homo sapien
ttcggggggccgtcactgctatcat

SEQ ID NO: 3370752 - DNA, 25 bp, Homo sapien
gagtagcattgtttggcctacaccc

SEQ ID NO: 3370753 - DNA, 25 bp, Homo sapien
agagtagcattgtttggcctacacc

SEQ ID NO: 3370754 - DNA, 25 bp, Homo sapien
gtccctgggaacgaccctgggcgca

SEQ ID NO: 3370755 - DNA, 25 bp, Homo sapien
gggaacgaccctgggcgcaaatatc

SEQ ID NO: 3370756 - DNA, 25 bp, Homo sapien
cgctgctgtcgtccctgggaacgac

SEQ ID NO: 3370757 - DNA, 25 bp, Homo sapien
gctgtcgtccctgggaacgaccctg

SEQ ID NO: 3370758 - DNA, 25 bp, Homo sapien
ggtttaattgctcttaggccctcag

SEQ ID NO: 3370759 - DNA, 25 bp, Homo sapien
tagcttagccaattagaacaggcag

SEQ ID NO: 3370760 - DNA, 25 bp, Homo sapien
caaatctagacagtgacagtgctga

SEQ ID NO: 3370761 - DNA, 25 bp, Homo sapien
tctaggcatggctcatgggaggcac

SEQ ID NO: 3370762 - DNA, 25 bp, Homo sapien
catacaagaaaacgagaatccaggt

SEQ ID NO: 3370763 - DNA, 25 bp, Homo sapien
gggaagtcacttatccaaaagcatg

SEQ ID NO: 3370764 - DNA, 25 bp, Homo sapien
tcaatcacttacagtccagttggga

SEQ ID NO: 3370765 - DNA, 25 bp, Homo sapien
agcatgcagctgacgaatcttggtc

SEQ ID NO: 3370766 - DNA, 25 bp, Homo sapien
gatttgcatagaaggagctaaaatg

SEQ ID NO: 3370767 - DNA, 25 bp, Homo sapien
aaaaaataagtcttcgatgatttgc

SEQ ID NO: 3370768 - DNA, 25 bp, Homo sapien
ttcgatgatttgcatagaaggagct

SEQ ID NO: 3370769 - DNA, 25 bp, Homo sapien
catagaaggagctaaaatgtcttca

SEQ ID NO: 3370770 - DNA, 25 bp, Homo sapien
tccaggcaatgtttgctggtggttg

SEQ ID NO: 3370771 - DNA, 25 bp, Homo sapien
agagtttgtcagcttccaggcaatg

SEQ ID NO: 3370772 - DNA, 25 bp, Homo sapien
tcccagttcaagcataatttagagt

SEQ ID NO: 3370773 - DNA, 25 bp, Homo sapien
ggtttttacatgctcccagttcaag

SEQ ID NO: 3370774 - DNA, 25 bp, Homo sapien
tgtaccccaaaacttcagactcatt

SEQ ID NO: 3370775 - DNA, 25 bp, Homo sapien
cttgtaccccaaaacttcagactca

SEQ ID NO: 3370776 - DNA, 25 bp, Homo sapien
ttgtaccccaaaacttcagactcat

SEQ ID NO: 3370777 - DNA, 25 bp, Homo sapien
agttttactctgtctgttttgccgg

SEQ ID NO: 3370778 - DNA, 25 bp, Homo sapien
tatttcaattaagtagtcttcttca

SEQ ID NO: 3370779 - DNA, 25 bp, Homo sapien
tactctgtctgttttgccggtacag

SEQ ID NO: 3370780 - DNA, 25 bp, Homo sapien
tgtttccaaaatatgagttttactc

SEQ ID NO: 3370781 - DNA, 25 bp, Homo sapien
gcagctgtctaggttcagaatctac

SEQ ID NO: 3370782 - DNA, 25 bp, Homo sapien
tcacccaacatttaagccataactg

SEQ ID NO: 3370783 - DNA, 25 bp, Homo sapien
cataactggaaggtttcatggagct

SEQ ID NO: 3370784 - DNA, 25 bp, Homo sapien
tactacagcaatggtgactcaactt

SEQ ID NO: 3370785 - DNA, 25 bp, Homo sapien
gacttgcactcaatcacagcttcag

SEQ ID NO: 3370786 - DNA, 25 bp, Homo sapien
gcaaagtctgcctaaaggattggcc

SEQ ID NO: 3370787 - DNA, 25 bp, Homo sapien
tattgcctgctaactctgactgact

SEQ ID NO: 3370788 - DNA, 25 bp, Homo sapien
agtgccttaccgtgtctttgtccaa

SEQ ID NO: 3370789 - DNA, 25 bp, Homo sapien
cagataagtggctgaatagcaaaac

SEQ ID NO: 3370790 - DNA, 25 bp, Homo sapien
gaaaatgggtgctaggttctaagaa

SEQ ID NO: 3370791 - DNA, 25 bp, Homo sapien
gaattgaattcctctggaactcaaa

SEQ ID NO: 3370792 - DNA, 25 bp, Homo sapien
gataagtggctgaatagcaaaacag

SEQ ID NO: 3370793 - DNA, 25 bp, Homo sapien
gtctgtattaagaacgcatcttgtg

SEQ ID NO: 3370794 - DNA, 25 bp, Homo sapien
agaggctggagagcatatatacaga

SEQ ID NO: 3370795 - DNA, 25 bp, Homo sapien
ttaagaacgcatcttgtgtcagagg

SEQ ID NO: 3370796 - DNA, 25 bp, Homo sapien
gaggctggagagcatatatacagaa

SEQ ID NO: 3370797 - DNA, 25 bp, Homo sapien
gtttttaaagacagcagccatgccc

SEQ ID NO: 3370798 - DNA, 25 bp, Homo sapien
tgtttttaaagacagcagccatgcc

SEQ ID NO: 3370799 - DNA, 25 bp, Homo sapien
ttttaaagacagcagccatgccctc

SEQ ID NO: 3370800 - DNA, 25 bp, Homo sapien
ttaaagacagcagccatgccctcct

SEQ ID NO: 3370801 - DNA, 25 bp, Homo sapien
ttacaatcagccttagcaaagtaac

SEQ ID NO: 3370802 - DNA, 25 bp, Homo sapien
caatcagccttagcaaagtaacaca

SEQ ID NO: 3370803 - DNA, 25 bp, Homo sapien
ttttacaatcagccttagcaaagta

SEQ ID NO: 3370804 - DNA, 25 bp, Homo sapien
tacaatcagccttagcaaagtaaca

SEQ ID NO: 3370805 - DNA, 25 bp, Homo sapien
tctctggcttggttatgcaattcta

SEQ ID NO: 3370806 - DNA, 25 bp, Homo sapien
tgcaacttagaccttggaatgatcc

SEQ ID NO: 3370807 - DNA, 25 bp, Homo sapien
tatgtgtatgatcaagggtatagac

SEQ ID NO: 3370808 - DNA, 25 bp, Homo sapien
gactttagttaattcggctgcaggg

SEQ ID NO: 3370809 - DNA, 25 bp, Homo sapien
tccatcagttattttgagcttttgg

SEQ ID NO: 3370810 - DNA, 25 bp, Homo sapien
gtgaatcttacagtatgacctaaag

SEQ ID NO: 3370811 - DNA, 25 bp, Homo sapien
taaaactgagtgaatcttacagtat

SEQ ID NO: 3370812 - DNA, 25 bp, Homo sapien
acagtatgacctaaagaagtagcac

SEQ ID NO: 3370813 - DNA, 25 bp, Homo sapien
taataatcagtgctgaagaatttac

SEQ ID NO: 3370814 - DNA, 25 bp, Homo sapien
accaaatgccaaatgctatgactga

SEQ ID NO: 3370815 - DNA, 25 bp, Homo sapien
attcaccatcaagtgagagaagcag

SEQ ID NO: 3370816 - DNA, 25 bp, Homo sapien
gctatgactgagacggacacaggga

SEQ ID NO: 3370817 - DNA, 25 bp, Homo sapien
ttctttaattcctacaacctggatc

SEQ ID NO: 3370818 - DNA, 25 bp, Homo sapien
acaacctggatcttatgtttctgct

SEQ ID NO: 3370819 - DNA, 25 bp, Homo sapien
tccactcttgtcttactggggttcc

SEQ ID NO: 3370820 - DNA, 25 bp, Homo sapien
taattcctacaacctggatcttatg

SEQ ID NO: 3370821 - DNA, 25 bp, Homo sapien
gggcaaaccgtatcttcactctcag

SEQ ID NO: 3370822 - DNA, 25 bp, Homo sapien
ccttagtggttccagaacatgggtt

SEQ ID NO: 3370823 - DNA, 25 bp, Homo sapien
tggtctgctatcttcctgtatgtaa

SEQ ID NO: 3370824 - DNA, 25 bp, Homo sapien
tttgtagttgactcgacctgatctg

SEQ ID NO: 3370825 - DNA, 25 bp, Homo sapien
aaggtcccaggtagcctcattcaca

SEQ ID NO: 3370826 - DNA, 25 bp, Homo sapien
taagtgcagtgatctggcagattga

SEQ ID NO: 3370827 - DNA, 25 bp, Homo sapien
gggcagtcccatcttgtggtcattc

SEQ ID NO: 3370828 - DNA, 25 bp, Homo sapien
ttatttaggctaggatcatctgggc

SEQ ID NO: 3370829 - DNA, 25 bp, Homo sapien
catcctcaacctggattccaagcca

SEQ ID NO: 3370830 - DNA, 25 bp, Homo sapien
caccaactccattgccatgtgcggg

SEQ ID NO: 3370831 - DNA, 25 bp, Homo sapien
gtatggtgaacagaagtgtgccagc

SEQ ID NO: 3370832 - DNA, 25 bp, Homo sapien
ggtgaacagaagtgtgccagcagta

SEQ ID NO: 3370833 - DNA, 25 bp, Homo sapien
gcagagtccctttggaatgccactt

SEQ ID NO: 3370834 - DNA, 25 bp, Homo sapien
tcatgggacagtcttgcagagtccc

SEQ ID NO: 3370835 - DNA, 25 bp, Homo sapien
gacagtcttgcagagtccctttgga

SEQ ID NO: 3370836 - DNA, 25 bp, Homo sapien
aagctcatgggacagtcttgcagag

SEQ ID NO: 3370837 - DNA, 25 bp, Homo sapien
tttgtcacattctccatcagtatgc

SEQ ID NO: 3370838 - DNA, 25 bp, Homo sapien
ttgtcacattctccatcagtatgca

SEQ ID NO: 3370839 - DNA, 25 bp, Homo sapien
ctttgtcacattctccatcagtatg

SEQ ID NO: 3370840 - DNA, 25 bp, Homo sapien
tgtcacattctccatcagtatgcat

SEQ ID NO: 3370841 - DNA, 25 bp, Homo sapien
cagtcataatttggttagaactctc

SEQ ID NO: 3370842 - DNA, 25 bp, Homo sapien
cagaaaagaagacaactgggtccga

SEQ ID NO: 3370843 - DNA, 25 bp, Homo sapien
ctgggtccgatacagtaaaaggtgt

SEQ ID NO: 3370844 - DNA, 25 bp, Homo sapien
cagtaaaaggtgtgtcagtcataat

SEQ ID NO: 3370845 - DNA, 25 bp, Homo sapien
tacatccttattcattgcttcacaa

SEQ ID NO: 3370846 - DNA, 25 bp, Homo sapien
ttgcttcacaactcactccgagctt

SEQ ID NO: 3370847 - DNA, 25 bp, Homo sapien
ctcttcaatgtttctaaatgggtga

SEQ ID NO: 3370848 - DNA, 25 bp, Homo sapien
caatgtttctaaatgggtgattcat

SEQ ID NO: 3370849 - DNA, 25 bp, Homo sapien
tcttgatggcaccattaaacagctg

SEQ ID NO: 3370850 - DNA, 25 bp, Homo sapien
gatggcaccattaaacagctgtgca

SEQ ID NO: 3370851 - DNA, 25 bp, Homo sapien
caagggaccatgactttccgaattc

SEQ ID NO: 3370852 - DNA, 25 bp, Homo sapien
ctccaagggaccatgactttccgaa

SEQ ID NO: 3370853 - DNA, 25 bp, Homo sapien
aaattcttatgtctaaaaccaaatg

SEQ ID NO: 3370854 - DNA, 25 bp, Homo sapien
tgccaaaattcttatgtctaaaacc

SEQ ID NO: 3370855 - DNA, 25 bp, Homo sapien
aaaattgccaaaattcttatgtcta

SEQ ID NO: 3370856 - DNA, 25 bp, Homo sapien
aattcttatgtctaaaaccaaatgg

SEQ ID NO: 3370857 - DNA, 25 bp, Homo sapien
tccagtcacttgcatttccattatt

SEQ ID NO: 3370858 - DNA, 25 bp, Homo sapien
atccagtcacttgcatttccattat

SEQ ID NO: 3370859 - DNA, 25 bp, Homo sapien
gtacttaagtccttcatttagcagt

SEQ ID NO: 3370860 - DNA, 25 bp, Homo sapien
taagtccttcatttagcagtttctg

SEQ ID NO: 3370861 - DNA, 25 bp, Homo sapien
taagtacttaagtccttcatttagc

SEQ ID NO: 3370862 - DNA, 25 bp, Homo sapien
cttaagtccttcatttagcagtttc

SEQ ID NO: 3370863 - DNA, 25 bp, Homo sapien
aactggacttttcttgatgatctgg

SEQ ID NO: 3370864 - DNA, 25 bp, Homo sapien
gagaaatatttatgacactggcttg

SEQ ID NO: 3370865 - DNA, 25 bp, Homo sapien
aaaggctccaacgtcataataattc

SEQ ID NO: 3370866 - DNA, 25 bp, Homo sapien
cacagagttcagtaaaaaggctcca

SEQ ID NO: 3370867 - DNA, 25 bp, Homo sapien
atttcagtctcttcagtcaagtcct

SEQ ID NO: 3370868 - DNA, 25 bp, Homo sapien
tctcttcagtcaagtccttttcctg

SEQ ID NO: 3370869 - DNA, 25 bp, Homo sapien
cagtctcttcagtcaagtccttttc

SEQ ID NO: 3370870 - DNA, 25 bp, Homo sapien
ttcagtctcttcagtcaagtccttt

SEQ ID NO: 3370871 - DNA, 25 bp, Homo sapien
tgccaccttcactagcaacaaaaac

SEQ ID NO: 3370872 - DNA, 25 bp, Homo sapien
accttcactagcaacaaaaactgcc

SEQ ID NO: 3370873 - DNA, 25 bp, Homo sapien
gaatgccaccttcactagcaacaaa

SEQ ID NO: 3370874 - DNA, 25 bp, Homo sapien
caccttcactagcaacaaaaactgc

SEQ ID NO: 3370875 - DNA, 25 bp, Homo sapien
taaatgctcggtaggtagtacctga

SEQ ID NO: 3370876 - DNA, 25 bp, Homo sapien
taaacgctccgtaggtggtacctga

SEQ ID NO: 3370877 - DNA, 25 bp, Homo sapien
tgacccggagtgaatgctctgcagg

SEQ ID NO: 3370878 - DNA, 25 bp, Homo sapien
ggtacctgacccagagtaaacgctc

SEQ ID NO: 3370879 - DNA, 25 bp, Homo sapien
gtctgcatttctataactgactgca

SEQ ID NO: 3370880 - DNA, 25 bp, Homo sapien
taggtcgtctgcatttctataactg

SEQ ID NO: 3370881 - DNA, 25 bp, Homo sapien
ctctgttctataggtcgtctgcatt

SEQ ID NO: 3370882 - DNA, 25 bp, Homo sapien
gttctataggtcgtctgcatttcta

SEQ ID NO: 3370883 - DNA, 25 bp, Homo sapien
tgctcttgccgtctattgtatccct

SEQ ID NO: 3370884 - DNA, 25 bp, Homo sapien
atctgctcttgccgtctattgtatc

SEQ ID NO: 3370885 - DNA, 25 bp, Homo sapien
gtatcccttacagctgcgtatctgc

SEQ ID NO: 3370886 - DNA, 25 bp, Homo sapien
tctattgtatcccttacagctgcag

SEQ ID NO: 3370887 - DNA, 25 bp, Homo sapien
gctgcgtatctgctcttgccgtcta

SEQ ID NO: 3370888 - DNA, 25 bp, Homo sapien
tacagctgcgtatctgctcttgccg

SEQ ID NO: 3370889 - DNA, 25 bp, Homo sapien
gcgtatctgctcttgccgtctattg

SEQ ID NO: 3370890 - DNA, 25 bp, Homo sapien
ttacagctgcgtatctgctcttgcc

SEQ ID NO: 3370891 - DNA, 25 bp, Homo sapien
gtatcccttacagctgcatatctgc

SEQ ID NO: 3370892 - DNA, 25 bp, Homo sapien
tgacagccacgcattgattgggtgt

SEQ ID NO: 3370893 - DNA, 25 bp, Homo sapien
gacagccacgcattgattgggtgtt

SEQ ID NO: 3370894 - DNA, 25 bp, Homo sapien
acagccacgcattgattgggtgttt

SEQ ID NO: 3370895 - DNA, 25 bp, Homo sapien
caaaactggcgtaaggcacatgggt

SEQ ID NO: 3370896 - DNA, 25 bp, Homo sapien
actggcgtaaggcacatgggtacat

SEQ ID NO: 3370897 - DNA, 25 bp, Homo sapien
atttgtacagttctattagtcagct

SEQ ID NO: 3370898 - DNA, 25 bp, Homo sapien
agctgccaaaactggcgtaaggcac

SEQ ID NO: 3370899 - DNA, 25 bp, Homo sapien
tacttggttgcacctatgtgatgcc

SEQ ID NO: 3370900 - DNA, 25 bp, Homo sapien
ggagacatacttggttgcacctatg

SEQ ID NO: 3370901 - DNA, 25 bp, Homo sapien
gacatacttggttgcacctatgtga

SEQ ID NO: 3370902 - DNA, 25 bp, Homo sapien
ggttgcacctatgtgatgcctgcat

SEQ ID NO: 3370903 - DNA, 25 bp, Homo sapien
actccacagtttttcgttgctgaaa

SEQ ID NO: 3370904 - DNA, 25 bp, Homo sapien
aaactccacagtttttcgttgctga

SEQ ID NO: 3370905 - DNA, 25 bp, Homo sapien
aactccacagtttttcgttgctgaa

SEQ ID NO: 3370906 - DNA, 25 bp, Homo sapien
ctccacagtttttcgttgctgaaaa

SEQ ID NO: 3370907 - DNA, 25 bp, Homo sapien
tggaccccagaaggtgagtggtgtg

SEQ ID NO: 3370908 - DNA, 25 bp, Homo sapien
accccagaaggtgagtggtgtgtga

SEQ ID NO: 3370909 - DNA, 25 bp, Homo sapien
gaccccagaaggtgagtggtgtgtg

SEQ ID NO: 3370910 - DNA, 25 bp, Homo sapien
ggtgtgtgaatcttcttgaatttgt

SEQ ID NO: 3370911 - DNA, 25 bp, Homo sapien
aacgtcagagaacttcacagccagt

SEQ ID NO: 3370912 - DNA, 25 bp, Homo sapien
cagccagtttgatcctgtgtttgtt

SEQ ID NO: 3370913 - DNA, 25 bp, Homo sapien
gacatatcatggtgttgaccttggc

SEQ ID NO: 3370914 - DNA, 25 bp, Homo sapien
cttctctccatgacatatcatggtg

SEQ ID NO: 3370915 - DNA, 25 bp, Homo sapien
aagcctcatagcaggagtcaatgga

SEQ ID NO: 3370916 - DNA, 25 bp, Homo sapien
gcaacatccaaagcctcatagcagg

SEQ ID NO: 3370917 - DNA, 25 bp, Homo sapien
gcctcatagcaggagtcaatggaac

SEQ ID NO: 3370918 - DNA, 25 bp, Homo sapien
caaagcctcatagcaggagtcaatg

SEQ ID NO: 3370919 - DNA, 25 bp, Homo sapien
cctgtggcagaaggcactgatggtt

SEQ ID NO: 3370920 - DNA, 25 bp, Homo sapien
gaggcaaggcaatttggcagccctt

SEQ ID NO: 3370921 - DNA, 25 bp, Homo sapien
tttatgttgctgtcgtttcctagag

SEQ ID NO: 3370922 - DNA, 25 bp, Homo sapien
taagctcaaccttgtaatttgtcat

SEQ ID NO: 3370923 - DNA, 25 bp, Homo sapien
ttacttttctccaaaagatggatgt

SEQ ID NO: 3370924 - DNA, 25 bp, Homo sapien
ccaaaagatggatgtcacacgtatt

SEQ ID NO: 3370925 - DNA, 25 bp, Homo sapien
tctccaaaagatggatgtcacacgt

SEQ ID NO: 3370926 - DNA, 25 bp, Homo sapien
cttttctccaaaagatggatgtcac

SEQ ID NO: 3370927 - DNA, 25 bp, Homo sapien
tcccctagaatagtatacctggcag

SEQ ID NO: 3370928 - DNA, 25 bp, Homo sapien
gcaatgaagcatacctacagggtct

SEQ ID NO: 3370929 - DNA, 25 bp, Homo sapien
tcagtgcaaacttataggccagaag

SEQ ID NO: 3370930 - DNA, 25 bp, Homo sapien
aaaatagtgagtttgaagacgggct

SEQ ID NO: 3370931 - DNA, 25 bp, Homo sapien
tgctcttctaacctttgactcagtg

SEQ ID NO: 3370932 - DNA, 25 bp, Homo sapien
gctcttctaacctttgactcagtgc

SEQ ID NO: 3370933 - DNA, 25 bp, Homo sapien
ctgctcttctaacctttgactcagt

SEQ ID NO: 3370934 - DNA, 25 bp, Homo sapien
ctcttctaacctttgactcagtgca

SEQ ID NO: 3370935 - DNA, 25 bp, Homo sapien
ggcacacggtagtgagccttgagaa

SEQ ID NO: 3370936 - DNA, 25 bp, Homo sapien
gatgttcgggtattgtaaaatccat

SEQ ID NO: 3370937 - DNA, 25 bp, Homo sapien
ggtattgtaaaatccataacttcca

SEQ ID NO: 3370938 - DNA, 25 bp, Homo sapien
tgagaatcgtttccacttggatgtt

SEQ ID NO: 3370939 - DNA, 25 bp, Homo sapien
cacctatatttcttgaacattttga

SEQ ID NO: 3370940 - DNA, 25 bp, Homo sapien
ggcacctatatttcttgaacatttt

SEQ ID NO: 3370941 - DNA, 25 bp, Homo sapien
acattttgaaataatttgctttact

SEQ ID NO: 3370942 - DNA, 25 bp, Homo sapien
gcacctatatttcttgaacattttg

SEQ ID NO: 3370943 - DNA, 25 bp, Homo sapien
tttcttcaaggctagattcactgac

SEQ ID NO: 3370944 - DNA, 25 bp, Homo sapien
gattcactgacaataataaaaggac

SEQ ID NO: 3370945 - DNA, 25 bp, Homo sapien
tcaaggctagattcactgacaataa

SEQ ID NO: 3370946 - DNA, 25 bp, Homo sapien
actttttcttcaaggctagattcac

SEQ ID NO: 3370947 - DNA, 25 bp, Homo sapien
gatcctgaacaattctctctttggg

SEQ ID NO: 3370948 - DNA, 25 bp, Homo sapien
tccagatcctgaacaattctctctt

SEQ ID NO: 3370949 - DNA, 25 bp, Homo sapien
cagatcctgaacaattctctctttg

SEQ ID NO: 3370950 - DNA, 25 bp, Homo sapien
atcctgaacaattctctctttgggc

SEQ ID NO: 3370951 - DNA, 25 bp, Homo sapien
tgtgaggtgcctgcaatgttagaag

SEQ ID NO: 3370952 - DNA, 25 bp, Homo sapien
ctggagcttgatcaagtcttctttt

SEQ ID NO: 3370953 - DNA, 25 bp, Homo sapien
gagcttgatcaagtcttctttttgt

SEQ ID NO: 3370954 - DNA, 25 bp, Homo sapien
gcttgatcaagtcttctttttgtat

SEQ ID NO: 3370955 - DNA, 25 bp, Homo sapien
gacatcataagggttgtgttaatag

SEQ ID NO: 3370956 - DNA, 25 bp, Homo sapien
gaaagacatcataagggttgtgtta

SEQ ID NO: 3370957 - DNA, 25 bp, Homo sapien
ataggagaaagacatcataagggtt

SEQ ID NO: 3370958 - DNA, 25 bp, Homo sapien
cataagggttgtgttaatagagggt

SEQ ID NO: 3370959 - DNA, 25 bp, Homo sapien
tttcccatgctgatcaaagtgagca

SEQ ID NO: 3370960 - DNA, 25 bp, Homo sapien
caagggccctggttatcgtttgtgg

SEQ ID NO: 3370961 - DNA, 25 bp, Homo sapien
tgagaggaatcaggcgtttttccca

SEQ ID NO: 3370962 - DNA, 25 bp, Homo sapien
tctgttgtaatgttacaagggccct

SEQ ID NO: 3370963 - DNA, 25 bp, Homo sapien
ctttttcatcctgagcttgagcact

SEQ ID NO: 3370964 - DNA, 25 bp, Homo sapien
tgagcttgagcactgctggtatccc

SEQ ID NO: 3370965 - DNA, 25 bp, Homo sapien
cctttttcatcctgagcttgagcac

SEQ ID NO: 3370966 - DNA, 25 bp, Homo sapien
atttgagaaagctgggttatttggt

SEQ ID NO: 3370967 - DNA, 25 bp, Homo sapien
catttgagaaagctgggttatttgg

SEQ ID NO: 3370968 - DNA, 25 bp, Homo sapien
ttgttattttgggctgacagtctgg

SEQ ID NO: 3370969 - DNA, 25 bp, Homo sapien
gggctttactcctctatgtaattta

SEQ ID NO: 3370970 - DNA, 25 bp, Homo sapien
catagtaattcatggagacacctcc

SEQ ID NO: 3370971 - DNA, 25 bp, Homo sapien
gacagtctgggctttactcctctat

SEQ ID NO: 3370972 - DNA, 25 bp, Homo sapien
gccatatttttctcacgcttcgtat

SEQ ID NO: 3370973 - DNA, 25 bp, Homo sapien
ctcacgcttcgtatgtgtagtaatt

SEQ ID NO: 3370974 - DNA, 25 bp, Homo sapien
aagcactctacatcagggatatctg

SEQ ID NO: 3370975 - DNA, 25 bp, Homo sapien
tgcatatagggcattgaggagcctc

SEQ ID NO: 3370976 - DNA, 25 bp, Homo sapien
ttggcttgaaaatagtttgagaatt

SEQ ID NO: 3370977 - DNA, 25 bp, Homo sapien
tagtttgagaattagctcttgatcc

SEQ ID NO: 3370978 - DNA, 25 bp, Homo sapien
gtttgagaattagctcttgatccat

SEQ ID NO: 3370979 - DNA, 25 bp, Homo sapien
caggttggcttgaaaatagtttgag

SEQ ID NO: 3370980 - DNA, 25 bp, Homo sapien
agctccaatttagaattgccacttg

SEQ ID NO: 3370981 - DNA, 25 bp, Homo sapien
agtactgatgaccactctaggaaca

SEQ ID NO: 3370982 - DNA, 25 bp, Homo sapien
gctccaatttagaattgccacttgt

SEQ ID NO: 3370983 - DNA, 25 bp, Homo sapien
aggcaccagtactgatgaccactct

SEQ ID NO: 3370984 - DNA, 25 bp, Homo sapien
attcccttgatgtctgtaatatcac

SEQ ID NO: 3370985 - DNA, 25 bp, Homo sapien
ttcccttgatgtctgtaatatcacc

SEQ ID NO: 3370986 - DNA, 25 bp, Homo sapien
ttcttatagattcacatatatgtgg

SEQ ID NO: 3370987 - DNA, 25 bp, Homo sapien
agattcacatatatgtggccaaagg

SEQ ID NO: 3370988 - DNA, 25 bp, Homo sapien
acattatagactcttccagttttgc

SEQ ID NO: 3370989 - DNA, 25 bp, Homo sapien
gccaacagcatgctgggtaacatta

SEQ ID NO: 3370990 - DNA, 25 bp, Homo sapien
acagcatgctgggtaacattataga

SEQ ID NO: 3370991 - DNA, 25 bp, Homo sapien
caacagcatgctgggtaacattata

SEQ ID NO: 3370992 - DNA, 25 bp, Homo sapien
tctgctcttagactgcttcgtgtgc

SEQ ID NO: 3370993 - DNA, 25 bp, Homo sapien
tctctgctcttagactgcttcgtgt

SEQ ID NO: 3370994 - DNA, 25 bp, Homo sapien
tgctcttagactgcttcgtgtgctc

SEQ ID NO: 3370995 - DNA, 25 bp, Homo sapien
ctatctctgctcttagactgcttcg

SEQ ID NO: 3370996 - DNA, 25 bp, Homo sapien
tcaagccagtgatcatttggtctct

SEQ ID NO: 3370997 - DNA, 25 bp, Homo sapien
attcatcaaatcctgggagtcctgg

SEQ ID NO: 3370998 - DNA, 25 bp, Homo sapien
aattcatcaaatcctgggagtcctg

SEQ ID NO: 3370999 - DNA, 25 bp, Homo sapien
tcctggtgaatcaagccagtgatca

SEQ ID NO: 3371000 - DNA, 25 bp, Homo sapien
atatttgaaaagggctttatgatca

SEQ ID NO: 3371001 - DNA, 25 bp, Homo sapien
aatatttgaaaagggctttatgatc

SEQ ID NO: 3371002 - DNA, 25 bp, Homo sapien
tttgtaataattttgtaccacctga

SEQ ID NO: 3371003 - DNA, 25 bp, Homo sapien
taggtgtgggcatatctaaaagcat

SEQ ID NO: 3371004 - DNA, 25 bp, Homo sapien
tttagtaacgggctgccaagctggt

SEQ ID NO: 3371005 - DNA, 25 bp, Homo sapien
ccaagctggtaggtgtgggcatatc

SEQ ID NO: 3371006 - DNA, 25 bp, Homo sapien
aagcatttggtgacgacaccttggc

SEQ ID NO: 3371007 - DNA, 25 bp, Homo sapien
gtgcttcagtcgtgatagccacaag

SEQ ID NO: 3371008 - DNA, 25 bp, Homo sapien
tcggttttgtgcttcagtcgtgata

SEQ ID NO: 3371009 - DNA, 25 bp, Homo sapien
caagttgttcggttttgtgcttcag

SEQ ID NO: 3371010 - DNA, 25 bp, Homo sapien
gctttcaagttgttcggttttgtgc

SEQ ID NO: 3371011 - DNA, 25 bp, Homo sapien
cctctcgcaggcattcttgttacca

SEQ ID NO: 3371012 - DNA, 25 bp, Homo sapien
tatttgcagttctttcctctcgcag

SEQ ID NO: 3371013 - DNA, 25 bp, Homo sapien
cacgtcaagtccatttctatttgca

SEQ ID NO: 3371014 - DNA, 25 bp, Homo sapien
ccaataaacaaagaatagcccaaag

SEQ ID NO: 3371015 - DNA, 25 bp, Homo sapien
gacttaggaagaccatggtgcagac

SEQ ID NO: 3371016 - DNA, 25 bp, Homo sapien
gggagcctgttgtcttaatagtttc

SEQ ID NO: 3371017 - DNA, 25 bp, Homo sapien
aaagcagagctctggacttaggaag

SEQ ID NO: 3371018 - DNA, 25 bp, Homo sapien
catggtgcagacacagcatcaacct

SEQ ID NO: 3371019 - DNA, 25 bp, Homo sapien
ctttcacattagttacccatgcaac

SEQ ID NO: 3371020 - DNA, 25 bp, Homo sapien
gccttaaatatggacatggtgactg

SEQ ID NO: 3371021 - DNA, 25 bp, Homo sapien
cttaaatatggacatggtgactgaa

SEQ ID NO: 3371022 - DNA, 25 bp, Homo sapien
tcacattagttacccatgcaactgc

SEQ ID NO: 3371023 - DNA, 25 bp, Homo sapien
tcagtatcgattggcaaagctagat

SEQ ID NO: 3371024 - DNA, 25 bp, Homo sapien
tctgtcagtatcgattggcaaagct

SEQ ID NO: 3371025 - DNA, 25 bp, Homo sapien
tatcgattggcaaagctagatccat

SEQ ID NO: 3371026 - DNA, 25 bp, Homo sapien
tttctgtcagtatcgattggcaaag

SEQ ID NO: 3371027 - DNA, 25 bp, Homo sapien
cctgcaactgttcaatatcagttct

SEQ ID NO: 3371028 - DNA, 25 bp, Homo sapien
aatgtggcctggcaaacgttcacaa

SEQ ID NO: 3371029 - DNA, 25 bp, Homo sapien
tataagtctaatgaatcttaaatct

SEQ ID NO: 3371030 - DNA, 25 bp, Homo sapien
cagttctataccagacaggtaattg

SEQ ID NO: 3371031 - DNA, 25 bp, Homo sapien
tttatgctaacagacttgtcaatgg

SEQ ID NO: 3371032 - DNA, 25 bp, Homo sapien
gcatagttggaaacagttgcttcca

SEQ ID NO: 3371033 - DNA, 25 bp, Homo sapien
gctaacagacttgtcaatggcatag

SEQ ID NO: 3371034 - DNA, 25 bp, Homo sapien
gttggaaacagttgcttccaggatg

SEQ ID NO: 3371035 - DNA, 25 bp, Homo sapien
tagtgaactgacctaaaagactgaa

SEQ ID NO: 3371036 - DNA, 25 bp, Homo sapien
attctcagccttgctttttcatcag

SEQ ID NO: 3371037 - DNA, 25 bp, Homo sapien
ggatggcaaggaaagattaagccca

SEQ ID NO: 3371038 - DNA, 25 bp, Homo sapien
ggtatagatgttttactcactccaa

SEQ ID NO: 3371039 - DNA, 25 bp, Homo sapien
gcagttcagagctacataaacaact

SEQ ID NO: 3371040 - DNA, 25 bp, Homo sapien
cagcagttcagagctacataaacaa

SEQ ID NO: 3371041 - DNA, 25 bp, Homo sapien
agcagttcagagctacataaacaac

SEQ ID NO: 3371042 - DNA, 25 bp, Homo sapien
tcagcagttcagagctacataaaca

SEQ ID NO: 3371043 - DNA, 25 bp, Homo sapien
gcactgtgcaaagtgactttgacag

SEQ ID NO: 3371044 - DNA, 25 bp, Homo sapien
gcagagaaaagccaacccagtcgaa

SEQ ID NO: 3371045 - DNA, 25 bp, Homo sapien
gtgcaaagtgactttgacaggcaga

SEQ ID NO: 3371046 - DNA, 25 bp, Homo sapien
cagtcgaattcgtctggaaagcatt

SEQ ID NO: 3371047 - DNA, 25 bp, Homo sapien
tagagattggcagcaatgccccagc

SEQ ID NO: 3371048 - DNA, 25 bp, Homo sapien
gggtaaccgtagagattggcagcaa

SEQ ID NO: 3371049 - DNA, 25 bp, Homo sapien
taaccgtagagattggcagcaatgc

SEQ ID NO: 3371050 - DNA, 25 bp, Homo sapien
ctcggggtaaccgtagagattggca

SEQ ID NO: 3371051 - DNA, 25 bp, Homo sapien
tcgaaccccgggctccgtctggcgc

SEQ ID NO: 3371052 - DNA, 25 bp, Homo sapien
gcagccaatcctggcgtcgaacccc

SEQ ID NO: 3371053 - DNA, 25 bp, Homo sapien
ctggaaaaacctggcgcgccggagt

SEQ ID NO: 3371054 - DNA, 25 bp, Homo sapien
cggagttcgggctgccggctcctta

SEQ ID NO: 3371055 - DNA, 25 bp, Homo sapien
gtgcggcgccggcacagtccgaggg

SEQ ID NO: 3371056 - DNA, 25 bp, Homo sapien
cgccgggctggcgagagcctcgggt

SEQ ID NO: 3371057 - DNA, 25 bp, Homo sapien
gggctggcgagagcctcgggtgcgg

SEQ ID NO: 3371058 - DNA, 25 bp, Homo sapien
tcgggtgcggcgccggcacagtccg

SEQ ID NO: 3371059 - DNA, 25 bp, Homo sapien
gggccctgagtcctccgcgctcagg

SEQ ID NO: 3371060 - DNA, 25 bp, Homo sapien
gacggtggcgtcgtcggggccctga

SEQ ID NO: 3371061 - DNA, 25 bp, Homo sapien
aagaagggtcgctgtggggtgacgg

SEQ ID NO: 3371062 - DNA, 25 bp, Homo sapien
gagaagaagggtcgctgtggggtga

SEQ ID NO: 3371063 - DNA, 25 bp, Homo sapien
cgggctctcggttccttgttttgtg

SEQ ID NO: 3371064 - DNA, 25 bp, Homo sapien
gcctcgcagcgcaacaaacttattt

SEQ ID NO: 3371065 - DNA, 25 bp, Homo sapien
aaggcttcccgcagcattccgggct

SEQ ID NO: 3371066 - DNA, 25 bp, Homo sapien
gcagtagcccgaaccagtcggagga

SEQ ID NO: 3371067 - DNA, 25 bp, Homo sapien
aggttcgcgtccctctgctgcgggc

SEQ ID NO: 3371068 - DNA, 25 bp, Homo sapien
caggcacctggcctgtcgctcgccg

SEQ ID NO: 3371069 - DNA, 25 bp, Homo sapien
gctccttccaccacggctacgggct

SEQ ID NO: 3371070 - DNA, 25 bp, Homo sapien
cagcgggcgccacagacatcagcct

SEQ ID NO: 3371071 - DNA, 25 bp, Homo sapien
aatgcacgaagattttgagccccgc

SEQ ID NO: 3371072 - DNA, 25 bp, Homo sapien
tgtttccatgcagccgactctctgg

SEQ ID NO: 3371073 - DNA, 25 bp, Homo sapien
gagccccgcgttccagaaggagagt

SEQ ID NO: 3371074 - DNA, 25 bp, Homo sapien
agagggattcaggagcccacgtcct

SEQ ID NO: 3371075 - DNA, 25 bp, Homo sapien
gccacccaaatcacctccaggtgcc

SEQ ID NO: 3371076 - DNA, 25 bp, Homo sapien
tgccacccaaatcacctccaggtgc

SEQ ID NO: 3371077 - DNA, 25 bp, Homo sapien
atgccacccaaatcacctccaggtg

SEQ ID NO: 3371078 - DNA, 25 bp, Homo sapien
agatttaataactgccccgcctggt

SEQ ID NO: 3371079 - DNA, 25 bp, Homo sapien
ttcagggcatgacagagatcttggc

SEQ ID NO: 3371080 - DNA, 25 bp, Homo sapien
tatcagtggcatggaaacaagtaca

SEQ ID NO: 3371081 - DNA, 25 bp, Homo sapien
cagattaacgggctcacatgatgca

SEQ ID NO: 3371082 - DNA, 25 bp, Homo sapien
tacaattacaacacggccatgggca

SEQ ID NO: 3371083 - DNA, 25 bp, Homo sapien
gatacagtgcatctgcgtgaggaaa

SEQ ID NO: 3371084 - DNA, 25 bp, Homo sapien
ttggagatgccaatcaatgggctac

SEQ ID NO: 3371085 - DNA, 25 bp, Homo sapien
taattcaggcaattgagagcagtga

SEQ ID NO: 3371086 - DNA, 25 bp, Homo sapien
taggaacactgctccatcatgctgg

SEQ ID NO: 3371087 - DNA, 25 bp, Homo sapien
gataactagttattgtgcacaccag

SEQ ID NO: 3371088 - DNA, 25 bp, Homo sapien
taagactgagtctatgggctgcaaa

SEQ ID NO: 3371089 - DNA, 25 bp, Homo sapien
gagtgtgctgtctcacgtgaatcac

SEQ ID NO: 3371090 - DNA, 25 bp, Homo sapien
gaaatgggccctgtcatccacaatg

SEQ ID NO: 3371091 - DNA, 25 bp, Homo sapien
tggatgctggccaatcactaacact

SEQ ID NO: 3371092 - DNA, 25 bp, Homo sapien
caaattgtaatgaaacctctgagga

SEQ ID NO: 3371093 - DNA, 25 bp, Homo sapien
tattaccgtggattattgcccctcg

SEQ ID NO: 3371094 - DNA, 25 bp, Homo sapien
cagataagacttatggccaaatgcc

SEQ ID NO: 3371095 - DNA, 25 bp, Homo sapien
gaccaagaacgtgggattacatcct

SEQ ID NO: 3371096 - DNA, 25 bp, Homo sapien
tcatgagcccatacccagataagac

SEQ ID NO: 3371097 - DNA, 25 bp, Homo sapien
tgggacaacctagcttcaggtacag

SEQ ID NO: 3371098 - DNA, 25 bp, Homo sapien
ctcctacaccctctatttctttctc

SEQ ID NO: 3371099 - DNA, 25 bp, Homo sapien
aagaaagggatggagctttgctcat

SEQ ID NO: 3371100 - DNA, 25 bp, Homo sapien
ctcacctgcagaagaaagggatgga

SEQ ID NO: 3371101 - DNA, 25 bp, Homo sapien
ttctttctcacctgcagaagaaagg

SEQ ID NO: 3371102 - DNA, 25 bp, Homo sapien
tgccacactattatgttttatatga

SEQ ID NO: 3371103 - DNA, 25 bp, Homo sapien
ttccaagcctcttactagcaaagcc

SEQ ID NO: 3371104 - DNA, 25 bp, Homo sapien
tgattatttccaagcctcttactag

SEQ ID NO: 3371105 - DNA, 25 bp, Homo sapien
gcctcttactagcaaagccttgaat

SEQ ID NO: 3371106 - DNA, 25 bp, Homo sapien
cattagcgataaagtcccacaacca

SEQ ID NO: 3371107 - DNA, 25 bp, Homo sapien
agcagcatatgtttaaggtgaaatc

SEQ ID NO: 3371108 - DNA, 25 bp, Homo sapien
taatcttatctcaatgtgtccaact

SEQ ID NO: 3371109 - DNA, 25 bp, Homo sapien
gcagaattgcaattagtcctactac

SEQ ID NO: 3371110 - DNA, 25 bp, Homo sapien
tcttcccacgaattgggagtggttc

SEQ ID NO: 3371111 - DNA, 25 bp, Homo sapien
ggcccatacagatagagattctagt

SEQ ID NO: 3371112 - DNA, 25 bp, Homo sapien
ttctggcacttttgtggatcacaca

SEQ ID NO: 3371113 - DNA, 25 bp, Homo sapien
gatttcatttcctccgtatttctgg

SEQ ID NO: 3371114 - DNA, 25 bp, Homo sapien
cacggtggcgctgcttgaggacgct

SEQ ID NO: 3371115 - DNA, 25 bp, Homo sapien
acacggtggcgctgcttgaggacgc

SEQ ID NO: 3371116 - DNA, 25 bp, Homo sapien
tttatctcttgatgtcccacatgcg

SEQ ID NO: 3371117 - DNA, 25 bp, Homo sapien
gacatccacaccagggagtggacag

SEQ ID NO: 3371118 - DNA, 25 bp, Homo sapien
gacaggaatccgatcactgccattg

SEQ ID NO: 3371119 - DNA, 25 bp, Homo sapien
aggaagtccgccgaggacatccaca

SEQ ID NO: 3371120 - DNA, 25 bp, Homo sapien
tctatttacttgctgactatttctt

SEQ ID NO: 3371121 - DNA, 25 bp, Homo sapien
gccaatatctacaagagtttttctg

SEQ ID NO: 3371122 - DNA, 25 bp, Homo sapien
attctttccctaagccaatatctac

SEQ ID NO: 3371123 - DNA, 25 bp, Homo sapien
attctgcgggttgtctatttacttg

SEQ ID NO: 3371124 - DNA, 25 bp, Homo sapien
tctaacaagttcctaggtgctcctg

SEQ ID NO: 3371125 - DNA, 25 bp, Homo sapien
ggaccaatggtatagatgacagcac

SEQ ID NO: 3371126 - DNA, 25 bp, Homo sapien
gagtgtacttacctgcgctttggga

SEQ ID NO: 3371127 - DNA, 25 bp, Homo sapien
gatttccgggattttgttgcagcca

SEQ ID NO: 3371128 - DNA, 25 bp, Homo sapien
cctggaactgtagactagagtattc

SEQ ID NO: 3371129 - DNA, 25 bp, Homo sapien
actgtcccgtagctctgagatgctg

SEQ ID NO: 3371130 - DNA, 25 bp, Homo sapien
ctggcctggaactgtagactagagt

SEQ ID NO: 3371131 - DNA, 25 bp, Homo sapien
ccatgcagactgtcccgtagctctg

SEQ ID NO: 3371132 - DNA, 25 bp, Homo sapien
gggatggaactatggacaaacttgt

SEQ ID NO: 3371133 - DNA, 25 bp, Homo sapien
tccagtaaagatgcatcataagtaa

SEQ ID NO: 3371134 - DNA, 25 bp, Homo sapien
caactccagtaaagatgcatcataa

SEQ ID NO: 3371135 - DNA, 25 bp, Homo sapien
gacaaacttgtgttgcaggagaata

SEQ ID NO: 3371136 - DNA, 25 bp, Homo sapien
tcactgcttagagcataaacaagat

SEQ ID NO: 3371137 - DNA, 25 bp, Homo sapien
caagataggagtgattcacacataa

SEQ ID NO: 3371138 - DNA, 25 bp, Homo sapien
gaacttccgacctcataagatctgc

SEQ ID NO: 3371139 - DNA, 25 bp, Homo sapien
taggatagaaatggatcactgctta

SEQ ID NO: 3371140 - DNA, 25 bp, Homo sapien
ggctaagatattcctttcctggata

SEQ ID NO: 3371141 - DNA, 25 bp, Homo sapien
caagtgttcatcatataggatagca

SEQ ID NO: 3371142 - DNA, 25 bp, Homo sapien
tagttctctagttggcatagtaacc

SEQ ID NO: 3371143 - DNA, 25 bp, Homo sapien
tagtaaagaaatgaattagcccaag

SEQ ID NO: 3371144 - DNA, 25 bp, Homo sapien
agacgacgattgagaatttttctaa

SEQ ID NO: 3371145 - DNA, 25 bp, Homo sapien
aagacgacgattgagaatttttcta

SEQ ID NO: 3371146 - DNA, 25 bp, Homo sapien
taagggttcagtaccatctgcaggc

SEQ ID NO: 3371147 - DNA, 25 bp, Homo sapien
caggcatctacttggagttgtggta

SEQ ID NO: 3371148 - DNA, 25 bp, Homo sapien
aatattttcctgtgggcaaccagcc

SEQ ID NO: 3371149 - DNA, 25 bp, Homo sapien
gccacatgtaagtagtggctgacag

SEQ ID NO: 3371150 - DNA, 25 bp, Homo sapien
ttttagtgagaacctacatggactg

SEQ ID NO: 3371151 - DNA, 25 bp, Homo sapien
cagtgtttcatcagttagcgaagtc

SEQ ID NO: 3371152 - DNA, 25 bp, Homo sapien
taaagttgcgaaacagtccaagtgg

SEQ ID NO: 3371153 - DNA, 25 bp, Homo sapien
ccaagtgggctctggcagtgtttca

SEQ ID NO: 3371154 - DNA, 25 bp, Homo sapien
atggctctttgaaatagtgttcttc

SEQ ID NO: 3371155 - DNA, 25 bp, Homo sapien
cagctgtgaaattgctgatttttct

SEQ ID NO: 3371156 - DNA, 25 bp, Homo sapien
gcagtatgaatttctttgttaggaa

SEQ ID NO: 3371157 - DNA, 25 bp, Homo sapien
catttcaggatttcaaaaaccagct

SEQ ID NO: 3371158 - DNA, 25 bp, Homo sapien
taaactaaagacctctgcacagtaa

SEQ ID NO: 3371159 - DNA, 25 bp, Homo sapien
ctaaagacctctgcacagtaaaaga

SEQ ID NO: 3371160 - DNA, 25 bp, Homo sapien
aactaaagacctctgcacagtaaaa

SEQ ID NO: 3371161 - DNA, 25 bp, Homo sapien
aaagacctctgcacagtaaaagaaa

SEQ ID NO: 3371162 - DNA, 25 bp, Homo sapien
aacatttgtatctacgcaccctgag

SEQ ID NO: 3371163 - DNA, 25 bp, Homo sapien
cccaggaataaccatttaagcttgg

SEQ ID NO: 3371164 - DNA, 25 bp, Homo sapien
cacctgttgcatatagtacatgtca

SEQ ID NO: 3371165 - DNA, 25 bp, Homo sapien
taagcttggtctcctccagttagta

SEQ ID NO: 3371166 - DNA, 25 bp, Homo sapien
cactgcacaacgaaccaatgggtat

SEQ ID NO: 3371167 - DNA, 25 bp, Homo sapien
ggacaagttctcgttaccctgccca

SEQ ID NO: 3371168 - DNA, 25 bp, Homo sapien
tttgatgaatcctctgcccgctagc

SEQ ID NO: 3371169 - DNA, 25 bp, Homo sapien
gaaccacagagctcggcgtcttaaa

SEQ ID NO: 3371170 - DNA, 25 bp, Homo sapien
acatgctgtggagttactctatgtc

SEQ ID NO: 3371171 - DNA, 25 bp, Homo sapien
cttttagggaagctcttgaagacac

SEQ ID NO: 3371172 - DNA, 25 bp, Homo sapien
aagctcttgaagacacatgctgtgg

SEQ ID NO: 3371173 - DNA, 25 bp, Homo sapien
tagggaagctcttgaagacacatgc

SEQ ID NO: 3371174 - DNA, 25 bp, Homo sapien
cataatctggtaccatttgcctgct

SEQ ID NO: 3371175 - DNA, 25 bp, Homo sapien
tgactgagagctattcatttctcgc

SEQ ID NO: 3371176 - DNA, 25 bp, Homo sapien
tagcaaatggcttcaaacatgaaag

SEQ ID NO: 3371177 - DNA, 25 bp, Homo sapien
taaattttcgttggttagtgagtca

SEQ ID NO: 3371178 - DNA, 25 bp, Homo sapien
tgcttccccttagcctacctgcatg

SEQ ID NO: 3371179 - DNA, 25 bp, Homo sapien
tgggcaaacatattatagaagactg

SEQ ID NO: 3371180 - DNA, 25 bp, Homo sapien
tagaagactgaaatacggacaaaat

SEQ ID NO: 3371181 - DNA, 25 bp, Homo sapien
ttatgcaatattgtgttcatatttc

SEQ ID NO: 3371182 - DNA, 25 bp, Homo sapien
tcctcagatgtgtgccgcgcagccc

SEQ ID NO: 3371183 - DNA, 25 bp, Homo sapien
tcagatgtgtgccgcgcagccctgg

SEQ ID NO: 3371184 - DNA, 25 bp, Homo sapien
cagagggcacaacccagctgccagc

SEQ ID NO: 3371185 - DNA, 25 bp, Homo sapien
gctcctcagatgtgtgccgcgcagc

SEQ ID NO: 3371186 - DNA, 25 bp, Homo sapien
acgtactcgattcacggcattcctg

SEQ ID NO: 3371187 - DNA, 25 bp, Homo sapien
cctgggaagtacagaaaagcagtcc

SEQ ID NO: 3371188 - DNA, 25 bp, Homo sapien
cagttgtacgtactcgattcacggc

SEQ ID NO: 3371189 - DNA, 25 bp, Homo sapien
aaaacaacacagttgtacgtactcg

SEQ ID NO: 3371190 - DNA, 25 bp, Homo sapien
caatggtaaataaatgtccatgcat

SEQ ID NO: 3371191 - DNA, 25 bp, Homo sapien
ctatggacagacaatggtaaataaa

SEQ ID NO: 3371192 - DNA, 25 bp, Homo sapien
aaataaatgtccatgcatatcacct

SEQ ID NO: 3371193 - DNA, 25 bp, Homo sapien
taaatgtccatgcatatcaccttct

SEQ ID NO: 3371194 - DNA, 25 bp, Homo sapien
gagacaacctgtagtatccaaaact

SEQ ID NO: 3371195 - DNA, 25 bp, Homo sapien
ggatccagggataggtcattctgta

SEQ ID NO: 3371196 - DNA, 25 bp, Homo sapien
tccaaaactctgtctgggatccagg

SEQ ID NO: 3371197 - DNA, 25 bp, Homo sapien
agggagctgggtaaccttccttgca

SEQ ID NO: 3371198 - DNA, 25 bp, Homo sapien
ttttaggtattagagttaaactgca

SEQ ID NO: 3371199 - DNA, 25 bp, Homo sapien
cacagaggatgtgacatcaagggga

SEQ ID NO: 3371200 - DNA, 25 bp, Homo sapien
gagttaaactgcatgaagaagcatg

SEQ ID NO: 3371201 - DNA, 25 bp, Homo sapien
ggtattagagttaaactgcatgaag

SEQ ID NO: 3371202 - DNA, 25 bp, Homo sapien
actgactatatagaaacagtagagc

SEQ ID NO: 3371203 - DNA, 25 bp, Homo sapien
taactttacagagagttcgagaaaa

SEQ ID NO: 3371204 - DNA, 25 bp, Homo sapien
ggcctaatgaagaaaactgtctcga

SEQ ID NO: 3371205 - DNA, 25 bp, Homo sapien
aatatatcacacctttgcctctcag

SEQ ID NO: 3371206 - DNA, 25 bp, Homo sapien
tatagttattaattgggttgctcca

SEQ ID NO: 3371207 - DNA, 25 bp, Homo sapien
gggttctttcatgtcagtgcctatg

SEQ ID NO: 3371208 - DNA, 25 bp, Homo sapien
cctatctataacagtatgggttcgc

SEQ ID NO: 3371209 - DNA, 25 bp, Homo sapien
gatctctcaagctcgagtgattcac

SEQ ID NO: 3371210 - DNA, 25 bp, Homo sapien
cattttacaattgtcaagagaaggg

SEQ ID NO: 3371211 - DNA, 25 bp, Homo sapien
tggtaaagtggacgaatagaaagcc

SEQ ID NO: 3371212 - DNA, 25 bp, Homo sapien
tccactgcctgatgtggtaaagtgg

SEQ ID NO: 3371213 - DNA, 25 bp, Homo sapien
caattgtcaagagaagggattaatt

SEQ ID NO: 3371214 - DNA, 25 bp, Homo sapien
tagaggctgtgaaaatgacaacatc

SEQ ID NO: 3371215 - DNA, 25 bp, Homo sapien
tggagttggaaggaacattgcacac

SEQ ID NO: 3371216 - DNA, 25 bp, Homo sapien
tggaaggaacattgcacactatcaa

SEQ ID NO: 3371217 - DNA, 25 bp, Homo sapien
ctagaggctgtgaaaatgacaacat

SEQ ID NO: 3371218 - DNA, 25 bp, Homo sapien
tctggatgagcatgatcaatgttca

SEQ ID NO: 3371219 - DNA, 25 bp, Homo sapien
caatgttcattaaacgcactaaact

SEQ ID NO: 3371220 - DNA, 25 bp, Homo sapien
taaactgacaggtacacaaaatggc

SEQ ID NO: 3371221 - DNA, 25 bp, Homo sapien
cctgcttgcagcatcgagaagtgtg

SEQ ID NO: 3371222 - DNA, 25 bp, Homo sapien
caaagtgcagatatccagttgaaaa

SEQ ID NO: 3371223 - DNA, 25 bp, Homo sapien
ggaataaagaaacagatgcactctc

SEQ ID NO: 3371224 - DNA, 25 bp, Homo sapien
gatgcactctcattaaccatttcaa

SEQ ID NO: 3371225 - DNA, 25 bp, Homo sapien
aggtaaacacacgtcatgggcgttt

SEQ ID NO: 3371226 - DNA, 25 bp, Homo sapien
caacaaggctctatgtgatctgatc

SEQ ID NO: 3371227 - DNA, 25 bp, Homo sapien
cagagaggactctccggaacagcat

SEQ ID NO: 3371228 - DNA, 25 bp, Homo sapien
tctcgaatacggtaaatgagcttcc

SEQ ID NO: 3371229 - DNA, 25 bp, Homo sapien
tgagcttccaagaaggctgcccctt

SEQ ID NO: 3371230 - DNA, 25 bp, Homo sapien
gatgatcttatcctgttagtgtcca

SEQ ID NO: 3371231 - DNA, 25 bp, Homo sapien
gactatttgatgatcttatcctgtt

SEQ ID NO: 3371232 - DNA, 25 bp, Homo sapien
ccacaggactatttgatgatcttat

SEQ ID NO: 3371233 - DNA, 25 bp, Homo sapien
ctcatcataggggaccacaggacta

SEQ ID NO: 3371234 - DNA, 25 bp, Homo sapien
ttttcccccaccaggcttcgctgcc

SEQ ID NO: 3371235 - DNA, 25 bp, Homo sapien
ctgctctgggcttggctacgctcac

SEQ ID NO: 3371236 - DNA, 25 bp, Homo sapien
gcctgctctgggcttggctacgctc

SEQ ID NO: 3371237 - DNA, 25 bp, Homo sapien
caccaggcttcgctgcctgctctgg

SEQ ID NO: 3371238 - DNA, 25 bp, Homo sapien
tccaactggacactacattctctgc

SEQ ID NO: 3371239 - DNA, 25 bp, Homo sapien
tcatgatgcttccaactggacacta

SEQ ID NO: 3371240 - DNA, 25 bp, Homo sapien
tgccccaggcttgtgacctctttct

SEQ ID NO: 3371241 - DNA, 25 bp, Homo sapien
gacctctttctcttgcgtgccccac

SEQ ID NO: 3371242 - DNA, 25 bp, Homo sapien
ttccgatagctttcgagtgttcaat

SEQ ID NO: 3371243 - DNA, 25 bp, Homo sapien
cttccgatagctttcgagtgttcaa

SEQ ID NO: 3371244 - DNA, 25 bp, Homo sapien
tccgatagctttcgagtgttcaatt

SEQ ID NO: 3371245 - DNA, 25 bp, Homo sapien
aatggataacggatacagctgccac

SEQ ID NO: 3371246 - DNA, 25 bp, Homo sapien
gccacgatatgttactagcagaata

SEQ ID NO: 3371247 - DNA, 25 bp, Homo sapien
tacagctgccacgatatgttactag

SEQ ID NO: 3371248 - DNA, 25 bp, Homo sapien
cctctggctccatgggaatatgcag

SEQ ID NO: 3371249 - DNA, 25 bp, Homo sapien
gacttacctatcagtggttgatgaa

SEQ ID NO: 3371250 - DNA, 25 bp, Homo sapien
tgatctcgaaaatagcaaagctttt

SEQ ID NO: 3371251 - DNA, 25 bp, Homo sapien
tgcccattaatagatgacttaccta

SEQ ID NO: 3371252 - DNA, 25 bp, Homo sapien
catcaccctagcttgggaaaatgta

SEQ ID NO: 3371253 - DNA, 25 bp, Homo sapien
catgtaaggacagaactactgcagc

SEQ ID NO: 3371254 - DNA, 25 bp, Homo sapien
tcagatgggatgcagagaccttcct

SEQ ID NO: 3371255 - DNA, 25 bp, Homo sapien
ttcccaacggcctaattttgcagag

SEQ ID NO: 3371256 - DNA, 25 bp, Homo sapien
caaagcctcggtgaattcgcatgat

SEQ ID NO: 3371257 - DNA, 25 bp, Homo sapien
ccaaagtggtggtaacagttcatta

SEQ ID NO: 3371258 - DNA, 25 bp, Homo sapien
taaatttgcctattgcttcctgcat

SEQ ID NO: 3371259 - DNA, 25 bp, Homo sapien
cattacacttgtcgtagccttcaga

SEQ ID NO: 3371260 - DNA, 25 bp, Homo sapien
gagggccaacattcacccaaagtgg

SEQ ID NO: 3371261 - DNA, 25 bp, Homo sapien
taccagggcagttaaaacggatcgc

SEQ ID NO: 3371262 - DNA, 25 bp, Homo sapien
gctgaagagatttccggtaatggga

SEQ ID NO: 3371263 - DNA, 25 bp, Homo sapien
aagtatagaagcaaaggtgtctccc

SEQ ID NO: 3371264 - DNA, 25 bp, Homo sapien
tcttctgatccactaccagggcagt

SEQ ID NO: 3371265 - DNA, 25 bp, Homo sapien
tacttggaaactcttgtgagaaata

SEQ ID NO: 3371266 - DNA, 25 bp, Homo sapien
cagactgtaattgagctgcatgact

SEQ ID NO: 3371267 - DNA, 25 bp, Homo sapien
gctgcatgactgataaaaggcatac

SEQ ID NO: 3371268 - DNA, 25 bp, Homo sapien
catggataattatacttggaaactc

SEQ ID NO: 3371269 - DNA, 25 bp, Homo sapien
cttcaaaaatggtgccttctgttct

SEQ ID NO: 3371270 - DNA, 25 bp, Homo sapien
ccttctgttctgctttccaaccacc

SEQ ID NO: 3371271 - DNA, 25 bp, Homo sapien
ttcaaaaatggtgccttctgttctg

SEQ ID NO: 3371272 - DNA, 25 bp, Homo sapien
tctgttctgctttccaaccacccat

SEQ ID NO: 3371273 - DNA, 25 bp, Homo sapien
tataatcggctttttcactaacgtg

SEQ ID NO: 3371274 - DNA, 25 bp, Homo sapien
cggactcttcggctctggtactgag

SEQ ID NO: 3371275 - DNA, 25 bp, Homo sapien
tcactaacgtggtgctccacggact

SEQ ID NO: 3371276 - DNA, 25 bp, Homo sapien
tcttttgtcggctccagggcgtgta

SEQ ID NO: 3371277 - DNA, 25 bp, Homo sapien
gaacaggcccttatggattgcttag

SEQ ID NO: 3371278 - DNA, 25 bp, Homo sapien
taattagcacacgaatcaaagacgc

SEQ ID NO: 3371279 - DNA, 25 bp, Homo sapien
gatttcagctctcagcaagtccctg

SEQ ID NO: 3371280 - DNA, 25 bp, Homo sapien
caaagacgcacactgggagaatcac

SEQ ID NO: 3371281 - DNA, 25 bp, Homo sapien
tagagaaatttcatgcaaaaatgca

SEQ ID NO: 3371282 - DNA, 25 bp, Homo sapien
tttcatgcaaaaatgcagaaggact

SEQ ID NO: 3371283 - DNA, 25 bp, Homo sapien
caaaaatgcagaaggacttcccttc

SEQ ID NO: 3371284 - DNA, 25 bp, Homo sapien
gagaaatttcatgcaaaaatgcaga

SEQ ID NO: 3371285 - DNA, 25 bp, Homo sapien
tcagctcaaatccagacttgaggca

SEQ ID NO: 3371286 - DNA, 25 bp, Homo sapien
catgctgtgagttgatcttgccacc

SEQ ID NO: 3371287 - DNA, 25 bp, Homo sapien
actatatcagcggttgctaggcaca

SEQ ID NO: 3371288 - DNA, 25 bp, Homo sapien
gatataaaccttccagagctctcga

SEQ ID NO: 3371289 - DNA, 25 bp, Homo sapien
tcttgccaccctgaaacgaatctgg

SEQ ID NO: 3371290 - DNA, 25 bp, Homo sapien
cagtaaaaacctgcttaatccaact

SEQ ID NO: 3371291 - DNA, 25 bp, Homo sapien
agtcagtaaaaacctgcttaatcca

SEQ ID NO: 3371292 - DNA, 25 bp, Homo sapien
tcagtaaaaacctgcttaatccaac

SEQ ID NO: 3371293 - DNA, 25 bp, Homo sapien
gtcagtaaaaacctgcttaatccaa

SEQ ID NO: 3371294 - DNA, 25 bp, Homo sapien
ggcctggcctgtcacatatataaca

SEQ ID NO: 3371295 - DNA, 25 bp, Homo sapien
gataagacatactggcctcgtgtgc

SEQ ID NO: 3371296 - DNA, 25 bp, Homo sapien
gaaatgagtacatgctgccaatcta

SEQ ID NO: 3371297 - DNA, 25 bp, Homo sapien
gggcaaacactaactggttctcaga

SEQ ID NO: 3371298 - DNA, 25 bp, Homo sapien
gccaattctgctaacctcccaaata

SEQ ID NO: 3371299 - DNA, 25 bp, Homo sapien
aattctgctaacctcccaaataaat

SEQ ID NO: 3371300 - DNA, 25 bp, Homo sapien
gtgccaattctgctaacctcccaaa

SEQ ID NO: 3371301 - DNA, 25 bp, Homo sapien
tccttctgctcgctggtgtgctgca

SEQ ID NO: 3371302 - DNA, 25 bp, Homo sapien
gtcaaagggagtttcaagtccaata

SEQ ID NO: 3371303 - DNA, 25 bp, Homo sapien
acaagcgaatagaattgctgcttct

SEQ ID NO: 3371304 - DNA, 25 bp, Homo sapien
caagtccaataacaagcgaatagaa

SEQ ID NO: 3371305 - DNA, 25 bp, Homo sapien
tcaaagggagtttcaagtccaataa

SEQ ID NO: 3371306 - DNA, 25 bp, Homo sapien
caaggcacaaaatgaatgattgcag

SEQ ID NO: 3371307 - DNA, 25 bp, Homo sapien
ctgcaaggcacaaaatgaatgattg

SEQ ID NO: 3371308 - DNA, 25 bp, Homo sapien
ggcacaaaatgaatgattgcagtac

SEQ ID NO: 3371309 - DNA, 25 bp, Homo sapien
tgcaaggcacaaaatgaatgattgc

SEQ ID NO: 3371310 - DNA, 25 bp, Homo sapien
actcattatctgtgggactttggac

SEQ ID NO: 3371311 - DNA, 25 bp, Homo sapien
tactcacgaggttgagtgaccatca

SEQ ID NO: 3371312 - DNA, 25 bp, Homo sapien
gaccatcaccgctttctaatgccag

SEQ ID NO: 3371313 - DNA, 25 bp, Homo sapien
tatcatgtatcagggaatttggctc

SEQ ID NO: 3371314 - DNA, 25 bp, Homo sapien
caggaggagacataatgactgctac

SEQ ID NO: 3371315 - DNA, 25 bp, Homo sapien
tctccatagtcatgtagcaaatcag

SEQ ID NO: 3371316 - DNA, 25 bp, Homo sapien
tattgaaggactagactgaagaggc

SEQ ID NO: 3371317 - DNA, 25 bp, Homo sapien
gggctgcagagtaaataaggtaaca

SEQ ID NO: 3371318 - DNA, 25 bp, Homo sapien
tgaggcataaggtgctccctgccaa

SEQ ID NO: 3371319 - DNA, 25 bp, Homo sapien
ctgccaaaggcccttgaaagctcct

SEQ ID NO: 3371320 - DNA, 25 bp, Homo sapien
aaagctcctaatacttcataaaaat

SEQ ID NO: 3371321 - DNA, 25 bp, Homo sapien
ctccttcattgaggcataaggtgct

SEQ ID NO: 3371322 - DNA, 25 bp, Homo sapien
ccacagaaaaataccgataaaccag

SEQ ID NO: 3371323 - DNA, 25 bp, Homo sapien
cacagaaaaataccgataaaccagg

SEQ ID NO: 3371324 - DNA, 25 bp, Homo sapien
tcatgggtctggagatctgaagtct

SEQ ID NO: 3371325 - DNA, 25 bp, Homo sapien
ttatcatttttaaccaacaccaata

SEQ ID NO: 3371326 - DNA, 25 bp, Homo sapien
tgaagttatcatttttaaccaacac

SEQ ID NO: 3371327 - DNA, 25 bp, Homo sapien
tctgaagtctctgaagttatcattt

SEQ ID NO: 3371328 - DNA, 25 bp, Homo sapien
tatgtgtccacgaacatgccaagat

SEQ ID NO: 3371329 - DNA, 25 bp, Homo sapien
caaaagttaagacctctccaggtgt

SEQ ID NO: 3371330 - DNA, 25 bp, Homo sapien
aaacttgtggaaaggagcataggca

SEQ ID NO: 3371331 - DNA, 25 bp, Homo sapien
gccaagatttttgcaggacctgtct

SEQ ID NO: 3371332 - DNA, 25 bp, Homo sapien
cacataatggtctgctgcaagtacc

SEQ ID NO: 3371333 - DNA, 25 bp, Homo sapien
ctggatatcaagaagcagcatgaca

SEQ ID NO: 3371334 - DNA, 25 bp, Homo sapien
cgagtctggatatcaagaagcagca

SEQ ID NO: 3371335 - DNA, 25 bp, Homo sapien
acagcacataatggtctgctgcaag

SEQ ID NO: 3371336 - DNA, 25 bp, Homo sapien
ccagcaaggaccagaagtcagtctg

SEQ ID NO: 3371337 - DNA, 25 bp, Homo sapien
acccccagcaaggaccagaagtcag

SEQ ID NO: 3371338 - DNA, 25 bp, Homo sapien
ccccagcaaggaccagaagtcagtc

SEQ ID NO: 3371339 - DNA, 25 bp, Homo sapien
agcacccccagcaaggaccagaagt

SEQ ID NO: 3371340 - DNA, 25 bp, Homo sapien
ctgggtggtgcctccaactaacaag

SEQ ID NO: 3371341 - DNA, 25 bp, Homo sapien
gaaaaagccacaataggcaatgagc

SEQ ID NO: 3371342 - DNA, 25 bp, Homo sapien
caagagcaagctctgaacatggcca

SEQ ID NO: 3371343 - DNA, 25 bp, Homo sapien
gggcacattcaaggcgcccttgtga

SEQ ID NO: 3371344 - DNA, 25 bp, Homo sapien
agagtatcaattctgtctctaatga

SEQ ID NO: 3371345 - DNA, 25 bp, Homo sapien
tcttcaataaagagtatcaattctg

SEQ ID NO: 3371346 - DNA, 25 bp, Homo sapien
caataaagagtatcaattctgtctc

SEQ ID NO: 3371347 - DNA, 25 bp, Homo sapien
taaagagtatcaattctgtctctaa

SEQ ID NO: 3371348 - DNA, 25 bp, Homo sapien
taaaagtcgttagaattcactgatc

SEQ ID NO: 3371349 - DNA, 25 bp, Homo sapien
ctcactgcagactagggtaatacct

SEQ ID NO: 3371350 - DNA, 25 bp, Homo sapien
gaccatctggtatgtagaaagccaa

SEQ ID NO: 3371351 - DNA, 25 bp, Homo sapien
ggacataagagaacaaaaacctcac

SEQ ID NO: 3371352 - DNA, 25 bp, Homo sapien
cacagtcagagtagcttgggaagaa

SEQ ID NO: 3371353 - DNA, 25 bp, Homo sapien
gaccaggtttccagttcgatgtatc

SEQ ID NO: 3371354 - DNA, 25 bp, Homo sapien
gcccagtgactgtgcatcagatcgt

SEQ ID NO: 3371355 - DNA, 25 bp, Homo sapien
tagaccttgagaaatcagtgcgtgc

SEQ ID NO: 3371356 - DNA, 25 bp, Homo sapien
caaatagaggcaggtataatcccca

SEQ ID NO: 3371357 - DNA, 25 bp, Homo sapien
gatatctaaggtgaacacacgctgt

SEQ ID NO: 3371358 - DNA, 25 bp, Homo sapien
caaagtgaagcgtcctagatatcta

SEQ ID NO: 3371359 - DNA, 25 bp, Homo sapien
ttaatggcagggttaagacaggcct

SEQ ID NO: 3371360 - DNA, 25 bp, Homo sapien
tcctgctctgacgtgctgggcatca

SEQ ID NO: 3371361 - DNA, 25 bp, Homo sapien
cttatacagcatcctgagaagggag

SEQ ID NO: 3371362 - DNA, 25 bp, Homo sapien
tatatctgtcattctggccttcgga

SEQ ID NO: 3371363 - DNA, 25 bp, Homo sapien
gaatactcatgctagaggcactcct

SEQ ID NO: 3371364 - DNA, 25 bp, Homo sapien
ctgtgtttgtctgaatttgggaaat

SEQ ID NO: 3371365 - DNA, 25 bp, Homo sapien
tgctctgcaggaaggttaacatgaa

SEQ ID NO: 3371366 - DNA, 25 bp, Homo sapien
tgtttgtctgaatttgggaaatgct

SEQ ID NO: 3371367 - DNA, 25 bp, Homo sapien
tgcaggaaggttaacatgaattttt

SEQ ID NO: 3371368 - DNA, 25 bp, Homo sapien
tgcatccctgaatgactgtatgaac

SEQ ID NO: 3371369 - DNA, 25 bp, Homo sapien
tatgaaccatagttgttgctgccac

SEQ ID NO: 3371370 - DNA, 25 bp, Homo sapien
tcctccattgaatcttatatgagtg

SEQ ID NO: 3371371 - DNA, 25 bp, Homo sapien
cacactgaagattaatctgcatccc

SEQ ID NO: 3371372 - DNA, 25 bp, Homo sapien
gccatatcatacttttcgtagggtg

SEQ ID NO: 3371373 - DNA, 25 bp, Homo sapien
ggtggtctctactcttgccatatca

SEQ ID NO: 3371374 - DNA, 25 bp, Homo sapien
gtctcctacactcttccgcaggtgg

SEQ ID NO: 3371375 - DNA, 25 bp, Homo sapien
tcaatagtgccatgattgcccttcc

SEQ ID NO: 3371376 - DNA, 25 bp, Homo sapien
taaaccaaccatgcaaagatggcct

SEQ ID NO: 3371377 - DNA, 25 bp, Homo sapien
ggttccggtcacttacatcaagcaa

SEQ ID NO: 3371378 - DNA, 25 bp, Homo sapien
aatcctagaaaatggaagatacagc

SEQ ID NO: 3371379 - DNA, 25 bp, Homo sapien
gctttcaccgccatagagtaggagc

SEQ ID NO: 3371380 - DNA, 25 bp, Homo sapien
cttctctaagtcatctcctgatcct

SEQ ID NO: 3371381 - DNA, 25 bp, Homo sapien
ctgatcctgttgctatggcaggtat

SEQ ID NO: 3371382 - DNA, 25 bp, Homo sapien
tctaagtcatctcctgatcctgttg

SEQ ID NO: 3371383 - DNA, 25 bp, Homo sapien
ttgctatggcaggtatttgagagcc

SEQ ID NO: 3371384 - DNA, 25 bp, Homo sapien
gattggtatggtctgtcccagtctc

SEQ ID NO: 3371385 - DNA, 25 bp, Homo sapien
gatgctggcggcagagaaaatctac

SEQ ID NO: 3371386 - DNA, 25 bp, Homo sapien
tccttcagtttcagagtgtcaaatg

SEQ ID NO: 3371387 - DNA, 25 bp, Homo sapien
gctaaaggcttgtcctgaaatgaaa

SEQ ID NO: 3371388 - DNA, 25 bp, Homo sapien
cagattaattgctttctggtatcca

SEQ ID NO: 3371389 - DNA, 25 bp, Homo sapien
tgctttctggtatccattccctcct

SEQ ID NO: 3371390 - DNA, 25 bp, Homo sapien
gattaattgctttctggtatccatt

SEQ ID NO: 3371391 - DNA, 25 bp, Homo sapien
taattgctttctggtatccattccc

SEQ ID NO: 3371392 - DNA, 25 bp, Homo sapien
agctgctctactgctaattctagag

SEQ ID NO: 3371393 - DNA, 25 bp, Homo sapien
tcagctgctctactgctaattctag

SEQ ID NO: 3371394 - DNA, 25 bp, Homo sapien
ttatatcagctgctctactgctaat

SEQ ID NO: 3371395 - DNA, 25 bp, Homo sapien
tatcagctgctctactgctaattct

SEQ ID NO: 3371396 - DNA, 25 bp, Homo sapien
aggaccaagatcagtaaccataatc

SEQ ID NO: 3371397 - DNA, 25 bp, Homo sapien
tccacagaggtaccatctgtatcta

SEQ ID NO: 3371398 - DNA, 25 bp, Homo sapien
tgttatcctcacttatgtcttctcc

SEQ ID NO: 3371399 - DNA, 25 bp, Homo sapien
ctactcaaaatatactggatgcatt

SEQ ID NO: 3371400 - DNA, 25 bp, Homo sapien
taagtcattaaccttgttgagcccc

SEQ ID NO: 3371401 - DNA, 25 bp, Homo sapien
ttcatctatgataccccacgctggg

SEQ ID NO: 3371402 - DNA, 25 bp, Homo sapien
gaaaatgctacgcatgcgctgtccc

SEQ ID NO: 3371403 - DNA, 25 bp, Homo sapien
gaattgcagctcaaacgccctttca

SEQ ID NO: 3371404 - DNA, 25 bp, Homo sapien
ggcattggcagcctggcttactcca

SEQ ID NO: 3371405 - DNA, 25 bp, Homo sapien
tctttggaccatgggttccttggca

SEQ ID NO: 3371406 - DNA, 25 bp, Homo sapien
gtactgcttgcctataattgccttg

SEQ ID NO: 3371407 - DNA, 25 bp, Homo sapien
ggctgagtaagctcccactggctgt

SEQ ID NO: 3371408 - DNA, 25 bp, Homo sapien
ctttatcaaacctttgggatcttga

SEQ ID NO: 3371409 - DNA, 25 bp, Homo sapien
cctgaagtaggatctgagcagttgt

SEQ ID NO: 3371410 - DNA, 25 bp, Homo sapien
gacacgaaaagcatcctgaagtagg

SEQ ID NO: 3371411 - DNA, 25 bp, Homo sapien
aatgaaaaccaaccattctttatca

SEQ ID NO: 3371412 - DNA, 25 bp, Homo sapien
caatgtatcctactctgaccctgat

SEQ ID NO: 3371413 - DNA, 25 bp, Homo sapien
caggaacaatggattaatgactctt

SEQ ID NO: 3371414 - DNA, 25 bp, Homo sapien
gggtgatactgacgccaagccctag

SEQ ID NO: 3371415 - DNA, 25 bp, Homo sapien
ctgaactgatgggaactgatgggag

SEQ ID NO: 3371416 - DNA, 25 bp, Homo sapien
acacgtagggcacactgtgtcctgc

SEQ ID NO: 3371417 - DNA, 25 bp, Homo sapien
aagaagggcacacgtagggcacact

SEQ ID NO: 3371418 - DNA, 25 bp, Homo sapien
agggcacacgtagggcacactgtgt

SEQ ID NO: 3371419 - DNA, 25 bp, Homo sapien
ttccaagaagggcacacgtagggca

SEQ ID NO: 3371420 - DNA, 25 bp, Homo sapien
caatgggaagaaccattactctttc

SEQ ID NO: 3371421 - DNA, 25 bp, Homo sapien
acccaatgggaagaaccattactct

SEQ ID NO: 3371422 - DNA, 25 bp, Homo sapien
tgggaagaaccattactctttccac

SEQ ID NO: 3371423 - DNA, 25 bp, Homo sapien
gaagaaccattactctttccaccac

SEQ ID NO: 3371424 - DNA, 25 bp, Homo sapien
cgagttagactgtagaccacctgca

SEQ ID NO: 3371425 - DNA, 25 bp, Homo sapien
taaagaggtaaagagcatcgcagca

SEQ ID NO: 3371426 - DNA, 25 bp, Homo sapien
tcaaggcctaggactgacataaact

SEQ ID NO: 3371427 - DNA, 25 bp, Homo sapien
taatacaatgcgtctccgagttaga

SEQ ID NO: 3371428 - DNA, 25 bp, Homo sapien
cataagaataaaacgtaataatgat

SEQ ID NO: 3371429 - DNA, 25 bp, Homo sapien
gagagactgtggattaacatctgta

SEQ ID NO: 3371430 - DNA, 25 bp, Homo sapien
gaataaaacgtaataatgattactc

SEQ ID NO: 3371431 - DNA, 25 bp, Homo sapien
aacatctgtactgtttctcaatgta

SEQ ID NO: 3371432 - DNA, 25 bp, Homo sapien
taacttcacaattgagcttcacttt

SEQ ID NO: 3371433 - DNA, 25 bp, Homo sapien
tcttgaataaaaatcgggccatgca

SEQ ID NO: 3371434 - DNA, 25 bp, Homo sapien
aacattacaggacttggttcttgaa

SEQ ID NO: 3371435 - DNA, 25 bp, Homo sapien
agaatccaaagggaacattacagga

SEQ ID NO: 3371436 - DNA, 25 bp, Homo sapien
gaaaatacttgatctctccattctt

SEQ ID NO: 3371437 - DNA, 25 bp, Homo sapien
aaaatacttgatctctccattcttt

SEQ ID NO: 3371438 - DNA, 25 bp, Homo sapien
ttccccctcaaattcagcctgaaga

SEQ ID NO: 3371439 - DNA, 25 bp, Homo sapien
tcttctacttgttcttccccctcaa

SEQ ID NO: 3371440 - DNA, 25 bp, Homo sapien
tgttcttccccctcaaattcagcct

SEQ ID NO: 3371441 - DNA, 25 bp, Homo sapien
ttcttctacttgttcttccccctca

SEQ ID NO: 3371442 - DNA, 25 bp, Homo sapien
aatgccagtagataaagtcttgtca

SEQ ID NO: 3371443 - DNA, 25 bp, Homo sapien
tgccagtagataaagtcttgtcata

SEQ ID NO: 3371444 - DNA, 25 bp, Homo sapien
cagtagataaagtcttgtcatatta

SEQ ID NO: 3371445 - DNA, 25 bp, Homo sapien
agataaagtcttgtcatattaatca

SEQ ID NO: 3371446 - DNA, 25 bp, Homo sapien
tctgctaacaattgttccaaacgag

SEQ ID NO: 3371447 - DNA, 25 bp, Homo sapien
ttcaacaacactgtagcggaaatcc

SEQ ID NO: 3371448 - DNA, 25 bp, Homo sapien
tccaaacgagtttgtcgctgtgcac

SEQ ID NO: 3371449 - DNA, 25 bp, Homo sapien
tggtacgttccagcatcttgggttt

SEQ ID NO: 3371450 - DNA, 25 bp, Homo sapien
cacaacaaaggaggtaaacaacctg

SEQ ID NO: 3371451 - DNA, 25 bp, Homo sapien
gctcacgaaattatagaagctgaat

SEQ ID NO: 3371452 - DNA, 25 bp, Homo sapien
aagtaccttgttcaagctcacgaaa

SEQ ID NO: 3371453 - DNA, 25 bp, Homo sapien
ccagggcttgtgctcttatcaacta

SEQ ID NO: 3371454 - DNA, 25 bp, Homo sapien
gatgagtagcttaagtcttttgctt

SEQ ID NO: 3371455 - DNA, 25 bp, Homo sapien
atgatgagtagcttaagtcttttgc

SEQ ID NO: 3371456 - DNA, 25 bp, Homo sapien
gagtagcttaagtcttttgctttgc

SEQ ID NO: 3371457 - DNA, 25 bp, Homo sapien
agatgatgagtagcttaagtctttt

SEQ ID NO: 3371458 - DNA, 25 bp, Homo sapien
aatgaagtggcttttgtacgtaagc

SEQ ID NO: 3371459 - DNA, 25 bp, Homo sapien
tcatagattgcttgcttgaagtcac

SEQ ID NO: 3371460 - DNA, 25 bp, Homo sapien
gtaagcactcctttcacttaacatc

SEQ ID NO: 3371461 - DNA, 25 bp, Homo sapien
gtcacaggaaggccaaaatgaagtg

SEQ ID NO: 3371462 - DNA, 25 bp, Homo sapien
tgactgcgaagaggacggaagctgg

SEQ ID NO: 3371463 - DNA, 25 bp, Homo sapien
ctgactgcgaagaggacggaagctg

SEQ ID NO: 3371464 - DNA, 25 bp, Homo sapien
gctgactgcgaagaggacggaagct

SEQ ID NO: 3371465 - DNA, 25 bp, Homo sapien
tgctgactgcgaagaggacggaagc

SEQ ID NO: 3371466 - DNA, 25 bp, Homo sapien
aactatgtatctgattaaggtctaa

SEQ ID NO: 3371467 - DNA, 25 bp, Homo sapien
gtatctgattaaggtctaatatcta

SEQ ID NO: 3371468 - DNA, 25 bp, Homo sapien
ctatgtatctgattaaggtctaata

SEQ ID NO: 3371469 - DNA, 25 bp, Homo sapien
atgtatctgattaaggtctaatatc

SEQ ID NO: 3371470 - DNA, 25 bp, Homo sapien
caatttatattaccggattcgccat

SEQ ID NO: 3371471 - DNA, 25 bp, Homo sapien
attacaatttatattaccggattcg

SEQ ID NO: 3371472 - DNA, 25 bp, Homo sapien
aagatgcttgtgatgtgattacaat

SEQ ID NO: 3371473 - DNA, 25 bp, Homo sapien
accggattcgccattcatttcagaa

SEQ ID NO: 3371474 - DNA, 25 bp, Homo sapien
tttaattgacatactgtgcctacag

SEQ ID NO: 3371475 - DNA, 25 bp, Homo sapien
tattttaccaagatgcataataggg

SEQ ID NO: 3371476 - DNA, 25 bp, Homo sapien
tgcctacagtgatgtgtgaggctac

SEQ ID NO: 3371477 - DNA, 25 bp, Homo sapien
gctcctcttgattagtgttaattgg

SEQ ID NO: 3371478 - DNA, 25 bp, Homo sapien
gagagttactcaaacccaggctatc

SEQ ID NO: 3371479 - DNA, 25 bp, Homo sapien
gactactcatgctctgggtttcaaa

SEQ ID NO: 3371480 - DNA, 25 bp, Homo sapien
tctcatgagagctttggcatcaagt

SEQ ID NO: 3371481 - DNA, 25 bp, Homo sapien
cacagacagtgccaaggtacagcct

SEQ ID NO: 3371482 - DNA, 25 bp, Homo sapien
cgtcaatattacttgtggtgccatg

SEQ ID NO: 3371483 - DNA, 25 bp, Homo sapien
gatatgatacgcacatcagtggctc

SEQ ID NO: 3371484 - DNA, 25 bp, Homo sapien
gacagccctcccttcgtcaatatta

SEQ ID NO: 3371485 - DNA, 25 bp, Homo sapien
caacatggtccctgatctcaagacg

SEQ ID NO: 3371486 - DNA, 25 bp, Homo sapien
tgggagcttacagcgttcctgatgg

SEQ ID NO: 3371487 - DNA, 25 bp, Homo sapien
agcttacagcgttcctgatggctat

SEQ ID NO: 3371488 - DNA, 25 bp, Homo sapien
tctgggagcttacagcgttcctgat

SEQ ID NO: 3371489 - DNA, 25 bp, Homo sapien
ggagcttacagcgttcctgatggct

SEQ ID NO: 3371490 - DNA, 25 bp, Homo sapien
tgcagccatgaacatcactatggaa

SEQ ID NO: 3371491 - DNA, 25 bp, Homo sapien
aactgcctgagttttttgtcaccct

SEQ ID NO: 3371492 - DNA, 25 bp, Homo sapien
tgtcaccctcttcggtcataccaaa

SEQ ID NO: 3371493 - DNA, 25 bp, Homo sapien
aaaagggaaagcttattcagagctg

SEQ ID NO: 3371494 - DNA, 25 bp, Homo sapien
ggacagacacagtgcttcttgttct

SEQ ID NO: 3371495 - DNA, 25 bp, Homo sapien
gtggcgggccacacagtagcaccat

SEQ ID NO: 3371496 - DNA, 25 bp, Homo sapien
ggccacacagtagcaccattccttg

SEQ ID NO: 3371497 - DNA, 25 bp, Homo sapien
ccattccttgacctcgacggacaga

SEQ ID NO: 3371498 - DNA, 25 bp, Homo sapien
tctccttcgtattcaggatgcttga

SEQ ID NO: 3371499 - DNA, 25 bp, Homo sapien
ctctccttcgtattcaggatgcttg

SEQ ID NO: 3371500 - DNA, 25 bp, Homo sapien
cctctccttcgtattcaggatgctt

SEQ ID NO: 3371501 - DNA, 25 bp, Homo sapien
tcccacctctccttcgtattcagga

SEQ ID NO: 3371502 - DNA, 25 bp, Homo sapien
ctagtacatccctggtagcactctc

SEQ ID NO: 3371503 - DNA, 25 bp, Homo sapien
tgtgtttttcacatctccagactct

SEQ ID NO: 3371504 - DNA, 25 bp, Homo sapien
tctcttctggctagtacatccctgg

SEQ ID NO: 3371505 - DNA, 25 bp, Homo sapien
tgtcccaacctatgttctaacacaa

SEQ ID NO: 3371506 - DNA, 25 bp, Homo sapien
caactttcatacagtccccttggga

SEQ ID NO: 3371507 - DNA, 25 bp, Homo sapien
aagtggtgctgacagatgtgttgaa

SEQ ID NO: 3371508 - DNA, 25 bp, Homo sapien
tcattagtctgcttcaagagctggg

SEQ ID NO: 3371509 - DNA, 25 bp, Homo sapien
cagagcagatagtcagcagggaatc

SEQ ID NO: 3371510 - DNA, 25 bp, Homo sapien
gttttcatgaaccccctatgagtta

SEQ ID NO: 3371511 - DNA, 25 bp, Homo sapien
ttcatgaaccccctatgagttacag

SEQ ID NO: 3371512 - DNA, 25 bp, Homo sapien
catgaaccccctatgagttacagat

SEQ ID NO: 3371513 - DNA, 25 bp, Homo sapien
tgaaccccctatgagttacagatgc

SEQ ID NO: 3371514 - DNA, 25 bp, Homo sapien
atatttgtggtcaagggaggaagaa

SEQ ID NO: 3371515 - DNA, 25 bp, Homo sapien
cagccatttccctggtgaaacgttt

SEQ ID NO: 3371516 - DNA, 25 bp, Homo sapien
atttgtggtcaagggaggaagaata

SEQ ID NO: 3371517 - DNA, 25 bp, Homo sapien
ctggtgaaacgtttaatatttgtgg

SEQ ID NO: 3371518 - DNA, 25 bp, Homo sapien
tgttcctttaaatttattctgaaga

SEQ ID NO: 3371519 - DNA, 25 bp, Homo sapien
ctttaaatttattctgaagacccat

SEQ ID NO: 3371520 - DNA, 25 bp, Homo sapien
atgttcctttaaatttattctgaag

SEQ ID NO: 3371521 - DNA, 25 bp, Homo sapien
cagatgacacccgtgtgacctggac

SEQ ID NO: 3371522 - DNA, 25 bp, Homo sapien
cagatcacagttactcaaaggtgac

SEQ ID NO: 3371523 - DNA, 25 bp, Homo sapien
atcacagttactcaaaggtgacagg

SEQ ID NO: 3371524 - DNA, 25 bp, Homo sapien
aggtcagatcacagttactcaaagg

SEQ ID NO: 3371525 - DNA, 25 bp, Homo sapien
atatgttgatgaaaactagagttac

SEQ ID NO: 3371526 - DNA, 25 bp, Homo sapien
agctttgagtcatgtccttccttcc

SEQ ID NO: 3371527 - DNA, 25 bp, Homo sapien
gggcagctttgagtcatgtccttcc

SEQ ID NO: 3371528 - DNA, 25 bp, Homo sapien
gcagctttgagtcatgtccttcctt

SEQ ID NO: 3371529 - DNA, 25 bp, Homo sapien
aagggcagctttgagtcatgtcctt

SEQ ID NO: 3371530 - DNA, 25 bp, Homo sapien
tctctaggaaggagtgtgggtccca

SEQ ID NO: 3371531 - DNA, 25 bp, Homo sapien
caagtcctgtggattcgaattccat

SEQ ID NO: 3371532 - DNA, 25 bp, Homo sapien
ttgtctcaccgtcatctgtcactgg

SEQ ID NO: 3371533 - DNA, 25 bp, Homo sapien
tgtcactggcctaagaacatcctgc

SEQ ID NO: 3371534 - DNA, 25 bp, Homo sapien
taagtcaagggctaagcatttatag

SEQ ID NO: 3371535 - DNA, 25 bp, Homo sapien
tctttaagtcaagggctaagcattt

SEQ ID NO: 3371536 - DNA, 25 bp, Homo sapien
caagggctaagcatttatagtttgc

SEQ ID NO: 3371537 - DNA, 25 bp, Homo sapien
ctctttaagtcaagggctaagcatt

SEQ ID NO: 3371538 - DNA, 25 bp, Homo sapien
ctgataggaagggtattcattgaag

SEQ ID NO: 3371539 - DNA, 25 bp, Homo sapien
ttgaagatccaggcataactcagct

SEQ ID NO: 3371540 - DNA, 25 bp, Homo sapien
attgaagatccaggcataactcagc

SEQ ID NO: 3371541 - DNA, 25 bp, Homo sapien
cattgaagatccaggcataactcag

SEQ ID NO: 3371542 - DNA, 25 bp, Homo sapien
caggaccttgtggtttgtcacggta

SEQ ID NO: 3371543 - DNA, 25 bp, Homo sapien
tggcaatatacagattcccagtctc

SEQ ID NO: 3371544 - DNA, 25 bp, Homo sapien
tcacggtattggtaaccacacaggt

SEQ ID NO: 3371545 - DNA, 25 bp, Homo sapien
cttgagaaacaaagcggcgattatc

SEQ ID NO: 3371546 - DNA, 25 bp, Homo sapien
gagatgtaggaaggagtgagccatg

SEQ ID NO: 3371547 - DNA, 25 bp, Homo sapien
taggaaggagtgagccatgtgaaga

SEQ ID NO: 3371548 - DNA, 25 bp, Homo sapien
ctgagatgtaggaaggagtgagcca

SEQ ID NO: 3371549 - DNA, 25 bp, Homo sapien
gatgtaggaaggagtgagccatgtg

SEQ ID NO: 3371550 - DNA, 25 bp, Homo sapien
ctcctggccccacataggagacatc

SEQ ID NO: 3371551 - DNA, 25 bp, Homo sapien
tcctggccccacataggagacatca

SEQ ID NO: 3371552 - DNA, 25 bp, Homo sapien
cctggccccacataggagacatcat

SEQ ID NO: 3371553 - DNA, 25 bp, Homo sapien
agaacttgtggcaactgtatctcct

SEQ ID NO: 3371554 - DNA, 25 bp, Homo sapien
ttgggagagtactagcaatggagtc

SEQ ID NO: 3371555 - DNA, 25 bp, Homo sapien
gtcccaacttgagggaccaagtcca

SEQ ID NO: 3371556 - DNA, 25 bp, Homo sapien
ctgtatctccttcaaaacctggaca

SEQ ID NO: 3371557 - DNA, 25 bp, Homo sapien
caccgttgctccttttgcagtcgga

SEQ ID NO: 3371558 - DNA, 25 bp, Homo sapien
ccgttgctccttttgcagtcggaac

SEQ ID NO: 3371559 - DNA, 25 bp, Homo sapien
cagcttcaccgttgctccttttgca

SEQ ID NO: 3371560 - DNA, 25 bp, Homo sapien
ttcaccgttgctccttttgcagtcg

SEQ ID NO: 3371561 - DNA, 25 bp, Homo sapien
ggctttccatcagctcttcgccaga

SEQ ID NO: 3371562 - DNA, 25 bp, Homo sapien
tgtccccttgctacatttttccctc

SEQ ID NO: 3371563 - DNA, 25 bp, Homo sapien
tttgacttgtgtcttctggctttcc

SEQ ID NO: 3371564 - DNA, 25 bp, Homo sapien
gctcttcgccagataatagttggta

SEQ ID NO: 3371565 - DNA, 25 bp, Homo sapien
gcaacgtttgcttaatgcgtacccc

SEQ ID NO: 3371566 - DNA, 25 bp, Homo sapien
tgcgtaccccttaaaaactgtagca

SEQ ID NO: 3371567 - DNA, 25 bp, Homo sapien
taaaccaacagtttgagccctcctg

SEQ ID NO: 3371568 - DNA, 25 bp, Homo sapien
tgccttctctgggactatagagtga

SEQ ID NO: 3371569 - DNA, 25 bp, Homo sapien
atcatttattttttgaatccaatta

SEQ ID NO: 3371570 - DNA, 25 bp, Homo sapien
catttattttttgaatccaattagg

SEQ ID NO: 3371571 - DNA, 25 bp, Homo sapien
attttttgaatccaattaggttgag

SEQ ID NO: 3371572 - DNA, 25 bp, Homo sapien
ggccacgtgaatatcatttattttt

SEQ ID NO: 3371573 - DNA, 25 bp, Homo sapien
ccgagttagcagaggttcgccattt

SEQ ID NO: 3371574 - DNA, 25 bp, Homo sapien
gcagaggttcgccattttttagcca

SEQ ID NO: 3371575 - DNA, 25 bp, Homo sapien
cattttttagccacttgtatgtagg

SEQ ID NO: 3371576 - DNA, 25 bp, Homo sapien
tatgtaggcttaggccttccatttg

SEQ ID NO: 3371577 - DNA, 25 bp, Homo sapien
agcatctgagaggttcactattgtt

SEQ ID NO: 3371578 - DNA, 25 bp, Homo sapien
gctctgcgttggaaaagataactcc

SEQ ID NO: 3371579 - DNA, 25 bp, Homo sapien
ctataacactaagctctgcgttgga

SEQ ID NO: 3371580 - DNA, 25 bp, Homo sapien
gtgttccttgctcaatttgaattct

SEQ ID NO: 3371581 - DNA, 25 bp, Homo sapien
tcccttggctagctgtgttaatctg

SEQ ID NO: 3371582 - DNA, 25 bp, Homo sapien
ggccacactgcaccaacaggaagaa

SEQ ID NO: 3371583 - DNA, 25 bp, Homo sapien
tgttaatctgtgttcgtaggctttg

SEQ ID NO: 3371584 - DNA, 25 bp, Homo sapien
gaatgggaatcatgtgcagtaggta

SEQ ID NO: 3371585 - DNA, 25 bp, Homo sapien
tactcttttcaagagtgttcttgaa

SEQ ID NO: 3371586 - DNA, 25 bp, Homo sapien
cgcttttggcttacactcaatgaca

SEQ ID NO: 3371587 - DNA, 25 bp, Homo sapien
acaggttttggagacgcttttggct

SEQ ID NO: 3371588 - DNA, 25 bp, Homo sapien
ggagacgcttttggcttacactcaa

SEQ ID NO: 3371589 - DNA, 25 bp, Homo sapien
cttccaggcacatagcaagattata

SEQ ID NO: 3371590 - DNA, 25 bp, Homo sapien
taagaacccatgcatgtttggctct

SEQ ID NO: 3371591 - DNA, 25 bp, Homo sapien
gttaagctgtagcagttgtaagcag

SEQ ID NO: 3371592 - DNA, 25 bp, Homo sapien
tctaagtagaggctttaagaaccca

SEQ ID NO: 3371593 - DNA, 25 bp, Homo sapien
taaatgcctgatattgcctacactg

SEQ ID NO: 3371594 - DNA, 25 bp, Homo sapien
ttaaatgcctgatattgcctacact

SEQ ID NO: 3371595 - DNA, 25 bp, Homo sapien
tgagctgtgtgacaggtcttccctg

SEQ ID NO: 3371596 - DNA, 25 bp, Homo sapien
ctaaagctcttgagctgtgtgacag

SEQ ID NO: 3371597 - DNA, 25 bp, Homo sapien
ggtgactagagacctctcctgagga

SEQ ID NO: 3371598 - DNA, 25 bp, Homo sapien
tttatggtgactagagacctctcct

SEQ ID NO: 3371599 - DNA, 25 bp, Homo sapien
atgattccaactgcctttatggtga

SEQ ID NO: 3371600 - DNA, 25 bp, Homo sapien
aatgattccaactgcctttatggtg

SEQ ID NO: 3371601 - DNA, 25 bp, Homo sapien
catgaatttcaactcttccaaaagc

SEQ ID NO: 3371602 - DNA, 25 bp, Homo sapien
tacatgaatttcaactcttccaaaa

SEQ ID NO: 3371603 - DNA, 25 bp, Homo sapien
ttacatgaatttcaactcttccaaa

SEQ ID NO: 3371604 - DNA, 25 bp, Homo sapien
acatgaatttcaactcttccaaaag

SEQ ID NO: 3371605 - DNA, 25 bp, Homo sapien
cttcacatttaaagctcccttgggc

SEQ ID NO: 3371606 - DNA, 25 bp, Homo sapien
tcctggcaaaagttgggaggtactg

SEQ ID NO: 3371607 - DNA, 25 bp, Homo sapien
gagttcagattttgggggcatgaaa

SEQ ID NO: 3371608 - DNA, 25 bp, Homo sapien
acatttaaagctcccttgggctctg

SEQ ID NO: 3371609 - DNA, 25 bp, Homo sapien
cacttcctctgacaatcagtgtgca

SEQ ID NO: 3371610 - DNA, 25 bp, Homo sapien
cccacttcctctgacaatcagtgtg

SEQ ID NO: 3371611 - DNA, 25 bp, Homo sapien
tcctctgacaatcagtgtgcaatga

SEQ ID NO: 3371612 - DNA, 25 bp, Homo sapien
tgacaatcagtgtgcaatgaaccat

SEQ ID NO: 3371613 - DNA, 25 bp, Homo sapien
taggttcttgtccagacttcacagg

SEQ ID NO: 3371614 - DNA, 25 bp, Homo sapien
ttatagatgtgaggaactaggttct

SEQ ID NO: 3371615 - DNA, 25 bp, Homo sapien
ctagatctagatgtacaagcactat

SEQ ID NO: 3371616 - DNA, 25 bp, Homo sapien
taacataaagggatagagctagatc

SEQ ID NO: 3371617 - DNA, 25 bp, Homo sapien
ttgggtgttgttagatgtctggtat

SEQ ID NO: 3371618 - DNA, 25 bp, Homo sapien
tacccttcgaggaaacagggctctc

SEQ ID NO: 3371619 - DNA, 25 bp, Homo sapien
actccagtgctagctacccttcgag

SEQ ID NO: 3371620 - DNA, 25 bp, Homo sapien
cacatgttcgacaactccattagtc

SEQ ID NO: 3371621 - DNA, 25 bp, Homo sapien
gagtctctgcaagtccacatgttcg

SEQ ID NO: 3371622 - DNA, 25 bp, Homo sapien
tcagcaactcccatgtcagcacatg

SEQ ID NO: 3371623 - DNA, 25 bp, Homo sapien
tcatttggcaggttcaggcccattg

SEQ ID NO: 3371624 - DNA, 25 bp, Homo sapien
gacatacaatgactcattctgggag

SEQ ID NO: 3371625 - DNA, 25 bp, Homo sapien
tgaagcatggacatacaatgactca

SEQ ID NO: 3371626 - DNA, 25 bp, Homo sapien
gggcactggaggacaactttcataa

SEQ ID NO: 3371627 - DNA, 25 bp, Homo sapien
ggagaaggtgaaagaccttgttcat

SEQ ID NO: 3371628 - DNA, 25 bp, Homo sapien
tgtccatcggtagtaactgatcttt

SEQ ID NO: 3371629 - DNA, 25 bp, Homo sapien
atcttttgcaagttcccaatgggca

SEQ ID NO: 3371630 - DNA, 25 bp, Homo sapien
tattttacttagcaccgtctgggga

SEQ ID NO: 3371631 - DNA, 25 bp, Homo sapien
gggaaaggctctgacatagacactg

SEQ ID NO: 3371632 - DNA, 25 bp, Homo sapien
cttagcaccgtctggggaaaggctc

SEQ ID NO: 3371633 - DNA, 25 bp, Homo sapien
tgacatagacactgagagctttgct

SEQ ID NO: 3371634 - DNA, 25 bp, Homo sapien
ggctcttgcccgtgcggtacctata

SEQ ID NO: 3371635 - DNA, 25 bp, Homo sapien
tgcggtacctatagacatgagaaat

SEQ ID NO: 3371636 - DNA, 25 bp, Homo sapien
taaagtatggctcttgcccgtgcgg

SEQ ID NO: 3371637 - DNA, 25 bp, Homo sapien
ttatctaaagtatggctcttgcccg

SEQ ID NO: 3371638 - DNA, 25 bp, Homo sapien
cttcagatctgttttgcataggaga

SEQ ID NO: 3371639 - DNA, 25 bp, Homo sapien
atctgttttgcataggagaaacttc

SEQ ID NO: 3371640 - DNA, 25 bp, Homo sapien
ttcagatctgttttgcataggagaa

SEQ ID NO: 3371641 - DNA, 25 bp, Homo sapien
tgttttgcataggagaaacttccat

SEQ ID NO: 3371642 - DNA, 25 bp, Homo sapien
tgttctcttcccagggatattattt

SEQ ID NO: 3371643 - DNA, 25 bp, Homo sapien
cttcccagggatattatttttatgt

SEQ ID NO: 3371644 - DNA, 25 bp, Homo sapien
tctcttcccagggatattattttta

SEQ ID NO: 3371645 - DNA, 25 bp, Homo sapien
ctgggtgttctcttcccagggatat

SEQ ID NO: 3371646 - DNA, 25 bp, Homo sapien
tttcctgaactgacgtctctccatt

SEQ ID NO: 3371647 - DNA, 25 bp, Homo sapien
ttcctgaactgacgtctctccattt

SEQ ID NO: 3371648 - DNA, 25 bp, Homo sapien
cactatcatgatagaacaccactgt

SEQ ID NO: 3371649 - DNA, 25 bp, Homo sapien
tagaacaccactgtcacggtccagt

SEQ ID NO: 3371650 - DNA, 25 bp, Homo sapien
tgtcacggtccagttaaaatcccca

SEQ ID NO: 3371651 - DNA, 25 bp, Homo sapien
tcatgatagaacaccactgtcacgg

SEQ ID NO: 3371652 - DNA, 25 bp, Homo sapien
cctggtgacaaagttcccttagaga

SEQ ID NO: 3371653 - DNA, 25 bp, Homo sapien
ctattgaacagacaccctggtgaca

SEQ ID NO: 3371654 - DNA, 25 bp, Homo sapien
tctctgtggtggcaatagacatcac

SEQ ID NO: 3371655 - DNA, 25 bp, Homo sapien
taataaactgctgaacaacctgtgc

SEQ ID NO: 3371656 - DNA, 25 bp, Homo sapien
ctgatagcaaataacaccaagactt

SEQ ID NO: 3371657 - DNA, 25 bp, Homo sapien
gatagcaaataacaccaagactttt

SEQ ID NO: 3371658 - DNA, 25 bp, Homo sapien
tgatagcaaataacaccaagacttt

SEQ ID NO: 3371659 - DNA, 25 bp, Homo sapien
tagcaaataacaccaagacttttct

SEQ ID NO: 3371660 - DNA, 25 bp, Homo sapien
gctggcggtgcctatgttgctttct

SEQ ID NO: 3371661 - DNA, 25 bp, Homo sapien
tggtagaggcctggcgttggaggtc

SEQ ID NO: 3371662 - DNA, 25 bp, Homo sapien
ggcggtgcctatgttgctttctggt

SEQ ID NO: 3371663 - DNA, 25 bp, Homo sapien
tgctttctggtagaggcctggcgtt

SEQ ID NO: 3371664 - DNA, 25 bp, Homo sapien
tactgctagcagttccaaaatggtt

SEQ ID NO: 3371665 - DNA, 25 bp, Homo sapien
tatacaggtataactcccagcgtct

SEQ ID NO: 3371666 - DNA, 25 bp, Homo sapien
tccaaaatggttagtggctatacag

SEQ ID NO: 3371667 - DNA, 25 bp, Homo sapien
gatttagtaacgttgatgattctga

SEQ ID NO: 3371668 - DNA, 25 bp, Homo sapien
aatgatgccacttcggtagattaca

SEQ ID NO: 3371669 - DNA, 25 bp, Homo sapien
caaagcatagaggtgatcaaagcct

SEQ ID NO: 3371670 - DNA, 25 bp, Homo sapien
tacattattagacacgaggacacat

SEQ ID NO: 3371671 - DNA, 25 bp, Homo sapien
catatctctgaataaatgggacagc

SEQ ID NO: 3371672 - DNA, 25 bp, Homo sapien
tgccttcatctgtcttcaccaaggg

SEQ ID NO: 3371673 - DNA, 25 bp, Homo sapien
tttgccttcatctgtcttcaccaag

SEQ ID NO: 3371674 - DNA, 25 bp, Homo sapien
ttatttgccttcatctgtcttcacc

SEQ ID NO: 3371675 - DNA, 25 bp, Homo sapien
tatttgccttcatctgtcttcacca

SEQ ID NO: 3371676 - DNA, 25 bp, Homo sapien
ttgggtgaatacttgttcacatttt

SEQ ID NO: 3371677 - DNA, 25 bp, Homo sapien
tgggtgaatacttgttcacatttta

SEQ ID NO: 3371678 - DNA, 25 bp, Homo sapien
tgtgtttgacactatcttcagcctc

SEQ ID NO: 3371679 - DNA, 25 bp, Homo sapien
tctttggtgtaggacagtgtttccc

SEQ ID NO: 3371680 - DNA, 25 bp, Homo sapien
taggtggcatgcatgtacgaagttc

SEQ ID NO: 3371681 - DNA, 25 bp, Homo sapien
tcagcacgatgactatgttaacagc

SEQ ID NO: 3371682 - DNA, 25 bp, Homo sapien
ccaaagtatagtctggaaccaccag

SEQ ID NO: 3371683 - DNA, 25 bp, Homo sapien
tctggattttcaactcgtatccaag

SEQ ID NO: 3371684 - DNA, 25 bp, Homo sapien
gaattattgttccagtgtctgccaa

SEQ ID NO: 3371685 - DNA, 25 bp, Homo sapien
gttctaaagtcaactgtttggatac

SEQ ID NO: 3371686 - DNA, 25 bp, Homo sapien
ctgtgtgaatcctccccacatgctg

SEQ ID NO: 3371687 - DNA, 25 bp, Homo sapien
tacggctcacaatggcctacaggga

SEQ ID NO: 3371688 - DNA, 25 bp, Homo sapien
aaggttgagctcctaagtttgcagg

SEQ ID NO: 3371689 - DNA, 25 bp, Homo sapien
gattctgatgcttgtggtctacggc

SEQ ID NO: 3371690 - DNA, 25 bp, Homo sapien
gagattctggttctgcaggtcagag

SEQ ID NO: 3371691 - DNA, 25 bp, Homo sapien
tctgagaacagatacatacacagtt

SEQ ID NO: 3371692 - DNA, 25 bp, Homo sapien
tacagatctgagaacagatacatac

SEQ ID NO: 3371693 - DNA, 25 bp, Homo sapien
cagatacatacacagttaagataca

SEQ ID NO: 3371694 - DNA, 25 bp, Homo sapien
ggattgaatacagcctggatgtaat

SEQ ID NO: 3371695 - DNA, 25 bp, Homo sapien
ggttcatccacatatcaatagcatg

SEQ ID NO: 3371696 - DNA, 25 bp, Homo sapien
tgccttctgatacatctacacatgg

SEQ ID NO: 3371697 - DNA, 25 bp, Homo sapien
ccctggcagctacgaatctactttc

SEQ ID NO: 3371698 - DNA, 25 bp, Homo sapien
gaagccctgtacttattaggagtca

SEQ ID NO: 3371699 - DNA, 25 bp, Homo sapien
cttaatttcacagcgccctcctcgt

SEQ ID NO: 3371700 - DNA, 25 bp, Homo sapien
cactgggaaggtgaacgacgtaggt

SEQ ID NO: 3371701 - DNA, 25 bp, Homo sapien
ggtcttaatttcacagcgccctcct

SEQ ID NO: 3371702 - DNA, 25 bp, Homo sapien
tgaacgacgtaggtcttaatttcac

SEQ ID NO: 3371703 - DNA, 25 bp, Homo sapien
acatcatcagacactgtgaaaaatg

SEQ ID NO: 3371704 - DNA, 25 bp, Homo sapien
tcatgcttgttgtatccacatttca

SEQ ID NO: 3371705 - DNA, 25 bp, Homo sapien
ttcaggacctccattaactctctga

SEQ ID NO: 3371706 - DNA, 25 bp, Homo sapien
ctccattaactctctgaacatcatc

SEQ ID NO: 3371707 - DNA, 25 bp, Homo sapien
gagtgatcatgcgttacctggcacg

SEQ ID NO: 3371708 - DNA, 25 bp, Homo sapien
taaacacgatgtctagcgagtgatc

SEQ ID NO: 3371709 - DNA, 25 bp, Homo sapien
acctggcacggtaaaacaatactct

SEQ ID NO: 3371710 - DNA, 25 bp, Homo sapien
tctctgtcaaagtctatcaggtgtc

SEQ ID NO: 3371711 - DNA, 25 bp, Homo sapien
gtctgcagcagcagatagcctgtcc

SEQ ID NO: 3371712 - DNA, 25 bp, Homo sapien
cacttgtttggaccatgcagacata

SEQ ID NO: 3371713 - DNA, 25 bp, Homo sapien
gcatgcttcagttggatgtttcgga

SEQ ID NO: 3371714 - DNA, 25 bp, Homo sapien
tgtttcggatcatcaaatcaccagc

SEQ ID NO: 3371715 - DNA, 25 bp, Homo sapien
ggtatctgtgatttcgtctattgtc

SEQ ID NO: 3371716 - DNA, 25 bp, Homo sapien
cagcccacggagaatggagtcctgg

SEQ ID NO: 3371717 - DNA, 25 bp, Homo sapien
gatttcgtctattgtcacagcctct

SEQ ID NO: 3371718 - DNA, 25 bp, Homo sapien
tcctggcttgaatgacatacatggt

SEQ ID NO: 3371719 - DNA, 25 bp, Homo sapien
gaattcatattcaacccaagggttc

SEQ ID NO: 3371720 - DNA, 25 bp, Homo sapien
ttggctgcaactgtgcggaattcat

SEQ ID NO: 3371721 - DNA, 25 bp, Homo sapien
ccaatcccaatcacgttggctgcaa

SEQ ID NO: 3371722 - DNA, 25 bp, Homo sapien
gttcaaacccaccacggtcgctgtg

SEQ ID NO: 3371723 - DNA, 25 bp, Homo sapien
ccgttgcgtgttcagctgggcttct

SEQ ID NO: 3371724 - DNA, 25 bp, Homo sapien
gaagggtgagctaacacagagccgc

SEQ ID NO: 3371725 - DNA, 25 bp, Homo sapien
cagagccgcatgagcgctgaagagc

SEQ ID NO: 3371726 - DNA, 25 bp, Homo sapien
actcttgattgaaacccgttgcgtg

SEQ ID NO: 3371727 - DNA, 25 bp, Homo sapien
ggagcgcctgcaccagttagagcaa

SEQ ID NO: 3371728 - DNA, 25 bp, Homo sapien
ttagagcaaggtcgacaaccagggt

SEQ ID NO: 3371729 - DNA, 25 bp, Homo sapien
tgagccacgtggagatacacaaagg

SEQ ID NO: 3371730 - DNA, 25 bp, Homo sapien
tgcccaggcagagcttacaagctgg

SEQ ID NO: 3371731 - DNA, 25 bp, Homo sapien
tgacattcgctggtgtgacttcggg

SEQ ID NO: 3371732 - DNA, 25 bp, Homo sapien
ggttataaccagttcagatttgctg

SEQ ID NO: 3371733 - DNA, 25 bp, Homo sapien
cgccaccactgacattcgctggtgt

SEQ ID NO: 3371734 - DNA, 25 bp, Homo sapien
ctcccaggttataaccagttcagat

SEQ ID NO: 3371735 - DNA, 25 bp, Homo sapien
cttttaaatttagggcttgcagtca

SEQ ID NO: 3371736 - DNA, 25 bp, Homo sapien
cacatttccaacacgtatcctctaa

SEQ ID NO: 3371737 - DNA, 25 bp, Homo sapien
tggacatcggtctcctgaaaaacca

SEQ ID NO: 3371738 - DNA, 25 bp, Homo sapien
cattgccaaatagacaaaagatctc

SEQ ID NO: 3371739 - DNA, 25 bp, Homo sapien
tcgaccattctgtaattcctcaggg

SEQ ID NO: 3371740 - DNA, 25 bp, Homo sapien
cataaccaaagcctcgaccattctg

SEQ ID NO: 3371741 - DNA, 25 bp, Homo sapien
gggccggaaggccaccacataacca

SEQ ID NO: 3371742 - DNA, 25 bp, Homo sapien
ggaaggccaccacataaccaaagcc

SEQ ID NO: 3371743 - DNA, 25 bp, Homo sapien
gaacacgtatctagaggcatcagct

SEQ ID NO: 3371744 - DNA, 25 bp, Homo sapien
cacgctctcattcctgaacacgtat

SEQ ID NO: 3371745 - DNA, 25 bp, Homo sapien
tgaagacacctactttaacctcaaa

SEQ ID NO: 3371746 - DNA, 25 bp, Homo sapien
tacaccaccgtggtgggactgaaag

SEQ ID NO: 3371747 - DNA, 25 bp, Homo sapien
tctattcttctccagtggggaggcc

SEQ ID NO: 3371748 - DNA, 25 bp, Homo sapien
aagacttctggcaaagatactggct

SEQ ID NO: 3371749 - DNA, 25 bp, Homo sapien
ttctggcaaagatactggctggtgg

SEQ ID NO: 3371750 - DNA, 25 bp, Homo sapien
cataaccttgtattcgtcctctatt

SEQ ID NO: 3371751 - DNA, 25 bp, Homo sapien
cattgactgttgcactagaggggcc

SEQ ID NO: 3371752 - DNA, 25 bp, Homo sapien
ctgccttttaagttcgtgatttttg

SEQ ID NO: 3371753 - DNA, 25 bp, Homo sapien
gccttgacagctaagtgatacagca

SEQ ID NO: 3371754 - DNA, 25 bp, Homo sapien
tgtcccagcagaattatatgccttg

SEQ ID NO: 3371755 - DNA, 25 bp, Homo sapien
tcaggataattttggagtctgatga

SEQ ID NO: 3371756 - DNA, 25 bp, Homo sapien
ttttacttccgactcattatccagg

SEQ ID NO: 3371757 - DNA, 25 bp, Homo sapien
gccttcacttgatcccaattcagga

SEQ ID NO: 3371758 - DNA, 25 bp, Homo sapien
gatgaattccatatgatgtttccgg

SEQ ID NO: 3371759 - DNA, 25 bp, Homo sapien
agcacgattaggtgcctttgcaaaa

SEQ ID NO: 3371760 - DNA, 25 bp, Homo sapien
gattaggtgcctttgcaaaaaagaa

SEQ ID NO: 3371761 - DNA, 25 bp, Homo sapien
gcacgattaggtgcctttgcaaaaa

SEQ ID NO: 3371762 - DNA, 25 bp, Homo sapien
acgattaggtgcctttgcaaaaaag

SEQ ID NO: 3371763 - DNA, 25 bp, Homo sapien
tgtagggtgtctggctcttccagta

SEQ ID NO: 3371764 - DNA, 25 bp, Homo sapien
cttccttggggtgtagttgaggagg

SEQ ID NO: 3371765 - DNA, 25 bp, Homo sapien
ccttggggtgtagttgaggaggtgt

SEQ ID NO: 3371766 - DNA, 25 bp, Homo sapien
gggtgtctggctcttccagtaccac

SEQ ID NO: 3371767 - DNA, 25 bp, Homo sapien
tcttcatcgaaaggcaaagaaagct

SEQ ID NO: 3371768 - DNA, 25 bp, Homo sapien
tattatataatcttcatcgaaaggc

SEQ ID NO: 3371769 - DNA, 25 bp, Homo sapien
gaaagctccaccgatgttttatttg

SEQ ID NO: 3371770 - DNA, 25 bp, Homo sapien
cctccgtcgctgaatggcttaattt

SEQ ID NO: 3371771 - DNA, 25 bp, Homo sapien
gaagttagaggctttgtttgataaa

SEQ ID NO: 3371772 - DNA, 25 bp, Homo sapien
ctttcgatagaagttagaggctttg

SEQ ID NO: 3371773 - DNA, 25 bp, Homo sapien
tagctccctttcgatagaagttaga

SEQ ID NO: 3371774 - DNA, 25 bp, Homo sapien
aatctagctccctttcgatagaagt

SEQ ID NO: 3371775 - DNA, 25 bp, Homo sapien
tagggtataggacagccctgtacct

SEQ ID NO: 3371776 - DNA, 25 bp, Homo sapien
gtagggtataggacagccctgtacc

SEQ ID NO: 3371777 - DNA, 25 bp, Homo sapien
ctgggagtagggtataggacagccc

SEQ ID NO: 3371778 - DNA, 25 bp, Homo sapien
ggagtagggtataggacagccctgt

SEQ ID NO: 3371779 - DNA, 25 bp, Homo sapien
gccccagatcctctcgcgtaggcat

SEQ ID NO: 3371780 - DNA, 25 bp, Homo sapien
gacagcgtacatgcattcgaagtgg

SEQ ID NO: 3371781 - DNA, 25 bp, Homo sapien
ttattgtactgatggctgacagcgt

SEQ ID NO: 3371782 - DNA, 25 bp, Homo sapien
tacatgcattcgaagtggaagcccc

SEQ ID NO: 3371783 - DNA, 25 bp, Homo sapien
aaactggacctagctgtgagggaaa

SEQ ID NO: 3371784 - DNA, 25 bp, Homo sapien
tcataaactggacctagctgtgagg

SEQ ID NO: 3371785 - DNA, 25 bp, Homo sapien
ctggacctagctgtgagggaaatca

SEQ ID NO: 3371786 - DNA, 25 bp, Homo sapien
taaactggacctagctgtgagggaa

SEQ ID NO: 3371787 - DNA, 25 bp, Homo sapien
taagatgtacttgaacaacaatatt

SEQ ID NO: 3371788 - DNA, 25 bp, Homo sapien
tattacttagtactgggtgtcttca

SEQ ID NO: 3371789 - DNA, 25 bp, Homo sapien
tcaaaacaactagctaaatgttgct

SEQ ID NO: 3371790 - DNA, 25 bp, Homo sapien
tccagtaataagatgtacttgaaca

SEQ ID NO: 3371791 - DNA, 25 bp, Homo sapien
caacagccttgagttacggaccaag

SEQ ID NO: 3371792 - DNA, 25 bp, Homo sapien
caagtcttccgctgttctgccatga

SEQ ID NO: 3371793 - DNA, 25 bp, Homo sapien
cactgtccagtagggtttactcaca

SEQ ID NO: 3371794 - DNA, 25 bp, Homo sapien
tcaaaatcacaacggcatgggaaac

SEQ ID NO: 3371795 - DNA, 25 bp, Homo sapien
aaaaagattacatatgctagatcac

SEQ ID NO: 3371796 - DNA, 25 bp, Homo sapien
gattacatatgctagatcactggta

SEQ ID NO: 3371797 - DNA, 25 bp, Homo sapien
aaatatcatttacactggggttggg

SEQ ID NO: 3371798 - DNA, 25 bp, Homo sapien
aagattacatatgctagatcactgg

SEQ ID NO: 3371799 - DNA, 25 bp, Homo sapien
tggaaaggtgctgctttgtatgtag

SEQ ID NO: 3371800 - DNA, 25 bp, Homo sapien
tcttctgtgcccatggaaaggtgct

SEQ ID NO: 3371801 - DNA, 25 bp, Homo sapien
gtcttctgtgcccatggaaaggtgc

SEQ ID NO: 3371802 - DNA, 25 bp, Homo sapien
aaaggtgctgctttgtatgtagcat

SEQ ID NO: 3371803 - DNA, 25 bp, Homo sapien
ctgagaaatgaagcttatcatccat

SEQ ID NO: 3371804 - DNA, 25 bp, Homo sapien
gctgatgatttccctgtagctccat

SEQ ID NO: 3371805 - DNA, 25 bp, Homo sapien
tgctgatgatttccctgtagctcca

SEQ ID NO: 3371806 - DNA, 25 bp, Homo sapien
tttccaagatatccgttccaatagg

SEQ ID NO: 3371807 - DNA, 25 bp, Homo sapien
cacgggatcagaacaaacatgcttt

SEQ ID NO: 3371808 - DNA, 25 bp, Homo sapien
cagccacgggatcagaacaaacatg

SEQ ID NO: 3371809 - DNA, 25 bp, Homo sapien
ttggaattcactgcgtgcagcatgg

SEQ ID NO: 3371810 - DNA, 25 bp, Homo sapien
tgcctgcactggaagcctgtgatct

SEQ ID NO: 3371811 - DNA, 25 bp, Homo sapien
ctggtttgggatgttcattcatgaa

SEQ ID NO: 3371812 - DNA, 25 bp, Homo sapien
gatctggtttgggatgttcattcat

SEQ ID NO: 3371813 - DNA, 25 bp, Homo sapien
ctcctgacttgcctgcactggaagc

SEQ ID NO: 3371814 - DNA, 25 bp, Homo sapien
ggctccagaaggtacatagcccttg

SEQ ID NO: 3371815 - DNA, 25 bp, Homo sapien
gcccagcaaccccttatagggaaga

SEQ ID NO: 3371816 - DNA, 25 bp, Homo sapien
tagcaggttgataaaataggcccag

SEQ ID NO: 3371817 - DNA, 25 bp, Homo sapien
ccagaaggtacatagcccttggtgc

SEQ ID NO: 3371818 - DNA, 25 bp, Homo sapien
ctttctggaatttactcctctgctc

SEQ ID NO: 3371819 - DNA, 25 bp, Homo sapien
ttcatcaagatgattaataaacgta

SEQ ID NO: 3371820 - DNA, 25 bp, Homo sapien
gctcagtttaggatcattagtgaat

SEQ ID NO: 3371821 - DNA, 25 bp, Homo sapien
cttataaatccatcctttctggaat

SEQ ID NO: 3371822 - DNA, 25 bp, Homo sapien
tctttgccccggtgttacaggcacg

SEQ ID NO: 3371823 - DNA, 25 bp, Homo sapien
ttacaggcacgcaggagcaactgtg

SEQ ID NO: 3371824 - DNA, 25 bp, Homo sapien
gtgttacaggcacgcaggagcaact

SEQ ID NO: 3371825 - DNA, 25 bp, Homo sapien
cccggtgttacaggcacgcaggagc

SEQ ID NO: 3371826 - DNA, 25 bp, Homo sapien
caaacagaaccactgatccaacctg

SEQ ID NO: 3371827 - DNA, 25 bp, Homo sapien
actgatccaacctgggccaccatct

SEQ ID NO: 3371828 - DNA, 25 bp, Homo sapien
acagaaccactgatccaacctgggc

SEQ ID NO: 3371829 - DNA, 25 bp, Homo sapien
ctcacaaacagaaccactgatccaa

SEQ ID NO: 3371830 - DNA, 25 bp, Homo sapien
caattgctccggtttcattttggca

SEQ ID NO: 3371831 - DNA, 25 bp, Homo sapien
caactgctaaaatggtcaccttggg

SEQ ID NO: 3371832 - DNA, 25 bp, Homo sapien
gcacacacgctgactgtacttgcac

SEQ ID NO: 3371833 - DNA, 25 bp, Homo sapien
cagcttctacactgagccttttgga

SEQ ID NO: 3371834 - DNA, 25 bp, Homo sapien
catggtagagccactgaaccatgat

SEQ ID NO: 3371835 - DNA, 25 bp, Homo sapien
tagagccactgaaccatgattttcg

SEQ ID NO: 3371836 - DNA, 25 bp, Homo sapien
gttcatggtagagccactgaaccat

SEQ ID NO: 3371837 - DNA, 25 bp, Homo sapien
gccactgaaccatgattttcgtttt

SEQ ID NO: 3371838 - DNA, 25 bp, Homo sapien
ttggggcaaggaaagccccaaatca

SEQ ID NO: 3371839 - DNA, 25 bp, Homo sapien
tggggcaaggaaagccccaaatcat

SEQ ID NO: 3371840 - DNA, 25 bp, Homo sapien
gaggcacagcattgatatcatccgg

SEQ ID NO: 3371841 - DNA, 25 bp, Homo sapien
tatcatccggtgcaaggattttctg

SEQ ID NO: 3371842 - DNA, 25 bp, Homo sapien
tccaaatggacattcagaggcacag

SEQ ID NO: 3371843 - DNA, 25 bp, Homo sapien
gatgtgcaattaccacacctcttca

SEQ ID NO: 3371844 - DNA, 25 bp, Homo sapien
ttagatttgatccagttcattaatt

SEQ ID NO: 3371845 - DNA, 25 bp, Homo sapien
ccatctgtaacgtggagaacttaga

SEQ ID NO: 3371846 - DNA, 25 bp, Homo sapien
tttgtgtaaccattggcctccttgg

SEQ ID NO: 3371847 - DNA, 25 bp, Homo sapien
gcccggaggcttcccatctgtaacg

SEQ ID NO: 3371848 - DNA, 25 bp, Homo sapien
gcccttctcgccagacctctggctg

SEQ ID NO: 3371849 - DNA, 25 bp, Homo sapien
tcgtttaattacgcccttctcgcca

SEQ ID NO: 3371850 - DNA, 25 bp, Homo sapien
cgcccttctcgccagacctctggct

SEQ ID NO: 3371851 - DNA, 25 bp, Homo sapien
tttaattacgcccttctcgccagac

SEQ ID NO: 3371852 - DNA, 25 bp, Homo sapien
aggcgaacctcagccggtttcccag

SEQ ID NO: 3371853 - DNA, 25 bp, Homo sapien
gcggcgaatgggaagtcgcggcggg

SEQ ID NO: 3371854 - DNA, 25 bp, Homo sapien
gggttggcggcgaatgggaagtcgc

SEQ ID NO: 3371855 - DNA, 25 bp, Homo sapien
ctccccaccgtgaggcgaacctcag

SEQ ID NO: 3371856 - DNA, 25 bp, Homo sapien
cttccgggctggtgaacgcggtgac

SEQ ID NO: 3371857 - DNA, 25 bp, Homo sapien
cgggctggtgaacgcggtgacgtca

SEQ ID NO: 3371858 - DNA, 25 bp, Homo sapien
acgcggtgacgtcaccaacgcacat

SEQ ID NO: 3371859 - DNA, 25 bp, Homo sapien
ctggtgaacgcggtgacgtcaccaa

SEQ ID NO: 3371860 - DNA, 25 bp, Homo sapien
ctgagggaagccaaggaatccgcgc

SEQ ID NO: 3371861 - DNA, 25 bp, Homo sapien
tcttcctcgaggaccgggcgcggtg

SEQ ID NO: 3371862 - DNA, 25 bp, Homo sapien
tgctgaggaggcctctcgccacgtc

SEQ ID NO: 3371863 - DNA, 25 bp, Homo sapien
aaggcccagtgaaaaagcgtctcgg

SEQ ID NO: 3371864 - DNA, 25 bp, Homo sapien
gcacctccgcctcgacttaggaaaa

SEQ ID NO: 3371865 - DNA, 25 bp, Homo sapien
aaaaccattccattccacggaagcg

SEQ ID NO: 3371866 - DNA, 25 bp, Homo sapien
cattccattccacggaagcgggtgg

SEQ ID NO: 3371867 - DNA, 25 bp, Homo sapien
gaaagacccactcagtttcctcgca

SEQ ID NO: 3371868 - DNA, 25 bp, Homo sapien
cctgcccataaggaggccgcagcag

SEQ ID NO: 3371869 - DNA, 25 bp, Homo sapien
gctctcgagtgaccccggtgtaaac

SEQ ID NO: 3371870 - DNA, 25 bp, Homo sapien
cagctctcgagtgaccccggtgtaa

SEQ ID NO: 3371871 - DNA, 25 bp, Homo sapien
gcagcagctctcgagtgaccccggt

SEQ ID NO: 3371872 - DNA, 25 bp, Homo sapien
tatcacatcctcgttctccccatac

SEQ ID NO: 3371873 - DNA, 25 bp, Homo sapien
ggtactgtgatgacactctccccag

SEQ ID NO: 3371874 - DNA, 25 bp, Homo sapien
tcgaggattcacgaccctgggatag

SEQ ID NO: 3371875 - DNA, 25 bp, Homo sapien
ggagcattaccacgacactcgcatg

SEQ ID NO: 3371876 - DNA, 25 bp, Homo sapien
cctgggatagctcctagacattgta

SEQ ID NO: 3371877 - DNA, 25 bp, Homo sapien
agctctgtaattctgagtcggtctg

SEQ ID NO: 3371878 - DNA, 25 bp, Homo sapien
tctgtaattctgagtcggtctggga

SEQ ID NO: 3371879 - DNA, 25 bp, Homo sapien
tgggatattttccacgccttcgccc

SEQ ID NO: 3371880 - DNA, 25 bp, Homo sapien
aattctgagtcggtctgggatattt

SEQ ID NO: 3371881 - DNA, 25 bp, Homo sapien
aggcctccacgaacaagtttattag

SEQ ID NO: 3371882 - DNA, 25 bp, Homo sapien
ggactcagatcttatgggtaagaag

SEQ ID NO: 3371883 - DNA, 25 bp, Homo sapien
tgtatctttagatcaatgcacactt

SEQ ID NO: 3371884 - DNA, 25 bp, Homo sapien
acaagttttactggggatctgagga

SEQ ID NO: 3371885 - DNA, 25 bp, Homo sapien
cctgtgccaatgatacaggcacctc

SEQ ID NO: 3371886 - DNA, 25 bp, Homo sapien
actggcctgtgccaatgatacaggc

SEQ ID NO: 3371887 - DNA, 25 bp, Homo sapien
gccaatgatacaggcacctcagcat

SEQ ID NO: 3371888 - DNA, 25 bp, Homo sapien
tggcctgtgccaatgatacaggcac

SEQ ID NO: 3371889 - DNA, 25 bp, Homo sapien
tagatactgcttcggaaggcacagc

SEQ ID NO: 3371890 - DNA, 25 bp, Homo sapien
tgaatagatactgcttcggaaggca

SEQ ID NO: 3371891 - DNA, 25 bp, Homo sapien
tgtgaatagatactgcttcggaagg

SEQ ID NO: 3371892 - DNA, 25 bp, Homo sapien
gaatagatactgcttcggaaggcac

SEQ ID NO: 3371893 - DNA, 25 bp, Homo sapien
ctggaattcgggagactgcaacttc

SEQ ID NO: 3371894 - DNA, 25 bp, Homo sapien
tgtgaaaagtgactggaattcggga

SEQ ID NO: 3371895 - DNA, 25 bp, Homo sapien
ggaattcgggagactgcaacttcat

SEQ ID NO: 3371896 - DNA, 25 bp, Homo sapien
gtgaaaagtgactggaattcgggag

SEQ ID NO: 3371897 - DNA, 25 bp, Homo sapien
caatgaaaatatccgaatgctggct

SEQ ID NO: 3371898 - DNA, 25 bp, Homo sapien
tggatcagccatatgtaagcctttc

SEQ ID NO: 3371899 - DNA, 25 bp, Homo sapien
aaacgtgcacattgggcaccgtggc

SEQ ID NO: 3371900 - DNA, 25 bp, Homo sapien
cattaagttagtagcaccagtcctg

SEQ ID NO: 3371901 - DNA, 25 bp, Homo sapien
cagttctcatggaaagcatttatac

SEQ ID NO: 3371902 - DNA, 25 bp, Homo sapien
tcagttctcatggaaagcatttata

SEQ ID NO: 3371903 - DNA, 25 bp, Homo sapien
gaatcaacactaatgaaactgtggc

SEQ ID NO: 3371904 - DNA, 25 bp, Homo sapien
ccagacaggttttgcaacgtgcaca

SEQ ID NO: 3371905 - DNA, 25 bp, Homo sapien
ctactgtgtggctgctttagcaaca

SEQ ID NO: 3371906 - DNA, 25 bp, Homo sapien
aaatatagatggtcatcccacccag

SEQ ID NO: 3371907 - DNA, 25 bp, Homo sapien
tatctctggcacgtacctaaaaagc

SEQ ID NO: 3371908 - DNA, 25 bp, Homo sapien
catcggcaaaaccaaacatgcattt

SEQ ID NO: 3371909 - DNA, 25 bp, Homo sapien
gaataagctaatacaaggtgagtca

SEQ ID NO: 3371910 - DNA, 25 bp, Homo sapien
taatggttcgtctatcttctgtgca

SEQ ID NO: 3371911 - DNA, 25 bp, Homo sapien
ctgatagtatcttagatatattgga

SEQ ID NO: 3371912 - DNA, 25 bp, Homo sapien
gacacatatcagtatgcttgcctat

SEQ ID NO: 3371913 - DNA, 25 bp, Homo sapien
ctacagacacatatcagtatgcttg

SEQ ID NO: 3371914 - DNA, 25 bp, Homo sapien
tttatacaaaattcatactgatagt

SEQ ID NO: 3371915 - DNA, 25 bp, Homo sapien
cacaattgttaaaatgatgttcaag

SEQ ID NO: 3371916 - DNA, 25 bp, Homo sapien
gagttaattactactccttcttcca

SEQ ID NO: 3371917 - DNA, 25 bp, Homo sapien
taaaatgatgttcaagaaactatag

SEQ ID NO: 3371918 - DNA, 25 bp, Homo sapien
gaatgacctgagttaggccatcaag

SEQ ID NO: 3371919 - DNA, 25 bp, Homo sapien
taaattttgacgactggaggctggg

SEQ ID NO: 3371920 - DNA, 25 bp, Homo sapien
cattacattttaccagggcacccaa

SEQ ID NO: 3371921 - DNA, 25 bp, Homo sapien
taacatgatggccttctgacgtcac

SEQ ID NO: 3371922 - DNA, 25 bp, Homo sapien
tgttctaagagctccggacttcaag

SEQ ID NO: 3371923 - DNA, 25 bp, Homo sapien
catggcccactaagaggtaactacc

SEQ ID NO: 3371924 - DNA, 25 bp, Homo sapien
ggaaaacaatgatctagctcactct

SEQ ID NO: 3371925 - DNA, 25 bp, Homo sapien
tctaagcgactagtacagcatatct

SEQ ID NO: 3371926 - DNA, 25 bp, Homo sapien
cttgaacttactataaacagtggga

SEQ ID NO: 3371927 - DNA, 25 bp, Homo sapien
tgtttatcatccgaatcccagccga

SEQ ID NO: 3371928 - DNA, 25 bp, Homo sapien
cagccgactgaaacatctccttcat

SEQ ID NO: 3371929 - DNA, 25 bp, Homo sapien
tggcaaaatctatatcctgaggctt

SEQ ID NO: 3371930 - DNA, 25 bp, Homo sapien
gtaattgttccgtgcttttctcctc

SEQ ID NO: 3371931 - DNA, 25 bp, Homo sapien
tatagtgagatctctgcgttccgca

SEQ ID NO: 3371932 - DNA, 25 bp, Homo sapien
tgccagtcagttgtaaattctacct

SEQ ID NO: 3371933 - DNA, 25 bp, Homo sapien
catcagtggtgacatcaatccgtag

SEQ ID NO: 3371934 - DNA, 25 bp, Homo sapien
caatccgtagtgtagtaatctcaaa

SEQ ID NO: 3371935 - DNA, 25 bp, Homo sapien
ggcattctgatagactcacaatatg

SEQ ID NO: 3371936 - DNA, 25 bp, Homo sapien
cattctgatagactcacaatatggt

SEQ ID NO: 3371937 - DNA, 25 bp, Homo sapien
tctgatagactcacaatatggtttt

SEQ ID NO: 3371938 - DNA, 25 bp, Homo sapien
ttctgatagactcacaatatggttt

SEQ ID NO: 3371939 - DNA, 25 bp, Homo sapien
ttagcatgtccaacaaatctaactt

SEQ ID NO: 3371940 - DNA, 25 bp, Homo sapien
attctctgtttagcatgtccaacaa

SEQ ID NO: 3371941 - DNA, 25 bp, Homo sapien
tgtttagcatgtccaacaaatctaa

SEQ ID NO: 3371942 - DNA, 25 bp, Homo sapien
ctctgtttagcatgtccaacaaatc

SEQ ID NO: 3371943 - DNA, 25 bp, Homo sapien
tatgaaggcgaacactttcactcgt

SEQ ID NO: 3371944 - DNA, 25 bp, Homo sapien
cacgtttaatgcacctaacacaggg

SEQ ID NO: 3371945 - DNA, 25 bp, Homo sapien
cctgtggtaagcattcaaacatctg

SEQ ID NO: 3371946 - DNA, 25 bp, Homo sapien
taaaaccgtaagctgtatgaaggcg

SEQ ID NO: 3371947 - DNA, 25 bp, Homo sapien
aatcctttctcctgatattccagcc

SEQ ID NO: 3371948 - DNA, 25 bp, Homo sapien
tataaggagccacatcaagatcata

SEQ ID NO: 3371949 - DNA, 25 bp, Homo sapien
atataaggagccacatcaagatcat

SEQ ID NO: 3371950 - DNA, 25 bp, Homo sapien
accttgccaccattttagtatccag

SEQ ID NO: 3371951 - DNA, 25 bp, Homo sapien
gacagtggtgtcagactcacaaggc

SEQ ID NO: 3371952 - DNA, 25 bp, Homo sapien
tttacactgatacaagatccacccc

SEQ ID NO: 3371953 - DNA, 25 bp, Homo sapien
tgcccaagcttaccgaagtgtgata

SEQ ID NO: 3371954 - DNA, 25 bp, Homo sapien
tctaaacttgcattagcaggtaaac

SEQ ID NO: 3371955 - DNA, 25 bp, Homo sapien
gcgatcttcaacctcaaatccaatt

SEQ ID NO: 3371956 - DNA, 25 bp, Homo sapien
tataatgaagtcttgatagggtttc

SEQ ID NO: 3371957 - DNA, 25 bp, Homo sapien
ggtttcaatgggtctgaactatctg

SEQ ID NO: 3371958 - DNA, 25 bp, Homo sapien
tacacgagtagttgcatcaggttcc

SEQ ID NO: 3371959 - DNA, 25 bp, Homo sapien
tgtcatggccacttacaggaaatgg

SEQ ID NO: 3371960 - DNA, 25 bp, Homo sapien
gaggaatggaccactgctgcatttc

SEQ ID NO: 3371961 - DNA, 25 bp, Homo sapien
gacagtgctctccttggtacttcag

SEQ ID NO: 3371962 - DNA, 25 bp, Homo sapien
aatgctctgctttttagtagccatc

SEQ ID NO: 3371963 - DNA, 25 bp, Homo sapien
gctctgctttttagtagccatcagt

SEQ ID NO: 3371964 - DNA, 25 bp, Homo sapien
gaaatgctctgctttttagtagcca

SEQ ID NO: 3371965 - DNA, 25 bp, Homo sapien
tgctctgctttttagtagccatcag

SEQ ID NO: 3371966 - DNA, 25 bp, Homo sapien
tagacagtcattgttaaggtaaccc

SEQ ID NO: 3371967 - DNA, 25 bp, Homo sapien
gcatagcttgctagaacaaatcctg

SEQ ID NO: 3371968 - DNA, 25 bp, Homo sapien
tgttgttctacagaggtcccctaaa

SEQ ID NO: 3371969 - DNA, 25 bp, Homo sapien
tagtgaccctcaagttaatcccatg

SEQ ID NO: 3371970 - DNA, 25 bp, Homo sapien
tgacacctaatacacattgtcagat

SEQ ID NO: 3371971 - DNA, 25 bp, Homo sapien
ggcatattaccattgtatatgacac

SEQ ID NO: 3371972 - DNA, 25 bp, Homo sapien
acaggcatattaccattgtatatga

SEQ ID NO: 3371973 - DNA, 25 bp, Homo sapien
aatagccatatccttttaattaata

SEQ ID NO: 3371974 - DNA, 25 bp, Homo sapien
ctgatgaaagcatttaggactcaaa

SEQ ID NO: 3371975 - DNA, 25 bp, Homo sapien
tgaaagcatttaggactcaaatctt

SEQ ID NO: 3371976 - DNA, 25 bp, Homo sapien
tttatttacctgatgaaagcattta

SEQ ID NO: 3371977 - DNA, 25 bp, Homo sapien
gatgaaagcatttaggactcaaatc

SEQ ID NO: 3371978 - DNA, 25 bp, Homo sapien
aaattactatttgctcatagagtac

SEQ ID NO: 3371979 - DNA, 25 bp, Homo sapien
aattactatttgctcatagagtaca

SEQ ID NO: 3371980 - DNA, 25 bp, Homo sapien
ttactatttgctcatagagtacaaa

SEQ ID NO: 3371981 - DNA, 25 bp, Homo sapien
actatttgctcatagagtacaaaga

SEQ ID NO: 3371982 - DNA, 25 bp, Homo sapien
gaaatcagttgagtgtcacactgca

SEQ ID NO: 3371983 - DNA, 25 bp, Homo sapien
taacaaaagctagggtgacaagtac

SEQ ID NO: 3371984 - DNA, 25 bp, Homo sapien
gctcagtatctgaactataagccca

SEQ ID NO: 3371985 - DNA, 25 bp, Homo sapien
gcagttttttgagcccacgaatagt

SEQ ID NO: 3371986 - DNA, 25 bp, Homo sapien
tctggtagcatgtcattgatgggac

SEQ ID NO: 3371987 - DNA, 25 bp, Homo sapien
catgaacggcagtctagaataccag

SEQ ID NO: 3371988 - DNA, 25 bp, Homo sapien
cataacattacttggagggttgcag

SEQ ID NO: 3371989 - DNA, 25 bp, Homo sapien
catctacttgggtagcttggtgcca

SEQ ID NO: 3371990 - DNA, 25 bp, Homo sapien
gaatgtggtcttggcaaccagcaat

SEQ ID NO: 3371991 - DNA, 25 bp, Homo sapien
tgtggtgccagtacaagttagaatg

SEQ ID NO: 3371992 - DNA, 25 bp, Homo sapien
tcttaggtatgcctggactgttgcc

SEQ ID NO: 3371993 - DNA, 25 bp, Homo sapien
ttcagggaactgtatggatcaaatc

SEQ ID NO: 3371994 - DNA, 25 bp, Homo sapien
caaatagctagaaacatctgttgca

SEQ ID NO: 3371995 - DNA, 25 bp, Homo sapien
gttgtcctcagattactgtatccag

SEQ ID NO: 3371996 - DNA, 25 bp, Homo sapien
aatcagctgtcttatgacccagtag

SEQ ID NO: 3371997 - DNA, 25 bp, Homo sapien
agagtcctaagcagagttgccacaa

SEQ ID NO: 3371998 - DNA, 25 bp, Homo sapien
ggcagcttatgtgaatcctcatgga

SEQ ID NO: 3371999 - DNA, 25 bp, Homo sapien
taggccggccttctacagaacacag

SEQ ID NO: 3372000 - DNA, 25 bp, Homo sapien
gcaacttgaatctgataggccggcc

SEQ ID NO: 3372001 - DNA, 25 bp, Homo sapien
ttatccttatgtgggccgatggcag

SEQ ID NO: 3372002 - DNA, 25 bp, Homo sapien
gcttctgaacacatactgatgctct

SEQ ID NO: 3372003 - DNA, 25 bp, Homo sapien
catcagttttgccatatagggccaa

SEQ ID NO: 3372004 - DNA, 25 bp, Homo sapien
gactgtcttcaattaggccctaaca

SEQ ID NO: 3372005 - DNA, 25 bp, Homo sapien
catcttccagattgggtactcagag

SEQ ID NO: 3372006 - DNA, 25 bp, Homo sapien
taatccctatggactgggtcagaaa

SEQ ID NO: 3372007 - DNA, 25 bp, Homo sapien
gggaaaactcaacaacatgcacgac

SEQ ID NO: 3372008 - DNA, 25 bp, Homo sapien
tctgtcacttactctgtgggcctgg

SEQ ID NO: 3372009 - DNA, 25 bp, Homo sapien
tacctggtgtgcatagcgggcattc

SEQ ID NO: 3372010 - DNA, 25 bp, Homo sapien
gaagatctcttacctgtctagactg

SEQ ID NO: 3372011 - DNA, 25 bp, Homo sapien
tattggcatcacaagagaagatctc

SEQ ID NO: 3372012 - DNA, 25 bp, Homo sapien
cacagtgacattgaagatccgtacc

SEQ ID NO: 3372013 - DNA, 25 bp, Homo sapien
tgcctcacaggaagatagctcatag

SEQ ID NO: 3372014 - DNA, 25 bp, Homo sapien
taacatgggatgcttatataccacg

SEQ ID NO: 3372015 - DNA, 25 bp, Homo sapien
ttctctgtacttctaggtactagag

SEQ ID NO: 3372016 - DNA, 25 bp, Homo sapien
taagaagcttaatactatgttgtgg

SEQ ID NO: 3372017 - DNA, 25 bp, Homo sapien
acttactgtttgtgatatgtgggca

SEQ ID NO: 3372018 - DNA, 25 bp, Homo sapien
tctgttgccccgagccgtgagccag

SEQ ID NO: 3372019 - DNA, 25 bp, Homo sapien
tgtcggggggagcatttgctattaa

SEQ ID NO: 3372020 - DNA, 25 bp, Homo sapien
aaagctgcttcacgtcggccctcgg

SEQ ID NO: 3372021 - DNA, 25 bp, Homo sapien
ccagcgatggagtcgcggcgctttc

SEQ ID NO: 3372022 - DNA, 25 bp, Homo sapien
gggcgaggctcggagccgctagcgg

SEQ ID NO: 3372023 - DNA, 25 bp, Homo sapien
cgcccggagtagttccctgtagtcg

SEQ ID NO: 3372024 - DNA, 25 bp, Homo sapien
tcggagccgctagcggtgcagctgg

SEQ ID NO: 3372025 - DNA, 25 bp, Homo sapien
agtagttccctgtagtcgggagtgg

SEQ ID NO: 3372026 - DNA, 25 bp, Homo sapien
acatggccggcgaaggagatcagca

SEQ ID NO: 3372027 - DNA, 25 bp, Homo sapien
gtaaacagacatggccggcgaagga

SEQ ID NO: 3372028 - DNA, 25 bp, Homo sapien
cagcaggacgctgcgcacaacatgg

SEQ ID NO: 3372029 - DNA, 25 bp, Homo sapien
ccagcctcctttgcgggtaaacaga

SEQ ID NO: 3372030 - DNA, 25 bp, Homo sapien
caggcttgggtacgcgccgccgtct

SEQ ID NO: 3372031 - DNA, 25 bp, Homo sapien
ggccctccctcggagtcttcggcac

SEQ ID NO: 3372032 - DNA, 25 bp, Homo sapien
tttcaggcttgggtacgcgccgccg

SEQ ID NO: 3372033 - DNA, 25 bp, Homo sapien
agccgcgcgacacgggccctccctc

SEQ ID NO: 3372034 - DNA, 25 bp, Homo sapien
cacaccaatacaccggccattccct

SEQ ID NO: 3372035 - DNA, 25 bp, Homo sapien
atacaccggccattccctcatcgtt

SEQ ID NO: 3372036 - DNA, 25 bp, Homo sapien
caatacaccggccattccctcatcg

SEQ ID NO: 3372037 - DNA, 25 bp, Homo sapien
acacgcacaccaatacaccggccat

SEQ ID NO: 3372038 - DNA, 25 bp, Homo sapien
gaagtcttgattgacccagggttca

SEQ ID NO: 3372039 - DNA, 25 bp, Homo sapien
atttgtagactccaccagccttgca

SEQ ID NO: 3372040 - DNA, 25 bp, Homo sapien
tacacagatgtgagctccggtgatc

SEQ ID NO: 3372041 - DNA, 25 bp, Homo sapien
tccggtgatctgtagcaatgcacaa

SEQ ID NO: 3372042 - DNA, 25 bp, Homo sapien
aactgactctggcttaccaaagcag

SEQ ID NO: 3372043 - DNA, 25 bp, Homo sapien
tgcaataagcatacaacttgctgag

SEQ ID NO: 3372044 - DNA, 25 bp, Homo sapien
gtggactaaattggatctaagcccc

SEQ ID NO: 3372045 - DNA, 25 bp, Homo sapien
taagccccagtaacaagtggacagg

SEQ ID NO: 3372046 - DNA, 25 bp, Homo sapien
tttgagtattcgaatgacaagtggc

SEQ ID NO: 3372047 - DNA, 25 bp, Homo sapien
aacatgaatcagttttacgtgatgc

SEQ ID NO: 3372048 - DNA, 25 bp, Homo sapien
cgaatgacaagtggctgatccacag

SEQ ID NO: 3372049 - DNA, 25 bp, Homo sapien
cattaacatgaatcagttttacgtg

SEQ ID NO: 3372050 - DNA, 25 bp, Homo sapien
actgagatatggcgtgggtgatttc

SEQ ID NO: 3372051 - DNA, 25 bp, Homo sapien
taactgagatatggcgtgggtgatt

SEQ ID NO: 3372052 - DNA, 25 bp, Homo sapien
ttaactgagatatggcgtgggtgat

SEQ ID NO: 3372053 - DNA, 25 bp, Homo sapien
tgagatatggcgtgggtgatttcat

SEQ ID NO: 3372054 - DNA, 25 bp, Homo sapien
tctggtataggaaaccgtgtaaatg

SEQ ID NO: 3372055 - DNA, 25 bp, Homo sapien
ctggtataggaaaccgtgtaaatgt

SEQ ID NO: 3372056 - DNA, 25 bp, Homo sapien
tggtataggaaaccgtgtaaatgta

SEQ ID NO: 3372057 - DNA, 25 bp, Homo sapien
ttgtaactgaacttcacaaacttct

SEQ ID NO: 3372058 - DNA, 25 bp, Homo sapien
ctgacaagtctttgtaactgaactt

SEQ ID NO: 3372059 - DNA, 25 bp, Homo sapien
caagtctttgtaactgaacttcaca

SEQ ID NO: 3372060 - DNA, 25 bp, Homo sapien
gacaagtctttgtaactgaacttca

SEQ ID NO: 3372061 - DNA, 25 bp, Homo sapien
gaagaagggaacaaactgggcactc

SEQ ID NO: 3372062 - DNA, 25 bp, Homo sapien
tggagtgtcttggtaaagtaaaaca

SEQ ID NO: 3372063 - DNA, 25 bp, Homo sapien
cagtgccatggcattgctgacctat

SEQ ID NO: 3372064 - DNA, 25 bp, Homo sapien
ccttgggaccccaaacatgaaggtg

SEQ ID NO: 3372065 - DNA, 25 bp, Homo sapien
tgctgacctatccttctagggatgg

SEQ ID NO: 3372066 - DNA, 25 bp, Homo sapien
gatggctccactgattgcatctgga

SEQ ID NO: 3372067 - DNA, 25 bp, Homo sapien
ctgagcaatccacaagccagtgtca

SEQ ID NO: 3372068 - DNA, 25 bp, Homo sapien
tgagcaatccacaagccagtgtcag

SEQ ID NO: 3372069 - DNA, 25 bp, Homo sapien
gagcaatccacaagccagtgtcaga

SEQ ID NO: 3372070 - DNA, 25 bp, Homo sapien
gcaatccacaagccagtgtcagaat

SEQ ID NO: 3372071 - DNA, 25 bp, Homo sapien
ccttgtgccgggctaggtcctcaat

SEQ ID NO: 3372072 - DNA, 25 bp, Homo sapien
gcctggatggttttatcaggagcct

SEQ ID NO: 3372073 - DNA, 25 bp, Homo sapien
gccctagagattgtcataacgccag

SEQ ID NO: 3372074 - DNA, 25 bp, Homo sapien
tttgtgaacagaggtgaaactaccg

SEQ ID NO: 3372075 - DNA, 25 bp, Homo sapien
tcacattgtctcatagggccaaaaa

SEQ ID NO: 3372076 - DNA, 25 bp, Homo sapien
cattgtctcatagggccaaaaatgc

SEQ ID NO: 3372077 - DNA, 25 bp, Homo sapien
cacattgtctcatagggccaaaaat

SEQ ID NO: 3372078 - DNA, 25 bp, Homo sapien
cttcacattgtctcatagggccaaa

SEQ ID NO: 3372079 - DNA, 25 bp, Homo sapien
gggcctatgacaccaacagacatta

SEQ ID NO: 3372080 - DNA, 25 bp, Homo sapien
aggcatatcactgtatcatctccca

SEQ ID NO: 3372081 - DNA, 25 bp, Homo sapien
taaaccctgggcctatgacaccaac

SEQ ID NO: 3372082 - DNA, 25 bp, Homo sapien
aacagacattatcaggcatatcact

SEQ ID NO: 3372083 - DNA, 25 bp, Homo sapien
gagacccaatcagggtagctttgta

SEQ ID NO: 3372084 - DNA, 25 bp, Homo sapien
cagggtagctttgtattagacgcat

SEQ ID NO: 3372085 - DNA, 25 bp, Homo sapien
cctacagagacccaatcagggtagc

SEQ ID NO: 3372086 - DNA, 25 bp, Homo sapien
cccaatcagggtagctttgtattag

SEQ ID NO: 3372087 - DNA, 25 bp, Homo sapien
ctttgcctgtgtcatgtagataaaa

SEQ ID NO: 3372088 - DNA, 25 bp, Homo sapien
aaaattctccgcataaaacagttgc

SEQ ID NO: 3372089 - DNA, 25 bp, Homo sapien
tgtcatgtagataaaaattctccgc

SEQ ID NO: 3372090 - DNA, 25 bp, Homo sapien
aaaacagttgccaggcacagggaat

SEQ ID NO: 3372091 - DNA, 25 bp, Homo sapien
tacagatttgttttatcgattgtga

SEQ ID NO: 3372092 - DNA, 25 bp, Homo sapien
cagcttccttattccgagctaaatc

SEQ ID NO: 3372093 - DNA, 25 bp, Homo sapien
ttccgagctaaatcaagtttacaga

SEQ ID NO: 3372094 - DNA, 25 bp, Homo sapien
gttttatcgattgtgaatatttaac

SEQ ID NO: 3372095 - DNA, 25 bp, Homo sapien
tctgttgaacttgccttttgcataa

SEQ ID NO: 3372096 - DNA, 25 bp, Homo sapien
gaacttgccttttgcataaggtaag

SEQ ID NO: 3372097 - DNA, 25 bp, Homo sapien
tgcataaggtaaggcaaccttagtt

SEQ ID NO: 3372098 - DNA, 25 bp, Homo sapien
cttttgcataaggtaaggcaacctt

SEQ ID NO: 3372099 - DNA, 25 bp, Homo sapien
tgtcccgctttagttgctttccttc

SEQ ID NO: 3372100 - DNA, 25 bp, Homo sapien
gtcccgctttagttgctttccttca

SEQ ID NO: 3372101 - DNA, 25 bp, Homo sapien
ctactgtcccattgcatgtagcatc

SEQ ID NO: 3372102 - DNA, 25 bp, Homo sapien
cgtcttcgtcttctactgtcccatt

SEQ ID NO: 3372103 - DNA, 25 bp, Homo sapien
caccctcccaatatctatgagattg

SEQ ID NO: 3372104 - DNA, 25 bp, Homo sapien
ccaccagagtagaacgtgattcttc

SEQ ID NO: 3372105 - DNA, 25 bp, Homo sapien
gagtcttaaagatactccaatgctc

SEQ ID NO: 3372106 - DNA, 25 bp, Homo sapien
taaagatactccaatgctcagattc

SEQ ID NO: 3372107 - DNA, 25 bp, Homo sapien
tatttcccattctgccaatgattct

SEQ ID NO: 3372108 - DNA, 25 bp, Homo sapien
tgccaatgattcttccttagacata

SEQ ID NO: 3372109 - DNA, 25 bp, Homo sapien
agacataagcttcttgtgttgacag

SEQ ID NO: 3372110 - DNA, 25 bp, Homo sapien
gattcttccttagacataagcttct

SEQ ID NO: 3372111 - DNA, 25 bp, Homo sapien
tttccacaggactaccaagccctga

SEQ ID NO: 3372112 - DNA, 25 bp, Homo sapien
tcatgctccaatttgattttaccaa

SEQ ID NO: 3372113 - DNA, 25 bp, Homo sapien
attttccacaggactaccaagccct

SEQ ID NO: 3372114 - DNA, 25 bp, Homo sapien
gttcaggttcatgctccaatttgat

SEQ ID NO: 3372115 - DNA, 25 bp, Homo sapien
ggtaggaaatttatcctatgagcaa

SEQ ID NO: 3372116 - DNA, 25 bp, Homo sapien
cggccccaaggcttatattataatg

SEQ ID NO: 3372117 - DNA, 25 bp, Homo sapien
aaatttatcctatgagcaatttagg

SEQ ID NO: 3372118 - DNA, 25 bp, Homo sapien
gcccggccccaaggcttatattata

SEQ ID NO: 3372119 - DNA, 25 bp, Homo sapien
tcctcacacgtatcacaaaaaccag

SEQ ID NO: 3372120 - DNA, 25 bp, Homo sapien
tttctttgaagcacgtcccctcctc

SEQ ID NO: 3372121 - DNA, 25 bp, Homo sapien
tagcgctgtcctgtgtcatgagtgg

SEQ ID NO: 3372122 - DNA, 25 bp, Homo sapien
tattttctcttagcgctgtcctgtg

SEQ ID NO: 3372123 - DNA, 25 bp, Homo sapien
taaggaccacggtagacagagcaga

SEQ ID NO: 3372124 - DNA, 25 bp, Homo sapien
taaagttaattatgacctgcaggaa

SEQ ID NO: 3372125 - DNA, 25 bp, Homo sapien
catagctccagtatatcaaggttgg

SEQ ID NO: 3372126 - DNA, 25 bp, Homo sapien
tagccatttatctcaagcatctggg

SEQ ID NO: 3372127 - DNA, 25 bp, Homo sapien
ctaattctttaaggtctgctaaact

SEQ ID NO: 3372128 - DNA, 25 bp, Homo sapien
agatctaattctttaaggtctgcta

SEQ ID NO: 3372129 - DNA, 25 bp, Homo sapien
gatctaattctttaaggtctgctaa

SEQ ID NO: 3372130 - DNA, 25 bp, Homo sapien
tctaattctttaaggtctgctaaac

SEQ ID NO: 3372131 - DNA, 25 bp, Homo sapien
agttgtctctatgagcactgagttt

SEQ ID NO: 3372132 - DNA, 25 bp, Homo sapien
ggcacagttgtctctatgagcactg

SEQ ID NO: 3372133 - DNA, 25 bp, Homo sapien
cacagttgtctctatgagcactgag

SEQ ID NO: 3372134 - DNA, 25 bp, Homo sapien
gagcagagatagggcacagttgtct

SEQ ID NO: 3372135 - DNA, 25 bp, Homo sapien
gataccaggaattccctgatgaaaa

SEQ ID NO: 3372136 - DNA, 25 bp, Homo sapien
caatgagacctaatggctgatacca

SEQ ID NO: 3372137 - DNA, 25 bp, Homo sapien
tgatcatttgcctgaaagttctgga

SEQ ID NO: 3372138 - DNA, 25 bp, Homo sapien
agcatttgatcatttgcctgaaagt

SEQ ID NO: 3372139 - DNA, 25 bp, Homo sapien
caagttggcctttgaacatgctccc

SEQ ID NO: 3372140 - DNA, 25 bp, Homo sapien
tcaagttggcctttgaacatgctcc

SEQ ID NO: 3372141 - DNA, 25 bp, Homo sapien
agttggcctttgaacatgctcccac

SEQ ID NO: 3372142 - DNA, 25 bp, Homo sapien
aagttggcctttgaacatgctccca

SEQ ID NO: 3372143 - DNA, 25 bp, Homo sapien
taggtccaccagtttctgagaggct

SEQ ID NO: 3372144 - DNA, 25 bp, Homo sapien
gagaggctacaatataaacaactgc

SEQ ID NO: 3372145 - DNA, 25 bp, Homo sapien
gcctctacatagcagcagatatgac

SEQ ID NO: 3372146 - DNA, 25 bp, Homo sapien
gatatgactgattgccagatcctgt

SEQ ID NO: 3372147 - DNA, 25 bp, Homo sapien
tcaggtcagctggactgcattgatc

SEQ ID NO: 3372148 - DNA, 25 bp, Homo sapien
agactcagtggggacggcgtaagca

SEQ ID NO: 3372149 - DNA, 25 bp, Homo sapien
tttcctttccctcggagactcagtg

SEQ ID NO: 3372150 - DNA, 25 bp, Homo sapien
gctggactgcattgatctttggttt

SEQ ID NO: 3372151 - DNA, 25 bp, Homo sapien
aagtgaaatatgataatgttctgct

SEQ ID NO: 3372152 - DNA, 25 bp, Homo sapien
gcattgcttggccatattgaatatt

SEQ ID NO: 3372153 - DNA, 25 bp, Homo sapien
taaatgcattgcttggccatattga

SEQ ID NO: 3372154 - DNA, 25 bp, Homo sapien
ttgtgatttcaacacatttcaaatc

SEQ ID NO: 3372155 - DNA, 25 bp, Homo sapien
tctccaaagctctagattgagacga

SEQ ID NO: 3372156 - DNA, 25 bp, Homo sapien
caggagagcaagttatctccaaagc

SEQ ID NO: 3372157 - DNA, 25 bp, Homo sapien
gctcttccaggagagcaagttatct

SEQ ID NO: 3372158 - DNA, 25 bp, Homo sapien
ttcaggtacctgctctggctagaac

SEQ ID NO: 3372159 - DNA, 25 bp, Homo sapien
tccaactgcttcagatttgccccac

SEQ ID NO: 3372160 - DNA, 25 bp, Homo sapien
tcaatatctccaactgcttcagatt

SEQ ID NO: 3372161 - DNA, 25 bp, Homo sapien
ttttctccatttcaatatctccaac

SEQ ID NO: 3372162 - DNA, 25 bp, Homo sapien
tgcttcagatttgccccacccttcc

SEQ ID NO: 3372163 - DNA, 25 bp, Homo sapien
gggatgaaatctgcgtaaactgaca

SEQ ID NO: 3372164 - DNA, 25 bp, Homo sapien
tgacagtgggatgcataacaaacag

SEQ ID NO: 3372165 - DNA, 25 bp, Homo sapien
aacagcccgagccatcaaactgtat

SEQ ID NO: 3372166 - DNA, 25 bp, Homo sapien
acagagcagtgagagggatgaaatc

SEQ ID NO: 3372167 - DNA, 25 bp, Homo sapien
gagtccgctgcatttctaaggtcac

SEQ ID NO: 3372168 - DNA, 25 bp, Homo sapien
cgtgctatcaactttgaggaaggct

SEQ ID NO: 3372169 - DNA, 25 bp, Homo sapien
tgcatgtgcacgatggagtccgctg

SEQ ID NO: 3372170 - DNA, 25 bp, Homo sapien
taaggtcacagtaactggcaggtgg

SEQ ID NO: 3372171 - DNA, 25 bp, Homo sapien
caggcactgttgtactggcatggaa

SEQ ID NO: 3372172 - DNA, 25 bp, Homo sapien
catgcacttgtatgcggccctcaaa

SEQ ID NO: 3372173 - DNA, 25 bp, Homo sapien
attactttgcagagcgtcactggcg

SEQ ID NO: 3372174 - DNA, 25 bp, Homo sapien
ctctttgagaagcacgtggtacatc

SEQ ID NO: 3372175 - DNA, 25 bp, Homo sapien
taaggcagcaaggtgccccttgcct

SEQ ID NO: 3372176 - DNA, 25 bp, Homo sapien
cttttaggtttaaggcagcaaggtg

SEQ ID NO: 3372177 - DNA, 25 bp, Homo sapien
catttttagaaagtcagcaggaatc

SEQ ID NO: 3372178 - DNA, 25 bp, Homo sapien
taggtttaaggcagcaaggtgcccc

SEQ ID NO: 3372179 - DNA, 25 bp, Homo sapien
gctaatgggtaattctagctcactg

SEQ ID NO: 3372180 - DNA, 25 bp, Homo sapien
gtccatggtatgctttgatttcaaa

SEQ ID NO: 3372181 - DNA, 25 bp, Homo sapien
gcagatgaccctgatagtccatggt

SEQ ID NO: 3372182 - DNA, 25 bp, Homo sapien
tattgaaaacccttgacatttaaga

SEQ ID NO: 3372183 - DNA, 25 bp, Homo sapien
tagtatctgtttgagatctctgagc

SEQ ID NO: 3372184 - DNA, 25 bp, Homo sapien
gagctttccatatctagatgtctaa

SEQ ID NO: 3372185 - DNA, 25 bp, Homo sapien
tatatcaccctattctctcctgtgg

SEQ ID NO: 3372186 - DNA, 25 bp, Homo sapien
aaaattcactgctagtctgtgggac

SEQ ID NO: 3372187 - DNA, 25 bp, Homo sapien
tgtatgttagctttaccagtgggtt

SEQ ID NO: 3372188 - DNA, 25 bp, Homo sapien
tcctgtgtattcattatagtagata

SEQ ID NO: 3372189 - DNA, 25 bp, Homo sapien
tttgcttgtctgaggaatactttat

SEQ ID NO: 3372190 - DNA, 25 bp, Homo sapien
ccaggtatagaattccattaagcat

SEQ ID NO: 3372191 - DNA, 25 bp, Homo sapien
tgtgtgtgaccagcatttgctcttc

SEQ ID NO: 3372192 - DNA, 25 bp, Homo sapien
agtgtggaaactgcatacagaagcc

SEQ ID NO: 3372193 - DNA, 25 bp, Homo sapien
gagaaaggtggcaccaccagatgga

SEQ ID NO: 3372194 - DNA, 25 bp, Homo sapien
cacaggtgtcttttgggagccacga

SEQ ID NO: 3372195 - DNA, 25 bp, Homo sapien
taagaagttcctcatatcaagagcc

SEQ ID NO: 3372196 - DNA, 25 bp, Homo sapien
tgaagtccggtgaccaacatagatg

SEQ ID NO: 3372197 - DNA, 25 bp, Homo sapien
taatacatgtgcttatcctggctgc

SEQ ID NO: 3372198 - DNA, 25 bp, Homo sapien
cacaggtagggtaaatcactttggg

SEQ ID NO: 3372199 - DNA, 25 bp, Homo sapien
gggacattggaaatcgtcaggcccc

SEQ ID NO: 3372200 - DNA, 25 bp, Homo sapien
ccagcagtaacttgcttagtgtcac

SEQ ID NO: 3372201 - DNA, 25 bp, Homo sapien
gaagcccagcgggacattggaaatc

SEQ ID NO: 3372202 - DNA, 25 bp, Homo sapien
ccctatgcgtttatgccccagcagt

SEQ ID NO: 3372203 - DNA, 25 bp, Homo sapien
ttagccatcccgaggaggagcccac

SEQ ID NO: 3372204 - DNA, 25 bp, Homo sapien
aaattagccatcccgaggaggagcc

SEQ ID NO: 3372205 - DNA, 25 bp, Homo sapien
tcaaattagccatcccgaggaggag

SEQ ID NO: 3372206 - DNA, 25 bp, Homo sapien
attagccatcccgaggaggagccca

SEQ ID NO: 3372207 - DNA, 25 bp, Homo sapien
gaggcctatatttcaggacaagata

SEQ ID NO: 3372208 - DNA, 25 bp, Homo sapien
aagatagagataggtcgtttctcta

SEQ ID NO: 3372209 - DNA, 25 bp, Homo sapien
aatggcagaacacaggatgcctgtg

SEQ ID NO: 3372210 - DNA, 25 bp, Homo sapien
gactccatattgtttgctgaggcct

SEQ ID NO: 3372211 - DNA, 25 bp, Homo sapien
ttaaatagtgtcagcagcaattttg

SEQ ID NO: 3372212 - DNA, 25 bp, Homo sapien
tgtcagcagcaattttgcctttggg

SEQ ID NO: 3372213 - DNA, 25 bp, Homo sapien
gggaaataattctttgaagctgtag

SEQ ID NO: 3372214 - DNA, 25 bp, Homo sapien
ctgtagtttgcttctaacagcattt

SEQ ID NO: 3372215 - DNA, 25 bp, Homo sapien
gattcttcataacctacggattggg

SEQ ID NO: 3372216 - DNA, 25 bp, Homo sapien
taaactgtcctcttatagtggagca

SEQ ID NO: 3372217 - DNA, 25 bp, Homo sapien
tgttgtttcccctgaatcttctggc

SEQ ID NO: 3372218 - DNA, 25 bp, Homo sapien
gcaaatcctttgagtacctgtgatg

SEQ ID NO: 3372219 - DNA, 25 bp, Homo sapien
tcagatgtgacttcattgaggagat

SEQ ID NO: 3372220 - DNA, 25 bp, Homo sapien
acggtacctcggcaactgagatcag

SEQ ID NO: 3372221 - DNA, 25 bp, Homo sapien
atgaacagcagtatccccacggtac

SEQ ID NO: 3372222 - DNA, 25 bp, Homo sapien
tgaagtcttctttatgaacagcagt

SEQ ID NO: 3372223 - DNA, 25 bp, Homo sapien
tattcatgctcaaacacttgaaatc

SEQ ID NO: 3372224 - DNA, 25 bp, Homo sapien
tgcactgtgctaggagttctgtcct

SEQ ID NO: 3372225 - DNA, 25 bp, Homo sapien
ggcctcagtcatgtcttaaacagaa

SEQ ID NO: 3372226 - DNA, 25 bp, Homo sapien
aattgccataactcttcattccatg

SEQ ID NO: 3372227 - DNA, 25 bp, Homo sapien
catcactcaaaaggcttagcagcat

SEQ ID NO: 3372228 - DNA, 25 bp, Homo sapien
tgaataattgtgaacggtgacgttc

SEQ ID NO: 3372229 - DNA, 25 bp, Homo sapien
tagataaatggtcactggacatggg

SEQ ID NO: 3372230 - DNA, 25 bp, Homo sapien
ttgtggatagcgagtggtctagata

SEQ ID NO: 3372231 - DNA, 25 bp, Homo sapien
ggaactattaagtcctccataaagc

SEQ ID NO: 3372232 - DNA, 25 bp, Homo sapien
gtcactggacatgggaggaactatt

SEQ ID NO: 3372233 - DNA, 25 bp, Homo sapien
ccaatactaatccactggcaaccag

SEQ ID NO: 3372234 - DNA, 25 bp, Homo sapien
tcctggagactctagctcggctggg

SEQ ID NO: 3372235 - DNA, 25 bp, Homo sapien
tgtcggcaggctttgaagtgtttcc

SEQ ID NO: 3372236 - DNA, 25 bp, Homo sapien
cagaagcaatctgcgtgtcggcagg

SEQ ID NO: 3372237 - DNA, 25 bp, Homo sapien
ggcaggccatggaaactcagtcagg

SEQ ID NO: 3372238 - DNA, 25 bp, Homo sapien
tgaatagaaagtgcaaaacccgtga

SEQ ID NO: 3372239 - DNA, 25 bp, Homo sapien
ccaaaggaaatcactgcagcgcagg

SEQ ID NO: 3372240 - DNA, 25 bp, Homo sapien
gaaattggcacacagtcatagatgg

SEQ ID NO: 3372241 - DNA, 25 bp, Homo sapien
ccctgggggcagttgctttatagag

SEQ ID NO: 3372242 - DNA, 25 bp, Homo sapien
ctgttaaaaggatttcagtcaaaag

SEQ ID NO: 3372243 - DNA, 25 bp, Homo sapien
gctttatagagacattgttagctgt

SEQ ID NO: 3372244 - DNA, 25 bp, Homo sapien
tccctggaaatcatgcctcttgggc

SEQ ID NO: 3372245 - DNA, 25 bp, Homo sapien
tttgtgtgttccaggtcaccagggc

SEQ ID NO: 3372246 - DNA, 25 bp, Homo sapien
tttcccacaggaagtcggagaggct

SEQ ID NO: 3372247 - DNA, 25 bp, Homo sapien
cccttttgtgtgttccaggtcacca

SEQ ID NO: 3372248 - DNA, 25 bp, Homo sapien
atgacccttttgtgtgttccaggtc

SEQ ID NO: 3372249 - DNA, 25 bp, Homo sapien
ggccgcgcgcggattggctgctccg

SEQ ID NO: 3372250 - DNA, 25 bp, Homo sapien
caaaggcggtcagctgatgggccgc

SEQ ID NO: 3372251 - DNA, 25 bp, Homo sapien
gcggtcagctgatgggccgcgcgcg

SEQ ID NO: 3372252 - DNA, 25 bp, Homo sapien
tgtaagcaaaggcggtcagctgatg

SEQ ID NO: 3372253 - DNA, 25 bp, Homo sapien
gggcctcgcctcgttcaccggctcg

SEQ ID NO: 3372254 - DNA, 25 bp, Homo sapien
cgcggtgcgccccgctttgtgctcc

SEQ ID NO: 3372255 - DNA, 25 bp, Homo sapien
gcctcgcctcgttcaccggctcgtt

SEQ ID NO: 3372256 - DNA, 25 bp, Homo sapien
tcgcctcgttcaccggctcgttgcc

SEQ ID NO: 3372257 - DNA, 25 bp, Homo sapien
aggaggactagctgagcggcgcctc

SEQ ID NO: 3372258 - DNA, 25 bp, Homo sapien
agcgagcggccaggtccggaggaag

SEQ ID NO: 3372259 - DNA, 25 bp, Homo sapien
ccgggagagcaccaagaccggagac

SEQ ID NO: 3372260 - DNA, 25 bp, Homo sapien
ggcggcgacacaggcaaccgctgct

SEQ ID NO: 3372261 - DNA, 25 bp, Homo sapien
ggctgccactccttctgggctcaag

SEQ ID NO: 3372262 - DNA, 25 bp, Homo sapien
cacctggcaaacgtcctgaggctgc

SEQ ID NO: 3372263 - DNA, 25 bp, Homo sapien
ggccacctggcaaacgtcctgaggc

SEQ ID NO: 3372264 - DNA, 25 bp, Homo sapien
ccacctggcaaacgtcctgaggctg

SEQ ID NO: 3372265 - DNA, 25 bp, Homo sapien
tcctggatccggcatccgggccgaa

SEQ ID NO: 3372266 - DNA, 25 bp, Homo sapien
ggccagtcgttcactcacggccagg

SEQ ID NO: 3372267 - DNA, 25 bp, Homo sapien
tggacacggcaagcgaggtcccctt

SEQ ID NO: 3372268 - DNA, 25 bp, Homo sapien
acaaaggacactcgccggcaaactt

SEQ ID NO: 3372269 - DNA, 25 bp, Homo sapien
tgcctgtgagcttcaagtgcttcag

SEQ ID NO: 3372270 - DNA, 25 bp, Homo sapien
gcgggatgggatttagactcttagc

SEQ ID NO: 3372271 - DNA, 25 bp, Homo sapien
gcctgtgagcttcaagtgcttcaga

SEQ ID NO: 3372272 - DNA, 25 bp, Homo sapien
gatttagactcttagcctttgcctg

SEQ ID NO: 3372273 - DNA, 25 bp, Homo sapien
tcctggacaccactgtaggatggct

SEQ ID NO: 3372274 - DNA, 25 bp, Homo sapien
ttccctggattgaaatggtggctcc

SEQ ID NO: 3372275 - DNA, 25 bp, Homo sapien
tataatagatgtgagctaggacagc

SEQ ID NO: 3372276 - DNA, 25 bp, Homo sapien
tggtggctccggaatacaatggcag

SEQ ID NO: 3372277 - DNA, 25 bp, Homo sapien
tgatagagccatgaagcaccgggat

SEQ ID NO: 3372278 - DNA, 25 bp, Homo sapien
tggatcctttaacgcacaactctga

SEQ ID NO: 3372279 - DNA, 25 bp, Homo sapien
tcgcactggtgatattgaaatcatc

SEQ ID NO: 3372280 - DNA, 25 bp, Homo sapien
gcagaaatcaaattattcgcactgg

SEQ ID NO: 3372281 - DNA, 25 bp, Homo sapien
taggactccacggtctaggaagctg

SEQ ID NO: 3372282 - DNA, 25 bp, Homo sapien
tgagtcaccgtcagcttgttacctg

SEQ ID NO: 3372283 - DNA, 25 bp, Homo sapien
gcatcgtaggtccttgctttcttcg

SEQ ID NO: 3372284 - DNA, 25 bp, Homo sapien
caagagctagcatgctgagtcaccg

SEQ ID NO: 3372285 - DNA, 25 bp, Homo sapien
tctcttcggtataggatgcagtctc

SEQ ID NO: 3372286 - DNA, 25 bp, Homo sapien
tattctattctaagccacactggtc

SEQ ID NO: 3372287 - DNA, 25 bp, Homo sapien
tcttcctggtgtgcccgacttggca

SEQ ID NO: 3372288 - DNA, 25 bp, Homo sapien
ggcatatgccagtccacacatgtaa

SEQ ID NO: 3372289 - DNA, 25 bp, Homo sapien
catctataatggtgagctaaaggga

SEQ ID NO: 3372290 - DNA, 25 bp, Homo sapien
acttaatgctttctagggccaggta

SEQ ID NO: 3372291 - DNA, 25 bp, Homo sapien
cagtagtcatgtagaaggctggaga

SEQ ID NO: 3372292 - DNA, 25 bp, Homo sapien
tctaacacagtaagaagcagtagtc

SEQ ID NO: 3372293 - DNA, 25 bp, Homo sapien
caggtccgtggcatgaattatttca

SEQ ID NO: 3372294 - DNA, 25 bp, Homo sapien
tattgtgatatgtaggacagcgagc

SEQ ID NO: 3372295 - DNA, 25 bp, Homo sapien
tagaattccagagtccaaagggatg

SEQ ID NO: 3372296 - DNA, 25 bp, Homo sapien
taactgtgtctctcaattccaggca

SEQ ID NO: 3372297 - DNA, 25 bp, Homo sapien
ggcttgctgagcaagctcaactcct

SEQ ID NO: 3372298 - DNA, 25 bp, Homo sapien
ttgctgagcaagctcaactcctgac

SEQ ID NO: 3372299 - DNA, 25 bp, Homo sapien
gctggcttgctgagcaagctcaact

SEQ ID NO: 3372300 - DNA, 25 bp, Homo sapien
gcttgctgagcaagctcaactcctg

SEQ ID NO: 3372301 - DNA, 25 bp, Homo sapien
gctataacaaagctcatcctagcca

SEQ ID NO: 3372302 - DNA, 25 bp, Homo sapien
tgctataacaaagctcatcctagcc

SEQ ID NO: 3372303 - DNA, 25 bp, Homo sapien
ctgctataacaaagctcatcctagc

SEQ ID NO: 3372304 - DNA, 25 bp, Homo sapien
ctataacaaagctcatcctagccat

SEQ ID NO: 3372305 - DNA, 25 bp, Homo sapien
tattcatggacatcgactgggaccc

SEQ ID NO: 3372306 - DNA, 25 bp, Homo sapien
cagtctaggaaaaccgtcgtgccga

SEQ ID NO: 3372307 - DNA, 25 bp, Homo sapien
tgaagtcattagtaggcccagcacc

SEQ ID NO: 3372308 - DNA, 25 bp, Homo sapien
gttatccagggcatagcggtcgaca

SEQ ID NO: 3372309 - DNA, 25 bp, Homo sapien
tggcagccgtgtcaaacccttgcga

SEQ ID NO: 3372310 - DNA, 25 bp, Homo sapien
aacgtctttgtgctccttactacca

SEQ ID NO: 3372311 - DNA, 25 bp, Homo sapien
tattgagcactgtagttagaacagc

SEQ ID NO: 3372312 - DNA, 25 bp, Homo sapien
gactggaagcctagagtcgctggca

SEQ ID NO: 3372313 - DNA, 25 bp, Homo sapien
ttcaacgaaggtaacaagtctagcc

SEQ ID NO: 3372314 - DNA, 25 bp, Homo sapien
ggtcatgctactggtaaaagcacag

SEQ ID NO: 3372315 - DNA, 25 bp, Homo sapien
caatgctgcttcaaaaccgtatgtt

SEQ ID NO: 3372316 - DNA, 25 bp, Homo sapien
caaagtactttctacggatggcttc

SEQ ID NO: 3372317 - DNA, 25 bp, Homo sapien
tacagtttgtgacactccacagacg

SEQ ID NO: 3372318 - DNA, 25 bp, Homo sapien
gactaacacgggtctaagcatatag

SEQ ID NO: 3372319 - DNA, 25 bp, Homo sapien
tgcatgggatacaacaatacacctt

SEQ ID NO: 3372320 - DNA, 25 bp, Homo sapien
tgcccattaggtgctagtcagtact

SEQ ID NO: 3372321 - DNA, 25 bp, Homo sapien
ggttattcagaactgcaaaagaggg

SEQ ID NO: 3372322 - DNA, 25 bp, Homo sapien
gagtgcagagcgctgaactggcagg

SEQ ID NO: 3372323 - DNA, 25 bp, Homo sapien
gggcactagaggttattcagaactg

SEQ ID NO: 3372324 - DNA, 25 bp, Homo sapien
tccgaactgggtaagctgcaagccc

SEQ ID NO: 3372325 - DNA, 25 bp, Homo sapien
gaacaggaaagttgtaacatggtcc

SEQ ID NO: 3372326 - DNA, 25 bp, Homo sapien
tcaagggaaacacctcaagtttgca

SEQ ID NO: 3372327 - DNA, 25 bp, Homo sapien
tactctgcagacgtttgaagacaag

SEQ ID NO: 3372328 - DNA, 25 bp, Homo sapien
caagtttgcattcaacgcagctcca

SEQ ID NO: 3372329 - DNA, 25 bp, Homo sapien
acctcgcagatttgcaattgcaggc

SEQ ID NO: 3372330 - DNA, 25 bp, Homo sapien
tatgggccgaatgaaacctcgcaga

SEQ ID NO: 3372331 - DNA, 25 bp, Homo sapien
ttattgcacccgtatttaagtgctc

SEQ ID NO: 3372332 - DNA, 25 bp, Homo sapien
gagggtctaatgcatcagtgccatc

SEQ ID NO: 3372333 - DNA, 25 bp, Homo sapien
caagtaaagggttgactatggcgtc

SEQ ID NO: 3372334 - DNA, 25 bp, Homo sapien
cagctcattagcacagacagggaaa

SEQ ID NO: 3372335 - DNA, 25 bp, Homo sapien
gatacactatataccctgaaggcag

SEQ ID NO: 3372336 - DNA, 25 bp, Homo sapien
caaaattattctagacctccggatg

SEQ ID NO: 3372337 - DNA, 25 bp, Homo sapien
tttaaatgagttgcaaacacgaacc

SEQ ID NO: 3372338 - DNA, 25 bp, Homo sapien
aaccatcttatgatggtgggagccc

SEQ ID NO: 3372339 - DNA, 25 bp, Homo sapien
gtttcatcagtagcacaggagatac

SEQ ID NO: 3372340 - DNA, 25 bp, Homo sapien
caggagatacttaaaccagtctgcc

SEQ ID NO: 3372341 - DNA, 25 bp, Homo sapien
ctaacttaatctgggcttcgaaggc

SEQ ID NO: 3372342 - DNA, 25 bp, Homo sapien
cagtccttgggtcagaagttgggca

SEQ ID NO: 3372343 - DNA, 25 bp, Homo sapien
gaataaggcaaatatcttccggtgg

SEQ ID NO: 3372344 - DNA, 25 bp, Homo sapien
gttgctaagaaggagagaacagcct

SEQ ID NO: 3372345 - DNA, 25 bp, Homo sapien
caaaatgattgcatgggaagtggaa

SEQ ID NO: 3372346 - DNA, 25 bp, Homo sapien
aaggaccatcctgtgactactgtac

SEQ ID NO: 3372347 - DNA, 25 bp, Homo sapien
ggattgctgcctgtggttttgctca

SEQ ID NO: 3372348 - DNA, 25 bp, Homo sapien
ccctcacaagatggctgggaaaaag

SEQ ID NO: 3372349 - DNA, 25 bp, Homo sapien
tgtacttaagtattcctctgcctca

SEQ ID NO: 3372350 - DNA, 25 bp, Homo sapien
gtacttaagtattcctctgcctcag

SEQ ID NO: 3372351 - DNA, 25 bp, Homo sapien
cctgtacttaagtattcctctgcct

SEQ ID NO: 3372352 - DNA, 25 bp, Homo sapien
tcctgtacttaagtattcctctgcc

SEQ ID NO: 3372353 - DNA, 25 bp, Homo sapien
tagaataaaggagtagcccgcctat

SEQ ID NO: 3372354 - DNA, 25 bp, Homo sapien
gaaggcaaaatgtagaagaaggcac

SEQ ID NO: 3372355 - DNA, 25 bp, Homo sapien
tcccttgggtttgcagtgtagatgt

SEQ ID NO: 3372356 - DNA, 25 bp, Homo sapien
cactgggcatctgacttagtgatca

SEQ ID NO: 3372357 - DNA, 25 bp, Homo sapien
tgtgaagggcctaatatagtatccc

SEQ ID NO: 3372358 - DNA, 25 bp, Homo sapien
tgggcatttgcagcagcatggtgca

SEQ ID NO: 3372359 - DNA, 25 bp, Homo sapien
gaaataaggctgatgactgtggaca

SEQ ID NO: 3372360 - DNA, 25 bp, Homo sapien
catgagcattaacgaaggtgtgtac

SEQ ID NO: 3372361 - DNA, 25 bp, Homo sapien
aagtagaaggaagcataggatgcct

SEQ ID NO: 3372362 - DNA, 25 bp, Homo sapien
taagatgccatgcaactggaaggat

SEQ ID NO: 3372363 - DNA, 25 bp, Homo sapien
gacaaggtcattggaagacaggaag

SEQ ID NO: 3372364 - DNA, 25 bp, Homo sapien
taagtcaggacctaagatctccagg

SEQ ID NO: 3372365 - DNA, 25 bp, Homo sapien
gaccaattgctagggaaatatcctg

SEQ ID NO: 3372366 - DNA, 25 bp, Homo sapien
taattatgcatgaaagagagggacc

SEQ ID NO: 3372367 - DNA, 25 bp, Homo sapien
gaaggcagggcatatggacacaaat

SEQ ID NO: 3372368 - DNA, 25 bp, Homo sapien
cacacttgaatgctgacgaggataa

SEQ ID NO: 3372369 - DNA, 25 bp, Homo sapien
gcgatcccttctgccttagcacttt

SEQ ID NO: 3372370 - DNA, 25 bp, Homo sapien
ttttagtctctaccatccacttgac

SEQ ID NO: 3372371 - DNA, 25 bp, Homo sapien
ttcccaacaagagtaaggcctttca

SEQ ID NO: 3372372 - DNA, 25 bp, Homo sapien
tcccaattgtgtcctccttaatcac

SEQ ID NO: 3372373 - DNA, 25 bp, Homo sapien
ataaatagggttacatgacttgggc

SEQ ID NO: 3372374 - DNA, 25 bp, Homo sapien
tcataaatagggttacatgacttgg

SEQ ID NO: 3372375 - DNA, 25 bp, Homo sapien
catgacttgggcattagagtctgta

SEQ ID NO: 3372376 - DNA, 25 bp, Homo sapien
taaatagggttacatgacttgggca

SEQ ID NO: 3372377 - DNA, 25 bp, Homo sapien
aatttctgtgttgcagctttcccct

SEQ ID NO: 3372378 - DNA, 25 bp, Homo sapien
ttaaaatttctgtgttgcagctttc

SEQ ID NO: 3372379 - DNA, 25 bp, Homo sapien
aaatttctgtgttgcagctttcccc

SEQ ID NO: 3372380 - DNA, 25 bp, Homo sapien
aaaatttctgtgttgcagctttccc

SEQ ID NO: 3372381 - DNA, 25 bp, Homo sapien
gtaacgaccattgacactgtgaaga

SEQ ID NO: 3372382 - DNA, 25 bp, Homo sapien
ttgtttctgtgtctgattctggtcc

SEQ ID NO: 3372383 - DNA, 25 bp, Homo sapien
ctgtgtctgattctggtcctgagag

SEQ ID NO: 3372384 - DNA, 25 bp, Homo sapien
gtgtctgattctggtcctgagaggc

SEQ ID NO: 3372385 - DNA, 25 bp, Homo sapien
gattctggtcctgagaggcacccat

SEQ ID NO: 3372386 - DNA, 25 bp, Homo sapien
aatgtcacaggaacccaataacttt

SEQ ID NO: 3372387 - DNA, 25 bp, Homo sapien
gaacccaataactttcgtctctctg

SEQ ID NO: 3372388 - DNA, 25 bp, Homo sapien
tcacaggaacccaataactttcgtc

SEQ ID NO: 3372389 - DNA, 25 bp, Homo sapien
aataactttcgtctctctgctctgt

SEQ ID NO: 3372390 - DNA, 25 bp, Homo sapien
caatgaggcccagtaagtggcggat

SEQ ID NO: 3372391 - DNA, 25 bp, Homo sapien
ccagtaagtggcggatggaaggtct

SEQ ID NO: 3372392 - DNA, 25 bp, Homo sapien
gtaagtggcggatggaaggtctggg

SEQ ID NO: 3372393 - DNA, 25 bp, Homo sapien
acaatgaggcccagtaagtggcgga

SEQ ID NO: 3372394 - DNA, 25 bp, Homo sapien
ttacagctcttttgtggcctctgtt

SEQ ID NO: 3372395 - DNA, 25 bp, Homo sapien
tcactctgctcttacagctcttttg

SEQ ID NO: 3372396 - DNA, 25 bp, Homo sapien
ctctgctcttacagctcttttgtgg

SEQ ID NO: 3372397 - DNA, 25 bp, Homo sapien
tacagctcttttgtggcctctgttc

SEQ ID NO: 3372398 - DNA, 25 bp, Homo sapien
taactgctgatattgccctaaggcc

SEQ ID NO: 3372399 - DNA, 25 bp, Homo sapien
tcactgatcttgagcagcctgactg

SEQ ID NO: 3372400 - DNA, 25 bp, Homo sapien
gaactgtactacacgggtgctgata

SEQ ID NO: 3372401 - DNA, 25 bp, Homo sapien
tgtgtcacattgagaggcgctccct

SEQ ID NO: 3372402 - DNA, 25 bp, Homo sapien
aaaataacatagcatttcctagaaa

SEQ ID NO: 3372403 - DNA, 25 bp, Homo sapien
ttgaaaataacatagcatttcctag

SEQ ID NO: 3372404 - DNA, 25 bp, Homo sapien
ttcctagaaaagtgctgtcttctgg

SEQ ID NO: 3372405 - DNA, 25 bp, Homo sapien
agaaaagtgctgtcttctggatgca

SEQ ID NO: 3372406 - DNA, 25 bp, Homo sapien
tacaaagatagacagtttctgacaa

SEQ ID NO: 3372407 - DNA, 25 bp, Homo sapien
gccacttgttacaaagatagacagt

SEQ ID NO: 3372408 - DNA, 25 bp, Homo sapien
ctgacaataacttgtacagatttgg

SEQ ID NO: 3372409 - DNA, 25 bp, Homo sapien
gatctccaaactggaacactaacag

SEQ ID NO: 3372410 - DNA, 25 bp, Homo sapien
tttgatacaggttgtccttcatgtg

SEQ ID NO: 3372411 - DNA, 25 bp, Homo sapien
ttttgatacaggttgtccttcatgt

SEQ ID NO: 3372412 - DNA, 25 bp, Homo sapien
taacagattttacaaggatatcaag

SEQ ID NO: 3372413 - DNA, 25 bp, Homo sapien
acagattttacaaggatatcaagat

SEQ ID NO: 3372414 - DNA, 25 bp, Homo sapien
tagtaacagattttacaaggatatc

SEQ ID NO: 3372415 - DNA, 25 bp, Homo sapien
atagtaacagattttacaaggatat

SEQ ID NO: 3372416 - DNA, 25 bp, Homo sapien
ggcagccaagttcccttgacatcca

SEQ ID NO: 3372417 - DNA, 25 bp, Homo sapien
cagacacagcacttgtctgtttcca

SEQ ID NO: 3372418 - DNA, 25 bp, Homo sapien
gccaagttcccttgacatccagggc

SEQ ID NO: 3372419 - DNA, 25 bp, Homo sapien
cttctatgccccatggatggagttc

SEQ ID NO: 3372420 - DNA, 25 bp, Homo sapien
tcttttggaaaagtcggcgtctgca

SEQ ID NO: 3372421 - DNA, 25 bp, Homo sapien
tatcttttggaaaagtcggcgtctg

SEQ ID NO: 3372422 - DNA, 25 bp, Homo sapien
cttttggaaaagtcggcgtctgcag

SEQ ID NO: 3372423 - DNA, 25 bp, Homo sapien
acttgaggcttggaatctttcatcc

SEQ ID NO: 3372424 - DNA, 25 bp, Homo sapien
catccacagggcctagaatagtgcc

SEQ ID NO: 3372425 - DNA, 25 bp, Homo sapien
gccagcatgtagagtatagcccttt

SEQ ID NO: 3372426 - DNA, 25 bp, Homo sapien
ggtcctcaaggctgcaaaaaattgg

SEQ ID NO: 3372427 - DNA, 25 bp, Homo sapien
tgattgaataacaggatccatggcc

SEQ ID NO: 3372428 - DNA, 25 bp, Homo sapien
catcgtaatccttgcctcacgggtt

SEQ ID NO: 3372429 - DNA, 25 bp, Homo sapien
tcagctcatcgtaatccttgcctca

SEQ ID NO: 3372430 - DNA, 25 bp, Homo sapien
gctcatcgtaatccttgcctcacgg

SEQ ID NO: 3372431 - DNA, 25 bp, Homo sapien
gatctcagctcatcgtaatccttgc

SEQ ID NO: 3372432 - DNA, 25 bp, Homo sapien
caacagcaatatgagctggctctag

SEQ ID NO: 3372433 - DNA, 25 bp, Homo sapien
ggatacaacagcaatatgagctggc

SEQ ID NO: 3372434 - DNA, 25 bp, Homo sapien
tacaacagcaatatgagctggctct

SEQ ID NO: 3372435 - DNA, 25 bp, Homo sapien
gcaatatgagctggctctagctcca

SEQ ID NO: 3372436 - DNA, 25 bp, Homo sapien
gctaacctgcaatgcattcctaggt

SEQ ID NO: 3372437 - DNA, 25 bp, Homo sapien
tgtaaaaaaggctaacctgcaatgc

SEQ ID NO: 3372438 - DNA, 25 bp, Homo sapien
aaaaggctaacctgcaatgcattcc

SEQ ID NO: 3372439 - DNA, 25 bp, Homo sapien
taaaaaaggctaacctgcaatgcat

SEQ ID NO: 3372440 - DNA, 25 bp, Homo sapien
tggacctttatagcttaagaatggt

SEQ ID NO: 3372441 - DNA, 25 bp, Homo sapien
aaatctggacctttatagcttaaga

SEQ ID NO: 3372442 - DNA, 25 bp, Homo sapien
tctggacctttatagcttaagaatg

SEQ ID NO: 3372443 - DNA, 25 bp, Homo sapien
aatctggacctttatagcttaagaa

SEQ ID NO: 3372444 - DNA, 25 bp, Homo sapien
gtgtatttctctttccgccagtctt

SEQ ID NO: 3372445 - DNA, 25 bp, Homo sapien
tggcactgaaggttaaactgtagaa

SEQ ID NO: 3372446 - DNA, 25 bp, Homo sapien
aaactgtagaaatgtgtgaattgtc

SEQ ID NO: 3372447 - DNA, 25 bp, Homo sapien
tgaattgtctgctcccttctgaggt

SEQ ID NO: 3372448 - DNA, 25 bp, Homo sapien
tccctcctataagatgagattccaa

SEQ ID NO: 3372449 - DNA, 25 bp, Homo sapien
ttctggtgcatataagctccctcct

SEQ ID NO: 3372450 - DNA, 25 bp, Homo sapien
tctggtaaacaggattgctcattat

SEQ ID NO: 3372451 - DNA, 25 bp, Homo sapien
caggattgctcattatcttttctgg

SEQ ID NO: 3372452 - DNA, 25 bp, Homo sapien
gattttctgacgtctttactcacag

SEQ ID NO: 3372453 - DNA, 25 bp, Homo sapien
cttacaccgtaatctgctgatctca

SEQ ID NO: 3372454 - DNA, 25 bp, Homo sapien
tttattatggccatcagtgcctttg

SEQ ID NO: 3372455 - DNA, 25 bp, Homo sapien
cataggcctggacatgcttttgtgc

SEQ ID NO: 3372456 - DNA, 25 bp, Homo sapien
ctgtgctgccggttttcataaccag

SEQ ID NO: 3372457 - DNA, 25 bp, Homo sapien
ggaaaaagctgtgctgccggttttc

SEQ ID NO: 3372458 - DNA, 25 bp, Homo sapien
agggagggaaaaagctgtgctgccg

SEQ ID NO: 3372459 - DNA, 25 bp, Homo sapien
tgtgctgccggttttcataaccagc

SEQ ID NO: 3372460 - DNA, 25 bp, Homo sapien
tttcatgtggtctggaagaacagca

SEQ ID NO: 3372461 - DNA, 25 bp, Homo sapien
ggtctggaagaacagcacccgggat

SEQ ID NO: 3372462 - DNA, 25 bp, Homo sapien
tgtggtctggaagaacagcacccgg

SEQ ID NO: 3372463 - DNA, 25 bp, Homo sapien
ctttcatgtggtctggaagaacagc

SEQ ID NO: 3372464 - DNA, 25 bp, Homo sapien
ttgggcccattgtttgaatgacagt

SEQ ID NO: 3372465 - DNA, 25 bp, Homo sapien
gaagggtctcagaaatcctgaactg

SEQ ID NO: 3372466 - DNA, 25 bp, Homo sapien
acttcatgactaatgtggtttggaa

SEQ ID NO: 3372467 - DNA, 25 bp, Homo sapien
gaatgtcagctcttgggtgcttttg

SEQ ID NO: 3372468 - DNA, 25 bp, Homo sapien
cgtgaactagcgaagtcatccagcc

SEQ ID NO: 3372469 - DNA, 25 bp, Homo sapien
gaagaaaacgcactccactacagta

SEQ ID NO: 3372470 - DNA, 25 bp, Homo sapien
gaaataagactatacgtggagccct

SEQ ID NO: 3372471 - DNA, 25 bp, Homo sapien
tcaacaacacgcagtgagaagacgt

SEQ ID NO: 3372472 - DNA, 25 bp, Homo sapien
cattggtttccaacaaagcctccca

SEQ ID NO: 3372473 - DNA, 25 bp, Homo sapien
attggtttccaacaaagcctcccag

SEQ ID NO: 3372474 - DNA, 25 bp, Homo sapien
ccttgcattgagtagtagtgggaca

SEQ ID NO: 3372475 - DNA, 25 bp, Homo sapien
tagatgctcatctgactgtagacct

SEQ ID NO: 3372476 - DNA, 25 bp, Homo sapien
tcctatgagcatagaagggacagtt

SEQ ID NO: 3372477 - DNA, 25 bp, Homo sapien
cacagagctgcacttttagatgtcc

SEQ ID NO: 3372478 - DNA, 25 bp, Homo sapien
ttccaaatgacacagcttgaagaaa

SEQ ID NO: 3372479 - DNA, 25 bp, Homo sapien
caaatgacacagcttgaagaaatta

SEQ ID NO: 3372480 - DNA, 25 bp, Homo sapien
attttccttccaaatgacacagctt

SEQ ID NO: 3372481 - DNA, 25 bp, Homo sapien
tccttccaaatgacacagcttgaag

SEQ ID NO: 3372482 - DNA, 25 bp, Homo sapien
gtgaaattgctcatcagggactgtg

SEQ ID NO: 3372483 - DNA, 25 bp, Homo sapien
gtgaggcgactcacgcagaactgct

SEQ ID NO: 3372484 - DNA, 25 bp, Homo sapien
ggtgaaattgctcatcagggactgt

SEQ ID NO: 3372485 - DNA, 25 bp, Homo sapien
catcagggactgtgaggcgactcac

SEQ ID NO: 3372486 - DNA, 25 bp, Homo sapien
ctattgtctaagctctggtccccaa

SEQ ID NO: 3372487 - DNA, 25 bp, Homo sapien
ctctattgtctaagctctggtcccc

SEQ ID NO: 3372488 - DNA, 25 bp, Homo sapien
catccacccttcttagaaggcgtca

SEQ ID NO: 3372489 - DNA, 25 bp, Homo sapien
ttatattctcccctcagcaaaacca

SEQ ID NO: 3372490 - DNA, 25 bp, Homo sapien
gactatctcacaagcatattgagaa

SEQ ID NO: 3372491 - DNA, 25 bp, Homo sapien
tgagttggtgatgctcagctttctg

SEQ ID NO: 3372492 - DNA, 25 bp, Homo sapien
tggaagttctcaggcatgatgaccg

SEQ ID NO: 3372493 - DNA, 25 bp, Homo sapien
gatgttgtatcacctgccttgacta

SEQ ID NO: 3372494 - DNA, 25 bp, Homo sapien
gagccattaatcattgccacacaaa

SEQ ID NO: 3372495 - DNA, 25 bp, Homo sapien
ttaatcattgccacacaaagggcat

SEQ ID NO: 3372496 - DNA, 25 bp, Homo sapien
ccattaatcattgccacacaaaggg

SEQ ID NO: 3372497 - DNA, 25 bp, Homo sapien
gccattaatcattgccacacaaagg

SEQ ID NO: 3372498 - DNA, 25 bp, Homo sapien
ccagagacactagcttctgctgctt

SEQ ID NO: 3372499 - DNA, 25 bp, Homo sapien
tagagtttagtgacaccagagacac

SEQ ID NO: 3372500 - DNA, 25 bp, Homo sapien
tgcttgtccgtgaagctcctccatg

SEQ ID NO: 3372501 - DNA, 25 bp, Homo sapien
caaccttgggctattgatctcagta

SEQ ID NO: 3372502 - DNA, 25 bp, Homo sapien
ctacacacagcactggtacatccag

SEQ ID NO: 3372503 - DNA, 25 bp, Homo sapien
ggagacacccgtatttattgaccat

SEQ ID NO: 3372504 - DNA, 25 bp, Homo sapien
cagcactggtacatccaggttggat

SEQ ID NO: 3372505 - DNA, 25 bp, Homo sapien
ggatttgagggtaccagcgattgaa

SEQ ID NO: 3372506 - DNA, 25 bp, Homo sapien
aagtgcacttggtgtcaggagatga

SEQ ID NO: 3372507 - DNA, 25 bp, Homo sapien
ctaacccttggaagtgcacttggtg

SEQ ID NO: 3372508 - DNA, 25 bp, Homo sapien
tgatgacaggccctccgggtagaga

SEQ ID NO: 3372509 - DNA, 25 bp, Homo sapien
gagatgatgatgacaggccctccgg

SEQ ID NO: 3372510 - DNA, 25 bp, Homo sapien
acaaagtacagttggatattattca

SEQ ID NO: 3372511 - DNA, 25 bp, Homo sapien
ggggactgacgtgatgaaccctggc

SEQ ID NO: 3372512 - DNA, 25 bp, Homo sapien
gaattttgaatcttgactgagtgat

SEQ ID NO: 3372513 - DNA, 25 bp, Homo sapien
cttgactgagtgatttaaggacaca

SEQ ID NO: 3372514 - DNA, 25 bp, Homo sapien
cccacagaaggtgtagcagtgatct

SEQ ID NO: 3372515 - DNA, 25 bp, Homo sapien
cataatgccatctgcggatctcaga

SEQ ID NO: 3372516 - DNA, 25 bp, Homo sapien
cagtgatctgtaaagcgtctgctgc

SEQ ID NO: 3372517 - DNA, 25 bp, Homo sapien
gatctcagaataaatgctgaccaag

SEQ ID NO: 3372518 - DNA, 25 bp, Homo sapien
gggctctttgagtcagctgatcctc

SEQ ID NO: 3372519 - DNA, 25 bp, Homo sapien
gtcagggctctttgagtcagctgat

SEQ ID NO: 3372520 - DNA, 25 bp, Homo sapien
gctctttgagtcagctgatcctctc

SEQ ID NO: 3372521 - DNA, 25 bp, Homo sapien
cagggctctttgagtcagctgatcc

SEQ ID NO: 3372522 - DNA, 25 bp, Homo sapien
catgtgcctcatgggccaagtggct

SEQ ID NO: 3372523 - DNA, 25 bp, Homo sapien
cacatgaactgccacggccactggt

SEQ ID NO: 3372524 - DNA, 25 bp, Homo sapien
caaggccactcagtgagaagtgaag

SEQ ID NO: 3372525 - DNA, 25 bp, Homo sapien
gggacgaaagatcatgcagatgcac

SEQ ID NO: 3372526 - DNA, 25 bp, Homo sapien
ctttttgccattgtagggtcttgcc

SEQ ID NO: 3372527 - DNA, 25 bp, Homo sapien
ccttataatagaagaagatgctatc

SEQ ID NO: 3372528 - DNA, 25 bp, Homo sapien
cttgatattgatggtccctgactga

SEQ ID NO: 3372529 - DNA, 25 bp, Homo sapien
ttttcaaagctagagagaagcctag

SEQ ID NO: 3372530 - DNA, 25 bp, Homo sapien
gattgtaatcatgatctcggcaggc

SEQ ID NO: 3372531 - DNA, 25 bp, Homo sapien
atgatctcggcaggcatatcacagc

SEQ ID NO: 3372532 - DNA, 25 bp, Homo sapien
taatcatgatctcggcaggcatatc

SEQ ID NO: 3372533 - DNA, 25 bp, Homo sapien
ctgtgattgtaatcatgatctcggc

SEQ ID NO: 3372534 - DNA, 25 bp, Homo sapien
caagcaggcttgagatctgatgtcc

SEQ ID NO: 3372535 - DNA, 25 bp, Homo sapien
tgggagaaatctgtacgtggcactg

SEQ ID NO: 3372536 - DNA, 25 bp, Homo sapien
gatgctggtcttctactgaacaccg

SEQ ID NO: 3372537 - DNA, 25 bp, Homo sapien
gcagaagtgaacatggatagatttt

SEQ ID NO: 3372538 - DNA, 25 bp, Homo sapien
tagacatattttggcttatagcagc

SEQ ID NO: 3372539 - DNA, 25 bp, Homo sapien
agctctttgcttgggttgaggccgg

SEQ ID NO: 3372540 - DNA, 25 bp, Homo sapien
gggcagttacactaccctttagctc

SEQ ID NO: 3372541 - DNA, 25 bp, Homo sapien
agaatatcagagatgtggtcagttt

SEQ ID NO: 3372542 - DNA, 25 bp, Homo sapien
gaatcatgctcgtggatttagaacg

SEQ ID NO: 3372543 - DNA, 25 bp, Homo sapien
gatttagaacgagacaatttcatga

SEQ ID NO: 3372544 - DNA, 25 bp, Homo sapien
tttcatgaagcagaaatcatttgga

SEQ ID NO: 3372545 - DNA, 25 bp, Homo sapien
tgttttggaatcatgctcgtggatt

SEQ ID NO: 3372546 - DNA, 25 bp, Homo sapien
gatgctgactcagcgtaactgggtt

SEQ ID NO: 3372547 - DNA, 25 bp, Homo sapien
cccagaggactgtgcacggctatat

SEQ ID NO: 3372548 - DNA, 25 bp, Homo sapien
acggctatatctaactgcctgggaa

SEQ ID NO: 3372549 - DNA, 25 bp, Homo sapien
aactctactcccaatttcagatgat

SEQ ID NO: 3372550 - DNA, 25 bp, Homo sapien
cagtctgagctcctaaaatggcata

SEQ ID NO: 3372551 - DNA, 25 bp, Homo sapien
ttccattcaggtccacagtctgagc

SEQ ID NO: 3372552 - DNA, 25 bp, Homo sapien
tcaagggagaggcaccaaatgcagg

SEQ ID NO: 3372553 - DNA, 25 bp, Homo sapien
gcaggtcatcaattccattcaggtc

SEQ ID NO: 3372554 - DNA, 25 bp, Homo sapien
ctccagtctgagtttctcaggcttc

SEQ ID NO: 3372555 - DNA, 25 bp, Homo sapien
aggcttcctttctgtcactatcttc

SEQ ID NO: 3372556 - DNA, 25 bp, Homo sapien
ggcttcctttctgtcactatcttcc

SEQ ID NO: 3372557 - DNA, 25 bp, Homo sapien
cagtctgagtttctcaggcttcctt

SEQ ID NO: 3372558 - DNA, 25 bp, Homo sapien
tagtatttgaagatgtagatttggg

SEQ ID NO: 3372559 - DNA, 25 bp, Homo sapien
aaactgtattttgaggagcgggtag

SEQ ID NO: 3372560 - DNA, 25 bp, Homo sapien
gagaagagataagtttgatttagaa

SEQ ID NO: 3372561 - DNA, 25 bp, Homo sapien
tttgatttagaaggttctatgaggg

SEQ ID NO: 3372562 - DNA, 25 bp, Homo sapien
tgtcatgtactgcatcagccatatg

SEQ ID NO: 3372563 - DNA, 25 bp, Homo sapien
aagccccttcttgtcatgtactgca

SEQ ID NO: 3372564 - DNA, 25 bp, Homo sapien
ggtaagggtattgtgtagaccaaca

SEQ ID NO: 3372565 - DNA, 25 bp, Homo sapien
tcagccatatgttcttgggtaaggg

SEQ ID NO: 3372566 - DNA, 25 bp, Homo sapien
ctttgctctggcacttaatccagcc

SEQ ID NO: 3372567 - DNA, 25 bp, Homo sapien
tttgctctggcacttaatccagcca

SEQ ID NO: 3372568 - DNA, 25 bp, Homo sapien
ttgctctggcacttaatccagccat

SEQ ID NO: 3372569 - DNA, 25 bp, Homo sapien
acccgcctcacgcaacgcccactac

SEQ ID NO: 3372570 - DNA, 25 bp, Homo sapien
cacgcaacgcccactaccctgacag

SEQ ID NO: 3372571 - DNA, 25 bp, Homo sapien
cgcctcacgcaacgcccactaccct

SEQ ID NO: 3372572 - DNA, 25 bp, Homo sapien
ttacccgcctcacgcaacgcccact

SEQ ID NO: 3372573 - DNA, 25 bp, Homo sapien
acaaggccgtgtcgtctttgccgct

SEQ ID NO: 3372574 - DNA, 25 bp, Homo sapien
cccacaaggccgtgtcgtctttgcc

SEQ ID NO: 3372575 - DNA, 25 bp, Homo sapien
cacaaggccgtgtcgtctttgccgc

SEQ ID NO: 3372576 - DNA, 25 bp, Homo sapien
ccacaaggccgtgtcgtctttgccg

SEQ ID NO: 3372577 - DNA, 25 bp, Homo sapien
tcaggcttctccttaaactccgcca

SEQ ID NO: 3372578 - DNA, 25 bp, Homo sapien
gacatccagctgctcagtcggggcc

SEQ ID NO: 3372579 - DNA, 25 bp, Homo sapien
agtcggggcctcaggcttctcctta

SEQ ID NO: 3372580 - DNA, 25 bp, Homo sapien
gcgacatccagctgctcagtcgggg

SEQ ID NO: 3372581 - DNA, 25 bp, Homo sapien
aggccggggcatgcacacctattcc

SEQ ID NO: 3372582 - DNA, 25 bp, Homo sapien
tgatgccgtgggtcaacagaaaaag

SEQ ID NO: 3372583 - DNA, 25 bp, Homo sapien
ctattcccgcgcaccaacgggtgcg

SEQ ID NO: 3372584 - DNA, 25 bp, Homo sapien
gcaccaacgggtgcgctgtaagaga

SEQ ID NO: 3372585 - DNA, 25 bp, Homo sapien
acaaggcctccggttctgcgcttca

SEQ ID NO: 3372586 - DNA, 25 bp, Homo sapien
gaggtaaatgactccccccgtgatg

SEQ ID NO: 3372587 - DNA, 25 bp, Homo sapien
tctcacaaggcctccggttctgcgc

SEQ ID NO: 3372588 - DNA, 25 bp, Homo sapien
gcctccggttctgcgcttcagggaa

SEQ ID NO: 3372589 - DNA, 25 bp, Homo sapien
cactgtacgctggaagactctaagg

SEQ ID NO: 3372590 - DNA, 25 bp, Homo sapien
caaagcactccggaagagaggtact

SEQ ID NO: 3372591 - DNA, 25 bp, Homo sapien
gctgtttttatgcacgacaccggct

SEQ ID NO: 3372592 - DNA, 25 bp, Homo sapien
gacaccggctgcgatccattaatag

SEQ ID NO: 3372593 - DNA, 25 bp, Homo sapien
gctgctattgaatctcttatcttat

SEQ ID NO: 3372594 - DNA, 25 bp, Homo sapien
atttgattgacgtctcctctctccc

SEQ ID NO: 3372595 - DNA, 25 bp, Homo sapien
gccttctgaaccaaacccatgtaca

SEQ ID NO: 3372596 - DNA, 25 bp, Homo sapien
ggcagatagggttcattgttgataa

SEQ ID NO: 3372597 - DNA, 25 bp, Homo sapien
gatacttgttaacgagaagtttgac

SEQ ID NO: 3372598 - DNA, 25 bp, Homo sapien
ttcgattgccagattgcagctcttg

SEQ ID NO: 3372599 - DNA, 25 bp, Homo sapien
tgctcaagaagcatttttcgattgc

SEQ ID NO: 3372600 - DNA, 25 bp, Homo sapien
tgcagctcttgatacttgttaacga

SEQ ID NO: 3372601 - DNA, 25 bp, Homo sapien
gatatgacctaagccagacttctgc

SEQ ID NO: 3372602 - DNA, 25 bp, Homo sapien
tactgggtccagacatgcctatagt

SEQ ID NO: 3372603 - DNA, 25 bp, Homo sapien
ggcctactgagtgtgtagcctacca

SEQ ID NO: 3372604 - DNA, 25 bp, Homo sapien
tcctgactgatacaccctgggtaga

SEQ ID NO: 3372605 - DNA, 25 bp, Homo sapien
gatgctctatcagtcaaactcaacg

SEQ ID NO: 3372606 - DNA, 25 bp, Homo sapien
ccttcagggacttatagacagtagc

SEQ ID NO: 3372607 - DNA, 25 bp, Homo sapien
agacagtagctaattccgaatgaac

SEQ ID NO: 3372608 - DNA, 25 bp, Homo sapien
catgccacgcggttaaacttcgagt

SEQ ID NO: 3372609 - DNA, 25 bp, Homo sapien
gcaaggaaccagttgcacggccttt

SEQ ID NO: 3372610 - DNA, 25 bp, Homo sapien
gaaccagttgcacggcctttcattg

SEQ ID NO: 3372611 - DNA, 25 bp, Homo sapien
aaggaaccagttgcacggcctttca

SEQ ID NO: 3372612 - DNA, 25 bp, Homo sapien
ctgcaaggaaccagttgcacggcct

SEQ ID NO: 3372613 - DNA, 25 bp, Homo sapien
caacagcacagtcgggtaagagcag

SEQ ID NO: 3372614 - DNA, 25 bp, Homo sapien
tccaggaagcagtttcatgggctgt

SEQ ID NO: 3372615 - DNA, 25 bp, Homo sapien
tcccacaacagcacagtcgggtaag

SEQ ID NO: 3372616 - DNA, 25 bp, Homo sapien
caggaagcagtttcatgggctgttt

SEQ ID NO: 3372617 - DNA, 25 bp, Homo sapien
ttgttcagaagtggcattgactttt

SEQ ID NO: 3372618 - DNA, 25 bp, Homo sapien
attgttcagaagtggcattgacttt

SEQ ID NO: 3372619 - DNA, 25 bp, Homo sapien
cattgttcagaagtggcattgactt

SEQ ID NO: 3372620 - DNA, 25 bp, Homo sapien
tgttcagaagtggcattgacttttt

SEQ ID NO: 3372621 - DNA, 25 bp, Homo sapien
gaacaaacaggtctagtgagcttag

SEQ ID NO: 3372622 - DNA, 25 bp, Homo sapien
gactggatatttggctctgcctgag

SEQ ID NO: 3372623 - DNA, 25 bp, Homo sapien
gattagatacatagcttgccctgcc

SEQ ID NO: 3372624 - DNA, 25 bp, Homo sapien
cacacagtatgtggtagaagtagac

SEQ ID NO: 3372625 - DNA, 25 bp, Homo sapien
ccctcttatctttggatgtcagaaa

SEQ ID NO: 3372626 - DNA, 25 bp, Homo sapien
gatgacaagtcaattgcacacagaa

SEQ ID NO: 3372627 - DNA, 25 bp, Homo sapien
gctgctacagctacaagtgggaacc

SEQ ID NO: 3372628 - DNA, 25 bp, Homo sapien
tgggttacctcagatactggttggg

SEQ ID NO: 3372629 - DNA, 25 bp, Homo sapien
cacggcatgtcatatatttcctata

SEQ ID NO: 3372630 - DNA, 25 bp, Homo sapien
aaaaatatacacactgtaagtcagc

SEQ ID NO: 3372631 - DNA, 25 bp, Homo sapien
tcagcacggcatgtcatatatttcc

SEQ ID NO: 3372632 - DNA, 25 bp, Homo sapien
cactgtaagtcagcacggcatgtca

SEQ ID NO: 3372633 - DNA, 25 bp, Homo sapien
gaaagcagtacatgatttggcacca

SEQ ID NO: 3372634 - DNA, 25 bp, Homo sapien
gctccaggtccaactacatgatcag

SEQ ID NO: 3372635 - DNA, 25 bp, Homo sapien
tgacacaaatgcatccgggaaaggt

SEQ ID NO: 3372636 - DNA, 25 bp, Homo sapien
gagtgggatcaatgtctgctccagg

SEQ ID NO: 3372637 - DNA, 25 bp, Homo sapien
ttccacaactgatgttcgacttttc

SEQ ID NO: 3372638 - DNA, 25 bp, Homo sapien
tcgacttttctacggggcagtacag

SEQ ID NO: 3372639 - DNA, 25 bp, Homo sapien
aactgatgttcgacttttctacggg

SEQ ID NO: 3372640 - DNA, 25 bp, Homo sapien
ctcaagggtcaatcgcttgcaggag

SEQ ID NO: 3372641 - DNA, 25 bp, Homo sapien
ctaggcagaggtaaagctagccaac

SEQ ID NO: 3372642 - DNA, 25 bp, Homo sapien
tgtcttccactatagggaggggcaa

SEQ ID NO: 3372643 - DNA, 25 bp, Homo sapien
aaagctagccaaccactgtcttcca

SEQ ID NO: 3372644 - DNA, 25 bp, Homo sapien
gaggggcaagctgcttatcactgaa

SEQ ID NO: 3372645 - DNA, 25 bp, Homo sapien
tatgcagccacaagggtttcttgga

SEQ ID NO: 3372646 - DNA, 25 bp, Homo sapien
gatgttctacagtaccagacaccta

SEQ ID NO: 3372647 - DNA, 25 bp, Homo sapien
caagcagggtttaggtatgcagcca

SEQ ID NO: 3372648 - DNA, 25 bp, Homo sapien
gaaagtacaaaggtgtcagatcacg

SEQ ID NO: 3372649 - DNA, 25 bp, Homo sapien
tataatgttgaaagtgcagggcctc

SEQ ID NO: 3372650 - DNA, 25 bp, Homo sapien
tttggagtgagggatacaagctgcc

SEQ ID NO: 3372651 - DNA, 25 bp, Homo sapien
tccatattgcgtctgaagcagctca

SEQ ID NO: 3372652 - DNA, 25 bp, Homo sapien
tagtaccatttgttcacagggaacc

SEQ ID NO: 3372653 - DNA, 25 bp, Homo sapien
gaatctggtttctaggattaagtgc

SEQ ID NO: 3372654 - DNA, 25 bp, Homo sapien
ccatattcagtcagttgtctctggc

SEQ ID NO: 3372655 - DNA, 25 bp, Homo sapien
tctctgctgttcaatatagaaaggc

SEQ ID NO: 3372656 - DNA, 25 bp, Homo sapien
ccttgtctctgaatggaagattgtc

SEQ ID NO: 3372657 - DNA, 25 bp, Homo sapien
aagacttggaataaagactctttga

SEQ ID NO: 3372658 - DNA, 25 bp, Homo sapien
gacttggaataaagactctttgact

SEQ ID NO: 3372659 - DNA, 25 bp, Homo sapien
ggaataaagactctttgactcttac

SEQ ID NO: 3372660 - DNA, 25 bp, Homo sapien
cttggaataaagactctttgactct

SEQ ID NO: 3372661 - DNA, 25 bp, Homo sapien
gcaacatgcggtcgggcattgtcgt

SEQ ID NO: 3372662 - DNA, 25 bp, Homo sapien
ttgaagtgtgggttgtgcaacatgc

SEQ ID NO: 3372663 - DNA, 25 bp, Homo sapien
gttgtgcaacatgcggtcgggcatt

SEQ ID NO: 3372664 - DNA, 25 bp, Homo sapien
tgggttgtgcaacatgcggtcgggc

SEQ ID NO: 3372665 - DNA, 25 bp, Homo sapien
ggcattgctctaacccctttgcatg

SEQ ID NO: 3372666 - DNA, 25 bp, Homo sapien
tagaagggagaactttgggtcacat

SEQ ID NO: 3372667 - DNA, 25 bp, Homo sapien
tgggtcacatcctacagacagttct

SEQ ID NO: 3372668 - DNA, 25 bp, Homo sapien
catgtgttaactcaatcttcccaac

SEQ ID NO: 3372669 - DNA, 25 bp, Homo sapien
ttccccctttaagtctgccatttga

SEQ ID NO: 3372670 - DNA, 25 bp, Homo sapien
tgtgtatgtatgtaaccttaggcac

SEQ ID NO: 3372671 - DNA, 25 bp, Homo sapien
tcttgctcagctctaacccttctgg

SEQ ID NO: 3372672 - DNA, 25 bp, Homo sapien
ggcactctaaaatgcagggctcagg

SEQ ID NO: 3372673 - DNA, 25 bp, Homo sapien
caggcaagggacttaaactcaccag

SEQ ID NO: 3372674 - DNA, 25 bp, Homo sapien
ccccagttgtagttggtcagggatt

SEQ ID NO: 3372675 - DNA, 25 bp, Homo sapien
tcaccacatcgaaataagatgccag

SEQ ID NO: 3372676 - DNA, 25 bp, Homo sapien
gaagtgaaactgttccaactgtccc

SEQ ID NO: 3372677 - DNA, 25 bp, Homo sapien
acttctctcacttaacagtatgcat

SEQ ID NO: 3372678 - DNA, 25 bp, Homo sapien
tctctcacttaacagtatgcattta

SEQ ID NO: 3372679 - DNA, 25 bp, Homo sapien
cttctctcacttaacagtatgcatt

SEQ ID NO: 3372680 - DNA, 25 bp, Homo sapien
atgcatttaaggttcatacaggact

SEQ ID NO: 3372681 - DNA, 25 bp, Homo sapien
tgcattcctgtgattccctgacttc

SEQ ID NO: 3372682 - DNA, 25 bp, Homo sapien
gacttaattatcaaacctccagagg

SEQ ID NO: 3372683 - DNA, 25 bp, Homo sapien
tatcaactaggaactgcttacttgc

SEQ ID NO: 3372684 - DNA, 25 bp, Homo sapien
cctccagagggaatgtttaagcttc

SEQ ID NO: 3372685 - DNA, 25 bp, Homo sapien
tctaggctgtctgagctgacaaaga

SEQ ID NO: 3372686 - DNA, 25 bp, Homo sapien
taaattcccaatccaacagtgagaa

SEQ ID NO: 3372687 - DNA, 25 bp, Homo sapien
tctgggtgctaaatgtgctccttgc

SEQ ID NO: 3372688 - DNA, 25 bp, Homo sapien
gttgtcaccacaccaaaacaggcta

SEQ ID NO: 3372689 - DNA, 25 bp, Homo sapien
ggaatatgggaaatgccagcaatat

SEQ ID NO: 3372690 - DNA, 25 bp, Homo sapien
tcataagagatggaatatgggaaat

SEQ ID NO: 3372691 - DNA, 25 bp, Homo sapien
gatggaatatgggaaatgccagcaa

SEQ ID NO: 3372692 - DNA, 25 bp, Homo sapien
taagagatggaatatgggaaatgcc

SEQ ID NO: 3372693 - DNA, 25 bp, Homo sapien
gaaggtcaaatgtgaaaccagccat

SEQ ID NO: 3372694 - DNA, 25 bp, Homo sapien
tgaagtccaggagtaaaggaaggtc

SEQ ID NO: 3372695 - DNA, 25 bp, Homo sapien
ggagtaaaggaaggtcaaatgtgaa

SEQ ID NO: 3372696 - DNA, 25 bp, Homo sapien
aaaggaaggtcaaatgtgaaaccag

SEQ ID NO: 3372697 - DNA, 25 bp, Homo sapien
tgctcccttgacataaacctgttgt

SEQ ID NO: 3372698 - DNA, 25 bp, Homo sapien
ggtgctgcttctgtgttaggctcta

SEQ ID NO: 3372699 - DNA, 25 bp, Homo sapien
tctcgagtaatagtaagccagttgg

SEQ ID NO: 3372700 - DNA, 25 bp, Homo sapien
gagggtcactagtgagtctaccttg

SEQ ID NO: 3372701 - DNA, 25 bp, Homo sapien
gccgttgaacacataggaatgtctg

SEQ ID NO: 3372702 - DNA, 25 bp, Homo sapien
gaacgtgaaatgtgcgctaaacggg

SEQ ID NO: 3372703 - DNA, 25 bp, Homo sapien
gttgttatgatgaatcccacatggg

SEQ ID NO: 3372704 - DNA, 25 bp, Homo sapien
gagctatattcagggtatccggtat

SEQ ID NO: 3372705 - DNA, 25 bp, Homo sapien
tcacccccctgactttgattgggtg

SEQ ID NO: 3372706 - DNA, 25 bp, Homo sapien
aggaagcactgtcagggcatcaccc

SEQ ID NO: 3372707 - DNA, 25 bp, Homo sapien
caggaagcactgtcagggcatcacc

SEQ ID NO: 3372708 - DNA, 25 bp, Homo sapien
gattgggtgccccacctttggctcc

SEQ ID NO: 3372709 - DNA, 25 bp, Homo sapien
agaggtaacaatgattctgatgttc

SEQ ID NO: 3372710 - DNA, 25 bp, Homo sapien
ttaagaggtaacaatgattctgatg

SEQ ID NO: 3372711 - DNA, 25 bp, Homo sapien
tgttccctgcccctcgaatattgga

SEQ ID NO: 3372712 - DNA, 25 bp, Homo sapien
aatattggactctgtatcgtcggcc

SEQ ID NO: 3372713 - DNA, 25 bp, Homo sapien
gccacagacaccatgcaggttgtat

SEQ ID NO: 3372714 - DNA, 25 bp, Homo sapien
tgagctactgttgtcaaactgtccc

SEQ ID NO: 3372715 - DNA, 25 bp, Homo sapien
cgttctgggtttggtgaggatactt

SEQ ID NO: 3372716 - DNA, 25 bp, Homo sapien
ttggagtgggcaaaattccttccag

SEQ ID NO: 3372717 - DNA, 25 bp, Homo sapien
tgagcggtttgtgagcggacattta

SEQ ID NO: 3372718 - DNA, 25 bp, Homo sapien
tgggtaaagcattatattcagactc

SEQ ID NO: 3372719 - DNA, 25 bp, Homo sapien
gttaaatgacattccatgggcagga

SEQ ID NO: 3372720 - DNA, 25 bp, Homo sapien
cggacatttatcatccctgttggct

SEQ ID NO: 3372721 - DNA, 25 bp, Homo sapien
tctttctattgttcgacaaattttc

SEQ ID NO: 3372722 - DNA, 25 bp, Homo sapien
tcctctttctattgttcgacaaatt

SEQ ID NO: 3372723 - DNA, 25 bp, Homo sapien
gtttcctctttctattgttcgacaa

SEQ ID NO: 3372724 - DNA, 25 bp, Homo sapien
gagtttcctctttctattgttcgac

SEQ ID NO: 3372725 - DNA, 25 bp, Homo sapien
ggcccagtttacgtctattcatttc

SEQ ID NO: 3372726 - DNA, 25 bp, Homo sapien
agaggaaagagcatggcatagttcc

SEQ ID NO: 3372727 - DNA, 25 bp, Homo sapien
tttccaaattagtttgctcctggcc

SEQ ID NO: 3372728 - DNA, 25 bp, Homo sapien
gctcctggcccagtttacgtctatt

SEQ ID NO: 3372729 - DNA, 25 bp, Homo sapien
gaaattctgtgagtgatgtcccggt

SEQ ID NO: 3372730 - DNA, 25 bp, Homo sapien
ggagaacacagacgccatggagaag

SEQ ID NO: 3372731 - DNA, 25 bp, Homo sapien
tggatgagcaacaagcaaattgtcg

SEQ ID NO: 3372732 - DNA, 25 bp, Homo sapien
cagaagtaaccatgaagcaacggag

SEQ ID NO: 3372733 - DNA, 25 bp, Homo sapien
tactgcactttaaagcggctccggg

SEQ ID NO: 3372734 - DNA, 25 bp, Homo sapien
cgttaggatggaagcggaacaccca

SEQ ID NO: 3372735 - DNA, 25 bp, Homo sapien
catgtccgcgaagagggagctcgtt

SEQ ID NO: 3372736 - DNA, 25 bp, Homo sapien
caatgtagtccaagtagcgggtcgt

SEQ ID NO: 3372737 - DNA, 25 bp, Homo sapien
ggagccacgccggtttgggggagca

SEQ ID NO: 3372738 - DNA, 25 bp, Homo sapien
gagccacgccggtttgggggagcag

SEQ ID NO: 3372739 - DNA, 25 bp, Homo sapien
cgaagcccgcatcctcattggacat

SEQ ID NO: 3372740 - DNA, 25 bp, Homo sapien
aaggccaagtatccgaagcccgcat

SEQ ID NO: 3372741 - DNA, 25 bp, Homo sapien
atccgaagcccgcatcctcattgga

SEQ ID NO: 3372742 - DNA, 25 bp, Homo sapien
tttcccggcgagaaggccaagtatc

SEQ ID NO: 3372743 - DNA, 25 bp, Homo sapien
gcaaatcctgctcctctgtagtcag

SEQ ID NO: 3372744 - DNA, 25 bp, Homo sapien
tgcaaatcctgctcctctgtagtca

SEQ ID NO: 3372745 - DNA, 25 bp, Homo sapien
aagcccagcgaggggtgcaaatcct

SEQ ID NO: 3372746 - DNA, 25 bp, Homo sapien
cccagcgaggggtgcaaatcctgct

SEQ ID NO: 3372747 - DNA, 25 bp, Homo sapien
tcactgttacgtgaagaggattccc

SEQ ID NO: 3372748 - DNA, 25 bp, Homo sapien
ggctccagtcactgttacgtgaaga

SEQ ID NO: 3372749 - DNA, 25 bp, Homo sapien
tttcctggtcttctcgtccactctg

SEQ ID NO: 3372750 - DNA, 25 bp, Homo sapien
tgctggctccagtcactgttacgtg

SEQ ID NO: 3372751 - DNA, 25 bp, Homo sapien
tttgttgagcctgacaccaccctct

SEQ ID NO: 3372752 - DNA, 25 bp, Homo sapien
gccctctattgaaattgctccctga

SEQ ID NO: 3372753 - DNA, 25 bp, Homo sapien
gcaaagaaaggtagatcactgcctc

SEQ ID NO: 3372754 - DNA, 25 bp, Homo sapien
gatcactgcctctgggagacactct

SEQ ID NO: 3372755 - DNA, 25 bp, Homo sapien
cctccggcctcgccttagtgaagtg

SEQ ID NO: 3372756 - DNA, 25 bp, Homo sapien
ccggcctcgccttagtgaagtggag

SEQ ID NO: 3372757 - DNA, 25 bp, Homo sapien
cctcgccttagtgaagtggaggaag

SEQ ID NO: 3372758 - DNA, 25 bp, Homo sapien
gcctcgccttagtgaagtggaggaa

SEQ ID NO: 3372759 - DNA, 25 bp, Homo sapien
agaaagcttgctggtctggctagaa

SEQ ID NO: 3372760 - DNA, 25 bp, Homo sapien
aggactgggcagaaagcttgctggt

SEQ ID NO: 3372761 - DNA, 25 bp, Homo sapien
tgggcagaaagcttgctggtctggc

SEQ ID NO: 3372762 - DNA, 25 bp, Homo sapien
gaaagcttgctggtctggctagaaa

SEQ ID NO: 3372763 - DNA, 25 bp, Homo sapien
cccaaggtgctaataaatccatttg

SEQ ID NO: 3372764 - DNA, 25 bp, Homo sapien
ctccgcgtacagagaacaaatgtct

SEQ ID NO: 3372765 - DNA, 25 bp, Homo sapien
tctccaatatgtaggaagctagaca

SEQ ID NO: 3372766 - DNA, 25 bp, Homo sapien
aaatccatttgtcgatccctccgcg

SEQ ID NO: 3372767 - DNA, 25 bp, Homo sapien
ggcatccagataggggctgtgcaca

SEQ ID NO: 3372768 - DNA, 25 bp, Homo sapien
caggggaaacatgggaatagagtgg

SEQ ID NO: 3372769 - DNA, 25 bp, Homo sapien
tttaaccaggcatccagataggggc

SEQ ID NO: 3372770 - DNA, 25 bp, Homo sapien
gctgtgcacagtcaaggaggaggga

SEQ ID NO: 3372771 - DNA, 25 bp, Homo sapien
ccttcagcttcatgacacaagactt

SEQ ID NO: 3372772 - DNA, 25 bp, Homo sapien
cttcagcttcatgacacaagacttc

SEQ ID NO: 3372773 - DNA, 25 bp, Homo sapien
tacaacacaacgatcatcaaccagg

SEQ ID NO: 3372774 - DNA, 25 bp, Homo sapien
ggtttctggctgtacaacacaacga

SEQ ID NO: 3372775 - DNA, 25 bp, Homo sapien
gtccccggtttctggctgtacaaca

SEQ ID NO: 3372776 - DNA, 25 bp, Homo sapien
ctctgaatttcttaggtggattgtt

SEQ ID NO: 3372777 - DNA, 25 bp, Homo sapien
tactccaggaaagccaccaccttac

SEQ ID NO: 3372778 - DNA, 25 bp, Homo sapien
ctactccaggaaagccaccacctta

SEQ ID NO: 3372779 - DNA, 25 bp, Homo sapien
ctggtctagaattcccagactcgtc

SEQ ID NO: 3372780 - DNA, 25 bp, Homo sapien
cagactcgtctagaattcccaggct

SEQ ID NO: 3372781 - DNA, 25 bp, Homo sapien
tagaattcccagactcgtctagaat

SEQ ID NO: 3372782 - DNA, 25 bp, Homo sapien
tcccagactcgtctagaattcccag

SEQ ID NO: 3372783 - DNA, 25 bp, Homo sapien
ccagggtgactcaggtatgcaaaaa

SEQ ID NO: 3372784 - DNA, 25 bp, Homo sapien
ccagagccttcagacatgcatctca

SEQ ID NO: 3372785 - DNA, 25 bp, Homo sapien
gtaaacacaaattcccttatgctca

SEQ ID NO: 3372786 - DNA, 25 bp, Homo sapien
ggtacccagagccttcagacatgca

SEQ ID NO: 3372787 - DNA, 25 bp, Homo sapien
acttgaacccatgactgactccaga

SEQ ID NO: 3372788 - DNA, 25 bp, Homo sapien
cttgcctgtggtcatataactagta

SEQ ID NO: 3372789 - DNA, 25 bp, Homo sapien
tataactagtaagagcagggcaggg

SEQ ID NO: 3372790 - DNA, 25 bp, Homo sapien
aaccaccacgctgtagtgtctcccc

SEQ ID NO: 3372791 - DNA, 25 bp, Homo sapien
gacctttgaggctgtgtttctaaga

SEQ ID NO: 3372792 - DNA, 25 bp, Homo sapien
ggactaaaagctcatctgggattca

SEQ ID NO: 3372793 - DNA, 25 bp, Homo sapien
gtcaagaagcttgcacaatccaatg

SEQ ID NO: 3372794 - DNA, 25 bp, Homo sapien
ttgagatgccactacagaaacatgc

SEQ ID NO: 3372795 - DNA, 25 bp, Homo sapien
caaagatggtcagagagagtagttc

SEQ ID NO: 3372796 - DNA, 25 bp, Homo sapien
tataagacgtcaaacaccattagaa

SEQ ID NO: 3372797 - DNA, 25 bp, Homo sapien
tgtacagtttatgagagacagctct

SEQ ID NO: 3372798 - DNA, 25 bp, Homo sapien
agccttcgatgaaacttaaaggagg

SEQ ID NO: 3372799 - DNA, 25 bp, Homo sapien
cagagaagcccgcaatgaagtggaa

SEQ ID NO: 3372800 - DNA, 25 bp, Homo sapien
caaacacggatcagtctttctccaa

SEQ ID NO: 3372801 - DNA, 25 bp, Homo sapien
caagacccctggaaggtatgtcctt

SEQ ID NO: 3372802 - DNA, 25 bp, Homo sapien
cctttctaaagcgagaactctgaga

SEQ ID NO: 3372803 - DNA, 25 bp, Homo sapien
ctgtactgtcgacaaaagctggtat

SEQ ID NO: 3372804 - DNA, 25 bp, Homo sapien
tactgtcgacaaaagctggtattct

SEQ ID NO: 3372805 - DNA, 25 bp, Homo sapien
ggtattcttcaatcaccaagacact

SEQ ID NO: 3372806 - DNA, 25 bp, Homo sapien
caaaagctggtattcttcaatcacc

SEQ ID NO: 3372807 - DNA, 25 bp, Homo sapien
cacaaaggacactactgcttgcgga

SEQ ID NO: 3372808 - DNA, 25 bp, Homo sapien
cagaggaacaccagctagagtgaac

SEQ ID NO: 3372809 - DNA, 25 bp, Homo sapien
aaaaaggtcagagttggcccagcgc

SEQ ID NO: 3372810 - DNA, 25 bp, Homo sapien
catgcatttgctactgactggtcag

SEQ ID NO: 3372811 - DNA, 25 bp, Homo sapien
cttgaacgaactgaagtgaccaatg

SEQ ID NO: 3372812 - DNA, 25 bp, Homo sapien
gaccaatgaaaagggtcactggcac

SEQ ID NO: 3372813 - DNA, 25 bp, Homo sapien
ggcacaactccaataaacaggacaa

SEQ ID NO: 3372814 - DNA, 25 bp, Homo sapien
gaaaagggtcactggcacaactcca

SEQ ID NO: 3372815 - DNA, 25 bp, Homo sapien
agcgctctggcagcggactggtcaa

SEQ ID NO: 3372816 - DNA, 25 bp, Homo sapien
ggtcaatgcccatttgctgtcacct

SEQ ID NO: 3372817 - DNA, 25 bp, Homo sapien
gttggacggtcaccaagcgctctgg

SEQ ID NO: 3372818 - DNA, 25 bp, Homo sapien
gtcacctgtgcctacagtgtttctg

SEQ ID NO: 3372819 - DNA, 25 bp, Homo sapien
gtaccaataaaccacttaagcctca

SEQ ID NO: 3372820 - DNA, 25 bp, Homo sapien
caaatgtcttagtcaatcaaagact

SEQ ID NO: 3372821 - DNA, 25 bp, Homo sapien
cttcaaatgtcttagtcaatcaaag

SEQ ID NO: 3372822 - DNA, 25 bp, Homo sapien
ttcaaaatctggtaccaataaacca

SEQ ID NO: 3372823 - DNA, 25 bp, Homo sapien
cttttcccaaatgcctctccagaga

SEQ ID NO: 3372824 - DNA, 25 bp, Homo sapien
gcctctccagagaagacatattcat

SEQ ID NO: 3372825 - DNA, 25 bp, Homo sapien
caggagctccttttcccaaatgcct

SEQ ID NO: 3372826 - DNA, 25 bp, Homo sapien
tgcctctccagagaagacatattca

SEQ ID NO: 3372827 - DNA, 25 bp, Homo sapien
tttaagtcattcaggctaaaccatg

SEQ ID NO: 3372828 - DNA, 25 bp, Homo sapien
gaatattacaaaccaatgctacgat

SEQ ID NO: 3372829 - DNA, 25 bp, Homo sapien
gctcatgttcttttaacccacgtta

SEQ ID NO: 3372830 - DNA, 25 bp, Homo sapien
cagtggcctaggagctattcaattc

SEQ ID NO: 3372831 - DNA, 25 bp, Homo sapien
gactgcaggtaataaggagcagcca

SEQ ID NO: 3372832 - DNA, 25 bp, Homo sapien
ttaaaatccatttccggcattcatt

SEQ ID NO: 3372833 - DNA, 25 bp, Homo sapien
tccggcattcattgtgcaaacgaag

SEQ ID NO: 3372834 - DNA, 25 bp, Homo sapien
ccatttccggcattcattgtgcaaa

SEQ ID NO: 3372835 - DNA, 25 bp, Homo sapien
ggcattcattgtgcaaacgaagcat

SEQ ID NO: 3372836 - DNA, 25 bp, Homo sapien
ccaggagatcttcttgcaggtagaa

SEQ ID NO: 3372837 - DNA, 25 bp, Homo sapien
gcaccatccagtacaaaaagccaag

SEQ ID NO: 3372838 - DNA, 25 bp, Homo sapien
tgcaattgatagacctctggctacc

SEQ ID NO: 3372839 - DNA, 25 bp, Homo sapien
tcatcaacaaactccctgagggtga

SEQ ID NO: 3372840 - DNA, 25 bp, Homo sapien
ctacaggcatgcatcaccatgccta

SEQ ID NO: 3372841 - DNA, 25 bp, Homo sapien
atcctcctgtctcaactacccaagt

SEQ ID NO: 3372842 - DNA, 25 bp, Homo sapien
ggactacaggcatgcatcaccatgc

SEQ ID NO: 3372843 - DNA, 25 bp, Homo sapien
gatcctcctgtctcaactacccaag

SEQ ID NO: 3372844 - DNA, 25 bp, Homo sapien
acttgtaatggggtgggtgttgctt

SEQ ID NO: 3372845 - DNA, 25 bp, Homo sapien
aaatagatgtttgcttcatataaaa

SEQ ID NO: 3372846 - DNA, 25 bp, Homo sapien
ttatacagtggagtctgcacaaagc

SEQ ID NO: 3372847 - DNA, 25 bp, Homo sapien
gggtgggtgttgcttgttgtcccag

SEQ ID NO: 3372848 - DNA, 25 bp, Homo sapien
acttccaaaacacagcttgctttct

SEQ ID NO: 3372849 - DNA, 25 bp, Homo sapien
ctctagccaaaccgggtcactgacc

SEQ ID NO: 3372850 - DNA, 25 bp, Homo sapien
tctagccaaaccgggtcactgacca

SEQ ID NO: 3372851 - DNA, 25 bp, Homo sapien
gtgttccaaagagccttgccagcac

SEQ ID NO: 3372852 - DNA, 25 bp, Homo sapien
ccttgccagcacagaagtcttccat

SEQ ID NO: 3372853 - DNA, 25 bp, Homo sapien
cactgtgttccaaagagccttgcca

SEQ ID NO: 3372854 - DNA, 25 bp, Homo sapien
tgtgttccaaagagccttgccagca

SEQ ID NO: 3372855 - DNA, 25 bp, Homo sapien
agcccacaagcataggtccagcatc

SEQ ID NO: 3372856 - DNA, 25 bp, Homo sapien
gaaagcccacaagcataggtccagc

SEQ ID NO: 3372857 - DNA, 25 bp, Homo sapien
aactccacgaaagcccacaagcata

SEQ ID NO: 3372858 - DNA, 25 bp, Homo sapien
aagcataggtccagcatcttactca

SEQ ID NO: 3372859 - DNA, 25 bp, Homo sapien
ctgacagccaaagctaagatttttc

SEQ ID NO: 3372860 - DNA, 25 bp, Homo sapien
gacagccaaagctaagatttttcct

SEQ ID NO: 3372861 - DNA, 25 bp, Homo sapien
ccactccctgttgcctacttcactt

SEQ ID NO: 3372862 - DNA, 25 bp, Homo sapien
tttcctgtctgatgtcggccccact

SEQ ID NO: 3372863 - DNA, 25 bp, Homo sapien
tgtgtgctgcagatacaaagtcaat

SEQ ID NO: 3372864 - DNA, 25 bp, Homo sapien
tccaaggtgtctggcgcacagagga

SEQ ID NO: 3372865 - DNA, 25 bp, Homo sapien
ataaaacctggtccccgagtgtcat

SEQ ID NO: 3372866 - DNA, 25 bp, Homo sapien
cagtaagaaggtttctcatttgagc

SEQ ID NO: 3372867 - DNA, 25 bp, Homo sapien
tttctccagccatgacggtagcctt

SEQ ID NO: 3372868 - DNA, 25 bp, Homo sapien
ctccagccatgacggtagccttttg

SEQ ID NO: 3372869 - DNA, 25 bp, Homo sapien
catttctccagccatgacggtagcc

SEQ ID NO: 3372870 - DNA, 25 bp, Homo sapien
ggtagccttttgaagttaagtgaca

SEQ ID NO: 3372871 - DNA, 25 bp, Homo sapien
tagcactgcgtctgtggtgctgttg

SEQ ID NO: 3372872 - DNA, 25 bp, Homo sapien
ttgagtagcactgcgtctgtggtgc

SEQ ID NO: 3372873 - DNA, 25 bp, Homo sapien
aggcttagcggctttccagaactgc

SEQ ID NO: 3372874 - DNA, 25 bp, Homo sapien
ggccccaggcttagcggctttccag

SEQ ID NO: 3372875 - DNA, 25 bp, Homo sapien
aatgcagctggctgtgacttagcca

SEQ ID NO: 3372876 - DNA, 25 bp, Homo sapien
aaatgcagctggctgtgacttagcc

SEQ ID NO: 3372877 - DNA, 25 bp, Homo sapien
cagctggctgtgacttagccatacg

SEQ ID NO: 3372878 - DNA, 25 bp, Homo sapien
tgcagctggctgtgacttagccata

SEQ ID NO: 3372879 - DNA, 25 bp, Homo sapien
taaaaagtggaagacgtggcagcag

SEQ ID NO: 3372880 - DNA, 25 bp, Homo sapien
tgttgatttcccgtatggccaagag

SEQ ID NO: 3372881 - DNA, 25 bp, Homo sapien
cataggaaggagtgtcgaaaggact

SEQ ID NO: 3372882 - DNA, 25 bp, Homo sapien
tgacagtagggaagtagagctgccc

SEQ ID NO: 3372883 - DNA, 25 bp, Homo sapien
tgtctctgtgtcaggtactctgaat

SEQ ID NO: 3372884 - DNA, 25 bp, Homo sapien
gtctctgtgtcaggtactctgaatt

SEQ ID NO: 3372885 - DNA, 25 bp, Homo sapien
atgtctctgtgtcaggtactctgaa

SEQ ID NO: 3372886 - DNA, 25 bp, Homo sapien
atttctacagtacccacaggttctg

SEQ ID NO: 3372887 - DNA, 25 bp, Homo sapien
ttctgcaggtagtcttccaaacata

SEQ ID NO: 3372888 - DNA, 25 bp, Homo sapien
ttcagagatttctacagtacccaca

SEQ ID NO: 3372889 - DNA, 25 bp, Homo sapien
tcttccaaacataacattggactgc

SEQ ID NO: 3372890 - DNA, 25 bp, Homo sapien
tctttcccaggtaatgtgtcttcat

SEQ ID NO: 3372891 - DNA, 25 bp, Homo sapien
gtcctctttcccaggtaatgtgtct

SEQ ID NO: 3372892 - DNA, 25 bp, Homo sapien
caggtgccagtgggtcctctttccc

SEQ ID NO: 3372893 - DNA, 25 bp, Homo sapien
ctctttcccaggtaatgtgtcttca

SEQ ID NO: 3372894 - DNA, 25 bp, Homo sapien
ttgccatactggattacggtcccca

SEQ ID NO: 3372895 - DNA, 25 bp, Homo sapien
tactggattacggtccccagcaatt

SEQ ID NO: 3372896 - DNA, 25 bp, Homo sapien
gattacggtccccagcaatttcctg

SEQ ID NO: 3372897 - DNA, 25 bp, Homo sapien
cattgccatactggattacggtccc

SEQ ID NO: 3372898 - DNA, 25 bp, Homo sapien
cagaagggaagagctgccttgacct

SEQ ID NO: 3372899 - DNA, 25 bp, Homo sapien
gaagggaagagctgccttgacctac

SEQ ID NO: 3372900 - DNA, 25 bp, Homo sapien
agaagggaagagctgccttgaccta

SEQ ID NO: 3372901 - DNA, 25 bp, Homo sapien
tcagaagggaagagctgccttgacc

SEQ ID NO: 3372902 - DNA, 25 bp, Homo sapien
tcatttccagcctcgtccaatgtga

SEQ ID NO: 3372903 - DNA, 25 bp, Homo sapien
cgtccaatgtgactctcatggcatt

SEQ ID NO: 3372904 - DNA, 25 bp, Homo sapien
ggatcgcagcttgtagaatggctga

SEQ ID NO: 3372905 - DNA, 25 bp, Homo sapien
gctgtctccaatggatcgcagcttg

SEQ ID NO: 3372906 - DNA, 25 bp, Homo sapien
gaccagcattgacggggttcagaac

SEQ ID NO: 3372907 - DNA, 25 bp, Homo sapien
cagttgatggctgctagcatgtagg

SEQ ID NO: 3372908 - DNA, 25 bp, Homo sapien
tctaccagttgatggctgctagcat

SEQ ID NO: 3372909 - DNA, 25 bp, Homo sapien
attgcagcctgggttatctaccagt

SEQ ID NO: 3372910 - DNA, 25 bp, Homo sapien
agcacacgcatgcactggcgcctgc

SEQ ID NO: 3372911 - DNA, 25 bp, Homo sapien
caagtcactgctgaagtcactctca

SEQ ID NO: 3372912 - DNA, 25 bp, Homo sapien
tgcactggcgcctgccagacccgct

SEQ ID NO: 3372913 - DNA, 25 bp, Homo sapien
tgcacaaccttacacggcagccttg

SEQ ID NO: 3372914 - DNA, 25 bp, Homo sapien
gtcgtctttgttatcactccatttc

SEQ ID NO: 3372915 - DNA, 25 bp, Homo sapien
ccctttaatatgtcgtctttgttat

SEQ ID NO: 3372916 - DNA, 25 bp, Homo sapien
cctttaatatgtcgtctttgttatc

SEQ ID NO: 3372917 - DNA, 25 bp, Homo sapien
atatgtcgtctttgttatcactcca

SEQ ID NO: 3372918 - DNA, 25 bp, Homo sapien
tcagcatgaaacagcctcaccacgt

SEQ ID NO: 3372919 - DNA, 25 bp, Homo sapien
gaaacttctcctgctcagcatgaaa

SEQ ID NO: 3372920 - DNA, 25 bp, Homo sapien
cagggcttttgaactggtggcagat

SEQ ID NO: 3372921 - DNA, 25 bp, Homo sapien
cgtggttctcaggaagacgtgctgc

SEQ ID NO: 3372922 - DNA, 25 bp, Homo sapien
tgagaatagggaaacaaacaaggcc

SEQ ID NO: 3372923 - DNA, 25 bp, Homo sapien
tgtctctccaaagaaggcatcgagt

SEQ ID NO: 3372924 - DNA, 25 bp, Homo sapien
tcatgtgctagaacacacacgcagg

SEQ ID NO: 3372925 - DNA, 25 bp, Homo sapien
catgttggacaactggtggtacaca

SEQ ID NO: 3372926 - DNA, 25 bp, Homo sapien
ccgtggccagatgcttgaaacggaa

SEQ ID NO: 3372927 - DNA, 25 bp, Homo sapien
ctctgctgccaagtaatgccccgtg

SEQ ID NO: 3372928 - DNA, 25 bp, Homo sapien
tgccccgtggccagatgcttgaaac

SEQ ID NO: 3372929 - DNA, 25 bp, Homo sapien
gctccgccccgacatgggtcatgct

SEQ ID NO: 3372930 - DNA, 25 bp, Homo sapien
ggcattcttcctcaaagtcagggtc

SEQ ID NO: 3372931 - DNA, 25 bp, Homo sapien
attcttcctcaaagtcagggtctac

SEQ ID NO: 3372932 - DNA, 25 bp, Homo sapien
gaaactccaggcattcttcctcaaa

SEQ ID NO: 3372933 - DNA, 25 bp, Homo sapien
tgagggctgaaactccaggcattct

SEQ ID NO: 3372934 - DNA, 25 bp, Homo sapien
ccagtaaggagcacaaaagggagga

SEQ ID NO: 3372935 - DNA, 25 bp, Homo sapien
ggcctcagtcagagtgtctttcaaa

SEQ ID NO: 3372936 - DNA, 25 bp, Homo sapien
cagtcagagtgtctttcaaagccaa

SEQ ID NO: 3372937 - DNA, 25 bp, Homo sapien
aatccacaaacccacagcaggaagg

SEQ ID NO: 3372938 - DNA, 25 bp, Homo sapien
agaaggtgcaaggacaagaaccatc

SEQ ID NO: 3372939 - DNA, 25 bp, Homo sapien
gcagcatggagaccaccagatgttg

SEQ ID NO: 3372940 - DNA, 25 bp, Homo sapien
gcctaatctcagaggtaagatttcc

SEQ ID NO: 3372941 - DNA, 25 bp, Homo sapien
atgtcaccacagacggcagcatgga

SEQ ID NO: 3372942 - DNA, 25 bp, Homo sapien
agttcacttggacatcagcgctcac

SEQ ID NO: 3372943 - DNA, 25 bp, Homo sapien
gcacaaagttcacttggacatcagc

SEQ ID NO: 3372944 - DNA, 25 bp, Homo sapien
ccagagcacaaagttcacttggaca

SEQ ID NO: 3372945 - DNA, 25 bp, Homo sapien
ccgccagagcacaaagttcacttgg

SEQ ID NO: 3372946 - DNA, 25 bp, Homo sapien
gcacgaaaacgtcaaaagaccactg

SEQ ID NO: 3372947 - DNA, 25 bp, Homo sapien
caatcaacatcgaagtagccagagt

SEQ ID NO: 3372948 - DNA, 25 bp, Homo sapien
cactgaactctgagggagcctgaga

SEQ ID NO: 3372949 - DNA, 25 bp, Homo sapien
gagtctggaccactctcaacggctg

SEQ ID NO: 3372950 - DNA, 25 bp, Homo sapien
cttgccaccgggcagatctgtgctg

SEQ ID NO: 3372951 - DNA, 25 bp, Homo sapien
tgtgggcgtcgggtaagatcccctc

SEQ ID NO: 3372952 - DNA, 25 bp, Homo sapien
accgggcagatctgtgctgttggcc

SEQ ID NO: 3372953 - DNA, 25 bp, Homo sapien
gtcgggtaagatcccctctccatgc

SEQ ID NO: 3372954 - DNA, 25 bp, Homo sapien
ttgagacacaggactcagctacagg

SEQ ID NO: 3372955 - DNA, 25 bp, Homo sapien
gctatggtttgagacacaggactca

SEQ ID NO: 3372956 - DNA, 25 bp, Homo sapien
gactcagctacaggctggcagttaa

SEQ ID NO: 3372957 - DNA, 25 bp, Homo sapien
tacaggctggcagttaagtttcaga

SEQ ID NO: 3372958 - DNA, 25 bp, Homo sapien
aaataaacctgaatccaagtgttcg

SEQ ID NO: 3372959 - DNA, 25 bp, Homo sapien
aagtgttcgtaagcagcaaccccaa

SEQ ID NO: 3372960 - DNA, 25 bp, Homo sapien
tatttgagaagtcagcgtagccctg

SEQ ID NO: 3372961 - DNA, 25 bp, Homo sapien
cctctcctgagacatcagggatttg

SEQ ID NO: 3372962 - DNA, 25 bp, Homo sapien
ggcattccgcaacctacttcgagag

SEQ ID NO: 3372963 - DNA, 25 bp, Homo sapien
acttcgagaggcgtcctgatcaggg

SEQ ID NO: 3372964 - DNA, 25 bp, Homo sapien
cacgcagagtggtgggatctagctc

SEQ ID NO: 3372965 - DNA, 25 bp, Homo sapien
cagagaccagggagtataccatctt

SEQ ID NO: 3372966 - DNA, 25 bp, Homo sapien
cagtgcaaacctttcaccaaatcct

SEQ ID NO: 3372967 - DNA, 25 bp, Homo sapien
agtgcaaacctttcaccaaatcctt

SEQ ID NO: 3372968 - DNA, 25 bp, Homo sapien
ggtgtctgagccgaacataagagtt

SEQ ID NO: 3372969 - DNA, 25 bp, Homo sapien
tgtgaacccaggtattagtacatag

SEQ ID NO: 3372970 - DNA, 25 bp, Homo sapien
taggaatatttgtgctgtgaaccca

SEQ ID NO: 3372971 - DNA, 25 bp, Homo sapien
ccttgtcaataggaatatttgtgct

SEQ ID NO: 3372972 - DNA, 25 bp, Homo sapien
ttcaaggtggtccttgtgagataat

SEQ ID NO: 3372973 - DNA, 25 bp, Homo sapien
aattcaaggtggtccttgtgagata

SEQ ID NO: 3372974 - DNA, 25 bp, Homo sapien
caaggtggtccttgtgagataatct

SEQ ID NO: 3372975 - DNA, 25 bp, Homo sapien
gaaattcaaggtggtccttgtgaga

SEQ ID NO: 3372976 - DNA, 25 bp, Homo sapien
tctagcttcccagcaatggagccca

SEQ ID NO: 3372977 - DNA, 25 bp, Homo sapien
ctttcattctgggtgatggtgccct

SEQ ID NO: 3372978 - DNA, 25 bp, Homo sapien
aaaccggaactatggcaaatgcttc

SEQ ID NO: 3372979 - DNA, 25 bp, Homo sapien
ttcagcaggagaaaccggaactatg

SEQ ID NO: 3372980 - DNA, 25 bp, Homo sapien
tgaccagaattagttccaccagtga

SEQ ID NO: 3372981 - DNA, 25 bp, Homo sapien
tgttctctcatcagtttctgccgtt

SEQ ID NO: 3372982 - DNA, 25 bp, Homo sapien
tggagaagacaacttcgagaacatc

SEQ ID NO: 3372983 - DNA, 25 bp, Homo sapien
ccaccagtgacgaagtaaaccaaat

SEQ ID NO: 3372984 - DNA, 25 bp, Homo sapien
aatggggcttgtaacaacttgaaga

SEQ ID NO: 3372985 - DNA, 25 bp, Homo sapien
tgaatggggcttgtaacaacttgaa

SEQ ID NO: 3372986 - DNA, 25 bp, Homo sapien
ctgtgaatggggcttgtaacaactt

SEQ ID NO: 3372987 - DNA, 25 bp, Homo sapien
tgtgaatggggcttgtaacaacttg

SEQ ID NO: 3372988 - DNA, 25 bp, Homo sapien
cagagccggcagatgtgtctgaaag

SEQ ID NO: 3372989 - DNA, 25 bp, Homo sapien
tctgaaaggagcgtgccgctggtcc

SEQ ID NO: 3372990 - DNA, 25 bp, Homo sapien
tccagccgaagcattgggccatcac

SEQ ID NO: 3372991 - DNA, 25 bp, Homo sapien
agtgtctcagcaccctgtagcagag

SEQ ID NO: 3372992 - DNA, 25 bp, Homo sapien
tggaacaatgttaccctgtttcatt

SEQ ID NO: 3372993 - DNA, 25 bp, Homo sapien
gagtagcataagaaggtcaggaata

SEQ ID NO: 3372994 - DNA, 25 bp, Homo sapien
atgagtagcataagaaggtcaggaa

SEQ ID NO: 3372995 - DNA, 25 bp, Homo sapien
atctggaacaatgttaccctgtttc

SEQ ID NO: 3372996 - DNA, 25 bp, Homo sapien
tccgattattgtggagcagggcagt

SEQ ID NO: 3372997 - DNA, 25 bp, Homo sapien
ttcgcaccaggctgacaaatgtgtc

SEQ ID NO: 3372998 - DNA, 25 bp, Homo sapien
caaatgtgtcaatctctgccgcggt

SEQ ID NO: 3372999 - DNA, 25 bp, Homo sapien
gcagggcagtgatagtgtcttcagc

SEQ ID NO: 3373000 - DNA, 25 bp, Homo sapien
ttctaagtcttgatgccaatgttta

SEQ ID NO: 3373001 - DNA, 25 bp, Homo sapien
gcattctaagtcttgatgccaatgt

SEQ ID NO: 3373002 - DNA, 25 bp, Homo sapien
agcagcattctaagtcttgatgcca

SEQ ID NO: 3373003 - DNA, 25 bp, Homo sapien
aagtcttgatgccaatgtttatggc

SEQ ID NO: 3373004 - DNA, 25 bp, Homo sapien
cacagaggtcggagaggtaatctaa

SEQ ID NO: 3373005 - DNA, 25 bp, Homo sapien
gggttcagcacagctttacatatca

SEQ ID NO: 3373006 - DNA, 25 bp, Homo sapien
gaattgatttgttcatggagacaca

SEQ ID NO: 3373007 - DNA, 25 bp, Homo sapien
ggtctcaatcaggatgtcagcgttg

SEQ ID NO: 3373008 - DNA, 25 bp, Homo sapien
gtagctgagaacgtctcggtcctcc

SEQ ID NO: 3373009 - DNA, 25 bp, Homo sapien
tcacactcttgctgcgaatctcttt

SEQ ID NO: 3373010 - DNA, 25 bp, Homo sapien
cgaatctctttgttgctgtccctcc

SEQ ID NO: 3373011 - DNA, 25 bp, Homo sapien
tgtagtagctgagaacgtctcggtc

SEQ ID NO: 3373012 - DNA, 25 bp, Homo sapien
tatttgtgtagttatagaaagatac

SEQ ID NO: 3373013 - DNA, 25 bp, Homo sapien
cctatggtgttggaatggaattgga

SEQ ID NO: 3373014 - DNA, 25 bp, Homo sapien
tggaagtattagtgtaagtacatgc

SEQ ID NO: 3373015 - DNA, 25 bp, Homo sapien
aaaggtgaaggctagaataaatcct

SEQ ID NO: 3373016 - DNA, 25 bp, Homo sapien
gactggcaggtcttacagctggagc

SEQ ID NO: 3373017 - DNA, 25 bp, Homo sapien
gcagatgggtaaacatacagggaat

SEQ ID NO: 3373018 - DNA, 25 bp, Homo sapien
ggcagaggtgagacaggtacacaca

SEQ ID NO: 3373019 - DNA, 25 bp, Homo sapien
gtggcagaggtgagacaggtacaca

SEQ ID NO: 3373020 - DNA, 25 bp, Homo sapien
tagaggaaggaacaagggcacacag

SEQ ID NO: 3373021 - DNA, 25 bp, Homo sapien
aggaaggaacaagggcacacagctc

SEQ ID NO: 3373022 - DNA, 25 bp, Homo sapien
aaggaacaagggcacacagctcacg

SEQ ID NO: 3373023 - DNA, 25 bp, Homo sapien
ctagaggaaggaacaagggcacaca

SEQ ID NO: 3373024 - DNA, 25 bp, Homo sapien
tcatagggcaggttctcgtcagaca

SEQ ID NO: 3373025 - DNA, 25 bp, Homo sapien
tgagatcgacatccagctggcctga

SEQ ID NO: 3373026 - DNA, 25 bp, Homo sapien
accagaggcgggcatatttcacggg

SEQ ID NO: 3373027 - DNA, 25 bp, Homo sapien
cgtcaatggcgatctccgagggaat

SEQ ID NO: 3373028 - DNA, 25 bp, Homo sapien
caaactccatggtctgagcaaatct

SEQ ID NO: 3373029 - DNA, 25 bp, Homo sapien
ttcatctttggaagctccactacta

SEQ ID NO: 3373030 - DNA, 25 bp, Homo sapien
ctcaaacgtaagcttattcttctct

SEQ ID NO: 3373031 - DNA, 25 bp, Homo sapien
tttggaagctccactactatcatag

SEQ ID NO: 3373032 - DNA, 25 bp, Homo sapien
gccagaaggatcttagttaatcgta

SEQ ID NO: 3373033 - DNA, 25 bp, Homo sapien
ctcctttcgccatcttgctaatggg

SEQ ID NO: 3373034 - DNA, 25 bp, Homo sapien
gggaagattgttgtcacatgtacac

SEQ ID NO: 3373035 - DNA, 25 bp, Homo sapien
catgtacacagtccaatatggccag

SEQ ID NO: 3373036 - DNA, 25 bp, Homo sapien
ttcagcttctccacatcattgttac

SEQ ID NO: 3373037 - DNA, 25 bp, Homo sapien
tcttcagcttctccacatcattgtt

SEQ ID NO: 3373038 - DNA, 25 bp, Homo sapien
cttcagcttctccacatcattgtta

SEQ ID NO: 3373039 - DNA, 25 bp, Homo sapien
gtgacacaatgatggttccctgtgg

SEQ ID NO: 3373040 - DNA, 25 bp, Homo sapien
gatggttccctgtggcctcaaactt

SEQ ID NO: 3373041 - DNA, 25 bp, Homo sapien
tggtagagataggttctctctatat

SEQ ID NO: 3373042 - DNA, 25 bp, Homo sapien
ggtatgaatcactatgccctgccca

SEQ ID NO: 3373043 - DNA, 25 bp, Homo sapien
gtccatgaccatgatgtcctccttc

SEQ ID NO: 3373044 - DNA, 25 bp, Homo sapien
gcttcacattgccttcaggggcagc

SEQ ID NO: 3373045 - DNA, 25 bp, Homo sapien
atcagctctcccacgccatgaatag

SEQ ID NO: 3373046 - DNA, 25 bp, Homo sapien
ggcaaaaagcctcctccccggagca

SEQ ID NO: 3373047 - DNA, 25 bp, Homo sapien
cagggtcacttttcccaggattgct

SEQ ID NO: 3373048 - DNA, 25 bp, Homo sapien
cacagggtcacttttcccaggattg

SEQ ID NO: 3373049 - DNA, 25 bp, Homo sapien
tccaacacagggtcacttttcccag

SEQ ID NO: 3373050 - DNA, 25 bp, Homo sapien
caacacagggtcacttttcccagga

SEQ ID NO: 3373051 - DNA, 25 bp, Homo sapien
tataatccaacctcacattcaaaat

SEQ ID NO: 3373052 - DNA, 25 bp, Homo sapien
aatccaacctcacattcaaaataaa

SEQ ID NO: 3373053 - DNA, 25 bp, Homo sapien
ctataatccaacctcacattcaaaa

SEQ ID NO: 3373054 - DNA, 25 bp, Homo sapien
taatccaacctcacattcaaaataa

SEQ ID NO: 3373055 - DNA, 25 bp, Homo sapien
cttaaatatacacaggaggcaggag

SEQ ID NO: 3373056 - DNA, 25 bp, Homo sapien
ttaaatatacacaggaggcaggaga

SEQ ID NO: 3373057 - DNA, 25 bp, Homo sapien
taaatatacacaggaggcaggagat

SEQ ID NO: 3373058 - DNA, 25 bp, Homo sapien
aaatatacacaggaggcaggagatc

SEQ ID NO: 3373059 - DNA, 25 bp, Homo sapien
ctgctgtttccggaggatgtttctg

SEQ ID NO: 3373060 - DNA, 25 bp, Homo sapien
tggtacattacttggcccttcttgg

SEQ ID NO: 3373061 - DNA, 25 bp, Homo sapien
ctggtacattacttggcccttcttg

SEQ ID NO: 3373062 - DNA, 25 bp, Homo sapien
gctgtttccggaggatgtttctgaa

SEQ ID NO: 3373063 - DNA, 25 bp, Homo sapien
tgaaattccattctgaatcactaac

SEQ ID NO: 3373064 - DNA, 25 bp, Homo sapien
gtcccattctatggctgaaattcca

SEQ ID NO: 3373065 - DNA, 25 bp, Homo sapien
gccaggtcccattctatggctgaaa

SEQ ID NO: 3373066 - DNA, 25 bp, Homo sapien
agagccaggtcccattctatggctg

SEQ ID NO: 3373067 - DNA, 25 bp, Homo sapien
cttgggcttggtagatgggattatt

SEQ ID NO: 3373068 - DNA, 25 bp, Homo sapien
aggacagcaatgatctcactcatgg

SEQ ID NO: 3373069 - DNA, 25 bp, Homo sapien
gatgggattatttctactcctacca

SEQ ID NO: 3373070 - DNA, 25 bp, Homo sapien
catggtcccctggtaaaggacagca

SEQ ID NO: 3373071 - DNA, 25 bp, Homo sapien
gaaggtctgcaaacatgctgctggt

SEQ ID NO: 3373072 - DNA, 25 bp, Homo sapien
gttttgcagggtaaagctgttgagt

SEQ ID NO: 3373073 - DNA, 25 bp, Homo sapien
tctcccagaacattatattgcaaag

SEQ ID NO: 3373074 - DNA, 25 bp, Homo sapien
gctgttgagttaaccccaaatctcc

SEQ ID NO: 3373075 - DNA, 25 bp, Homo sapien
tcaatgtgttcaaagtcaagagcac

SEQ ID NO: 3373076 - DNA, 25 bp, Homo sapien
tgttcttcaatgtgttcaaagtcaa

SEQ ID NO: 3373077 - DNA, 25 bp, Homo sapien
tcttcaatgtgttcaaagtcaagag

SEQ ID NO: 3373078 - DNA, 25 bp, Homo sapien
caaagatgccttctgcttgttcttc

SEQ ID NO: 3373079 - DNA, 25 bp, Homo sapien
gcagccttccctacaaaacagtaac

SEQ ID NO: 3373080 - DNA, 25 bp, Homo sapien
gagcagccttccctacaaaacagta

SEQ ID NO: 3373081 - DNA, 25 bp, Homo sapien
agcagccttccctacaaaacagtaa

SEQ ID NO: 3373082 - DNA, 25 bp, Homo sapien
agagcagccttccctacaaaacagt

SEQ ID NO: 3373083 - DNA, 25 bp, Homo sapien
gagtactaacagttccaaagatagc

SEQ ID NO: 3373084 - DNA, 25 bp, Homo sapien
caaagatagcaccaaaacaacctaa

SEQ ID NO: 3373085 - DNA, 25 bp, Homo sapien
caacctaagcccagagactaaatat

SEQ ID NO: 3373086 - DNA, 25 bp, Homo sapien
ctctgacttgagtactaacagttcc

SEQ ID NO: 3373087 - DNA, 25 bp, Homo sapien
agcaggacatgatcttactaacttc

SEQ ID NO: 3373088 - DNA, 25 bp, Homo sapien
gattgcatttcctcactatgtaaaa

SEQ ID NO: 3373089 - DNA, 25 bp, Homo sapien
catgatcttactaacttcactctgt

SEQ ID NO: 3373090 - DNA, 25 bp, Homo sapien
ttgattgcatttcctcactatgtaa

SEQ ID NO: 3373091 - DNA, 25 bp, Homo sapien
gagaaaggttctgccgccgtggtca

SEQ ID NO: 3373092 - DNA, 25 bp, Homo sapien
gcatcgtcaagtggagcaggacacg

SEQ ID NO: 3373093 - DNA, 25 bp, Homo sapien
ggtgggtagtcatgcatcgtcaagt

SEQ ID NO: 3373094 - DNA, 25 bp, Homo sapien
tctggctgaagtgccggaagaggag

SEQ ID NO: 3373095 - DNA, 25 bp, Homo sapien
tgtttgtagttgtccacatcttggc

SEQ ID NO: 3373096 - DNA, 25 bp, Homo sapien
caaagctctgacttttccacgatgg

SEQ ID NO: 3373097 - DNA, 25 bp, Homo sapien
cttggctggtaaccagcagttgaac

SEQ ID NO: 3373098 - DNA, 25 bp, Homo sapien
atgcaccatccatagtctcatcggg

SEQ ID NO: 3373099 - DNA, 25 bp, Homo sapien
tgcttttgtggcttgttatttccct

SEQ ID NO: 3373100 - DNA, 25 bp, Homo sapien
atgcttttgtggcttgttatttccc

SEQ ID NO: 3373101 - DNA, 25 bp, Homo sapien
gcttttgtggcttgttatttccctc

SEQ ID NO: 3373102 - DNA, 25 bp, Homo sapien
ctctcttgaacacagagtttgctaa

SEQ ID NO: 3373103 - DNA, 25 bp, Homo sapien
tctttctcactgaggcactctcttg

SEQ ID NO: 3373104 - DNA, 25 bp, Homo sapien
catgttccggagcagacgctgttgc

SEQ ID NO: 3373105 - DNA, 25 bp, Homo sapien
cagagtttgctaagccgaatcaaaa

SEQ ID NO: 3373106 - DNA, 25 bp, Homo sapien
catgagccaacctcattatctcttg

SEQ ID NO: 3373107 - DNA, 25 bp, Homo sapien
tatgtgtttatgtagcaaagcttga

SEQ ID NO: 3373108 - DNA, 25 bp, Homo sapien
tggttgcctgcgcagaaattctgca

SEQ ID NO: 3373109 - DNA, 25 bp, Homo sapien
tctgctggttgcctgcgcagaaatt

SEQ ID NO: 3373110 - DNA, 25 bp, Homo sapien
tctcgttgatctcactgcaaagctg

SEQ ID NO: 3373111 - DNA, 25 bp, Homo sapien
ccgaccgtgagtctctatgcagtga

SEQ ID NO: 3373112 - DNA, 25 bp, Homo sapien
tatatactggacattccgaccgtga

SEQ ID NO: 3373113 - DNA, 25 bp, Homo sapien
tatgcagtgaacgaagtgctgaaca

SEQ ID NO: 3373114 - DNA, 25 bp, Homo sapien
agccaatgtgccctgcctccatctt

SEQ ID NO: 3373115 - DNA, 25 bp, Homo sapien
gtgagccaatgtgccctgcctccat

SEQ ID NO: 3373116 - DNA, 25 bp, Homo sapien
ctgcctccatcttatttttatgctt

SEQ ID NO: 3373117 - DNA, 25 bp, Homo sapien
cctgcctccatcttatttttatgct

SEQ ID NO: 3373118 - DNA, 25 bp, Homo sapien
gaaacagagattgcaagcttgcact

SEQ ID NO: 3373119 - DNA, 25 bp, Homo sapien
cacactggccctagaaagctattag

SEQ ID NO: 3373120 - DNA, 25 bp, Homo sapien
gagaaagcctgcataccagcattaa

SEQ ID NO: 3373121 - DNA, 25 bp, Homo sapien
gcattaatgcatcaagtggaaacag

SEQ ID NO: 3373122 - DNA, 25 bp, Homo sapien
gggtcaccacgcgaacgatgtcatc

SEQ ID NO: 3373123 - DNA, 25 bp, Homo sapien
gttgtagaacacgaggacatcctct

SEQ ID NO: 3373124 - DNA, 25 bp, Homo sapien
gccaggagctcgaccaagtggatgt

SEQ ID NO: 3373125 - DNA, 25 bp, Homo sapien
tgtagacattcttaccctccgtgca

SEQ ID NO: 3373126 - DNA, 25 bp, Homo sapien
aagggcacagccaggctgggctcgc

SEQ ID NO: 3373127 - DNA, 25 bp, Homo sapien
ggcacagccaggctgggctcgctca

SEQ ID NO: 3373128 - DNA, 25 bp, Homo sapien
gcacagccaggctgggctcgctcac

SEQ ID NO: 3373129 - DNA, 25 bp, Homo sapien
cacatagcaacgagaagggcacagc

SEQ ID NO: 3373130 - DNA, 25 bp, Homo sapien
accatcttggtgtgtatggaactca

SEQ ID NO: 3373131 - DNA, 25 bp, Homo sapien
aaccatcttggtgtgtatggaactc

SEQ ID NO: 3373132 - DNA, 25 bp, Homo sapien
aaaaccatcttggtgtgtatggaac

SEQ ID NO: 3373133 - DNA, 25 bp, Homo sapien
gaaaaaccatcttggtgtgtatgga

SEQ ID NO: 3373134 - DNA, 25 bp, Homo sapien
catgtgattgctggtataaatctcc

SEQ ID NO: 3373135 - DNA, 25 bp, Homo sapien
tgattcaggaagttaatgtatgcaa

SEQ ID NO: 3373136 - DNA, 25 bp, Homo sapien
cctgcagatgtctacaaggaaattc

SEQ ID NO: 3373137 - DNA, 25 bp, Homo sapien
tgtatccacatagcagtgattcagg

SEQ ID NO: 3373138 - DNA, 25 bp, Homo sapien
acttctccaaaatcgagtctgcatg

SEQ ID NO: 3373139 - DNA, 25 bp, Homo sapien
tactctggtctgagaagggagagct

SEQ ID NO: 3373140 - DNA, 25 bp, Homo sapien
gtttcctgtcactagtgttgttaca

SEQ ID NO: 3373141 - DNA, 25 bp, Homo sapien
caatactcatgacgatttcggtgac

SEQ ID NO: 3373142 - DNA, 25 bp, Homo sapien
ggcttggcattaaccagttgcagtg

SEQ ID NO: 3373143 - DNA, 25 bp, Homo sapien
cagctctccacggaggctttttggc

SEQ ID NO: 3373144 - DNA, 25 bp, Homo sapien
catcagacagcacccgaatacagct

SEQ ID NO: 3373145 - DNA, 25 bp, Homo sapien
ggtaaaccctgaacacgccttgcag

SEQ ID NO: 3373146 - DNA, 25 bp, Homo sapien
ctgcacaggagaaagatgagtcgtg

SEQ ID NO: 3373147 - DNA, 25 bp, Homo sapien
tgcacaggagaaagatgagtcgtga

SEQ ID NO: 3373148 - DNA, 25 bp, Homo sapien
gcacaggagaaagatgagtcgtgag

SEQ ID NO: 3373149 - DNA, 25 bp, Homo sapien
cacaggagaaagatgagtcgtgagc

SEQ ID NO: 3373150 - DNA, 25 bp, Homo sapien
gcaatctctcaatgatattccggta

SEQ ID NO: 3373151 - DNA, 25 bp, Homo sapien
tattccggtagtctctggaagctgc

SEQ ID NO: 3373152 - DNA, 25 bp, Homo sapien
caggtccacgggaatggcaatggcc

SEQ ID NO: 3373153 - DNA, 25 bp, Homo sapien
cagagtccctgcgtgcggcattgcg

SEQ ID NO: 3373154 - DNA, 25 bp, Homo sapien
tgactattcgttcagcacaccgaca

SEQ ID NO: 3373155 - DNA, 25 bp, Homo sapien
tgtgtgtggcaatcacgtgaggcca

SEQ ID NO: 3373156 - DNA, 25 bp, Homo sapien
tgaggccaggctaagcatcacttct

SEQ ID NO: 3373157 - DNA, 25 bp, Homo sapien
gaaatctgcaaatctaggagtaacc

SEQ ID NO: 3373158 - DNA, 25 bp, Homo sapien
taaaacactgatgcacgggtaggct

SEQ ID NO: 3373159 - DNA, 25 bp, Homo sapien
taaaacggaaacacagcctcagtca

SEQ ID NO: 3373160 - DNA, 25 bp, Homo sapien
tagagtaactttagtaccgtctggc

SEQ ID NO: 3373161 - DNA, 25 bp, Homo sapien
agtcaacggctcaggcagacgctga

SEQ ID NO: 3373162 - DNA, 25 bp, Homo sapien
ctgagacggtcctccagcgcggaga

SEQ ID NO: 3373163 - DNA, 25 bp, Homo sapien
acagataactctgcctgcaccaggg

SEQ ID NO: 3373164 - DNA, 25 bp, Homo sapien
cagctcgggtctgtggagaacatcc

SEQ ID NO: 3373165 - DNA, 25 bp, Homo sapien
ttcacatttccttctggcgtctgtg

SEQ ID NO: 3373166 - DNA, 25 bp, Homo sapien
cagaacaggactttagcacatgacc

SEQ ID NO: 3373167 - DNA, 25 bp, Homo sapien
gcacatgaccttgcattcatcaaag

SEQ ID NO: 3373168 - DNA, 25 bp, Homo sapien
gacaacgtctccttcttcgggaaca

SEQ ID NO: 3373169 - DNA, 25 bp, Homo sapien
ctggcaaatgaacaccccagagaga

SEQ ID NO: 3373170 - DNA, 25 bp, Homo sapien
tgtaggaccttaatgcagagcttct

SEQ ID NO: 3373171 - DNA, 25 bp, Homo sapien
tttggtcatcatttccctcagggtc

SEQ ID NO: 3373172 - DNA, 25 bp, Homo sapien
tcttctagcagctgttttgtatgct

SEQ ID NO: 3373173 - DNA, 25 bp, Homo sapien
atagcctctatctttggtcatcatt

SEQ ID NO: 3373174 - DNA, 25 bp, Homo sapien
ggtccctcccttcagtttcatagta

SEQ ID NO: 3373175 - DNA, 25 bp, Homo sapien
aggtccctcccttcagtttcatagt

SEQ ID NO: 3373176 - DNA, 25 bp, Homo sapien
atagtaaaacctggtttgaccatga

SEQ ID NO: 3373177 - DNA, 25 bp, Homo sapien
tccctcccttcagtttcatagtaaa

SEQ ID NO: 3373178 - DNA, 25 bp, Homo sapien
tcaggtcacgggactgtccatttcc

SEQ ID NO: 3373179 - DNA, 25 bp, Homo sapien
gaagtggagggcgtttcttgatgca

SEQ ID NO: 3373180 - DNA, 25 bp, Homo sapien
agaagtggtgacgtgtatgcctgcc

SEQ ID NO: 3373181 - DNA, 25 bp, Homo sapien
ctccctcagaagtggtgacgtgtat

SEQ ID NO: 3373182 - DNA, 25 bp, Homo sapien
ccagcctcctcgtaggcacagggag

SEQ ID NO: 3373183 - DNA, 25 bp, Homo sapien
ctcctcgtaggcacagggagagttg

SEQ ID NO: 3373184 - DNA, 25 bp, Homo sapien
ggcccctccagatccgattctttgg

SEQ ID NO: 3373185 - DNA, 25 bp, Homo sapien
gatccgattctttggcggtgaaggc

SEQ ID NO: 3373186 - DNA, 25 bp, Homo sapien
tcagcattatccaattcatcaatgg

SEQ ID NO: 3373187 - DNA, 25 bp, Homo sapien
ctcagcattatccaattcatcaatg

SEQ ID NO: 3373188 - DNA, 25 bp, Homo sapien
cagcattatccaattcatcaatgga

SEQ ID NO: 3373189 - DNA, 25 bp, Homo sapien
agcattatccaattcatcaatggaa

SEQ ID NO: 3373190 - DNA, 25 bp, Homo sapien
taatggccagcgtcaaccacaaatt

SEQ ID NO: 3373191 - DNA, 25 bp, Homo sapien
gagaagttctttaggccaatttcaa

SEQ ID NO: 3373192 - DNA, 25 bp, Homo sapien
ctttaggccaatttcaaaactgact

SEQ ID NO: 3373193 - DNA, 25 bp, Homo sapien
gataggttaatggccagcgtcaacc

SEQ ID NO: 3373194 - DNA, 25 bp, Homo sapien
cttgagcaagcaaacacatcaactg

SEQ ID NO: 3373195 - DNA, 25 bp, Homo sapien
ctgtggaatctttccataagtgagc

SEQ ID NO: 3373196 - DNA, 25 bp, Homo sapien
ggaatctttccataagtgagcaata

SEQ ID NO: 3373197 - DNA, 25 bp, Homo sapien
tttccataagtgagcaataaactcc

SEQ ID NO: 3373198 - DNA, 25 bp, Homo sapien
ataagtgagcaataaactcccagcc

SEQ ID NO: 3373199 - DNA, 25 bp, Homo sapien
ccaggggaacaacgcagaaggggat

SEQ ID NO: 3373200 - DNA, 25 bp, Homo sapien
ggggaacaacgcagaaggggatcca

SEQ ID NO: 3373201 - DNA, 25 bp, Homo sapien
gaacaacgcagaaggggatccacag

SEQ ID NO: 3373202 - DNA, 25 bp, Homo sapien
agttgccaggggaacaacgcagaag

SEQ ID NO: 3373203 - DNA, 25 bp, Homo sapien
acggcatcaattataaaggccaagg

SEQ ID NO: 3373204 - DNA, 25 bp, Homo sapien
accacaggagctgtggtagcttcca

SEQ ID NO: 3373205 - DNA, 25 bp, Homo sapien
gggacagggcatcggtgtcccagcg

SEQ ID NO: 3373206 - DNA, 25 bp, Homo sapien
aggcatctccgctgagagggccaga

SEQ ID NO: 3373207 - DNA, 25 bp, Homo sapien
agatgtgaggccctgccttaatccc

SEQ ID NO: 3373208 - DNA, 25 bp, Homo sapien
ccgggccagcacgaattctcattaa

SEQ ID NO: 3373209 - DNA, 25 bp, Homo sapien
gcacgaattctcattaagcttctgc

SEQ ID NO: 3373210 - DNA, 25 bp, Homo sapien
atgtgaggccctgccttaatcccgg

SEQ ID NO: 3373211 - DNA, 25 bp, Homo sapien
gcatggcgtcccttcctcagtgggc

SEQ ID NO: 3373212 - DNA, 25 bp, Homo sapien
tgatcaaagcatggcgtcccttcct

SEQ ID NO: 3373213 - DNA, 25 bp, Homo sapien
ctttatgatcaaagcatggcgtccc

SEQ ID NO: 3373214 - DNA, 25 bp, Homo sapien
tgggcaggccctacacagccttggg

SEQ ID NO: 3373215 - DNA, 25 bp, Homo sapien
gactatggctcatccagggtttagc

SEQ ID NO: 3373216 - DNA, 25 bp, Homo sapien
tacgaagccgtttgagaaaacagag

SEQ ID NO: 3373217 - DNA, 25 bp, Homo sapien
gatcccttcgtggaatagactggaa

SEQ ID NO: 3373218 - DNA, 25 bp, Homo sapien
ctatttcttaatcacccggcaggga

SEQ ID NO: 3373219 - DNA, 25 bp, Homo sapien
ctggtgttgaaagcatgagatgagt

SEQ ID NO: 3373220 - DNA, 25 bp, Homo sapien
gatgagtgacactacgaaatctggt

SEQ ID NO: 3373221 - DNA, 25 bp, Homo sapien
tgagatgagtgacactacgaaatct

SEQ ID NO: 3373222 - DNA, 25 bp, Homo sapien
tgttgaaagcatgagatgagtgaca

SEQ ID NO: 3373223 - DNA, 25 bp, Homo sapien
gcttgggaaagttccacgtgccaca

SEQ ID NO: 3373224 - DNA, 25 bp, Homo sapien
cctgcactcagggttactttggaga

SEQ ID NO: 3373225 - DNA, 25 bp, Homo sapien
cacatcctgtcctacagcagagaag

SEQ ID NO: 3373226 - DNA, 25 bp, Homo sapien
tcagtccaccgagacaaggaaagca

SEQ ID NO: 3373227 - DNA, 25 bp, Homo sapien
ctcagtggcgttctcagaatccgga

SEQ ID NO: 3373228 - DNA, 25 bp, Homo sapien
tgctaggcatgcagaaattccattt

SEQ ID NO: 3373229 - DNA, 25 bp, Homo sapien
acactaaggagacactaccatctgc

SEQ ID NO: 3373230 - DNA, 25 bp, Homo sapien
gttcatatatagacaagagttacac

SEQ ID NO: 3373231 - DNA, 25 bp, Homo sapien
tccattttaatacaacactaaggag

SEQ ID NO: 3373232 - DNA, 25 bp, Homo sapien
gctgccgcaggggtggacttggttc

SEQ ID NO: 3373233 - DNA, 25 bp, Homo sapien
cagctgccgcaggggtggacttggt

SEQ ID NO: 3373234 - DNA, 25 bp, Homo sapien
tgccgcaggggtggacttggttcaa

SEQ ID NO: 3373235 - DNA, 25 bp, Homo sapien
gccgcaggggtggacttggttcaag

SEQ ID NO: 3373236 - DNA, 25 bp, Homo sapien
acttggtcattatttggaggccagc

SEQ ID NO: 3373237 - DNA, 25 bp, Homo sapien
ggctgtgattgctcttgagtcaatt

SEQ ID NO: 3373238 - DNA, 25 bp, Homo sapien
ggacatgaaaagtttacttggtcat

SEQ ID NO: 3373239 - DNA, 25 bp, Homo sapien
ctgatggaggtgttacggtcattga

SEQ ID NO: 3373240 - DNA, 25 bp, Homo sapien
caagacctgctatttcatagcacaa

SEQ ID NO: 3373241 - DNA, 25 bp, Homo sapien
gctacccatttatctcaggcatcaa

SEQ ID NO: 3373242 - DNA, 25 bp, Homo sapien
gagtacaggtgcatctggctaccca

SEQ ID NO: 3373243 - DNA, 25 bp, Homo sapien
aaaaatgaacaagacctgctatttc

SEQ ID NO: 3373244 - DNA, 25 bp, Homo sapien
cacagctcactgtcctaaggtatag

SEQ ID NO: 3373245 - DNA, 25 bp, Homo sapien
taattacaaagttcacaggcatagg

SEQ ID NO: 3373246 - DNA, 25 bp, Homo sapien
taaggtatagggaccattgtcaccc

SEQ ID NO: 3373247 - DNA, 25 bp, Homo sapien
caggcataggcagcattccatacca

SEQ ID NO: 3373248 - DNA, 25 bp, Homo sapien
ggttccagccacttaaaaatcatgt

SEQ ID NO: 3373249 - DNA, 25 bp, Homo sapien
gagagagaactgacctttcggtttc

SEQ ID NO: 3373250 - DNA, 25 bp, Homo sapien
tgtgcttcaggcaagatcaccctct

SEQ ID NO: 3373251 - DNA, 25 bp, Homo sapien
ggagttaacattgccacacacaaag

SEQ ID NO: 3373252 - DNA, 25 bp, Homo sapien
atgaactgaactaaataagcgaatg

SEQ ID NO: 3373253 - DNA, 25 bp, Homo sapien
cactctaccaatatgagttccactg

SEQ ID NO: 3373254 - DNA, 25 bp, Homo sapien
gaactgaactaaataagcgaatgaa

SEQ ID NO: 3373255 - DNA, 25 bp, Homo sapien
accaatatgagttccactgatatga

SEQ ID NO: 3373256 - DNA, 25 bp, Homo sapien
tgtggagtaattaaaccaagctcct

SEQ ID NO: 3373257 - DNA, 25 bp, Homo sapien
gtgatgtggagtaattaaaccaagc

SEQ ID NO: 3373258 - DNA, 25 bp, Homo sapien
gatgtggagtaattaaaccaagctc

SEQ ID NO: 3373259 - DNA, 25 bp, Homo sapien
tggagtaattaaaccaagctcctac

SEQ ID NO: 3373260 - DNA, 25 bp, Homo sapien
cagcagtttacacctacagtatgca

SEQ ID NO: 3373261 - DNA, 25 bp, Homo sapien
gttggtctcagtcagaaattcccac

SEQ ID NO: 3373262 - DNA, 25 bp, Homo sapien
tgtaccaggctgagaaatctgattg

SEQ ID NO: 3373263 - DNA, 25 bp, Homo sapien
gaaaagctttcctaatcatcctgat

SEQ ID NO: 3373264 - DNA, 25 bp, Homo sapien
gagtctctgactggatcccctttgg

SEQ ID NO: 3373265 - DNA, 25 bp, Homo sapien
gggctgagacccgtaagccgcagcc

SEQ ID NO: 3373266 - DNA, 25 bp, Homo sapien
ccctttggcactgtgagaacattgt

SEQ ID NO: 3373267 - DNA, 25 bp, Homo sapien
gaacattgtttgagcgctagatggc

SEQ ID NO: 3373268 - DNA, 25 bp, Homo sapien
gacagtgggccattgccaaagctgg

SEQ ID NO: 3373269 - DNA, 25 bp, Homo sapien
tgacgtttccatagtaacggttgac

SEQ ID NO: 3373270 - DNA, 25 bp, Homo sapien
gctctctcttcgtcccgaaggtctg

SEQ ID NO: 3373271 - DNA, 25 bp, Homo sapien
catagtaacggttgaccagaacttg

SEQ ID NO: 3373272 - DNA, 25 bp, Homo sapien
tttgagcactgcctaaaaacacaaa

SEQ ID NO: 3373273 - DNA, 25 bp, Homo sapien
ggcaactcacatctgtgctttgagc

SEQ ID NO: 3373274 - DNA, 25 bp, Homo sapien
aggcaactcacatctgtgctttgag

SEQ ID NO: 3373275 - DNA, 25 bp, Homo sapien
tctgtgctttgagcactgcctaaaa

SEQ ID NO: 3373276 - DNA, 25 bp, Homo sapien
tcatagagctggatccggaacctcc

SEQ ID NO: 3373277 - DNA, 25 bp, Homo sapien
gctcatagagctggatccggaacct

SEQ ID NO: 3373278 - DNA, 25 bp, Homo sapien
tgctcatagagctggatccggaacc

SEQ ID NO: 3373279 - DNA, 25 bp, Homo sapien
atagagctggatccggaacctcccc

SEQ ID NO: 3373280 - DNA, 25 bp, Homo sapien
gacactgaacctcggccagactcat

SEQ ID NO: 3373281 - DNA, 25 bp, Homo sapien
gtgacactgaacctcggccagactc

SEQ ID NO: 3373282 - DNA, 25 bp, Homo sapien
tgacactgaacctcggccagactca

SEQ ID NO: 3373283 - DNA, 25 bp, Homo sapien
ggtcgataactagattggaagcccc

SEQ ID NO: 3373284 - DNA, 25 bp, Homo sapien
ggcaatggccaggagaatgctttca

SEQ ID NO: 3373285 - DNA, 25 bp, Homo sapien
cactggatgcgttcatgatgaggtc

SEQ ID NO: 3373286 - DNA, 25 bp, Homo sapien
gctttcatggaacactcggtcactg

SEQ ID NO: 3373287 - DNA, 25 bp, Homo sapien
aaggcttggtaccacccagacatct

SEQ ID NO: 3373288 - DNA, 25 bp, Homo sapien
ctggctcccagaacagactctcctc

SEQ ID NO: 3373289 - DNA, 25 bp, Homo sapien
cagaacagactctcctcctgctcag

SEQ ID NO: 3373290 - DNA, 25 bp, Homo sapien
tcaaacaaggcttggtaccacccag

SEQ ID NO: 3373291 - DNA, 25 bp, Homo sapien
tgatgagatcccctacaatcttgga

SEQ ID NO: 3373292 - DNA, 25 bp, Homo sapien
gaattttgtgccctcagaatgagct

SEQ ID NO: 3373293 - DNA, 25 bp, Homo sapien
gatttatgaccaaatgatcacagca

SEQ ID NO: 3373294 - DNA, 25 bp, Homo sapien
tcacagcaggatactagcagaactc

SEQ ID NO: 3373295 - DNA, 25 bp, Homo sapien
caaagaggtcgaatatgtttccagc

SEQ ID NO: 3373296 - DNA, 25 bp, Homo sapien
cgtgtcccagcaaaggatacgatca

SEQ ID NO: 3373297 - DNA, 25 bp, Homo sapien
tatcacatagattgcttcaccactc

SEQ ID NO: 3373298 - DNA, 25 bp, Homo sapien
gatacgatcacggagttttaaacat

SEQ ID NO: 3373299 - DNA, 25 bp, Homo sapien
tggtcatcccgatgccaagcccaga

SEQ ID NO: 3373300 - DNA, 25 bp, Homo sapien
cagaaccgaatggggcctctgactt

SEQ ID NO: 3373301 - DNA, 25 bp, Homo sapien
ctgacttctcttccacgtctaatca

SEQ ID NO: 3373302 - DNA, 25 bp, Homo sapien
ttccacgtctaatcagacgccattt

SEQ ID NO: 3373303 - DNA, 25 bp, Homo sapien
gacacaaccctagttccacatcatt

SEQ ID NO: 3373304 - DNA, 25 bp, Homo sapien
gacaagtcaagtctaggctagaagg

SEQ ID NO: 3373305 - DNA, 25 bp, Homo sapien
tctgaaccaacttctcaacagcaag

SEQ ID NO: 3373306 - DNA, 25 bp, Homo sapien
aagacgaaactctgaatcactcccc

SEQ ID NO: 3373307 - DNA, 25 bp, Homo sapien
cttgttcccataagcggagggttca

SEQ ID NO: 3373308 - DNA, 25 bp, Homo sapien
cccataagcggagggttcaatgtga

SEQ ID NO: 3373309 - DNA, 25 bp, Homo sapien
taagcggagggttcaatgtgaagcc

SEQ ID NO: 3373310 - DNA, 25 bp, Homo sapien
cggagggttcaatgtgaagcctgct

SEQ ID NO: 3373311 - DNA, 25 bp, Homo sapien
tcacagcttccgcagaagggcagtg

SEQ ID NO: 3373312 - DNA, 25 bp, Homo sapien
aacccccacgtgcaggaggagagct

SEQ ID NO: 3373313 - DNA, 25 bp, Homo sapien
gctgccctgactccactgctggctt

SEQ ID NO: 3373314 - DNA, 25 bp, Homo sapien
ttaatgccaacagctctcgaacccc

SEQ ID NO: 3373315 - DNA, 25 bp, Homo sapien
tcaaggactcctgttcaataacagt

SEQ ID NO: 3373316 - DNA, 25 bp, Homo sapien
ttgagcttcctccttaagacctgga

SEQ ID NO: 3373317 - DNA, 25 bp, Homo sapien
tatgcctaagaatgtaacgactttt

SEQ ID NO: 3373318 - DNA, 25 bp, Homo sapien
tttagaccaataatcctcaaggact

SEQ ID NO: 3373319 - DNA, 25 bp, Homo sapien
accagggcagagttgtgggaactgc

SEQ ID NO: 3373320 - DNA, 25 bp, Homo sapien
atgaccagggcagagttgtgggaac

SEQ ID NO: 3373321 - DNA, 25 bp, Homo sapien
cagggcagagttgtgggaactgcca

SEQ ID NO: 3373322 - DNA, 25 bp, Homo sapien
tgaccagggcagagttgtgggaact

SEQ ID NO: 3373323 - DNA, 25 bp, Homo sapien
tctgctgggaaccaatacaacttcg

SEQ ID NO: 3373324 - DNA, 25 bp, Homo sapien
tacagtacgaacagcgagggtctgc

SEQ ID NO: 3373325 - DNA, 25 bp, Homo sapien
gtgacaatatacaacctccgctctg

SEQ ID NO: 3373326 - DNA, 25 bp, Homo sapien
aaacaccgcgttctcttaacacttg

SEQ ID NO: 3373327 - DNA, 25 bp, Homo sapien
cagtttcaactaccctgccaggcaa

SEQ ID NO: 3373328 - DNA, 25 bp, Homo sapien
gctatgcctgacacctgagagaaaa

SEQ ID NO: 3373329 - DNA, 25 bp, Homo sapien
catttgtctgaaataaggtcctccc

SEQ ID NO: 3373330 - DNA, 25 bp, Homo sapien
cactcttattaatctggtcactggg

SEQ ID NO: 3373331 - DNA, 25 bp, Homo sapien
ctcctctccggtcccaaaacaccat

SEQ ID NO: 3373332 - DNA, 25 bp, Homo sapien
ggtcccaaaacaccatcttaggata

SEQ ID NO: 3373333 - DNA, 25 bp, Homo sapien
tcagcagggtaacgtgctcctctcc

SEQ ID NO: 3373334 - DNA, 25 bp, Homo sapien
tttttcagcagggtaacgtgctcct

SEQ ID NO: 3373335 - DNA, 25 bp, Homo sapien
tgtcattgaggccttcacgactccc

SEQ ID NO: 3373336 - DNA, 25 bp, Homo sapien
tcaccacctcccctatgcttagcct

SEQ ID NO: 3373337 - DNA, 25 bp, Homo sapien
ggaaccaaggtaagtctgtagtgtc

SEQ ID NO: 3373338 - DNA, 25 bp, Homo sapien
aaggtaagtctgtagtgtccttcat

SEQ ID NO: 3373339 - DNA, 25 bp, Homo sapien
gcccacaatgcacttcttggtcatg

SEQ ID NO: 3373340 - DNA, 25 bp, Homo sapien
tctgtcctgtctgcccacaatgcac

SEQ ID NO: 3373341 - DNA, 25 bp, Homo sapien
cacttcttggtcatgccctttctct

SEQ ID NO: 3373342 - DNA, 25 bp, Homo sapien
acactttgtggacaaacatctgtcc

SEQ ID NO: 3373343 - DNA, 25 bp, Homo sapien
atcgtcgacatgcaacttcagctac

SEQ ID NO: 3373344 - DNA, 25 bp, Homo sapien
ttccatcgtcgacatgcaacttcag

SEQ ID NO: 3373345 - DNA, 25 bp, Homo sapien
ccatcgtcgacatgcaacttcagct

SEQ ID NO: 3373346 - DNA, 25 bp, Homo sapien
catcgtcgacatgcaacttcagcta

SEQ ID NO: 3373347 - DNA, 25 bp, Homo sapien
ctgtcaagcgacagaaaaaggagtg

SEQ ID NO: 3373348 - DNA, 25 bp, Homo sapien
tcccaagtcactggtgttcactgtc

SEQ ID NO: 3373349 - DNA, 25 bp, Homo sapien
gggccaccttcatccggtcataaaa

SEQ ID NO: 3373350 - DNA, 25 bp, Homo sapien
gggcatccctgtctacctcatcgtc

SEQ ID NO: 3373351 - DNA, 25 bp, Homo sapien
gttcactgtcactgttgctttgatt

SEQ ID NO: 3373352 - DNA, 25 bp, Homo sapien
ctttcctggtggcagcggaggcctc

SEQ ID NO: 3373353 - DNA, 25 bp, Homo sapien
agtggtcgtcgggatcagcctccct

SEQ ID NO: 3373354 - DNA, 25 bp, Homo sapien
tcggttgtggttttcacacaggagc

SEQ ID NO: 3373355 - DNA, 25 bp, Homo sapien
gctgcatgatggtgatgaccgcgct

SEQ ID NO: 3373356 - DNA, 25 bp, Homo sapien
tagccaggcactcctctaattctag

SEQ ID NO: 3373357 - DNA, 25 bp, Homo sapien
actttgctgatctggccaggctcgg

SEQ ID NO: 3373358 - DNA, 25 bp, Homo sapien
tacttgcccaggcttttgcatcaca

SEQ ID NO: 3373359 - DNA, 25 bp, Homo sapien
caggctcggtggctcggtggctcat

SEQ ID NO: 3373360 - DNA, 25 bp, Homo sapien
tgcctagatgtctaacagtgacagg

SEQ ID NO: 3373361 - DNA, 25 bp, Homo sapien
ctgagtgcctagatgtctaacagtg

SEQ ID NO: 3373362 - DNA, 25 bp, Homo sapien
gagtgcctagatgtctaacagtgac

SEQ ID NO: 3373363 - DNA, 25 bp, Homo sapien
gtgcctagatgtctaacagtgacag

SEQ ID NO: 3373364 - DNA, 25 bp, Homo sapien
gcctgaatcccgtgactagtggtag

SEQ ID NO: 3373365 - DNA, 25 bp, Homo sapien
cagtggccttcagatagaggttatc

SEQ ID NO: 3373366 - DNA, 25 bp, Homo sapien
ggcataagtgctttgctccacccaa

SEQ ID NO: 3373367 - DNA, 25 bp, Homo sapien
catctagtcctctgtgggtcactca

SEQ ID NO: 3373368 - DNA, 25 bp, Homo sapien
gacactcatggagggattctactcc

SEQ ID NO: 3373369 - DNA, 25 bp, Homo sapien
cagagcaatgcactgaggaacgagt

SEQ ID NO: 3373370 - DNA, 25 bp, Homo sapien
gccttactccgctttcacagtggaa

SEQ ID NO: 3373371 - DNA, 25 bp, Homo sapien
gctaagctcgggaacaagcacattg

SEQ ID NO: 3373372 - DNA, 25 bp, Homo sapien
tgagatgggagcatcgcaagtcgcc

SEQ ID NO: 3373373 - DNA, 25 bp, Homo sapien
tagctgggcccacgtgtttcaaact

SEQ ID NO: 3373374 - DNA, 25 bp, Homo sapien
tgtgcgtacagagggaccgatcaac

SEQ ID NO: 3373375 - DNA, 25 bp, Homo sapien
tagtccccaggttcggtgagcaaag

SEQ ID NO: 3373376 - DNA, 25 bp, Homo sapien
tcttgttattttggcaacggaggaa

SEQ ID NO: 3373377 - DNA, 25 bp, Homo sapien
ccagggtttggttgataagcgctac

SEQ ID NO: 3373378 - DNA, 25 bp, Homo sapien
catttatatacaagcccagaagacc

SEQ ID NO: 3373379 - DNA, 25 bp, Homo sapien
cagtattcggtcagactttccaggg

SEQ ID NO: 3373380 - DNA, 25 bp, Homo sapien
gaaagagaccatggactgtccctcc

SEQ ID NO: 3373381 - DNA, 25 bp, Homo sapien
taaacagtaggaaagtccccatgca

SEQ ID NO: 3373382 - DNA, 25 bp, Homo sapien
taaatcagacgtcaaaggccaacag

SEQ ID NO: 3373383 - DNA, 25 bp, Homo sapien
caacaggcccctatttggcagagaa

SEQ ID NO: 3373384 - DNA, 25 bp, Homo sapien
ggctgtgatgatgtcaatgccattg

SEQ ID NO: 3373385 - DNA, 25 bp, Homo sapien
cattggattcatgggtggctatgca

SEQ ID NO: 3373386 - DNA, 25 bp, Homo sapien
ggattgatatcattgaggatcaggg

SEQ ID NO: 3373387 - DNA, 25 bp, Homo sapien
ttcagttctaacacaaggtccatcc

SEQ ID NO: 3373388 - DNA, 25 bp, Homo sapien
tggagttctgcatcgtagtcagcac

SEQ ID NO: 3373389 - DNA, 25 bp, Homo sapien
cctcatgagataccttacgtggaag

SEQ ID NO: 3373390 - DNA, 25 bp, Homo sapien
accagagagggaatggcgtttccac

SEQ ID NO: 3373391 - DNA, 25 bp, Homo sapien
tactcgatgctgttgggattcactt

SEQ ID NO: 3373392 - DNA, 25 bp, Homo sapien
tgggaagaagctgctactacacaga

SEQ ID NO: 3373393 - DNA, 25 bp, Homo sapien
gatctgtgctgccttccgggcaggt

SEQ ID NO: 3373394 - DNA, 25 bp, Homo sapien
gcaggtgtggttacaaactgttatt

SEQ ID NO: 3373395 - DNA, 25 bp, Homo sapien
cctcatggtgacagtggttgggaag

SEQ ID NO: 3373396 - DNA, 25 bp, Homo sapien
gatggccaggagcaacttcgaggca

SEQ ID NO: 3373397 - DNA, 25 bp, Homo sapien
ccaggagcaacttcgaggcattgtt

SEQ ID NO: 3373398 - DNA, 25 bp, Homo sapien
tggccaggagcaacttcgaggcatt

SEQ ID NO: 3373399 - DNA, 25 bp, Homo sapien
ggccaggagcaacttcgaggcattg

SEQ ID NO: 3373400 - DNA, 25 bp, Homo sapien
gggcctcatgttataaagtatcctc

SEQ ID NO: 3373401 - DNA, 25 bp, Homo sapien
atcctctctgcgttttcactgtcgt

SEQ ID NO: 3373402 - DNA, 25 bp, Homo sapien
ctctgcgttttcactgtcgtgcctg

SEQ ID NO: 3373403 - DNA, 25 bp, Homo sapien
ctcatgttataaagtatcctctctg

SEQ ID NO: 3373404 - DNA, 25 bp, Homo sapien
tcaccgttttctccatcctcaaatt

SEQ ID NO: 3373405 - DNA, 25 bp, Homo sapien
ctaatatgtagatgttgtgccccac

SEQ ID NO: 3373406 - DNA, 25 bp, Homo sapien
cacttcaccttgcatgtaggctttc

SEQ ID NO: 3373407 - DNA, 25 bp, Homo sapien
tgtagatgttgtgccccacgttcct

SEQ ID NO: 3373408 - DNA, 25 bp, Homo sapien
tctatctgcgccgtgtgcttggcat

SEQ ID NO: 3373409 - DNA, 25 bp, Homo sapien
ccaccaggtttcagcatgctctgaa

SEQ ID NO: 3373410 - DNA, 25 bp, Homo sapien
tatctgcgccgtgtgcttggcataa

SEQ ID NO: 3373411 - DNA, 25 bp, Homo sapien
gaagttctttgttatgccgagccaa

SEQ ID NO: 3373412 - DNA, 25 bp, Homo sapien
ttcagaccgcagaaagaaatcattg

SEQ ID NO: 3373413 - DNA, 25 bp, Homo sapien
tgctgggcacgggaaagactatctg

SEQ ID NO: 3373414 - DNA, 25 bp, Homo sapien
cattgattttgctgccttgttcgtc

SEQ ID NO: 3373415 - DNA, 25 bp, Homo sapien
gactccttggttaggaattcacata

SEQ ID NO: 3373416 - DNA, 25 bp, Homo sapien
tctgtggcagccaaataacgtgccc

SEQ ID NO: 3373417 - DNA, 25 bp, Homo sapien
tgtgctacctaacctagcaaaaggg

SEQ ID NO: 3373418 - DNA, 25 bp, Homo sapien
tatctaggtaggtccaatgtggtca

SEQ ID NO: 3373419 - DNA, 25 bp, Homo sapien
caagtatccgtgtaggtgagagagt

SEQ ID NO: 3373420 - DNA, 25 bp, Homo sapien
gaaagacatgttgcgggcacaccag

SEQ ID NO: 3373421 - DNA, 25 bp, Homo sapien
aggttcatcaggacggccaggttaa

SEQ ID NO: 3373422 - DNA, 25 bp, Homo sapien
cggccaggttaaacgaaatgctgct

SEQ ID NO: 3373423 - DNA, 25 bp, Homo sapien
gcacaccagtacaacacgggctggg

SEQ ID NO: 3373424 - DNA, 25 bp, Homo sapien
aactaaatctatggtaacagctaca

SEQ ID NO: 3373425 - DNA, 25 bp, Homo sapien
cagtactgcaccaatacatccagga

SEQ ID NO: 3373426 - DNA, 25 bp, Homo sapien
gatgcaagtcctagccttcctgctg

SEQ ID NO: 3373427 - DNA, 25 bp, Homo sapien
gaatgtggataactgggatccccag

SEQ ID NO: 3373428 - DNA, 25 bp, Homo sapien
gcaattaaggcccggatgccatggg

SEQ ID NO: 3373429 - DNA, 25 bp, Homo sapien
atggctgtccacaggagtcccgacc

SEQ ID NO: 3373430 - DNA, 25 bp, Homo sapien
gaaaatatcagtcgtagaattgtgg

SEQ ID NO: 3373431 - DNA, 25 bp, Homo sapien
ggttgtaacccgactgaaaatatca

SEQ ID NO: 3373432 - DNA, 25 bp, Homo sapien
gacttcattttagatggccacatta

SEQ ID NO: 3373433 - DNA, 25 bp, Homo sapien
cccaatcatttgtgactgaaaattt

SEQ ID NO: 3373434 - DNA, 25 bp, Homo sapien
catgacttcattttagatggccaca

SEQ ID NO: 3373435 - DNA, 25 bp, Homo sapien
attttagatggccacattattcttc

SEQ ID NO: 3373436 - DNA, 25 bp, Homo sapien
tgtctttccacctgaagcccagtag

SEQ ID NO: 3373437 - DNA, 25 bp, Homo sapien
cccagtaggtcaacgatgtaaatgc

SEQ ID NO: 3373438 - DNA, 25 bp, Homo sapien
tgccgcagctcacgttaacagcgtg

SEQ ID NO: 3373439 - DNA, 25 bp, Homo sapien
tagacagcccatagaagacagcctc

SEQ ID NO: 3373440 - DNA, 25 bp, Homo sapien
tgcggcgtgacaagtctcccagcgc

SEQ ID NO: 3373441 - DNA, 25 bp, Homo sapien
gctctcagaactccaatattctctc

SEQ ID NO: 3373442 - DNA, 25 bp, Homo sapien
tctgtctccgtccacaggtactttc

SEQ ID NO: 3373443 - DNA, 25 bp, Homo sapien
aaggattctgcgcacccagcagtct

SEQ ID NO: 3373444 - DNA, 25 bp, Homo sapien
gctgccacattaccaacactgaagg

SEQ ID NO: 3373445 - DNA, 25 bp, Homo sapien
ctttgatagaaaccccaatgcctgg

SEQ ID NO: 3373446 - DNA, 25 bp, Homo sapien
gcaatcagataagcgaggaagccga

SEQ ID NO: 3373447 - DNA, 25 bp, Homo sapien
gagtcctaactgaactactgtgcaa

SEQ ID NO: 3373448 - DNA, 25 bp, Homo sapien
caggaacagtcagatggcacggact

SEQ ID NO: 3373449 - DNA, 25 bp, Homo sapien
cagtcagatggcacggactgtgcca

SEQ ID NO: 3373450 - DNA, 25 bp, Homo sapien
tcagatggcacggactgtgccaaac

SEQ ID NO: 3373451 - DNA, 25 bp, Homo sapien
atgacaggaacagtcagatggcacg

SEQ ID NO: 3373452 - DNA, 25 bp, Homo sapien
catccagaaccatggctcggtagcc

SEQ ID NO: 3373453 - DNA, 25 bp, Homo sapien
tgaatgtcccacagttgcccacaaa

SEQ ID NO: 3373454 - DNA, 25 bp, Homo sapien
caccagatacaacaaatgatagagg

SEQ ID NO: 3373455 - DNA, 25 bp, Homo sapien
gatagaggaactcaacatccagaac

SEQ ID NO: 3373456 - DNA, 25 bp, Homo sapien
aaatatttccacaccaggtactcac

SEQ ID NO: 3373457 - DNA, 25 bp, Homo sapien
gaggacataggacactctcctagtt

SEQ ID NO: 3373458 - DNA, 25 bp, Homo sapien
tcctagtttccccacacataaaata

SEQ ID NO: 3373459 - DNA, 25 bp, Homo sapien
tgagagagaggacataggacactct

SEQ ID NO: 3373460 - DNA, 25 bp, Homo sapien
ggctgccaactgtggagcttcaatc

SEQ ID NO: 3373461 - DNA, 25 bp, Homo sapien
caccaatcaccattaaaaggaaggg

SEQ ID NO: 3373462 - DNA, 25 bp, Homo sapien
gagcttcaatcttggtggaccaggc

SEQ ID NO: 3373463 - DNA, 25 bp, Homo sapien
aggcacaccaatcaccattaaaagg

SEQ ID NO: 3373464 - DNA, 25 bp, Homo sapien
taacagatcgggagtgcccagtaca

SEQ ID NO: 3373465 - DNA, 25 bp, Homo sapien
catgttccattactgagaagtaaca

SEQ ID NO: 3373466 - DNA, 25 bp, Homo sapien
ggttgtgtgactcttgaattcctgg

SEQ ID NO: 3373467 - DNA, 25 bp, Homo sapien
tgcccagtacacagtgcggttgtgt

SEQ ID NO: 3373468 - DNA, 25 bp, Homo sapien
ggtttcttatctacaacgccacagg

SEQ ID NO: 3373469 - DNA, 25 bp, Homo sapien
gatggaaccagcttgtcttacagac

SEQ ID NO: 3373470 - DNA, 25 bp, Homo sapien
taagcacttggctcatatcggagga

SEQ ID NO: 3373471 - DNA, 25 bp, Homo sapien
caagaaatggactccctgagagctg

SEQ ID NO: 3373472 - DNA, 25 bp, Homo sapien
tgtaagcccccctctctttgtaagc

SEQ ID NO: 3373473 - DNA, 25 bp, Homo sapien
taagaccctgacctgaacagctgca

SEQ ID NO: 3373474 - DNA, 25 bp, Homo sapien
atgtaatccctgtgacggccctgtg

SEQ ID NO: 3373475 - DNA, 25 bp, Homo sapien
tacgttaagcgaagggagcatctca

SEQ ID NO: 3373476 - DNA, 25 bp, Homo sapien
taaaatagctggcaatcattcggca

SEQ ID NO: 3373477 - DNA, 25 bp, Homo sapien
gtttcactgatgcaaggactttttc

SEQ ID NO: 3373478 - DNA, 25 bp, Homo sapien
cagtgtcaacttgggaatcaacaga

SEQ ID NO: 3373479 - DNA, 25 bp, Homo sapien
tttcacatgcttgaataaaaggcag

SEQ ID NO: 3373480 - DNA, 25 bp, Homo sapien
gatgcaaactggaacgtgaaatgcc

SEQ ID NO: 3373481 - DNA, 25 bp, Homo sapien
aaggagcacatcacttgaagacaca

SEQ ID NO: 3373482 - DNA, 25 bp, Homo sapien
cacaaacaagtcaaggtccacacag

SEQ ID NO: 3373483 - DNA, 25 bp, Homo sapien
taatctggtttgatcctattgcgtt

SEQ ID NO: 3373484 - DNA, 25 bp, Homo sapien
gagtactgctttgataccaaaagga

SEQ ID NO: 3373485 - DNA, 25 bp, Homo sapien
ttagtagaataatttgaagtgtcag

SEQ ID NO: 3373486 - DNA, 25 bp, Homo sapien
gtagaataatttgaagtgtcagtgt

SEQ ID NO: 3373487 - DNA, 25 bp, Homo sapien
cttattagtagaataatttgaagtg

SEQ ID NO: 3373488 - DNA, 25 bp, Homo sapien
aataatttgaagtgtcagtgttttc

SEQ ID NO: 3373489 - DNA, 25 bp, Homo sapien
tctctccttttacaggcagcccgat

SEQ ID NO: 3373490 - DNA, 25 bp, Homo sapien
catggagggagctctcccaactctg

SEQ ID NO: 3373491 - DNA, 25 bp, Homo sapien
cttccggcctgctggcatggaggga

SEQ ID NO: 3373492 - DNA, 25 bp, Homo sapien
caactctggaacacatgggtgttcc

SEQ ID NO: 3373493 - DNA, 25 bp, Homo sapien
gatggaccgtccattgcgagtgaca

SEQ ID NO: 3373494 - DNA, 25 bp, Homo sapien
tccttgaagaaaagatagcccacta

SEQ ID NO: 3373495 - DNA, 25 bp, Homo sapien
gaacaggtaaacgaggatcagagcc

SEQ ID NO: 3373496 - DNA, 25 bp, Homo sapien
gatcagagccagaactgctgtcagg

SEQ ID NO: 3373497 - DNA, 25 bp, Homo sapien
agaacaggaactcgcttgccaaact

SEQ ID NO: 3373498 - DNA, 25 bp, Homo sapien
tcgcttgccaaactctcgccggttt

SEQ ID NO: 3373499 - DNA, 25 bp, Homo sapien
acatcggagaacaggaactcgcttg

SEQ ID NO: 3373500 - DNA, 25 bp, Homo sapien
tccaccctacacacatcggagaaca

SEQ ID NO: 3373501 - DNA, 25 bp, Homo sapien
gcacagtgacaatgcacatcagcag

SEQ ID NO: 3373502 - DNA, 25 bp, Homo sapien
gcagcgtctcacatgtgtgctcttt

SEQ ID NO: 3373503 - DNA, 25 bp, Homo sapien
tccgcagcccgtgactcagcacagt

SEQ ID NO: 3373504 - DNA, 25 bp, Homo sapien
gtgacaatgcacatcagcagcgtct

SEQ ID NO: 3373505 - DNA, 25 bp, Homo sapien
tgtgcgttcaggtggatcaggccta

SEQ ID NO: 3373506 - DNA, 25 bp, Homo sapien
caggagggatattcactgtgcgttc

SEQ ID NO: 3373507 - DNA, 25 bp, Homo sapien
cgacttctccaagtgtggtgtgaca

SEQ ID NO: 3373508 - DNA, 25 bp, Homo sapien
ttcatgtcccctgtctcaattgcga

SEQ ID NO: 3373509 - DNA, 25 bp, Homo sapien
gaagaacaagaggtcataaataact

SEQ ID NO: 3373510 - DNA, 25 bp, Homo sapien
gcaaaagtgtcaatgataaccccaa

SEQ ID NO: 3373511 - DNA, 25 bp, Homo sapien
cccaaaaatcaggttaagaacaatg

SEQ ID NO: 3373512 - DNA, 25 bp, Homo sapien
taaagcacgtggtcttcaagatctc

SEQ ID NO: 3373513 - DNA, 25 bp, Homo sapien
cagatagtgccacatgttgtgttct

SEQ ID NO: 3373514 - DNA, 25 bp, Homo sapien
caaaggtgacagtcttgttgtcaaa

SEQ ID NO: 3373515 - DNA, 25 bp, Homo sapien
actctcaggcccagtatattcggtg

SEQ ID NO: 3373516 - DNA, 25 bp, Homo sapien
ccaggacgatgaagcacagatagtg

SEQ ID NO: 3373517 - DNA, 25 bp, Homo sapien
ttgctcccaggaggcctttccactc

SEQ ID NO: 3373518 - DNA, 25 bp, Homo sapien
gctcccaggaggcctttccactcac

SEQ ID NO: 3373519 - DNA, 25 bp, Homo sapien
tgctcccaggaggcctttccactca

SEQ ID NO: 3373520 - DNA, 25 bp, Homo sapien
cttgctcccaggaggcctttccact

SEQ ID NO: 3373521 - DNA, 25 bp, Homo sapien
ttctgttgtgcagctccccgatggg

SEQ ID NO: 3373522 - DNA, 25 bp, Homo sapien
acacgaagttcacagagcacagcgc

SEQ ID NO: 3373523 - DNA, 25 bp, Homo sapien
gaagggctcaggcaacatcggatgt

SEQ ID NO: 3373524 - DNA, 25 bp, Homo sapien
gatcactccagagaacacacgaagt

SEQ ID NO: 3373525 - DNA, 25 bp, Homo sapien
tatgctgtcctacagaagtagccag

SEQ ID NO: 3373526 - DNA, 25 bp, Homo sapien
aaacggcagcgctggtgcattccag

SEQ ID NO: 3373527 - DNA, 25 bp, Homo sapien
tccagaacactctagctaccatggg

SEQ ID NO: 3373528 - DNA, 25 bp, Homo sapien
cagagtagaccaaggtatcgggacc

SEQ ID NO: 3373529 - DNA, 25 bp, Homo sapien
cattgttacaaacggcacctggcac

SEQ ID NO: 3373530 - DNA, 25 bp, Homo sapien
aatgtaggaaattcggaggagagca

SEQ ID NO: 3373531 - DNA, 25 bp, Homo sapien
ctccacgaaggtcagaatgtaggaa

SEQ ID NO: 3373532 - DNA, 25 bp, Homo sapien
gctcaactcattgttacaaacggca

SEQ ID NO: 3373533 - DNA, 25 bp, Homo sapien
ttagatatgggggtggtactgacca

SEQ ID NO: 3373534 - DNA, 25 bp, Homo sapien
ggtactgaccaacctcttgaaatgt

SEQ ID NO: 3373535 - DNA, 25 bp, Homo sapien
gggtggtactgaccaacctcttgaa

SEQ ID NO: 3373536 - DNA, 25 bp, Homo sapien
gatatgggggtggtactgaccaacc

SEQ ID NO: 3373537 - DNA, 25 bp, Homo sapien
caggctgaccacaagtgctaaggtt

SEQ ID NO: 3373538 - DNA, 25 bp, Homo sapien
ggctgaccacaagtgctaaggttct

SEQ ID NO: 3373539 - DNA, 25 bp, Homo sapien
tgaccacaagtgctaaggttctggt

SEQ ID NO: 3373540 - DNA, 25 bp, Homo sapien
aggctgaccacaagtgctaaggttc

SEQ ID NO: 3373541 - DNA, 25 bp, Homo sapien
agccagtacagttcccgtcacagca

SEQ ID NO: 3373542 - DNA, 25 bp, Homo sapien
agttcccgtcacagcaagtgcttcc

SEQ ID NO: 3373543 - DNA, 25 bp, Homo sapien
ttcctctctcggagcagacaaacta

SEQ ID NO: 3373544 - DNA, 25 bp, Homo sapien
cctctctcggagcagacaaactaac

SEQ ID NO: 3373545 - DNA, 25 bp, Homo sapien
ctgatcctttaattccgacagctgg

SEQ ID NO: 3373546 - DNA, 25 bp, Homo sapien
gatcctttaattccgacagctggcc

SEQ ID NO: 3373547 - DNA, 25 bp, Homo sapien
cgtgacaagtttcatggtggactcc

SEQ ID NO: 3373548 - DNA, 25 bp, Homo sapien
agctggccagaaaggttcgtgacaa

SEQ ID NO: 3373549 - DNA, 25 bp, Homo sapien
cactgaaagtagcaccatggcttta

SEQ ID NO: 3373550 - DNA, 25 bp, Homo sapien
ctgaaagtagcaccatggctttatc

SEQ ID NO: 3373551 - DNA, 25 bp, Homo sapien
agcagcactgaaagtagcaccatgg

SEQ ID NO: 3373552 - DNA, 25 bp, Homo sapien
gcactgaaagtagcaccatggcttt

SEQ ID NO: 3373553 - DNA, 25 bp, Homo sapien
aagagaatcacatttagtgttcaga

SEQ ID NO: 3373554 - DNA, 25 bp, Homo sapien
gttctcctccttggaataagaatgt

SEQ ID NO: 3373555 - DNA, 25 bp, Homo sapien
tcctagcaacagcaaataatggtcg

SEQ ID NO: 3373556 - DNA, 25 bp, Homo sapien
taatcttgtgttatgccttctgtcc

SEQ ID NO: 3373557 - DNA, 25 bp, Homo sapien
gataaccctcttgtatgaaaaatgc

SEQ ID NO: 3373558 - DNA, 25 bp, Homo sapien
gaaaaatgccaaatgctgtaacatg

SEQ ID NO: 3373559 - DNA, 25 bp, Homo sapien
tgaaggtcaggcgagaccattgcct

SEQ ID NO: 3373560 - DNA, 25 bp, Homo sapien
tctcatgttgatgggtctctagacc

SEQ ID NO: 3373561 - DNA, 25 bp, Homo sapien
tagacactgaggctcgctgaaggtc

SEQ ID NO: 3373562 - DNA, 25 bp, Homo sapien
gtctgcaagtgggttaaggtcctac

SEQ ID NO: 3373563 - DNA, 25 bp, Homo sapien
ggaaaatggtggctttgtacgatag

SEQ ID NO: 3373564 - DNA, 25 bp, Homo sapien
ggctttgtacgatagtaacaacacg

SEQ ID NO: 3373565 - DNA, 25 bp, Homo sapien
gatagtaacaacacgccatactaac

SEQ ID NO: 3373566 - DNA, 25 bp, Homo sapien
tgtacgatagtaacaacacgccata

SEQ ID NO: 3373567 - DNA, 25 bp, Homo sapien
agtttcatcattagacccagatact

SEQ ID NO: 3373568 - DNA, 25 bp, Homo sapien
aaaagtttcatcattagacccagat

SEQ ID NO: 3373569 - DNA, 25 bp, Homo sapien
aaaaagtttcatcattagacccaga

SEQ ID NO: 3373570 - DNA, 25 bp, Homo sapien
aagtttcatcattagacccagatac

SEQ ID NO: 3373571 - DNA, 25 bp, Homo sapien
ttgacattcatgtgaggaggatgtc

SEQ ID NO: 3373572 - DNA, 25 bp, Homo sapien
gatgtcctagaagaccaattctttg

SEQ ID NO: 3373573 - DNA, 25 bp, Homo sapien
aggatgtcctagaagaccaattctt

SEQ ID NO: 3373574 - DNA, 25 bp, Homo sapien
tgctggttgttgtgggttgacattc

SEQ ID NO: 3373575 - DNA, 25 bp, Homo sapien
taaccttcgtgggtgaatcagaact

SEQ ID NO: 3373576 - DNA, 25 bp, Homo sapien
ggagatgacactgattggccagcag

SEQ ID NO: 3373577 - DNA, 25 bp, Homo sapien
gagatccatgtacaaaactaggcaa

SEQ ID NO: 3373578 - DNA, 25 bp, Homo sapien
taggacactcgggagctacaaatgt

SEQ ID NO: 3373579 - DNA, 25 bp, Homo sapien
catgtaactagagctgatcctttca

SEQ ID NO: 3373580 - DNA, 25 bp, Homo sapien
ttcaggccgcgcacagggcatgtaa

SEQ ID NO: 3373581 - DNA, 25 bp, Homo sapien
taatcccggttacaggcttcaggcc

SEQ ID NO: 3373582 - DNA, 25 bp, Homo sapien
ccctggctcatagtgggctcgtaat

SEQ ID NO: 3373583 - DNA, 25 bp, Homo sapien
tacagatggtcgttgagggtcgcaa

SEQ ID NO: 3373584 - DNA, 25 bp, Homo sapien
ttggcgcggtgcctcgcagctgtct

SEQ ID NO: 3373585 - DNA, 25 bp, Homo sapien
aaagtgacttggctcgcgcctcagt

SEQ ID NO: 3373586 - DNA, 25 bp, Homo sapien
acgaaagctgctgacgggaaaacca

SEQ ID NO: 3373587 - DNA, 25 bp, Homo sapien
tggcaaaagggtgaaggcggaggag

SEQ ID NO: 3373588 - DNA, 25 bp, Homo sapien
taatgctcgtgattaccaaagcgct

SEQ ID NO: 3373589 - DNA, 25 bp, Homo sapien
tctgctactcagcaggacgactggg

SEQ ID NO: 3373590 - DNA, 25 bp, Homo sapien
ttcccactggagtttgcggcctcgg

SEQ ID NO: 3373591 - DNA, 25 bp, Homo sapien
gatttcccactcaagacgtcaaagg

SEQ ID NO: 3373592 - DNA, 25 bp, Homo sapien
ggcctctctgcgtctgtgtgctggt

SEQ ID NO: 3373593 - DNA, 25 bp, Homo sapien
tccacgtggcctctctgcgtctgtg

SEQ ID NO: 3373594 - DNA, 25 bp, Homo sapien
cacgtggcctctctgcgtctgtgtg

SEQ ID NO: 3373595 - DNA, 25 bp, Homo sapien
cctctctgcgtctgtgtgctggtct

SEQ ID NO: 3373596 - DNA, 25 bp, Homo sapien
tggcaacctcaaagtggaatctaca

SEQ ID NO: 3373597 - DNA, 25 bp, Homo sapien
ataaaatcatgtcttcggatagtga

SEQ ID NO: 3373598 - DNA, 25 bp, Homo sapien
gaatctacagagatagtctggaaag

SEQ ID NO: 3373599 - DNA, 25 bp, Homo sapien
tcagtgatatagctatttggcaacc

SEQ ID NO: 3373600 - DNA, 25 bp, Homo sapien
gtgaacgaaggtcctgccctccaag

SEQ ID NO: 3373601 - DNA, 25 bp, Homo sapien
tggcactgacagtcccttcaacctt

SEQ ID NO: 3373602 - DNA, 25 bp, Homo sapien
cataaagcaggctggcactgacagt

SEQ ID NO: 3373603 - DNA, 25 bp, Homo sapien
ccttctccacgggttggagtggaag

SEQ ID NO: 3373604 - DNA, 25 bp, Homo sapien
gatctgaagtttgactggccaaaat

SEQ ID NO: 3373605 - DNA, 25 bp, Homo sapien
gaggatctgaagtttgactggccaa

SEQ ID NO: 3373606 - DNA, 25 bp, Homo sapien
ggatctgaagtttgactggccaaaa

SEQ ID NO: 3373607 - DNA, 25 bp, Homo sapien
ctgaggatctgaagtttgactggcc

SEQ ID NO: 3373608 - DNA, 25 bp, Homo sapien
ctgtgtcacagaaaccgcttctacc

SEQ ID NO: 3373609 - DNA, 25 bp, Homo sapien
cagaaaccgcttctacccttgttga

SEQ ID NO: 3373610 - DNA, 25 bp, Homo sapien
tcacagaaaccgcttctacccttgt

SEQ ID NO: 3373611 - DNA, 25 bp, Homo sapien
ccgcttctacccttgttgaaagaag

SEQ ID NO: 3373612 - DNA, 25 bp, Homo sapien
tctggcttgccagtggcaatcactg

SEQ ID NO: 3373613 - DNA, 25 bp, Homo sapien
ggcaatcactgaccgctttgctgtt

SEQ ID NO: 3373614 - DNA, 25 bp, Homo sapien
agtggcaatcactgaccgctttgct

SEQ ID NO: 3373615 - DNA, 25 bp, Homo sapien
aatcactgaccgctttgctgttcct

SEQ ID NO: 3373616 - DNA, 25 bp, Homo sapien
tctttcctggttacttcagctgcag

SEQ ID NO: 3373617 - DNA, 25 bp, Homo sapien
gtctctctttcctggttacttcagc

SEQ ID NO: 3373618 - DNA, 25 bp, Homo sapien
cctggttacttcagctgcagatttc

SEQ ID NO: 3373619 - DNA, 25 bp, Homo sapien
ttcctggttacttcagctgcagatt

SEQ ID NO: 3373620 - DNA, 25 bp, Homo sapien
ggaaaggcctccacaactcacaact

SEQ ID NO: 3373621 - DNA, 25 bp, Homo sapien
aggaaaggcctccacaactcacaac

SEQ ID NO: 3373622 - DNA, 25 bp, Homo sapien
ttggccagaactccatagaaggctc

SEQ ID NO: 3373623 - DNA, 25 bp, Homo sapien
caccaactgggttcccgtgtccttg

SEQ ID NO: 3373624 - DNA, 25 bp, Homo sapien
tggccagaactccatagaaggctct

SEQ ID NO: 3373625 - DNA, 25 bp, Homo sapien
tgatcctgctccatgcaccaactgg

SEQ ID NO: 3373626 - DNA, 25 bp, Homo sapien
tgggattggagagtattattctagg

SEQ ID NO: 3373627 - DNA, 25 bp, Homo sapien
aattgaccttccctaacatgaagtt

SEQ ID NO: 3373628 - DNA, 25 bp, Homo sapien
gttgctcagaataaccaatatcttt

SEQ ID NO: 3373629 - DNA, 25 bp, Homo sapien
taacatgaagttgctcagaataacc

SEQ ID NO: 3373630 - DNA, 25 bp, Homo sapien
catcaagcaccggttcagtagggaa

SEQ ID NO: 3373631 - DNA, 25 bp, Homo sapien
tgagggcatcaagcaccggttcagt

SEQ ID NO: 3373632 - DNA, 25 bp, Homo sapien
agcaccggttcagtagggaaagaag

SEQ ID NO: 3373633 - DNA, 25 bp, Homo sapien
tgctgagggcatcaagcaccggttc

SEQ ID NO: 3373634 - DNA, 25 bp, Homo sapien
ggagcccaaaccttgcagcttccat

SEQ ID NO: 3373635 - DNA, 25 bp, Homo sapien
gggagcccaaaccttgcagcttcca

SEQ ID NO: 3373636 - DNA, 25 bp, Homo sapien
gagagatgactgtaagcccttccca

SEQ ID NO: 3373637 - DNA, 25 bp, Homo sapien
caagttcggggagttgagagatgac

SEQ ID NO: 3373638 - DNA, 25 bp, Homo sapien
tgcgcttcgggtcagtcaccccact

SEQ ID NO: 3373639 - DNA, 25 bp, Homo sapien
tgccctgcaagttcggggagttgag

SEQ ID NO: 3373640 - DNA, 25 bp, Homo sapien
ccttctcactcagccgggagcaggg

SEQ ID NO: 3373641 - DNA, 25 bp, Homo sapien
ctgatacagtcagaggagggagcca

SEQ ID NO: 3373642 - DNA, 25 bp, Homo sapien
agctgaaactccaatcccgcggtgt

SEQ ID NO: 3373643 - DNA, 25 bp, Homo sapien
ccgcggtgtgagcagcgctgataca

SEQ ID NO: 3373644 - DNA, 25 bp, Homo sapien
cccctccggctgcagcgttacacaa

SEQ ID NO: 3373645 - DNA, 25 bp, Homo sapien
cctccggctgcagcgttacacaacc

SEQ ID NO: 3373646 - DNA, 25 bp, Homo sapien
tccggctgcagcgttacacaaccgc

SEQ ID NO: 3373647 - DNA, 25 bp, Homo sapien
ccggctgcagcgttacacaaccgcg

SEQ ID NO: 3373648 - DNA, 25 bp, Homo sapien
gcggctgctagggagcccccacccc

SEQ ID NO: 3373649 - DNA, 25 bp, Homo sapien
tgttggacaacgctccggcggctgc

SEQ ID NO: 3373650 - DNA, 25 bp, Homo sapien
ggcccccaggtgtctgcggctgcgg

SEQ ID NO: 3373651 - DNA, 25 bp, Homo sapien
ggtggcagcacgacctgggtcctgc

SEQ ID NO: 3373652 - DNA, 25 bp, Homo sapien
cgccgtgcgagccaagtgaatgaga

SEQ ID NO: 3373653 - DNA, 25 bp, Homo sapien
ccgtgcgagccaagtgaatgagaag

SEQ ID NO: 3373654 - DNA, 25 bp, Homo sapien
ctgcgccgtgcgagccaagtgaatg

SEQ ID NO: 3373655 - DNA, 25 bp, Homo sapien
gtgaatgagaagtggggcgggcggg

SEQ ID NO: 3373656 - DNA, 25 bp, Homo sapien
ggtctctccgcagatgttcctctga

SEQ ID NO: 3373657 - DNA, 25 bp, Homo sapien
ctgcactagcggagcgtctggatga

SEQ ID NO: 3373658 - DNA, 25 bp, Homo sapien
acagactggcggtgtgtgctccctg

SEQ ID NO: 3373659 - DNA, 25 bp, Homo sapien
tggctccgactcagcgcacagactg

SEQ ID NO: 3373660 - DNA, 25 bp, Homo sapien
gcggcgagccggggccactgcgcgc

SEQ ID NO: 3373661 - DNA, 25 bp, Homo sapien
cgagccggggccactgcgcgctcct

SEQ ID NO: 3373662 - DNA, 25 bp, Homo sapien
agccggggccactgcgcgctcctgt

SEQ ID NO: 3373663 - DNA, 25 bp, Homo sapien
gcgagccggggccactgcgcgctcc

SEQ ID NO: 3373664 - DNA, 25 bp, Homo sapien
cctggtaggtctccgtgctccagtc

SEQ ID NO: 3373665 - DNA, 25 bp, Homo sapien
ctccagtcccggtgctttgggcagg

SEQ ID NO: 3373666 - DNA, 25 bp, Homo sapien
ccagtcccggtgctttgggcaggca

SEQ ID NO: 3373667 - DNA, 25 bp, Homo sapien
taggtctccgtgctccagtcccggt

SEQ ID NO: 3373668 - DNA, 25 bp, Homo sapien
accaggaagggtcgtgactgcttgc

SEQ ID NO: 3373669 - DNA, 25 bp, Homo sapien
ctgcttgcgcacggctgcaggcgtt

SEQ ID NO: 3373670 - DNA, 25 bp, Homo sapien
caagttgagagtggcgcataacatg

SEQ ID NO: 3373671 - DNA, 25 bp, Homo sapien
tgcaggcgttctgccgggcaagaac

SEQ ID NO: 3373672 - DNA, 25 bp, Homo sapien
gctttattccccgtcttgacttgta

SEQ ID NO: 3373673 - DNA, 25 bp, Homo sapien
cttggtacatgtgggcagggtacat

SEQ ID NO: 3373674 - DNA, 25 bp, Homo sapien
tcctcgctccgctttattccccgtc

SEQ ID NO: 3373675 - DNA, 25 bp, Homo sapien
ccgtcttgacttgtacacttggtac

SEQ ID NO: 3373676 - DNA, 25 bp, Homo sapien
gagatgagaagcctatcctcccagc

SEQ ID NO: 3373677 - DNA, 25 bp, Homo sapien
gagtagcacccagaaccatcgtctg

SEQ ID NO: 3373678 - DNA, 25 bp, Homo sapien
tcttggaaactcagcgcgcgcgagg

SEQ ID NO: 3373679 - DNA, 25 bp, Homo sapien
aagtcactcagaagaggcaccgagc

SEQ ID NO: 3373680 - DNA, 25 bp, Homo sapien
ttcgggtaggagatccttcagctgg

SEQ ID NO: 3373681 - DNA, 25 bp, Homo sapien
gccggtgcggcaatttgtaggtctc

SEQ ID NO: 3373682 - DNA, 25 bp, Homo sapien
tcgatgagccggtgcggcaatttgt

SEQ ID NO: 3373683 - DNA, 25 bp, Homo sapien
tgcactcgttaatccggtcacgtct

SEQ ID NO: 3373684 - DNA, 25 bp, Homo sapien
gagggacctctattacgtctggcag

SEQ ID NO: 3373685 - DNA, 25 bp, Homo sapien
tggtgtcaactcagagagggacctc

SEQ ID NO: 3373686 - DNA, 25 bp, Homo sapien
tggaagctgcaactacctcaggaaa

SEQ ID NO: 3373687 - DNA, 25 bp, Homo sapien
gaaaagagccttagtcagcggtgag

SEQ ID NO: 3373688 - DNA, 25 bp, Homo sapien
gtaaaccactctgcagggcaatgat

SEQ ID NO: 3373689 - DNA, 25 bp, Homo sapien
atgcttcaaggtaagttcaagaacc

SEQ ID NO: 3373690 - DNA, 25 bp, Homo sapien
gcttcaaggtaagttcaagaaccac

SEQ ID NO: 3373691 - DNA, 25 bp, Homo sapien
cagcttgtaaaccactctgcagggc

SEQ ID NO: 3373692 - DNA, 25 bp, Homo sapien
tgagcccacgggctctctatttgca

SEQ ID NO: 3373693 - DNA, 25 bp, Homo sapien
attacatcagatgttgagcccacgg

SEQ ID NO: 3373694 - DNA, 25 bp, Homo sapien
aaactcttaaagagagcatagccag

SEQ ID NO: 3373695 - DNA, 25 bp, Homo sapien
gagcatagccagaatcagcactcac

SEQ ID NO: 3373696 - DNA, 25 bp, Homo sapien
aattttcatcatacgagccttcgag

SEQ ID NO: 3373697 - DNA, 25 bp, Homo sapien
tacctagtggctattcagggaacca

SEQ ID NO: 3373698 - DNA, 25 bp, Homo sapien
tgcaattcaccaagatacctagtgg

SEQ ID NO: 3373699 - DNA, 25 bp, Homo sapien
taatacgtattcatgccaggtggca

SEQ ID NO: 3373700 - DNA, 25 bp, Homo sapien
cactgaggtgggataccagcacttc

SEQ ID NO: 3373701 - DNA, 25 bp, Homo sapien
tgaggcctgggtatagcactggcac

SEQ ID NO: 3373702 - DNA, 25 bp, Homo sapien
gaaagtccgctggatgactggcacg

SEQ ID NO: 3373703 - DNA, 25 bp, Homo sapien
tgcgaagacttcaggtcccgagtgt

SEQ ID NO: 3373704 - DNA, 25 bp, Homo sapien
gaagagtgactcacagaccaagact

SEQ ID NO: 3373705 - DNA, 25 bp, Homo sapien
taaagtcctataccaacacgcaggc

SEQ ID NO: 3373706 - DNA, 25 bp, Homo sapien
tgacttccctatgccaaaaggagct

SEQ ID NO: 3373707 - DNA, 25 bp, Homo sapien
tcacgtcgacaataaaggcaaaagg

SEQ ID NO: 3373708 - DNA, 25 bp, Homo sapien
taaggacactccatatgccgttggg

SEQ ID NO: 3373709 - DNA, 25 bp, Homo sapien
gccgttgggcaagaggaattagcct

SEQ ID NO: 3373710 - DNA, 25 bp, Homo sapien
gctggctggacacatcgggaaaaca

SEQ ID NO: 3373711 - DNA, 25 bp, Homo sapien
tggttaggcctagaaacaggtgcca

SEQ ID NO: 3373712 - DNA, 25 bp, Homo sapien
cttcaggaaggctccaaaatataaa

SEQ ID NO: 3373713 - DNA, 25 bp, Homo sapien
cactgtgtgaatcaagtaattatac

SEQ ID NO: 3373714 - DNA, 25 bp, Homo sapien
tctcactgtgtgaatcaagtaatta

SEQ ID NO: 3373715 - DNA, 25 bp, Homo sapien
ttcaggaaggctccaaaatataaac

SEQ ID NO: 3373716 - DNA, 25 bp, Homo sapien
ggacatgggagtcagccatatcaca

SEQ ID NO: 3373717 - DNA, 25 bp, Homo sapien
atatcacaccaagtgagctatttta

SEQ ID NO: 3373718 - DNA, 25 bp, Homo sapien
tatcacaccaagtgagctattttaa

SEQ ID NO: 3373719 - DNA, 25 bp, Homo sapien
gactaagcttattctgattgaatac

SEQ ID NO: 3373720 - DNA, 25 bp, Homo sapien
agggaaggtgacatgtgaagcaaac

SEQ ID NO: 3373721 - DNA, 25 bp, Homo sapien
ggatgccgctagaactgggctagaa

SEQ ID NO: 3373722 - DNA, 25 bp, Homo sapien
tccctctgagcgcatttggatgccg

SEQ ID NO: 3373723 - DNA, 25 bp, Homo sapien
atttggatgccgctagaactgggct

SEQ ID NO: 3373724 - DNA, 25 bp, Homo sapien
ggctagaagagaggttaagggcgag

SEQ ID NO: 3373725 - DNA, 25 bp, Homo sapien
cggcagccgcttttagccgcgggcc

SEQ ID NO: 3373726 - DNA, 25 bp, Homo sapien
tgcttccaggaaccggcagccgctt

SEQ ID NO: 3373727 - DNA, 25 bp, Homo sapien
gccgcttttagccgcgggccgcaca

SEQ ID NO: 3373728 - DNA, 25 bp, Homo sapien
cagccgcttttagccgcgggccgca

SEQ ID NO: 3373729 - DNA, 25 bp, Homo sapien
ctgggactgctggatacagatgtcc

SEQ ID NO: 3373730 - DNA, 25 bp, Homo sapien
gggactgctggatacagatgtccat

SEQ ID NO: 3373731 - DNA, 25 bp, Homo sapien
aaccaaaaaagcatcctgcctctcc

SEQ ID NO: 3373732 - DNA, 25 bp, Homo sapien
tgggactgctggatacagatgtcca

SEQ ID NO: 3373733 - DNA, 25 bp, Homo sapien
agagcagtttaggagagtgattaga

SEQ ID NO: 3373734 - DNA, 25 bp, Homo sapien
taggagagtgattagacaggccttt

SEQ ID NO: 3373735 - DNA, 25 bp, Homo sapien
tttaggagagtgattagacaggcct

SEQ ID NO: 3373736 - DNA, 25 bp, Homo sapien
cagtttaggagagtgattagacagg

SEQ ID NO: 3373737 - DNA, 25 bp, Homo sapien
ctgtggatgccataagcacgtgtca

SEQ ID NO: 3373738 - DNA, 25 bp, Homo sapien
gatagtaaaatctagccctccagca

SEQ ID NO: 3373739 - DNA, 25 bp, Homo sapien
ggtgctctcaagatcttcagtggag

SEQ ID NO: 3373740 - DNA, 25 bp, Homo sapien
tggctttgcaaagaacaccccacga

SEQ ID NO: 3373741 - DNA, 25 bp, Homo sapien
aaaacacagattctcgggcgggcac

SEQ ID NO: 3373742 - DNA, 25 bp, Homo sapien
gactggcacacggaagaggatagta

SEQ ID NO: 3373743 - DNA, 25 bp, Homo sapien
caatcccaaactatgagtgaaaaac

SEQ ID NO: 3373744 - DNA, 25 bp, Homo sapien
cacacggaagaggatagtaaatatt

SEQ ID NO: 3373745 - DNA, 25 bp, Homo sapien
ctggaatagtaacggacatgctcat

SEQ ID NO: 3373746 - DNA, 25 bp, Homo sapien
tcacgctgctctggggccaaaaata

SEQ ID NO: 3373747 - DNA, 25 bp, Homo sapien
tcttcacgctgctctggggccaaaa

SEQ ID NO: 3373748 - DNA, 25 bp, Homo sapien
cgggttcttcacgctgctctggggc

SEQ ID NO: 3373749 - DNA, 25 bp, Homo sapien
acgctgctctggggccaaaaataag

SEQ ID NO: 3373750 - DNA, 25 bp, Homo sapien
tgctcgccgaggttttcatccgttg

SEQ ID NO: 3373751 - DNA, 25 bp, Homo sapien
aaacggattcagagcgtccaaataa

SEQ ID NO: 3373752 - DNA, 25 bp, Homo sapien
tcaggatagacacatccgtccaaaa

SEQ ID NO: 3373753 - DNA, 25 bp, Homo sapien
catccgttgccaagtcaagttcaaa

SEQ ID NO: 3373754 - DNA, 25 bp, Homo sapien
ggcacccacggcaagagcggcgcgg

SEQ ID NO: 3373755 - DNA, 25 bp, Homo sapien
acggcaagagcggcgcggccaatcc

SEQ ID NO: 3373756 - DNA, 25 bp, Homo sapien
gagcggcgcggccaatccggccagg

SEQ ID NO: 3373757 - DNA, 25 bp, Homo sapien
gccgccgtcggcacccacggcaaga

SEQ ID NO: 3373758 - DNA, 25 bp, Homo sapien
gtcgacgacttccacacgagcgggc

SEQ ID NO: 3373759 - DNA, 25 bp, Homo sapien
cggaccctccaacggctccttggtg

SEQ ID NO: 3373760 - DNA, 25 bp, Homo sapien
ggaagccgagcggatcatatgactc

SEQ ID NO: 3373761 - DNA, 25 bp, Homo sapien
gagcgagaacggacgggaggacgga

SEQ ID NO: 3373762 - DNA, 25 bp, Homo sapien
aagagcgaacggaaccagtccagca

SEQ ID NO: 3373763 - DNA, 25 bp, Homo sapien
gagcgaacggaaccagtccagcagg

SEQ ID NO: 3373764 - DNA, 25 bp, Homo sapien
agagcgaacggaaccagtccagcag

SEQ ID NO: 3373765 - DNA, 25 bp, Homo sapien
ttacgctttctcgtacggctgacgg

SEQ ID NO: 3373766 - DNA, 25 bp, Homo sapien
tcgtacggctgacggatttgccaaa

SEQ ID NO: 3373767 - DNA, 25 bp, Homo sapien
tacggctgacggatttgccaaatcc

SEQ ID NO: 3373768 - DNA, 25 bp, Homo sapien
tttctcgtacggctgacggatttgc

SEQ ID NO: 3373769 - DNA, 25 bp, Homo sapien
gacaggcatttagaatgcattattg

SEQ ID NO: 3373770 - DNA, 25 bp, Homo sapien
gcattattgcactctaacagcttct

SEQ ID NO: 3373771 - DNA, 25 bp, Homo sapien
ggcatttagaatgcattattgcact

SEQ ID NO: 3373772 - DNA, 25 bp, Homo sapien
gaatgcattattgcactctaacagc

SEQ ID NO: 3373773 - DNA, 25 bp, Homo sapien
tttttaagagaatatgaccttggtc

SEQ ID NO: 3373774 - DNA, 25 bp, Homo sapien
ttaagagaatatgaccttggtcagg

SEQ ID NO: 3373775 - DNA, 25 bp, Homo sapien
taagagaatatgaccttggtcaggt

SEQ ID NO: 3373776 - DNA, 25 bp, Homo sapien
tttaagagaatatgaccttggtcag

SEQ ID NO: 3373777 - DNA, 25 bp, Homo sapien
taatccttcggaaacacaggtctta

SEQ ID NO: 3373778 - DNA, 25 bp, Homo sapien
cggatggtctctatattgctgctaa

SEQ ID NO: 3373779 - DNA, 25 bp, Homo sapien
taatgtcacactcagtcaaggccct

SEQ ID NO: 3373780 - DNA, 25 bp, Homo sapien
ttgtaaccaatttccttgcggatgg

SEQ ID NO: 3373781 - DNA, 25 bp, Homo sapien
ttctgcttcccgttcagtttcattt

SEQ ID NO: 3373782 - DNA, 25 bp, Homo sapien
tctgcttcccgttcagtttcatttc

SEQ ID NO: 3373783 - DNA, 25 bp, Homo sapien
ctgcttcccgttcagtttcatttct

SEQ ID NO: 3373784 - DNA, 25 bp, Homo sapien
ccctgctggtagaggagagtcgaaa

SEQ ID NO: 3373785 - DNA, 25 bp, Homo sapien
tagggaagctccacaacatgatggg

SEQ ID NO: 3373786 - DNA, 25 bp, Homo sapien
cgggtggcccgaatgtgtacaagca

SEQ ID NO: 3373787 - DNA, 25 bp, Homo sapien
gattccttgcaatggtccccagaag

SEQ ID NO: 3373788 - DNA, 25 bp, Homo sapien
aaagtagctcacaatattcaaaagg

SEQ ID NO: 3373789 - DNA, 25 bp, Homo sapien
tgcccagccctaattctaccaaaca

SEQ ID NO: 3373790 - DNA, 25 bp, Homo sapien
aacagaagaggcacgaacacttcca

SEQ ID NO: 3373791 - DNA, 25 bp, Homo sapien
aacaaaaagtagctcacaatattca

SEQ ID NO: 3373792 - DNA, 25 bp, Homo sapien
taggtaaaattcgacattggtgtcg

SEQ ID NO: 3373793 - DNA, 25 bp, Homo sapien
agagaaactaccagagggaaaggtg

SEQ ID NO: 3373794 - DNA, 25 bp, Homo sapien
agcagacgtgctctaaaagaaatgt

SEQ ID NO: 3373795 - DNA, 25 bp, Homo sapien
aaactaaaatctgtagccagcagac

SEQ ID NO: 3373796 - DNA, 25 bp, Homo sapien
tatagcagcggtccaatacaataca

SEQ ID NO: 3373797 - DNA, 25 bp, Homo sapien
gcaagctattaacaacagcatggga

SEQ ID NO: 3373798 - DNA, 25 bp, Homo sapien
ttcacatgctaaacagagtggtctt

SEQ ID NO: 3373799 - DNA, 25 bp, Homo sapien
tgaaatatggagcatgacaaagcct

SEQ ID NO: 3373800 - DNA, 25 bp, Homo sapien
taactagatgcaagtcatgtgacct

SEQ ID NO: 3373801 - DNA, 25 bp, Homo sapien
ccaaagttgcaaggcagtgtacctg

SEQ ID NO: 3373802 - DNA, 25 bp, Homo sapien
catgatcacacgtggcactcgctgt

SEQ ID NO: 3373803 - DNA, 25 bp, Homo sapien
cactcgctgtgattctgtgatggca

SEQ ID NO: 3373804 - DNA, 25 bp, Homo sapien
tctaggggtctgtgctaacaattta

SEQ ID NO: 3373805 - DNA, 25 bp, Homo sapien
ttgcgtacggcaagaaataacttac

SEQ ID NO: 3373806 - DNA, 25 bp, Homo sapien
tttaaattgcgtacggcaagaaata

SEQ ID NO: 3373807 - DNA, 25 bp, Homo sapien
aacaatttaaattgcgtacggcaag

SEQ ID NO: 3373808 - DNA, 25 bp, Homo sapien
gcttctgtaaaccacaataattggg

SEQ ID NO: 3373809 - DNA, 25 bp, Homo sapien
aacctgcacttgactaaatctggaa

SEQ ID NO: 3373810 - DNA, 25 bp, Homo sapien
cgtagggcatcacactagacactgg

SEQ ID NO: 3373811 - DNA, 25 bp, Homo sapien
gggctacattaaagtctcaagtcac

SEQ ID NO: 3373812 - DNA, 25 bp, Homo sapien
caggaccatgcaccatccagatttg

SEQ ID NO: 3373813 - DNA, 25 bp, Homo sapien
caaagatttggtttatgtgcaatag

SEQ ID NO: 3373814 - DNA, 25 bp, Homo sapien
tatcctgtaaataagtagccaacat

SEQ ID NO: 3373815 - DNA, 25 bp, Homo sapien
caaacaagctcttaatatgggaatt

SEQ ID NO: 3373816 - DNA, 25 bp, Homo sapien
ggggttgtcctcctatgtcccagat

SEQ ID NO: 3373817 - DNA, 25 bp, Homo sapien
atcggggttgtcctcctatgtccca

SEQ ID NO: 3373818 - DNA, 25 bp, Homo sapien
tcgaaatcggggttgtcctcctatg

SEQ ID NO: 3373819 - DNA, 25 bp, Homo sapien
gaaatcggggttgtcctcctatgtc

SEQ ID NO: 3373820 - DNA, 25 bp, Homo sapien
acaatagcattgactcctctgcaat

SEQ ID NO: 3373821 - DNA, 25 bp, Homo sapien
tagcattgactcctctgcaataccg

SEQ ID NO: 3373822 - DNA, 25 bp, Homo sapien
aatagcattgactcctctgcaatac

SEQ ID NO: 3373823 - DNA, 25 bp, Homo sapien
gcattgactcctctgcaataccgct

SEQ ID NO: 3373824 - DNA, 25 bp, Homo sapien
gtaactgtggtttatctagaagatt

SEQ ID NO: 3373825 - DNA, 25 bp, Homo sapien
ttgtaactgtggtttatctagaaga

SEQ ID NO: 3373826 - DNA, 25 bp, Homo sapien
gtggtttatctagaagattatgtag

SEQ ID NO: 3373827 - DNA, 25 bp, Homo sapien
aactgtggtttatctagaagattat

SEQ ID NO: 3373828 - DNA, 25 bp, Homo sapien
gtttctcatccaaggcattaggaag

SEQ ID NO: 3373829 - DNA, 25 bp, Homo sapien
atttctctatcctgaatagcagaca

SEQ ID NO: 3373830 - DNA, 25 bp, Homo sapien
ctctatcctgaatagcagacagatt

SEQ ID NO: 3373831 - DNA, 25 bp, Homo sapien
tctctatcctgaatagcagacagat

SEQ ID NO: 3373832 - DNA, 25 bp, Homo sapien
ttctctatcctgaatagcagacaga

SEQ ID NO: 3373833 - DNA, 25 bp, Homo sapien
ggaagcccaaaattagccagaacga

SEQ ID NO: 3373834 - DNA, 25 bp, Homo sapien
gatcagcctcaaatagcgaaagaag

SEQ ID NO: 3373835 - DNA, 25 bp, Homo sapien
ccacaagtgcttgaggagtctgttc

SEQ ID NO: 3373836 - DNA, 25 bp, Homo sapien
tatccgctgttactaaggctgagac

SEQ ID NO: 3373837 - DNA, 25 bp, Homo sapien
gggacaacagtgcacaatacgagca

SEQ ID NO: 3373838 - DNA, 25 bp, Homo sapien
cacaatacgagcaaagccacactca

SEQ ID NO: 3373839 - DNA, 25 bp, Homo sapien
caacagtgcacaatacgagcaaagc

SEQ ID NO: 3373840 - DNA, 25 bp, Homo sapien
cagtgcacaatacgagcaaagccac

SEQ ID NO: 3373841 - DNA, 25 bp, Homo sapien
aaactaaacatcaaacagagacaat

SEQ ID NO: 3373842 - DNA, 25 bp, Homo sapien
aagatagaggggaaaagtgaagaca

SEQ ID NO: 3373843 - DNA, 25 bp, Homo sapien
taaaaaactaaacatcaaacagaga

SEQ ID NO: 3373844 - DNA, 25 bp, Homo sapien
tagaggggaaaagtgaagacattaa

SEQ ID NO: 3373845 - DNA, 25 bp, Homo sapien
gaatgctgaataagccactgaagtg

SEQ ID NO: 3373846 - DNA, 25 bp, Homo sapien
ttgaatgctgaataagccactgaag

SEQ ID NO: 3373847 - DNA, 25 bp, Homo sapien
tgaatgctgaataagccactgaagt

SEQ ID NO: 3373848 - DNA, 25 bp, Homo sapien
ttcagaggaacggacaataattcta

SEQ ID NO: 3373849 - DNA, 25 bp, Homo sapien
gattatagccaagaaggactggaag

SEQ ID NO: 3373850 - DNA, 25 bp, Homo sapien
tctaggattatagccaagaaggact

SEQ ID NO: 3373851 - DNA, 25 bp, Homo sapien
ggaacggacaataattctaggatta

SEQ ID NO: 3373852 - DNA, 25 bp, Homo sapien
tgccatctggtgatagagttctcag

SEQ ID NO: 3373853 - DNA, 25 bp, Homo sapien
caacattgatctggtgcctccgctc

SEQ ID NO: 3373854 - DNA, 25 bp, Homo sapien
tgtgtgtggcactagaaacttcatg

SEQ ID NO: 3373855 - DNA, 25 bp, Homo sapien
catgagtcattcacgcctaaaggtt

SEQ ID NO: 3373856 - DNA, 25 bp, Homo sapien
gcaggcaggtctagagttgtcacaa

SEQ ID NO: 3373857 - DNA, 25 bp, Homo sapien
tcaggagttaagagtgtcatgcagc

SEQ ID NO: 3373858 - DNA, 25 bp, Homo sapien
tcaagatgtctaatggcaccagtca

SEQ ID NO: 3373859 - DNA, 25 bp, Homo sapien
tcccaccagggtagtatgcaacatg

SEQ ID NO: 3373860 - DNA, 25 bp, Homo sapien
cacagaccccattctttgagggctg

SEQ ID NO: 3373861 - DNA, 25 bp, Homo sapien
tgacaaatggtctatagaccctcct

SEQ ID NO: 3373862 - DNA, 25 bp, Homo sapien
tctgatttctgacaaatggtctata

SEQ ID NO: 3373863 - DNA, 25 bp, Homo sapien
ttctattttaactagcccacagacc

SEQ ID NO: 3373864 - DNA, 25 bp, Homo sapien
cactgctatgcacagttgagggcat

SEQ ID NO: 3373865 - DNA, 25 bp, Homo sapien
gcagcaggctgcatacttatagagc

SEQ ID NO: 3373866 - DNA, 25 bp, Homo sapien
tagagtaaagcatttggccaactgg

SEQ ID NO: 3373867 - DNA, 25 bp, Homo sapien
aactggatgttacagcatgatgccc

SEQ ID NO: 3373868 - DNA, 25 bp, Homo sapien
tgtaactactttggtctgctaggac

SEQ ID NO: 3373869 - DNA, 25 bp, Homo sapien
gctaggacctagtgcagaaactcag

SEQ ID NO: 3373870 - DNA, 25 bp, Homo sapien
tttaacgttagcacaagtcgccagg

SEQ ID NO: 3373871 - DNA, 25 bp, Homo sapien
tacttacagatctaactggcgttta

SEQ ID NO: 3373872 - DNA, 25 bp, Homo sapien
cgtagctctgccctaagagtgacct

SEQ ID NO: 3373873 - DNA, 25 bp, Homo sapien
tatataaagtacttacaaccgtgct

SEQ ID NO: 3373874 - DNA, 25 bp, Homo sapien
aagtcaggtgttcaaatcgtagctc

SEQ ID NO: 3373875 - DNA, 25 bp, Homo sapien
tagtgagacctattaatacttttca

SEQ ID NO: 3373876 - DNA, 25 bp, Homo sapien
cccagaccgcctggccttgggtgga

SEQ ID NO: 3373877 - DNA, 25 bp, Homo sapien
cggaaaaagccactctaggtctagg

SEQ ID NO: 3373878 - DNA, 25 bp, Homo sapien
ggcgccgcgggcattattttaaagc

SEQ ID NO: 3373879 - DNA, 25 bp, Homo sapien
cggcagagctaggaccggaaaaagc

SEQ ID NO: 3373880 - DNA, 25 bp, Homo sapien
caatactccatggaggccaagccgg

SEQ ID NO: 3373881 - DNA, 25 bp, Homo sapien
cagcccgaagacgagccacaatact

SEQ ID NO: 3373882 - DNA, 25 bp, Homo sapien
tcctcagacgctggaagccgaagct

SEQ ID NO: 3373883 - DNA, 25 bp, Homo sapien
agcggaaagcgctggtagaagccca

SEQ ID NO: 3373884 - DNA, 25 bp, Homo sapien
gagccttgcgcgggctctgcgctgc

SEQ ID NO: 3373885 - DNA, 25 bp, Homo sapien
gccgcggagccttgcgcgggctctg

SEQ ID NO: 3373886 - DNA, 25 bp, Homo sapien
gccttgcgcgggctctgcgctgccc

SEQ ID NO: 3373887 - DNA, 25 bp, Homo sapien
cggagccttgcgcgggctctgcgct

SEQ ID NO: 3373888 - DNA, 25 bp, Homo sapien
aggcgccgctgtagcgcttctcgta

SEQ ID NO: 3373889 - DNA, 25 bp, Homo sapien
ctgcggagggaaggcgccgctgtag

SEQ ID NO: 3373890 - DNA, 25 bp, Homo sapien
gaaggcgccgctgtagcgcttctcg

SEQ ID NO: 3373891 - DNA, 25 bp, Homo sapien
gggaaggcgccgctgtagcgcttct

SEQ ID NO: 3373892 - DNA, 25 bp, Homo sapien
tgccaggtcgcgcatctgggcacgc

SEQ ID NO: 3373893 - DNA, 25 bp, Homo sapien
catgtagttgtcgtagccaaagacg

SEQ ID NO: 3373894 - DNA, 25 bp, Homo sapien
aaggcgtgagccatgtagttgtcgt

SEQ ID NO: 3373895 - DNA, 25 bp, Homo sapien
gtagccaaagacgaacatgccccgt

SEQ ID NO: 3373896 - DNA, 25 bp, Homo sapien
ttagagtttatgctcatccggagga

SEQ ID NO: 3373897 - DNA, 25 bp, Homo sapien
agtttatgctcatccggaggaaggg

SEQ ID NO: 3373898 - DNA, 25 bp, Homo sapien
ctcacgcgtaagacactgagctgga

SEQ ID NO: 3373899 - DNA, 25 bp, Homo sapien
ctggacctcagtatcctcacgcgta

SEQ ID NO: 3373900 - DNA, 25 bp, Homo sapien
gcaagaaaaactcatcggtttccta

SEQ ID NO: 3373901 - DNA, 25 bp, Homo sapien
tttgaatttagcttgggatgtcccc

SEQ ID NO: 3373902 - DNA, 25 bp, Homo sapien
tgcttcggtagaaatcatgctctca

SEQ ID NO: 3373903 - DNA, 25 bp, Homo sapien
tataaacgctatggttaagcaagaa

SEQ ID NO: 3373904 - DNA, 25 bp, Homo sapien
taccaagagcactagtggaaaagca

SEQ ID NO: 3373905 - DNA, 25 bp, Homo sapien
tgagcaggaataaaggcacttattg

SEQ ID NO: 3373906 - DNA, 25 bp, Homo sapien
tctcccttcttgtaataccaagagc

SEQ ID NO: 3373907 - DNA, 25 bp, Homo sapien
ttattggaagtgctctctcccttct

SEQ ID NO: 3373908 - DNA, 25 bp, Homo sapien
caaaagaaaaatgcttgaggggttg

SEQ ID NO: 3373909 - DNA, 25 bp, Homo sapien
aacaggaggactacagtcaataata

SEQ ID NO: 3373910 - DNA, 25 bp, Homo sapien
tgcttgaggggttggatacccaatt

SEQ ID NO: 3373911 - DNA, 25 bp, Homo sapien
gggttggatacccaattttccatga

SEQ ID NO: 3373912 - DNA, 25 bp, Homo sapien
acagcacctctcgtgttgtgatggc

SEQ ID NO: 3373913 - DNA, 25 bp, Homo sapien
tggtctctgaaaggcctgtgcctca

SEQ ID NO: 3373914 - DNA, 25 bp, Homo sapien
tgtggtctctgaaaggcctgtgcct

SEQ ID NO: 3373915 - DNA, 25 bp, Homo sapien
tctcgtgttgtgatggcttgctgtg

SEQ ID NO: 3373916 - DNA, 25 bp, Homo sapien
agacaataaaagtaaacacccatca

SEQ ID NO: 3373917 - DNA, 25 bp, Homo sapien
aagtaaacacccatcagaaactata

SEQ ID NO: 3373918 - DNA, 25 bp, Homo sapien
agactttatttcaaaagagaagaca

SEQ ID NO: 3373919 - DNA, 25 bp, Homo sapien
caataaaagtaaacacccatcagaa

SEQ ID NO: 3373920 - DNA, 25 bp, Homo sapien
aatgcatcaacaagagtcaatgagt

SEQ ID NO: 3373921 - DNA, 25 bp, Homo sapien
gagtcaatgagtagttccctagtac

SEQ ID NO: 3373922 - DNA, 25 bp, Homo sapien
tgcaagtgtatccaatgcatcaaca

SEQ ID NO: 3373923 - DNA, 25 bp, Homo sapien
caatgagtagttccctagtacatca

SEQ ID NO: 3373924 - DNA, 25 bp, Homo sapien
cagtaatgccagcacccacgttggc

SEQ ID NO: 3373925 - DNA, 25 bp, Homo sapien
aatgccagcacccacgttggcagct

SEQ ID NO: 3373926 - DNA, 25 bp, Homo sapien
gtaatgccagcacccacgttggcag

SEQ ID NO: 3373927 - DNA, 25 bp, Homo sapien
ccagcacccacgttggcagctcagg

SEQ ID NO: 3373928 - DNA, 25 bp, Homo sapien
cctcaaagacttggacggtggaatc

SEQ ID NO: 3373929 - DNA, 25 bp, Homo sapien
gacggtggaatctttgtcaaatgaa

SEQ ID NO: 3373930 - DNA, 25 bp, Homo sapien
gctttctggaactcggatgaatttc

SEQ ID NO: 3373931 - DNA, 25 bp, Homo sapien
acttgacggctttctggaactcgga

SEQ ID NO: 3373932 - DNA, 25 bp, Homo sapien
ctgtgagcagaaaggaggcttccca

SEQ ID NO: 3373933 - DNA, 25 bp, Homo sapien
agcagaaaggaggcttcccaggacc

SEQ ID NO: 3373934 - DNA, 25 bp, Homo sapien
tgagcagaaaggaggcttcccagga

SEQ ID NO: 3373935 - DNA, 25 bp, Homo sapien
tgtgagcagaaaggaggcttcccag

SEQ ID NO: 3373936 - DNA, 25 bp, Homo sapien
gatatggaatccctgtcttggtgtt

SEQ ID NO: 3373937 - DNA, 25 bp, Homo sapien
ccaaagggctgcttggagtcagtta

SEQ ID NO: 3373938 - DNA, 25 bp, Homo sapien
catagtccttaattgtcatgtcacc

SEQ ID NO: 3373939 - DNA, 25 bp, Homo sapien
ccgaggatatggaatccctgtcttg

SEQ ID NO: 3373940 - DNA, 25 bp, Homo sapien
aaagggctttcactgctcgtctggc

SEQ ID NO: 3373941 - DNA, 25 bp, Homo sapien
tcccgctgtgcatgtctcattattg

SEQ ID NO: 3373942 - DNA, 25 bp, Homo sapien
cattgctccggaggttccaaagggc

SEQ ID NO: 3373943 - DNA, 25 bp, Homo sapien
ccaggagtcgactcagaatcccaaa

SEQ ID NO: 3373944 - DNA, 25 bp, Homo sapien
caagaggtattcatagaaggagtcc

SEQ ID NO: 3373945 - DNA, 25 bp, Homo sapien
tttcaagaggtattcatagaaggag

SEQ ID NO: 3373946 - DNA, 25 bp, Homo sapien
tcttcttaagtagttctgaatactc

SEQ ID NO: 3373947 - DNA, 25 bp, Homo sapien
ttctccaaagagaatgtaagatttc

SEQ ID NO: 3373948 - DNA, 25 bp, Homo sapien
agagagtcaatccaggtgttcatca

SEQ ID NO: 3373949 - DNA, 25 bp, Homo sapien
tgcagagagtcaatccaggtgttca

SEQ ID NO: 3373950 - DNA, 25 bp, Homo sapien
ctgcccactgaacatgttcacgttg

SEQ ID NO: 3373951 - DNA, 25 bp, Homo sapien
gacatagagtggagggtctccttct

SEQ ID NO: 3373952 - DNA, 25 bp, Homo sapien
cagtgggtagaagagaacgtcaggg

SEQ ID NO: 3373953 - DNA, 25 bp, Homo sapien
tcagggagggcaccatatcgtttcc

SEQ ID NO: 3373954 - DNA, 25 bp, Homo sapien
ccatatggcatagtagaaggcatga

SEQ ID NO: 3373955 - DNA, 25 bp, Homo sapien
tgcagctgccagttatatctctcag

SEQ ID NO: 3373956 - DNA, 25 bp, Homo sapien
ttttaggcatgaggactactaccag

SEQ ID NO: 3373957 - DNA, 25 bp, Homo sapien
gtttctaaaactcaggccctgcttg

SEQ ID NO: 3373958 - DNA, 25 bp, Homo sapien
gccagtttcttggtgagttaaccac

SEQ ID NO: 3373959 - DNA, 25 bp, Homo sapien
gggcatctgttaccggcctactgaa

SEQ ID NO: 3373960 - DNA, 25 bp, Homo sapien
ttttgtgtacttttccagactctgc

SEQ ID NO: 3373961 - DNA, 25 bp, Homo sapien
tgcagaatatccattcctacatgga

SEQ ID NO: 3373962 - DNA, 25 bp, Homo sapien
ttcctacatggaggtagaagggatt

SEQ ID NO: 3373963 - DNA, 25 bp, Homo sapien
tccagactctgcagaatatccattc

SEQ ID NO: 3373964 - DNA, 25 bp, Homo sapien
aaagtggctgacagaaaaaggtagg

SEQ ID NO: 3373965 - DNA, 25 bp, Homo sapien
gtggctgacagaaaaaggtaggaac

SEQ ID NO: 3373966 - DNA, 25 bp, Homo sapien
tggctgacagaaaaaggtaggaact

SEQ ID NO: 3373967 - DNA, 25 bp, Homo sapien
agtggctgacagaaaaaggtaggaa

SEQ ID NO: 3373968 - DNA, 25 bp, Homo sapien
tgagaaagaagctctccatccggtc

SEQ ID NO: 3373969 - DNA, 25 bp, Homo sapien
gtgatgcagcgtggcgtacccacac

SEQ ID NO: 3373970 - DNA, 25 bp, Homo sapien
tctgtggacttgtcaatgacgtgat

SEQ ID NO: 3373971 - DNA, 25 bp, Homo sapien
caatgacgtgatgcagcgtggcgta

SEQ ID NO: 3373972 - DNA, 25 bp, Homo sapien
gatggaagactatgcgaatgcttgc

SEQ ID NO: 3373973 - DNA, 25 bp, Homo sapien
taatatcctttggttctgacagcgt

SEQ ID NO: 3373974 - DNA, 25 bp, Homo sapien
tagccagtaagtacctgtcagatgg

SEQ ID NO: 3373975 - DNA, 25 bp, Homo sapien
tgtccagcacatagctttagccagt

SEQ ID NO: 3373976 - DNA, 25 bp, Homo sapien
gaggtttcggcctgtgcacagactt

SEQ ID NO: 3373977 - DNA, 25 bp, Homo sapien
tgacttttaactcatgaggtttcgg

SEQ ID NO: 3373978 - DNA, 25 bp, Homo sapien
tccacagatacaatgtgtccctctg

SEQ ID NO: 3373979 - DNA, 25 bp, Homo sapien
ttccatggcaattcccgaagatgct

SEQ ID NO: 3373980 - DNA, 25 bp, Homo sapien
tcctctcatcaggtacacgattgca

SEQ ID NO: 3373981 - DNA, 25 bp, Homo sapien
ctcctctcatcaggtacacgattgc

SEQ ID NO: 3373982 - DNA, 25 bp, Homo sapien
tctgtcgcatgtagatgctctttaa

SEQ ID NO: 3373983 - DNA, 25 bp, Homo sapien
tcaatctgtcgcatgtagatgctct

SEQ ID NO: 3373984 - DNA, 25 bp, Homo sapien
catctggtcaatctgtcgcatgtag

SEQ ID NO: 3373985 - DNA, 25 bp, Homo sapien
cgcatgtagatgctctttaagggca

SEQ ID NO: 3373986 - DNA, 25 bp, Homo sapien
gaagtgtgcaaggattaaccagacg

SEQ ID NO: 3373987 - DNA, 25 bp, Homo sapien
tggttcaagatgaggcctcacagag

SEQ ID NO: 3373988 - DNA, 25 bp, Homo sapien
aaccagacgtggtgaggtgttgcac

SEQ ID NO: 3373989 - DNA, 25 bp, Homo sapien
ttggtcgttaaggtctggttcaaga

SEQ ID NO: 3373990 - DNA, 25 bp, Homo sapien
aatactccagtatagcaggtgccag

SEQ ID NO: 3373991 - DNA, 25 bp, Homo sapien
tcctgaaaccatagcagtagctgcg

SEQ ID NO: 3373992 - DNA, 25 bp, Homo sapien
catgtggctaaacaggcctcctgaa

SEQ ID NO: 3373993 - DNA, 25 bp, Homo sapien
tagggataccaaatgaaccatgggc

SEQ ID NO: 3373994 - DNA, 25 bp, Homo sapien
gccagactaagagtcaaccctgctg

SEQ ID NO: 3373995 - DNA, 25 bp, Homo sapien
ttttactagaatgcgtttccaccca

SEQ ID NO: 3373996 - DNA, 25 bp, Homo sapien
catggaagccagactaagagtcaac

SEQ ID NO: 3373997 - DNA, 25 bp, Homo sapien
ttccacccatgacgcttcatggaag

SEQ ID NO: 3373998 - DNA, 25 bp, Homo sapien
tgctcgagtgacaggcaaagtgcct

SEQ ID NO: 3373999 - DNA, 25 bp, Homo sapien
cagaagctggtttttcacaatggcc

SEQ ID NO: 3374000 - DNA, 25 bp, Homo sapien
gagccgccgcaaaggatgaagtcca

SEQ ID NO: 3374001 - DNA, 25 bp, Homo sapien
tgagtaagttccagcacaagcgctg

SEQ ID NO: 3374002 - DNA, 25 bp, Homo sapien
tggtctcaaatactgctagtgggat

SEQ ID NO: 3374003 - DNA, 25 bp, Homo sapien
caaaccaaggtttactccactggca

SEQ ID NO: 3374004 - DNA, 25 bp, Homo sapien
tatagtgtatagcaagtccaagtgt

SEQ ID NO: 3374005 - DNA, 25 bp, Homo sapien
tcaaaaagtctatagccaatgtcct

SEQ ID NO: 3374006 - DNA, 25 bp, Homo sapien
tctttacataactagcagaaactat

SEQ ID NO: 3374007 - DNA, 25 bp, Homo sapien
caaaaacagatgcatagacctgtgg

SEQ ID NO: 3374008 - DNA, 25 bp, Homo sapien
acatgttaccctgttactacagggc

SEQ ID NO: 3374009 - DNA, 25 bp, Homo sapien
acagggctacagtaattgaaacagc

SEQ ID NO: 3374010 - DNA, 25 bp, Homo sapien
agtttccatgggcattctagtgcta

SEQ ID NO: 3374011 - DNA, 25 bp, Homo sapien
cattctagtgctagcacggagcctg

SEQ ID NO: 3374012 - DNA, 25 bp, Homo sapien
agacttagccttctgccagcctgtg

SEQ ID NO: 3374013 - DNA, 25 bp, Homo sapien
cagacttagccttctgccagcctgt

SEQ ID NO: 3374014 - DNA, 25 bp, Homo sapien
tacatcacgtcttctggaaaaatca

SEQ ID NO: 3374015 - DNA, 25 bp, Homo sapien
tggtggtggcaatagcaatgccagt

SEQ ID NO: 3374016 - DNA, 25 bp, Homo sapien
ggcaatagcaatgccagtcaccaaa

SEQ ID NO: 3374017 - DNA, 25 bp, Homo sapien
tagcaatgccagtcaccaaagaagg

SEQ ID NO: 3374018 - DNA, 25 bp, Homo sapien
catctgggccatcctcagacctaga

SEQ ID NO: 3374019 - DNA, 25 bp, Homo sapien
atctgggccatcctcagacctagac

SEQ ID NO: 3374020 - DNA, 25 bp, Homo sapien
tagagaagaatccagagtcagaggt

SEQ ID NO: 3374021 - DNA, 25 bp, Homo sapien
catattctcttctcttgtgtggcgg

SEQ ID NO: 3374022 - DNA, 25 bp, Homo sapien
agagcctataccattcccaagtggg

SEQ ID NO: 3374023 - DNA, 25 bp, Homo sapien
gcccatgcatagactaagaagctct

SEQ ID NO: 3374024 - DNA, 25 bp, Homo sapien
tttctgctccataggggcccactgt

SEQ ID NO: 3374025 - DNA, 25 bp, Homo sapien
ctcagtactagaggcaactggcttc

SEQ ID NO: 3374026 - DNA, 25 bp, Homo sapien
cttctttctgctccataggggccca

SEQ ID NO: 3374027 - DNA, 25 bp, Homo sapien
gcttttctcagtactagaggcaact

SEQ ID NO: 3374028 - DNA, 25 bp, Homo sapien
agttctccaaggatgcttctatttt

SEQ ID NO: 3374029 - DNA, 25 bp, Homo sapien
gaatgaggcaaagggatctctttgg

SEQ ID NO: 3374030 - DNA, 25 bp, Homo sapien
tatttttagaagcacagattcggct

SEQ ID NO: 3374031 - DNA, 25 bp, Homo sapien
ccctttcttgattgcttccacagga

SEQ ID NO: 3374032 - DNA, 25 bp, Homo sapien
cagccgttggaagatagcacaggga

SEQ ID NO: 3374033 - DNA, 25 bp, Homo sapien
cctgttatgtccattgcctttaaat

SEQ ID NO: 3374034 - DNA, 25 bp, Homo sapien
gcctgccagccgttggaagatagca

SEQ ID NO: 3374035 - DNA, 25 bp, Homo sapien
gtcagcctgccagccgttggaagat

SEQ ID NO: 3374036 - DNA, 25 bp, Homo sapien
tagaagtgcatgaggaagtctgaat

SEQ ID NO: 3374037 - DNA, 25 bp, Homo sapien
agtgcatgaggaagtctgaatttga

SEQ ID NO: 3374038 - DNA, 25 bp, Homo sapien
tacagtagaagtgcatgaggaagtc

SEQ ID NO: 3374039 - DNA, 25 bp, Homo sapien
cagtagaagtgcatgaggaagtctg

SEQ ID NO: 3374040 - DNA, 25 bp, Homo sapien
ggacagaccatgagaagcaggagta

SEQ ID NO: 3374041 - DNA, 25 bp, Homo sapien
tggacagaccatgagaagcaggagt

SEQ ID NO: 3374042 - DNA, 25 bp, Homo sapien
gactatggcttcgttgtaaacagga

SEQ ID NO: 3374043 - DNA, 25 bp, Homo sapien
tttggtcaatgttctcgggagggac

SEQ ID NO: 3374044 - DNA, 25 bp, Homo sapien
cgggagggacatcaaagactatggc

SEQ ID NO: 3374045 - DNA, 25 bp, Homo sapien
catcagcgagactttcacataggga

SEQ ID NO: 3374046 - DNA, 25 bp, Homo sapien
tgtgaaaatggcccacaatagtttt

SEQ ID NO: 3374047 - DNA, 25 bp, Homo sapien
ccagtgtgcaatgggcttccgagga

SEQ ID NO: 3374048 - DNA, 25 bp, Homo sapien
atgccagtgtgcaatgggcttccga

SEQ ID NO: 3374049 - DNA, 25 bp, Homo sapien
tctcagcctcgttgcctacttgaca

SEQ ID NO: 3374050 - DNA, 25 bp, Homo sapien
cacacgccgatgatctcattgtgac

SEQ ID NO: 3374051 - DNA, 25 bp, Homo sapien
gaacaatatgcacagttccagccaa

SEQ ID NO: 3374052 - DNA, 25 bp, Homo sapien
cagccaatgccacgaggtagccttt

SEQ ID NO: 3374053 - DNA, 25 bp, Homo sapien
gatgatgaagtctgatgcccaaaga

SEQ ID NO: 3374054 - DNA, 25 bp, Homo sapien
tatgctgagactatagcccacagtt

SEQ ID NO: 3374055 - DNA, 25 bp, Homo sapien
gggccctttcaaggctgagccaggt

SEQ ID NO: 3374056 - DNA, 25 bp, Homo sapien
gagagtgcagcaagtatgcagagaa

SEQ ID NO: 3374057 - DNA, 25 bp, Homo sapien
agccaggttggaagagggcagagct

SEQ ID NO: 3374058 - DNA, 25 bp, Homo sapien
tgcttccaggacaccagagagtgca

SEQ ID NO: 3374059 - DNA, 25 bp, Homo sapien
tggacagctgcaagtccatacgtgt

SEQ ID NO: 3374060 - DNA, 25 bp, Homo sapien
agtccatacgtgttctggtgagtct

SEQ ID NO: 3374061 - DNA, 25 bp, Homo sapien
gtgagtcttcaggttgtacgggaac

SEQ ID NO: 3374062 - DNA, 25 bp, Homo sapien
tcttcaggttgtacgggaacagagg

SEQ ID NO: 3374063 - DNA, 25 bp, Homo sapien
cctcagggaatatgttctggcagca

SEQ ID NO: 3374064 - DNA, 25 bp, Homo sapien
cattgaagaaaagtcggtcacgacc

SEQ ID NO: 3374065 - DNA, 25 bp, Homo sapien
cactaggacccatcaaaaagggagc

SEQ ID NO: 3374066 - DNA, 25 bp, Homo sapien
cagcattgttctacatcctggtgcc

SEQ ID NO: 3374067 - DNA, 25 bp, Homo sapien
cgtcagccagcgaaagcccatgaga

SEQ ID NO: 3374068 - DNA, 25 bp, Homo sapien
cagcgaaagcccatgagaaagagag

SEQ ID NO: 3374069 - DNA, 25 bp, Homo sapien
aaggatggttggaagtgtaggagga

SEQ ID NO: 3374070 - DNA, 25 bp, Homo sapien
cagggtaccagcagtgcagcaaggt

SEQ ID NO: 3374071 - DNA, 25 bp, Homo sapien
ggtgtgtgctgctaccccgttccgc

SEQ ID NO: 3374072 - DNA, 25 bp, Homo sapien
ttccttggaacaggaggtgtgtgct

SEQ ID NO: 3374073 - DNA, 25 bp, Homo sapien
gttccgccttgaggcgagccgcagc

SEQ ID NO: 3374074 - DNA, 25 bp, Homo sapien
tgctaaagcggcacactcacagcag

SEQ ID NO: 3374075 - DNA, 25 bp, Homo sapien
ttagggattggtatcctgccctgtg

SEQ ID NO: 3374076 - DNA, 25 bp, Homo sapien
ctggacttagggattggtatcctgc

SEQ ID NO: 3374077 - DNA, 25 bp, Homo sapien
gacttagggattggtatcctgccct

SEQ ID NO: 3374078 - DNA, 25 bp, Homo sapien
tagggattggtatcctgccctgtgg

SEQ ID NO: 3374079 - DNA, 25 bp, Homo sapien
gccaatggccaagtcatagcacagc

SEQ ID NO: 3374080 - DNA, 25 bp, Homo sapien
tgccaatggccaagtcatagcacag

SEQ ID NO: 3374081 - DNA, 25 bp, Homo sapien
atggccaagtcatagcacagctccc

SEQ ID NO: 3374082 - DNA, 25 bp, Homo sapien
ttgccaatggccaagtcatagcaca

SEQ ID NO: 3374083 - DNA, 25 bp, Homo sapien
gagtcttgagctaagccatttaggc

SEQ ID NO: 3374084 - DNA, 25 bp, Homo sapien
ttaatgtgcaccaaacaagtgccag

SEQ ID NO: 3374085 - DNA, 25 bp, Homo sapien
gatactaagcccataagtaggacac

SEQ ID NO: 3374086 - DNA, 25 bp, Homo sapien
taggctgaagaggaatccctctgga

SEQ ID NO: 3374087 - DNA, 25 bp, Homo sapien
taagatctttgtgagatggttgtcc

SEQ ID NO: 3374088 - DNA, 25 bp, Homo sapien
ttaagatctttgtgagatggttgtc

SEQ ID NO: 3374089 - DNA, 25 bp, Homo sapien
atttggtcactgaaatcgtctggat

SEQ ID NO: 3374090 - DNA, 25 bp, Homo sapien
tcactgaaatcgtctggatgttgct

SEQ ID NO: 3374091 - DNA, 25 bp, Homo sapien
ttacagctgagcatttggtcactga

SEQ ID NO: 3374092 - DNA, 25 bp, Homo sapien
ggttacagctgagcatttggtcact

SEQ ID NO: 3374093 - DNA, 25 bp, Homo sapien
gcatgagagacatgcttccctgcag

SEQ ID NO: 3374094 - DNA, 25 bp, Homo sapien
cagggcagatgctatgtcctcatca

SEQ ID NO: 3374095 - DNA, 25 bp, Homo sapien
catagtccgatcttggttcttggca

SEQ ID NO: 3374096 - DNA, 25 bp, Homo sapien
tggaataacgatttccagggcagat

SEQ ID NO: 3374097 - DNA, 25 bp, Homo sapien
gactctgggctgttgcatatggaaa

SEQ ID NO: 3374098 - DNA, 25 bp, Homo sapien
tatgtccaactcactggctgggagg

SEQ ID NO: 3374099 - DNA, 25 bp, Homo sapien
catgtgtgaattgagatctgctgcc

SEQ ID NO: 3374100 - DNA, 25 bp, Homo sapien
ggtactctctaccacgtgcatggga

SEQ ID NO: 3374101 - DNA, 25 bp, Homo sapien
ggcttgactctgtcttagatgatcc

SEQ ID NO: 3374102 - DNA, 25 bp, Homo sapien
aaagcaacacctctatagctgcgga

SEQ ID NO: 3374103 - DNA, 25 bp, Homo sapien
tccacggtgattgccaaaggatact

SEQ ID NO: 3374104 - DNA, 25 bp, Homo sapien
tccttcctctttggtcccgagagag

SEQ ID NO: 3374105 - DNA, 25 bp, Homo sapien
aatggtcatccagctttcacagagt

SEQ ID NO: 3374106 - DNA, 25 bp, Homo sapien
gctgggagaccctaatgacagaggc

SEQ ID NO: 3374107 - DNA, 25 bp, Homo sapien
gcattagcctatggatgagctggga

SEQ ID NO: 3374108 - DNA, 25 bp, Homo sapien
cactagctgttgtgaaagtttggca

SEQ ID NO: 3374109 - DNA, 25 bp, Homo sapien
atccagaggtatggaaggtgtggct

SEQ ID NO: 3374110 - DNA, 25 bp, Homo sapien
tagtgaatccagaggtatggaaggt

SEQ ID NO: 3374111 - DNA, 25 bp, Homo sapien
tgtcatgttgcttgatggtcacctg

SEQ ID NO: 3374112 - DNA, 25 bp, Homo sapien
gatgtcatgttgcttgatggtcacc

SEQ ID NO: 3374113 - DNA, 25 bp, Homo sapien
aaaacagcgttttgcacagcagaga

SEQ ID NO: 3374114 - DNA, 25 bp, Homo sapien
gtttgccagctagtgatcaagtcca

SEQ ID NO: 3374115 - DNA, 25 bp, Homo sapien
tattccacccgatacgtgagctcag

SEQ ID NO: 3374116 - DNA, 25 bp, Homo sapien
gtctcaagggctccggtggtgctct

SEQ ID NO: 3374117 - DNA, 25 bp, Homo sapien
aaagcgctggtagatgtaatgcacc

SEQ ID NO: 3374118 - DNA, 25 bp, Homo sapien
ctccaagactcgaaagcgctggtag

SEQ ID NO: 3374119 - DNA, 25 bp, Homo sapien
gactcgaaagcgctggtagatgtaa

SEQ ID NO: 3374120 - DNA, 25 bp, Homo sapien
ctgggtcctgggtacactgcggcgg

SEQ ID NO: 3374121 - DNA, 25 bp, Homo sapien
gagggatcctgactgagcatcattc

SEQ ID NO: 3374122 - DNA, 25 bp, Homo sapien
gatcctgactgagcatcattctggc

SEQ ID NO: 3374123 - DNA, 25 bp, Homo sapien
atgcagagggatcctgactgagcat

SEQ ID NO: 3374124 - DNA, 25 bp, Homo sapien
ctgactgagcatcattctggcactt

SEQ ID NO: 3374125 - DNA, 25 bp, Homo sapien
gagaactcttggaattcttgaatgt

SEQ ID NO: 3374126 - DNA, 25 bp, Homo sapien
aattcttgaatgtatgccctcgttg

SEQ ID NO: 3374127 - DNA, 25 bp, Homo sapien
tatgccctcgttgcttgggtacatt

SEQ ID NO: 3374128 - DNA, 25 bp, Homo sapien
tattttttgagaactcttggaattc

SEQ ID NO: 3374129 - DNA, 25 bp, Homo sapien
tgattcgatgcactcgtcagcctct

SEQ ID NO: 3374130 - DNA, 25 bp, Homo sapien
tatgtagtcaatctcccgttgggca

SEQ ID NO: 3374131 - DNA, 25 bp, Homo sapien
cagcctctcgaaggtattgtatgta

SEQ ID NO: 3374132 - DNA, 25 bp, Homo sapien
gccagtgtcttgtcctctgattcga

SEQ ID NO: 3374133 - DNA, 25 bp, Homo sapien
tggacacctgttctctgtatagctt

SEQ ID NO: 3374134 - DNA, 25 bp, Homo sapien
tgagcataatagtccctagaagggc

SEQ ID NO: 3374135 - DNA, 25 bp, Homo sapien
tagaagggctaggaaaagatgcagt

SEQ ID NO: 3374136 - DNA, 25 bp, Homo sapien
attactctatgatgctccctgactg

SEQ ID NO: 3374137 - DNA, 25 bp, Homo sapien
tcaccatctatggaggctttaggca

SEQ ID NO: 3374138 - DNA, 25 bp, Homo sapien
ggcactatagccttcaccatctatg

SEQ ID NO: 3374139 - DNA, 25 bp, Homo sapien
ctctttgggctgacttttggcacta

SEQ ID NO: 3374140 - DNA, 25 bp, Homo sapien
cttttggcactatagccttcaccat

SEQ ID NO: 3374141 - DNA, 25 bp, Homo sapien
tctgatggatcacaagattagacca

SEQ ID NO: 3374142 - DNA, 25 bp, Homo sapien
gcagatgctatctacagcctgggta

SEQ ID NO: 3374143 - DNA, 25 bp, Homo sapien
ggatgtagaatccaccaaactgcta

SEQ ID NO: 3374144 - DNA, 25 bp, Homo sapien
catccctgagggttggctgttgcca

SEQ ID NO: 3374145 - DNA, 25 bp, Homo sapien
ggagctggcttggtgttatcctcca

SEQ ID NO: 3374146 - DNA, 25 bp, Homo sapien
aatgcccgtatgtttgcaaattccc

SEQ ID NO: 3374147 - DNA, 25 bp, Homo sapien
tccctgccaggaaagtgttaggatt

SEQ ID NO: 3374148 - DNA, 25 bp, Homo sapien
tggagagttatagacagcatctttc

SEQ ID NO: 3374149 - DNA, 25 bp, Homo sapien
gaaccaaatggctatgggtgcctgg

SEQ ID NO: 3374150 - DNA, 25 bp, Homo sapien
tgctggtaaaccaatgctcggccta

SEQ ID NO: 3374151 - DNA, 25 bp, Homo sapien
agtgtgcccggctcaatctttgtga

SEQ ID NO: 3374152 - DNA, 25 bp, Homo sapien
tagtgcccagtggatcatagatgca

SEQ ID NO: 3374153 - DNA, 25 bp, Homo sapien
tgtcctgtagaacagctgccaaagc

SEQ ID NO: 3374154 - DNA, 25 bp, Homo sapien
taccaagcttagtggaaggacaggg

SEQ ID NO: 3374155 - DNA, 25 bp, Homo sapien
gaaaggaggcatacgtatttccact

SEQ ID NO: 3374156 - DNA, 25 bp, Homo sapien
cagaatgtggtcatccttgagagcc

SEQ ID NO: 3374157 - DNA, 25 bp, Homo sapien
tttttaggctgaaacgatgaacgca

SEQ ID NO: 3374158 - DNA, 25 bp, Homo sapien
cctaaactctagaatgacagctgta

SEQ ID NO: 3374159 - DNA, 25 bp, Homo sapien
tacgtatttgatgcttccttgggca

SEQ ID NO: 3374160 - DNA, 25 bp, Homo sapien
gtcttgtgcagacatgaaaactggc

SEQ ID NO: 3374161 - DNA, 25 bp, Homo sapien
tgaattggacaaacacgtgggaaac

SEQ ID NO: 3374162 - DNA, 25 bp, Homo sapien
cagaggcttcagcacgtgacacaga

SEQ ID NO: 3374163 - DNA, 25 bp, Homo sapien
gaagcccctgtcaagaggcatgctg

SEQ ID NO: 3374164 - DNA, 25 bp, Homo sapien
cagggcctcagtgtgttgggaatca

SEQ ID NO: 3374165 - DNA, 25 bp, Homo sapien
ggacctgcggaaggctcttcccgga

SEQ ID NO: 3374166 - DNA, 25 bp, Homo sapien
ccaccttcaaacatgagagcccaga

SEQ ID NO: 3374167 - DNA, 25 bp, Homo sapien
ctctcgggcaccgaagaagcctgct

SEQ ID NO: 3374168 - DNA, 25 bp, Homo sapien
gcccagaagcgagcgacgggccact

SEQ ID NO: 3374169 - DNA, 25 bp, Homo sapien
cggggccgaggctcctctccgggcg

SEQ ID NO: 3374170 - DNA, 25 bp, Homo sapien
gccgaggctcctctccgggcggctc

SEQ ID NO: 3374171 - DNA, 25 bp, Homo sapien
tgggtacggggccgaggctcctctc

SEQ ID NO: 3374172 - DNA, 25 bp, Homo sapien
ctgggtacggggccgaggctcctct

SEQ ID NO: 3374173 - DNA, 25 bp, Homo sapien
acaactctagcactgcctgtactca

SEQ ID NO: 3374174 - DNA, 25 bp, Homo sapien
agcctgtaaacccatcccgccacct

SEQ ID NO: 3374175 - DNA, 25 bp, Homo sapien
ttctcagccgcaatcttctcagctg

SEQ ID NO: 3374176 - DNA, 25 bp, Homo sapien
cacttcttttcctacactgtcctct

SEQ ID NO: 3374177 - DNA, 25 bp, Homo sapien
tacaggtgctaaggccaaggaaggt

SEQ ID NO: 3374178 - DNA, 25 bp, Homo sapien
tgcagggagggagaaccagataaac

SEQ ID NO: 3374179 - DNA, 25 bp, Homo sapien
tactgtggcctatgaagcaggtttc

SEQ ID NO: 3374180 - DNA, 25 bp, Homo sapien
tcagaagcaggcattcagcctcggg

SEQ ID NO: 3374181 - DNA, 25 bp, Homo sapien
gccatacacgctgtggagaacaggg

SEQ ID NO: 3374182 - DNA, 25 bp, Homo sapien
ggttctgaggctctccgccagtttt

SEQ ID NO: 3374183 - DNA, 25 bp, Homo sapien
tacacatgtgccgaatggccataca

SEQ ID NO: 3374184 - DNA, 25 bp, Homo sapien
acactcaagcatggtgcagcagagg

SEQ ID NO: 3374185 - DNA, 25 bp, Homo sapien
cctgcctggcctcctcctcttctta

SEQ ID NO: 3374186 - DNA, 25 bp, Homo sapien
gactccttttgcctgcctggcctcc

SEQ ID NO: 3374187 - DNA, 25 bp, Homo sapien
tgcctgcctggcctcctcctcttct

SEQ ID NO: 3374188 - DNA, 25 bp, Homo sapien
tttgcctgcctggcctcctcctctt

SEQ ID NO: 3374189 - DNA, 25 bp, Homo sapien
agcttccagcgcatgactagcatca

SEQ ID NO: 3374190 - DNA, 25 bp, Homo sapien
atgatcccgtccatttgctccaggg

SEQ ID NO: 3374191 - DNA, 25 bp, Homo sapien
gcgcatgactagcatcagaagccat

SEQ ID NO: 3374192 - DNA, 25 bp, Homo sapien
gcaatgatcccgtccatttgctcca

SEQ ID NO: 3374193 - DNA, 25 bp, Homo sapien
gggaagccagtccaggctcacaagt

SEQ ID NO: 3374194 - DNA, 25 bp, Homo sapien
tcactaagatctgcacctgttttag

SEQ ID NO: 3374195 - DNA, 25 bp, Homo sapien
cctcgatgagatggagcaccgggaa

SEQ ID NO: 3374196 - DNA, 25 bp, Homo sapien
cattcctttatgtaggcagctgttg

SEQ ID NO: 3374197 - DNA, 25 bp, Homo sapien
ggctggaattccaagtacttgaggg

SEQ ID NO: 3374198 - DNA, 25 bp, Homo sapien
gctggaattccaagtacttgaggga

SEQ ID NO: 3374199 - DNA, 25 bp, Homo sapien
ccaagtacttgagggaatggctgaa

SEQ ID NO: 3374200 - DNA, 25 bp, Homo sapien
aattccaagtacttgagggaatggc

SEQ ID NO: 3374201 - DNA, 25 bp, Homo sapien
gccagcagctggcataaggggagga

SEQ ID NO: 3374202 - DNA, 25 bp, Homo sapien
ctagccagcagctggcataagggga

SEQ ID NO: 3374203 - DNA, 25 bp, Homo sapien
gcagctggcataaggggaggagtaa

SEQ ID NO: 3374204 - DNA, 25 bp, Homo sapien
ctggcataaggggaggagtaaattc

SEQ ID NO: 3374205 - DNA, 25 bp, Homo sapien
tacacggtgggaactgtggttacac

SEQ ID NO: 3374206 - DNA, 25 bp, Homo sapien
tcctggaactcccagtctgaagagc

SEQ ID NO: 3374207 - DNA, 25 bp, Homo sapien
ttcaatgtccaccagggccagaagc

SEQ ID NO: 3374208 - DNA, 25 bp, Homo sapien
ggccccgagctctgctgtggcaaag

SEQ ID NO: 3374209 - DNA, 25 bp, Homo sapien
gagccctgcggagaaatcaaatgtc

SEQ ID NO: 3374210 - DNA, 25 bp, Homo sapien
tagatgccttggtggaaaaagccct

SEQ ID NO: 3374211 - DNA, 25 bp, Homo sapien
tctcagtgataataccggagcctgc

SEQ ID NO: 3374212 - DNA, 25 bp, Homo sapien
cattttccaggcgagtgacgggctg

SEQ ID NO: 3374213 - DNA, 25 bp, Homo sapien
cctcttcagccacgagaaatgcttg

SEQ ID NO: 3374214 - DNA, 25 bp, Homo sapien
cttcagccacgagaaatgcttgtaa

SEQ ID NO: 3374215 - DNA, 25 bp, Homo sapien
aatgcttgtaaacatcaatgtcccc

SEQ ID NO: 3374216 - DNA, 25 bp, Homo sapien
atgcttgtaaacatcaatgtcccca

SEQ ID NO: 3374217 - DNA, 25 bp, Homo sapien
gacaatcccaggcacatgttggctg

SEQ ID NO: 3374218 - DNA, 25 bp, Homo sapien
agaagggccttcttacattgcatca

SEQ ID NO: 3374219 - DNA, 25 bp, Homo sapien
cagagttacagtatctgccccaggg

SEQ ID NO: 3374220 - DNA, 25 bp, Homo sapien
caggagccagcataccctgggtctt

SEQ ID NO: 3374221 - DNA, 25 bp, Homo sapien
gcagttctgtagcactccccaactg

SEQ ID NO: 3374222 - DNA, 25 bp, Homo sapien
actccccaactggcatgacccagga

SEQ ID NO: 3374223 - DNA, 25 bp, Homo sapien
cactccccaactggcatgacccagg

SEQ ID NO: 3374224 - DNA, 25 bp, Homo sapien
cagttctgtagcactccccaactgg

SEQ ID NO: 3374225 - DNA, 25 bp, Homo sapien
tcaggggatatgtcaggtccaaaaa

SEQ ID NO: 3374226 - DNA, 25 bp, Homo sapien
gatcagccaaattgttccccttgtt

SEQ ID NO: 3374227 - DNA, 25 bp, Homo sapien
gaattgtggcgaaccctagatcagc

SEQ ID NO: 3374228 - DNA, 25 bp, Homo sapien
attttagggatgagatttttcaggg

SEQ ID NO: 3374229 - DNA, 25 bp, Homo sapien
taagtcagcgatagagcagttgccc

SEQ ID NO: 3374230 - DNA, 25 bp, Homo sapien
tgaaaagtcttgtccatgttcctga

SEQ ID NO: 3374231 - DNA, 25 bp, Homo sapien
tagtggaattgcaaatagaaggctt

SEQ ID NO: 3374232 - DNA, 25 bp, Homo sapien
cttggatggatagtggatccctgca

SEQ ID NO: 3374233 - DNA, 25 bp, Homo sapien
gtccacatggacacggagccaccta

SEQ ID NO: 3374234 - DNA, 25 bp, Homo sapien
tggtgatttccagtggacagagaat

SEQ ID NO: 3374235 - DNA, 25 bp, Homo sapien
catggacacggagccacctagcact

SEQ ID NO: 3374236 - DNA, 25 bp, Homo sapien
gaattaaacaggacccaggtgtcca

SEQ ID NO: 3374237 - DNA, 25 bp, Homo sapien
tgcaatatgagggactccttatccc

SEQ ID NO: 3374238 - DNA, 25 bp, Homo sapien
cgtgccaagcgttcctggtaggttt

SEQ ID NO: 3374239 - DNA, 25 bp, Homo sapien
tatccccttctagacgtgccaagcg

SEQ ID NO: 3374240 - DNA, 25 bp, Homo sapien
ggtttcattactagcagcactgtgg

SEQ ID NO: 3374241 - DNA, 25 bp, Homo sapien
tggactcctgctccttattcctctt

SEQ ID NO: 3374242 - DNA, 25 bp, Homo sapien
gggtcacgtttactgctcttgatag

SEQ ID NO: 3374243 - DNA, 25 bp, Homo sapien
tgatagactcaagagtaaaacaccc

SEQ ID NO: 3374244 - DNA, 25 bp, Homo sapien
ggagtctcggccactgctctgatga

SEQ ID NO: 3374245 - DNA, 25 bp, Homo sapien
ctgttgaagcatctcttcagcagca

SEQ ID NO: 3374246 - DNA, 25 bp, Homo sapien
gaagcatctcttcagcagcattgag

SEQ ID NO: 3374247 - DNA, 25 bp, Homo sapien
agcattgagtttcacctggtgtcct

SEQ ID NO: 3374248 - DNA, 25 bp, Homo sapien
caggtctcgaatcttttctccctgg

SEQ ID NO: 3374249 - DNA, 25 bp, Homo sapien
agcacatgagctgcttcggcaccca

SEQ ID NO: 3374250 - DNA, 25 bp, Homo sapien
aatctgtctaaccagctcagcaggt

SEQ ID NO: 3374251 - DNA, 25 bp, Homo sapien
gactttctaaaactccagatggcac

SEQ ID NO: 3374252 - DNA, 25 bp, Homo sapien
tataaacaccgtacaactgagcagc

SEQ ID NO: 3374253 - DNA, 25 bp, Homo sapien
taggtgatagtaaagatgacaatac

SEQ ID NO: 3374254 - DNA, 25 bp, Homo sapien
caattctgatacttttactaagaaa

SEQ ID NO: 3374255 - DNA, 25 bp, Homo sapien
gatagtaaagatgacaatacagcaa

SEQ ID NO: 3374256 - DNA, 25 bp, Homo sapien
tattataggtgatagtaaagatgac

SEQ ID NO: 3374257 - DNA, 25 bp, Homo sapien
acctccgtctctcgggttccagcga

SEQ ID NO: 3374258 - DNA, 25 bp, Homo sapien
ggtatgtaccaccacacctgtctaa

SEQ ID NO: 3374259 - DNA, 25 bp, Homo sapien
acaggtatgtaccaccacacctgtc

SEQ ID NO: 3374260 - DNA, 25 bp, Homo sapien
aacctccgtctctcgggttccagcg

SEQ ID NO: 3374261 - DNA, 25 bp, Homo sapien
tactttgccctgtagtctggattcc

SEQ ID NO: 3374262 - DNA, 25 bp, Homo sapien
tagtcaactcgagtttgaggccagg

SEQ ID NO: 3374263 - DNA, 25 bp, Homo sapien
ccaggtcttgcagggaagtctcttt

SEQ ID NO: 3374264 - DNA, 25 bp, Homo sapien
cccagggtgttaccgaccaatgaca

SEQ ID NO: 3374265 - DNA, 25 bp, Homo sapien
tgctcccaattgtttgaaggttccc

SEQ ID NO: 3374266 - DNA, 25 bp, Homo sapien
ggcaaaggcttcacaggcatcattc

SEQ ID NO: 3374267 - DNA, 25 bp, Homo sapien
tcatggtggaatcctgctggagtca

SEQ ID NO: 3374268 - DNA, 25 bp, Homo sapien
gtcatgcagctaccgcagtatatgg

SEQ ID NO: 3374269 - DNA, 25 bp, Homo sapien
catacaacttgataaaccttacggt

SEQ ID NO: 3374270 - DNA, 25 bp, Homo sapien
agtctcctgactcttcatacattcc

SEQ ID NO: 3374271 - DNA, 25 bp, Homo sapien
tacggtaacttcctggtcaaccagc

SEQ ID NO: 3374272 - DNA, 25 bp, Homo sapien
catacattcccatacaacttgataa

SEQ ID NO: 3374273 - DNA, 25 bp, Homo sapien
taggcgcactccgtctcctcaatag

SEQ ID NO: 3374274 - DNA, 25 bp, Homo sapien
cagcttctcagtagcacagtcacca

SEQ ID NO: 3374275 - DNA, 25 bp, Homo sapien
ggatctcacgtgtatccagaatgtg

SEQ ID NO: 3374276 - DNA, 25 bp, Homo sapien
tggccacaatcttctgacctttcat

SEQ ID NO: 3374277 - DNA, 25 bp, Homo sapien
tctgggtctcaagagatgtgcggct

SEQ ID NO: 3374278 - DNA, 25 bp, Homo sapien
gcttctgggtctcaagagatgtgcg

SEQ ID NO: 3374279 - DNA, 25 bp, Homo sapien
catcagatcgagcttctgggtctca

SEQ ID NO: 3374280 - DNA, 25 bp, Homo sapien
ctcaagagatgtgcggcttagcagc

SEQ ID NO: 3374281 - DNA, 25 bp, Homo sapien
tgagcttaggacagtacacactcac

SEQ ID NO: 3374282 - DNA, 25 bp, Homo sapien
ccaggtctgagcttaggacagtaca

SEQ ID NO: 3374283 - DNA, 25 bp, Homo sapien
gggagttgaccagatggcctaaatt

SEQ ID NO: 3374284 - DNA, 25 bp, Homo sapien
attcacattatgacagccttcccag

SEQ ID NO: 3374285 - DNA, 25 bp, Homo sapien
ctaaggttaaaacaggctgcctgct

SEQ ID NO: 3374286 - DNA, 25 bp, Homo sapien
ggcatgctccataagacccatcagg

SEQ ID NO: 3374287 - DNA, 25 bp, Homo sapien
aaaagagtctggcatgttccagcca

SEQ ID NO: 3374288 - DNA, 25 bp, Homo sapien
tctctaagagaaggcctgcacatgg

SEQ ID NO: 3374289 - DNA, 25 bp, Homo sapien
tcatgggaatataacctctatgttc

SEQ ID NO: 3374290 - DNA, 25 bp, Homo sapien
gggaatataacctctatgttctaga

SEQ ID NO: 3374291 - DNA, 25 bp, Homo sapien
tgctcatgggaatataacctctatg

SEQ ID NO: 3374292 - DNA, 25 bp, Homo sapien
aatataacctctatgttctagagag

SEQ ID NO: 3374293 - DNA, 25 bp, Homo sapien
catcatgatgtctaggtggcattta

SEQ ID NO: 3374294 - DNA, 25 bp, Homo sapien
tgtcctgtgttttaacctcagctca

SEQ ID NO: 3374295 - DNA, 25 bp, Homo sapien
ccattctgggttccacatcatgatg

SEQ ID NO: 3374296 - DNA, 25 bp, Homo sapien
gacccttttgtagctctgttccatt

SEQ ID NO: 3374297 - DNA, 25 bp, Homo sapien
agtaacaggcgctcttgaatctgcc

SEQ ID NO: 3374298 - DNA, 25 bp, Homo sapien
tcagggtggtccctactgagtaaca

SEQ ID NO: 3374299 - DNA, 25 bp, Homo sapien
cagctgcagcctacacatctgctcc

SEQ ID NO: 3374300 - DNA, 25 bp, Homo sapien
tggtccctactgagtaacaggcgct

SEQ ID NO: 3374301 - DNA, 25 bp, Homo sapien
ctcccaacaggcacagtcctggctg

SEQ ID NO: 3374302 - DNA, 25 bp, Homo sapien
atgctctgatatacttaagtgtggt

SEQ ID NO: 3374303 - DNA, 25 bp, Homo sapien
catgctctgatatacttaagtgtgg

SEQ ID NO: 3374304 - DNA, 25 bp, Homo sapien
gcatgctctgatatacttaagtgtg

SEQ ID NO: 3374305 - DNA, 25 bp, Homo sapien
ctgagaaggggaatcatgaggcttc

SEQ ID NO: 3374306 - DNA, 25 bp, Homo sapien
ggcacaaatgccccatcactcggag

SEQ ID NO: 3374307 - DNA, 25 bp, Homo sapien
gagaaggggaatcatgaggcttcct

SEQ ID NO: 3374308 - DNA, 25 bp, Homo sapien
atcactcggagcacctggtgcacct

SEQ ID NO: 3374309 - DNA, 25 bp, Homo sapien
gaggcctccttcgaggcatagggtt

SEQ ID NO: 3374310 - DNA, 25 bp, Homo sapien
cctccttcgaggcatagggttatct

SEQ ID NO: 3374311 - DNA, 25 bp, Homo sapien
tccttcgaggcatagggttatctct

SEQ ID NO: 3374312 - DNA, 25 bp, Homo sapien
ggcctccttcgaggcatagggttat

SEQ ID NO: 3374313 - DNA, 25 bp, Homo sapien
ggtgcctgagctcttgcagtaactc

SEQ ID NO: 3374314 - DNA, 25 bp, Homo sapien
tttagcttccattcatactgattcc

SEQ ID NO: 3374315 - DNA, 25 bp, Homo sapien
cactttgattttgaggtgcctgagc

SEQ ID NO: 3374316 - DNA, 25 bp, Homo sapien
gcttccattcatactgattcctttc

SEQ ID NO: 3374317 - DNA, 25 bp, Homo sapien
gctgtgcagacgctcaatttctgca

SEQ ID NO: 3374318 - DNA, 25 bp, Homo sapien
ttcagggccacctgttcttgcagct

SEQ ID NO: 3374319 - DNA, 25 bp, Homo sapien
ctttcagggccacctgttcttgcag

SEQ ID NO: 3374320 - DNA, 25 bp, Homo sapien
ctggctgtgcagacgctcaatttct

SEQ ID NO: 3374321 - DNA, 25 bp, Homo sapien
gcagcaaatgacccaaggaccagct

SEQ ID NO: 3374322 - DNA, 25 bp, Homo sapien
cttcggcagcaaatgacccaaggac

SEQ ID NO: 3374323 - DNA, 25 bp, Homo sapien
ggcagcaaatgacccaaggaccagc

SEQ ID NO: 3374324 - DNA, 25 bp, Homo sapien
tcggcagcaaatgacccaaggacca

SEQ ID NO: 3374325 - DNA, 25 bp, Homo sapien
catccccattttcagacgttgaatt

SEQ ID NO: 3374326 - DNA, 25 bp, Homo sapien
cattttcagacgttgaatttcttgg

SEQ ID NO: 3374327 - DNA, 25 bp, Homo sapien
agcaaagtttccatccccattttca

SEQ ID NO: 3374328 - DNA, 25 bp, Homo sapien
cagcaaagtttccatccccattttc

SEQ ID NO: 3374329 - DNA, 25 bp, Homo sapien
ccgtaagctcctctatccgacggtc

SEQ ID NO: 3374330 - DNA, 25 bp, Homo sapien
tttaacagccccgtaagctcctcta

SEQ ID NO: 3374331 - DNA, 25 bp, Homo sapien
caatctcctttaccttccggtactg

SEQ ID NO: 3374332 - DNA, 25 bp, Homo sapien
atcacaatctcctttaccttccggt

SEQ ID NO: 3374333 - DNA, 25 bp, Homo sapien
cttcagggtccttatttgtagcgtt

SEQ ID NO: 3374334 - DNA, 25 bp, Homo sapien
cttcattgattgagagagttctctc

SEQ ID NO: 3374335 - DNA, 25 bp, Homo sapien
attgagagagttctctccgaaggcc

SEQ ID NO: 3374336 - DNA, 25 bp, Homo sapien
tatttgtagcgttccacttgctgaa

SEQ ID NO: 3374337 - DNA, 25 bp, Homo sapien
ggtaggcttatcagtccatctgggc

SEQ ID NO: 3374338 - DNA, 25 bp, Homo sapien
tttcattcagcgagccactgcagac

SEQ ID NO: 3374339 - DNA, 25 bp, Homo sapien
catatcccagtagtacagtcctgag

SEQ ID NO: 3374340 - DNA, 25 bp, Homo sapien
taggttagccagagccaaattttgt

SEQ ID NO: 3374341 - DNA, 25 bp, Homo sapien
tggccccactgtaggagagctacat

SEQ ID NO: 3374342 - DNA, 25 bp, Homo sapien
taggagagctacatcttggaggcat

SEQ ID NO: 3374343 - DNA, 25 bp, Homo sapien
gccccactgtaggagagctacatct

SEQ ID NO: 3374344 - DNA, 25 bp, Homo sapien
cactgtaggagagctacatcttgga

SEQ ID NO: 3374345 - DNA, 25 bp, Homo sapien
aggaggtacatgttatcactcatgc

SEQ ID NO: 3374346 - DNA, 25 bp, Homo sapien
gaggtacatgttatcactcatgcag

SEQ ID NO: 3374347 - DNA, 25 bp, Homo sapien
gaaggaggtacatgttatcactcat

SEQ ID NO: 3374348 - DNA, 25 bp, Homo sapien
agaaggaggtacatgttatcactca

SEQ ID NO: 3374349 - DNA, 25 bp, Homo sapien
agtcttctagactacaagagagctt

SEQ ID NO: 3374350 - DNA, 25 bp, Homo sapien
tcttctagactacaagagagctttt

SEQ ID NO: 3374351 - DNA, 25 bp, Homo sapien
gtcttctagactacaagagagcttt

SEQ ID NO: 3374352 - DNA, 25 bp, Homo sapien
aagtcttctagactacaagagagct

SEQ ID NO: 3374353 - DNA, 25 bp, Homo sapien
tctaatgaccaagctcaagagcctg

SEQ ID NO: 3374354 - DNA, 25 bp, Homo sapien
tgctaggcccaaaaaagtaactcag

SEQ ID NO: 3374355 - DNA, 25 bp, Homo sapien
tatatcccagtactatgctaggccc

SEQ ID NO: 3374356 - DNA, 25 bp, Homo sapien
gaagggtctctatcagggcaggctc

SEQ ID NO: 3374357 - DNA, 25 bp, Homo sapien
gggaagggctggttcccatccatac

SEQ ID NO: 3374358 - DNA, 25 bp, Homo sapien
ccgggaagggctggttcccatccat

SEQ ID NO: 3374359 - DNA, 25 bp, Homo sapien
ggaagggctggttcccatccataca

SEQ ID NO: 3374360 - DNA, 25 bp, Homo sapien
cgggaagggctggttcccatccata

SEQ ID NO: 3374361 - DNA, 25 bp, Homo sapien
catgagggacttaaattccagagct

SEQ ID NO: 3374362 - DNA, 25 bp, Homo sapien
gatgactgtggagcggttctgcacc

SEQ ID NO: 3374363 - DNA, 25 bp, Homo sapien
gcaagggccagacactacagttagg

SEQ ID NO: 3374364 - DNA, 25 bp, Homo sapien
caagagccagtttaagcaagggcca

SEQ ID NO: 3374365 - DNA, 25 bp, Homo sapien
ggcagcctctccattgggcgtggct

SEQ ID NO: 3374366 - DNA, 25 bp, Homo sapien
tttgtgctccgccaagaaagggctg

SEQ ID NO: 3374367 - DNA, 25 bp, Homo sapien
cttcccaggtaaagtgggatatttg

SEQ ID NO: 3374368 - DNA, 25 bp, Homo sapien
ggcgtggctcctgaaagcttcccag

SEQ ID NO: 3374369 - DNA, 25 bp, Homo sapien
tacgggggcactgacactccggcca

SEQ ID NO: 3374370 - DNA, 25 bp, Homo sapien
ctaatacgggggcactgacactccg

SEQ ID NO: 3374371 - DNA, 25 bp, Homo sapien
aatacgggggcactgacactccggc

SEQ ID NO: 3374372 - DNA, 25 bp, Homo sapien
ggggcactgacactccggccacgat

SEQ ID NO: 3374373 - DNA, 25 bp, Homo sapien
cccgatgatgtggatgagaggtcat

SEQ ID NO: 3374374 - DNA, 25 bp, Homo sapien
ttgaccacagcagtgtcgtcccagc

SEQ ID NO: 3374375 - DNA, 25 bp, Homo sapien
ttgggattccgtttaccatctggtg

SEQ ID NO: 3374376 - DNA, 25 bp, Homo sapien
ggacctgattcagtgcccgatgatg

SEQ ID NO: 3374377 - DNA, 25 bp, Homo sapien
cttttgcaaggccatgcaggccagc

SEQ ID NO: 3374378 - DNA, 25 bp, Homo sapien
agggactctcggcagcactgcttct

SEQ ID NO: 3374379 - DNA, 25 bp, Homo sapien
tcagaaagcctacagtcactgtgct

SEQ ID NO: 3374380 - DNA, 25 bp, Homo sapien
ggagaagaatccatggagacggtca

SEQ ID NO: 3374381 - DNA, 25 bp, Homo sapien
ctagagagtcttggccctgcggttg

SEQ ID NO: 3374382 - DNA, 25 bp, Homo sapien
gaaatttcctgactgagttcttcgg

SEQ ID NO: 3374383 - DNA, 25 bp, Homo sapien
cagcgtgtcagtgtagaaatttcct

SEQ ID NO: 3374384 - DNA, 25 bp, Homo sapien
ccttggagtccctggtcctagagag

SEQ ID NO: 3374385 - DNA, 25 bp, Homo sapien
caatttctagttaagagtcacaagg

SEQ ID NO: 3374386 - DNA, 25 bp, Homo sapien
tgacccaatgattccccttctagag

SEQ ID NO: 3374387 - DNA, 25 bp, Homo sapien
tgtcagaatacagatagctccctaa

SEQ ID NO: 3374388 - DNA, 25 bp, Homo sapien
taaccatgctctcctactctaggga

SEQ ID NO: 3374389 - DNA, 25 bp, Homo sapien
gggtccctgaagcttaagcatcttt

SEQ ID NO: 3374390 - DNA, 25 bp, Homo sapien
gctccatacaaaggagggtccctga

SEQ ID NO: 3374391 - DNA, 25 bp, Homo sapien
tgatgaatctgactcaccatgcgtg

SEQ ID NO: 3374392 - DNA, 25 bp, Homo sapien
acacctggccctgttaacactatga

SEQ ID NO: 3374393 - DNA, 25 bp, Homo sapien
catattcctgttagtgggagagcct

SEQ ID NO: 3374394 - DNA, 25 bp, Homo sapien
catgggattctgctgaacaaaattc

SEQ ID NO: 3374395 - DNA, 25 bp, Homo sapien
tccactacaacacactcataggagg

SEQ ID NO: 3374396 - DNA, 25 bp, Homo sapien
cataggaggtagaccctagagtttt

SEQ ID NO: 3374397 - DNA, 25 bp, Homo sapien
gctctgtgctccactgggcaaaggg

SEQ ID NO: 3374398 - DNA, 25 bp, Homo sapien
acacgctctgtgctccactgggcaa

SEQ ID NO: 3374399 - DNA, 25 bp, Homo sapien
agatcacatactgagccaggccaaa

SEQ ID NO: 3374400 - DNA, 25 bp, Homo sapien
gcaaagatcacatactgagccaggc

SEQ ID NO: 3374401 - DNA, 25 bp, Homo sapien
cttttccatgtcctgaggggtggct

SEQ ID NO: 3374402 - DNA, 25 bp, Homo sapien
tgtcctgaggggtggctgtcaataa

SEQ ID NO: 3374403 - DNA, 25 bp, Homo sapien
ccatgtcctgaggggtggctgtcaa

SEQ ID NO: 3374404 - DNA, 25 bp, Homo sapien
ttttccatgtcctgaggggtggctg

SEQ ID NO: 3374405 - DNA, 25 bp, Homo sapien
tgtggtctagcagtgcagacttctc

SEQ ID NO: 3374406 - DNA, 25 bp, Homo sapien
ggtctagcagtgcagacttctcctc

SEQ ID NO: 3374407 - DNA, 25 bp, Homo sapien
cccaaatgtggtctagcagtgcaga

SEQ ID NO: 3374408 - DNA, 25 bp, Homo sapien
tgtcacccaaatgtggtctagcagt

SEQ ID NO: 3374409 - DNA, 25 bp, Homo sapien
gagacattcttaatacatatatgcc

SEQ ID NO: 3374410 - DNA, 25 bp, Homo sapien
tgtccttgaggtacccatttaacag

SEQ ID NO: 3374411 - DNA, 25 bp, Homo sapien
ctactcttagttgctgccagagaca

SEQ ID NO: 3374412 - DNA, 25 bp, Homo sapien
acagctgtccttgaggtacccattt

SEQ ID NO: 3374413 - DNA, 25 bp, Homo sapien
cacagttaggtattgcagcattcgt

SEQ ID NO: 3374414 - DNA, 25 bp, Homo sapien
gcagcattcgtctgtcaactctaga

SEQ ID NO: 3374415 - DNA, 25 bp, Homo sapien
gggtaagccaatatcatcaagccac

SEQ ID NO: 3374416 - DNA, 25 bp, Homo sapien
gattcatgaaactggtctttgtact

SEQ ID NO: 3374417 - DNA, 25 bp, Homo sapien
gatgtagttggctggtgacttttaa

SEQ ID NO: 3374418 - DNA, 25 bp, Homo sapien
gtagttggctggtgacttttaagaa

SEQ ID NO: 3374419 - DNA, 25 bp, Homo sapien
agctggccgccggtgcaggcagtgg

SEQ ID NO: 3374420 - DNA, 25 bp, Homo sapien
ctcatcagctggccgccggtgcagg

SEQ ID NO: 3374421 - DNA, 25 bp, Homo sapien
ctggagagatactatttgtggtctc

SEQ ID NO: 3374422 - DNA, 25 bp, Homo sapien
ggagagatactatttgtggtctcac

SEQ ID NO: 3374423 - DNA, 25 bp, Homo sapien
tggagagatactatttgtggtctca

SEQ ID NO: 3374424 - DNA, 25 bp, Homo sapien
cttaataggtcccaccatggtcctc

SEQ ID NO: 3374425 - DNA, 25 bp, Homo sapien
taggcttaataggtcccaccatggt

SEQ ID NO: 3374426 - DNA, 25 bp, Homo sapien
ggcttaataggtcccaccatggtcc

SEQ ID NO: 3374427 - DNA, 25 bp, Homo sapien
agttaggcttaataggtcccaccat

SEQ ID NO: 3374428 - DNA, 25 bp, Homo sapien
ccctcgaagattgggtgcatactct

SEQ ID NO: 3374429 - DNA, 25 bp, Homo sapien
ggtccacagatcgtaaccactccat

SEQ ID NO: 3374430 - DNA, 25 bp, Homo sapien
cactccctcgaagattgggtgcata

SEQ ID NO: 3374431 - DNA, 25 bp, Homo sapien
gattgggtgcatactctgccaggtc

SEQ ID NO: 3374432 - DNA, 25 bp, Homo sapien
tggccaggagcaaatacaaatggct

SEQ ID NO: 3374433 - DNA, 25 bp, Homo sapien
aagtctcatgccaaggaggtgctgc

SEQ ID NO: 3374434 - DNA, 25 bp, Homo sapien
ccttgtaagcgttggtctccatgca

SEQ ID NO: 3374435 - DNA, 25 bp, Homo sapien
tatgcaagacctccagatgaagtac

SEQ ID NO: 3374436 - DNA, 25 bp, Homo sapien
caggtggcgcctgaggagcgtcttt

SEQ ID NO: 3374437 - DNA, 25 bp, Homo sapien
atgttgagaagcatagccagggtgt

SEQ ID NO: 3374438 - DNA, 25 bp, Homo sapien
tccggaccaatcaaggcattgaact

SEQ ID NO: 3374439 - DNA, 25 bp, Homo sapien
gctggtgaggccattttctctcgct

SEQ ID NO: 3374440 - DNA, 25 bp, Homo sapien
tctttgtccaggctgcgcatgctgc

SEQ ID NO: 3374441 - DNA, 25 bp, Homo sapien
cacagcagaagctgaaagatcctct

SEQ ID NO: 3374442 - DNA, 25 bp, Homo sapien
ggctgtgggcatcgcgccaggtgct

SEQ ID NO: 3374443 - DNA, 25 bp, Homo sapien
tgctctggctgtgggcatcgcgcca

SEQ ID NO: 3374444 - DNA, 25 bp, Homo sapien
cctgaggataggtgcttcctgcaca

SEQ ID NO: 3374445 - DNA, 25 bp, Homo sapien
aaggaaagccagactcggagcgctt

SEQ ID NO: 3374446 - DNA, 25 bp, Homo sapien
tccttggactccaaactggtggaga

SEQ ID NO: 3374447 - DNA, 25 bp, Homo sapien
gacgagctctaagccacctgaggat

SEQ ID NO: 3374448 - DNA, 25 bp, Homo sapien
aacacagaaaatgcaagattatgag

SEQ ID NO: 3374449 - DNA, 25 bp, Homo sapien
cacagaaaatgcaagattatgagaa

SEQ ID NO: 3374450 - DNA, 25 bp, Homo sapien
taaaacacagaaaatgcaagattat

SEQ ID NO: 3374451 - DNA, 25 bp, Homo sapien
acagaaaatgcaagattatgagaag

SEQ ID NO: 3374452 - DNA, 25 bp, Homo sapien
tgtttccgaagtgtgaaaatcctag

SEQ ID NO: 3374453 - DNA, 25 bp, Homo sapien
cggtagccactgtagaccctgtgac

SEQ ID NO: 3374454 - DNA, 25 bp, Homo sapien
caaatgtagtccgtcgattcatcga

SEQ ID NO: 3374455 - DNA, 25 bp, Homo sapien
tgacaccgtcactgggctccattgg

SEQ ID NO: 3374456 - DNA, 25 bp, Homo sapien
tctcagggtgcacagagggcaggtg

SEQ ID NO: 3374457 - DNA, 25 bp, Homo sapien
ctctcagggtgcacagagggcaggt

SEQ ID NO: 3374458 - DNA, 25 bp, Homo sapien
gcacagagggcaggtgacaagggca

SEQ ID NO: 3374459 - DNA, 25 bp, Homo sapien
ggtgcacagagggcaggtgacaagg

SEQ ID NO: 3374460 - DNA, 25 bp, Homo sapien
gatgaacatcaagaattactagaca

SEQ ID NO: 3374461 - DNA, 25 bp, Homo sapien
gggtacacaattgctggaatattct

SEQ ID NO: 3374462 - DNA, 25 bp, Homo sapien
tctctgcgagtcatgcacacgtgcg

SEQ ID NO: 3374463 - DNA, 25 bp, Homo sapien
aaagcctggccccttagagatgcag

SEQ ID NO: 3374464 - DNA, 25 bp, Homo sapien
gcatcgaagttcatgtgtttccact

SEQ ID NO: 3374465 - DNA, 25 bp, Homo sapien
cgaagttcatgtgtttccactggtg

SEQ ID NO: 3374466 - DNA, 25 bp, Homo sapien
tcgaagttcatgtgtttccactggt

SEQ ID NO: 3374467 - DNA, 25 bp, Homo sapien
ctgcatcgaagttcatgtgtttcca

SEQ ID NO: 3374468 - DNA, 25 bp, Homo sapien
acgggcctaaggcacttgagctttt

SEQ ID NO: 3374469 - DNA, 25 bp, Homo sapien
tcagccaagactgtggtccacgggc

SEQ ID NO: 3374470 - DNA, 25 bp, Homo sapien
cctcgtgggagtgtccatggtctct

SEQ ID NO: 3374471 - DNA, 25 bp, Homo sapien
gcttttccctcaactgaagtgtagg

SEQ ID NO: 3374472 - DNA, 25 bp, Homo sapien
caacacaattccattgtcactgtgg

SEQ ID NO: 3374473 - DNA, 25 bp, Homo sapien
cacaattccattgtcactgtggcag

SEQ ID NO: 3374474 - DNA, 25 bp, Homo sapien
acacaattccattgtcactgtggca

SEQ ID NO: 3374475 - DNA, 25 bp, Homo sapien
acaattccattgtcactgtggcaga

SEQ ID NO: 3374476 - DNA, 25 bp, Homo sapien
ggcctgtggcaacagaccatgcctg

SEQ ID NO: 3374477 - DNA, 25 bp, Homo sapien
ttaagaagcaaatcttagcatagcc

SEQ ID NO: 3374478 - DNA, 25 bp, Homo sapien
gcatagcctccatctggtacagaat

SEQ ID NO: 3374479 - DNA, 25 bp, Homo sapien
tggcaacagaccatgcctgaggctg

SEQ ID NO: 3374480 - DNA, 25 bp, Homo sapien
ggacaggcaaggagtgggccaggcc

SEQ ID NO: 3374481 - DNA, 25 bp, Homo sapien
gagggacaggcaaggagtgggccag

SEQ ID NO: 3374482 - DNA, 25 bp, Homo sapien
ctggagggacaggcaaggagtgggc

SEQ ID NO: 3374483 - DNA, 25 bp, Homo sapien
ggagggacaggcaaggagtgggcca

SEQ ID NO: 3374484 - DNA, 25 bp, Homo sapien
gcatgcaagtcctgtcgtgctcaag

SEQ ID NO: 3374485 - DNA, 25 bp, Homo sapien
gtcctgtcgtgctcaagcctggctt

SEQ ID NO: 3374486 - DNA, 25 bp, Homo sapien
cacacatggatgcagcttgtgattc

SEQ ID NO: 3374487 - DNA, 25 bp, Homo sapien
agagatggcatgcaagtcctgtcgt

SEQ ID NO: 3374488 - DNA, 25 bp, Homo sapien
gggagaggagccctatctgcgtcac

SEQ ID NO: 3374489 - DNA, 25 bp, Homo sapien
ggagaggagccctatctgcgtcacg

SEQ ID NO: 3374490 - DNA, 25 bp, Homo sapien
aggagccctatctgcgtcacggtac

SEQ ID NO: 3374491 - DNA, 25 bp, Homo sapien
agaggagccctatctgcgtcacggt

SEQ ID NO: 3374492 - DNA, 25 bp, Homo sapien
aaggacacagccgaagggtcagttt

SEQ ID NO: 3374493 - DNA, 25 bp, Homo sapien
gctgcaccggaactagagggcactg

SEQ ID NO: 3374494 - DNA, 25 bp, Homo sapien
aatagagttttggtccaggctgccc

SEQ ID NO: 3374495 - DNA, 25 bp, Homo sapien
tgcggcagctgcaccggaactagag

SEQ ID NO: 3374496 - DNA, 25 bp, Homo sapien
gcaggcaggcgagagtcattcagca

SEQ ID NO: 3374497 - DNA, 25 bp, Homo sapien
caggcgagagtcattcagcagctgg

SEQ ID NO: 3374498 - DNA, 25 bp, Homo sapien
ggcgagagtcattcagcagctggtc

SEQ ID NO: 3374499 - DNA, 25 bp, Homo sapien
ggcaggcgagagtcattcagcagct

SEQ ID NO: 3374500 - DNA, 25 bp, Homo sapien
tgtcaccaggaatatcacgagccat

SEQ ID NO: 3374501 - DNA, 25 bp, Homo sapien
cacaaagtggtctgcagtccacgta

SEQ ID NO: 3374502 - DNA, 25 bp, Homo sapien
tctgtgtgctgatatgtcactgccc

SEQ ID NO: 3374503 - DNA, 25 bp, Homo sapien
aagagcgcagcatggttgaagacac

SEQ ID NO: 3374504 - DNA, 25 bp, Homo sapien
cgaagtccacgctcatcctggtgtg

SEQ ID NO: 3374505 - DNA, 25 bp, Homo sapien
ggttatacccaggacatgattttca

SEQ ID NO: 3374506 - DNA, 25 bp, Homo sapien
gttactgccgacatgatcaaggagc

SEQ ID NO: 3374507 - DNA, 25 bp, Homo sapien
tacagctcaggcttcgttactgccg

SEQ ID NO: 3374508 - DNA, 25 bp, Homo sapien
ccagttaggtttgctgtgctagagc

SEQ ID NO: 3374509 - DNA, 25 bp, Homo sapien
tggagctccgagtgaagccatcctg

SEQ ID NO: 3374510 - DNA, 25 bp, Homo sapien
tagttggaggcggtcactgcagctc

SEQ ID NO: 3374511 - DNA, 25 bp, Homo sapien
cagcgcttggctaaggtccttctag

SEQ ID NO: 3374512 - DNA, 25 bp, Homo sapien
gagagatttcgcctccagctgtaga

SEQ ID NO: 3374513 - DNA, 25 bp, Homo sapien
aaacactggccgatcacctgggaat

SEQ ID NO: 3374514 - DNA, 25 bp, Homo sapien
gcttaaaatggtgcagacagtccct

SEQ ID NO: 3374515 - DNA, 25 bp, Homo sapien
ggaatcagaccagaccagacgagtg

SEQ ID NO: 3374516 - DNA, 25 bp, Homo sapien
tgcctgatacataaatggtgcctgc

SEQ ID NO: 3374517 - DNA, 25 bp, Homo sapien
gggttaatacttgggctcccagctg

SEQ ID NO: 3374518 - DNA, 25 bp, Homo sapien
tactgaaaaatggatggagggagtc

SEQ ID NO: 3374519 - DNA, 25 bp, Homo sapien
cactggttcacctccgtgagtgaga

SEQ ID NO: 3374520 - DNA, 25 bp, Homo sapien
tagttctgtctttagggactgggcc

SEQ ID NO: 3374521 - DNA, 25 bp, Homo sapien
tgtatgaacctttggctgtagccag

SEQ ID NO: 3374522 - DNA, 25 bp, Homo sapien
tagagctacgcaccctagttctgtc

SEQ ID NO: 3374523 - DNA, 25 bp, Homo sapien
actgggcccctcattccggattgtg

SEQ ID NO: 3374524 - DNA, 25 bp, Homo sapien
cagactacaccacaaaaaggtggga

SEQ ID NO: 3374525 - DNA, 25 bp, Homo sapien
tatagaatatctttaagggcttggg

SEQ ID NO: 3374526 - DNA, 25 bp, Homo sapien
taataaccaagcacctgcaggtaaa

SEQ ID NO: 3374527 - DNA, 25 bp, Homo sapien
gaaaggtgctcaaacttattagcag

SEQ ID NO: 3374528 - DNA, 25 bp, Homo sapien
gacccaggtaatgagaatattagcc

SEQ ID NO: 3374529 - DNA, 25 bp, Homo sapien
tgcatattactgcacgatgctgagg

SEQ ID NO: 3374530 - DNA, 25 bp, Homo sapien
agtacaaatgatcgcgtgacccagg

SEQ ID NO: 3374531 - DNA, 25 bp, Homo sapien
gctattccgaacagtgctttgatga

SEQ ID NO: 3374532 - DNA, 25 bp, Homo sapien
tccaatgtcctgtagccctcatggg

SEQ ID NO: 3374533 - DNA, 25 bp, Homo sapien
tcatgggttatctcacgtagttcgg

SEQ ID NO: 3374534 - DNA, 25 bp, Homo sapien
cacgtagttcggtacaagtctgctc

SEQ ID NO: 3374535 - DNA, 25 bp, Homo sapien
tcccataggcggtgtggtttttctc

SEQ ID NO: 3374536 - DNA, 25 bp, Homo sapien
tttggtccaagattctcaagagaga

SEQ ID NO: 3374537 - DNA, 25 bp, Homo sapien
tatcacagggttataggaacacatt

SEQ ID NO: 3374538 - DNA, 25 bp, Homo sapien
gaaggttataacaggtagacctgag

SEQ ID NO: 3374539 - DNA, 25 bp, Homo sapien
ggaacacattaaagtcacagctctg

SEQ ID NO: 3374540 - DNA, 25 bp, Homo sapien
gggagtgaaacttcaccaacttgaa

SEQ ID NO: 3374541 - DNA, 25 bp, Homo sapien
gagtgaaacttcaccaacttgaagg

SEQ ID NO: 3374542 - DNA, 25 bp, Homo sapien
tagggagtgaaacttcaccaacttg

SEQ ID NO: 3374543 - DNA, 25 bp, Homo sapien
agtgaaacttcaccaacttgaagga

SEQ ID NO: 3374544 - DNA, 25 bp, Homo sapien
ctgctttgggcccttttctaccact

SEQ ID NO: 3374545 - DNA, 25 bp, Homo sapien
tcaggtcttttcaaccttattcaca

SEQ ID NO: 3374546 - DNA, 25 bp, Homo sapien
agggaatgggtcatcattagacgct

SEQ ID NO: 3374547 - DNA, 25 bp, Homo sapien
atgggtcatcattagacgctattgc

SEQ ID NO: 3374548 - DNA, 25 bp, Homo sapien
tttcaaccttattcacagggcaagg

SEQ ID NO: 3374549 - DNA, 25 bp, Homo sapien
gcttctggcgaacaagatgccccta

SEQ ID NO: 3374550 - DNA, 25 bp, Homo sapien
gcagcttctggcgaacaagatgccc

SEQ ID NO: 3374551 - DNA, 25 bp, Homo sapien
ttctggcgaacaagatgcccctaac

SEQ ID NO: 3374552 - DNA, 25 bp, Homo sapien
ctggcgaacaagatgcccctaacat

SEQ ID NO: 3374553 - DNA, 25 bp, Homo sapien
tgggcccaaatacctatacctggat

SEQ ID NO: 3374554 - DNA, 25 bp, Homo sapien
taccccaaaagcactgtttatctct

SEQ ID NO: 3374555 - DNA, 25 bp, Homo sapien
tgtatagatgacatagagtgggccc

SEQ ID NO: 3374556 - DNA, 25 bp, Homo sapien
tagagtgggcccaaatacctatacc

SEQ ID NO: 3374557 - DNA, 25 bp, Homo sapien
ccacagaaggaataggctcactgca

SEQ ID NO: 3374558 - DNA, 25 bp, Homo sapien
gaatcaccacaaaaagtagactctg

SEQ ID NO: 3374559 - DNA, 25 bp, Homo sapien
tggtcacatgtagaagagaatcacc

SEQ ID NO: 3374560 - DNA, 25 bp, Homo sapien
aaagtagactctgcaggtctgaaaa

SEQ ID NO: 3374561 - DNA, 25 bp, Homo sapien
aaggttgtggctgagcttgatggcc

SEQ ID NO: 3374562 - DNA, 25 bp, Homo sapien
cataggagtgtgaaggttgtggctg

SEQ ID NO: 3374563 - DNA, 25 bp, Homo sapien
tgtggctgagcttgatggcccccat

SEQ ID NO: 3374564 - DNA, 25 bp, Homo sapien
tgtgaaggttgtggctgagcttgat

SEQ ID NO: 3374565 - DNA, 25 bp, Homo sapien
tagaaagtccaccaacatgcgaggg

SEQ ID NO: 3374566 - DNA, 25 bp, Homo sapien
taattacaagcaagggagaccactg

SEQ ID NO: 3374567 - DNA, 25 bp, Homo sapien
tattgtatatatcatggccgtcagc

SEQ ID NO: 3374568 - DNA, 25 bp, Homo sapien
tagcggtcgtaggacatagcggcca

SEQ ID NO: 3374569 - DNA, 25 bp, Homo sapien
ttatttatcaatgctgtgtaatttt

SEQ ID NO: 3374570 - DNA, 25 bp, Homo sapien
aatgttcaggctctttttttgtctt

SEQ ID NO: 3374571 - DNA, 25 bp, Homo sapien
ctgtgtaatttttttaaatgttcag

SEQ ID NO: 3374572 - DNA, 25 bp, Homo sapien
taaatgttcaggctctttttttgtc

SEQ ID NO: 3374573 - DNA, 25 bp, Homo sapien
gataaattccaccatattagagtta

SEQ ID NO: 3374574 - DNA, 25 bp, Homo sapien
cacatagtatatctgatcaaggatg

SEQ ID NO: 3374575 - DNA, 25 bp, Homo sapien
gttatccagaatcatttaaacaatc

SEQ ID NO: 3374576 - DNA, 25 bp, Homo sapien
gcaatagattcttagttatgacatc

SEQ ID NO: 3374577 - DNA, 25 bp, Homo sapien
gaggagagacgctctgtgttttaga

SEQ ID NO: 3374578 - DNA, 25 bp, Homo sapien
gacgctctgtgttttagagtttcca

SEQ ID NO: 3374579 - DNA, 25 bp, Homo sapien
gagagacgctctgtgttttagagtt

SEQ ID NO: 3374580 - DNA, 25 bp, Homo sapien
gagacgctctgtgttttagagtttc

SEQ ID NO: 3374581 - DNA, 25 bp, Homo sapien
atgctaatatttcccggtatagtaa

SEQ ID NO: 3374582 - DNA, 25 bp, Homo sapien
tacattagcgtgtgaagctgtgggc

SEQ ID NO: 3374583 - DNA, 25 bp, Homo sapien
aatggcacatagcataggattgtct

SEQ ID NO: 3374584 - DNA, 25 bp, Homo sapien
gaactctgtcactgttgtattgttt

SEQ ID NO: 3374585 - DNA, 25 bp, Homo sapien
ctctcttaagaaattgatgagaatg

SEQ ID NO: 3374586 - DNA, 25 bp, Homo sapien
gaatgattggcgtaactgatatgga

SEQ ID NO: 3374587 - DNA, 25 bp, Homo sapien
atcagagccaagctgtgctatacag

SEQ ID NO: 3374588 - DNA, 25 bp, Homo sapien
tgtgacaggaatagtcgttttctct

SEQ ID NO: 3374589 - DNA, 25 bp, Homo sapien
agatagccacatagtgaccagcagg

SEQ ID NO: 3374590 - DNA, 25 bp, Homo sapien
cagatagccacatagtgaccagcag

SEQ ID NO: 3374591 - DNA, 25 bp, Homo sapien
gatagccacatagtgaccagcagga

SEQ ID NO: 3374592 - DNA, 25 bp, Homo sapien
cagcctgtaaaagacgaagcgttca

SEQ ID NO: 3374593 - DNA, 25 bp, Homo sapien
tcagtagagcacaccttcaggatgg

SEQ ID NO: 3374594 - DNA, 25 bp, Homo sapien
ccttgacctgatccgctgaatagct

SEQ ID NO: 3374595 - DNA, 25 bp, Homo sapien
tatttggaccgcagaaggacaggtt

SEQ ID NO: 3374596 - DNA, 25 bp, Homo sapien
tgttcttgccatcaattttctcatg

SEQ ID NO: 3374597 - DNA, 25 bp, Homo sapien
ccaatgtgttcttgccatcaatttt

SEQ ID NO: 3374598 - DNA, 25 bp, Homo sapien
caatgtgttcttgccatcaattttc

SEQ ID NO: 3374599 - DNA, 25 bp, Homo sapien
tgccatcaattttctcatggcctct

SEQ ID NO: 3374600 - DNA, 25 bp, Homo sapien
ccttggccttctttccttttgacat

SEQ ID NO: 3374601 - DNA, 25 bp, Homo sapien
tcatgacagcaggggccagagccac

SEQ ID NO: 3374602 - DNA, 25 bp, Homo sapien
ttcatgacagcaggggccagagcca

SEQ ID NO: 3374603 - DNA, 25 bp, Homo sapien
actttcagccacttaaaaaggatgg

SEQ ID NO: 3374604 - DNA, 25 bp, Homo sapien
ccacttaaaaaggatggctctctgc

SEQ ID NO: 3374605 - DNA, 25 bp, Homo sapien
tcagccacttaaaaaggatggctct

SEQ ID NO: 3374606 - DNA, 25 bp, Homo sapien
gccacttaaaaaggatggctctctg

SEQ ID NO: 3374607 - DNA, 25 bp, Homo sapien
tagacgtccagatccacgtcatctg

SEQ ID NO: 3374608 - DNA, 25 bp, Homo sapien
cctgtggagtagacgtccagatcca

SEQ ID NO: 3374609 - DNA, 25 bp, Homo sapien
gagtagacgtccagatccacgtcat

SEQ ID NO: 3374610 - DNA, 25 bp, Homo sapien
cgtccagatccacgtcatctgcaat

SEQ ID NO: 3374611 - DNA, 25 bp, Homo sapien
caggacattacttccccattgatgg

SEQ ID NO: 3374612 - DNA, 25 bp, Homo sapien
cccaggacattacttccccattgat

SEQ ID NO: 3374613 - DNA, 25 bp, Homo sapien
aggacattacttccccattgatggc

SEQ ID NO: 3374614 - DNA, 25 bp, Homo sapien
ggacattacttccccattgatggca

SEQ ID NO: 3374615 - DNA, 25 bp, Homo sapien
gtccagaaaactcaacagtgtacat

SEQ ID NO: 3374616 - DNA, 25 bp, Homo sapien
tgtccagaaaactcaacagtgtaca

SEQ ID NO: 3374617 - DNA, 25 bp, Homo sapien
tttttatgtccagaaaactcaacag

SEQ ID NO: 3374618 - DNA, 25 bp, Homo sapien
attatttttatgtccagaaaactca

SEQ ID NO: 3374619 - DNA, 25 bp, Homo sapien
tcaattggtcccaacaggaagcagg

SEQ ID NO: 3374620 - DNA, 25 bp, Homo sapien
aattggtcccaacaggaagcaggac

SEQ ID NO: 3374621 - DNA, 25 bp, Homo sapien
caattggtcccaacaggaagcagga

SEQ ID NO: 3374622 - DNA, 25 bp, Homo sapien
gagataaatgacaaggaacaccaca

SEQ ID NO: 3374623 - DNA, 25 bp, Homo sapien
tgtggagccgcgagtctgctctgat

SEQ ID NO: 3374624 - DNA, 25 bp, Homo sapien
aggacggtctgtgaatcccatgagg

SEQ ID NO: 3374625 - DNA, 25 bp, Homo sapien
tcccatgaggacaaattcggtcact

SEQ ID NO: 3374626 - DNA, 25 bp, Homo sapien
ttgggcccaatagaagatgagtaac

SEQ ID NO: 3374627 - DNA, 25 bp, Homo sapien
gatgagtaacacagatcaatgaatg

SEQ ID NO: 3374628 - DNA, 25 bp, Homo sapien
gagcaaaacagcctgaaaaggagat

SEQ ID NO: 3374629 - DNA, 25 bp, Homo sapien
tcaatgaatgccaggtgactgagga

SEQ ID NO: 3374630 - DNA, 25 bp, Homo sapien
caagaggaatcattctgtagtggca

SEQ ID NO: 3374631 - DNA, 25 bp, Homo sapien
agaggaatcattctgtagtggcaaa

SEQ ID NO: 3374632 - DNA, 25 bp, Homo sapien
ccaagaggaatcattctgtagtggc

SEQ ID NO: 3374633 - DNA, 25 bp, Homo sapien
gaggaatcattctgtagtggcaaaa

SEQ ID NO: 3374634 - DNA, 25 bp, Homo sapien
gatggccacgtagcggtcgtagggc

SEQ ID NO: 3374635 - DNA, 25 bp, Homo sapien
tgcagatggccacgtagcggtcgta

SEQ ID NO: 3374636 - DNA, 25 bp, Homo sapien
ctgtgtaaatcagggggttgcagat

SEQ ID NO: 3374637 - DNA, 25 bp, Homo sapien
cagatggccacgtagcggtcgtagg

SEQ ID NO: 3374638 - DNA, 25 bp, Homo sapien
tgaattccccgcttttggttgctgc

SEQ ID NO: 3374639 - DNA, 25 bp, Homo sapien
tgcacttgccctcggaagactggat

SEQ ID NO: 3374640 - DNA, 25 bp, Homo sapien
tttcggaagccataggtatagaccc

SEQ ID NO: 3374641 - DNA, 25 bp, Homo sapien
cgtcggagttgcagaaagacagctg

SEQ ID NO: 3374642 - DNA, 25 bp, Homo sapien
gaaaccacactggatgcggaatggg

SEQ ID NO: 3374643 - DNA, 25 bp, Homo sapien
tccttctgaaacaaatagatgggcc

SEQ ID NO: 3374644 - DNA, 25 bp, Homo sapien
tagatgggccaaaaggtcctgtgac

SEQ ID NO: 3374645 - DNA, 25 bp, Homo sapien
ccacaaggcttttgggttcatggcc

SEQ ID NO: 3374646 - DNA, 25 bp, Homo sapien
cccatcagcgtatgcaatttgggca

SEQ ID NO: 3374647 - DNA, 25 bp, Homo sapien
cacttctgggaagtacataagggca

SEQ ID NO: 3374648 - DNA, 25 bp, Homo sapien
tgggcataagatacaaccacttctg

SEQ ID NO: 3374649 - DNA, 25 bp, Homo sapien
gagatcatcacgtgtccttgtgcaa

SEQ ID NO: 3374650 - DNA, 25 bp, Homo sapien
gcccgggcttctgagtgtaaaaata

SEQ ID NO: 3374651 - DNA, 25 bp, Homo sapien
cctccctgcactcccggcagagctg

SEQ ID NO: 3374652 - DNA, 25 bp, Homo sapien
cagagctgcccgggcttctgagtgt

SEQ ID NO: 3374653 - DNA, 25 bp, Homo sapien
gctgcctccctgcactcccggcaga

SEQ ID NO: 3374654 - DNA, 25 bp, Homo sapien
taaaataaccggtgtatccaatgtg

SEQ ID NO: 3374655 - DNA, 25 bp, Homo sapien
cgcaagctgaggaaccttgtaagag

SEQ ID NO: 3374656 - DNA, 25 bp, Homo sapien
taagagaaccgtgtgggcaaggcat

SEQ ID NO: 3374657 - DNA, 25 bp, Homo sapien
tttataaagtcagcctcaattcctc

SEQ ID NO: 3374658 - DNA, 25 bp, Homo sapien
ttgctgggtcaaaaggcatttttga

SEQ ID NO: 3374659 - DNA, 25 bp, Homo sapien
atttttgattctagatcctcgccac

SEQ ID NO: 3374660 - DNA, 25 bp, Homo sapien
tgcttttggtgtcatcctgatacca

SEQ ID NO: 3374661 - DNA, 25 bp, Homo sapien
ttgattctagatcctcgccacactg

SEQ ID NO: 3374662 - DNA, 25 bp, Homo sapien
gaactgtggtaagcagcctagactg

SEQ ID NO: 3374663 - DNA, 25 bp, Homo sapien
aactgtggtaagcagcctagactgg

SEQ ID NO: 3374664 - DNA, 25 bp, Homo sapien
atggctccacctggaccaacaaccc

SEQ ID NO: 3374665 - DNA, 25 bp, Homo sapien
tccacctggaccaacaaccccactc

SEQ ID NO: 3374666 - DNA, 25 bp, Homo sapien
ccatggctccacctggaccaacaac

SEQ ID NO: 3374667 - DNA, 25 bp, Homo sapien
ctggaccaacaaccccactcctgtg

SEQ ID NO: 3374668 - DNA, 25 bp, Homo sapien
tccaatttacatgccttctaacagt

SEQ ID NO: 3374669 - DNA, 25 bp, Homo sapien
tgaataaactctgtcatgttttagt

SEQ ID NO: 3374670 - DNA, 25 bp, Homo sapien
ttcccattgatgaataaactctgtc

SEQ ID NO: 3374671 - DNA, 25 bp, Homo sapien
agtatataaaagttcccattgatga

SEQ ID NO: 3374672 - DNA, 25 bp, Homo sapien
gcagagctgccgcatgcactgtgat

SEQ ID NO: 3374673 - DNA, 25 bp, Homo sapien
agagctgccgcatgcactgtgatgc

SEQ ID NO: 3374674 - DNA, 25 bp, Homo sapien
gcactgtgatgctgccgcccaccct

SEQ ID NO: 3374675 - DNA, 25 bp, Homo sapien
agctgccgcatgcactgtgatgctg

SEQ ID NO: 3374676 - DNA, 25 bp, Homo sapien
taaaggcactttgacatccattatc

SEQ ID NO: 3374677 - DNA, 25 bp, Homo sapien
ttaaaggcactttgacatccattat

SEQ ID NO: 3374678 - DNA, 25 bp, Homo sapien
aaggcactttgacatccattatctc

SEQ ID NO: 3374679 - DNA, 25 bp, Homo sapien
aaaggcactttgacatccattatct

SEQ ID NO: 3374680 - DNA, 25 bp, Homo sapien
aggcactttgacatccattatctca

SEQ ID NO: 3374681 - DNA, 25 bp, Homo sapien
agataatggatgtcaaagtgccttt

SEQ ID NO: 3374682 - DNA, 25 bp, Homo sapien
gataatggatgtcaaagtgccttta

SEQ ID NO: 3374683 - DNA, 25 bp, Homo sapien
tgagataatggatgtcaaagtgcct

SEQ ID NO: 3374684 - DNA, 25 bp, Homo sapien
ataatggatgtcaaagtgcctttaa

SEQ ID NO: 3374685 - DNA, 25 bp, Homo sapien
gagataatggatgtcaaagtgcctt

SEQ ID NO: 3374686 - DNA, 25 bp, Homo sapien
ggcactttgacatccattatctcat

SEQ ID NO: 3374687 - DNA, 25 bp, Homo sapien
taaaggcactttgacatccattatc

SEQ ID NO: 3374688 - DNA, 25 bp, Homo sapien
aaggcactttgacatccattatctc

SEQ ID NO: 3374689 - DNA, 25 bp, Homo sapien
aggcactttgacatccattatctca

SEQ ID NO: 3374690 - DNA, 25 bp, Homo sapien
tttgacatccattatctcatttaag

SEQ ID NO: 3374691 - DNA, 25 bp, Homo sapien
cctcgagcttctgggctcaaacgat

SEQ ID NO: 3374692 - DNA, 25 bp, Homo sapien
gataatggatgtcaaagtgccttta

SEQ ID NO: 3374693 - DNA, 25 bp, Homo sapien
tgagataatggatgtcaaagtgcct

SEQ ID NO: 3374694 - DNA, 25 bp, Homo sapien
atcgtttgagcccagaagctcgagg

SEQ ID NO: 3374695 - DNA, 25 bp, Homo sapien
atgagataatggatgtcaaagtgcc

SEQ ID NO: 3374696 - DNA, 25 bp, Homo sapien
taaatgagataatggatgtcaaagt

SEQ ID NO: 3374697 - DNA, 25 bp, Homo sapien
gagataatggatgtcaaagtgcctt

SEQ ID NO: 3374698 - DNA, 25 bp, Homo sapien
tgctttctggttccacctggcggca

SEQ ID NO: 3374699 - DNA, 25 bp, Homo sapien
gtgtttctcttcgaacgccgtccca

SEQ ID NO: 3374700 - DNA, 25 bp, Homo sapien
gaatttcgacctccgcgctgctttc

SEQ ID NO: 3374701 - DNA, 25 bp, Homo sapien
tcgacctccgcgctgctttctggtt

SEQ ID NO: 3374702 - DNA, 25 bp, Homo sapien
tttctggttccacctggcggcagct

SEQ ID NO: 3374703 - DNA, 25 bp, Homo sapien
aacacgaatttcgacctccgcgctg

SEQ ID NO: 3374704 - DNA, 25 bp, Homo sapien
aaagcagcgcggaggtcgaaattcg

SEQ ID NO: 3374705 - DNA, 25 bp, Homo sapien
agctgccgccaggtggaaccagaaa

SEQ ID NO: 3374706 - DNA, 25 bp, Homo sapien
aaccagaaagcagcgcggaggtcga

SEQ ID NO: 3374707 - DNA, 25 bp, Homo sapien
cagcgcggaggtcgaaattcgtgtt

SEQ ID NO: 3374708 - DNA, 25 bp, Homo sapien
tgggacggcgttcgaagagaaacac

SEQ ID NO: 3374709 - DNA, 25 bp, Homo sapien
tgccgccaggtggaaccagaaagca

SEQ ID NO: 3374710 - DNA, 25 bp, Homo sapien
caccagtaaccaatcagcaaaaagc

SEQ ID NO: 3374711 - DNA, 25 bp, Homo sapien
caaaaagctctagctcacgtggtgt

SEQ ID NO: 3374712 - DNA, 25 bp, Homo sapien
taccaacggcgggactatttcagtg

SEQ ID NO: 3374713 - DNA, 25 bp, Homo sapien
cacgtggtgtatattcagcctatca

SEQ ID NO: 3374714 - DNA, 25 bp, Homo sapien
gaatgctgtcatttccgcttccgcc

SEQ ID NO: 3374715 - DNA, 25 bp, Homo sapien
tgctccgagaagtatcaccagtaac

SEQ ID NO: 3374716 - DNA, 25 bp, Homo sapien
gacagcattcatgaatatcaggagc

SEQ ID NO: 3374717 - DNA, 25 bp, Homo sapien
gttactggtgatacttctcggagca

SEQ ID NO: 3374718 - DNA, 25 bp, Homo sapien
caccacgtgagctagagctttttgc

SEQ ID NO: 3374719 - DNA, 25 bp, Homo sapien
cactgaaatagtcccgccgttggta

SEQ ID NO: 3374720 - DNA, 25 bp, Homo sapien
gataggctgaatatacaccacgtga

SEQ ID NO: 3374721 - DNA, 25 bp, Homo sapien
ggcggaagcggaaatgacagcattc

SEQ ID NO: 3374722 - DNA, 25 bp, Homo sapien
tgcggctccagcctcatcctcagac

SEQ ID NO: 3374723 - DNA, 25 bp, Homo sapien
tgcggctccggttcccgctgcggct

SEQ ID NO: 3374724 - DNA, 25 bp, Homo sapien
agttccagcgccaacgccagcaccg

SEQ ID NO: 3374725 - DNA, 25 bp, Homo sapien
ggcggccccagcctcagttccagcg

SEQ ID NO: 3374726 - DNA, 25 bp, Homo sapien
gccagcaccggctgcggctccggtt

SEQ ID NO: 3374727 - DNA, 25 bp, Homo sapien
gtaagtgctcctccggccacgccaa

SEQ ID NO: 3374728 - DNA, 25 bp, Homo sapien
ccggtgctggcgttggcgctggaac

SEQ ID NO: 3374729 - DNA, 25 bp, Homo sapien
gaaccggagccgcagccggtgctgg

SEQ ID NO: 3374730 - DNA, 25 bp, Homo sapien
gctggagccgcagcgggaaccggag

SEQ ID NO: 3374731 - DNA, 25 bp, Homo sapien
ggtctgaggatgaggctggagccgc

SEQ ID NO: 3374732 - DNA, 25 bp, Homo sapien
ttggcgtggccggaggagcacttac

SEQ ID NO: 3374733 - DNA, 25 bp, Homo sapien
cgttggcgctggaactgaggctggg

SEQ ID NO: 3374734 - DNA, 25 bp, Homo sapien
ccccggcctcagcgcaagctccagc

SEQ ID NO: 3374735 - DNA, 25 bp, Homo sapien
accccggcctcagcgcaagctccag

SEQ ID NO: 3374736 - DNA, 25 bp, Homo sapien
ccggcctcagcgcaagctccagcgc

SEQ ID NO: 3374737 - DNA, 25 bp, Homo sapien
cccggcctcagcgcaagctccagcg

SEQ ID NO: 3374738 - DNA, 25 bp, Homo sapien
ggcctcagcgcaagctccagcgcag

SEQ ID NO: 3374739 - DNA, 25 bp, Homo sapien
cggcctcagcgcaagctccagcgca

SEQ ID NO: 3374740 - DNA, 25 bp, Homo sapien
gcgctggagcttgcgctgaggccgg

SEQ ID NO: 3374741 - DNA, 25 bp, Homo sapien
ctggagcttgcgctgaggccggggt

SEQ ID NO: 3374742 - DNA, 25 bp, Homo sapien
tgcgctggagcttgcgctgaggccg

SEQ ID NO: 3374743 - DNA, 25 bp, Homo sapien
gctggagcttgcgctgaggccgggg

SEQ ID NO: 3374744 - DNA, 25 bp, Homo sapien
cgctggagcttgcgctgaggccggg

SEQ ID NO: 3374745 - DNA, 25 bp, Homo sapien
ctgcgctggagcttgcgctgaggcc

SEQ ID NO: 3374746 - DNA, 25 bp, Homo sapien
cgctctgcctggtcctgctcttcca

SEQ ID NO: 3374747 - DNA, 25 bp, Homo sapien
gctctgcctggtcctgctcttccag

SEQ ID NO: 3374748 - DNA, 25 bp, Homo sapien
cagcgcccgctctgcctggtcctgc

SEQ ID NO: 3374749 - DNA, 25 bp, Homo sapien
cccagcgcccgctctgcctggtcct

SEQ ID NO: 3374750 - DNA, 25 bp, Homo sapien
agcgcccgctctgcctggtcctgct

SEQ ID NO: 3374751 - DNA, 25 bp, Homo sapien
ccagcgcccgctctgcctggtcctg

SEQ ID NO: 3374752 - DNA, 25 bp, Homo sapien
aggaccaggcagagcgggcgctggg

SEQ ID NO: 3374753 - DNA, 25 bp, Homo sapien
tggaagagcaggaccaggcagagcg

SEQ ID NO: 3374754 - DNA, 25 bp, Homo sapien
ctggaagagcaggaccaggcagagc

SEQ ID NO: 3374755 - DNA, 25 bp, Homo sapien
caggaccaggcagagcgggcgctgg

SEQ ID NO: 3374756 - DNA, 25 bp, Homo sapien
agcaggaccaggcagagcgggcgct

SEQ ID NO: 3374757 - DNA, 25 bp, Homo sapien
gcaggaccaggcagagcgggcgctg

SEQ ID NO: 3374758 - DNA, 25 bp, Homo sapien
tgctgcccgagttatcgggaccctg

SEQ ID NO: 3374759 - DNA, 25 bp, Homo sapien
tgcccgagttatcgggaccctgttg

SEQ ID NO: 3374760 - DNA, 25 bp, Homo sapien
ggtgctgcccgagttatcgggaccc

SEQ ID NO: 3374761 - DNA, 25 bp, Homo sapien
ctgcccgagttatcgggaccctgtt

SEQ ID NO: 3374762 - DNA, 25 bp, Homo sapien
gctgcccgagttatcgggaccctgt

SEQ ID NO: 3374763 - DNA, 25 bp, Homo sapien
gtgctgcccgagttatcgggaccct

SEQ ID NO: 3374764 - DNA, 25 bp, Homo sapien
caacagggtcccgataactcgggca

SEQ ID NO: 3374765 - DNA, 25 bp, Homo sapien
agggtcccgataactcgggcagcac

SEQ ID NO: 3374766 - DNA, 25 bp, Homo sapien
acagggtcccgataactcgggcagc

SEQ ID NO: 3374767 - DNA, 25 bp, Homo sapien
aacagggtcccgataactcgggcag

SEQ ID NO: 3374768 - DNA, 25 bp, Homo sapien
cagggtcccgataactcgggcagca

SEQ ID NO: 3374769 - DNA, 25 bp, Homo sapien
gggtcccgataactcgggcagcacc

SEQ ID NO: 3374770 - DNA, 25 bp, Homo sapien
actcaacgtagtggtcttaggtcaa

SEQ ID NO: 3374771 - DNA, 25 bp, Homo sapien
taagtggtcaagtctgttcaacgct

SEQ ID NO: 3374772 - DNA, 25 bp, Homo sapien
aattctgcctttgtagcaagaaagc

SEQ ID NO: 3374773 - DNA, 25 bp, Homo sapien
tctgttcaacgctgatgagaggtca

SEQ ID NO: 3374774 - DNA, 25 bp, Homo sapien
gatatagacaacactgtggtttctg

SEQ ID NO: 3374775 - DNA, 25 bp, Homo sapien
gagcagaaaccatagtgagttggaa

SEQ ID NO: 3374776 - DNA, 25 bp, Homo sapien
tatttgacctctcatcagcgttgaa

SEQ ID NO: 3374777 - DNA, 25 bp, Homo sapien
cagcgttgaacagacttgaccactt

SEQ ID NO: 3374778 - DNA, 25 bp, Homo sapien
gctttcttgctacaaaggcagaatt

SEQ ID NO: 3374779 - DNA, 25 bp, Homo sapien
tctattggaacctcctaccccagga

SEQ ID NO: 3374780 - DNA, 25 bp, Homo sapien
ttgacctaagaccactacgttgagt

SEQ ID NO: 3374781 - DNA, 25 bp, Homo sapien
gaaactatgtccctaaaccaaatgc

SEQ ID NO: 3374782 - DNA, 25 bp, Homo sapien
ttcagtgccgcacaatgagtcagaa

SEQ ID NO: 3374783 - DNA, 25 bp, Homo sapien
gtgccgcacaatgagtcagaagatg

SEQ ID NO: 3374784 - DNA, 25 bp, Homo sapien
tgccgcacaatgagtcagaagatga

SEQ ID NO: 3374785 - DNA, 25 bp, Homo sapien
gccgcacaatgagtcagaagatgaa

SEQ ID NO: 3374786 - DNA, 25 bp, Homo sapien
tcagtgccgcacaatgagtcagaag

SEQ ID NO: 3374787 - DNA, 25 bp, Homo sapien
cagtgccgcacaatgagtcagaaga

SEQ ID NO: 3374788 - DNA, 25 bp, Homo sapien
tcttctgactcattgtgcggcactg

SEQ ID NO: 3374789 - DNA, 25 bp, Homo sapien
cttctgactcattgtgcggcactga

SEQ ID NO: 3374790 - DNA, 25 bp, Homo sapien
ttcatcttctgactcattgtgcggc

SEQ ID NO: 3374791 - DNA, 25 bp, Homo sapien
ttctgactcattgtgcggcactgaa

SEQ ID NO: 3374792 - DNA, 25 bp, Homo sapien
tcatcttctgactcattgtgcggca

SEQ ID NO: 3374793 - DNA, 25 bp, Homo sapien
catcttctgactcattgtgcggcac

SEQ ID NO: 3374794 - DNA, 25 bp, Homo sapien
tttagctgttcatttgctcggctcc

SEQ ID NO: 3374795 - DNA, 25 bp, Homo sapien
tagctgttcatttgctcggctcccc

SEQ ID NO: 3374796 - DNA, 25 bp, Homo sapien
cataactagagctcctgtagccaag

SEQ ID NO: 3374797 - DNA, 25 bp, Homo sapien
gtgggaatccaagctgtccctctgc

SEQ ID NO: 3374798 - DNA, 25 bp, Homo sapien
cactcataactagagctcctgtagc

SEQ ID NO: 3374799 - DNA, 25 bp, Homo sapien
ccacactcataactagagctcctgt

SEQ ID NO: 3374800 - DNA, 25 bp, Homo sapien
gcagagggacagcttggattcccac

SEQ ID NO: 3374801 - DNA, 25 bp, Homo sapien
ggctacaggagctctagttatgagt

SEQ ID NO: 3374802 - DNA, 25 bp, Homo sapien
gggagccgagcaaatgaacagctaa

SEQ ID NO: 3374803 - DNA, 25 bp, Homo sapien
cttggctacaggagctctagttatg

SEQ ID NO: 3374804 - DNA, 25 bp, Homo sapien
ggagccgagcaaatgaacagctaaa

SEQ ID NO: 3374805 - DNA, 25 bp, Homo sapien
tacaggagctctagttatgagtgtg

SEQ ID NO: 3374806 - DNA, 25 bp, Homo sapien
tgtttattgggggtggcctcttgtc

SEQ ID NO: 3374807 - DNA, 25 bp, Homo sapien
ctgtttattgggggtggcctcttgt

SEQ ID NO: 3374808 - DNA, 25 bp, Homo sapien
tctgtttattgggggtggcctcttg

SEQ ID NO: 3374809 - DNA, 25 bp, Homo sapien
cttctgtttattgggggtggcctct

SEQ ID NO: 3374810 - DNA, 25 bp, Homo sapien
caagaggccacccccaataaacaga

SEQ ID NO: 3374811 - DNA, 25 bp, Homo sapien
agaggccacccccaataaacagaag

SEQ ID NO: 3374812 - DNA, 25 bp, Homo sapien
acaagaggccacccccaataaacag

SEQ ID NO: 3374813 - DNA, 25 bp, Homo sapien
gacaagaggccacccccaataaaca

SEQ ID NO: 3374814 - DNA, 25 bp, Homo sapien
tgtttattgggggtggcctcttgtc

SEQ ID NO: 3374815 - DNA, 25 bp, Homo sapien
tggacttctggcttcttagcttgct

SEQ ID NO: 3374816 - DNA, 25 bp, Homo sapien
gtacgtacttcctgggcctcttctg

SEQ ID NO: 3374817 - DNA, 25 bp, Homo sapien
ccaatttttctttggacttctggct

SEQ ID NO: 3374818 - DNA, 25 bp, Homo sapien
ggcttcttagcttgctttcctgcct

SEQ ID NO: 3374819 - DNA, 25 bp, Homo sapien
tcctgggcctcttctgtttattggg

SEQ ID NO: 3374820 - DNA, 25 bp, Homo sapien
agaggccacccccaataaacagaag

SEQ ID NO: 3374821 - DNA, 25 bp, Homo sapien
gcaggaaagcaagctaagaagccag

SEQ ID NO: 3374822 - DNA, 25 bp, Homo sapien
agcaagctaagaagccagaagtcca

SEQ ID NO: 3374823 - DNA, 25 bp, Homo sapien
agccagaagtccaaagaaaaattgg

SEQ ID NO: 3374824 - DNA, 25 bp, Homo sapien
ccccaataaacagaagaggcccagg

SEQ ID NO: 3374825 - DNA, 25 bp, Homo sapien
cagaagaggcccaggaagtacgtac

SEQ ID NO: 3374826 - DNA, 25 bp, Homo sapien
gaatatgtatgaactgcataaaaaa

SEQ ID NO: 3374827 - DNA, 25 bp, Homo sapien
gtttctccaaatgagctcatcctgg

SEQ ID NO: 3374828 - DNA, 25 bp, Homo sapien
gaactgcataaaaaagtttctccaa

SEQ ID NO: 3374829 - DNA, 25 bp, Homo sapien
ctccaaatgagctcatcctgggctg

SEQ ID NO: 3374830 - DNA, 25 bp, Homo sapien
ggctgttgacatggaatttgctaag

SEQ ID NO: 3374831 - DNA, 25 bp, Homo sapien
tttgctaagaatatgtatgaactgc

SEQ ID NO: 3374832 - DNA, 25 bp, Homo sapien
tagcaaattccatgtcaacagccac

SEQ ID NO: 3374833 - DNA, 25 bp, Homo sapien
tatgcagttcatacatattcttagc

SEQ ID NO: 3374834 - DNA, 25 bp, Homo sapien
cagcccaggatgagctcatttggag

SEQ ID NO: 3374835 - DNA, 25 bp, Homo sapien
ttggagaaacttttttatgcagttc

SEQ ID NO: 3374836 - DNA, 25 bp, Homo sapien
tattcttagcaaattccatgtcaac

SEQ ID NO: 3374837 - DNA, 25 bp, Homo sapien
ccaggatgagctcatttggagaaac

SEQ ID NO: 3374838 - DNA, 25 bp, Homo sapien
ggcaagagtattgcaagtgtattac

SEQ ID NO: 3374839 - DNA, 25 bp, Homo sapien
gctactggactggatcttatactct

SEQ ID NO: 3374840 - DNA, 25 bp, Homo sapien
gattgccggtgtcttttgctactgg

SEQ ID NO: 3374841 - DNA, 25 bp, Homo sapien
tgtattactgactgtgagcagtggc

SEQ ID NO: 3374842 - DNA, 25 bp, Homo sapien
gaaggtctcttcgtgattgccggtg

SEQ ID NO: 3374843 - DNA, 25 bp, Homo sapien
tcttttgctactggactggatctta

SEQ ID NO: 3374844 - DNA, 25 bp, Homo sapien
taagatccagtccagtagcaaaaga

SEQ ID NO: 3374845 - DNA, 25 bp, Homo sapien
cagtagcaaaagacaccggcaatca

SEQ ID NO: 3374846 - DNA, 25 bp, Homo sapien
agagtataagatccagtccagtagc

SEQ ID NO: 3374847 - DNA, 25 bp, Homo sapien
gccactgctcacagtcagtaataca

SEQ ID NO: 3374848 - DNA, 25 bp, Homo sapien
gtaatacacttgcaatactcttgcc

SEQ ID NO: 3374849 - DNA, 25 bp, Homo sapien
caccggcaatcacgaagagaccttc

SEQ ID NO: 3374850 - DNA, 25 bp, Homo sapien
tagaagtgtccggtaccctgaagac

SEQ ID NO: 3374851 - DNA, 25 bp, Homo sapien
ggtgtcactaggtgtcctaccgtag

SEQ ID NO: 3374852 - DNA, 25 bp, Homo sapien
tatagacaggagtccaccactgtgt

SEQ ID NO: 3374853 - DNA, 25 bp, Homo sapien
gaaagtgtgttacctgtaggaactg

SEQ ID NO: 3374854 - DNA, 25 bp, Homo sapien
tattgacgccacatatagacaggag

SEQ ID NO: 3374855 - DNA, 25 bp, Homo sapien
cactgttgtgtttgatattgacgcc

SEQ ID NO: 3374856 - DNA, 25 bp, Homo sapien
gactcctgtctatatgtggcgtcaa

SEQ ID NO: 3374857 - DNA, 25 bp, Homo sapien
tacggtaggacacctagtgacacca

SEQ ID NO: 3374858 - DNA, 25 bp, Homo sapien
ggcgtcaatatcaaacacaacagtg

SEQ ID NO: 3374859 - DNA, 25 bp, Homo sapien
aattcgaaatatcctggccccacag

SEQ ID NO: 3374860 - DNA, 25 bp, Homo sapien
gcaatacacacaccgaaaactatgt

SEQ ID NO: 3374861 - DNA, 25 bp, Homo sapien
gtcttcagggtaccggacacttcta

SEQ ID NO: 3374862 - DNA, 25 bp, Homo sapien
agagcactctgtgctgatccacgag

SEQ ID NO: 3374863 - DNA, 25 bp, Homo sapien
gggccatgacatcacagagcactct

SEQ ID NO: 3374864 - DNA, 25 bp, Homo sapien
tggacacaagtctccagaacggccg

SEQ ID NO: 3374865 - DNA, 25 bp, Homo sapien
gatccacgagtactacagccgagag

SEQ ID NO: 3374866 - DNA, 25 bp, Homo sapien
acgctacgggccatgacatcacaga

SEQ ID NO: 3374867 - DNA, 25 bp, Homo sapien
gccgcatgagcatcaaagcctacgt

SEQ ID NO: 3374868 - DNA, 25 bp, Homo sapien
catgcggccgttctggagacttgtg

SEQ ID NO: 3374869 - DNA, 25 bp, Homo sapien
tactcgtggatcagcacagagtgct

SEQ ID NO: 3374870 - DNA, 25 bp, Homo sapien
ctgtgatgtcatggcccgtagcgta

SEQ ID NO: 3374871 - DNA, 25 bp, Homo sapien
gacgtaggctttgatgctcatgcgg

SEQ ID NO: 3374872 - DNA, 25 bp, Homo sapien
agagtgctctgtgatgtcatggccc

SEQ ID NO: 3374873 - DNA, 25 bp, Homo sapien
gcctctcggctgtagtactcgtgga

SEQ ID NO: 3374874 - DNA, 25 bp, Homo sapien
gacagtgaaatacgcgtactacgac

SEQ ID NO: 3374875 - DNA, 25 bp, Homo sapien
tactacgacactgaacgcatcggag

SEQ ID NO: 3374876 - DNA, 25 bp, Homo sapien
ggaccatgggagtgatgttcacgcc

SEQ ID NO: 3374877 - DNA, 25 bp, Homo sapien
gaaatacgcgtactacgacactgaa

SEQ ID NO: 3374878 - DNA, 25 bp, Homo sapien
gagtgatgttcacgcctctgacagt

SEQ ID NO: 3374879 - DNA, 25 bp, Homo sapien
cactttaatgggagtccctgggagg

SEQ ID NO: 3374880 - DNA, 25 bp, Homo sapien
actgtcagaggcgtgaacatcactc

SEQ ID NO: 3374881 - DNA, 25 bp, Homo sapien
gatgcgttcagtgtcgtagtacgcg

SEQ ID NO: 3374882 - DNA, 25 bp, Homo sapien
gaggcgtgaacatcactcccatggt

SEQ ID NO: 3374883 - DNA, 25 bp, Homo sapien
cgtagtacgcgtatttcactgtcag

SEQ ID NO: 3374884 - DNA, 25 bp, Homo sapien
cctcccagggactcccattaaagtg

SEQ ID NO: 3374885 - DNA, 25 bp, Homo sapien
ctccgatgcgttcagtgtcgtagta

SEQ ID NO: 3374886 - DNA, 25 bp, Homo sapien
gagttagtaggacgttaagaccatc

SEQ ID NO: 3374887 - DNA, 25 bp, Homo sapien
cagagttagtaggacgttaagacca

SEQ ID NO: 3374888 - DNA, 25 bp, Homo sapien
gtgtgactgagcagactgagtctaa

SEQ ID NO: 3374889 - DNA, 25 bp, Homo sapien
ttagtaggacgttaagaccatctct

SEQ ID NO: 3374890 - DNA, 25 bp, Homo sapien
cgctgccaccctgccaaccaacttc

SEQ ID NO: 3374891 - DNA, 25 bp, Homo sapien
tgactgagcagactgagtctaaggg

SEQ ID NO: 3374892 - DNA, 25 bp, Homo sapien
tggtcttaacgtcctactaactctg

SEQ ID NO: 3374893 - DNA, 25 bp, Homo sapien
tccccttagactcagtctgctcagt

SEQ ID NO: 3374894 - DNA, 25 bp, Homo sapien
gagatggtcttaacgtcctactaac

SEQ ID NO: 3374895 - DNA, 25 bp, Homo sapien
agagatggtcttaacgtcctactaa

SEQ ID NO: 3374896 - DNA, 25 bp, Homo sapien
gaagttggttggcagggtggcagcg

SEQ ID NO: 3374897 - DNA, 25 bp, Homo sapien
ttagactcagtctgctcagtcacac

SEQ ID NO: 3374898 - DNA, 25 bp, Homo sapien
gacctgctttagccccaacagagtg

SEQ ID NO: 3374899 - DNA, 25 bp, Homo sapien
aagacctgctttagccccaacagag

SEQ ID NO: 3374900 - DNA, 25 bp, Homo sapien
agacctgctttagccccaacagagt

SEQ ID NO: 3374901 - DNA, 25 bp, Homo sapien
cactctgttggggctaaagcaggtc

SEQ ID NO: 3374902 - DNA, 25 bp, Homo sapien
ctctgttggggctaaagcaggtctt

SEQ ID NO: 3374903 - DNA, 25 bp, Homo sapien
actctgttggggctaaagcaggtct

SEQ ID NO: 3374904 - DNA, 25 bp, Homo sapien
cctcatcgagtctttgttttggtac

SEQ ID NO: 3374905 - DNA, 25 bp, Homo sapien
gaggacatagttctctatcctggga

SEQ ID NO: 3374906 - DNA, 25 bp, Homo sapien
gtagggctcagtggttataattaac

SEQ ID NO: 3374907 - DNA, 25 bp, Homo sapien
tgtgctgatgaaatggtagggctca

SEQ ID NO: 3374908 - DNA, 25 bp, Homo sapien
ggttataattaactgcctcatcgag

SEQ ID NO: 3374909 - DNA, 25 bp, Homo sapien
ctgggatcactgaggcatgtgctga

SEQ ID NO: 3374910 - DNA, 25 bp, Homo sapien
taccaaaacaaagactcgatgaggc

SEQ ID NO: 3374911 - DNA, 25 bp, Homo sapien
gagccctaccatttcatcagcacat

SEQ ID NO: 3374912 - DNA, 25 bp, Homo sapien
tcagcacatgcctcagtgatcccag

SEQ ID NO: 3374913 - DNA, 25 bp, Homo sapien
gatcccaggatagagaactatgtcc

SEQ ID NO: 3374914 - DNA, 25 bp, Homo sapien
ctcgatgaggcagttaattataacc

SEQ ID NO: 3374915 - DNA, 25 bp, Homo sapien
taattataaccactgagccctacca

SEQ ID NO: 3374916 - DNA, 25 bp, Homo sapien
tgacaatactgtgggccgcttcctg

SEQ ID NO: 3374917 - DNA, 25 bp, Homo sapien
agctgacaatactgtgggccgcttc

SEQ ID NO: 3374918 - DNA, 25 bp, Homo sapien
tactgtgggccgcttcctgatgagc

SEQ ID NO: 3374919 - DNA, 25 bp, Homo sapien
actgtgggccgcttcctgatgagcc

SEQ ID NO: 3374920 - DNA, 25 bp, Homo sapien
gctgacaatactgtgggccgcttcc

SEQ ID NO: 3374921 - DNA, 25 bp, Homo sapien
ctgacaatactgtgggccgcttcct

SEQ ID NO: 3374922 - DNA, 25 bp, Homo sapien
ggaagcggcccacagtattgtcagc

SEQ ID NO: 3374923 - DNA, 25 bp, Homo sapien
aggaagcggcccacagtattgtcag

SEQ ID NO: 3374924 - DNA, 25 bp, Homo sapien
gctcatcaggaagcggcccacagta

SEQ ID NO: 3374925 - DNA, 25 bp, Homo sapien
gaagcggcccacagtattgtcagct

SEQ ID NO: 3374926 - DNA, 25 bp, Homo sapien
ggctcatcaggaagcggcccacagt

SEQ ID NO: 3374927 - DNA, 25 bp, Homo sapien
caggaagcggcccacagtattgtca

SEQ ID NO: 3374928 - DNA, 25 bp, Homo sapien
catttactgctgatactactgtgac

SEQ ID NO: 3374929 - DNA, 25 bp, Homo sapien
gacttactgtctaaattcgtgatgg

SEQ ID NO: 3374930 - DNA, 25 bp, Homo sapien
taaggcacccctagtctataagtgt

SEQ ID NO: 3374931 - DNA, 25 bp, Homo sapien
tgttatgcgtggttggagacttcct

SEQ ID NO: 3374932 - DNA, 25 bp, Homo sapien
tccatgggtttcagctaaggcaccc

SEQ ID NO: 3374933 - DNA, 25 bp, Homo sapien
tgtctaccatagagctggccaaagc

SEQ ID NO: 3374934 - DNA, 25 bp, Homo sapien
gaaggaagtctccaaccacgcataa

SEQ ID NO: 3374935 - DNA, 25 bp, Homo sapien
gggtgccttagctgaaacccatgga

SEQ ID NO: 3374936 - DNA, 25 bp, Homo sapien
cagtaagtcacagtagtatcagcag

SEQ ID NO: 3374937 - DNA, 25 bp, Homo sapien
tagacactgggtatgaggacagctg

SEQ ID NO: 3374938 - DNA, 25 bp, Homo sapien
tggataaatgacagctaggagagac

SEQ ID NO: 3374939 - DNA, 25 bp, Homo sapien
gctttggccagctctatggtagaca

SEQ ID NO: 3374940 - DNA, 25 bp, Homo sapien
ggccaacctcacacagtcacagatt

SEQ ID NO: 3374941 - DNA, 25 bp, Homo sapien
ccaacctcacacagtcacagattgc

SEQ ID NO: 3374942 - DNA, 25 bp, Homo sapien
tggccaacctcacacagtcacagat

SEQ ID NO: 3374943 - DNA, 25 bp, Homo sapien
gccaacctcacacagtcacagattg

SEQ ID NO: 3374944 - DNA, 25 bp, Homo sapien
atctgtgactgtgtgaggttggcca

SEQ ID NO: 3374945 - DNA, 25 bp, Homo sapien
aatctgtgactgtgtgaggttggcc

SEQ ID NO: 3374946 - DNA, 25 bp, Homo sapien
caatctgtgactgtgtgaggttggc

SEQ ID NO: 3374947 - DNA, 25 bp, Homo sapien
gcaatctgtgactgtgtgaggttgg

SEQ ID NO: 3374948 - DNA, 25 bp, Homo sapien
actgagatagtcagttgtgtgtgac

SEQ ID NO: 3374949 - DNA, 25 bp, Homo sapien
gagatagtcagttgtgtgtgactct

SEQ ID NO: 3374950 - DNA, 25 bp, Homo sapien
gatagtcagttgtgtgtgactctaa

SEQ ID NO: 3374951 - DNA, 25 bp, Homo sapien
ctgagatagtcagttgtgtgtgact

SEQ ID NO: 3374952 - DNA, 25 bp, Homo sapien
agatagtcagttgtgtgtgactcta

SEQ ID NO: 3374953 - DNA, 25 bp, Homo sapien
tgagatagtcagttgtgtgtgactc

SEQ ID NO: 3374954 - DNA, 25 bp, Homo sapien
agagtcacacacaactgactatctc

SEQ ID NO: 3374955 - DNA, 25 bp, Homo sapien
tagagtcacacacaactgactatct

SEQ ID NO: 3374956 - DNA, 25 bp, Homo sapien
gagtcacacacaactgactatctca

SEQ ID NO: 3374957 - DNA, 25 bp, Homo sapien
agtcacacacaactgactatctcag

SEQ ID NO: 3374958 - DNA, 25 bp, Homo sapien
gtcacacacaactgactatctcagt

SEQ ID NO: 3374959 - DNA, 25 bp, Homo sapien
ttagagtcacacacaactgactatc

SEQ ID NO: 3374960 - DNA, 25 bp, Homo sapien
tagtactacccagttgatacggtgg

SEQ ID NO: 3374961 - DNA, 25 bp, Homo sapien
gatggcatttcccagaggccttgta

SEQ ID NO: 3374962 - DNA, 25 bp, Homo sapien
gaagagatacttccacgttcactga

SEQ ID NO: 3374963 - DNA, 25 bp, Homo sapien
tatactgaggtctgccagtggctca

SEQ ID NO: 3374964 - DNA, 25 bp, Homo sapien
taaattcacacatacggagtctgca

SEQ ID NO: 3374965 - DNA, 25 bp, Homo sapien
gagtactgaaccattattcccaagg

SEQ ID NO: 3374966 - DNA, 25 bp, Homo sapien
agaagactgtgatgtgccgcctgga

SEQ ID NO: 3374967 - DNA, 25 bp, Homo sapien
tcattcaggaataagtgtcgtgggc

SEQ ID NO: 3374968 - DNA, 25 bp, Homo sapien
catatacagacagccaaccgcatgt

SEQ ID NO: 3374969 - DNA, 25 bp, Homo sapien
tatattgttactcacagctgcagga

SEQ ID NO: 3374970 - DNA, 25 bp, Homo sapien
tatttctaagacacacagtggcgag

SEQ ID NO: 3374971 - DNA, 25 bp, Homo sapien
tacaaggcctctgggaaatgccatc

SEQ ID NO: 3374972 - DNA, 25 bp, Homo sapien
cctggtgagatctactcctagcaat

SEQ ID NO: 3374973 - DNA, 25 bp, Homo sapien
cacaacaggtctccggaacgtacta

SEQ ID NO: 3374974 - DNA, 25 bp, Homo sapien
tacacattgcgaaattgattaccac

SEQ ID NO: 3374975 - DNA, 25 bp, Homo sapien
gaacgtactactcctgtttaactga

SEQ ID NO: 3374976 - DNA, 25 bp, Homo sapien
aattcctgggttaagggcatgcata

SEQ ID NO: 3374977 - DNA, 25 bp, Homo sapien
gaagtaaatctttcgtcctgtcctg

SEQ ID NO: 3374978 - DNA, 25 bp, Homo sapien
tacattgtgtcataacgagaccagt

SEQ ID NO: 3374979 - DNA, 25 bp, Homo sapien
catagagagggctgtaccaacttat

SEQ ID NO: 3374980 - DNA, 25 bp, Homo sapien
agggtccggtggctgctgactccct

SEQ ID NO: 3374981 - DNA, 25 bp, Homo sapien
gtcatagctccagcggctgtaagac

SEQ ID NO: 3374982 - DNA, 25 bp, Homo sapien
ctgtcatagctccagcggctgtaag

SEQ ID NO: 3374983 - DNA, 25 bp, Homo sapien
tgtcatagctccagcggctgtaaga

SEQ ID NO: 3374984 - DNA, 25 bp, Homo sapien
ctgcgccgtacccgaggctctgggt

SEQ ID NO: 3374985 - DNA, 25 bp, Homo sapien
gacagctctgccccgtgggtgtggg

SEQ ID NO: 3374986 - DNA, 25 bp, Homo sapien
ggggacactaccctcgctggagctc

SEQ ID NO: 3374987 - DNA, 25 bp, Homo sapien
cagtggccgcgtgccctcctccgac

SEQ ID NO: 3374988 - DNA, 25 bp, Homo sapien
gaagcaggacttcacggagatgaga

SEQ ID NO: 3374989 - DNA, 25 bp, Homo sapien
aaacagacgtggatcagttgcgccc

SEQ ID NO: 3374990 - DNA, 25 bp, Homo sapien
tctgaatctaggcaaacaagggctg

SEQ ID NO: 3374991 - DNA, 25 bp, Homo sapien
ctagccttaggcaggagggacacct

SEQ ID NO: 3374992 - DNA, 25 bp, Homo sapien
cgtgctgagcatacgtgagggaata

SEQ ID NO: 3374993 - DNA, 25 bp, Homo sapien
ccacgccgggctagagtcgtgctga

SEQ ID NO: 3374994 - DNA, 25 bp, Homo sapien
ggcccggccgaagatgaagaccatg

SEQ ID NO: 3374995 - DNA, 25 bp, Homo sapien
gattttaacattgatccacgccggg

SEQ ID NO: 3374996 - DNA, 25 bp, Homo sapien
aggtgcggccactgccagcagatcg

SEQ ID NO: 3374997 - DNA, 25 bp, Homo sapien
actgccagcagatcgcgcatggcca

SEQ ID NO: 3374998 - DNA, 25 bp, Homo sapien
ctgtcccctcgcaggtgcggccact

SEQ ID NO: 3374999 - DNA, 25 bp, Homo sapien
tcgcgcatggccagctcggactggt

SEQ ID NO: 3375000 - DNA, 25 bp, Homo sapien
ggaggctctgtgcagtcgcggctgc

SEQ ID NO: 3375001 - DNA, 25 bp, Homo sapien
cagtgggaggctctgtgcagtcgcg

SEQ ID NO: 3375002 - DNA, 25 bp, Homo sapien
gtgcagtcgcggctgctccccttcc

SEQ ID NO: 3375003 - DNA, 25 bp, Homo sapien
cagccccttcccgagcaggaaactc

SEQ ID NO: 3375004 - DNA, 25 bp, Homo sapien
tgggcaccctggaagacagcccatg

SEQ ID NO: 3375005 - DNA, 25 bp, Homo sapien
ccctgaggtgtctgacggctgaagc

SEQ ID NO: 3375006 - DNA, 25 bp, Homo sapien
cagtgggatggaatgaaggatgggc

SEQ ID NO: 3375007 - DNA, 25 bp, Homo sapien
cagttactctggcaacctgcaggcc

SEQ ID NO: 3375008 - DNA, 25 bp, Homo sapien
tggggcccgtgctactgagacttgt

SEQ ID NO: 3375009 - DNA, 25 bp, Homo sapien
catggggcccgtgctactgagactt

SEQ ID NO: 3375010 - DNA, 25 bp, Homo sapien
gggcccgtgctactgagacttgtgc

SEQ ID NO: 3375011 - DNA, 25 bp, Homo sapien
atggggcccgtgctactgagacttg

SEQ ID NO: 3375012 - DNA, 25 bp, Homo sapien
gcatagtaagacctggagcctgttg

SEQ ID NO: 3375013 - DNA, 25 bp, Homo sapien
gcctcagtactgaaaccagcacttg

SEQ ID NO: 3375014 - DNA, 25 bp, Homo sapien
caaccaccatcacccattaattagg

SEQ ID NO: 3375015 - DNA, 25 bp, Homo sapien
gaaattccctgtattcgcctcagta

SEQ ID NO: 3375016 - DNA, 25 bp, Homo sapien
gatggagtgggtttaagggatggtc

SEQ ID NO: 3375017 - DNA, 25 bp, Homo sapien
atctcttcggtggccccgtttcagg

SEQ ID NO: 3375018 - DNA, 25 bp, Homo sapien
cgatctcttcggtggccccgtttca

SEQ ID NO: 3375019 - DNA, 25 bp, Homo sapien
gatctcttcggtggccccgtttcag

SEQ ID NO: 3375020 - DNA, 25 bp, Homo sapien
tccttccttccagtacttcctcctg

SEQ ID NO: 3375021 - DNA, 25 bp, Homo sapien
tccttccagtacttcctcctggttg

SEQ ID NO: 3375022 - DNA, 25 bp, Homo sapien
cttccttccagtacttcctcctggt

SEQ ID NO: 3375023 - DNA, 25 bp, Homo sapien
cttccagtacttcctcctggttgtt

SEQ ID NO: 3375024 - DNA, 25 bp, Homo sapien
cagctcttcctactggatgggggtt

SEQ ID NO: 3375025 - DNA, 25 bp, Homo sapien
ctgaaagtccccttgggttaggctg

SEQ ID NO: 3375026 - DNA, 25 bp, Homo sapien
gactatgccatagggtttggtagct

SEQ ID NO: 3375027 - DNA, 25 bp, Homo sapien
tgggttaggctgtgaaatgaagact

SEQ ID NO: 3375028 - DNA, 25 bp, Homo sapien
tccatatagccagatgactgtccca

SEQ ID NO: 3375029 - DNA, 25 bp, Homo sapien
acacaacagacaagcgcagggaaag

SEQ ID NO: 3375030 - DNA, 25 bp, Homo sapien
gatgctcagcagtgcacggtcacgt

SEQ ID NO: 3375031 - DNA, 25 bp, Homo sapien
aacttcactccttcactggtggtcg

SEQ ID NO: 3375032 - DNA, 25 bp, Homo sapien
cctcctgttttctggcaatgtgcat

SEQ ID NO: 3375033 - DNA, 25 bp, Homo sapien
tcttcctcctgttttctggcaatgt

SEQ ID NO: 3375034 - DNA, 25 bp, Homo sapien
ttcctcctgttttctggcaatgtgc

SEQ ID NO: 3375035 - DNA, 25 bp, Homo sapien
cttactccagacctgctcttcctcc

SEQ ID NO: 3375036 - DNA, 25 bp, Homo sapien
tatccatggggctcccaaatctact

SEQ ID NO: 3375037 - DNA, 25 bp, Homo sapien
tctacttcctgatggctcccctgag

SEQ ID NO: 3375038 - DNA, 25 bp, Homo sapien
tccagggatacctctaagtctccag

SEQ ID NO: 3375039 - DNA, 25 bp, Homo sapien
tgtgttctccgcaggtgacctcttc

SEQ ID NO: 3375040 - DNA, 25 bp, Homo sapien
ctgatgaaatcacccgcagctaggc

SEQ ID NO: 3375041 - DNA, 25 bp, Homo sapien
tgttggcaaggattcacagacccca

SEQ ID NO: 3375042 - DNA, 25 bp, Homo sapien
cgtacaacagtataagggatcctct

SEQ ID NO: 3375043 - DNA, 25 bp, Homo sapien
caaactgagcggcatccactgatga

SEQ ID NO: 3375044 - DNA, 25 bp, Homo sapien
ccaccctgccgagtgagaacgggct

SEQ ID NO: 3375045 - DNA, 25 bp, Homo sapien
ccctgccgagtgagaacgggctgaa

SEQ ID NO: 3375046 - DNA, 25 bp, Homo sapien
aaccaccctgccgagtgagaacggg

SEQ ID NO: 3375047 - DNA, 25 bp, Homo sapien
gagtgagaacgggctgaagcctcca

SEQ ID NO: 3375048 - DNA, 25 bp, Homo sapien
tcagcttcacattggcgcttgagtc

SEQ ID NO: 3375049 - DNA, 25 bp, Homo sapien
ttcagcttcacattggcgcttgagt

SEQ ID NO: 3375050 - DNA, 25 bp, Homo sapien
cagcttcacattggcgcttgagtcc

SEQ ID NO: 3375051 - DNA, 25 bp, Homo sapien
tcttcagcttcacattggcgcttga

SEQ ID NO: 3375052 - DNA, 25 bp, Homo sapien
tccaaaccccggccactggtgtggc

SEQ ID NO: 3375053 - DNA, 25 bp, Homo sapien
ctctcaaacagcgaccctccccagg

SEQ ID NO: 3375054 - DNA, 25 bp, Homo sapien
cattttataaagctgcgtcctcctc

SEQ ID NO: 3375055 - DNA, 25 bp, Homo sapien
ggagtcattttataaagctgcgtcc

SEQ ID NO: 3375056 - DNA, 25 bp, Homo sapien
tctccttcccacgagagtgcagatg

SEQ ID NO: 3375057 - DNA, 25 bp, Homo sapien
caacgtctgagtgtctaaggtggcc

SEQ ID NO: 3375058 - DNA, 25 bp, Homo sapien
cccacgagagtgcagatgacctgaa

SEQ ID NO: 3375059 - DNA, 25 bp, Homo sapien
ccttccagagacaacgtctgagtgt

SEQ ID NO: 3375060 - DNA, 25 bp, Homo sapien
acagatgtgagggtccccggcctca

SEQ ID NO: 3375061 - DNA, 25 bp, Homo sapien
actgtgatggggcagtccctggccc

SEQ ID NO: 3375062 - DNA, 25 bp, Homo sapien
acactgtgatggggcagtccctggc

SEQ ID NO: 3375063 - DNA, 25 bp, Homo sapien
agatgtgagggtccccggcctcagc

SEQ ID NO: 3375064 - DNA, 25 bp, Homo sapien
cacacacgtggctggacaggggctg

SEQ ID NO: 3375065 - DNA, 25 bp, Homo sapien
tcacacacgtggctggacaggggct

SEQ ID NO: 3375066 - DNA, 25 bp, Homo sapien
ttagactcagaaccgatcctgccat

SEQ ID NO: 3375067 - DNA, 25 bp, Homo sapien
cctattggtgggagactgagaactg

SEQ ID NO: 3375068 - DNA, 25 bp, Homo sapien
cattttccagtcctgatccagctct

SEQ ID NO: 3375069 - DNA, 25 bp, Homo sapien
gaaaactcagagctatccattttcc

SEQ ID NO: 3375070 - DNA, 25 bp, Homo sapien
tctttgctctgagatcccaggaggc

SEQ ID NO: 3375071 - DNA, 25 bp, Homo sapien
aggaggccctgtggccctgtctgca

SEQ ID NO: 3375072 - DNA, 25 bp, Homo sapien
ctgtggccctgtctgcaacagccat

SEQ ID NO: 3375073 - DNA, 25 bp, Homo sapien
gtcctcatcatctggcctctttgct

SEQ ID NO: 3375074 - DNA, 25 bp, Homo sapien
gcaccatgctaacagcatatagggt

SEQ ID NO: 3375075 - DNA, 25 bp, Homo sapien
ggcaccatgctaacagcatataggg

SEQ ID NO: 3375076 - DNA, 25 bp, Homo sapien
aggcaccatgctaacagcatatagg

SEQ ID NO: 3375077 - DNA, 25 bp, Homo sapien
agatcatgggttactggaggacaca

SEQ ID NO: 3375078 - DNA, 25 bp, Homo sapien
aaatcgcggagtgacctcgtaggcc

SEQ ID NO: 3375079 - DNA, 25 bp, Homo sapien
tttctacagcaggactcgacgggag

SEQ ID NO: 3375080 - DNA, 25 bp, Homo sapien
gatgactaacacagggcactggcct

SEQ ID NO: 3375081 - DNA, 25 bp, Homo sapien
gactcctggtccgatcacagcccac

SEQ ID NO: 3375082 - DNA, 25 bp, Homo sapien
tctctcccgactcctggtccgatca

SEQ ID NO: 3375083 - DNA, 25 bp, Homo sapien
cactgtgtctctctcccgactcctg

SEQ ID NO: 3375084 - DNA, 25 bp, Homo sapien
tccccctctgcgtcctttgcatcac

SEQ ID NO: 3375085 - DNA, 25 bp, Homo sapien
gtcatgtgcaaggtccccacaggca

SEQ ID NO: 3375086 - DNA, 25 bp, Homo sapien
gactgtcatgtgcaaggtccccaca

SEQ ID NO: 3375087 - DNA, 25 bp, Homo sapien
ggtcaggactgtcatgtgcaaggtc

SEQ ID NO: 3375088 - DNA, 25 bp, Homo sapien
cctggaaagggtcaggactgtcatg

SEQ ID NO: 3375089 - DNA, 25 bp, Homo sapien
cagatgtgactgtcttagatccagg

SEQ ID NO: 3375090 - DNA, 25 bp, Homo sapien
ttgtggacagaggtagcacccagca

SEQ ID NO: 3375091 - DNA, 25 bp, Homo sapien
tagatccaggacaagagggctcctc

SEQ ID NO: 3375092 - DNA, 25 bp, Homo sapien
cagttgatatgtggccaaaatggtc

SEQ ID NO: 3375093 - DNA, 25 bp, Homo sapien
aggctctgtcctaagggagcaaaat

SEQ ID NO: 3375094 - DNA, 25 bp, Homo sapien
taggctctgtcctaagggagcaaaa

SEQ ID NO: 3375095 - DNA, 25 bp, Homo sapien
aggtctcaggagcctggagtaattg

SEQ ID NO: 3375096 - DNA, 25 bp, Homo sapien
ttaggctctgtcctaagggagcaaa

SEQ ID NO: 3375097 - DNA, 25 bp, Homo sapien
ccgcatcctcccgggccggggcgct

SEQ ID NO: 3375098 - DNA, 25 bp, Homo sapien
tagggaatccagtcggaatgcggct

SEQ ID NO: 3375099 - DNA, 25 bp, Homo sapien
gaatccagtcggaatgcggcttgga

SEQ ID NO: 3375100 - DNA, 25 bp, Homo sapien
ctgtagggaatccagtcggaatgcg

SEQ ID NO: 3375101 - DNA, 25 bp, Homo sapien
tccagtcggaatgcggcttggaagt

SEQ ID NO: 3375102 - DNA, 25 bp, Homo sapien
caatgggtggccaagaatctggcgc

SEQ ID NO: 3375103 - DNA, 25 bp, Homo sapien
gagtccagcacccattttccacaga

SEQ ID NO: 3375104 - DNA, 25 bp, Homo sapien
gggtcgacaataacacagtgggcct

SEQ ID NO: 3375105 - DNA, 25 bp, Homo sapien
tacaaggcgggacctgaggatctca

SEQ ID NO: 3375106 - DNA, 25 bp, Homo sapien
agcaatgccacctccggaaatgctg

SEQ ID NO: 3375107 - DNA, 25 bp, Homo sapien
gctgctcaactgactaaaggtattt

SEQ ID NO: 3375108 - DNA, 25 bp, Homo sapien
cagctgctcaactgactaaaggtat

SEQ ID NO: 3375109 - DNA, 25 bp, Homo sapien
gcagctgctcaactgactaaaggta

SEQ ID NO: 3375110 - DNA, 25 bp, Homo sapien
ttttcagggcttgcccgtgaggtgc

SEQ ID NO: 3375111 - DNA, 25 bp, Homo sapien
tgaggtgccaggatatacagcccag

SEQ ID NO: 3375112 - DNA, 25 bp, Homo sapien
ctgcagagcgaaagaggggttttca

SEQ ID NO: 3375113 - DNA, 25 bp, Homo sapien
cgtgaggtgccaggatatacagccc

SEQ ID NO: 3375114 - DNA, 25 bp, Homo sapien
gtttctgccctcatcatctaagaca

SEQ ID NO: 3375115 - DNA, 25 bp, Homo sapien
ctgccgatcaagcttctgctgcctc

SEQ ID NO: 3375116 - DNA, 25 bp, Homo sapien
caggtttctgccctcatcatctaag

SEQ ID NO: 3375117 - DNA, 25 bp, Homo sapien
ctcaggtttctgccctcatcatcta

SEQ ID NO: 3375118 - DNA, 25 bp, Homo sapien
caatcagacgggatcatccagggaa

SEQ ID NO: 3375119 - DNA, 25 bp, Homo sapien
ccccaatcagacgggatcatccagg

SEQ ID NO: 3375120 - DNA, 25 bp, Homo sapien
cggcagggttagtgctgagctggga

SEQ ID NO: 3375121 - DNA, 25 bp, Homo sapien
atgggaatcccatcccccaatcaga

SEQ ID NO: 3375122 - DNA, 25 bp, Homo sapien
agaggttggctgacccactgcctcc

SEQ ID NO: 3375123 - DNA, 25 bp, Homo sapien
aggcacagaggttggctgacccact

SEQ ID NO: 3375124 - DNA, 25 bp, Homo sapien
gctcccagttatcggggggtccaca

SEQ ID NO: 3375125 - DNA, 25 bp, Homo sapien
acagaggttggctgacccactgcct

SEQ ID NO: 3375126 - DNA, 25 bp, Homo sapien
tcaggggctcctggcgcttcttctt

SEQ ID NO: 3375127 - DNA, 25 bp, Homo sapien
gggctcctggcgcttcttcttctgc

SEQ ID NO: 3375128 - DNA, 25 bp, Homo sapien
catcaggggctcctggcgcttcttc

SEQ ID NO: 3375129 - DNA, 25 bp, Homo sapien
aggggctcctggcgcttcttcttct

SEQ ID NO: 3375130 - DNA, 25 bp, Homo sapien
tccggggccgcccatctgcattggc

SEQ ID NO: 3375131 - DNA, 25 bp, Homo sapien
ctccggggccgcccatctgcattgg

SEQ ID NO: 3375132 - DNA, 25 bp, Homo sapien
gctccggggccgcccatctgcattg

SEQ ID NO: 3375133 - DNA, 25 bp, Homo sapien
cactgctgctgaggtaggactccac

SEQ ID NO: 3375134 - DNA, 25 bp, Homo sapien
tggtagctggtgctgccactgctgc

SEQ ID NO: 3375135 - DNA, 25 bp, Homo sapien
tgccactgctgctgaggtaggactc

SEQ ID NO: 3375136 - DNA, 25 bp, Homo sapien
cttggtagctggtgctgccactgct

SEQ ID NO: 3375137 - DNA, 25 bp, Homo sapien
caggaagtgacgggctccccgaagc

SEQ ID NO: 3375138 - DNA, 25 bp, Homo sapien
acgggctccccgaagcagtgacggg

SEQ ID NO: 3375139 - DNA, 25 bp, Homo sapien
aagtgacgggctccccgaagcagtg

SEQ ID NO: 3375140 - DNA, 25 bp, Homo sapien
cgggctccccgaagcagtgacggga

SEQ ID NO: 3375141 - DNA, 25 bp, Homo sapien
tagagtacaggcataccaggtatgg

SEQ ID NO: 3375142 - DNA, 25 bp, Homo sapien
ttttctgaaggcctctcaagtagag

SEQ ID NO: 3375143 - DNA, 25 bp, Homo sapien
tctcaagtagagtacaggcatacca

SEQ ID NO: 3375144 - DNA, 25 bp, Homo sapien
caggcataccaggtatggccagggt

SEQ ID NO: 3375145 - DNA, 25 bp, Homo sapien
cagctgcacactggcgagtgagtcg

SEQ ID NO: 3375146 - DNA, 25 bp, Homo sapien
ctgctgtagctgccgccttggttct

SEQ ID NO: 3375147 - DNA, 25 bp, Homo sapien
cttcttctccttcctagcggcgcca

SEQ ID NO: 3375148 - DNA, 25 bp, Homo sapien
gctggtgctgttgggcgcgtggctc

SEQ ID NO: 3375149 - DNA, 25 bp, Homo sapien
catcattaaaaacgtgggccccttg

SEQ ID NO: 3375150 - DNA, 25 bp, Homo sapien
aattggcatacactcgccttcccaa

SEQ ID NO: 3375151 - DNA, 25 bp, Homo sapien
gagaaagattgcaattggcatacac

SEQ ID NO: 3375152 - DNA, 25 bp, Homo sapien
gagcatctcccatcctacgtcagct

SEQ ID NO: 3375153 - DNA, 25 bp, Homo sapien
tcctgggcgtggtctgactggccca

SEQ ID NO: 3375154 - DNA, 25 bp, Homo sapien
cctctgcatcgtggcacggagatcc

SEQ ID NO: 3375155 - DNA, 25 bp, Homo sapien
tgcatcgtggcacggagatcctgcc

SEQ ID NO: 3375156 - DNA, 25 bp, Homo sapien
gccagtgctgctggcccgctggtgc

SEQ ID NO: 3375157 - DNA, 25 bp, Homo sapien
ttggacacaggaaggccatgctccc

SEQ ID NO: 3375158 - DNA, 25 bp, Homo sapien
ggtttggacacaggaaggccatgct

SEQ ID NO: 3375159 - DNA, 25 bp, Homo sapien
gaaaggtgcatctgagaacctggga

SEQ ID NO: 3375160 - DNA, 25 bp, Homo sapien
cagagaaaggtgcatctgagaacct

SEQ ID NO: 3375161 - DNA, 25 bp, Homo sapien
gtgttactatttagctgggaggagc

SEQ ID NO: 3375162 - DNA, 25 bp, Homo sapien
gagctggagctattctcctcctcat

SEQ ID NO: 3375163 - DNA, 25 bp, Homo sapien
tcatcctcgtcaaagctcatgctgc

SEQ ID NO: 3375164 - DNA, 25 bp, Homo sapien
cctgacggacttcctgctagtagca

SEQ ID NO: 3375165 - DNA, 25 bp, Homo sapien
cctggacctcaacgtccactggttg

SEQ ID NO: 3375166 - DNA, 25 bp, Homo sapien
tggacctcaacgtccactggttgct

SEQ ID NO: 3375167 - DNA, 25 bp, Homo sapien
caacgtccactggttgctctggagc

SEQ ID NO: 3375168 - DNA, 25 bp, Homo sapien
cctcaacgtccactggttgctctgg

SEQ ID NO: 3375169 - DNA, 25 bp, Homo sapien
taggtggggtacatgccccggtcca

SEQ ID NO: 3375170 - DNA, 25 bp, Homo sapien
cggcatttgatggtgataccctggg

SEQ ID NO: 3375171 - DNA, 25 bp, Homo sapien
ccatcctcacggtccaggtgcagaa

SEQ ID NO: 3375172 - DNA, 25 bp, Homo sapien
ttcttgtcccgagtgatgcggcatt

SEQ ID NO: 3375173 - DNA, 25 bp, Homo sapien
cgagacaagtctgttgggtccacag

SEQ ID NO: 3375174 - DNA, 25 bp, Homo sapien
ccctcctcgagacaagtctgttggg

SEQ ID NO: 3375175 - DNA, 25 bp, Homo sapien
cgcagtttcccgatatagctgtccc

SEQ ID NO: 3375176 - DNA, 25 bp, Homo sapien
agtttcccgatatagctgtcccctc

SEQ ID NO: 3375177 - DNA, 25 bp, Homo sapien
gatgagatctcctctgtcgcagcca

SEQ ID NO: 3375178 - DNA, 25 bp, Homo sapien
gttggatccatcactcttggtgggc

SEQ ID NO: 3375179 - DNA, 25 bp, Homo sapien
gaggtgagcaaacagaatggcatct

SEQ ID NO: 3375180 - DNA, 25 bp, Homo sapien
ccatggtggcctgcgttatcagtga

SEQ ID NO: 3375181 - DNA, 25 bp, Homo sapien
gaacttggtgcccatcaagttggac

SEQ ID NO: 3375182 - DNA, 25 bp, Homo sapien
ccttctgagggttgactccattgtc

SEQ ID NO: 3375183 - DNA, 25 bp, Homo sapien
tgccagctcctgacgtaaggttcca

SEQ ID NO: 3375184 - DNA, 25 bp, Homo sapien
gatgaggccttctgagggttgactc

SEQ ID NO: 3375185 - DNA, 25 bp, Homo sapien
ccttgaagcctaagacgtttgtctc

SEQ ID NO: 3375186 - DNA, 25 bp, Homo sapien
cccttgaagcctaagacgtttgtct

SEQ ID NO: 3375187 - DNA, 25 bp, Homo sapien
tcatgcctgggacaatcacgctcat

SEQ ID NO: 3375188 - DNA, 25 bp, Homo sapien
gcggatagagactctctcatgaacc

SEQ ID NO: 3375189 - DNA, 25 bp, Homo sapien
gttgcgggggcggatagagactctc

SEQ ID NO: 3375190 - DNA, 25 bp, Homo sapien
cgggggcggatagagactctctcat

SEQ ID NO: 3375191 - DNA, 25 bp, Homo sapien
caggcctttggcaccatgaccaccc

SEQ ID NO: 3375192 - DNA, 25 bp, Homo sapien
tgtgacgcgcccatggaagttgagt

SEQ ID NO: 3375193 - DNA, 25 bp, Homo sapien
gcagctcgatgatactctccgtgtt

SEQ ID NO: 3375194 - DNA, 25 bp, Homo sapien
cttcacggaggcctgtgtgacgcgc

SEQ ID NO: 3375195 - DNA, 25 bp, Homo sapien
tcttattctgccagcgtgctagcag

SEQ ID NO: 3375196 - DNA, 25 bp, Homo sapien
tactcgcacgccagcttgctgtcga

SEQ ID NO: 3375197 - DNA, 25 bp, Homo sapien
tccatggtgaacacatcctctgcta

SEQ ID NO: 3375198 - DNA, 25 bp, Homo sapien
tgcagtgcacacagcgggtagttgt

SEQ ID NO: 3375199 - DNA, 25 bp, Homo sapien
tgctgtcgaagctggacagggcaat

SEQ ID NO: 3375200 - DNA, 25 bp, Homo sapien
tcacagagatgtacggccgaggtgt

SEQ ID NO: 3375201 - DNA, 25 bp, Homo sapien
ccagttttttcaggcaatgcagagc

SEQ ID NO: 3375202 - DNA, 25 bp, Homo sapien
ctagaccgagaagtgtgcagcagcc

SEQ ID NO: 3375203 - DNA, 25 bp, Homo sapien
gttaacacagggatgccgcagctgg

SEQ ID NO: 3375204 - DNA, 25 bp, Homo sapien
gacaaacactaaattctacaacata

SEQ ID NO: 3375205 - DNA, 25 bp, Homo sapien
caagtttgtcattgcacataccaat

SEQ ID NO: 3375206 - DNA, 25 bp, Homo sapien
tgtacttagacaaacactaaattct

SEQ ID NO: 3375207 - DNA, 25 bp, Homo sapien
tgatatatgtgtgtacttagacaaa

SEQ ID NO: 3375208 - DNA, 25 bp, Homo sapien
agacatttggatgtacctttcagtt

SEQ ID NO: 3375209 - DNA, 25 bp, Homo sapien
tcagacatttggatgtacctttcag

SEQ ID NO: 3375210 - DNA, 25 bp, Homo sapien
cagacatttggatgtacctttcagt

SEQ ID NO: 3375211 - DNA, 25 bp, Homo sapien
cagatagctaccctgagcaagagga

SEQ ID NO: 3375212 - DNA, 25 bp, Homo sapien
tcaagtgtcatagctatcaggccac

SEQ ID NO: 3375213 - DNA, 25 bp, Homo sapien
tcagcaccgataaagcatatacagg

SEQ ID NO: 3375214 - DNA, 25 bp, Homo sapien
cagcatgctgaggaagcgtaacccc

SEQ ID NO: 3375215 - DNA, 25 bp, Homo sapien
gttctgtcagatcaaaattgtatca

SEQ ID NO: 3375216 - DNA, 25 bp, Homo sapien
atgattattagaaaagcccaaaata

SEQ ID NO: 3375217 - DNA, 25 bp, Homo sapien
tgttctgtcagatcaaaattgtatc

SEQ ID NO: 3375218 - DNA, 25 bp, Homo sapien
tctgtcagatcaaaattgtatcaca

SEQ ID NO: 3375219 - DNA, 25 bp, Homo sapien
ccagtgagtgatacaattcaatgca

SEQ ID NO: 3375220 - DNA, 25 bp, Homo sapien
gatcttttggttcttaatccagtga

SEQ ID NO: 3375221 - DNA, 25 bp, Homo sapien
caaaattcacaactaacaaggcaga

SEQ ID NO: 3375222 - DNA, 25 bp, Homo sapien
taggacttgaacatggatcttttgg

SEQ ID NO: 3375223 - DNA, 25 bp, Homo sapien
catgttatggccatccatttctcaa

SEQ ID NO: 3375224 - DNA, 25 bp, Homo sapien
taagactggatgacttttaaggccc

SEQ ID NO: 3375225 - DNA, 25 bp, Homo sapien
caggtggacagtcaggatttcatgt

SEQ ID NO: 3375226 - DNA, 25 bp, Homo sapien
catctttggctagcgcatttttctt

SEQ ID NO: 3375227 - DNA, 25 bp, Homo sapien
ctctgctcatcgcaacctttgtctc

SEQ ID NO: 3375228 - DNA, 25 bp, Homo sapien
tctgctcatcgcaacctttgtctcc

SEQ ID NO: 3375229 - DNA, 25 bp, Homo sapien
tctctgctcatcgcaacctttgtct

SEQ ID NO: 3375230 - DNA, 25 bp, Homo sapien
cagtaactgaaacttgcagcaaaaa

SEQ ID NO: 3375231 - DNA, 25 bp, Homo sapien
ccagtaactgaaacttgcagcaaaa

SEQ ID NO: 3375232 - DNA, 25 bp, Homo sapien
agtaactgaaacttgcagcaaaaaa

SEQ ID NO: 3375233 - DNA, 25 bp, Homo sapien
ctggaagggtcaggaacgtatgcat

SEQ ID NO: 3375234 - DNA, 25 bp, Homo sapien
gagtctgcagccttcaccgaaatat

SEQ ID NO: 3375235 - DNA, 25 bp, Homo sapien
gaccaccgtgagcagtcatggcgta

SEQ ID NO: 3375236 - DNA, 25 bp, Homo sapien
cgccgccgacacctgaaggtaagag

SEQ ID NO: 3375237 - DNA, 25 bp, Homo sapien
tgaagggccaatgcccacggttccg

SEQ ID NO: 3375238 - DNA, 25 bp, Homo sapien
catttacagcgacgggtaaccacgc

SEQ ID NO: 3375239 - DNA, 25 bp, Homo sapien
caactcccgacagtggaggtgaaga

SEQ ID NO: 3375240 - DNA, 25 bp, Homo sapien
taaccacgcgggaggagcaggtcaa

SEQ ID NO: 3375241 - DNA, 25 bp, Homo sapien
gaaggcgagggtaccatttacagcg

SEQ ID NO: 3375242 - DNA, 25 bp, Homo sapien
cttgacttttcctcgtaccagttga

SEQ ID NO: 3375243 - DNA, 25 bp, Homo sapien
ctcgtaccagttgagaagactgctc

SEQ ID NO: 3375244 - DNA, 25 bp, Homo sapien
gtaccagttgagaagactgctcggg

SEQ ID NO: 3375245 - DNA, 25 bp, Homo sapien
agttgagaagactgctcggggatcc

SEQ ID NO: 3375246 - DNA, 25 bp, Homo sapien
tcctccaaataccttgtgtgagttc

SEQ ID NO: 3375247 - DNA, 25 bp, Homo sapien
ttcatgggcctgtcttccagggaga

SEQ ID NO: 3375248 - DNA, 25 bp, Homo sapien
cttcatgggcctgtcttccagggag

SEQ ID NO: 3375249 - DNA, 25 bp, Homo sapien
ctcctccaaataccttgtgtgagtt

SEQ ID NO: 3375250 - DNA, 25 bp, Homo sapien
tgaaggtccttgaaagagtggccaa

SEQ ID NO: 3375251 - DNA, 25 bp, Homo sapien
tatggcagccaaagggagtcatgga

SEQ ID NO: 3375252 - DNA, 25 bp, Homo sapien
ctggtctggagggtaaagcacactg

SEQ ID NO: 3375253 - DNA, 25 bp, Homo sapien
gcttttgagcaggagaggatcccaa

SEQ ID NO: 3375254 - DNA, 25 bp, Homo sapien
ctatcctcccgggactcccaactag

SEQ ID NO: 3375255 - DNA, 25 bp, Homo sapien
gtgaaaaggcccagtaaacccatga

SEQ ID NO: 3375256 - DNA, 25 bp, Homo sapien
aacaagttctgtgctcagtcatgcc

SEQ ID NO: 3375257 - DNA, 25 bp, Homo sapien
tctgtgctcagtcatgccatgggag

SEQ ID NO: 3375258 - DNA, 25 bp, Homo sapien
gaactggcctcgtaaggaagctcca

SEQ ID NO: 3375259 - DNA, 25 bp, Homo sapien
taaactttggagttacaggccttgc

SEQ ID NO: 3375260 - DNA, 25 bp, Homo sapien
ccaaaagaggtaggccaagcaagca

SEQ ID NO: 3375261 - DNA, 25 bp, Homo sapien
cagaattgcttcttgccagggcgaa

SEQ ID NO: 3375262 - DNA, 25 bp, Homo sapien
aaatatgggccttctagaggcttcc

SEQ ID NO: 3375263 - DNA, 25 bp, Homo sapien
gcctttgagcggcagcagctgttgc

SEQ ID NO: 3375264 - DNA, 25 bp, Homo sapien
tgtctcacacgtgattgccttccag

SEQ ID NO: 3375265 - DNA, 25 bp, Homo sapien
cctgtccccatttgggtagagcttt

SEQ ID NO: 3375266 - DNA, 25 bp, Homo sapien
gcagaaatgcccaaggtaaccgact

SEQ ID NO: 3375267 - DNA, 25 bp, Homo sapien
tggcaggaaagcagtaaggacattc

SEQ ID NO: 3375268 - DNA, 25 bp, Homo sapien
tcaaaaagccaattgtcattctgcc

SEQ ID NO: 3375269 - DNA, 25 bp, Homo sapien
tatgcaaagtgtgacttaagcaggg

SEQ ID NO: 3375270 - DNA, 25 bp, Homo sapien
ggttctccagttttcaccagcttga

SEQ ID NO: 3375271 - DNA, 25 bp, Homo sapien
tctccagttttcaccagcttgatcc

SEQ ID NO: 3375272 - DNA, 25 bp, Homo sapien
gcctggttctccagttttcaccagc

SEQ ID NO: 3375273 - DNA, 25 bp, Homo sapien
tggttctccagttttcaccagcttg

SEQ ID NO: 3375274 - DNA, 25 bp, Homo sapien
tgcccagtaagcagggaactggcag

SEQ ID NO: 3375275 - DNA, 25 bp, Homo sapien
gctctgcccagtaagcagggaactg

SEQ ID NO: 3375276 - DNA, 25 bp, Homo sapien
gtagtgaattgtaagaagaagagag

SEQ ID NO: 3375277 - DNA, 25 bp, Homo sapien
ctacttaagtagtgaattgtaagaa

SEQ ID NO: 3375278 - DNA, 25 bp, Homo sapien
tacagctggagcaagtagatctcaa

SEQ ID NO: 3375279 - DNA, 25 bp, Homo sapien
gaattgagcccctgaagaacaagga

SEQ ID NO: 3375280 - DNA, 25 bp, Homo sapien
caatgggatatgagtggagcaccta

SEQ ID NO: 3375281 - DNA, 25 bp, Homo sapien
gactgtctgaagatgacctcaaggg

SEQ ID NO: 3375282 - DNA, 25 bp, Homo sapien
ctgccaagatgaagtcttccacagg

SEQ ID NO: 3375283 - DNA, 25 bp, Homo sapien
tcaatccctactctgtccagatgta

SEQ ID NO: 3375284 - DNA, 25 bp, Homo sapien
actctgtccagatgtaccgctgggc

SEQ ID NO: 3375285 - DNA, 25 bp, Homo sapien
gccaagatgaagtcttccacaggcc

SEQ ID NO: 3375286 - DNA, 25 bp, Homo sapien
tcctctcttctcagaaacatcctca

SEQ ID NO: 3375287 - DNA, 25 bp, Homo sapien
ctcctctcttctcagaaacatcctc

SEQ ID NO: 3375288 - DNA, 25 bp, Homo sapien
cctctcttctcagaaacatcctcat

SEQ ID NO: 3375289 - DNA, 25 bp, Homo sapien
gctcttggcaagcaattagctgtcc

SEQ ID NO: 3375290 - DNA, 25 bp, Homo sapien
cttcacgactaattgcagagaggca

SEQ ID NO: 3375291 - DNA, 25 bp, Homo sapien
tttggcaatctattaaagggcccac

SEQ ID NO: 3375292 - DNA, 25 bp, Homo sapien
tgcgcctgcggagtttggagctcct

SEQ ID NO: 3375293 - DNA, 25 bp, Homo sapien
caaatcctggaaacggaggccaaag

SEQ ID NO: 3375294 - DNA, 25 bp, Homo sapien
ggccaaaggtactcttgtccaggct

SEQ ID NO: 3375295 - DNA, 25 bp, Homo sapien
gaccccaactctctgaggggtgcat

SEQ ID NO: 3375296 - DNA, 25 bp, Homo sapien
tccaggctagagtcctgaccccaac

SEQ ID NO: 3375297 - DNA, 25 bp, Homo sapien
aggaaaatgggaggttgcatcagac

SEQ ID NO: 3375298 - DNA, 25 bp, Homo sapien
ggaaaatgggaggttgcatcagacc

SEQ ID NO: 3375299 - DNA, 25 bp, Homo sapien
gtaattgatacacggcgcagctttg

SEQ ID NO: 3375300 - DNA, 25 bp, Homo sapien
gcacgcagcctctcggtaattgata

SEQ ID NO: 3375301 - DNA, 25 bp, Homo sapien
acaatgcgggcccttatcagctggg

SEQ ID NO: 3375302 - DNA, 25 bp, Homo sapien
cagcggttaacactcttgatggccc

SEQ ID NO: 3375303 - DNA, 25 bp, Homo sapien
gacctgcggcggctggcagcttcac

SEQ ID NO: 3375304 - DNA, 25 bp, Homo sapien
cctgcggcggctggcagcttcaccc

SEQ ID NO: 3375305 - DNA, 25 bp, Homo sapien
acctgcggcggctggcagcttcacc

SEQ ID NO: 3375306 - DNA, 25 bp, Homo sapien
taacaagatccatttgcgggaggga

SEQ ID NO: 3375307 - DNA, 25 bp, Homo sapien
ccagcagtgccaagcaggagacact

SEQ ID NO: 3375308 - DNA, 25 bp, Homo sapien
gaagatgagggcatttctcctccgg

SEQ ID NO: 3375309 - DNA, 25 bp, Homo sapien
cttgggtctggcctagtggactgct

SEQ ID NO: 3375310 - DNA, 25 bp, Homo sapien
taatgtctgacgttgcacgtgggtc

SEQ ID NO: 3375311 - DNA, 25 bp, Homo sapien
ccatgagggtaacactagagggttc

SEQ ID NO: 3375312 - DNA, 25 bp, Homo sapien
tccagcagctgaagtaggcataagg

SEQ ID NO: 3375313 - DNA, 25 bp, Homo sapien
ttaagagactaaacgtgcgtgcggc

SEQ ID NO: 3375314 - DNA, 25 bp, Homo sapien
cctatctgaattggcccactctggc

SEQ ID NO: 3375315 - DNA, 25 bp, Homo sapien
tctggatagattccattcagtctct

SEQ ID NO: 3375316 - DNA, 25 bp, Homo sapien
gccagcagattcttgccagtaatat

SEQ ID NO: 3375317 - DNA, 25 bp, Homo sapien
gggcagcaacaagcctgattaaggc

SEQ ID NO: 3375318 - DNA, 25 bp, Homo sapien
gcggcatcccgttaaggaacacagg

SEQ ID NO: 3375319 - DNA, 25 bp, Homo sapien
cgttttctggttcagcgcgctggtg

SEQ ID NO: 3375320 - DNA, 25 bp, Homo sapien
cagctgtgcagcttcaagcggcatc

SEQ ID NO: 3375321 - DNA, 25 bp, Homo sapien
tcattagatgggtgacgcgggcttt

SEQ ID NO: 3375322 - DNA, 25 bp, Homo sapien
gagacatgcaaggtgtcctcccatt

SEQ ID NO: 3375323 - DNA, 25 bp, Homo sapien
caggcttagctctttgtggtgctgc

SEQ ID NO: 3375324 - DNA, 25 bp, Homo sapien
gccccagaggttcctatggcatgtg

SEQ ID NO: 3375325 - DNA, 25 bp, Homo sapien
ctagagtgagttttcccagcaggcc

SEQ ID NO: 3375326 - DNA, 25 bp, Homo sapien
catgggcaaaggaaacacgaggttc

SEQ ID NO: 3375327 - DNA, 25 bp, Homo sapien
acagatggatgattgccagtgagca

SEQ ID NO: 3375328 - DNA, 25 bp, Homo sapien
tgccagagttgggaagtggccatgg

SEQ ID NO: 3375329 - DNA, 25 bp, Homo sapien
gtggccatggctagacgggctgggc

SEQ ID NO: 3375330 - DNA, 25 bp, Homo sapien
ttctgctgggaatgaggcatcacat

SEQ ID NO: 3375331 - DNA, 25 bp, Homo sapien
tctgctgggaatgaggcatcacatc

SEQ ID NO: 3375332 - DNA, 25 bp, Homo sapien
catacagccgcttccccttcctgcc

SEQ ID NO: 3375333 - DNA, 25 bp, Homo sapien
cagtgcgccctagaaaactgcaggg

SEQ ID NO: 3375334 - DNA, 25 bp, Homo sapien
tgagcgccgagcaaatcagcggctt

SEQ ID NO: 3375335 - DNA, 25 bp, Homo sapien
gacatctgcatgagcgtgactcggt

SEQ ID NO: 3375336 - DNA, 25 bp, Homo sapien
cccaaagccttactggcagggagtg

SEQ ID NO: 3375337 - DNA, 25 bp, Homo sapien
cactccgtagctgcgggatggctga

SEQ ID NO: 3375338 - DNA, 25 bp, Homo sapien
ttagtgcctgaaggacgaagtgctg

SEQ ID NO: 3375339 - DNA, 25 bp, Homo sapien
tgagggtgccgtcaaaccagcactg

SEQ ID NO: 3375340 - DNA, 25 bp, Homo sapien
aaatatcaggttcaactagaggcgg

SEQ ID NO: 3375341 - DNA, 25 bp, Homo sapien
ccgtcgggaccatggtgttggacca

SEQ ID NO: 3375342 - DNA, 25 bp, Homo sapien
tgggaactttctcacggactcttgc

SEQ ID NO: 3375343 - DNA, 25 bp, Homo sapien
ctcctccggctgatgggtggcttcc

SEQ ID NO: 3375344 - DNA, 25 bp, Homo sapien
tcactctgctgaggcgagtacggcc

SEQ ID NO: 3375345 - DNA, 25 bp, Homo sapien
cttccattcctactcgctaaggtca

SEQ ID NO: 3375346 - DNA, 25 bp, Homo sapien
gcctgaacaagtgcaggctttcaca

SEQ ID NO: 3375347 - DNA, 25 bp, Homo sapien
gttgacagcctgaacaagtgcaggc

SEQ ID NO: 3375348 - DNA, 25 bp, Homo sapien
taaggtcaccagtgttgacagcctg

SEQ ID NO: 3375349 - DNA, 25 bp, Homo sapien
tgtgttcactctggtgagccggttg

SEQ ID NO: 3375350 - DNA, 25 bp, Homo sapien
tgggacatgcggttgtagctccaag

SEQ ID NO: 3375351 - DNA, 25 bp, Homo sapien
gcggttgtagctccaaggggaccac

SEQ ID NO: 3375352 - DNA, 25 bp, Homo sapien
gtgctgttgggacatgcggttgtag

SEQ ID NO: 3375353 - DNA, 25 bp, Homo sapien
tgcggttgtagctccaaggggacca

SEQ ID NO: 3375354 - DNA, 25 bp, Homo sapien
ctgtggtcctatgaggtagagcttg

SEQ ID NO: 3375355 - DNA, 25 bp, Homo sapien
ggtagagcttggaaaaagcagcccc

SEQ ID NO: 3375356 - DNA, 25 bp, Homo sapien
gttgagccagggacccatctgtggt

SEQ ID NO: 3375357 - DNA, 25 bp, Homo sapien
tttgtgtccataggcctggaccaca

SEQ ID NO: 3375358 - DNA, 25 bp, Homo sapien
ctagaggaagacagatgaagccaag

SEQ ID NO: 3375359 - DNA, 25 bp, Homo sapien
aagacagatgaagccaagccatgga

SEQ ID NO: 3375360 - DNA, 25 bp, Homo sapien
aagccaagccatggaggacaggatg

SEQ ID NO: 3375361 - DNA, 25 bp, Homo sapien
gactgacatggctaaagctgtgcaa

SEQ ID NO: 3375362 - DNA, 25 bp, Homo sapien
tagagacggagccagaccgttttct

SEQ ID NO: 3375363 - DNA, 25 bp, Homo sapien
ggaacacaagcacgccggctgggct

SEQ ID NO: 3375364 - DNA, 25 bp, Homo sapien
ccttgggtttgaacgctggaacaca

SEQ ID NO: 3375365 - DNA, 25 bp, Homo sapien
gtgctagagacggagccagaccgtt

SEQ ID NO: 3375366 - DNA, 25 bp, Homo sapien
ggcttgggaagctgaacgcaggcct

SEQ ID NO: 3375367 - DNA, 25 bp, Homo sapien
tgagaaaccagagacgctcactggc

SEQ ID NO: 3375368 - DNA, 25 bp, Homo sapien
tgcattccctgaattatgcactggg

SEQ ID NO: 3375369 - DNA, 25 bp, Homo sapien
tccagctactgggttccagcgacag

SEQ ID NO: 3375370 - DNA, 25 bp, Homo sapien
cagtgcttgggatctcttctaggcc

SEQ ID NO: 3375371 - DNA, 25 bp, Homo sapien
gatgaatgtctagcctcgttctccc

SEQ ID NO: 3375372 - DNA, 25 bp, Homo sapien
ctcagaaggatgaatgtctagcctc

SEQ ID NO: 3375373 - DNA, 25 bp, Homo sapien
ggggctagtggcctccaacagctca

SEQ ID NO: 3375374 - DNA, 25 bp, Homo sapien
ctcgttctcccaagcagggacattc

SEQ ID NO: 3375375 - DNA, 25 bp, Homo sapien
ccaaacatttgtggatatccaggca

SEQ ID NO: 3375376 - DNA, 25 bp, Homo sapien
acacgtatgccctgaatatgtgcac

SEQ ID NO: 3375377 - DNA, 25 bp, Homo sapien
aggcacacacgcagctgagcgattg

SEQ ID NO: 3375378 - DNA, 25 bp, Homo sapien
gcagctgagcgattgtacatccaca

SEQ ID NO: 3375379 - DNA, 25 bp, Homo sapien
cactgcttccgtggtggccttggct

SEQ ID NO: 3375380 - DNA, 25 bp, Homo sapien
ggccaccttggtcccggcgctgtaa

SEQ ID NO: 3375381 - DNA, 25 bp, Homo sapien
tgccctgatctgttctgatcctggc

SEQ ID NO: 3375382 - DNA, 25 bp, Homo sapien
acaagcgcgccttcaaccagctgct

SEQ ID NO: 3375383 - DNA, 25 bp, Homo sapien
ggtgctatattggacatccccatcc

SEQ ID NO: 3375384 - DNA, 25 bp, Homo sapien
tggtgctatattggacatccccatc

SEQ ID NO: 3375385 - DNA, 25 bp, Homo sapien
gtggtgctatattggacatccccat

SEQ ID NO: 3375386 - DNA, 25 bp, Homo sapien
tgctatattggacatccccatccat

SEQ ID NO: 3375387 - DNA, 25 bp, Homo sapien
ctgagtaataaatacactgtttttc

SEQ ID NO: 3375388 - DNA, 25 bp, Homo sapien
ttctgatcctggagatttccttttc

SEQ ID NO: 3375389 - DNA, 25 bp, Homo sapien
tctgatcctggagatttccttttct

SEQ ID NO: 3375390 - DNA, 25 bp, Homo sapien
aaatacactgtttttctgatcctgg

SEQ ID NO: 3375391 - DNA, 25 bp, Homo sapien
gatcctacagcatccttcttgattg

SEQ ID NO: 3375392 - DNA, 25 bp, Homo sapien
ctacagcatccttcttgattgccat

SEQ ID NO: 3375393 - DNA, 25 bp, Homo sapien
gcatgggatcctacagcatccttct

SEQ ID NO: 3375394 - DNA, 25 bp, Homo sapien
agcagcatgggatcctacagcatcc

SEQ ID NO: 3375395 - DNA, 25 bp, Homo sapien
ctttcatgggcaagaggctaaatct

SEQ ID NO: 3375396 - DNA, 25 bp, Homo sapien
agtgcttccagccacatacaaaaga

SEQ ID NO: 3375397 - DNA, 25 bp, Homo sapien
ccctgcttgggtgttaaataccaag

SEQ ID NO: 3375398 - DNA, 25 bp, Homo sapien
aaagacttagttccagctctgtgtc

SEQ ID NO: 3375399 - DNA, 25 bp, Homo sapien
aggctggacggcccaggctcctctt

SEQ ID NO: 3375400 - DNA, 25 bp, Homo sapien
gttcttggcaatttcttgctccgtt

SEQ ID NO: 3375401 - DNA, 25 bp, Homo sapien
catccctctatctgattgtctgcga

SEQ ID NO: 3375402 - DNA, 25 bp, Homo sapien
ttgtctgcgaggctagttcttggca

SEQ ID NO: 3375403 - DNA, 25 bp, Homo sapien
gggacatggcccctgcccgccagca

SEQ ID NO: 3375404 - DNA, 25 bp, Homo sapien
ggacatggcccctgcccgccagcac

SEQ ID NO: 3375405 - DNA, 25 bp, Homo sapien
acatggcccctgcccgccagcacac

SEQ ID NO: 3375406 - DNA, 25 bp, Homo sapien
ccgggacatggcccctgcccgccag

SEQ ID NO: 3375407 - DNA, 25 bp, Homo sapien
tggcagacatggaggctcctctagc

SEQ ID NO: 3375408 - DNA, 25 bp, Homo sapien
gcccataggcttgggaaggcctctt

SEQ ID NO: 3375409 - DNA, 25 bp, Homo sapien
cgtaggacagggaggatctcactga

SEQ ID NO: 3375410 - DNA, 25 bp, Homo sapien
tttaacgctgaactggctggcctgg

SEQ ID NO: 3375411 - DNA, 25 bp, Homo sapien
cctgcagagaacctaagcgggtggt

SEQ ID NO: 3375412 - DNA, 25 bp, Homo sapien
taagcgggtggtgggaaggactgta

SEQ ID NO: 3375413 - DNA, 25 bp, Homo sapien
taggagggtgagcagtggcaaagcc

SEQ ID NO: 3375414 - DNA, 25 bp, Homo sapien
gcaaagccctcagtctggtaaggag

SEQ ID NO: 3375415 - DNA, 25 bp, Homo sapien
gcctggactccataaagggcctggg

SEQ ID NO: 3375416 - DNA, 25 bp, Homo sapien
cactagtaccaggagccaatggcca

SEQ ID NO: 3375417 - DNA, 25 bp, Homo sapien
gaacaggtagccaggaccgcctgga

SEQ ID NO: 3375418 - DNA, 25 bp, Homo sapien
catgtgctgtccgatcctgttaaca

SEQ ID NO: 3375419 - DNA, 25 bp, Homo sapien
agcagagatgatcctccctggagga

SEQ ID NO: 3375420 - DNA, 25 bp, Homo sapien
taggatcagagacatcgtcctggac

SEQ ID NO: 3375421 - DNA, 25 bp, Homo sapien
attgatgtggcaccgtcctggccgg

SEQ ID NO: 3375422 - DNA, 25 bp, Homo sapien
gcctgttcctgataactgataggat

SEQ ID NO: 3375423 - DNA, 25 bp, Homo sapien
taggcttgtttctaggtaggagtaa

SEQ ID NO: 3375424 - DNA, 25 bp, Homo sapien
ggcatattgccaacacgcttccttt

SEQ ID NO: 3375425 - DNA, 25 bp, Homo sapien
aactttgagggcatattgccaacac

SEQ ID NO: 3375426 - DNA, 25 bp, Homo sapien
ctaggcttgtttctaggtaggagta

SEQ ID NO: 3375427 - DNA, 25 bp, Homo sapien
cctgtcctgacccttgcagaggcgt

SEQ ID NO: 3375428 - DNA, 25 bp, Homo sapien
cacgtacagataagacagagcccaa

SEQ ID NO: 3375429 - DNA, 25 bp, Homo sapien
tgggtgcccactcgctgccgtggaa

SEQ ID NO: 3375430 - DNA, 25 bp, Homo sapien
tccaccagctccacgtacagataag

SEQ ID NO: 3375431 - DNA, 25 bp, Homo sapien
tgtctgaccaggtgagaaagaagca

SEQ ID NO: 3375432 - DNA, 25 bp, Homo sapien
agccgagatactgaaccgtcctggg

SEQ ID NO: 3375433 - DNA, 25 bp, Homo sapien
ggcaatgaggcagccgagatactga

SEQ ID NO: 3375434 - DNA, 25 bp, Homo sapien
cacagacttgttccaaactgatgtc

SEQ ID NO: 3375435 - DNA, 25 bp, Homo sapien
gtagaagtcgctcttgtccctcctt

SEQ ID NO: 3375436 - DNA, 25 bp, Homo sapien
ttctgtagaagtcgctcttgtccct

SEQ ID NO: 3375437 - DNA, 25 bp, Homo sapien
ctgtagaagtcgctcttgtccctcc

SEQ ID NO: 3375438 - DNA, 25 bp, Homo sapien
cccttctgtagaagtcgctcttgtc

SEQ ID NO: 3375439 - DNA, 25 bp, Homo sapien
gagcaagacatgaactcagtctgca

SEQ ID NO: 3375440 - DNA, 25 bp, Homo sapien
ctcagccttgcaagccagagcaaga

SEQ ID NO: 3375441 - DNA, 25 bp, Homo sapien
aagaggccgccacgccctcagcctt

SEQ ID NO: 3375442 - DNA, 25 bp, Homo sapien
cttccaagcagatcttctcagagag

SEQ ID NO: 3375443 - DNA, 25 bp, Homo sapien
tcaatcactgggatgatcccgctgt

SEQ ID NO: 3375444 - DNA, 25 bp, Homo sapien
aatcactgggatgatcccgctgtga

SEQ ID NO: 3375445 - DNA, 25 bp, Homo sapien
cactgggatgatcccgctgtgaaga

SEQ ID NO: 3375446 - DNA, 25 bp, Homo sapien
gcctcaatcactgggatgatcccgc

SEQ ID NO: 3375447 - DNA, 25 bp, Homo sapien
atcaaccgagatccctgtttcccag

SEQ ID NO: 3375448 - DNA, 25 bp, Homo sapien
cctggtggctgtcgctcagtgatgc

SEQ ID NO: 3375449 - DNA, 25 bp, Homo sapien
cccaggttcccaaggatcaaccgag

SEQ ID NO: 3375450 - DNA, 25 bp, Homo sapien
tctgaccccgctcattcccctggag

SEQ ID NO: 3375451 - DNA, 25 bp, Homo sapien
ggcactgtcgagttagtggttttga

SEQ ID NO: 3375452 - DNA, 25 bp, Homo sapien
aaatggaggattgtacaaggtgcaa

SEQ ID NO: 3375453 - DNA, 25 bp, Homo sapien
tcactctcgattaatgagaacatca

SEQ ID NO: 3375454 - DNA, 25 bp, Homo sapien
catcatctctagcttctagtttttg

SEQ ID NO: 3375455 - DNA, 25 bp, Homo sapien
gggtgtcggctacaagtggggtgct

SEQ ID NO: 3375456 - DNA, 25 bp, Homo sapien
ctcggtgctcactagaccagaagcc

SEQ ID NO: 3375457 - DNA, 25 bp, Homo sapien
tgctcggtgctcactagaccagaag

SEQ ID NO: 3375458 - DNA, 25 bp, Homo sapien
cagctgctcggtgctcactagacca

SEQ ID NO: 3375459 - DNA, 25 bp, Homo sapien
gaaataatgacaggcatcgttggag

SEQ ID NO: 3375460 - DNA, 25 bp, Homo sapien
ggtgagaggtagtccagcccctcac

SEQ ID NO: 3375461 - DNA, 25 bp, Homo sapien
tgacaggcatcgttggaggtgtaaa

SEQ ID NO: 3375462 - DNA, 25 bp, Homo sapien
ggtgtaaagggtgagaggtagtcca

SEQ ID NO: 3375463 - DNA, 25 bp, Homo sapien
gcaagatgccacatgtccagtgtga

SEQ ID NO: 3375464 - DNA, 25 bp, Homo sapien
aatcccaagtgtcaccccaatgtag

SEQ ID NO: 3375465 - DNA, 25 bp, Homo sapien
ggtcctccgatgttcctcgctgcag

SEQ ID NO: 3375466 - DNA, 25 bp, Homo sapien
ccaatgtagcgtgacacagcagccg

SEQ ID NO: 3375467 - DNA, 25 bp, Homo sapien
gcagtccattgtgttcctgttaaca

SEQ ID NO: 3375468 - DNA, 25 bp, Homo sapien
ccaggacaggctttaatgacaatgt

SEQ ID NO: 3375469 - DNA, 25 bp, Homo sapien
ccagtcctcggaacactgtgcgtct

SEQ ID NO: 3375470 - DNA, 25 bp, Homo sapien
cctgttaacagggattcgtggacaa

SEQ ID NO: 3375471 - DNA, 25 bp, Homo sapien
cctccaaacatgcatcaggtcctgt

SEQ ID NO: 3375472 - DNA, 25 bp, Homo sapien
aggcttctgctggttcctctccgaa

SEQ ID NO: 3375473 - DNA, 25 bp, Homo sapien
gatcctgtggcatcttcacaccata

SEQ ID NO: 3375474 - DNA, 25 bp, Homo sapien
tagagacgccgtgcagaccctgtct

SEQ ID NO: 3375475 - DNA, 25 bp, Homo sapien
tttcaatgactgataggccaactcg

SEQ ID NO: 3375476 - DNA, 25 bp, Homo sapien
ggttttgctgtgatccagcgggaca

SEQ ID NO: 3375477 - DNA, 25 bp, Homo sapien
ggccaactcgaaggcaccaataaca

SEQ ID NO: 3375478 - DNA, 25 bp, Homo sapien
tcacagctgtgaaaaaagggcgctc

SEQ ID NO: 3375479 - DNA, 25 bp, Homo sapien
taaaggacagccaccagtaggcttg

SEQ ID NO: 3375480 - DNA, 25 bp, Homo sapien
accaagtaccctgctaaatccggcg

SEQ ID NO: 3375481 - DNA, 25 bp, Homo sapien
taagctgcacatggcattaaaggac

SEQ ID NO: 3375482 - DNA, 25 bp, Homo sapien
gagccccgccatgtgtttgcaccag

SEQ ID NO: 3375483 - DNA, 25 bp, Homo sapien
ggacttcaccagttcgaaattacag

SEQ ID NO: 3375484 - DNA, 25 bp, Homo sapien
gaatatgtgtctagtgcatccttaa

SEQ ID NO: 3375485 - DNA, 25 bp, Homo sapien
taacccactacgcagtttgataaga

SEQ ID NO: 3375486 - DNA, 25 bp, Homo sapien
acaggatgcttctagtgctagttgc

SEQ ID NO: 3375487 - DNA, 25 bp, Homo sapien
tattgctatgaattatcctgctctg

SEQ ID NO: 3375488 - DNA, 25 bp, Homo sapien
gttgggaacatacttaagagagaaa

SEQ ID NO: 3375489 - DNA, 25 bp, Homo sapien
gaacattcaggtacatgtattttgg

SEQ ID NO: 3375490 - DNA, 25 bp, Homo sapien
tataccatcgtattcatccagctgt

SEQ ID NO: 3375491 - DNA, 25 bp, Homo sapien
cagaaggccaagaggtctttttcat

SEQ ID NO: 3375492 - DNA, 25 bp, Homo sapien
gatatggccacagaaggccaagagg

SEQ ID NO: 3375493 - DNA, 25 bp, Homo sapien
gatacaaagggatatggccacagaa

SEQ ID NO: 3375494 - DNA, 25 bp, Homo sapien
acaaagggatatggccacagaaggc

SEQ ID NO: 3375495 - DNA, 25 bp, Homo sapien
agaattcaccgtaaaagctttgagg

SEQ ID NO: 3375496 - DNA, 25 bp, Homo sapien
tggcactgtatactccagccatacc

SEQ ID NO: 3375497 - DNA, 25 bp, Homo sapien
ctttgaggtgaaaagcgtgtgcaca

SEQ ID NO: 3375498 - DNA, 25 bp, Homo sapien
accacagaattcaccgtaaaagctt

SEQ ID NO: 3375499 - DNA, 25 bp, Homo sapien
tcatctttgtagatgcaaagcctct

SEQ ID NO: 3375500 - DNA, 25 bp, Homo sapien
ctcatctttgtagatgcaaagcctc

SEQ ID NO: 3375501 - DNA, 25 bp, Homo sapien
tctcatctttgtagatgcaaagcct

SEQ ID NO: 3375502 - DNA, 25 bp, Homo sapien
tattcgatttcaggacactgtgtga

SEQ ID NO: 3375503 - DNA, 25 bp, Homo sapien
tgagagatgtgaaacatagtctgaa

SEQ ID NO: 3375504 - DNA, 25 bp, Homo sapien
aacttattatatccaggagagacag

SEQ ID NO: 3375505 - DNA, 25 bp, Homo sapien
ggttgaagtacttcaagcagaaatc

SEQ ID NO: 3375506 - DNA, 25 bp, Homo sapien
gctttaaaacttattatatccagga

SEQ ID NO: 3375507 - DNA, 25 bp, Homo sapien
gccaattcactcattttttgatcag

SEQ ID NO: 3375508 - DNA, 25 bp, Homo sapien
tcatgtaccatgtggagggtgaact

SEQ ID NO: 3375509 - DNA, 25 bp, Homo sapien
tgctattgaagaatggtcctgcaca

SEQ ID NO: 3375510 - DNA, 25 bp, Homo sapien
cttgaaatccgaaaagtacaatata

SEQ ID NO: 3375511 - DNA, 25 bp, Homo sapien
tacaatatagctgttgctgataaag

SEQ ID NO: 3375512 - DNA, 25 bp, Homo sapien
tgaatttcccctgtaatctgggact

SEQ ID NO: 3375513 - DNA, 25 bp, Homo sapien
tctcctaaaggcaccggttgttgaa

SEQ ID NO: 3375514 - DNA, 25 bp, Homo sapien
taatctgggactttcatcatttcct

SEQ ID NO: 3375515 - DNA, 25 bp, Homo sapien
gatgaggacagaatgtcagctttct

SEQ ID NO: 3375516 - DNA, 25 bp, Homo sapien
caggagggatgggtcggcagagttt

SEQ ID NO: 3375517 - DNA, 25 bp, Homo sapien
gatgggtcggcagagtttgtaagtt

SEQ ID NO: 3375518 - DNA, 25 bp, Homo sapien
ttacacaggagggatgggtcggcag

SEQ ID NO: 3375519 - DNA, 25 bp, Homo sapien
gggatgggtcggcagagtttgtaag

SEQ ID NO: 3375520 - DNA, 25 bp, Homo sapien
ctttcttgtccatgcaaagtatgat

SEQ ID NO: 3375521 - DNA, 25 bp, Homo sapien
cactaataacgcatttcccagacat

SEQ ID NO: 3375522 - DNA, 25 bp, Homo sapien
tatgatcactaataacgcatttccc

SEQ ID NO: 3375523 - DNA, 25 bp, Homo sapien
gcaaagtatgatcactaataacgca

SEQ ID NO: 3375524 - DNA, 25 bp, Homo sapien
tttcacttcatggagagctccctct

SEQ ID NO: 3375525 - DNA, 25 bp, Homo sapien
cttagggttatgacctttcacttca

SEQ ID NO: 3375526 - DNA, 25 bp, Homo sapien
cctctgtggctgtatgctttgtctg

SEQ ID NO: 3375527 - DNA, 25 bp, Homo sapien
gacctttcctattggatggctgaga

SEQ ID NO: 3375528 - DNA, 25 bp, Homo sapien
gaattgtgatccagttgagccgtgg

SEQ ID NO: 3375529 - DNA, 25 bp, Homo sapien
ttcaagcgtgcagtgtggaaaagct

SEQ ID NO: 3375530 - DNA, 25 bp, Homo sapien
cctgggttcaaattttggtcctgca

SEQ ID NO: 3375531 - DNA, 25 bp, Homo sapien
gcttaggattggtgagctcaggctc

SEQ ID NO: 3375532 - DNA, 25 bp, Homo sapien
gcccgcggacccctccgagtgtctc

SEQ ID NO: 3375533 - DNA, 25 bp, Homo sapien
gtatttggggtggtctctgtctgcc

SEQ ID NO: 3375534 - DNA, 25 bp, Homo sapien
ctatggcaacgcggtggaaaaacgg

SEQ ID NO: 3375535 - DNA, 25 bp, Homo sapien
aaaacgggcctctgggtatctcgct

SEQ ID NO: 3375536 - DNA, 25 bp, Homo sapien
acctcctgggctgctatgcatgaca

SEQ ID NO: 3375537 - DNA, 25 bp, Homo sapien
tgttgtatgtcctccaagactgctc

SEQ ID NO: 3375538 - DNA, 25 bp, Homo sapien
tgtcctccacaaatgactgagctca

SEQ ID NO: 3375539 - DNA, 25 bp, Homo sapien
tcatctgtgtctgtaactctcccca

SEQ ID NO: 3375540 - DNA, 25 bp, Homo sapien
taacgagtgttaaactgatggccag

SEQ ID NO: 3375541 - DNA, 25 bp, Homo sapien
tgctctccggaatgctgtatggcag

SEQ ID NO: 3375542 - DNA, 25 bp, Homo sapien
aaggtatacacgtgtgggcacaagc

SEQ ID NO: 3375543 - DNA, 25 bp, Homo sapien
tgcctgtgttgacagcctaacgagt

SEQ ID NO: 3375544 - DNA, 25 bp, Homo sapien
gaattcgacatcagtccttcagata

SEQ ID NO: 3375545 - DNA, 25 bp, Homo sapien
tgggttcctgaattcgacatcagtc

SEQ ID NO: 3375546 - DNA, 25 bp, Homo sapien
catcagtccttcagatagcagcaac

SEQ ID NO: 3375547 - DNA, 25 bp, Homo sapien
cagatagcagcaacatcctgaatga

SEQ ID NO: 3375548 - DNA, 25 bp, Homo sapien
acatactgcatgtgaccagcaggaa

SEQ ID NO: 3375549 - DNA, 25 bp, Homo sapien
gggtcttgagaataggaggggagat

SEQ ID NO: 3375550 - DNA, 25 bp, Homo sapien
agaggggtcttgagaataggagggg

SEQ ID NO: 3375551 - DNA, 25 bp, Homo sapien
tccctccatcaaccttaatcacata

SEQ ID NO: 3375552 - DNA, 25 bp, Homo sapien
tccctgtcttcgctaatagcagcat

SEQ ID NO: 3375553 - DNA, 25 bp, Homo sapien
ctccctgtcttcgctaatagcagca

SEQ ID NO: 3375554 - DNA, 25 bp, Homo sapien
taggtgtgctgtactgcacgccgcc

SEQ ID NO: 3375555 - DNA, 25 bp, Homo sapien
gaccctaagggcctcgttgtctgag

SEQ ID NO: 3375556 - DNA, 25 bp, Homo sapien
ttttctggcgccttggtcagggaac

SEQ ID NO: 3375557 - DNA, 25 bp, Homo sapien
gccaagtctcgcgaggtatcggcca

SEQ ID NO: 3375558 - DNA, 25 bp, Homo sapien
ggcagcccagacgaaaaaggaaggc

SEQ ID NO: 3375559 - DNA, 25 bp, Homo sapien
ttggcagcccagacgaaaaaggaag

SEQ ID NO: 3375560 - DNA, 25 bp, Homo sapien
tggcagcccagacgaaaaaggaagg

SEQ ID NO: 3375561 - DNA, 25 bp, Homo sapien
gttggcagcccagacgaaaaaggaa

SEQ ID NO: 3375562 - DNA, 25 bp, Homo sapien
gatgactaggggcaatgggaataca

SEQ ID NO: 3375563 - DNA, 25 bp, Homo sapien
ctggaagccccgaccatggtaggga

SEQ ID NO: 3375564 - DNA, 25 bp, Homo sapien
gaggaggcaagaaacgaaacaccta

SEQ ID NO: 3375565 - DNA, 25 bp, Homo sapien
gaatacagcttaggggtctccgccg

SEQ ID NO: 3375566 - DNA, 25 bp, Homo sapien
ggaaagctgagggtaccgatccgct

SEQ ID NO: 3375567 - DNA, 25 bp, Homo sapien
cctgtaagcctgtgggtcaaagacc

SEQ ID NO: 3375568 - DNA, 25 bp, Homo sapien
gtgaggtctcaccacggtagcgcag

SEQ ID NO: 3375569 - DNA, 25 bp, Homo sapien
gacctaacttctggagcgtttggga

SEQ ID NO: 3375570 - DNA, 25 bp, Homo sapien
tgtggaaaaagcttggtggtaaggc

SEQ ID NO: 3375571 - DNA, 25 bp, Homo sapien
tgtgtggaaaaagcttggtggtaag

SEQ ID NO: 3375572 - DNA, 25 bp, Homo sapien
ctgtgtggaaaaagcttggtggtaa

SEQ ID NO: 3375573 - DNA, 25 bp, Homo sapien
tggctcacgtggcccctaagtttcc

SEQ ID NO: 3375574 - DNA, 25 bp, Homo sapien
ggattccgggtgaaacatcttttca

SEQ ID NO: 3375575 - DNA, 25 bp, Homo sapien
tttcagcaatgcgattactttagga

SEQ ID NO: 3375576 - DNA, 25 bp, Homo sapien
atgccggttttcagcaatgcgatta

SEQ ID NO: 3375577 - DNA, 25 bp, Homo sapien
tgcgattactttaggattccgggtg

SEQ ID NO: 3375578 - DNA, 25 bp, Homo sapien
gggcgacagtgatcagtctcacaca

SEQ ID NO: 3375579 - DNA, 25 bp, Homo sapien
tgggcgacagtgatcagtctcacac

SEQ ID NO: 3375580 - DNA, 25 bp, Homo sapien
ggcgacagtgatcagtctcacacac

SEQ ID NO: 3375581 - DNA, 25 bp, Homo sapien
ctgggcgacagtgatcagtctcaca

SEQ ID NO: 3375582 - DNA, 25 bp, Homo sapien
ggtcaggagttcgagaccagcctgg

SEQ ID NO: 3375583 - DNA, 25 bp, Homo sapien
cagcattttaggaggacgagggggg

SEQ ID NO: 3375584 - DNA, 25 bp, Homo sapien
ggacgagggggggtagatcacctga

SEQ ID NO: 3375585 - DNA, 25 bp, Homo sapien
taggaggacgagggggggtagatca

SEQ ID NO: 3375586 - DNA, 25 bp, Homo sapien
acaaagctacgtggggccggtgtga

SEQ ID NO: 3375587 - DNA, 25 bp, Homo sapien
aggaatacaaagctacgtggggccg

SEQ ID NO: 3375588 - DNA, 25 bp, Homo sapien
ctgcaggaatacaaagctacgtggg

SEQ ID NO: 3375589 - DNA, 25 bp, Homo sapien
aatacaaagctacgtggggccggtg

SEQ ID NO: 3375590 - DNA, 25 bp, Homo sapien
cggccgccggggtgcttccggtgct

SEQ ID NO: 3375591 - DNA, 25 bp, Homo sapien
gaagttgatccggtggtgatgcaga

SEQ ID NO: 3375592 - DNA, 25 bp, Homo sapien
ccaccagcattaccgcggccgccgg

SEQ ID NO: 3375593 - DNA, 25 bp, Homo sapien
gttgatccggtggtgatgcagacca

SEQ ID NO: 3375594 - DNA, 25 bp, Homo sapien
caataggcaaggcttgcttctaaac

SEQ ID NO: 3375595 - DNA, 25 bp, Homo sapien
acagcaataggcaaggcttgcttct

SEQ ID NO: 3375596 - DNA, 25 bp, Homo sapien
tcaataaaagcagtccaaggacact

SEQ ID NO: 3375597 - DNA, 25 bp, Homo sapien
cctacctcccaagctgtgtcaataa

SEQ ID NO: 3375598 - DNA, 25 bp, Homo sapien
gtgactgactgtgccataaggccca

SEQ ID NO: 3375599 - DNA, 25 bp, Homo sapien
ttcgaggactctagcacactcaggc

SEQ ID NO: 3375600 - DNA, 25 bp, Homo sapien
aggcaatagccgatacccaagcgtg

SEQ ID NO: 3375601 - DNA, 25 bp, Homo sapien
cccaagcgtgactctagcctcgatg

SEQ ID NO: 3375602 - DNA, 25 bp, Homo sapien
gaggcagggccgagactaaaattca

SEQ ID NO: 3375603 - DNA, 25 bp, Homo sapien
gaaccaggataaaccaccgacaatg

SEQ ID NO: 3375604 - DNA, 25 bp, Homo sapien
ctatcatgaggaaaaggctagtctt

SEQ ID NO: 3375605 - DNA, 25 bp, Homo sapien
tcaggcatatgatacatctgttgac

SEQ ID NO: 3375606 - DNA, 25 bp, Homo sapien
gaagaggtaacaaccaccttcatac

SEQ ID NO: 3375607 - DNA, 25 bp, Homo sapien
ggaagaggtaacaaccaccttcata

SEQ ID NO: 3375608 - DNA, 25 bp, Homo sapien
gaggtaacaaccaccttcatacaca

SEQ ID NO: 3375609 - DNA, 25 bp, Homo sapien
taggaagaggtaacaaccaccttca

SEQ ID NO: 3375610 - DNA, 25 bp, Homo sapien
ccacaatttgtcaaggttgacagtt

SEQ ID NO: 3375611 - DNA, 25 bp, Homo sapien
atttgtcaaggttgacagttgggca

SEQ ID NO: 3375612 - DNA, 25 bp, Homo sapien
caatttgtcaaggttgacagttggg

SEQ ID NO: 3375613 - DNA, 25 bp, Homo sapien
aagtccacaatttgtcaaggttgac

SEQ ID NO: 3375614 - DNA, 25 bp, Homo sapien
tagcagcattcacccgtgtctgttc

SEQ ID NO: 3375615 - DNA, 25 bp, Homo sapien
cgatcgcaccacatcaatgatggga

SEQ ID NO: 3375616 - DNA, 25 bp, Homo sapien
tcaatgatgggagcagccccagtct

SEQ ID NO: 3375617 - DNA, 25 bp, Homo sapien
gcagccccagtcttgtttttagcag

SEQ ID NO: 3375618 - DNA, 25 bp, Homo sapien
catggcactgagtatcaatggaaca

SEQ ID NO: 3375619 - DNA, 25 bp, Homo sapien
gttcaagcacgaaatgcaaacctga

SEQ ID NO: 3375620 - DNA, 25 bp, Homo sapien
gcactgctacggatagggaactacc

SEQ ID NO: 3375621 - DNA, 25 bp, Homo sapien
ccccgcaaggacagacataatacat

SEQ ID NO: 3375622 - DNA, 25 bp, Homo sapien
caaagcataagcctcctcctgctca

SEQ ID NO: 3375623 - DNA, 25 bp, Homo sapien
cataagcctcctcctgctcaaatac

SEQ ID NO: 3375624 - DNA, 25 bp, Homo sapien
aagcataagcctcctcctgctcaaa

SEQ ID NO: 3375625 - DNA, 25 bp, Homo sapien
gcataagcctcctcctgctcaaata

SEQ ID NO: 3375626 - DNA, 25 bp, Homo sapien
tgtcaggatgtgactctagtctcgg

SEQ ID NO: 3375627 - DNA, 25 bp, Homo sapien
agttgtgtcaggatgtgactctagt

SEQ ID NO: 3375628 - DNA, 25 bp, Homo sapien
caggacaagagttgtgtcaggatgt

SEQ ID NO: 3375629 - DNA, 25 bp, Homo sapien
gacaagagttgtgtcaggatgtgac

SEQ ID NO: 3375630 - DNA, 25 bp, Homo sapien
ttctgatctgggcactaacgggggc

SEQ ID NO: 3375631 - DNA, 25 bp, Homo sapien
gtgaatcaagaccagtagattctct

SEQ ID NO: 3375632 - DNA, 25 bp, Homo sapien
gattctcttcgagtactctagcaca

SEQ ID NO: 3375633 - DNA, 25 bp, Homo sapien
tgatctgggcactaacgggggcacc

SEQ ID NO: 3375634 - DNA, 25 bp, Homo sapien
tgaggaaagactgccaacccacttt

SEQ ID NO: 3375635 - DNA, 25 bp, Homo sapien
cccactttctaaatccctaggcagg

SEQ ID NO: 3375636 - DNA, 25 bp, Homo sapien
caatacactgtagtaggtaccaact

SEQ ID NO: 3375637 - DNA, 25 bp, Homo sapien
taccaactgcgtgatgggcgtgagg

SEQ ID NO: 3375638 - DNA, 25 bp, Homo sapien
actcttaatcttctcctcagctctt

SEQ ID NO: 3375639 - DNA, 25 bp, Homo sapien
cttcacgatgacaggctgctttggg

SEQ ID NO: 3375640 - DNA, 25 bp, Homo sapien
ggccttcacgatgacaggctgcttt

SEQ ID NO: 3375641 - DNA, 25 bp, Homo sapien
gaatttggccttcacgatgacaggc

SEQ ID NO: 3375642 - DNA, 25 bp, Homo sapien
taagtactagaacctgggctcccaa

SEQ ID NO: 3375643 - DNA, 25 bp, Homo sapien
tcaagattaaggagccatggccggg

SEQ ID NO: 3375644 - DNA, 25 bp, Homo sapien
gccacgtggaaaaaccttgggctga

SEQ ID NO: 3375645 - DNA, 25 bp, Homo sapien
gaaatgtttaactggccaacgtctg

SEQ ID NO: 3375646 - DNA, 25 bp, Homo sapien
taaaattgtccagctgaatcgaggt

SEQ ID NO: 3375647 - DNA, 25 bp, Homo sapien
gatgtgtcccatagacagccatggt

SEQ ID NO: 3375648 - DNA, 25 bp, Homo sapien
tattacaagtcctctatgggcccta

SEQ ID NO: 3375649 - DNA, 25 bp, Homo sapien
tcggcttattatgaccccacagtgc

SEQ ID NO: 3375650 - DNA, 25 bp, Homo sapien
tggtcggcccactacaattcagtct

SEQ ID NO: 3375651 - DNA, 25 bp, Homo sapien
ttagccagccactagagatcgccag

SEQ ID NO: 3375652 - DNA, 25 bp, Homo sapien
gatttagctgcccttgacgagcact

SEQ ID NO: 3375653 - DNA, 25 bp, Homo sapien
gaatcggcggacttagggctcaaaa

SEQ ID NO: 3375654 - DNA, 25 bp, Homo sapien
tcgggtcgtgctgactgatgaacgc

SEQ ID NO: 3375655 - DNA, 25 bp, Homo sapien
aagacccaaggtccggtctgtgttg

SEQ ID NO: 3375656 - DNA, 25 bp, Homo sapien
aacgcggccgatggagccaccaggt

SEQ ID NO: 3375657 - DNA, 25 bp, Homo sapien
tctgtgttgtgaggacgccactgag

SEQ ID NO: 3375658 - DNA, 25 bp, Homo sapien
cgtctccggaagtagaagctactca

SEQ ID NO: 3375659 - DNA, 25 bp, Homo sapien
gtctccggaagtagaagctactcac

SEQ ID NO: 3375660 - DNA, 25 bp, Homo sapien
cttgccggaagtggccgagcgaggc

SEQ ID NO: 3375661 - DNA, 25 bp, Homo sapien
agcgaggccggtctccgccgggctt

SEQ ID NO: 3375662 - DNA, 25 bp, Homo sapien
ttatctgcgctcgcgcaccactggc

SEQ ID NO: 3375663 - DNA, 25 bp, Homo sapien
tgcgctcgcgcaccactggccggct

SEQ ID NO: 3375664 - DNA, 25 bp, Homo sapien
tcgaagatttacgtaaaggccacgc

SEQ ID NO: 3375665 - DNA, 25 bp, Homo sapien
aggccacgcccactgttcttaaacg

SEQ ID NO: 3375666 - DNA, 25 bp, Homo sapien
ttggccattcctccgcttcgaaggg

SEQ ID NO: 3375667 - DNA, 25 bp, Homo sapien
tctggaggttcccatctcgaagatt

SEQ ID NO: 3375668 - DNA, 25 bp, Homo sapien
cgcattgggttgaacaaaaaactgc

SEQ ID NO: 3375669 - DNA, 25 bp, Homo sapien
gaatatttccatccgtgtacaagca

SEQ ID NO: 3375670 - DNA, 25 bp, Homo sapien
ccaaagtgcccttgaatgtcgctga

SEQ ID NO: 3375671 - DNA, 25 bp, Homo sapien
taaaaggccatgaaaactctcgaaa

SEQ ID NO: 3375672 - DNA, 25 bp, Homo sapien
tgaaacaacgtaaagtgggaatgag

SEQ ID NO: 3375673 - DNA, 25 bp, Homo sapien
tagagccaggaattaaatttacgct

SEQ ID NO: 3375674 - DNA, 25 bp, Homo sapien
caaaatacgtttctagagccagatg

SEQ ID NO: 3375675 - DNA, 25 bp, Homo sapien
taccaaaatgacttacagggataca

SEQ ID NO: 3375676 - DNA, 25 bp, Homo sapien
tccccatttgtagcatggcaccagg

SEQ ID NO: 3375677 - DNA, 25 bp, Homo sapien
cgggtgctttcctgtcctgccagag

SEQ ID NO: 3375678 - DNA, 25 bp, Homo sapien
ccagagcatggatgaagtttcgctg

SEQ ID NO: 3375679 - DNA, 25 bp, Homo sapien
tttcgctgggtgctcgtgactggcc

SEQ ID NO: 3375680 - DNA, 25 bp, Homo sapien
tgcccccacagatcctatcctccaa

SEQ ID NO: 3375681 - DNA, 25 bp, Homo sapien
ctctgcccccacagatcctatcctc

SEQ ID NO: 3375682 - DNA, 25 bp, Homo sapien
cctatcctccaagccagcccacctc

SEQ ID NO: 3375683 - DNA, 25 bp, Homo sapien
ccccacagatcctatcctccaagcc

SEQ ID NO: 3375684 - DNA, 25 bp, Homo sapien
gagggcctttcagcgagaggccttc

SEQ ID NO: 3375685 - DNA, 25 bp, Homo sapien
gcatccgccgctttcttgaggtttt

SEQ ID NO: 3375686 - DNA, 25 bp, Homo sapien
tttttatggagtctcagatgtttgc

SEQ ID NO: 3375687 - DNA, 25 bp, Homo sapien
ttccgcaaatctgtggcctccaaaa

SEQ ID NO: 3375688 - DNA, 25 bp, Homo sapien
gctcgtaggctagttacaaggctat

SEQ ID NO: 3375689 - DNA, 25 bp, Homo sapien
ccaaagacatgtggcaaccccaaag

SEQ ID NO: 3375690 - DNA, 25 bp, Homo sapien
gcctcaagccattgcaggagatgaa

SEQ ID NO: 3375691 - DNA, 25 bp, Homo sapien
tacaccaggaagattgaggaaggct

SEQ ID NO: 3375692 - DNA, 25 bp, Homo sapien
gttgcagagaggtttagaggaggct

SEQ ID NO: 3375693 - DNA, 25 bp, Homo sapien
cagagaggtttagaggaggcttaaa

SEQ ID NO: 3375694 - DNA, 25 bp, Homo sapien
gggctctggttgcagagaggtttag

SEQ ID NO: 3375695 - DNA, 25 bp, Homo sapien
tctggttgcagagaggtttagagga

SEQ ID NO: 3375696 - DNA, 25 bp, Homo sapien
aggcgcatgccactatgaccggcta

SEQ ID NO: 3375697 - DNA, 25 bp, Homo sapien
gcgcatgccactatgaccggctaat

SEQ ID NO: 3375698 - DNA, 25 bp, Homo sapien
caggcgcatgccactatgaccggct

SEQ ID NO: 3375699 - DNA, 25 bp, Homo sapien
acaggcgcatgccactatgaccggc

SEQ ID NO: 3375700 - DNA, 25 bp, Homo sapien
tctcacccagcttgtccaaagaatt

SEQ ID NO: 3375701 - DNA, 25 bp, Homo sapien
tcacccagcttgtccaaagaattaa

SEQ ID NO: 3375702 - DNA, 25 bp, Homo sapien
tcctgcttttctcacccagcttgtc

SEQ ID NO: 3375703 - DNA, 25 bp, Homo sapien
cttttctcacccagcttgtccaaag

SEQ ID NO: 3375704 - DNA, 25 bp, Homo sapien
cagggtccacttgtctctgtacatc

SEQ ID NO: 3375705 - DNA, 25 bp, Homo sapien
tagtggtccaggactcagggtccac

SEQ ID NO: 3375706 - DNA, 25 bp, Homo sapien
tcagctggttcagtttagtggtcca

SEQ ID NO: 3375707 - DNA, 25 bp, Homo sapien
actgggagaatctatttgagacagc

SEQ ID NO: 3375708 - DNA, 25 bp, Homo sapien
ggcagcaaactgacacattgcagtt

SEQ ID NO: 3375709 - DNA, 25 bp, Homo sapien
caaactgacacattgcagtttctgc

SEQ ID NO: 3375710 - DNA, 25 bp, Homo sapien
cagcaaactgacacattgcagtttc

SEQ ID NO: 3375711 - DNA, 25 bp, Homo sapien
agtttctgccaaactagaatgtacc

SEQ ID NO: 3375712 - DNA, 25 bp, Homo sapien
accgagcaccttccagacactattt

SEQ ID NO: 3375713 - DNA, 25 bp, Homo sapien
cagacactatttgtttgtccctggg

SEQ ID NO: 3375714 - DNA, 25 bp, Homo sapien
gcaccttccagacactatttgtttg

SEQ ID NO: 3375715 - DNA, 25 bp, Homo sapien
cactatttgtttgtccctgggccta

SEQ ID NO: 3375716 - DNA, 25 bp, Homo sapien
catggcattccggagcctgagaggc

SEQ ID NO: 3375717 - DNA, 25 bp, Homo sapien
tggcattccggagcctgagaggctg

SEQ ID NO: 3375718 - DNA, 25 bp, Homo sapien
gcattccggagcctgagaggctggg

SEQ ID NO: 3375719 - DNA, 25 bp, Homo sapien
cattccggagcctgagaggctgggc

SEQ ID NO: 3375720 - DNA, 25 bp, Homo sapien
ttttctgtgtgtgagcgagcagtga

SEQ ID NO: 3375721 - DNA, 25 bp, Homo sapien
ccagttttctgtgtgtgagcgagca

SEQ ID NO: 3375722 - DNA, 25 bp, Homo sapien
agttttctgtgtgtgagcgagcagt

SEQ ID NO: 3375723 - DNA, 25 bp, Homo sapien
ttctgtgtgtgagcgagcagtgaca

SEQ ID NO: 3375724 - DNA, 25 bp, Homo sapien
ctgttgattgggggcagccagaggc

SEQ ID NO: 3375725 - DNA, 25 bp, Homo sapien
ggatggctcttgtttgacttgccct

SEQ ID NO: 3375726 - DNA, 25 bp, Homo sapien
tctgtgcccatatacacatgggatg

SEQ ID NO: 3375727 - DNA, 25 bp, Homo sapien
cattggcttggcttggcactgaatt

SEQ ID NO: 3375728 - DNA, 25 bp, Homo sapien
gagcagagcctctttggtcattggc

SEQ ID NO: 3375729 - DNA, 25 bp, Homo sapien
caagggtagcacgtgaagccgtggg

SEQ ID NO: 3375730 - DNA, 25 bp, Homo sapien
ggtagcacgtgaagccgtgggtccc

SEQ ID NO: 3375731 - DNA, 25 bp, Homo sapien
gggcaagggtagcacgtgaagccgt

SEQ ID NO: 3375732 - DNA, 25 bp, Homo sapien
ctggggcaagggtagcacgtgaagc

SEQ ID NO: 3375733 - DNA, 25 bp, Homo sapien
ggcaggttcctctgtggtacagtgc

SEQ ID NO: 3375734 - DNA, 25 bp, Homo sapien
gatatggggcttcaggtcagcacag

SEQ ID NO: 3375735 - DNA, 25 bp, Homo sapien
tgatatggggcttcaggtcagcaca

SEQ ID NO: 3375736 - DNA, 25 bp, Homo sapien
aggcaggttcctctgtggtacagtg

SEQ ID NO: 3375737 - DNA, 25 bp, Homo sapien
tagggtggctgaactagctccactt

SEQ ID NO: 3375738 - DNA, 25 bp, Homo sapien
cccataagagcatcagagcctgtag

SEQ ID NO: 3375739 - DNA, 25 bp, Homo sapien
gagagatccaatccagacatcatgg

SEQ ID NO: 3375740 - DNA, 25 bp, Homo sapien
gaagctgattcttagggtggctgaa

SEQ ID NO: 3375741 - DNA, 25 bp, Homo sapien
tggcctagatatagccccagttggg

SEQ ID NO: 3375742 - DNA, 25 bp, Homo sapien
tgttgagggctcacaactgtttgag

SEQ ID NO: 3375743 - DNA, 25 bp, Homo sapien
tttcacgtaactctgacaagctgta

SEQ ID NO: 3375744 - DNA, 25 bp, Homo sapien
caagctgtagggacctggaaaatct

SEQ ID NO: 3375745 - DNA, 25 bp, Homo sapien
tgtcagggatcagtaacctcagagg

SEQ ID NO: 3375746 - DNA, 25 bp, Homo sapien
gctcagcggtccacttggtgcttcc

SEQ ID NO: 3375747 - DNA, 25 bp, Homo sapien
gagagttcatcattccctcccggag

SEQ ID NO: 3375748 - DNA, 25 bp, Homo sapien
gggcttctgcagtgtcagtattctc

SEQ ID NO: 3375749 - DNA, 25 bp, Homo sapien
caggagatttcacttttgcagtaag

SEQ ID NO: 3375750 - DNA, 25 bp, Homo sapien
tctcaggagatttcacttttgcagt

SEQ ID NO: 3375751 - DNA, 25 bp, Homo sapien
tgctctcaggagatttcacttttgc

SEQ ID NO: 3375752 - DNA, 25 bp, Homo sapien
ttcttcactatgaaactccagcacc

SEQ ID NO: 3375753 - DNA, 25 bp, Homo sapien
aacccagtggttctaagacgcattt

SEQ ID NO: 3375754 - DNA, 25 bp, Homo sapien
tttgtatccagctttggtggaagag

SEQ ID NO: 3375755 - DNA, 25 bp, Homo sapien
tccaaggaggagactcctcggtgtg

SEQ ID NO: 3375756 - DNA, 25 bp, Homo sapien
cctttgacactttggctacgtcggg

SEQ ID NO: 3375757 - DNA, 25 bp, Homo sapien
ctttcaataggtgtttggtagtgac

SEQ ID NO: 3375758 - DNA, 25 bp, Homo sapien
gaaatgaccatgactgccaacaaga

SEQ ID NO: 3375759 - DNA, 25 bp, Homo sapien
tgccaacaagaattccagcatcacc

SEQ ID NO: 3375760 - DNA, 25 bp, Homo sapien
ctctgagcaggtgggtaagggagca

SEQ ID NO: 3375761 - DNA, 25 bp, Homo sapien
gcagagagccgaaatgaccatgact

SEQ ID NO: 3375762 - DNA, 25 bp, Homo sapien
ctcctccgtattccaggccaggggt

SEQ ID NO: 3375763 - DNA, 25 bp, Homo sapien
actcctccgtattccaggccagggg

SEQ ID NO: 3375764 - DNA, 25 bp, Homo sapien
cgtattccaggccaggggtttcttg

SEQ ID NO: 3375765 - DNA, 25 bp, Homo sapien
ctggagactgacgaaatggcttaga

SEQ ID NO: 3375766 - DNA, 25 bp, Homo sapien
tgcgttcctttgtggttgagggcca

SEQ ID NO: 3375767 - DNA, 25 bp, Homo sapien
cattggtaatgctttcactggatcc

SEQ ID NO: 3375768 - DNA, 25 bp, Homo sapien
gcttagatgagccattggtaatgct

SEQ ID NO: 3375769 - DNA, 25 bp, Homo sapien
agtattggttgctgagactcttggc

SEQ ID NO: 3375770 - DNA, 25 bp, Homo sapien
ccatggatgaggagaggtgcaggaa

SEQ ID NO: 3375771 - DNA, 25 bp, Homo sapien
gaatctgagggccagtattggttgc

SEQ ID NO: 3375772 - DNA, 25 bp, Homo sapien
ttggcaagaaggtaaagagggtctg

SEQ ID NO: 3375773 - DNA, 25 bp, Homo sapien
tgccaagtagcacttgctctgttta

SEQ ID NO: 3375774 - DNA, 25 bp, Homo sapien
ctgccaagtagcacttgctctgttt

SEQ ID NO: 3375775 - DNA, 25 bp, Homo sapien
actgccaagtagcacttgctctgtt

SEQ ID NO: 3375776 - DNA, 25 bp, Homo sapien
gccaagtagcacttgctctgtttaa

SEQ ID NO: 3375777 - DNA, 25 bp, Homo sapien
tctgaaatcttttgtgctgcctgct

SEQ ID NO: 3375778 - DNA, 25 bp, Homo sapien
gctgcctgctgacggttactttctg

SEQ ID NO: 3375779 - DNA, 25 bp, Homo sapien
catagcgtggaatgtccttttctcc

SEQ ID NO: 3375780 - DNA, 25 bp, Homo sapien
gtatatactgttccccatagcgtgg

SEQ ID NO: 3375781 - DNA, 25 bp, Homo sapien
tgccagagtggctcatggtggtcgc

SEQ ID NO: 3375782 - DNA, 25 bp, Homo sapien
gtctgtccttgtatggtgccagagt

SEQ ID NO: 3375783 - DNA, 25 bp, Homo sapien
gatgccctcgagtctgtccttgtat

SEQ ID NO: 3375784 - DNA, 25 bp, Homo sapien
gctcatggtggtcgctgctgtgggc

SEQ ID NO: 3375785 - DNA, 25 bp, Homo sapien
cctgcgatgtctggtggttgactct

SEQ ID NO: 3375786 - DNA, 25 bp, Homo sapien
ctgcctgcgatgtctggtggttgac

SEQ ID NO: 3375787 - DNA, 25 bp, Homo sapien
agcaagctgcctgcgatgtctggtg

SEQ ID NO: 3375788 - DNA, 25 bp, Homo sapien
tgtctggtggttgactctgctgcct

SEQ ID NO: 3375789 - DNA, 25 bp, Homo sapien
gcttacaagtctgtcttaggatctc

SEQ ID NO: 3375790 - DNA, 25 bp, Homo sapien
tttaccgaggtagccctcttggcta

SEQ ID NO: 3375791 - DNA, 25 bp, Homo sapien
cctctgggttgagcttacaagtctg

SEQ ID NO: 3375792 - DNA, 25 bp, Homo sapien
tagccctcttggctatccaaggtgg

SEQ ID NO: 3375793 - DNA, 25 bp, Homo sapien
caagtcagtaatagttccaatcttc

SEQ ID NO: 3375794 - DNA, 25 bp, Homo sapien
ggtccatatgaataccaagtcagta

SEQ ID NO: 3375795 - DNA, 25 bp, Homo sapien
taaggaatgtccaacaggaggtacc

SEQ ID NO: 3375796 - DNA, 25 bp, Homo sapien
tcttggaccatatgtgacaggccta

SEQ ID NO: 3375797 - DNA, 25 bp, Homo sapien
gagggatgggatctgaaaagtctcc

SEQ ID NO: 3375798 - DNA, 25 bp, Homo sapien
gccttctgaatgtgtatgagggatg

SEQ ID NO: 3375799 - DNA, 25 bp, Homo sapien
ttcgctcaccaaaggagctggtcct

SEQ ID NO: 3375800 - DNA, 25 bp, Homo sapien
catagttcaatcctgagggtgtttc

SEQ ID NO: 3375801 - DNA, 25 bp, Homo sapien
tagagggggtactacatccagaaag

SEQ ID NO: 3375802 - DNA, 25 bp, Homo sapien
caactactctaccatgtggcggctg

SEQ ID NO: 3375803 - DNA, 25 bp, Homo sapien
agacacgtgccagtagaacttccat

SEQ ID NO: 3375804 - DNA, 25 bp, Homo sapien
agaaagaagacacgtgccagtagaa

SEQ ID NO: 3375805 - DNA, 25 bp, Homo sapien
ggtttttcattgacacggcaaattc

SEQ ID NO: 3375806 - DNA, 25 bp, Homo sapien
tcattgacacggcaaattcaggatt

SEQ ID NO: 3375807 - DNA, 25 bp, Homo sapien
tgacacggcaaattcaggatttggg

SEQ ID NO: 3375808 - DNA, 25 bp, Homo sapien
gaagctgacggtctgtgaaagtgca

SEQ ID NO: 3375809 - DNA, 25 bp, Homo sapien
tttcctcttcgcagcagtgatccca

SEQ ID NO: 3375810 - DNA, 25 bp, Homo sapien
agtttgcgtgtgtgtcattttatcc

SEQ ID NO: 3375811 - DNA, 25 bp, Homo sapien
tatcctccttttcggttagaggcag

SEQ ID NO: 3375812 - DNA, 25 bp, Homo sapien
aagtgctccttggtctgtatcctcc

SEQ ID NO: 3375813 - DNA, 25 bp, Homo sapien
gtatttccaactaaaggcagaccca

SEQ ID NO: 3375814 - DNA, 25 bp, Homo sapien
tctatagctctcacagagactgcag

SEQ ID NO: 3375815 - DNA, 25 bp, Homo sapien
tcaagaccccgagttctgtaatagc

SEQ ID NO: 3375816 - DNA, 25 bp, Homo sapien
caggtgatctgctagaaaatggagc

SEQ ID NO: 3375817 - DNA, 25 bp, Homo sapien
tactgtactttccatggcatagtgg

SEQ ID NO: 3375818 - DNA, 25 bp, Homo sapien
gatttatatcctgtcctctcagagg

SEQ ID NO: 3375819 - DNA, 25 bp, Homo sapien
tggtttgaattgtggctcctccttt

SEQ ID NO: 3375820 - DNA, 25 bp, Homo sapien
agaaaattgatgtgtctggctgcag

SEQ ID NO: 3375821 - DNA, 25 bp, Homo sapien
gaagcaaacaggagtctgtgcccat

SEQ ID NO: 3375822 - DNA, 25 bp, Homo sapien
tcctggattctgaagcaaacaggag

SEQ ID NO: 3375823 - DNA, 25 bp, Homo sapien
taagcaggtattaagacccagaaag

SEQ ID NO: 3375824 - DNA, 25 bp, Homo sapien
aagtctaagcaggtattaagaccca

SEQ ID NO: 3375825 - DNA, 25 bp, Homo sapien
ggtgggcagctggtactgaggagag

SEQ ID NO: 3375826 - DNA, 25 bp, Homo sapien
tgaggagaggcagtaggccaaagtc

SEQ ID NO: 3375827 - DNA, 25 bp, Homo sapien
gaaggaccacgtgggtgggtccaca

SEQ ID NO: 3375828 - DNA, 25 bp, Homo sapien
gggtccacacagctgtcgtctattt

SEQ ID NO: 3375829 - DNA, 25 bp, Homo sapien
cacagctgtcgtctattttgcggat

SEQ ID NO: 3375830 - DNA, 25 bp, Homo sapien
gatgctcactgggaacttggattca

SEQ ID NO: 3375831 - DNA, 25 bp, Homo sapien
atttcattaggattggtggcatttc

SEQ ID NO: 3375832 - DNA, 25 bp, Homo sapien
tcagcactactactggctggcaggg

SEQ ID NO: 3375833 - DNA, 25 bp, Homo sapien
gatgagatttccaggtatgtgctcg

SEQ ID NO: 3375834 - DNA, 25 bp, Homo sapien
gctcgtctttaaacagatgcttgtc

SEQ ID NO: 3375835 - DNA, 25 bp, Homo sapien
ggtaaaggtccatgctctcaatgac

SEQ ID NO: 3375836 - DNA, 25 bp, Homo sapien
ggtccatgctctcaatgactcttct

SEQ ID NO: 3375837 - DNA, 25 bp, Homo sapien
taaaggtccatgctctcaatgactc

SEQ ID NO: 3375838 - DNA, 25 bp, Homo sapien
cctggtaaaggtccatgctctcaat

SEQ ID NO: 3375839 - DNA, 25 bp, Homo sapien
ggtgcatagagctcccaaaactgtg

SEQ ID NO: 3375840 - DNA, 25 bp, Homo sapien
tcgacagtagctccttgtagaacca

SEQ ID NO: 3375841 - DNA, 25 bp, Homo sapien
agaaccaggagaagcttagcctcga

SEQ ID NO: 3375842 - DNA, 25 bp, Homo sapien
gggctcagattcgacagtagctcct

SEQ ID NO: 3375843 - DNA, 25 bp, Homo sapien
tctttgagtgctaccaaagctctga

SEQ ID NO: 3375844 - DNA, 25 bp, Homo sapien
caatgtgttttaagtccctcaaatc

SEQ ID NO: 3375845 - DNA, 25 bp, Homo sapien
tgctgccaaatttagcaatgtgttt

SEQ ID NO: 3375846 - DNA, 25 bp, Homo sapien
cagggaacaggaacttttgctgcca

SEQ ID NO: 3375847 - DNA, 25 bp, Homo sapien
cttgtctgttgggtttgttctgctg

SEQ ID NO: 3375848 - DNA, 25 bp, Homo sapien
acccagcctcaggagtgtttgtttg

SEQ ID NO: 3375849 - DNA, 25 bp, Homo sapien
accacgccaggcagctgtgtttatt

SEQ ID NO: 3375850 - DNA, 25 bp, Homo sapien
gcctctggagtaacaaatgtgcacc

SEQ ID NO: 3375851 - DNA, 25 bp, Homo sapien
caaattagatatcagtcaccccggg

SEQ ID NO: 3375852 - DNA, 25 bp, Homo sapien
taagaactgcattacgggaggtcca

SEQ ID NO: 3375853 - DNA, 25 bp, Homo sapien
ctagacctaagagaggctgtgcccc

SEQ ID NO: 3375854 - DNA, 25 bp, Homo sapien
tcaccccgggaagatgaaactttga

SEQ ID NO: 3375855 - DNA, 25 bp, Homo sapien
tgagccgcttgttcgtcctagtgaa

SEQ ID NO: 3375856 - DNA, 25 bp, Homo sapien
ggaaactccagtgccttttgagccg

SEQ ID NO: 3375857 - DNA, 25 bp, Homo sapien
ggcacaggatatttttacaggaaga

SEQ ID NO: 3375858 - DNA, 25 bp, Homo sapien
tctgagttaacatcactcccgtggt

SEQ ID NO: 3375859 - DNA, 25 bp, Homo sapien
acatggcccgttagtggtggagtca

SEQ ID NO: 3375860 - DNA, 25 bp, Homo sapien
tgggacttgcccaatggcacatggc

SEQ ID NO: 3375861 - DNA, 25 bp, Homo sapien
gacttgagagtgctttcacggacag

SEQ ID NO: 3375862 - DNA, 25 bp, Homo sapien
taaagttcttagttcagttcctgac

SEQ ID NO: 3375863 - DNA, 25 bp, Homo sapien
tcaagatcttaaattgctttctact

SEQ ID NO: 3375864 - DNA, 25 bp, Homo sapien
tctactctccccgttccctccacat

SEQ ID NO: 3375865 - DNA, 25 bp, Homo sapien
tactctccccgttccctccacattc

SEQ ID NO: 3375866 - DNA, 25 bp, Homo sapien
agatcttaaattgctttctactctc

SEQ ID NO: 3375867 - DNA, 25 bp, Homo sapien
taagaagggagtgttctgctggcac

SEQ ID NO: 3375868 - DNA, 25 bp, Homo sapien
gagctagcatctaccagttttagcc

SEQ ID NO: 3375869 - DNA, 25 bp, Homo sapien
ttcctttatctgctcgggtttgaga

SEQ ID NO: 3375870 - DNA, 25 bp, Homo sapien
caggagaactgtgaaatcgttgact

SEQ ID NO: 3375871 - DNA, 25 bp, Homo sapien
ccgagttgtgctgttgaaggtgcac

SEQ ID NO: 3375872 - DNA, 25 bp, Homo sapien
agcttccccgcagatacagctgcat

SEQ ID NO: 3375873 - DNA, 25 bp, Homo sapien
tgggttcttgtggtctgcgtcctga

SEQ ID NO: 3375874 - DNA, 25 bp, Homo sapien
ggtgcagccttaacggccgagttgt

SEQ ID NO: 3375875 - DNA, 25 bp, Homo sapien
tcagagtgcacccagcatcatcagc

SEQ ID NO: 3375876 - DNA, 25 bp, Homo sapien
cagagtgcacccagcatcatcagct

SEQ ID NO: 3375877 - DNA, 25 bp, Homo sapien
ttcagagtgcacccagcatcatcag

SEQ ID NO: 3375878 - DNA, 25 bp, Homo sapien
cttggtataactggacgtctcccca

SEQ ID NO: 3375879 - DNA, 25 bp, Homo sapien
cttggtcttggtataactggacgtc

SEQ ID NO: 3375880 - DNA, 25 bp, Homo sapien
tcttggtcttggtataactggacgt

SEQ ID NO: 3375881 - DNA, 25 bp, Homo sapien
ggtcttggtataactggacgtctcc

SEQ ID NO: 3375882 - DNA, 25 bp, Homo sapien
tcccctgtgactggattgcttcggg

SEQ ID NO: 3375883 - DNA, 25 bp, Homo sapien
ccaggcttgttctgtcagggcctct

SEQ ID NO: 3375884 - DNA, 25 bp, Homo sapien
ggattgcttcgggtctccctaagac

SEQ ID NO: 3375885 - DNA, 25 bp, Homo sapien
agtgcagccgctgcttactggaagc

SEQ ID NO: 3375886 - DNA, 25 bp, Homo sapien
cagagaccttcgatgtttgctaaca

SEQ ID NO: 3375887 - DNA, 25 bp, Homo sapien
ggtccttggaagttgtagcttccag

SEQ ID NO: 3375888 - DNA, 25 bp, Homo sapien
catcatgcggagattggtccttgga

SEQ ID NO: 3375889 - DNA, 25 bp, Homo sapien
ggttctgttcatggctatgttcaaa

SEQ ID NO: 3375890 - DNA, 25 bp, Homo sapien
agtgacttcttcagttcccccggca

SEQ ID NO: 3375891 - DNA, 25 bp, Homo sapien
tgacttcttcagttcccccggcaaa

SEQ ID NO: 3375892 - DNA, 25 bp, Homo sapien
caaagatccttgttcgggtcccttg

SEQ ID NO: 3375893 - DNA, 25 bp, Homo sapien
agatccttgttcgggtcccttgaat

SEQ ID NO: 3375894 - DNA, 25 bp, Homo sapien
actcaggcctaggtgctcagatgtg

SEQ ID NO: 3375895 - DNA, 25 bp, Homo sapien
gtggtcctgccgttcagccctatta

SEQ ID NO: 3375896 - DNA, 25 bp, Homo sapien
tttttgtggtcttggtgccctggaa

SEQ ID NO: 3375897 - DNA, 25 bp, Homo sapien
tgtgggaagcttgcccgactcaggc

SEQ ID NO: 3375898 - DNA, 25 bp, Homo sapien
cattcaagtactaacggggcctgac

SEQ ID NO: 3375899 - DNA, 25 bp, Homo sapien
ccattcaagtactaacggggcctga

SEQ ID NO: 3375900 - DNA, 25 bp, Homo sapien
cttttgagatcagacgagatggcac

SEQ ID NO: 3375901 - DNA, 25 bp, Homo sapien
acgagatggcacattcagggtagta

SEQ ID NO: 3375902 - DNA, 25 bp, Homo sapien
cgtagtctgtttcattgccttgaga

SEQ ID NO: 3375903 - DNA, 25 bp, Homo sapien
tgccttgagaatcaatatcagccat

SEQ ID NO: 3375904 - DNA, 25 bp, Homo sapien
cattgccttgagaatcaatatcagc

SEQ ID NO: 3375905 - DNA, 25 bp, Homo sapien
gcagccagcacttgcgtagtctgtt

SEQ ID NO: 3375906 - DNA, 25 bp, Homo sapien
gtcactcgaatctgtacatagatac

SEQ ID NO: 3375907 - DNA, 25 bp, Homo sapien
gtacttttcagtagtcactcgaatc

SEQ ID NO: 3375908 - DNA, 25 bp, Homo sapien
tcagtagtcactcgaatctgtacat

SEQ ID NO: 3375909 - DNA, 25 bp, Homo sapien
gaaaatagtataattgtatgggagg

SEQ ID NO: 3375910 - DNA, 25 bp, Homo sapien
gcaatgctttggttttttctttcat

SEQ ID NO: 3375911 - DNA, 25 bp, Homo sapien
cgcaatgctttggttttttctttca

SEQ ID NO: 3375912 - DNA, 25 bp, Homo sapien
tcgcaatgctttggttttttctttc

SEQ ID NO: 3375913 - DNA, 25 bp, Homo sapien
aatgtgtatgtggatcaatgccact

SEQ ID NO: 3375914 - DNA, 25 bp, Homo sapien
tgccactgctggtttgtcctttatg

SEQ ID NO: 3375915 - DNA, 25 bp, Homo sapien
tatgtggatcaatgccactgctggt

SEQ ID NO: 3375916 - DNA, 25 bp, Homo sapien
tgtatgtggatcaatgccactgctg

SEQ ID NO: 3375917 - DNA, 25 bp, Homo sapien
taaagagctagttggagtgaccacg

SEQ ID NO: 3375918 - DNA, 25 bp, Homo sapien
gtaccctgcagcgagtagcttggtt

SEQ ID NO: 3375919 - DNA, 25 bp, Homo sapien
cgagtagcttggttcactgggtaaa

SEQ ID NO: 3375920 - DNA, 25 bp, Homo sapien
ttcactgggtaaagagctagttgga

SEQ ID NO: 3375921 - DNA, 25 bp, Homo sapien
tggtgccgagcggagacccgatctc

SEQ ID NO: 3375922 - DNA, 25 bp, Homo sapien
cgccttgcctctcggtggcggcatt

SEQ ID NO: 3375923 - DNA, 25 bp, Homo sapien
gcggcattcgagctcctacctggag

SEQ ID NO: 3375924 - DNA, 25 bp, Homo sapien
ccgatctcgggacgtcctgggagct

SEQ ID NO: 3375925 - DNA, 25 bp, Homo sapien
tgctgcagtaccaaaagtagcttct

SEQ ID NO: 3375926 - DNA, 25 bp, Homo sapien
ctgctgctgcagtaccaaaagtagc

SEQ ID NO: 3375927 - DNA, 25 bp, Homo sapien
tgctgctgcagtaccaaaagtagct

SEQ ID NO: 3375928 - DNA, 25 bp, Homo sapien
gctgctgcagtaccaaaagtagctt

SEQ ID NO: 3375929 - DNA, 25 bp, Homo sapien
ttagttgaaagttgactgatgagta

SEQ ID NO: 3375930 - DNA, 25 bp, Homo sapien
tagttgaaagttgactgatgagtac

SEQ ID NO: 3375931 - DNA, 25 bp, Homo sapien
atattttggctcttcaagtcttgat

SEQ ID NO: 3375932 - DNA, 25 bp, Homo sapien
tcttcaagtcttgattagttgaaag

SEQ ID NO: 3375933 - DNA, 25 bp, Homo sapien
cggctcactcgtcaaggcgcatgcg

SEQ ID NO: 3375934 - DNA, 25 bp, Homo sapien
aacgctattctaggaagagggacca

SEQ ID NO: 3375935 - DNA, 25 bp, Homo sapien
ggcgcatgcgcgcaacgctattcta

SEQ ID NO: 3375936 - DNA, 25 bp, Homo sapien
agagggaccaggcctagcgctcccg

SEQ ID NO: 3375937 - DNA, 25 bp, Homo sapien
cctgctccaaatccgggtgggagcc

SEQ ID NO: 3375938 - DNA, 25 bp, Homo sapien
ctgagtgggcacacaacgtacaaac

SEQ ID NO: 3375939 - DNA, 25 bp, Homo sapien
cgtacaaacgccggcgggtcagctg

SEQ ID NO: 3375940 - DNA, 25 bp, Homo sapien
ccaggactaggcctagcgcgcccgc

SEQ ID NO: 3375941 - DNA, 25 bp, Homo sapien
ccttgctgaacgctgcagggaacgt

SEQ ID NO: 3375942 - DNA, 25 bp, Homo sapien
catgcagcctttgggacgctccagg

SEQ ID NO: 3375943 - DNA, 25 bp, Homo sapien
tccagcacttctagagccagccttg

SEQ ID NO: 3375944 - DNA, 25 bp, Homo sapien
ctgcggccgccaaacagttgtccat

SEQ ID NO: 3375945 - DNA, 25 bp, Homo sapien
ggctaccgcggcgcgaaggactggg

SEQ ID NO: 3375946 - DNA, 25 bp, Homo sapien
gcgggctaccgcggcgcgaaggact

SEQ ID NO: 3375947 - DNA, 25 bp, Homo sapien
tcccagcgggctaccgcggcgcgaa

SEQ ID NO: 3375948 - DNA, 25 bp, Homo sapien
ctggctcccagcgggctaccgcggc

SEQ ID NO: 3375949 - DNA, 25 bp, Homo sapien
ccacactgacttgaagtatagtcca

SEQ ID NO: 3375950 - DNA, 25 bp, Homo sapien
tgaagtatagtccatgaattcagcc

SEQ ID NO: 3375951 - DNA, 25 bp, Homo sapien
gacttgaagtatagtccatgaattc

SEQ ID NO: 3375952 - DNA, 25 bp, Homo sapien
cactgacttgaagtatagtccatga

SEQ ID NO: 3375953 - DNA, 25 bp, Homo sapien
agacatgggttgcccctccttcctc

SEQ ID NO: 3375954 - DNA, 25 bp, Homo sapien
tagacatgggttgcccctccttcct

SEQ ID NO: 3375955 - DNA, 25 bp, Homo sapien
atagacatgggttgcccctccttcc

SEQ ID NO: 3375956 - DNA, 25 bp, Homo sapien
acatgtgcagcttcgactcgcctct

SEQ ID NO: 3375957 - DNA, 25 bp, Homo sapien
gtgcagcttcgactcgcctctgtga

SEQ ID NO: 3375958 - DNA, 25 bp, Homo sapien
atgtgcagcttcgactcgcctctgt

SEQ ID NO: 3375959 - DNA, 25 bp, Homo sapien
gcagcttcgactcgcctctgtgata

SEQ ID NO: 3375960 - DNA, 25 bp, Homo sapien
gctgggatgcctctggagcatgctc

SEQ ID NO: 3375961 - DNA, 25 bp, Homo sapien
gatatttgatagctgcctccaggac

SEQ ID NO: 3375962 - DNA, 25 bp, Homo sapien
catgctctgatatttgatagctgcc

SEQ ID NO: 3375963 - DNA, 25 bp, Homo sapien
caggaccaagggatgtcttttttct

SEQ ID NO: 3375964 - DNA, 25 bp, Homo sapien
catggagttgcaacggtggtgaaac

SEQ ID NO: 3375965 - DNA, 25 bp, Homo sapien
tatagactcaattcaaatagccctc

SEQ ID NO: 3375966 - DNA, 25 bp, Homo sapien
catgtcaactggttcatggagttgc

SEQ ID NO: 3375967 - DNA, 25 bp, Homo sapien
tggtgaaacccagtgcgtaagcagt

SEQ ID NO: 3375968 - DNA, 25 bp, Homo sapien
aagggtagacttcactcatggctgg

SEQ ID NO: 3375969 - DNA, 25 bp, Homo sapien
gaagagagcctgtaattaagggcca

SEQ ID NO: 3375970 - DNA, 25 bp, Homo sapien
ggcagaagttgtcgattccactacc

SEQ ID NO: 3375971 - DNA, 25 bp, Homo sapien
gagcacaatcagtcttccaagggta

SEQ ID NO: 3375972 - DNA, 25 bp, Homo sapien
tatgtagaggtccttagagatgttc

SEQ ID NO: 3375973 - DNA, 25 bp, Homo sapien
ccaggtccacgctttgtccagaatc

SEQ ID NO: 3375974 - DNA, 25 bp, Homo sapien
aagaccaggtccacgctttgtccag

SEQ ID NO: 3375975 - DNA, 25 bp, Homo sapien
tggttaagtcatttgagcccacagt

SEQ ID NO: 3375976 - DNA, 25 bp, Homo sapien
taagagaatcatacagtggctttat

SEQ ID NO: 3375977 - DNA, 25 bp, Homo sapien
ttaagagaatcatacagtggcttta

SEQ ID NO: 3375978 - DNA, 25 bp, Homo sapien
cagtggctttattcttactacttaa

SEQ ID NO: 3375979 - DNA, 25 bp, Homo sapien
tacagtggctttattcttactactt

SEQ ID NO: 3375980 - DNA, 25 bp, Homo sapien
tactttcaggcaaacaagcgtggag

SEQ ID NO: 3375981 - DNA, 25 bp, Homo sapien
gtggaggacctctacaccctcaagt

SEQ ID NO: 3375982 - DNA, 25 bp, Homo sapien
gaaagagacagactccagttcccgg

SEQ ID NO: 3375983 - DNA, 25 bp, Homo sapien
gcaagcagtaaaacctgttcagaca

SEQ ID NO: 3375984 - DNA, 25 bp, Homo sapien
aaagctgctaaagtgcccctaggtg

SEQ ID NO: 3375985 - DNA, 25 bp, Homo sapien
gaacttccagagttggagcccacag

SEQ ID NO: 3375986 - DNA, 25 bp, Homo sapien
tctgctagggccaatcactgggcgc

SEQ ID NO: 3375987 - DNA, 25 bp, Homo sapien
tattggaagagaaacgggcctgagc

SEQ ID NO: 3375988 - DNA, 25 bp, Homo sapien
caacagcagtatggccctggcactg

SEQ ID NO: 3375989 - DNA, 25 bp, Homo sapien
ggagccaggctgtaatcaggccaga

SEQ ID NO: 3375990 - DNA, 25 bp, Homo sapien
gagagccaaggctgcgtctacagct

SEQ ID NO: 3375991 - DNA, 25 bp, Homo sapien
aattcgaggctcctcttgtcgcagg

SEQ ID NO: 3375992 - DNA, 25 bp, Homo sapien
tcagcatttccggtcgtggtgagag

SEQ ID NO: 3375993 - DNA, 25 bp, Homo sapien
cacttcatggtaaacgggatctaaa

SEQ ID NO: 3375994 - DNA, 25 bp, Homo sapien
tatattttgcagtgtagccagcctc

SEQ ID NO: 3375995 - DNA, 25 bp, Homo sapien
cctaaggacttggacacttgcaata

SEQ ID NO: 3375996 - DNA, 25 bp, Homo sapien
gactcctgccctggatatataatag

SEQ ID NO: 3375997 - DNA, 25 bp, Homo sapien
tctatacagatacctgggcaaccct

SEQ ID NO: 3375998 - DNA, 25 bp, Homo sapien
tgtaatgactacaaacatccagttg

SEQ ID NO: 3375999 - DNA, 25 bp, Homo sapien
ccactgggtgcttaacaatggaaga

SEQ ID NO: 3376000 - DNA, 25 bp, Homo sapien
tttaggatttgtacaagccattacc

SEQ ID NO: 3376001 - DNA, 25 bp, Homo sapien
gcaacatgggtagaccctatttcaa

SEQ ID NO: 3376002 - DNA, 25 bp, Homo sapien
aattaagttcatggccagtctgggc

SEQ ID NO: 3376003 - DNA, 25 bp, Homo sapien
taaaaataggctataggtcccagct

SEQ ID NO: 3376004 - DNA, 25 bp, Homo sapien
cggtgacgccttcgcgtccagacgg

SEQ ID NO: 3376005 - DNA, 25 bp, Homo sapien
ttttgcatctgacccggcgcgcccg

SEQ ID NO: 3376006 - DNA, 25 bp, Homo sapien
gttccggggcggatgctttttgcat

SEQ ID NO: 3376007 - DNA, 25 bp, Homo sapien
ccagacggaagtgcgggcggaggat

SEQ ID NO: 3376008 - DNA, 25 bp, Homo sapien
caaccctttgactggcggtgggcat

SEQ ID NO: 3376009 - DNA, 25 bp, Homo sapien
tctgcgcccgggaaagatatccaag

SEQ ID NO: 3376010 - DNA, 25 bp, Homo sapien
cgagggcagctcacagaattagaaa

SEQ ID NO: 3376011 - DNA, 25 bp, Homo sapien
ggaggactttccagcgcaatggcga

SEQ ID NO: 3376012 - DNA, 25 bp, Homo sapien
ctcctaaagtacttgctgagaatga

SEQ ID NO: 3376013 - DNA, 25 bp, Homo sapien
gggctgtgatgatccgtgtccttgc

SEQ ID NO: 3376014 - DNA, 25 bp, Homo sapien
ttgccaaaggtcattcaacaaatcc

SEQ ID NO: 3376015 - DNA, 25 bp, Homo sapien
atgggagaatgtgccgatctaaggc

SEQ ID NO: 3376016 - DNA, 25 bp, Homo sapien
tcagatacgttgtgttagattcaca

SEQ ID NO: 3376017 - DNA, 25 bp, Homo sapien
gattcacatgaatctaagaatcaca

SEQ ID NO: 3376018 - DNA, 25 bp, Homo sapien
tattgagagcattctgttaaaacat

SEQ ID NO: 3376019 - DNA, 25 bp, Homo sapien
tcacatgggcgaaaaatattgagag

SEQ ID NO: 3376020 - DNA, 25 bp, Homo sapien
gaagacccactacaaagccttgata

SEQ ID NO: 3376021 - DNA, 25 bp, Homo sapien
tgtcctttgtccagtagaagaccca

SEQ ID NO: 3376022 - DNA, 25 bp, Homo sapien
aaagccttgataattcatcaaagtg

SEQ ID NO: 3376023 - DNA, 25 bp, Homo sapien
ggtgagaggacatctagccctgcca

SEQ ID NO: 3376024 - DNA, 25 bp, Homo sapien
tatgaggtttcagctacagcaggca

SEQ ID NO: 3376025 - DNA, 25 bp, Homo sapien
taaaattccgcccagactgagtgtg

SEQ ID NO: 3376026 - DNA, 25 bp, Homo sapien
caaggccttgaaaacaattcggaag

SEQ ID NO: 3376027 - DNA, 25 bp, Homo sapien
taaactgatgcctaacttgcagctg

SEQ ID NO: 3376028 - DNA, 25 bp, Homo sapien
gactatctcatagtcacactccact

SEQ ID NO: 3376029 - DNA, 25 bp, Homo sapien
tccactcacggcagccacattctgt

SEQ ID NO: 3376030 - DNA, 25 bp, Homo sapien
cttcctgacagcactataacatttt

SEQ ID NO: 3376031 - DNA, 25 bp, Homo sapien
ttggcctgaggcttcattgtctcca

SEQ ID NO: 3376032 - DNA, 25 bp, Homo sapien
tgaaaaatcccactaaacagggctg

SEQ ID NO: 3376033 - DNA, 25 bp, Homo sapien
cacttaggtggctttacaggcagca

SEQ ID NO: 3376034 - DNA, 25 bp, Homo sapien
tggtgaacaccagcaagtgatgcac

SEQ ID NO: 3376035 - DNA, 25 bp, Homo sapien
tcagggaacccagtaacatcagcag

SEQ ID NO: 3376036 - DNA, 25 bp, Homo sapien
gacacttgaatgctaggtacttaag

SEQ ID NO: 3376037 - DNA, 25 bp, Homo sapien
ctgtgcagtaggcttagagaaaaac

SEQ ID NO: 3376038 - DNA, 25 bp, Homo sapien
gagaaaaactagtccacagtgaagg

SEQ ID NO: 3376039 - DNA, 25 bp, Homo sapien
tgatgggctcctagagagttgtctc

SEQ ID NO: 3376040 - DNA, 25 bp, Homo sapien
gagtaataagatactgcatccacca

SEQ ID NO: 3376041 - DNA, 25 bp, Homo sapien
caaagtcacatgattcctaatgtag

SEQ ID NO: 3376042 - DNA, 25 bp, Homo sapien
tccctggaggacgttatgctgaatg

SEQ ID NO: 3376043 - DNA, 25 bp, Homo sapien
ccaccaaatggaacagactgctatt

SEQ ID NO: 3376044 - DNA, 25 bp, Homo sapien
tgcagtatgtcctaccaattacaag

SEQ ID NO: 3376045 - DNA, 25 bp, Homo sapien
tactaatgggtttgcgaccagaagt

SEQ ID NO: 3376046 - DNA, 25 bp, Homo sapien
cctgtcctgacagttggagatctct

SEQ ID NO: 3376047 - DNA, 25 bp, Homo sapien
tatgatatgtgtaagaaaccaaagt

SEQ ID NO: 3376048 - DNA, 25 bp, Homo sapien
tcttgctcctcattactacttctag

SEQ ID NO: 3376049 - DNA, 25 bp, Homo sapien
tctcagtaagtttagttcactgctc

SEQ ID NO: 3376050 - DNA, 25 bp, Homo sapien
tcagctttgagttccataccatcaa

SEQ ID NO: 3376051 - DNA, 25 bp, Homo sapien
gacacgtctcctatcttcccttaaa

SEQ ID NO: 3376052 - DNA, 25 bp, Homo sapien
tctgttatgaaatgctggactcctt

SEQ ID NO: 3376053 - DNA, 25 bp, Homo sapien
tactggagccagagtaatctcccag

SEQ ID NO: 3376054 - DNA, 25 bp, Homo sapien
cagggaccccagatactccgatgtt

SEQ ID NO: 3376055 - DNA, 25 bp, Homo sapien
gaatctcctgtactctaaacctgca

SEQ ID NO: 3376056 - DNA, 25 bp, Homo sapien
ctgggcacaatttctcacgccaaat

SEQ ID NO: 3376057 - DNA, 25 bp, Homo sapien
gcattgtcaatcaaatgtagcttct

SEQ ID NO: 3376058 - DNA, 25 bp, Homo sapien
tcacgccaaattctttgactctaga

SEQ ID NO: 3376059 - DNA, 25 bp, Homo sapien
tgactctagaacatctttattaaaa

SEQ ID NO: 3376060 - DNA, 25 bp, Homo sapien
gaaagcatttactgtaaaccaggga

SEQ ID NO: 3376061 - DNA, 25 bp, Homo sapien
ggactatgctatcccctgcaaagaa

SEQ ID NO: 3376062 - DNA, 25 bp, Homo sapien
gaggtagcagagaggtatatcttga

SEQ ID NO: 3376063 - DNA, 25 bp, Homo sapien
gacatttaatattgagcacatccca

SEQ ID NO: 3376064 - DNA, 25 bp, Homo sapien
tttattgcacttgcatagtggggga

SEQ ID NO: 3376065 - DNA, 25 bp, Homo sapien
acttggattaacagaaattcacatt

SEQ ID NO: 3376066 - DNA, 25 bp, Homo sapien
ttgcacttgcatagtgggggagaac

SEQ ID NO: 3376067 - DNA, 25 bp, Homo sapien
cttggattaacagaaattcacatta

SEQ ID NO: 3376068 - DNA, 25 bp, Homo sapien
acagggttgcggcccagcagaggcg

SEQ ID NO: 3376069 - DNA, 25 bp, Homo sapien
cccagacagggttgcggcccagcag

SEQ ID NO: 3376070 - DNA, 25 bp, Homo sapien
cctcccagacagggttgcggcccag

SEQ ID NO: 3376071 - DNA, 25 bp, Homo sapien
ccagacagggttgcggcccagcaga

SEQ ID NO: 3376072 - DNA, 25 bp, Homo sapien
tctacttctatccacagagacccgg

SEQ ID NO: 3376073 - DNA, 25 bp, Homo sapien
tggcccatccccaatgagccgctgg

SEQ ID NO: 3376074 - DNA, 25 bp, Homo sapien
ttgtcatcatggcccatccccaatg

SEQ ID NO: 3376075 - DNA, 25 bp, Homo sapien
gctggccaggcagaggggtcctcac

SEQ ID NO: 3376076 - DNA, 25 bp, Homo sapien
tattaggtcagtgactgaagggacc

SEQ ID NO: 3376077 - DNA, 25 bp, Homo sapien
tgaagggaccaagaacgcagacctg

SEQ ID NO: 3376078 - DNA, 25 bp, Homo sapien
gcaagtgaattgtctaagttcatat

SEQ ID NO: 3376079 - DNA, 25 bp, Homo sapien
gagcccagggacattatccattaca

SEQ ID NO: 3376080 - DNA, 25 bp, Homo sapien
tcacgctcggctataaaaggcgcgg

SEQ ID NO: 3376081 - DNA, 25 bp, Homo sapien
gcctcaagaagctgggctcgtccaa

SEQ ID NO: 3376082 - DNA, 25 bp, Homo sapien
ggcgcctcagcgatgttttactcag

SEQ ID NO: 3376083 - DNA, 25 bp, Homo sapien
tgaagcaggcggtgcagttcatcca

SEQ ID NO: 3376084 - DNA, 25 bp, Homo sapien
acaggtgagcaggtacccgcggcca

SEQ ID NO: 3376085 - DNA, 25 bp, Homo sapien
ccacggcgtggacaggtgagcaggt

SEQ ID NO: 3376086 - DNA, 25 bp, Homo sapien
ccggctgtcggtgatccccgggtcg

SEQ ID NO: 3376087 - DNA, 25 bp, Homo sapien
tgatccccgggtcggccacggcgtg

SEQ ID NO: 3376088 - DNA, 25 bp, Homo sapien
cgtggaggtgcgtttctgagaagcc

SEQ ID NO: 3376089 - DNA, 25 bp, Homo sapien
tgaagttggagaaatccggagcgct

SEQ ID NO: 3376090 - DNA, 25 bp, Homo sapien
aacctcggagggagtcgccagtcct

SEQ ID NO: 3376091 - DNA, 25 bp, Homo sapien
gagcgctcccaacctcggagggagt

SEQ ID NO: 3376092 - DNA, 25 bp, Homo sapien
ccgcgggcttccgactgcacctgct

SEQ ID NO: 3376093 - DNA, 25 bp, Homo sapien
gaggaggtcccgaaagcctcctcca

SEQ ID NO: 3376094 - DNA, 25 bp, Homo sapien
cgcgggcttccgactgcacctgctc

SEQ ID NO: 3376095 - DNA, 25 bp, Homo sapien
aggtcccgaaagcctcctccacacg

SEQ ID NO: 3376096 - DNA, 25 bp, Homo sapien
tgaggggaccaacaggtattgcagc

SEQ ID NO: 3376097 - DNA, 25 bp, Homo sapien
caacaggtattgcagccacagaccc

SEQ ID NO: 3376098 - DNA, 25 bp, Homo sapien
caaggaaggtctcagacaggtgagg

SEQ ID NO: 3376099 - DNA, 25 bp, Homo sapien
gggaccaacaggtattgcagccaca

SEQ ID NO: 3376100 - DNA, 25 bp, Homo sapien
catgatgagggtcctaggagtggcc

SEQ ID NO: 3376101 - DNA, 25 bp, Homo sapien
tagtggtgaggacatctgaggagga

SEQ ID NO: 3376102 - DNA, 25 bp, Homo sapien
gaaagggatcctacagctataagga

SEQ ID NO: 3376103 - DNA, 25 bp, Homo sapien
gaggaggaaagggatcctacagcta

SEQ ID NO: 3376104 - DNA, 25 bp, Homo sapien
ccatgtagccagagatcctggcaca

SEQ ID NO: 3376105 - DNA, 25 bp, Homo sapien
ggacagaaatatctcttatctttgc

SEQ ID NO: 3376106 - DNA, 25 bp, Homo sapien
gatgttggcaatcactctgaaggaa

SEQ ID NO: 3376107 - DNA, 25 bp, Homo sapien
tcctggcacacatctggatagctgt

SEQ ID NO: 3376108 - DNA, 25 bp, Homo sapien
tgacactctgctggccattgcctga

SEQ ID NO: 3376109 - DNA, 25 bp, Homo sapien
gtgtgatacaagtttgatcccagga

SEQ ID NO: 3376110 - DNA, 25 bp, Homo sapien
caaatgcactatgctgactctcgca

SEQ ID NO: 3376111 - DNA, 25 bp, Homo sapien
aaaactaagcacttctggagacata

SEQ ID NO: 3376112 - DNA, 25 bp, Homo sapien
tgtgatcattgatgcctgactctgc

SEQ ID NO: 3376113 - DNA, 25 bp, Homo sapien
cataaactctttggagatacacaca

SEQ ID NO: 3376114 - DNA, 25 bp, Homo sapien
tgcctgactctgcatgaaccataaa

SEQ ID NO: 3376115 - DNA, 25 bp, Homo sapien
gactggagttgtgatcattgatgcc

SEQ ID NO: 3376116 - DNA, 25 bp, Homo sapien
tccagcctgggtaacagagcgcaac

SEQ ID NO: 3376117 - DNA, 25 bp, Homo sapien
gcctgggtaacagagcgcaaccctg

SEQ ID NO: 3376118 - DNA, 25 bp, Homo sapien
cctgggtaacagagcgcaaccctgt

SEQ ID NO: 3376119 - DNA, 25 bp, Homo sapien
cagcctgggtaacagagcgcaaccc

SEQ ID NO: 3376120 - DNA, 25 bp, Homo sapien
gtcaggacatctcattacccaggca

SEQ ID NO: 3376121 - DNA, 25 bp, Homo sapien
tccgggaatccatcaaagctgcttt

SEQ ID NO: 3376122 - DNA, 25 bp, Homo sapien
tatatagggtgtggtactctccgag

SEQ ID NO: 3376123 - DNA, 25 bp, Homo sapien
gacactcctgtggtgcgcatgggct

SEQ ID NO: 3376124 - DNA, 25 bp, Homo sapien
gtatagagcaggcaatactgttgaa

SEQ ID NO: 3376125 - DNA, 25 bp, Homo sapien
tgtttatggctttggccacaatgtt

SEQ ID NO: 3376126 - DNA, 25 bp, Homo sapien
tggctttggccacaatgtttggcat

SEQ ID NO: 3376127 - DNA, 25 bp, Homo sapien
tatggctttggccacaatgtttggc

SEQ ID NO: 3376128 - DNA, 25 bp, Homo sapien
gtttatggctttggccacaatgttt

SEQ ID NO: 3376129 - DNA, 25 bp, Homo sapien
ctgcaagcctggctaccaaggggaa

SEQ ID NO: 3376130 - DNA, 25 bp, Homo sapien
tgcaagcctggctaccaaggggaag

SEQ ID NO: 3376131 - DNA, 25 bp, Homo sapien
caggcagtgtgagggtaagtgcctt

SEQ ID NO: 3376132 - DNA, 25 bp, Homo sapien
gcaagcctggctaccaaggggaagg

SEQ ID NO: 3376133 - DNA, 25 bp, Homo sapien
tgcccgcaaccgctgagccatccat

SEQ ID NO: 3376134 - DNA, 25 bp, Homo sapien
ctgcccgcaaccgctgagccatcca

SEQ ID NO: 3376135 - DNA, 25 bp, Homo sapien
tctgcccgcaaccgctgagccatcc

SEQ ID NO: 3376136 - DNA, 25 bp, Homo sapien
gctccgagcgttggagcggagcggg

SEQ ID NO: 3376137 - DNA, 25 bp, Homo sapien
gttgtaacacactggaacaggcgcg

SEQ ID NO: 3376138 - DNA, 25 bp, Homo sapien
ggcaccgagggctccgagcgttgga

SEQ ID NO: 3376139 - DNA, 25 bp, Homo sapien
agggcctgggtcgagttgtaacaca

SEQ ID NO: 3376140 - DNA, 25 bp, Homo sapien
atctagaagggctgtttgtcctcac

SEQ ID NO: 3376141 - DNA, 25 bp, Homo sapien
tatacggaacactttctgggcgccc

SEQ ID NO: 3376142 - DNA, 25 bp, Homo sapien
tcccacgtggaaagccccaagatgg

SEQ ID NO: 3376143 - DNA, 25 bp, Homo sapien
gaccccgaatatttcaatctagaag

SEQ ID NO: 3376144 - DNA, 25 bp, Homo sapien
tggagcttccccctgtggaaattcc

SEQ ID NO: 3376145 - DNA, 25 bp, Homo sapien
ccggttgtaagccatattgacttta

SEQ ID NO: 3376146 - DNA, 25 bp, Homo sapien
gctgcagaatagagggcagcctgca

SEQ ID NO: 3376147 - DNA, 25 bp, Homo sapien
gacatttggacacagttttcccctg

SEQ ID NO: 3376148 - DNA, 25 bp, Homo sapien
tggctggactgcctcttcgcacccc

SEQ ID NO: 3376149 - DNA, 25 bp, Homo sapien
ggctggactgcctcttcgcacccct

SEQ ID NO: 3376150 - DNA, 25 bp, Homo sapien
ttcgcacccctgaggcctggttcat

SEQ ID NO: 3376151 - DNA, 25 bp, Homo sapien
cttcgcacccctgaggcctggttca

SEQ ID NO: 3376152 - DNA, 25 bp, Homo sapien
ttcttcagcctcctcaaaggcccac

SEQ ID NO: 3376153 - DNA, 25 bp, Homo sapien
caggctttcttcagcctcctcaaag

SEQ ID NO: 3376154 - DNA, 25 bp, Homo sapien
ggctttcttcagcctcctcaaaggc

SEQ ID NO: 3376155 - DNA, 25 bp, Homo sapien
gctttcttcagcctcctcaaaggcc

SEQ ID NO: 3376156 - DNA, 25 bp, Homo sapien
tctaggtcatgagcttcgttttgaa

SEQ ID NO: 3376157 - DNA, 25 bp, Homo sapien
cagagattcgagaaagcagagaagc

SEQ ID NO: 3376158 - DNA, 25 bp, Homo sapien
ctaggtcatgagcttcgttttgaac

SEQ ID NO: 3376159 - DNA, 25 bp, Homo sapien
accaggcagagattcgagaaagcag

SEQ ID NO: 3376160 - DNA, 25 bp, Homo sapien
gctccaggagctgatatgggcacca

SEQ ID NO: 3376161 - DNA, 25 bp, Homo sapien
tgttctgctgctccagggaccgcac

SEQ ID NO: 3376162 - DNA, 25 bp, Homo sapien
tcttgttctgctgctccagggaccg

SEQ ID NO: 3376163 - DNA, 25 bp, Homo sapien
gtctccagcatcttgttctgctgct

SEQ ID NO: 3376164 - DNA, 25 bp, Homo sapien
tggtctccagcatcttgttctgctg

SEQ ID NO: 3376165 - DNA, 25 bp, Homo sapien
tatgctgtccatgtcgctctgagct

SEQ ID NO: 3376166 - DNA, 25 bp, Homo sapien
gcatgttgccaagcttcagcttctc

SEQ ID NO: 3376167 - DNA, 25 bp, Homo sapien
gtcagtcagcccttccagaagagac

SEQ ID NO: 3376168 - DNA, 25 bp, Homo sapien
tcgtcagtcagcccttccagaagag

SEQ ID NO: 3376169 - DNA, 25 bp, Homo sapien
agtcagcccttccagaagagactcc

SEQ ID NO: 3376170 - DNA, 25 bp, Homo sapien
cttccagaagagactccagctctac

SEQ ID NO: 3376171 - DNA, 25 bp, Homo sapien
gctgccattggcgatctccttgtac

SEQ ID NO: 3376172 - DNA, 25 bp, Homo sapien
ccagctgccattggcgatctccttg

SEQ ID NO: 3376173 - DNA, 25 bp, Homo sapien
gatctgatgcatgccctcagcctca

SEQ ID NO: 3376174 - DNA, 25 bp, Homo sapien
tcagcccagctgccattggcgatct

SEQ ID NO: 3376175 - DNA, 25 bp, Homo sapien
cctccagctcgacagcttcgtgttg

SEQ ID NO: 3376176 - DNA, 25 bp, Homo sapien
gcctccagctcgacagcttcgtgtt

SEQ ID NO: 3376177 - DNA, 25 bp, Homo sapien
ataacgcaggtcattcctatgcttc

SEQ ID NO: 3376178 - DNA, 25 bp, Homo sapien
ctttgcataacgcaggtcattccta

SEQ ID NO: 3376179 - DNA, 25 bp, Homo sapien
ctaaggcctgttgtagagggcttgt

SEQ ID NO: 3376180 - DNA, 25 bp, Homo sapien
cttcagatggacactcatgttctgt

SEQ ID NO: 3376181 - DNA, 25 bp, Homo sapien
gtgcccgtgggtcgagctcagccca

SEQ ID NO: 3376182 - DNA, 25 bp, Homo sapien
tagagggcttgtgaggtgcccgtgg

SEQ ID NO: 3376183 - DNA, 25 bp, Homo sapien
tgccatctcgcgtttccaccttctt

SEQ ID NO: 3376184 - DNA, 25 bp, Homo sapien
actagcttgccatctcgcgtttcca

SEQ ID NO: 3376185 - DNA, 25 bp, Homo sapien
ggacactagcttgccatctcgcgtt

SEQ ID NO: 3376186 - DNA, 25 bp, Homo sapien
acctggagaagctggcgcggctgaa

SEQ ID NO: 3376187 - DNA, 25 bp, Homo sapien
agcggcttcctccacgggccctggg

SEQ ID NO: 3376188 - DNA, 25 bp, Homo sapien
gggcaggctggtaggggctgccatg

SEQ ID NO: 3376189 - DNA, 25 bp, Homo sapien
cacagcggcttcctccacgggccct

SEQ ID NO: 3376190 - DNA, 25 bp, Homo sapien
ttttgtagctggaagcatggccaat

SEQ ID NO: 3376191 - DNA, 25 bp, Homo sapien
tagctattacattcaaagcacaagc

SEQ ID NO: 3376192 - DNA, 25 bp, Homo sapien
atagcttaatcccaacatatcagtg

SEQ ID NO: 3376193 - DNA, 25 bp, Homo sapien
catctttatgaccttagattaggca

SEQ ID NO: 3376194 - DNA, 25 bp, Homo sapien
aagcacaagcaacaagctgggcaca

SEQ ID NO: 3376195 - DNA, 25 bp, Homo sapien
gcaccgatgagtcagtcccacgtat

SEQ ID NO: 3376196 - DNA, 25 bp, Homo sapien
cttattttgaagctggtgccctccc

SEQ ID NO: 3376197 - DNA, 25 bp, Homo sapien
agttatgtttccttgccccgtcgca

SEQ ID NO: 3376198 - DNA, 25 bp, Homo sapien
tagtagtgcctctaagcaagcaccg

SEQ ID NO: 3376199 - DNA, 25 bp, Homo sapien
tccgcactactctagcagaagttct

SEQ ID NO: 3376200 - DNA, 25 bp, Homo sapien
ttccgtacctctgcaaaaatctagg

SEQ ID NO: 3376201 - DNA, 25 bp, Homo sapien
tacttgcaggctcaataccacgtgg

SEQ ID NO: 3376202 - DNA, 25 bp, Homo sapien
tgggcatccaggtatttccgtacct

SEQ ID NO: 3376203 - DNA, 25 bp, Homo sapien
tattaagagtatatccccaaaggga

SEQ ID NO: 3376204 - DNA, 25 bp, Homo sapien
agaggtgatgtcagttagaactaag

SEQ ID NO: 3376205 - DNA, 25 bp, Homo sapien
taacttaggcttttaacaggatcac

SEQ ID NO: 3376206 - DNA, 25 bp, Homo sapien
gatcactctggccattatattaaga

SEQ ID NO: 3376207 - DNA, 25 bp, Homo sapien
ataggatggtcagggtatacctcac

SEQ ID NO: 3376208 - DNA, 25 bp, Homo sapien
ttcaggagaattctaaggagtcaaa

SEQ ID NO: 3376209 - DNA, 25 bp, Homo sapien
gggtatacctcactgagaggatgac

SEQ ID NO: 3376210 - DNA, 25 bp, Homo sapien
tctccacatttatcaggctggtatt

SEQ ID NO: 3376211 - DNA, 25 bp, Homo sapien
ctctgtcgccaggctcaggtgcagt

SEQ ID NO: 3376212 - DNA, 25 bp, Homo sapien
ggcactatctcaactcactgcagcc

SEQ ID NO: 3376213 - DNA, 25 bp, Homo sapien
tatgagccactgcattttttgtttt

SEQ ID NO: 3376214 - DNA, 25 bp, Homo sapien
gtatgagccactgcattttttgttt

SEQ ID NO: 3376215 - DNA, 25 bp, Homo sapien
tggcgagactcgggtctctacagaa

SEQ ID NO: 3376216 - DNA, 25 bp, Homo sapien
gatgctgaggttggcagatcagctg

SEQ ID NO: 3376217 - DNA, 25 bp, Homo sapien
tgtagtggtgtatgtctgtggttcc

SEQ ID NO: 3376218 - DNA, 25 bp, Homo sapien
atgctgaggttggcagatcagctga

SEQ ID NO: 3376219 - DNA, 25 bp, Homo sapien
gattacatgcatctgccatcacgcc

SEQ ID NO: 3376220 - DNA, 25 bp, Homo sapien
ccctccttggcctcttaaagggctg

SEQ ID NO: 3376221 - DNA, 25 bp, Homo sapien
ctccttggcctcttaaagggctggg

SEQ ID NO: 3376222 - DNA, 25 bp, Homo sapien
ttacatgcatctgccatcacgccca

SEQ ID NO: 3376223 - DNA, 25 bp, Homo sapien
cgcacctggctgcccgactaatttt

SEQ ID NO: 3376224 - DNA, 25 bp, Homo sapien
tgaaaaatgatactcccgacttggc

SEQ ID NO: 3376225 - DNA, 25 bp, Homo sapien
gaaaaatgatactcccgacttggcc

SEQ ID NO: 3376226 - DNA, 25 bp, Homo sapien
ccgcacctggctgcccgactaattt

SEQ ID NO: 3376227 - DNA, 25 bp, Homo sapien
tagccgggcgtcgtggcgcgtgcct

SEQ ID NO: 3376228 - DNA, 25 bp, Homo sapien
gccgggcgtcgtggcgcgtgcctgt

SEQ ID NO: 3376229 - DNA, 25 bp, Homo sapien
aattagccgggcgtcgtggcgcgtg

SEQ ID NO: 3376230 - DNA, 25 bp, Homo sapien
attagccgggcgtcgtggcgcgtgc

SEQ ID NO: 3376231 - DNA, 25 bp, Homo sapien
catagtattccagcgttggcagaaa

SEQ ID NO: 3376232 - DNA, 25 bp, Homo sapien
gcatagtattccagcgttggcagaa

SEQ ID NO: 3376233 - DNA, 25 bp, Homo sapien
tagtattccagcgttggcagaaact

SEQ ID NO: 3376234 - DNA, 25 bp, Homo sapien
gtattccagcgttggcagaaactat

SEQ ID NO: 3376235 - DNA, 25 bp, Homo sapien
tctacactatacgtggaattttttc

SEQ ID NO: 3376236 - DNA, 25 bp, Homo sapien
tacgtggaattttttcgattgtaca

SEQ ID NO: 3376237 - DNA, 25 bp, Homo sapien
tatacgtggaattttttcgattgta

SEQ ID NO: 3376238 - DNA, 25 bp, Homo sapien
cactatacgtggaattttttcgatt

SEQ ID NO: 3376239 - DNA, 25 bp, Homo sapien
caactgatttagtaagcttgtgttt

SEQ ID NO: 3376240 - DNA, 25 bp, Homo sapien
ttgagagacatgaggatcctgatgc

SEQ ID NO: 3376241 - DNA, 25 bp, Homo sapien
gctggttccgggcaaggtgttggag

SEQ ID NO: 3376242 - DNA, 25 bp, Homo sapien
aattttcaactgatttagtaagctt

SEQ ID NO: 3376243 - DNA, 25 bp, Homo sapien
tcaggaccattcagattttgagact

SEQ ID NO: 3376244 - DNA, 25 bp, Homo sapien
ctgatgcgctacctactgcactaag

SEQ ID NO: 3376245 - DNA, 25 bp, Homo sapien
aggaccattcagattttgagactga

SEQ ID NO: 3376246 - DNA, 25 bp, Homo sapien
gatgcgctacctactgcactaagga

SEQ ID NO: 3376247 - DNA, 25 bp, Homo sapien
acaagcatctgtggtgcggaggcaa

SEQ ID NO: 3376248 - DNA, 25 bp, Homo sapien
gatttacagacttggcctgatgccc

SEQ ID NO: 3376249 - DNA, 25 bp, Homo sapien
caagcaggctaactaggagttgaca

SEQ ID NO: 3376250 - DNA, 25 bp, Homo sapien
gatggcctgtcttcacggatttaca

SEQ ID NO: 3376251 - DNA, 25 bp, Homo sapien
acttactctattctcagagtatatt

SEQ ID NO: 3376252 - DNA, 25 bp, Homo sapien
gtgtaaattgtacttactctattct

SEQ ID NO: 3376253 - DNA, 25 bp, Homo sapien
tgtgtaaattgtacttactctattc

SEQ ID NO: 3376254 - DNA, 25 bp, Homo sapien
tactctattctcagagtatatttac

SEQ ID NO: 3376255 - DNA, 25 bp, Homo sapien
ctggccttttgcgtgagattattta

SEQ ID NO: 3376256 - DNA, 25 bp, Homo sapien
tgtcacctggccttttgcgtgagat

SEQ ID NO: 3376257 - DNA, 25 bp, Homo sapien
tcacctggccttttgcgtgagatta

SEQ ID NO: 3376258 - DNA, 25 bp, Homo sapien
gccttttgcgtgagattatttatta

SEQ ID NO: 3376259 - DNA, 25 bp, Homo sapien
tatgcatgatacacctagaaaaatg

SEQ ID NO: 3376260 - DNA, 25 bp, Homo sapien
tgattacttattgcagtttcccaat

SEQ ID NO: 3376261 - DNA, 25 bp, Homo sapien
catttattaatctggtcattaagga

SEQ ID NO: 3376262 - DNA, 25 bp, Homo sapien
tgatggctttgttgtttggagctac

SEQ ID NO: 3376263 - DNA, 25 bp, Homo sapien
aggctatatgcccacttccacctcc

SEQ ID NO: 3376264 - DNA, 25 bp, Homo sapien
ctgacctcaggctatatgcccactt

SEQ ID NO: 3376265 - DNA, 25 bp, Homo sapien
acctcaggctatatgcccacttcca

SEQ ID NO: 3376266 - DNA, 25 bp, Homo sapien
ctcaggctatatgcccacttccacc

SEQ ID NO: 3376267 - DNA, 25 bp, Homo sapien
ggcatgttagtagacgactgaatat

SEQ ID NO: 3376268 - DNA, 25 bp, Homo sapien
gtttggagatggcatgttagtagac

SEQ ID NO: 3376269 - DNA, 25 bp, Homo sapien
tggagatggcatgttagtagacgac

SEQ ID NO: 3376270 - DNA, 25 bp, Homo sapien
aagtagtgttgcaggttttgttaat

SEQ ID NO: 3376271 - DNA, 25 bp, Homo sapien
aacaaagttagaataacagggactg

SEQ ID NO: 3376272 - DNA, 25 bp, Homo sapien
tggtttattgttccatcagaaggta

SEQ ID NO: 3376273 - DNA, 25 bp, Homo sapien
gtaagagttgagcaaatctcctttt

SEQ ID NO: 3376274 - DNA, 25 bp, Homo sapien
caaaaattagttgatcctcgtggcg

SEQ ID NO: 3376275 - DNA, 25 bp, Homo sapien
aggatgccaatcctcgggtccctac

SEQ ID NO: 3376276 - DNA, 25 bp, Homo sapien
tatccaggatgccaatcctcgggtc

SEQ ID NO: 3376277 - DNA, 25 bp, Homo sapien
caggagctccgcaaggcaattcagc

SEQ ID NO: 3376278 - DNA, 25 bp, Homo sapien
agctccgcaaggcaattcagctttc

SEQ ID NO: 3376279 - DNA, 25 bp, Homo sapien
tctcgcggttactgggccggcgcga

SEQ ID NO: 3376280 - DNA, 25 bp, Homo sapien
gcacgcgaggctcgggggcggcacg

SEQ ID NO: 3376281 - DNA, 25 bp, Homo sapien
ttgtctcgcggttactgggccggcg

SEQ ID NO: 3376282 - DNA, 25 bp, Homo sapien
tgggccggcgcgagcacgcgaggct

SEQ ID NO: 3376283 - DNA, 25 bp, Homo sapien
tggcgcctccaaattgaagacagca

SEQ ID NO: 3376284 - DNA, 25 bp, Homo sapien
ttcccaccatcttttagatcaagca

SEQ ID NO: 3376285 - DNA, 25 bp, Homo sapien
caccatcttttagatcaagcactct

SEQ ID NO: 3376286 - DNA, 25 bp, Homo sapien
actctctggcgcctccaaattgaag

SEQ ID NO: 3376287 - DNA, 25 bp, Homo sapien
caggaaagacgttcatttggccggg

SEQ ID NO: 3376288 - DNA, 25 bp, Homo sapien
ggaaatggtccatccctggcttgag

SEQ ID NO: 3376289 - DNA, 25 bp, Homo sapien
tctgggtggatactacaattaactc

SEQ ID NO: 3376290 - DNA, 25 bp, Homo sapien
gcagtagtaccagacaggccaaatc

SEQ ID NO: 3376291 - DNA, 25 bp, Homo sapien
agatattgtatatagcagagtgtcc

SEQ ID NO: 3376292 - DNA, 25 bp, Homo sapien
tagcagagtgtccttgttgctgcag

SEQ ID NO: 3376293 - DNA, 25 bp, Homo sapien
ctctgttgctgttacagaaggcttg

SEQ ID NO: 3376294 - DNA, 25 bp, Homo sapien
caggttttcgaaggcatcattgtgc

SEQ ID NO: 3376295 - DNA, 25 bp, Homo sapien
gaactccagtgtttaggccctgcaa

SEQ ID NO: 3376296 - DNA, 25 bp, Homo sapien
gggccttctccaaatgcgctgcatt

SEQ ID NO: 3376297 - DNA, 25 bp, Homo sapien
ttggcagcttgataaaggatccctg

SEQ ID NO: 3376298 - DNA, 25 bp, Homo sapien
tgctcagtaatgctggagccgccgg

SEQ ID NO: 3376299 - DNA, 25 bp, Homo sapien
cgccgtcactggtggttcccgactg

SEQ ID NO: 3376300 - DNA, 25 bp, Homo sapien
ctggtggttcccgactgcagtgaag

SEQ ID NO: 3376301 - DNA, 25 bp, Homo sapien
agctcttccggtcaccgccgtcact

SEQ ID NO: 3376302 - DNA, 25 bp, Homo sapien
actgcagtgaaggtgcggacgccaa

SEQ ID NO: 3376303 - DNA, 25 bp, Homo sapien
ctccgcagcggcaaccggcgcgaaa

SEQ ID NO: 3376304 - DNA, 25 bp, Homo sapien
gaacctcttcgcctcggcgtggagg

SEQ ID NO: 3376305 - DNA, 25 bp, Homo sapien
gagaagcgccaaggccccggataga

SEQ ID NO: 3376306 - DNA, 25 bp, Homo sapien
caaggccccggatagaacctcttcg

SEQ ID NO: 3376307 - DNA, 25 bp, Homo sapien
gcagcgcggactcggtcaaacccgg

SEQ ID NO: 3376308 - DNA, 25 bp, Homo sapien
cagcgcggactcggtcaaacccggg

SEQ ID NO: 3376309 - DNA, 25 bp, Homo sapien
cgcagcgcggactcggtcaaacccg

SEQ ID NO: 3376310 - DNA, 25 bp, Homo sapien
gcctcgataatggtgttggggtcca

SEQ ID NO: 3376311 - DNA, 25 bp, Homo sapien
gggcctcgataatggtgttggggtc

SEQ ID NO: 3376312 - DNA, 25 bp, Homo sapien
cctcgataatggtgttggggtccat

SEQ ID NO: 3376313 - DNA, 25 bp, Homo sapien
ggcctcgataatggtgttggggtcc

SEQ ID NO: 3376314 - DNA, 25 bp, Homo sapien
aggaccagccggcattcccaggagc

SEQ ID NO: 3376315 - DNA, 25 bp, Homo sapien
acaaggatgacaggcgcagccccca

SEQ ID NO: 3376316 - DNA, 25 bp, Homo sapien
aaggaccagccggcattcccaggag

SEQ ID NO: 3376317 - DNA, 25 bp, Homo sapien
tcagcccagcaaagtgacaaggatg

SEQ ID NO: 3376318 - DNA, 25 bp, Homo sapien
agtaaagctggcagattcagcagca

SEQ ID NO: 3376319 - DNA, 25 bp, Homo sapien
gcagcatgctgaaggacagttacta

SEQ ID NO: 3376320 - DNA, 25 bp, Homo sapien
gctggcagattcagcagcatgctga

SEQ ID NO: 3376321 - DNA, 25 bp, Homo sapien
gttcagtaaagctggcagattcagc

SEQ ID NO: 3376322 - DNA, 25 bp, Homo sapien
ttctcagagtatgctctaacatcag

SEQ ID NO: 3376323 - DNA, 25 bp, Homo sapien
gatgtatagccaagttaccctttag

SEQ ID NO: 3376324 - DNA, 25 bp, Homo sapien
gagtatgctctaacatcagtaaggt

SEQ ID NO: 3376325 - DNA, 25 bp, Homo sapien
tcagtaaggtgtaaacgatgtatag

SEQ ID NO: 3376326 - DNA, 25 bp, Homo sapien
aaatccagctgttccgacatagtaa

SEQ ID NO: 3376327 - DNA, 25 bp, Homo sapien
tccagctgttccgacatagtaatct

SEQ ID NO: 3376328 - DNA, 25 bp, Homo sapien
gctgttccgacatagtaatctggag

SEQ ID NO: 3376329 - DNA, 25 bp, Homo sapien
aggtaaatccagctgttccgacata

SEQ ID NO: 3376330 - DNA, 25 bp, Homo sapien
tacagatcagtttgacaaaagaatg

SEQ ID NO: 3376331 - DNA, 25 bp, Homo sapien
cagatcagtttgacaaaagaatgtt

SEQ ID NO: 3376332 - DNA, 25 bp, Homo sapien
aaaatacagatcagtttgacaaaag

SEQ ID NO: 3376333 - DNA, 25 bp, Homo sapien
ctaaaatacagatcagtttgacaaa

SEQ ID NO: 3376334 - DNA, 25 bp, Homo sapien
tattttctcgaatacaatggcgatc

SEQ ID NO: 3376335 - DNA, 25 bp, Homo sapien
tatcccctggtgctgtttctcgatc

SEQ ID NO: 3376336 - DNA, 25 bp, Homo sapien
cgatcaggccaatactgtgttatca

SEQ ID NO: 3376337 - DNA, 25 bp, Homo sapien
aatggcgatcttcttctggaatagt

SEQ ID NO: 3376338 - DNA, 25 bp, Homo sapien
gcaaagaagaattcctagccaacaa

SEQ ID NO: 3376339 - DNA, 25 bp, Homo sapien
caaagaagaattcctagccaacaag

SEQ ID NO: 3376340 - DNA, 25 bp, Homo sapien
aagaagaattcctagccaacaagca

SEQ ID NO: 3376341 - DNA, 25 bp, Homo sapien
agaagaattcctagccaacaagcac

SEQ ID NO: 3376342 - DNA, 25 bp, Homo sapien
ggaacattccttagcaggaagatgg

SEQ ID NO: 3376343 - DNA, 25 bp, Homo sapien
ccagtaccaatgctgtaaatggtat

SEQ ID NO: 3376344 - DNA, 25 bp, Homo sapien
cattccttagcaggaagatgggtag

SEQ ID NO: 3376345 - DNA, 25 bp, Homo sapien
gaacacaagaaaacaccagtaccaa

SEQ ID NO: 3376346 - DNA, 25 bp, Homo sapien
ctttgagtaggaatacaaactaatt

SEQ ID NO: 3376347 - DNA, 25 bp, Homo sapien
tgctaccaatggactccgctcctct

SEQ ID NO: 3376348 - DNA, 25 bp, Homo sapien
tgctgctaccaatggactccgctcc

SEQ ID NO: 3376349 - DNA, 25 bp, Homo sapien
caatggactccgctcctctggtttt

SEQ ID NO: 3376350 - DNA, 25 bp, Homo sapien
gactccgctcctctggttttttata

SEQ ID NO: 3376351 - DNA, 25 bp, Homo sapien
gactgatcagactggtcagaaagaa

SEQ ID NO: 3376352 - DNA, 25 bp, Homo sapien
actgatcagactggtcagaaagaag

SEQ ID NO: 3376353 - DNA, 25 bp, Homo sapien
gacagactgatcagactggtcagaa

SEQ ID NO: 3376354 - DNA, 25 bp, Homo sapien
cagactgatcagactggtcagaaag

SEQ ID NO: 3376355 - DNA, 25 bp, Homo sapien
ccggcccagattcattaattcctaa

SEQ ID NO: 3376356 - DNA, 25 bp, Homo sapien
attcctaaggtgaaagatactttct

SEQ ID NO: 3376357 - DNA, 25 bp, Homo sapien
ttcattaattcctaaggtgaaagat

SEQ ID NO: 3376358 - DNA, 25 bp, Homo sapien
tgcccggcccagattcattaattcc

SEQ ID NO: 3376359 - DNA, 25 bp, Homo sapien
ggtacatccctgttcacaacagtct

SEQ ID NO: 3376360 - DNA, 25 bp, Homo sapien
tacatccctgttcacaacagtcttt

SEQ ID NO: 3376361 - DNA, 25 bp, Homo sapien
tccctgttcacaacagtctttaaaa

SEQ ID NO: 3376362 - DNA, 25 bp, Homo sapien
catccctgttcacaacagtctttaa

SEQ ID NO: 3376363 - DNA, 25 bp, Homo sapien
tgtgaatgcttcactaatgctggcc

SEQ ID NO: 3376364 - DNA, 25 bp, Homo sapien
aatacaatataggaggaacagcatg

SEQ ID NO: 3376365 - DNA, 25 bp, Homo sapien
gacaaaaatgtgaatgcttcactaa

SEQ ID NO: 3376366 - DNA, 25 bp, Homo sapien
cagcatgagatgagaatagattgac

SEQ ID NO: 3376367 - DNA, 25 bp, Homo sapien
aaaatatgtaaggcccacttcttgc

SEQ ID NO: 3376368 - DNA, 25 bp, Homo sapien
ttgcatttccaccatggtaactcag

SEQ ID NO: 3376369 - DNA, 25 bp, Homo sapien
tttccaccatggtaactcaggtcga

SEQ ID NO: 3376370 - DNA, 25 bp, Homo sapien
catggtaactcaggtcgatcatctt

SEQ ID NO: 3376371 - DNA, 25 bp, Homo sapien
gcaaattcattatactccttggaaa

SEQ ID NO: 3376372 - DNA, 25 bp, Homo sapien
cttcagcaaattcattatactcctt

SEQ ID NO: 3376373 - DNA, 25 bp, Homo sapien
cagcaaattcattatactccttgga

SEQ ID NO: 3376374 - DNA, 25 bp, Homo sapien
tcagcaaattcattatactccttgg

SEQ ID NO: 3376375 - DNA, 25 bp, Homo sapien
ttctccttgtactgatataacacct

SEQ ID NO: 3376376 - DNA, 25 bp, Homo sapien
tctccttgtactgatataacacctt

SEQ ID NO: 3376377 - DNA, 25 bp, Homo sapien
ctccttgtactgatataacaccttc

SEQ ID NO: 3376378 - DNA, 25 bp, Homo sapien
gcgtatatattcgtaagggtcttct

SEQ ID NO: 3376379 - DNA, 25 bp, Homo sapien
tgccaaagttcctcatcagcatctg

SEQ ID NO: 3376380 - DNA, 25 bp, Homo sapien
agcatctgtatagcacatcaatgga

SEQ ID NO: 3376381 - DNA, 25 bp, Homo sapien
caaacttcatgcgtatatattcgta

SEQ ID NO: 3376382 - DNA, 25 bp, Homo sapien
aacatgcttaatctttacataaggt

SEQ ID NO: 3376383 - DNA, 25 bp, Homo sapien
cccagatccctttataattttgcaa

SEQ ID NO: 3376384 - DNA, 25 bp, Homo sapien
gatcccagatccctttataattttg

SEQ ID NO: 3376385 - DNA, 25 bp, Homo sapien
atgatcccagatccctttataattt

SEQ ID NO: 3376386 - DNA, 25 bp, Homo sapien
cagtggtaggagaaatgaaatcttc

SEQ ID NO: 3376387 - DNA, 25 bp, Homo sapien
aggctgtaaacaaaagtgtctgggc

SEQ ID NO: 3376388 - DNA, 25 bp, Homo sapien
ctctttcctcttactacaggctgta

SEQ ID NO: 3376389 - DNA, 25 bp, Homo sapien
tctgggcagcagtggtaggagaaat

SEQ ID NO: 3376390 - DNA, 25 bp, Homo sapien
ttgttactgaataggccaacagtcc

SEQ ID NO: 3376391 - DNA, 25 bp, Homo sapien
taacaaaatgactcacatgactaac

SEQ ID NO: 3376392 - DNA, 25 bp, Homo sapien
gaaaagtattgttactgaataggcc

SEQ ID NO: 3376393 - DNA, 25 bp, Homo sapien
tgaataggccaacagtccttaaaaa

SEQ ID NO: 3376394 - DNA, 25 bp, Homo sapien
tttttcgagggtcagcatttggttc

SEQ ID NO: 3376395 - DNA, 25 bp, Homo sapien
tggttctgtaagaatctggtaacaa

SEQ ID NO: 3376396 - DNA, 25 bp, Homo sapien
gggtcagcatttggttctgtaagaa

SEQ ID NO: 3376397 - DNA, 25 bp, Homo sapien
tccatctttttttcgagggtcagca

SEQ ID NO: 3376398 - DNA, 25 bp, Homo sapien
ttaaaactacttgcatagtcatgca

SEQ ID NO: 3376399 - DNA, 25 bp, Homo sapien
taaaactacttgcatagtcatgcac

SEQ ID NO: 3376400 - DNA, 25 bp, Homo sapien
ctgttactatgaaacttttataagg

SEQ ID NO: 3376401 - DNA, 25 bp, Homo sapien
tgttcgaatgatgtaagtttggtta

SEQ ID NO: 3376402 - DNA, 25 bp, Homo sapien
agcaatagtgttcgaatgatgtaag

SEQ ID NO: 3376403 - DNA, 25 bp, Homo sapien
tggttaattttatctgttactatga

SEQ ID NO: 3376404 - DNA, 25 bp, Homo sapien
tgtagcctagttcactgctgaagag

SEQ ID NO: 3376405 - DNA, 25 bp, Homo sapien
cagtggtagatgtgtccagagacaa

SEQ ID NO: 3376406 - DNA, 25 bp, Homo sapien
gacagacactgctaccagacacaga

SEQ ID NO: 3376407 - DNA, 25 bp, Homo sapien
ccgcatgatgtttgtgtggatagca

SEQ ID NO: 3376408 - DNA, 25 bp, Homo sapien
caagttactctttggccgcatgatg

SEQ ID NO: 3376409 - DNA, 25 bp, Homo sapien
aaaaatagtgaagtacccagcaagc

SEQ ID NO: 3376410 - DNA, 25 bp, Homo sapien
aaggctgtttgaaggttctgatcac

SEQ ID NO: 3376411 - DNA, 25 bp, Homo sapien
gattgctgatcaatacttgaagggc

SEQ ID NO: 3376412 - DNA, 25 bp, Homo sapien
ctatcatcaatcagacatcttcttg

SEQ ID NO: 3376413 - DNA, 25 bp, Homo sapien
tctgatgaatggtgtgatatattct

SEQ ID NO: 3376414 - DNA, 25 bp, Homo sapien
gtctgatgaatggtgtgatatattc

SEQ ID NO: 3376415 - DNA, 25 bp, Homo sapien
tgatgaatggtgtgatatattcttt

SEQ ID NO: 3376416 - DNA, 25 bp, Homo sapien
ggtctgatgaatggtgtgatatatt

SEQ ID NO: 3376417 - DNA, 25 bp, Homo sapien
taactgctttgtcatcactaccttc

SEQ ID NO: 3376418 - DNA, 25 bp, Homo sapien
ctgctttgtcatcactaccttcttc

SEQ ID NO: 3376419 - DNA, 25 bp, Homo sapien
atagcagtaactgctttgtcatcac

SEQ ID NO: 3376420 - DNA, 25 bp, Homo sapien
cagtaactgctttgtcatcactacc

SEQ ID NO: 3376421 - DNA, 25 bp, Homo sapien
aacagtaccaatgacctgtaagcag

SEQ ID NO: 3376422 - DNA, 25 bp, Homo sapien
cagattccctcaagctgttgggtta

SEQ ID NO: 3376423 - DNA, 25 bp, Homo sapien
catgctgttgtaaaacagtaccaat

SEQ ID NO: 3376424 - DNA, 25 bp, Homo sapien
tgacctgtaagcagattccctcaag

SEQ ID NO: 3376425 - DNA, 25 bp, Homo sapien
ttgttgacatgtcaaactgtgcgct

SEQ ID NO: 3376426 - DNA, 25 bp, Homo sapien
cttgttgacatgtcaaactgtgcgc

SEQ ID NO: 3376427 - DNA, 25 bp, Homo sapien
tgttgacatgtcaaactgtgcgcta

SEQ ID NO: 3376428 - DNA, 25 bp, Homo sapien
ttacataattatgaaggaggggcat

SEQ ID NO: 3376429 - DNA, 25 bp, Homo sapien
cataattatgaaggaggggcatcat

SEQ ID NO: 3376430 - DNA, 25 bp, Homo sapien
tacataattatgaaggaggggcatc

SEQ ID NO: 3376431 - DNA, 25 bp, Homo sapien
ctgttacataattatgaaggagggg

SEQ ID NO: 3376432 - DNA, 25 bp, Homo sapien
tcagacagaagtgtgtctgtatcaa

SEQ ID NO: 3376433 - DNA, 25 bp, Homo sapien
gcacatactgtatatcatttcaaga

SEQ ID NO: 3376434 - DNA, 25 bp, Homo sapien
acttggtgtcagacagaagtgtgtc

SEQ ID NO: 3376435 - DNA, 25 bp, Homo sapien
tcaagatacttggtgtcagacagaa

SEQ ID NO: 3376436 - DNA, 25 bp, Homo sapien
gaatataaattgcagtaaggcttta

SEQ ID NO: 3376437 - DNA, 25 bp, Homo sapien
aggctttatcctttaaatcaggtat

SEQ ID NO: 3376438 - DNA, 25 bp, Homo sapien
taaattgcagtaaggctttatcctt

SEQ ID NO: 3376439 - DNA, 25 bp, Homo sapien
cagtaaggctttatcctttaaatca

SEQ ID NO: 3376440 - DNA, 25 bp, Homo sapien
tggtcaatgccacgccctttgcact

SEQ ID NO: 3376441 - DNA, 25 bp, Homo sapien
tgcactgcagaatgatgacctctaa

SEQ ID NO: 3376442 - DNA, 25 bp, Homo sapien
tgctgcatgacactctgcatcttct

SEQ ID NO: 3376443 - DNA, 25 bp, Homo sapien
tgacctctaacaattttgctgcatg

SEQ ID NO: 3376444 - DNA, 25 bp, Homo sapien
gtgtggattataatacaaagctgca

SEQ ID NO: 3376445 - DNA, 25 bp, Homo sapien
cattattagggaagcgaagattttc

SEQ ID NO: 3376446 - DNA, 25 bp, Homo sapien
caaagctgcaattgcaacttgcaga

SEQ ID NO: 3376447 - DNA, 25 bp, Homo sapien
ttgcagacacatagttcgaagttca

SEQ ID NO: 3376448 - DNA, 25 bp, Homo sapien
cacagagtccgagaacacacatctt

SEQ ID NO: 3376449 - DNA, 25 bp, Homo sapien
acagagtccgagaacacacatcttt

SEQ ID NO: 3376450 - DNA, 25 bp, Homo sapien
catgttctgcatggcaggcatatgc

SEQ ID NO: 3376451 - DNA, 25 bp, Homo sapien
tatgctcttttcaatccgttaaata

SEQ ID NO: 3376452 - DNA, 25 bp, Homo sapien
actgtcattctcatgttctgcatgg

SEQ ID NO: 3376453 - DNA, 25 bp, Homo sapien
gataaaagccggcaaaatctgtcca

SEQ ID NO: 3376454 - DNA, 25 bp, Homo sapien
ttcatcatcaatgattgtggaatag

SEQ ID NO: 3376455 - DNA, 25 bp, Homo sapien
cttcatcatcaatgattgtggaata

SEQ ID NO: 3376456 - DNA, 25 bp, Homo sapien
gaacctagtattctggagccacata

SEQ ID NO: 3376457 - DNA, 25 bp, Homo sapien
tatttaacagtgtacgtggctccag

SEQ ID NO: 3376458 - DNA, 25 bp, Homo sapien
aaggctactgtggtacatgggcccc

SEQ ID NO: 3376459 - DNA, 25 bp, Homo sapien
tattcatcagttcccagtgcatagg

SEQ ID NO: 3376460 - DNA, 25 bp, Homo sapien
cattaagaccgtgagtcagtgcctg

SEQ ID NO: 3376461 - DNA, 25 bp, Homo sapien
tcattaagaccgtgagtcagtgcct

SEQ ID NO: 3376462 - DNA, 25 bp, Homo sapien
cagattagagttaattcctatcacc

SEQ ID NO: 3376463 - DNA, 25 bp, Homo sapien
actgcgcccggcttaggtgtttaca

SEQ ID NO: 3376464 - DNA, 25 bp, Homo sapien
catcaccatgagctaaagttattgc

SEQ ID NO: 3376465 - DNA, 25 bp, Homo sapien
ttattgcaaactgaaagtagtcttc

SEQ ID NO: 3376466 - DNA, 25 bp, Homo sapien
gaacttggcacaactggagcactga

SEQ ID NO: 3376467 - DNA, 25 bp, Homo sapien
gctgggcctccaaaattgaaagaac

SEQ ID NO: 3376468 - DNA, 25 bp, Homo sapien
cactgaatttgtatcctccatgctt

SEQ ID NO: 3376469 - DNA, 25 bp, Homo sapien
tcaattcatccctggtgctgggcct

SEQ ID NO: 3376470 - DNA, 25 bp, Homo sapien
cactatcagaggtgagtgcaccaca

SEQ ID NO: 3376471 - DNA, 25 bp, Homo sapien
caaatacccacttgtacactgacag

SEQ ID NO: 3376472 - DNA, 25 bp, Homo sapien
tacataccgaattcaagtcactatc

SEQ ID NO: 3376473 - DNA, 25 bp, Homo sapien
gaaattggacaaatactcataggtg

SEQ ID NO: 3376474 - DNA, 25 bp, Homo sapien
ccgatgtttaagatcaataacggct

SEQ ID NO: 3376475 - DNA, 25 bp, Homo sapien
tcagataccacgatcaacaagagcg

SEQ ID NO: 3376476 - DNA, 25 bp, Homo sapien
cctttaagcaacctagggtatacag

SEQ ID NO: 3376477 - DNA, 25 bp, Homo sapien
gattaacagttttcacccacacacg

SEQ ID NO: 3376478 - DNA, 25 bp, Homo sapien
aaaaagcagtgaagtctgaaaattt

SEQ ID NO: 3376479 - DNA, 25 bp, Homo sapien
aaaagcagtgaagtctgaaaattta

SEQ ID NO: 3376480 - DNA, 25 bp, Homo sapien
aagcagtgaagtctgaaaatttaaa

SEQ ID NO: 3376481 - DNA, 25 bp, Homo sapien
aaagcagtgaagtctgaaaatttaa

SEQ ID NO: 3376482 - DNA, 25 bp, Homo sapien
gacaagtccctatgtagctaattac

SEQ ID NO: 3376483 - DNA, 25 bp, Homo sapien
caagttaaagtctgtaaacggagat

SEQ ID NO: 3376484 - DNA, 25 bp, Homo sapien
tgttctcaaagacatgccaatacat

SEQ ID NO: 3376485 - DNA, 25 bp, Homo sapien
tttggattatatgacacaggagaca

SEQ ID NO: 3376486 - DNA, 25 bp, Homo sapien
tgaatagcagcatatggcccaaggg

SEQ ID NO: 3376487 - DNA, 25 bp, Homo sapien
tactctagtctcttccagagttgag

SEQ ID NO: 3376488 - DNA, 25 bp, Homo sapien
gccaaagacatggtttagtcatact

SEQ ID NO: 3376489 - DNA, 25 bp, Homo sapien
gacattgtgttagatctttgccaaa

SEQ ID NO: 3376490 - DNA, 25 bp, Homo sapien
agaacagaactgacagttttataac

SEQ ID NO: 3376491 - DNA, 25 bp, Homo sapien
attacaaagaacagaactgacagtt

SEQ ID NO: 3376492 - DNA, 25 bp, Homo sapien
aaagaacagaactgacagttttata

SEQ ID NO: 3376493 - DNA, 25 bp, Homo sapien
ttaaattacaaagaacagaactgac

SEQ ID NO: 3376494 - DNA, 25 bp, Homo sapien
tcctgctgaaattccggcggcttgg

SEQ ID NO: 3376495 - DNA, 25 bp, Homo sapien
ttcctctcctgctgaaattccggcg

SEQ ID NO: 3376496 - DNA, 25 bp, Homo sapien
gattcctcggggagacaccactgat

SEQ ID NO: 3376497 - DNA, 25 bp, Homo sapien
attccggcggcttggcaaccggccg

SEQ ID NO: 3376498 - DNA, 25 bp, Homo sapien
ttggtcttgctctagggctctgcat

SEQ ID NO: 3376499 - DNA, 25 bp, Homo sapien
aggctctcagtgtcggccgaggccc

SEQ ID NO: 3376500 - DNA, 25 bp, Homo sapien
cattcccgagagctgctgtatgccg

SEQ ID NO: 3376501 - DNA, 25 bp, Homo sapien
ggcttccaagcctgcctgagcttct

SEQ ID NO: 3376502 - DNA, 25 bp, Homo sapien
ggaagtcgaagggagaaataggaca

SEQ ID NO: 3376503 - DNA, 25 bp, Homo sapien
gaaataggacagaaagagagacctg

SEQ ID NO: 3376504 - DNA, 25 bp, Homo sapien
aagtcgaagggagaaataggacaga

SEQ ID NO: 3376505 - DNA, 25 bp, Homo sapien
gagaaataggacagaaagagagacc

SEQ ID NO: 3376506 - DNA, 25 bp, Homo sapien
gcgaggaggcggctttggttctccc

SEQ ID NO: 3376507 - DNA, 25 bp, Homo sapien
gcttgccggagtgcgttctgcagac

SEQ ID NO: 3376508 - DNA, 25 bp, Homo sapien
agccggggtgacgagcgccattttc

SEQ ID NO: 3376509 - DNA, 25 bp, Homo sapien
ttgtctggcgattgctgaatgctca

SEQ ID NO: 3376510 - DNA, 25 bp, Homo sapien
tcactcacaggacgcttccggtttt

SEQ ID NO: 3376511 - DNA, 25 bp, Homo sapien
cccagcttccattgggctgtcatta

SEQ ID NO: 3376512 - DNA, 25 bp, Homo sapien
cgcaacccgcatagtgtgtctgagg

SEQ ID NO: 3376513 - DNA, 25 bp, Homo sapien
caccatgcaccaggacaggaaacag

SEQ ID NO: 3376514 - DNA, 25 bp, Homo sapien
tgcggcggaggctgagcagcgggag

SEQ ID NO: 3376515 - DNA, 25 bp, Homo sapien
cggcggaggctgagcagcgggagcc

SEQ ID NO: 3376516 - DNA, 25 bp, Homo sapien
cggaggctgagcagcgggagccgga

SEQ ID NO: 3376517 - DNA, 25 bp, Homo sapien
ctgcggcggaggctgagcagcggga

SEQ ID NO: 3376518 - DNA, 25 bp, Homo sapien
ggccggcccataaaatcggcaaggc

SEQ ID NO: 3376519 - DNA, 25 bp, Homo sapien
cgcggccggcccataaaatcggcaa

SEQ ID NO: 3376520 - DNA, 25 bp, Homo sapien
tagagtggcggccgcgggttattaa

SEQ ID NO: 3376521 - DNA, 25 bp, Homo sapien
ttattaataaactccgcttctgccc

SEQ ID NO: 3376522 - DNA, 25 bp, Homo sapien
gctgcccaggcctaattacacattt

SEQ ID NO: 3376523 - DNA, 25 bp, Homo sapien
tttgtagaaacatgggagggccgtc

SEQ ID NO: 3376524 - DNA, 25 bp, Homo sapien
taaaggcgggcatctgtaaagcaaa

SEQ ID NO: 3376525 - DNA, 25 bp, Homo sapien
tacgccaggacaaaattagctatgc

SEQ ID NO: 3376526 - DNA, 25 bp, Homo sapien
tatgtagggtaagagtattagccca

SEQ ID NO: 3376527 - DNA, 25 bp, Homo sapien
taagatgaaatttcactcaatatgt

SEQ ID NO: 3376528 - DNA, 25 bp, Homo sapien
gctgaggatgtaatggtgttggaaa

SEQ ID NO: 3376529 - DNA, 25 bp, Homo sapien
gaaatttcactcaatatgtagggta

SEQ ID NO: 3376530 - DNA, 25 bp, Homo sapien
tccctgagaatctcgatttatttgg

SEQ ID NO: 3376531 - DNA, 25 bp, Homo sapien
ccctgagaatctcgatttatttggg

SEQ ID NO: 3376532 - DNA, 25 bp, Homo sapien
acagcgtaacatgttgcgcctccat

SEQ ID NO: 3376533 - DNA, 25 bp, Homo sapien
gcctctgtcaagcacagcgtaacat

SEQ ID NO: 3376534 - DNA, 25 bp, Homo sapien
tgcctctgtcaagcacagcgtaaca

SEQ ID NO: 3376535 - DNA, 25 bp, Homo sapien
cacagcgtaacatgttgcgcctcca

SEQ ID NO: 3376536 - DNA, 25 bp, Homo sapien
gcatatggacatgctgattaatttt

SEQ ID NO: 3376537 - DNA, 25 bp, Homo sapien
caaaatgagatttagcggccgggtg

SEQ ID NO: 3376538 - DNA, 25 bp, Homo sapien
gacagctagcatatggacatgctga

SEQ ID NO: 3376539 - DNA, 25 bp, Homo sapien
aaatgagatttagcggccgggtgca

SEQ ID NO: 3376540 - DNA, 25 bp, Homo sapien
caagtgttactgcttgcaagcttac

SEQ ID NO: 3376541 - DNA, 25 bp, Homo sapien
aattgtgttgtatgtaagcagtaga

SEQ ID NO: 3376542 - DNA, 25 bp, Homo sapien
aagcttacgccttccatattttcta

SEQ ID NO: 3376543 - DNA, 25 bp, Homo sapien
cagtagaaccatctgcaagtgttac

SEQ ID NO: 3376544 - DNA, 25 bp, Homo sapien
gtatgggtacatgttgaacataggc

SEQ ID NO: 3376545 - DNA, 25 bp, Homo sapien
gacctggccatctatgagttttgca

SEQ ID NO: 3376546 - DNA, 25 bp, Homo sapien
aatgacctggccatctatgagtttt

SEQ ID NO: 3376547 - DNA, 25 bp, Homo sapien
tttaggtatgggtacatgttgaaca

SEQ ID NO: 3376548 - DNA, 25 bp, Homo sapien
catcttctaactgtactgcttgacc

SEQ ID NO: 3376549 - DNA, 25 bp, Homo sapien
tgaccatcctctagacgcaaactgt

SEQ ID NO: 3376550 - DNA, 25 bp, Homo sapien
gtggtaccatcttctaactgtactg

SEQ ID NO: 3376551 - DNA, 25 bp, Homo sapien
gtgtggtgaataaatgctgtggtac

SEQ ID NO: 3376552 - DNA, 25 bp, Homo sapien
gctgaaccgcctgtaatgcactctg

SEQ ID NO: 3376553 - DNA, 25 bp, Homo sapien
ggtcaattgtagcatccccagtgtg

SEQ ID NO: 3376554 - DNA, 25 bp, Homo sapien
ccaagatggtgtcagactgcgggac

SEQ ID NO: 3376555 - DNA, 25 bp, Homo sapien
catggtggatataagctgtggtacc

SEQ ID NO: 3376556 - DNA, 25 bp, Homo sapien
tacctgctacactttcacttccatc

SEQ ID NO: 3376557 - DNA, 25 bp, Homo sapien
ctgctacactttcacttccatcaat

SEQ ID NO: 3376558 - DNA, 25 bp, Homo sapien
cctgctacactttcacttccatcaa

SEQ ID NO: 3376559 - DNA, 25 bp, Homo sapien
tgctacactttcacttccatcaatg

SEQ ID NO: 3376560 - DNA, 25 bp, Homo sapien
caccttcagactaggtagcggcagc

SEQ ID NO: 3376561 - DNA, 25 bp, Homo sapien
ctatgaaatgaaagtgcttaccagc

SEQ ID NO: 3376562 - DNA, 25 bp, Homo sapien
taaaggcagatttcaattgaagact

SEQ ID NO: 3376563 - DNA, 25 bp, Homo sapien
tcctttctaacagcactatgaaatg

SEQ ID NO: 3376564 - DNA, 25 bp, Homo sapien
agtctatcagctacttgaagtcaag

SEQ ID NO: 3376565 - DNA, 25 bp, Homo sapien
cactcagctgtacactctaaatggg

SEQ ID NO: 3376566 - DNA, 25 bp, Homo sapien
aatttaaagtgtgtaggctgtgcca

SEQ ID NO: 3376567 - DNA, 25 bp, Homo sapien
cacagtgctaggttcaccctgaaaa

SEQ ID NO: 3376568 - DNA, 25 bp, Homo sapien
tattcacatcgaaatgccttctctc

SEQ ID NO: 3376569 - DNA, 25 bp, Homo sapien
actcttgtagcatgtccttgtaaaa

SEQ ID NO: 3376570 - DNA, 25 bp, Homo sapien
cactctgttgagatttagcagttac

SEQ ID NO: 3376571 - DNA, 25 bp, Homo sapien
gatgatgagctgttgtatataattt

SEQ ID NO: 3376572 - DNA, 25 bp, Homo sapien
actgataaggccgatctcctgtgtg

SEQ ID NO: 3376573 - DNA, 25 bp, Homo sapien
cactgataaggccgatctcctgtgt

SEQ ID NO: 3376574 - DNA, 25 bp, Homo sapien
tagtacaattatcttccgaacaccg

SEQ ID NO: 3376575 - DNA, 25 bp, Homo sapien
agttctgacgtgactttttaatcca

SEQ ID NO: 3376576 - DNA, 25 bp, Homo sapien
ccgaacaccgatatggcttttctcc

SEQ ID NO: 3376577 - DNA, 25 bp, Homo sapien
atgtgtttctgtagatctcctgaag

SEQ ID NO: 3376578 - DNA, 25 bp, Homo sapien
tgtgtcctaacgtgcacttttctga

SEQ ID NO: 3376579 - DNA, 25 bp, Homo sapien
gctctgtgcagtaataaggtctttc

SEQ ID NO: 3376580 - DNA, 25 bp, Homo sapien
tttgatgttgtaaaggaccgaccgc

SEQ ID NO: 3376581 - DNA, 25 bp, Homo sapien
cgcagccttcgaagggacacttaaa

SEQ ID NO: 3376582 - DNA, 25 bp, Homo sapien
cagcgtggagatctgcttgtatgtc

SEQ ID NO: 3376583 - DNA, 25 bp, Homo sapien
tgctcctcctcgatgggctcagtgt

SEQ ID NO: 3376584 - DNA, 25 bp, Homo sapien
caacatgatgtttgtacaaactgga

SEQ ID NO: 3376585 - DNA, 25 bp, Homo sapien
tgtccgtttgtgcatggccagcgtg

SEQ ID NO: 3376586 - DNA, 25 bp, Homo sapien
tacttgtgtagaaacaacgtcgtcc

SEQ ID NO: 3376587 - DNA, 25 bp, Homo sapien
gattgggttactgtggctacttgtg

SEQ ID NO: 3376588 - DNA, 25 bp, Homo sapien
agtgtaacttgttgactcagtccag

SEQ ID NO: 3376589 - DNA, 25 bp, Homo sapien
tgtaacatacgtaatctgggaccct

SEQ ID NO: 3376590 - DNA, 25 bp, Homo sapien
tctgtaccctcagcagtaaccatag

SEQ ID NO: 3376591 - DNA, 25 bp, Homo sapien
caatggcctgcatgtcagcttgaga

SEQ ID NO: 3376592 - DNA, 25 bp, Homo sapien
ccatagcaacagagtgcgttcctgc

SEQ ID NO: 3376593 - DNA, 25 bp, Homo sapien
tgtgatgggcgtgccatcctgcgtt

SEQ ID NO: 3376594 - DNA, 25 bp, Homo sapien
cattggatgttgctactaaggtcag

SEQ ID NO: 3376595 - DNA, 25 bp, Homo sapien
tctgatgaggcagtatggaatgctg

SEQ ID NO: 3376596 - DNA, 25 bp, Homo sapien
ggttactaagtgatggctatgctgc

SEQ ID NO: 3376597 - DNA, 25 bp, Homo sapien
gaactgcaatctgggtgccattgga

SEQ ID NO: 3376598 - DNA, 25 bp, Homo sapien
cacagtgtacaaagttgaaagctat

SEQ ID NO: 3376599 - DNA, 25 bp, Homo sapien
ttgaaagctatgagcagcactgctg

SEQ ID NO: 3376600 - DNA, 25 bp, Homo sapien
gcactgctgtcgactgaggacagta

SEQ ID NO: 3376601 - DNA, 25 bp, Homo sapien
taaaggttatacacgaagcacagtg

SEQ ID NO: 3376602 - DNA, 25 bp, Homo sapien
gattctagacgctattctgatggct

SEQ ID NO: 3376603 - DNA, 25 bp, Homo sapien
ccttgttggattctagacgctattc

SEQ ID NO: 3376604 - DNA, 25 bp, Homo sapien
tgttggattctagacgctattctga

SEQ ID NO: 3376605 - DNA, 25 bp, Homo sapien
ctccttgttggattctagacgctat

SEQ ID NO: 3376606 - DNA, 25 bp, Homo sapien
tccacgggaagttaaaaatccatca

SEQ ID NO: 3376607 - DNA, 25 bp, Homo sapien
gaataaaatgttctccactctcgca

SEQ ID NO: 3376608 - DNA, 25 bp, Homo sapien
tccaagggttatatacacaaaagtg

SEQ ID NO: 3376609 - DNA, 25 bp, Homo sapien
tgggcccgggcttcatggatttctg

SEQ ID NO: 3376610 - DNA, 25 bp, Homo sapien
tatctgaaggctttacaccctttat

SEQ ID NO: 3376611 - DNA, 25 bp, Homo sapien
aaaatggacaagcatatagtagaac

SEQ ID NO: 3376612 - DNA, 25 bp, Homo sapien
aaaccgcagacactctactaactgg

SEQ ID NO: 3376613 - DNA, 25 bp, Homo sapien
taattagcatttcagcttgaagagc

SEQ ID NO: 3376614 - DNA, 25 bp, Homo sapien
tataattttgtacataattcaatgt

SEQ ID NO: 3376615 - DNA, 25 bp, Homo sapien
ttataattttgtacataattcaatg

SEQ ID NO: 3376616 - DNA, 25 bp, Homo sapien
caccagcctgtggttaaactttgat

SEQ ID NO: 3376617 - DNA, 25 bp, Homo sapien
cagcctgtggttaaactttgatgat

SEQ ID NO: 3376618 - DNA, 25 bp, Homo sapien
acagtactgttatcccgggcaccag

SEQ ID NO: 3376619 - DNA, 25 bp, Homo sapien
tccaattacagtactgttatcccgg

SEQ ID NO: 3376620 - DNA, 25 bp, Homo sapien
gaagtccacccatcctgaaagaaaa

SEQ ID NO: 3376621 - DNA, 25 bp, Homo sapien
tcctttctgtttatgggtacctctg

SEQ ID NO: 3376622 - DNA, 25 bp, Homo sapien
ggtacctctgagtggagtcctgaca

SEQ ID NO: 3376623 - DNA, 25 bp, Homo sapien
cattggagcctaaattcaaactact

SEQ ID NO: 3376624 - DNA, 25 bp, Homo sapien
agctgggcagagacacaaccaaaaa

SEQ ID NO: 3376625 - DNA, 25 bp, Homo sapien
aaagctgggcagagacacaaccaaa

SEQ ID NO: 3376626 - DNA, 25 bp, Homo sapien
ccaaagctgggcagagacacaacca

SEQ ID NO: 3376627 - DNA, 25 bp, Homo sapien
agagaattttagaccaatatccttg

SEQ ID NO: 3376628 - DNA, 25 bp, Homo sapien
tatttaaactggcttcgttcagatt

SEQ ID NO: 3376629 - DNA, 25 bp, Homo sapien
ttgtgattatttaaactggcttcgt

SEQ ID NO: 3376630 - DNA, 25 bp, Homo sapien
cagggactgccagttgtttgctggc

SEQ ID NO: 3376631 - DNA, 25 bp, Homo sapien
tgaatgaccacagggactgccagtt

SEQ ID NO: 3376632 - DNA, 25 bp, Homo sapien
gattcatgacttcgcacgtaaaggg

SEQ ID NO: 3376633 - DNA, 25 bp, Homo sapien
tgacttcgcacgtaaagggctttaa

SEQ ID NO: 3376634 - DNA, 25 bp, Homo sapien
tctttagattcatgacttcgcacgt

SEQ ID NO: 3376635 - DNA, 25 bp, Homo sapien
tgtttatcctctttagattcatgac

SEQ ID NO: 3376636 - DNA, 25 bp, Homo sapien
ggctcgcggcaaactcaaacgcaat

SEQ ID NO: 3376637 - DNA, 25 bp, Homo sapien
ccagcacgtgggcatgcgttggcaa

SEQ ID NO: 3376638 - DNA, 25 bp, Homo sapien
gtttacatttgttcgccagcacgtg

SEQ ID NO: 3376639 - DNA, 25 bp, Homo sapien
ttggcaaaaccgattggcccggctc

SEQ ID NO: 3376640 - DNA, 25 bp, Homo sapien
ctgcgggagccgatgtgcttaggct

SEQ ID NO: 3376641 - DNA, 25 bp, Homo sapien
ggaggcctccgagccccattatttc

SEQ ID NO: 3376642 - DNA, 25 bp, Homo sapien
gccgatgtgcttaggctggacactg

SEQ ID NO: 3376643 - DNA, 25 bp, Homo sapien
gcgagaagagctctcccaagcaggg

SEQ ID NO: 3376644 - DNA, 25 bp, Homo sapien
gggcagccacgttcagggtcgaggt

SEQ ID NO: 3376645 - DNA, 25 bp, Homo sapien
agccggaaatggtgactcgggcctc

SEQ ID NO: 3376646 - DNA, 25 bp, Homo sapien
aggtctgagccggaaatggtgactc

SEQ ID NO: 3376647 - DNA, 25 bp, Homo sapien
cacgttcagggtcgaggtctgagcc

SEQ ID NO: 3376648 - DNA, 25 bp, Homo sapien
ggaccgaatggccttcggccgctgc

SEQ ID NO: 3376649 - DNA, 25 bp, Homo sapien
agcgcctccgggtctctgcgagctg

SEQ ID NO: 3376650 - DNA, 25 bp, Homo sapien
cctccgggtctctgcgagctgggaa

SEQ ID NO: 3376651 - DNA, 25 bp, Homo sapien
gaagagccagggaccgaatggcctt

SEQ ID NO: 3376652 - DNA, 25 bp, Homo sapien
ctatgagcgagcctggggcggcggg

SEQ ID NO: 3376653 - DNA, 25 bp, Homo sapien
aaagagagctggattcgcctaagcc

SEQ ID NO: 3376654 - DNA, 25 bp, Homo sapien
caaaagagagctggattcgcctaag

SEQ ID NO: 3376655 - DNA, 25 bp, Homo sapien
gagagctggattcgcctaagccgac

SEQ ID NO: 3376656 - DNA, 25 bp, Homo sapien
gttaaccacgtgagtgcccagtcca

SEQ ID NO: 3376657 - DNA, 25 bp, Homo sapien
cccagtgcagctccgggtttgaaaa

SEQ ID NO: 3376658 - DNA, 25 bp, Homo sapien
aggtccagtctcaggttcgggctcc

SEQ ID NO: 3376659 - DNA, 25 bp, Homo sapien
gaccagctacgcgattttggcggga

SEQ ID NO: 3376660 - DNA, 25 bp, Homo sapien
ccgaggacaggagagcggaggcctg

SEQ ID NO: 3376661 - DNA, 25 bp, Homo sapien
gaggacaggagagcggaggcctgcg

SEQ ID NO: 3376662 - DNA, 25 bp, Homo sapien
gggccgaggacaggagagcggaggc

SEQ ID NO: 3376663 - DNA, 25 bp, Homo sapien
gccgaggacaggagagcggaggcct

SEQ ID NO: 3376664 - DNA, 25 bp, Homo sapien
gctgcagggcgagaagatcagcttc

SEQ ID NO: 3376665 - DNA, 25 bp, Homo sapien
ccggcgacttgaccggcgacgagga

SEQ ID NO: 3376666 - DNA, 25 bp, Homo sapien
gggctcttgaaaggccgagtcctcc

SEQ ID NO: 3376667 - DNA, 25 bp, Homo sapien
accggcgagaaagagctacccagga

SEQ ID NO: 3376668 - DNA, 25 bp, Homo sapien
cgtgtgcggggtgtcgaagagtcgc

SEQ ID NO: 3376669 - DNA, 25 bp, Homo sapien
gtgtcgaagagtcgcagcttgcgga

SEQ ID NO: 3376670 - DNA, 25 bp, Homo sapien
gggtgtcgaagagtcgcagcttgcg

SEQ ID NO: 3376671 - DNA, 25 bp, Homo sapien
gtcgaagagtcgcagcttgcggaag

SEQ ID NO: 3376672 - DNA, 25 bp, Homo sapien
gccgcttctgtaaccgaacccaggc

SEQ ID NO: 3376673 - DNA, 25 bp, Homo sapien
gggggagcggccggccgcttctgta

SEQ ID NO: 3376674 - DNA, 25 bp, Homo sapien
gggagcggccggccgcttctgtaac

SEQ ID NO: 3376675 - DNA, 25 bp, Homo sapien
ccgcttctgtaaccgaacccaggca

SEQ ID NO: 3376676 - DNA, 25 bp, Homo sapien
atgaagttccagacgaggcccattg

SEQ ID NO: 3376677 - DNA, 25 bp, Homo sapien
gatgaagttccagacgaggcccatt

SEQ ID NO: 3376678 - DNA, 25 bp, Homo sapien
tgaagttccagacgaggcccattgt

SEQ ID NO: 3376679 - DNA, 25 bp, Homo sapien
acgacacgatcagggcgggacaatt

SEQ ID NO: 3376680 - DNA, 25 bp, Homo sapien
aattacaggcccgatcgccgcgttt

SEQ ID NO: 3376681 - DNA, 25 bp, Homo sapien
catcctatggctcgggagtgtcagg

SEQ ID NO: 3376682 - DNA, 25 bp, Homo sapien
gaaccgcgttatcggtgccgcactc

SEQ ID NO: 3376683 - DNA, 25 bp, Homo sapien
tgttcctaatcacacggaggccggc

SEQ ID NO: 3376684 - DNA, 25 bp, Homo sapien
gaaacaggcctcagtactgcctgga

SEQ ID NO: 3376685 - DNA, 25 bp, Homo sapien
cacgataaaaacaaatgctgggcca

SEQ ID NO: 3376686 - DNA, 25 bp, Homo sapien
aaagtggtcatctgcgcagtactcg

SEQ ID NO: 3376687 - DNA, 25 bp, Homo sapien
taaacagtacagctcgaaagcacac

SEQ ID NO: 3376688 - DNA, 25 bp, Homo sapien
ttttgccttgagcaagtcggccaat

SEQ ID NO: 3376689 - DNA, 25 bp, Homo sapien
agtacagctcgaaagcacacagatt

SEQ ID NO: 3376690 - DNA, 25 bp, Homo sapien
ccttgagcaagtcggccaataaaca

SEQ ID NO: 3376691 - DNA, 25 bp, Homo sapien
aagcagtccgagagccccataaaat

SEQ ID NO: 3376692 - DNA, 25 bp, Homo sapien
gaatgcgtaggtgaaagcaacacac

SEQ ID NO: 3376693 - DNA, 25 bp, Homo sapien
tcaacgagcctttcatagggctgaa

SEQ ID NO: 3376694 - DNA, 25 bp, Homo sapien
ggatccaagtcctatagtcagcctt

SEQ ID NO: 3376695 - DNA, 25 bp, Homo sapien
tctacgacgacactgtcctgaggaa

SEQ ID NO: 3376696 - DNA, 25 bp, Homo sapien
tatccatgaagagagaactaccccg

SEQ ID NO: 3376697 - DNA, 25 bp, Homo sapien
tgaggagtctgtcgcacatcaaatt

SEQ ID NO: 3376698 - DNA, 25 bp, Homo sapien
tgaagcaacaaagaatccggagtaa

SEQ ID NO: 3376699 - DNA, 25 bp, Homo sapien
atcactggcttccatgtcttcacca

SEQ ID NO: 3376700 - DNA, 25 bp, Homo sapien
taatcactggcttccatgtcttcac

SEQ ID NO: 3376701 - DNA, 25 bp, Homo sapien
catcttcaagctcataatcactggc

SEQ ID NO: 3376702 - DNA, 25 bp, Homo sapien
ttgtttcatcttcaagctcataatc

SEQ ID NO: 3376703 - DNA, 25 bp, Homo sapien
aaacagttatttcttgctatggtga

SEQ ID NO: 3376704 - DNA, 25 bp, Homo sapien
taatacaaatatacgaaaacagtta

SEQ ID NO: 3376705 - DNA, 25 bp, Homo sapien
tgtaatacaaatatacgaaaacagt

SEQ ID NO: 3376706 - DNA, 25 bp, Homo sapien
gttatttcttgctatggtgataggg

SEQ ID NO: 3376707 - DNA, 25 bp, Homo sapien
tccagagccgattttctctagctca

SEQ ID NO: 3376708 - DNA, 25 bp, Homo sapien
aaatacagaaccaaattctccagag

SEQ ID NO: 3376709 - DNA, 25 bp, Homo sapien
gccaatggcttttttgatcgcttaa

SEQ ID NO: 3376710 - DNA, 25 bp, Homo sapien
taccgggacttcatattgctttcag

SEQ ID NO: 3376711 - DNA, 25 bp, Homo sapien
gagaaatatcgaactacatgagaat

SEQ ID NO: 3376712 - DNA, 25 bp, Homo sapien
atatgatcatcttctgcccacgcag

SEQ ID NO: 3376713 - DNA, 25 bp, Homo sapien
gaatgctgtccaagcactgcatgag

SEQ ID NO: 3376714 - DNA, 25 bp, Homo sapien
gagcatatacttctctcaaagcgtt

SEQ ID NO: 3376715 - DNA, 25 bp, Homo sapien
tgtgtcgaggccatagtcttgtcaa

SEQ ID NO: 3376716 - DNA, 25 bp, Homo sapien
gagagacataagtcggcccttgaag

SEQ ID NO: 3376717 - DNA, 25 bp, Homo sapien
tagggccggactacagaatgcttaa

SEQ ID NO: 3376718 - DNA, 25 bp, Homo sapien
tacgctaggtactacggacaccaaa

SEQ ID NO: 3376719 - DNA, 25 bp, Homo sapien
ttcacacttgagtatgaaaacccaa

SEQ ID NO: 3376720 - DNA, 25 bp, Homo sapien
gcacatttcacacttgagtatgaaa

SEQ ID NO: 3376721 - DNA, 25 bp, Homo sapien
atttcacacttgagtatgaaaaccc

SEQ ID NO: 3376722 - DNA, 25 bp, Homo sapien
acatttcacacttgagtatgaaaac

SEQ ID NO: 3376723 - DNA, 25 bp, Homo sapien
gatcacaaatgcatccagatagtcg

SEQ ID NO: 3376724 - DNA, 25 bp, Homo sapien
taatctgagagggtagcaagactac

SEQ ID NO: 3376725 - DNA, 25 bp, Homo sapien
tcacaataaagggaatcagttactc

SEQ ID NO: 3376726 - DNA, 25 bp, Homo sapien
cacacaaagaggcagtcctgtttca

SEQ ID NO: 3376727 - DNA, 25 bp, Homo sapien
ggtccagcaaccatagctgtgccca

SEQ ID NO: 3376728 - DNA, 25 bp, Homo sapien
caggtccagcaaccatagctgtgcc

SEQ ID NO: 3376729 - DNA, 25 bp, Homo sapien
tagcaggtccagcaaccatagctgt

SEQ ID NO: 3376730 - DNA, 25 bp, Homo sapien
ccagcaaccatagctgtgcccattt

SEQ ID NO: 3376731 - DNA, 25 bp, Homo sapien
aatgcatgagcatacctgtttcccc

SEQ ID NO: 3376732 - DNA, 25 bp, Homo sapien
gtatatcacctagaagccaaattgc

SEQ ID NO: 3376733 - DNA, 25 bp, Homo sapien
tgtcagacaagataggctaagtcct

SEQ ID NO: 3376734 - DNA, 25 bp, Homo sapien
gggagcaaaccaataacgctgtcag

SEQ ID NO: 3376735 - DNA, 25 bp, Homo sapien
tgctcaacatagatcggcactacag

SEQ ID NO: 3376736 - DNA, 25 bp, Homo sapien
tgctcaacttagatcggcatagatc

SEQ ID NO: 3376737 - DNA, 25 bp, Homo sapien
gatcggcatagatcggcatagatgc

SEQ ID NO: 3376738 - DNA, 25 bp, Homo sapien
catagatcggcatagatgctcaaca

SEQ ID NO: 3376739 - DNA, 25 bp, Homo sapien
tcagagtaaaccagtattatcaggt

SEQ ID NO: 3376740 - DNA, 25 bp, Homo sapien
ttctcccttcaacctgcttgtgaaa

SEQ ID NO: 3376741 - DNA, 25 bp, Homo sapien
caaccaatctcaaccaagaaagtgt

SEQ ID NO: 3376742 - DNA, 25 bp, Homo sapien
caaatgagtctcaaccaaccaatct

SEQ ID NO: 3376743 - DNA, 25 bp, Homo sapien
tagttttcacttatagcatcagcta

SEQ ID NO: 3376744 - DNA, 25 bp, Homo sapien
cacttatagcatcagctaaacttcc

SEQ ID NO: 3376745 - DNA, 25 bp, Homo sapien
gttttcacttatagcatcagctaaa

SEQ ID NO: 3376746 - DNA, 25 bp, Homo sapien
tttcacttatagcatcagctaaact

SEQ ID NO: 3376747 - DNA, 25 bp, Homo sapien
taggttttatatccatgtgaaccaa

SEQ ID NO: 3376748 - DNA, 25 bp, Homo sapien
cctcaagcctcggccaacttgcaaa

SEQ ID NO: 3376749 - DNA, 25 bp, Homo sapien
ggttttatatccatgtgaaccaaag

SEQ ID NO: 3376750 - DNA, 25 bp, Homo sapien
tcaagcctcggccaacttgcaaaag

SEQ ID NO: 3376751 - DNA, 25 bp, Homo sapien
tacaagaagcaactagtcaaatcca

SEQ ID NO: 3376752 - DNA, 25 bp, Homo sapien
gcctaagatgcttaacttgaatcca

SEQ ID NO: 3376753 - DNA, 25 bp, Homo sapien
taacatacgcatatgaaattctagc

SEQ ID NO: 3376754 - DNA, 25 bp, Homo sapien
gaaaaagggatagcttgcaagataa

SEQ ID NO: 3376755 - DNA, 25 bp, Homo sapien
catctatacgttttactttctttat

SEQ ID NO: 3376756 - DNA, 25 bp, Homo sapien
ggagtcatctatacgttttactttc

SEQ ID NO: 3376757 - DNA, 25 bp, Homo sapien
tggagtcatctatacgttttacttt

SEQ ID NO: 3376758 - DNA, 25 bp, Homo sapien
agtcatctatacgttttactttctt

SEQ ID NO: 3376759 - DNA, 25 bp, Homo sapien
acctaagacttggaattcgagacca

SEQ ID NO: 3376760 - DNA, 25 bp, Homo sapien
gaggattacctaagacttggaattc

SEQ ID NO: 3376761 - DNA, 25 bp, Homo sapien
aggtaggaggattacctaagacttg

SEQ ID NO: 3376762 - DNA, 25 bp, Homo sapien
gattacctaagacttggaattcgag

SEQ ID NO: 3376763 - DNA, 25 bp, Homo sapien
tataccagaatcatccataatgctt

SEQ ID NO: 3376764 - DNA, 25 bp, Homo sapien
tgtcaaacagttaattatgtaagcc

SEQ ID NO: 3376765 - DNA, 25 bp, Homo sapien
catggaataagcatctcaggggaca

SEQ ID NO: 3376766 - DNA, 25 bp, Homo sapien
taaaatgccgattctcaagttctag

SEQ ID NO: 3376767 - DNA, 25 bp, Homo sapien
gaggttcgagatatgaaaatattac

SEQ ID NO: 3376768 - DNA, 25 bp, Homo sapien
taactttgttggatgcccaatcatc

SEQ ID NO: 3376769 - DNA, 25 bp, Homo sapien
tggatgcccaatcatcttcgtctcc

SEQ ID NO: 3376770 - DNA, 25 bp, Homo sapien
ttgggattgaggttcgagatatgaa

SEQ ID NO: 3376771 - DNA, 25 bp, Homo sapien
gactatcgccctcttcaacttgtgg

SEQ ID NO: 3376772 - DNA, 25 bp, Homo sapien
caacttgtggactggagatccttgt

SEQ ID NO: 3376773 - DNA, 25 bp, Homo sapien
ggagatccttgttacatgcccaaga

SEQ ID NO: 3376774 - DNA, 25 bp, Homo sapien
tgcaagaaaacgactatcgccctct

SEQ ID NO: 3376775 - DNA, 25 bp, Homo sapien
aatgccctcagatgacggtttagat

SEQ ID NO: 3376776 - DNA, 25 bp, Homo sapien
tccaccagtggtgtatgagaacata

SEQ ID NO: 3376777 - DNA, 25 bp, Homo sapien
gaacatattttttacgacaactcca

SEQ ID NO: 3376778 - DNA, 25 bp, Homo sapien
gcaaactatgattaagggagaagaa

SEQ ID NO: 3376779 - DNA, 25 bp, Homo sapien
caaaacacgtagaaacacactgaca

SEQ ID NO: 3376780 - DNA, 25 bp, Homo sapien
aaagaaatccctctacctctaggca

SEQ ID NO: 3376781 - DNA, 25 bp, Homo sapien
cactcttttgaaactataggccata

SEQ ID NO: 3376782 - DNA, 25 bp, Homo sapien
caatgggatcagacaattacacttt

SEQ ID NO: 3376783 - DNA, 25 bp, Homo sapien
atctgcttttggtagatgggtataa

SEQ ID NO: 3376784 - DNA, 25 bp, Homo sapien
tatctgcttttggtagatgggtata

SEQ ID NO: 3376785 - DNA, 25 bp, Homo sapien
agggcaagcgcaaaaatatctgctt

SEQ ID NO: 3376786 - DNA, 25 bp, Homo sapien
ctgtgagggcaagcgcaaaaatatc

SEQ ID NO: 3376787 - DNA, 25 bp, Homo sapien
cgaggtaatctaccctgtctgattt

SEQ ID NO: 3376788 - DNA, 25 bp, Homo sapien
tatccgaggtaatctaccctgtctg

SEQ ID NO: 3376789 - DNA, 25 bp, Homo sapien
tggtatccgaggtaatctaccctgt

SEQ ID NO: 3376790 - DNA, 25 bp, Homo sapien
cttgtggtatccgaggtaatctacc

SEQ ID NO: 3376791 - DNA, 25 bp, Homo sapien
cactctttctagaagcggacagcaa

SEQ ID NO: 3376792 - DNA, 25 bp, Homo sapien
ttaccagtgccattgctgaaggtct

SEQ ID NO: 3376793 - DNA, 25 bp, Homo sapien
aattctattcgtaattgttctgcac

SEQ ID NO: 3376794 - DNA, 25 bp, Homo sapien
gaatttttgaacttttcggcattca

SEQ ID NO: 3376795 - DNA, 25 bp, Homo sapien
gatgttctattactctgggtggtgg

SEQ ID NO: 3376796 - DNA, 25 bp, Homo sapien
agtaaggctgacagagcggttcatt

SEQ ID NO: 3376797 - DNA, 25 bp, Homo sapien
tctttccaataagtcgagatgttct

SEQ ID NO: 3376798 - DNA, 25 bp, Homo sapien
agtggccatccggtcagtgaagagt

SEQ ID NO: 3376799 - DNA, 25 bp, Homo sapien
cacagtggttaaccctggaaaggct

SEQ ID NO: 3376800 - DNA, 25 bp, Homo sapien
gaaaggctggtgtaacatccaacag

SEQ ID NO: 3376801 - DNA, 25 bp, Homo sapien
tactttttacaggtcactacaggga

SEQ ID NO: 3376802 - DNA, 25 bp, Homo sapien
tgcaatgcctacaaagtgctcccag

SEQ ID NO: 3376803 - DNA, 25 bp, Homo sapien
acaggcatcacaaggatttagacaa

SEQ ID NO: 3376804 - DNA, 25 bp, Homo sapien
catgcataacatgcaatgtgatatt

SEQ ID NO: 3376805 - DNA, 25 bp, Homo sapien
aatattagaaaacaggcatcacaag

SEQ ID NO: 3376806 - DNA, 25 bp, Homo sapien
gcaagtcacatgcataacatgcaat

SEQ ID NO: 3376807 - DNA, 25 bp, Homo sapien
aaaaatgccatagtttcttgacttc

SEQ ID NO: 3376808 - DNA, 25 bp, Homo sapien
caaagcttgataatggactcttcaa

SEQ ID NO: 3376809 - DNA, 25 bp, Homo sapien
caaagcggagtgaaaatcaaagctt

SEQ ID NO: 3376810 - DNA, 25 bp, Homo sapien
ttgacttccggaacaaagcggagtg

SEQ ID NO: 3376811 - DNA, 25 bp, Homo sapien
ggaaagcttcagtaatcccaccagt

SEQ ID NO: 3376812 - DNA, 25 bp, Homo sapien
agtatactctaaagactcacccagg

SEQ ID NO: 3376813 - DNA, 25 bp, Homo sapien
cttgaaacgctgctttaaatatcta

SEQ ID NO: 3376814 - DNA, 25 bp, Homo sapien
ccagtcacgtaaatgacagctgttg

SEQ ID NO: 3376815 - DNA, 25 bp, Homo sapien
attcatcaatattttcagctttggt

SEQ ID NO: 3376816 - DNA, 25 bp, Homo sapien
tcattcatcaatattttcagctttg

SEQ ID NO: 3376817 - DNA, 25 bp, Homo sapien
cattcatcaatattttcagctttgg

SEQ ID NO: 3376818 - DNA, 25 bp, Homo sapien
tcaagcttgtttttcctgggagtgc

SEQ ID NO: 3376819 - DNA, 25 bp, Homo sapien
tcttccgaggatattcgggctgtct

SEQ ID NO: 3376820 - DNA, 25 bp, Homo sapien
tgacgtgtggatcttttttttgtgg

SEQ ID NO: 3376821 - DNA, 25 bp, Homo sapien
ttcgggctgtctccggagtcgcagt

SEQ ID NO: 3376822 - DNA, 25 bp, Homo sapien
tatgtatatttagaattaggcatct

SEQ ID NO: 3376823 - DNA, 25 bp, Homo sapien
tgtatatttagaattaggcatctgg

SEQ ID NO: 3376824 - DNA, 25 bp, Homo sapien
gtatatttagaattaggcatctgga

SEQ ID NO: 3376825 - DNA, 25 bp, Homo sapien
tatatgtatatttagaattaggcat

SEQ ID NO: 3376826 - DNA, 25 bp, Homo sapien
tcggcacgtaaacgcggttctagga

SEQ ID NO: 3376827 - DNA, 25 bp, Homo sapien
ggctcagtgcacgacttatcagaaa

SEQ ID NO: 3376828 - DNA, 25 bp, Homo sapien
taatctgattgagacttcggcacgt

SEQ ID NO: 3376829 - DNA, 25 bp, Homo sapien
gcttcaataacgcttcctgcagtgg

SEQ ID NO: 3376830 - DNA, 25 bp, Homo sapien
ccgaaagggattctactgggacagt

SEQ ID NO: 3376831 - DNA, 25 bp, Homo sapien
cctgtgcaagccaaggaacacgtta

SEQ ID NO: 3376832 - DNA, 25 bp, Homo sapien
tctcacggaaatgttcagctgccgg

SEQ ID NO: 3376833 - DNA, 25 bp, Homo sapien
tgttatatgtgatctccagaggacc

SEQ ID NO: 3376834 - DNA, 25 bp, Homo sapien
cttggaaagctttggtcttctgatc

SEQ ID NO: 3376835 - DNA, 25 bp, Homo sapien
tgcccttcttgacccgaggcaggtc

SEQ ID NO: 3376836 - DNA, 25 bp, Homo sapien
tgatcccgcttttgtgcccttcttg

SEQ ID NO: 3376837 - DNA, 25 bp, Homo sapien
gactggcctcagagagttcacaggg

SEQ ID NO: 3376838 - DNA, 25 bp, Homo sapien
catcgatgataattacgcagcaggg

SEQ ID NO: 3376839 - DNA, 25 bp, Homo sapien
taaacatgcatgtgttggagcccca

SEQ ID NO: 3376840 - DNA, 25 bp, Homo sapien
ccatcggaattacgtgggagcttca

SEQ ID NO: 3376841 - DNA, 25 bp, Homo sapien
gagattaggagctacaactgcaggc

SEQ ID NO: 3376842 - DNA, 25 bp, Homo sapien
taagctaggctaatctacctatttt

SEQ ID NO: 3376843 - DNA, 25 bp, Homo sapien
ttggacacacttggataagctaggc

SEQ ID NO: 3376844 - DNA, 25 bp, Homo sapien
gttatatgttcacaggttcctgaga

SEQ ID NO: 3376845 - DNA, 25 bp, Homo sapien
tgaacatcttgggagacctttattc

SEQ ID NO: 3376846 - DNA, 25 bp, Homo sapien
gactctagtttgaggcccagagggc

SEQ ID NO: 3376847 - DNA, 25 bp, Homo sapien
actggaagatggcggttccggccga

SEQ ID NO: 3376848 - DNA, 25 bp, Homo sapien
aattactggaagatggcggttccgg

SEQ ID NO: 3376849 - DNA, 25 bp, Homo sapien
gaattactggaagatggcggttccg

SEQ ID NO: 3376850 - DNA, 25 bp, Homo sapien
ttactggaagatggcggttccggcc

SEQ ID NO: 3376851 - DNA, 25 bp, Homo sapien
ggctgcttcccgttggttctcacaa

SEQ ID NO: 3376852 - DNA, 25 bp, Homo sapien
cagctcaggctgcttcccgttggtt

SEQ ID NO: 3376853 - DNA, 25 bp, Homo sapien
gcagctcaggctgcttcccgttggt

SEQ ID NO: 3376854 - DNA, 25 bp, Homo sapien
ctcaggctgcttcccgttggttctc

SEQ ID NO: 3376855 - DNA, 25 bp, Homo sapien
ctcggacgcccctcaacctccgcag

SEQ ID NO: 3376856 - DNA, 25 bp, Homo sapien
gcccctcaacctccgcagccacagc

SEQ ID NO: 3376857 - DNA, 25 bp, Homo sapien
ggacgcccctcaacctccgcagcca

SEQ ID NO: 3376858 - DNA, 25 bp, Homo sapien
acgcccctcaacctccgcagccaca

SEQ ID NO: 3376859 - DNA, 25 bp, Homo sapien
ctgccccgccaacccctcctgccca

SEQ ID NO: 3376860 - DNA, 25 bp, Homo sapien
cccctcctgcccagccagcccctcc

SEQ ID NO: 3376861 - DNA, 25 bp, Homo sapien
ctcctgcccagccagcccctccgcg

SEQ ID NO: 3376862 - DNA, 25 bp, Homo sapien
tcctgcccagccagcccctccgcgc

SEQ ID NO: 3376863 - DNA, 25 bp, Homo sapien
tgtggtcctggtcgagtgcggtgaa

SEQ ID NO: 3376864 - DNA, 25 bp, Homo sapien
tgcggtgaaggcgtgccagatggct

SEQ ID NO: 3376865 - DNA, 25 bp, Homo sapien
tcctggtcgagtgcggtgaaggcgt

SEQ ID NO: 3376866 - DNA, 25 bp, Homo sapien
aaggcgtgccagatggctttgagca

SEQ ID NO: 3376867 - DNA, 25 bp, Homo sapien
cgaggatggtcgttctctttgactg

SEQ ID NO: 3376868 - DNA, 25 bp, Homo sapien
ctatcgaggatggtcgttctctttg

SEQ ID NO: 3376869 - DNA, 25 bp, Homo sapien
tctttgactgagcacacagcattgg

SEQ ID NO: 3376870 - DNA, 25 bp, Homo sapien
actgagcacacagcattgggaggga

SEQ ID NO: 3376871 - DNA, 25 bp, Homo sapien
gcacaactcgtctggcctgagatct

SEQ ID NO: 3376872 - DNA, 25 bp, Homo sapien
gagaaggctctataacagaagaggg

SEQ ID NO: 3376873 - DNA, 25 bp, Homo sapien
ttaacaccaccagaactagccaagc

SEQ ID NO: 3376874 - DNA, 25 bp, Homo sapien
tctagttcagatcactttcagagtg

SEQ ID NO: 3376875 - DNA, 25 bp, Homo sapien
gaaaagtaactcaaagtcatctgtt

SEQ ID NO: 3376876 - DNA, 25 bp, Homo sapien
ccacagaatatatgccactgatgtc

SEQ ID NO: 3376877 - DNA, 25 bp, Homo sapien
gaatatatgccactgatgtcataca

SEQ ID NO: 3376878 - DNA, 25 bp, Homo sapien
gtcatctgttggaatgctgtccaca

SEQ ID NO: 3376879 - DNA, 25 bp, Homo sapien
cccttttgagcattttactccagcc

SEQ ID NO: 3376880 - DNA, 25 bp, Homo sapien
tgcatgagccctgctcgtgtggtct

SEQ ID NO: 3376881 - DNA, 25 bp, Homo sapien
aacagatccatatccatgccagaaa

SEQ ID NO: 3376882 - DNA, 25 bp, Homo sapien
tgctgacaagatgactaattaactg

SEQ ID NO: 3376883 - DNA, 25 bp, Homo sapien
cctgtttaaataaggcatgtagccc

SEQ ID NO: 3376884 - DNA, 25 bp, Homo sapien
ccgtgcacaggttatgggaaaggac

SEQ ID NO: 3376885 - DNA, 25 bp, Homo sapien
gtagccctggttggacactggaccc

SEQ ID NO: 3376886 - DNA, 25 bp, Homo sapien
gcaccgtgcacaggttatgggaaag

SEQ ID NO: 3376887 - DNA, 25 bp, Homo sapien
gattgcggcactgcactcctgctgg

SEQ ID NO: 3376888 - DNA, 25 bp, Homo sapien
cactgcactcctgctggggaaacaa

SEQ ID NO: 3376889 - DNA, 25 bp, Homo sapien
ctgcactcctgctggggaaacaaga

SEQ ID NO: 3376890 - DNA, 25 bp, Homo sapien
gcggcactgcactcctgctggggaa

SEQ ID NO: 3376891 - DNA, 25 bp, Homo sapien
tgaacactaaggaacaccatacact

SEQ ID NO: 3376892 - DNA, 25 bp, Homo sapien
tcacttattagctaggccaccttaa

SEQ ID NO: 3376893 - DNA, 25 bp, Homo sapien
tacatgacagcataccttgcaactg

SEQ ID NO: 3376894 - DNA, 25 bp, Homo sapien
taactcttggtatgaacctcctcag

SEQ ID NO: 3376895 - DNA, 25 bp, Homo sapien
cacaggaagcagcatgtctgaaggc

SEQ ID NO: 3376896 - DNA, 25 bp, Homo sapien
gaagcagcatgtctgaaggctctga

SEQ ID NO: 3376897 - DNA, 25 bp, Homo sapien
caggaagcagcatgtctgaaggctc

SEQ ID NO: 3376898 - DNA, 25 bp, Homo sapien
gcacaggaagcagcatgtctgaagg

SEQ ID NO: 3376899 - DNA, 25 bp, Homo sapien
tctgagaacaagaagtgattctaag

SEQ ID NO: 3376900 - DNA, 25 bp, Homo sapien
acactaagtggaagatatgccacac

SEQ ID NO: 3376901 - DNA, 25 bp, Homo sapien
tggattctgtggtgaatcatagggt

SEQ ID NO: 3376902 - DNA, 25 bp, Homo sapien
gccatctatgcagaacatttccaag

SEQ ID NO: 3376903 - DNA, 25 bp, Homo sapien
tggatacttgtcctcagataaaaag

SEQ ID NO: 3376904 - DNA, 25 bp, Homo sapien
cacaataattaatggatacttgtcc

SEQ ID NO: 3376905 - DNA, 25 bp, Homo sapien
cagagggtccaacacatcctattga

SEQ ID NO: 3376906 - DNA, 25 bp, Homo sapien
gaattcaatcttgtcaaagttgtct

SEQ ID NO: 3376907 - DNA, 25 bp, Homo sapien
tctgctacagaaatggtcccaaggt

SEQ ID NO: 3376908 - DNA, 25 bp, Homo sapien
ccaagactccgttgcagctagtgca

SEQ ID NO: 3376909 - DNA, 25 bp, Homo sapien
gggaaatccctacctgccaatgtag

SEQ ID NO: 3376910 - DNA, 25 bp, Homo sapien
tgatcaccagcgagcacctaattgt

SEQ ID NO: 3376911 - DNA, 25 bp, Homo sapien
agccaggctggttatattttacatt

SEQ ID NO: 3376912 - DNA, 25 bp, Homo sapien
caccaagccaggctggttatatttt

SEQ ID NO: 3376913 - DNA, 25 bp, Homo sapien
ccaagccaggctggttatattttac

SEQ ID NO: 3376914 - DNA, 25 bp, Homo sapien
gcctcccaaagattgcaggcatgaa

SEQ ID NO: 3376915 - DNA, 25 bp, Homo sapien
aacttcactatgtaagtcacttaaa

SEQ ID NO: 3376916 - DNA, 25 bp, Homo sapien
tgtgacagaaacatcttaacttcac

SEQ ID NO: 3376917 - DNA, 25 bp, Homo sapien
aatggggacacactatttcttacaa

SEQ ID NO: 3376918 - DNA, 25 bp, Homo sapien
taacaaaaattatggaacgaactca

SEQ ID NO: 3376919 - DNA, 25 bp, Homo sapien
caggttcatcctgaacctttctgaa

SEQ ID NO: 3376920 - DNA, 25 bp, Homo sapien
acgtcattcacactccaagcttcag

SEQ ID NO: 3376921 - DNA, 25 bp, Homo sapien
tagaagtagcttgccaggttcatcc

SEQ ID NO: 3376922 - DNA, 25 bp, Homo sapien
gcgcctattagtagcaaactcagct

SEQ ID NO: 3376923 - DNA, 25 bp, Homo sapien
gaaaaatagacatgcatgtttgcaa

SEQ ID NO: 3376924 - DNA, 25 bp, Homo sapien
agaaaaatagacatgcatgtttgca

SEQ ID NO: 3376925 - DNA, 25 bp, Homo sapien
ctcaggaggctaaacagggaagact

SEQ ID NO: 3376926 - DNA, 25 bp, Homo sapien
tcaggaggctaaacagggaagactg

SEQ ID NO: 3376927 - DNA, 25 bp, Homo sapien
tcctatgggttgcagtgaaaataaa

SEQ ID NO: 3376928 - DNA, 25 bp, Homo sapien
tgtgtgtgctgggtcatgatataaa

SEQ ID NO: 3376929 - DNA, 25 bp, Homo sapien
caggcagctctgaactctgtcactc

SEQ ID NO: 3376930 - DNA, 25 bp, Homo sapien
gatctgcttttggtcgggcctcctg

SEQ ID NO: 3376931 - DNA, 25 bp, Homo sapien
gacttcattaattgccatagacaca

SEQ ID NO: 3376932 - DNA, 25 bp, Homo sapien
taagctcaataagttcccatgcaga

SEQ ID NO: 3376933 - DNA, 25 bp, Homo sapien
tgctaaactgtccatttccaataag

SEQ ID NO: 3376934 - DNA, 25 bp, Homo sapien
cagtctgccggtccatgcctttgct

SEQ ID NO: 3376935 - DNA, 25 bp, Homo sapien
ctgacctctcaatattctgaaggag

SEQ ID NO: 3376936 - DNA, 25 bp, Homo sapien
tgacctctcaatattctgaaggagg

SEQ ID NO: 3376937 - DNA, 25 bp, Homo sapien
aacatgaacaccaattgttcttgga

SEQ ID NO: 3376938 - DNA, 25 bp, Homo sapien
atgaacaccaattgttcttggatcc

SEQ ID NO: 3376939 - DNA, 25 bp, Homo sapien
aaacatgaacaccaattgttcttgg

SEQ ID NO: 3376940 - DNA, 25 bp, Homo sapien
catgaacaccaattgttcttggatc

SEQ ID NO: 3376941 - DNA, 25 bp, Homo sapien
gatatacttgcctactccattattt

SEQ ID NO: 3376942 - DNA, 25 bp, Homo sapien
ctcttccttgatatacttgcctact

SEQ ID NO: 3376943 - DNA, 25 bp, Homo sapien
tccttgatatacttgcctactccat

SEQ ID NO: 3376944 - DNA, 25 bp, Homo sapien
cttgatatacttgcctactccatta

SEQ ID NO: 3376945 - DNA, 25 bp, Homo sapien
ttccgtctgtggccctttttcatca

SEQ ID NO: 3376946 - DNA, 25 bp, Homo sapien
tttccgtctgtggccctttttcatc

SEQ ID NO: 3376947 - DNA, 25 bp, Homo sapien
gatgccatgcattgggatttcctga

SEQ ID NO: 3376948 - DNA, 25 bp, Homo sapien
gggatatgaagcacctaagccaggg

SEQ ID NO: 3376949 - DNA, 25 bp, Homo sapien
ttgtggctggcaacccgtggtttct

SEQ ID NO: 3376950 - DNA, 25 bp, Homo sapien
taagccagggtgattcctacatctg

SEQ ID NO: 3376951 - DNA, 25 bp, Homo sapien
ctgatttcaaaagtcttatcaaaac

SEQ ID NO: 3376952 - DNA, 25 bp, Homo sapien
gtcttatcaaaacattttacgagaa

SEQ ID NO: 3376953 - DNA, 25 bp, Homo sapien
aagtcttatcaaaacattttacgag

SEQ ID NO: 3376954 - DNA, 25 bp, Homo sapien
gatttcaaaagtcttatcaaaacat

SEQ ID NO: 3376955 - DNA, 25 bp, Homo sapien
gttgggtacaatgctcacttcctgg

SEQ ID NO: 3376956 - DNA, 25 bp, Homo sapien
gttattcattcactacggagccata

SEQ ID NO: 3376957 - DNA, 25 bp, Homo sapien
ccaccaacagttgtagtgtgtgcat

SEQ ID NO: 3376958 - DNA, 25 bp, Homo sapien
tattacctcaagctcaagatggcca

SEQ ID NO: 3376959 - DNA, 25 bp, Homo sapien
gagttctttccgacgctggcgggct

SEQ ID NO: 3376960 - DNA, 25 bp, Homo sapien
gagttccttcatttgtcgctccagt

SEQ ID NO: 3376961 - DNA, 25 bp, Homo sapien
tcctgctgcttgctttcgttggcgg

SEQ ID NO: 3376962 - DNA, 25 bp, Homo sapien
tgcttcttccggagttctttccgac

SEQ ID NO: 3376963 - DNA, 25 bp, Homo sapien
ctgaacctggcctgaagttccactt

SEQ ID NO: 3376964 - DNA, 25 bp, Homo sapien
gcctgaagttccacttgagtctgaa

SEQ ID NO: 3376965 - DNA, 25 bp, Homo sapien
tccacttgagtctgaaggcgtttct

SEQ ID NO: 3376966 - DNA, 25 bp, Homo sapien
gagtctgaaggcgtttcttttcctc

SEQ ID NO: 3376967 - DNA, 25 bp, Homo sapien
ctttctccagccatgtgatactcac

SEQ ID NO: 3376968 - DNA, 25 bp, Homo sapien
caggctgagctactgcagctgcttt

SEQ ID NO: 3376969 - DNA, 25 bp, Homo sapien
agctgctttctccagccatgtgata

SEQ ID NO: 3376970 - DNA, 25 bp, Homo sapien
cgacccaggctgagctactgcagct

SEQ ID NO: 3376971 - DNA, 25 bp, Homo sapien
gagtcttgaaaacaaggtttatgtc

SEQ ID NO: 3376972 - DNA, 25 bp, Homo sapien
tttgccattacatctttggcacact

SEQ ID NO: 3376973 - DNA, 25 bp, Homo sapien
ttccacttaggagtcttgaaaacaa

SEQ ID NO: 3376974 - DNA, 25 bp, Homo sapien
cttttgccattacatctttggcaca

SEQ ID NO: 3376975 - DNA, 25 bp, Homo sapien
tcccagtcagagcaaacgaaccttt

SEQ ID NO: 3376976 - DNA, 25 bp, Homo sapien
ttttcccagtcagagcaaacgaacc

SEQ ID NO: 3376977 - DNA, 25 bp, Homo sapien
gtcagagcaaacgaaccttttccca

SEQ ID NO: 3376978 - DNA, 25 bp, Homo sapien
ccagtcagagcaaacgaaccttttc

SEQ ID NO: 3376979 - DNA, 25 bp, Homo sapien
ccagctcccgtactcgctgtaaata

SEQ ID NO: 3376980 - DNA, 25 bp, Homo sapien
tgtctcttcatcttgccgggcctgt

SEQ ID NO: 3376981 - DNA, 25 bp, Homo sapien
gttcagaggacttttgagcaacctg

SEQ ID NO: 3376982 - DNA, 25 bp, Homo sapien
gcagctttaggtacatgtcttccag

SEQ ID NO: 3376983 - DNA, 25 bp, Homo sapien
tctcgaataagactaagggtacctc

SEQ ID NO: 3376984 - DNA, 25 bp, Homo sapien
ccaccagagtgttagtcattccaag

SEQ ID NO: 3376985 - DNA, 25 bp, Homo sapien
gatcaaagactggaccctgtgctgc

SEQ ID NO: 3376986 - DNA, 25 bp, Homo sapien
aaaacctgacggcaacgttggcctg

SEQ ID NO: 3376987 - DNA, 25 bp, Homo sapien
agcaggggggcaaatttgtccattt

SEQ ID NO: 3376988 - DNA, 25 bp, Homo sapien
taaaatgccctttgcacattaagaa

SEQ ID NO: 3376989 - DNA, 25 bp, Homo sapien
tcataaaatgccctttgcacattaa

SEQ ID NO: 3376990 - DNA, 25 bp, Homo sapien
gagcaggggggcaaatttgtccatt

SEQ ID NO: 3376991 - DNA, 25 bp, Homo sapien
aatgagattccaaatattccacgaa

SEQ ID NO: 3376992 - DNA, 25 bp, Homo sapien
tccaaatattccacgaatgatcggc

SEQ ID NO: 3376993 - DNA, 25 bp, Homo sapien
tattccacgaatgatcggctgttgc

SEQ ID NO: 3376994 - DNA, 25 bp, Homo sapien
cgaatgatcggctgttgctttaaga

SEQ ID NO: 3376995 - DNA, 25 bp, Homo sapien
aggacacgctgattctccaactcct

SEQ ID NO: 3376996 - DNA, 25 bp, Homo sapien
tgctgctgctccaagtgccactttt

SEQ ID NO: 3376997 - DNA, 25 bp, Homo sapien
ggttgtctgaatggcctgctgctgc

SEQ ID NO: 3376998 - DNA, 25 bp, Homo sapien
gtgcttgcttccgttctaactcaag

SEQ ID NO: 3376999 - DNA, 25 bp, Homo sapien
tggtcttattagttgccatctccag

SEQ ID NO: 3377000 - DNA, 25 bp, Homo sapien
ctggttctatcagtcgaattaatcc

SEQ ID NO: 3377001 - DNA, 25 bp, Homo sapien
ccagctcttggtcttattagttgcc

SEQ ID NO: 3377002 - DNA, 25 bp, Homo sapien
taatccttcatgatgggccactttg

SEQ ID NO: 3377003 - DNA, 25 bp, Homo sapien
aggtccccagttagtgatcaggtga

SEQ ID NO: 3377004 - DNA, 25 bp, Homo sapien
tagtgatcaggtgagggttctttga

SEQ ID NO: 3377005 - DNA, 25 bp, Homo sapien
gtgatcaggtgagggttctttgaac

SEQ ID NO: 3377006 - DNA, 25 bp, Homo sapien
ccagttagtgatcaggtgagggttc

SEQ ID NO: 3377007 - DNA, 25 bp, Homo sapien
tcttttgtctttagcgtaaagctct

SEQ ID NO: 3377008 - DNA, 25 bp, Homo sapien
taactgacgtgactgccagcaagct

SEQ ID NO: 3377009 - DNA, 25 bp, Homo sapien
tgtctttagcgtaaagctctcctgc

SEQ ID NO: 3377010 - DNA, 25 bp, Homo sapien
tgcagtatctacataactgacgtga

SEQ ID NO: 3377011 - DNA, 25 bp, Homo sapien
caggaaatggaaagcgaaccggcca

SEQ ID NO: 3377012 - DNA, 25 bp, Homo sapien
gatatttcctccgttgtcaccacag

SEQ ID NO: 3377013 - DNA, 25 bp, Homo sapien
acagcctggcatatacttggtagca

SEQ ID NO: 3377014 - DNA, 25 bp, Homo sapien
gatactgacccacttagagaggcac

SEQ ID NO: 3377015 - DNA, 25 bp, Homo sapien
gatattgcctcctagacatagtgcc

SEQ ID NO: 3377016 - DNA, 25 bp, Homo sapien
ggaaaacacctgatgacaagcactc

SEQ ID NO: 3377017 - DNA, 25 bp, Homo sapien
agtgtgaggtctccaagaacccagg

SEQ ID NO: 3377018 - DNA, 25 bp, Homo sapien
taaccgcttagtcgtatcaaggtcc

SEQ ID NO: 3377019 - DNA, 25 bp, Homo sapien
ccccactgttttattaaatcagaca

SEQ ID NO: 3377020 - DNA, 25 bp, Homo sapien
cccactgttttattaaatcagacag

SEQ ID NO: 3377021 - DNA, 25 bp, Homo sapien
tgcgggcgtggcgcacgcctgccac

SEQ ID NO: 3377022 - DNA, 25 bp, Homo sapien
ctgcgggcgtggcgcacgcctgcca

SEQ ID NO: 3377023 - DNA, 25 bp, Homo sapien
agcggagcgaccaccgcacactgga

SEQ ID NO: 3377024 - DNA, 25 bp, Homo sapien
ggcgctcagtgctcgtggctttcct

SEQ ID NO: 3377025 - DNA, 25 bp, Homo sapien
gagttcacgtcagggctggctctca

SEQ ID NO: 3377026 - DNA, 25 bp, Homo sapien
ggcagataaaatgagttcacgtcag

SEQ ID NO: 3377027 - DNA, 25 bp, Homo sapien
tatctctaagcaaggatggcagaac

SEQ ID NO: 3377028 - DNA, 25 bp, Homo sapien
gagactcagtagtcttggcccagca

SEQ ID NO: 3377029 - DNA, 25 bp, Homo sapien
gcaagtacatgcaggcacgtgctct

SEQ ID NO: 3377030 - DNA, 25 bp, Homo sapien
agctatgactcagtggcacgcggca

SEQ ID NO: 3377031 - DNA, 25 bp, Homo sapien
gaagggcaggcctagatggaaaact

SEQ ID NO: 3377032 - DNA, 25 bp, Homo sapien
tcatgaaggatctcatcacagggct

SEQ ID NO: 3377033 - DNA, 25 bp, Homo sapien
taggtcttactgtctaaaggcggga

SEQ ID NO: 3377034 - DNA, 25 bp, Homo sapien
gaggccatccaactttaatgctgaa

SEQ ID NO: 3377035 - DNA, 25 bp, Homo sapien
taaccaacaactatccatccacatg

SEQ ID NO: 3377036 - DNA, 25 bp, Homo sapien
taagcatccattatcctagagtcca

SEQ ID NO: 3377037 - DNA, 25 bp, Homo sapien
gagccaacgtgcctgactgatcatt

SEQ ID NO: 3377038 - DNA, 25 bp, Homo sapien
tgtctacagatcagtccactagtcc

SEQ ID NO: 3377039 - DNA, 25 bp, Homo sapien
gatgcctggtccctacggaaagccc

SEQ ID NO: 3377040 - DNA, 25 bp, Homo sapien
ggtctttttgcatctcctctgcagt

SEQ ID NO: 3377041 - DNA, 25 bp, Homo sapien
tccaagcctaagagttgaacaacag

SEQ ID NO: 3377042 - DNA, 25 bp, Homo sapien
aatggtctttttgcatctcctctgc

SEQ ID NO: 3377043 - DNA, 25 bp, Homo sapien
gaaaaacgtgaaaagagagactggc

SEQ ID NO: 3377044 - DNA, 25 bp, Homo sapien
ctgccagtgcggctagaatataaag

SEQ ID NO: 3377045 - DNA, 25 bp, Homo sapien
agagactggcctagtctcccagcct

SEQ ID NO: 3377046 - DNA, 25 bp, Homo sapien
ctaattagctgccagtgcggctaga

SEQ ID NO: 3377047 - DNA, 25 bp, Homo sapien
tcaacttggtactattctcatgaca

SEQ ID NO: 3377048 - DNA, 25 bp, Homo sapien
gtaccatcaacttggtactattctc

SEQ ID NO: 3377049 - DNA, 25 bp, Homo sapien
tgaaagttcccgcttggccttctac

SEQ ID NO: 3377050 - DNA, 25 bp, Homo sapien
tgacatgaaagttcccgcttggcct

SEQ ID NO: 3377051 - DNA, 25 bp, Homo sapien
ggatacacctcaggatcagccaaag

SEQ ID NO: 3377052 - DNA, 25 bp, Homo sapien
tttctaagggatacacctcaggatc

SEQ ID NO: 3377053 - DNA, 25 bp, Homo sapien
gatacacctcaggatcagccaaagg

SEQ ID NO: 3377054 - DNA, 25 bp, Homo sapien
ctaagggatacacctcaggatcagc

SEQ ID NO: 3377055 - DNA, 25 bp, Homo sapien
tatttaggaccatacgcacctgtga

SEQ ID NO: 3377056 - DNA, 25 bp, Homo sapien
ctgtggcatgactggatacccaaac

SEQ ID NO: 3377057 - DNA, 25 bp, Homo sapien
tacaacaatgaccagcccaatgcag

SEQ ID NO: 3377058 - DNA, 25 bp, Homo sapien
aattctctagaccagaggtgctctg

SEQ ID NO: 3377059 - DNA, 25 bp, Homo sapien
agatgcttccatggtccgtgctctg

SEQ ID NO: 3377060 - DNA, 25 bp, Homo sapien
acaagagacgtcattgttcagtagc

SEQ ID NO: 3377061 - DNA, 25 bp, Homo sapien
tctgccagtggggttcacaacaaga

SEQ ID NO: 3377062 - DNA, 25 bp, Homo sapien
gatgcttccatggtccgtgctctgc

SEQ ID NO: 3377063 - DNA, 25 bp, Homo sapien
caaaaccctccaagattgtctcata

SEQ ID NO: 3377064 - DNA, 25 bp, Homo sapien
gagagacatctacttgtaatgcctg

SEQ ID NO: 3377065 - DNA, 25 bp, Homo sapien
ttcctcggagacctgtttaacaagc

SEQ ID NO: 3377066 - DNA, 25 bp, Homo sapien
catattctacctggactaggtttcc

SEQ ID NO: 3377067 - DNA, 25 bp, Homo sapien
gaccagcaaacgtgtgtataacttc

SEQ ID NO: 3377068 - DNA, 25 bp, Homo sapien
aacttctgcgcccaggatggacaga

SEQ ID NO: 3377069 - DNA, 25 bp, Homo sapien
tggttttgtagctcaagaccagcaa

SEQ ID NO: 3377070 - DNA, 25 bp, Homo sapien
ggtcaacccacgcagaagaaacaga

SEQ ID NO: 3377071 - DNA, 25 bp, Homo sapien
gaaaatgcaaaataaggcgctccca

SEQ ID NO: 3377072 - DNA, 25 bp, Homo sapien
tcaacatcccctatgactctagaga

SEQ ID NO: 3377073 - DNA, 25 bp, Homo sapien
tttatggtatgcatgaatctcaggc

SEQ ID NO: 3377074 - DNA, 25 bp, Homo sapien
ggacacgaaggccaactttatggta

SEQ ID NO: 3377075 - DNA, 25 bp, Homo sapien
tgaggacacaagctgtaaaggccac

SEQ ID NO: 3377076 - DNA, 25 bp, Homo sapien
gctgcgctactatgactcaggtgag

SEQ ID NO: 3377077 - DNA, 25 bp, Homo sapien
gtagaaatggtcatccctgctggcc

SEQ ID NO: 3377078 - DNA, 25 bp, Homo sapien
ggagccccaaagcacacaagtgaca

SEQ ID NO: 3377079 - DNA, 25 bp, Homo sapien
ttaacatgaaagatagatacagttt

SEQ ID NO: 3377080 - DNA, 25 bp, Homo sapien
taacatgaaagatagatacagtttt

SEQ ID NO: 3377081 - DNA, 25 bp, Homo sapien
tcttctggacttctttaacatgaaa

SEQ ID NO: 3377082 - DNA, 25 bp, Homo sapien
cagtcttctggacttctttaacatg

SEQ ID NO: 3377083 - DNA, 25 bp, Homo sapien
cccatccaatggagtggagcgaaga

SEQ ID NO: 3377084 - DNA, 25 bp, Homo sapien
ccccatccaatggagtggagcgaag

SEQ ID NO: 3377085 - DNA, 25 bp, Homo sapien
tccccatccaatggagtggagcgaa

SEQ ID NO: 3377086 - DNA, 25 bp, Homo sapien
ctccccatccaatggagtggagcga

SEQ ID NO: 3377087 - DNA, 25 bp, Homo sapien
taatccactgtgagggaatggcgtt

SEQ ID NO: 3377088 - DNA, 25 bp, Homo sapien
gactggctccaaatgcaacagaagg

SEQ ID NO: 3377089 - DNA, 25 bp, Homo sapien
gtacagtacacaccttcgtatccta

SEQ ID NO: 3377090 - DNA, 25 bp, Homo sapien
caatcgaacccacatcagactggct

SEQ ID NO: 3377091 - DNA, 25 bp, Homo sapien
gctggctgcttaggcaaactttatc

SEQ ID NO: 3377092 - DNA, 25 bp, Homo sapien
caaagtgggctcatgttagtaatag

SEQ ID NO: 3377093 - DNA, 25 bp, Homo sapien
gaaaagtgtagactgcctcctgcat

SEQ ID NO: 3377094 - DNA, 25 bp, Homo sapien
tcatgattgatagactgctggctgc

SEQ ID NO: 3377095 - DNA, 25 bp, Homo sapien
gtcctaaaagcttaatatgttgatt

SEQ ID NO: 3377096 - DNA, 25 bp, Homo sapien
tgataggatttggcactagctgtct

SEQ ID NO: 3377097 - DNA, 25 bp, Homo sapien
caccgcaccacgctgagtcataatt

SEQ ID NO: 3377098 - DNA, 25 bp, Homo sapien
gattattacatactggattataggg

SEQ ID NO: 3377099 - DNA, 25 bp, Homo sapien
tctctacttatggtagggattcagg

SEQ ID NO: 3377100 - DNA, 25 bp, Homo sapien
gaatgactgaatggtctcctgcatg

SEQ ID NO: 3377101 - DNA, 25 bp, Homo sapien
aaaaaccctcgtctggtgtctggca

SEQ ID NO: 3377102 - DNA, 25 bp, Homo sapien
tgtgtgtttcaggttcacaaccagt

SEQ ID NO: 3377103 - DNA, 25 bp, Homo sapien
tacaccaggtaagtagagcaagctt

SEQ ID NO: 3377104 - DNA, 25 bp, Homo sapien
gcttatgccctaggtgacatccctg

SEQ ID NO: 3377105 - DNA, 25 bp, Homo sapien
gcattgcgatggtgtgcccggtacc

SEQ ID NO: 3377106 - DNA, 25 bp, Homo sapien
tggtcacaaattcagtcagaggagc

SEQ ID NO: 3377107 - DNA, 25 bp, Homo sapien
tctgcactcagaaagcgcttggtct

SEQ ID NO: 3377108 - DNA, 25 bp, Homo sapien
gatggagcccttgaccagcagtgtg

SEQ ID NO: 3377109 - DNA, 25 bp, Homo sapien
cagtgtgaggcgtggaccatccttc

SEQ ID NO: 3377110 - DNA, 25 bp, Homo sapien
aaggctgggacatcactgcacaagt

SEQ ID NO: 3377111 - DNA, 25 bp, Homo sapien
caggcctggtgatagctatgttgta

SEQ ID NO: 3377112 - DNA, 25 bp, Homo sapien
tagtacagcactgaacatgtgtgtg

SEQ ID NO: 3377113 - DNA, 25 bp, Homo sapien
tcattactgagtagggcatttgcct

SEQ ID NO: 3377114 - DNA, 25 bp, Homo sapien
gagcccaaaagaattcaggcctggt

SEQ ID NO: 3377115 - DNA, 25 bp, Homo sapien
tcttcatccgcagaacttcaaggta

SEQ ID NO: 3377116 - DNA, 25 bp, Homo sapien
tgtcattatgcactgccccattgga

SEQ ID NO: 3377117 - DNA, 25 bp, Homo sapien
gcctctgcagctatttggccccaaa

SEQ ID NO: 3377118 - DNA, 25 bp, Homo sapien
tgaaatccggcaagtgaaagccagt

SEQ ID NO: 3377119 - DNA, 25 bp, Homo sapien
tctttggcatgaaaagttagaggac

SEQ ID NO: 3377120 - DNA, 25 bp, Homo sapien
gatggtccaatagagtaatttgggc

SEQ ID NO: 3377121 - DNA, 25 bp, Homo sapien
tcttcagagctaggcaaccaggtta

SEQ ID NO: 3377122 - DNA, 25 bp, Homo sapien
taccagtaggccatcagtatagcat

SEQ ID NO: 3377123 - DNA, 25 bp, Homo sapien
gaaataataagtacagctgtcccat

SEQ ID NO: 3377124 - DNA, 25 bp, Homo sapien
gatacttgtgagtaccatgtctgag

SEQ ID NO: 3377125 - DNA, 25 bp, Homo sapien
ttagggatggctgcattcttccacc

SEQ ID NO: 3377126 - DNA, 25 bp, Homo sapien
cagtaggccactaagatatcagatc

SEQ ID NO: 3377127 - DNA, 25 bp, Homo sapien
tgcttcttttctagcatgactaaag

SEQ ID NO: 3377128 - DNA, 25 bp, Homo sapien
gcccaatagaggacatgaaagtctt

SEQ ID NO: 3377129 - DNA, 25 bp, Homo sapien
catgactaaagataacttgaagaac

SEQ ID NO: 3377130 - DNA, 25 bp, Homo sapien
gaacaggattttcccagcccaatag

SEQ ID NO: 3377131 - DNA, 25 bp, Homo sapien
gatagtgtcatagtctgcttaggct

SEQ ID NO: 3377132 - DNA, 25 bp, Homo sapien
gaacaagctctctatctcaggatac

SEQ ID NO: 3377133 - DNA, 25 bp, Homo sapien
tactacaaatatgggcacgctggat

SEQ ID NO: 3377134 - DNA, 25 bp, Homo sapien
taatcctgttggatcagggcctcac

SEQ ID NO: 3377135 - DNA, 25 bp, Homo sapien
ttctcacaggaaccttaagtctggt

SEQ ID NO: 3377136 - DNA, 25 bp, Homo sapien
ctcacaggaaccttaagtctggtct

SEQ ID NO: 3377137 - DNA, 25 bp, Homo sapien
tctcacaggaaccttaagtctggtc

SEQ ID NO: 3377138 - DNA, 25 bp, Homo sapien
tgacccgttttgaactcgaacaaga

SEQ ID NO: 3377139 - DNA, 25 bp, Homo sapien
atagaatggtcaatggtgagctctt

SEQ ID NO: 3377140 - DNA, 25 bp, Homo sapien
tttgatgattgctcccacttggttg

SEQ ID NO: 3377141 - DNA, 25 bp, Homo sapien
gtgagctcttcggcaccttctcgtg

SEQ ID NO: 3377142 - DNA, 25 bp, Homo sapien
aggttttctctatactgtttgttct

SEQ ID NO: 3377143 - DNA, 25 bp, Homo sapien
ttttctctatactgtttgttctagt

SEQ ID NO: 3377144 - DNA, 25 bp, Homo sapien
agttgatcgaattgggtattgaagc

SEQ ID NO: 3377145 - DNA, 25 bp, Homo sapien
tggaggcttcgtttgttgcttttta

SEQ ID NO: 3377146 - DNA, 25 bp, Homo sapien
ccgaatcccgcaggagcagttcact

SEQ ID NO: 3377147 - DNA, 25 bp, Homo sapien
gttcacttccttccgaggatctgtg

SEQ ID NO: 3377148 - DNA, 25 bp, Homo sapien
agcagttcacttccttccgaggatc

SEQ ID NO: 3377149 - DNA, 25 bp, Homo sapien
gggtgtctcccgaatcccgcaggag

SEQ ID NO: 3377150 - DNA, 25 bp, Homo sapien
tgccagaccagtttgctctatgaag

SEQ ID NO: 3377151 - DNA, 25 bp, Homo sapien
tcctcccaggcattgtcatcatgtg

SEQ ID NO: 3377152 - DNA, 25 bp, Homo sapien
tctatgaagtcactcaagatccaag

SEQ ID NO: 3377153 - DNA, 25 bp, Homo sapien
tcatcatgtgtatgctgaaggctgg

SEQ ID NO: 3377154 - DNA, 25 bp, Homo sapien
tagctccatctataggcaaaagtgg

SEQ ID NO: 3377155 - DNA, 25 bp, Homo sapien
tgaattgggatagtgagggataccc

SEQ ID NO: 3377156 - DNA, 25 bp, Homo sapien
caaaagtggcctagaagcaaagtca

SEQ ID NO: 3377157 - DNA, 25 bp, Homo sapien
taatggcatagactcaggatttctc

SEQ ID NO: 3377158 - DNA, 25 bp, Homo sapien
ctctacttctagtgtactgaggctg

SEQ ID NO: 3377159 - DNA, 25 bp, Homo sapien
tcagcattaagtatggtactagcca

SEQ ID NO: 3377160 - DNA, 25 bp, Homo sapien
tattgcgttaactaggacttgtagg

SEQ ID NO: 3377161 - DNA, 25 bp, Homo sapien
actgaggctgtttatcatcaatagg

SEQ ID NO: 3377162 - DNA, 25 bp, Homo sapien
tctggaccattggagttaacagagt

SEQ ID NO: 3377163 - DNA, 25 bp, Homo sapien
tccagtttggcctagttaagaactc

SEQ ID NO: 3377164 - DNA, 25 bp, Homo sapien
agagttctcgcactgttctttctca

SEQ ID NO: 3377165 - DNA, 25 bp, Homo sapien
gaattctattcgtcaatccatccag

SEQ ID NO: 3377166 - DNA, 25 bp, Homo sapien
cacttagtgtaatgacttcaagggt

SEQ ID NO: 3377167 - DNA, 25 bp, Homo sapien
tattgtgactagtactgccataagc

SEQ ID NO: 3377168 - DNA, 25 bp, Homo sapien
tgctgtagtcatctggcttgttccc

SEQ ID NO: 3377169 - DNA, 25 bp, Homo sapien
gctagaccagattacagatcacatg

SEQ ID NO: 3377170 - DNA, 25 bp, Homo sapien
gcagtgagccaaggtcacagcattg

SEQ ID NO: 3377171 - DNA, 25 bp, Homo sapien
agtgagccaaggtcacagcattgca

SEQ ID NO: 3377172 - DNA, 25 bp, Homo sapien
ttgcagtgagccaaggtcacagcat

SEQ ID NO: 3377173 - DNA, 25 bp, Homo sapien
cagtgagccaaggtcacagcattgc

SEQ ID NO: 3377174 - DNA, 25 bp, Homo sapien
tgggtcccgagaaacactgttataa

SEQ ID NO: 3377175 - DNA, 25 bp, Homo sapien
gaaggtcaaaaccagcaagcacaga

SEQ ID NO: 3377176 - DNA, 25 bp, Homo sapien
cactgtagctattacatgggttcta

SEQ ID NO: 3377177 - DNA, 25 bp, Homo sapien
gatatatgcatctctggaccgagtc

SEQ ID NO: 3377178 - DNA, 25 bp, Homo sapien
tatcattgcattgccaagtggtacc

SEQ ID NO: 3377179 - DNA, 25 bp, Homo sapien
cacaaacctgttagctttgtagcag

SEQ ID NO: 3377180 - DNA, 25 bp, Homo sapien
cagagtgattccctaagagtgtgtc

SEQ ID NO: 3377181 - DNA, 25 bp, Homo sapien
tgaatacttcctcaaacagaagtga

SEQ ID NO: 3377182 - DNA, 25 bp, Homo sapien
tcagtcttacgtgtagccgagtggc

SEQ ID NO: 3377183 - DNA, 25 bp, Homo sapien
ccaaatgtagtcaaggaagagatga

SEQ ID NO: 3377184 - DNA, 25 bp, Homo sapien
tggcaacttggaggccatttcatgt

SEQ ID NO: 3377185 - DNA, 25 bp, Homo sapien
gccgagtggctacacattgatataa

SEQ ID NO: 3377186 - DNA, 25 bp, Homo sapien
tgggagtttccaaggccctaggata

SEQ ID NO: 3377187 - DNA, 25 bp, Homo sapien
tgaggaacacatacagcatattggg

SEQ ID NO: 3377188 - DNA, 25 bp, Homo sapien
tatgacattggcctaagggttgggc

SEQ ID NO: 3377189 - DNA, 25 bp, Homo sapien
ctttggagttagttgttacagcaga

SEQ ID NO: 3377190 - DNA, 25 bp, Homo sapien
agaaatttcttctgtggtagccaaa

SEQ ID NO: 3377191 - DNA, 25 bp, Homo sapien
gaagcaaggaatccatatgagggac

SEQ ID NO: 3377192 - DNA, 25 bp, Homo sapien
tccatatgagggaccttcagagttg

SEQ ID NO: 3377193 - DNA, 25 bp, Homo sapien
gctgggaagcaaggaatccatatga

SEQ ID NO: 3377194 - DNA, 25 bp, Homo sapien
caaggaatccatatgagggaccttc

SEQ ID NO: 3377195 - DNA, 25 bp, Homo sapien
acaggcctgacccactacatctgtg

SEQ ID NO: 3377196 - DNA, 25 bp, Homo sapien
gcctggacttcgttacatggtatca

SEQ ID NO: 3377197 - DNA, 25 bp, Homo sapien
tcctgaggaagatgtagagctacac

SEQ ID NO: 3377198 - DNA, 25 bp, Homo sapien
tattgtttgcggacagcctggactt

SEQ ID NO: 3377199 - DNA, 25 bp, Homo sapien
aatctgctgtccattttcaaagttc

SEQ ID NO: 3377200 - DNA, 25 bp, Homo sapien
gatttttagcattacttactttctc

SEQ ID NO: 3377201 - DNA, 25 bp, Homo sapien
gacccattagttgttccagaatata

SEQ ID NO: 3377202 - DNA, 25 bp, Homo sapien
tataaacttcaatcttagtacggct

SEQ ID NO: 3377203 - DNA, 25 bp, Homo sapien
tctagacccttaaggtataatgtta

SEQ ID NO: 3377204 - DNA, 25 bp, Homo sapien
tcaatcttagtacggcttttgctgc

SEQ ID NO: 3377205 - DNA, 25 bp, Homo sapien
ttactaggaagtgtttggatgtacc

SEQ ID NO: 3377206 - DNA, 25 bp, Homo sapien
tgtttggatgtaccagttagtacaa

SEQ ID NO: 3377207 - DNA, 25 bp, Homo sapien
taggaagtgtttggatgtaccagtt

SEQ ID NO: 3377208 - DNA, 25 bp, Homo sapien
tggatgtaccagttagtacaatcat

SEQ ID NO: 3377209 - DNA, 25 bp, Homo sapien
gcagtttggcagtaaaaccatcttg

SEQ ID NO: 3377210 - DNA, 25 bp, Homo sapien
tgatgtaaagcttgaagatctccaa

SEQ ID NO: 3377211 - DNA, 25 bp, Homo sapien
ttggcagtaaaaccatcttggaatt

SEQ ID NO: 3377212 - DNA, 25 bp, Homo sapien
ctgcctgctgttgacaaatattcct

SEQ ID NO: 3377213 - DNA, 25 bp, Homo sapien
cactaattatgggagcagattctta

SEQ ID NO: 3377214 - DNA, 25 bp, Homo sapien
taggctgccccatcgtgtatataaa

SEQ ID NO: 3377215 - DNA, 25 bp, Homo sapien
tgtattcttacgtttctctgctttg

SEQ ID NO: 3377216 - DNA, 25 bp, Homo sapien
tgttatgatgtgcattaggctgccc

SEQ ID NO: 3377217 - DNA, 25 bp, Homo sapien
aaagtgatgaatgactgccttcaag

SEQ ID NO: 3377218 - DNA, 25 bp, Homo sapien
gaatgccttcaagcacaaagtgatg

SEQ ID NO: 3377219 - DNA, 25 bp, Homo sapien
gcacaaagtgatgaatgactgcctt

SEQ ID NO: 3377220 - DNA, 25 bp, Homo sapien
tttgctgaggaatgccttcaagcac

SEQ ID NO: 3377221 - DNA, 25 bp, Homo sapien
ctcggtggaatctggctctcccggg

SEQ ID NO: 3377222 - DNA, 25 bp, Homo sapien
gccagcccagttcgggaggatcccg

SEQ ID NO: 3377223 - DNA, 25 bp, Homo sapien
ggatgccgcgttcctcggtggaatc

SEQ ID NO: 3377224 - DNA, 25 bp, Homo sapien
cctgggaccgctgcgagggaagcaa

SEQ ID NO: 3377225 - DNA, 25 bp, Homo sapien
cgcgccaggacaggttttactttca

SEQ ID NO: 3377226 - DNA, 25 bp, Homo sapien
agcttccacttggttccgcgccagg

SEQ ID NO: 3377227 - DNA, 25 bp, Homo sapien
tggttccgcgccaggacaggtttta

SEQ ID NO: 3377228 - DNA, 25 bp, Homo sapien
ttccacttggttccgcgccaggaca

SEQ ID NO: 3377229 - DNA, 25 bp, Homo sapien
gaagaaatggccgcgcggaagttat

SEQ ID NO: 3377230 - DNA, 25 bp, Homo sapien
gaaggagtcacctgagcggacctga

SEQ ID NO: 3377231 - DNA, 25 bp, Homo sapien
cgcgcggaagttatttaaggactct

SEQ ID NO: 3377232 - DNA, 25 bp, Homo sapien
ggagtcacctgagcggacctgaatt

SEQ ID NO: 3377233 - DNA, 25 bp, Homo sapien
tcgggactcaacagtggacattgca

SEQ ID NO: 3377234 - DNA, 25 bp, Homo sapien
cgggactcaacagtggacattgcac

SEQ ID NO: 3377235 - DNA, 25 bp, Homo sapien
ctctcgggactcaacagtggacatt

SEQ ID NO: 3377236 - DNA, 25 bp, Homo sapien
tcactctcgggactcaacagtggac

SEQ ID NO: 3377237 - DNA, 25 bp, Homo sapien
gctaagagagtgatctgccaagtac

SEQ ID NO: 3377238 - DNA, 25 bp, Homo sapien
cagctgcagtgagaagcccgaagtg

SEQ ID NO: 3377239 - DNA, 25 bp, Homo sapien
tcctgtgctttataagcgcacgggt

SEQ ID NO: 3377240 - DNA, 25 bp, Homo sapien
cagacgtcccactggcaatggcaaa

SEQ ID NO: 3377241 - DNA, 25 bp, Homo sapien
tcttaacccgcagggtctgcggcac

SEQ ID NO: 3377242 - DNA, 25 bp, Homo sapien
ctcttaacccgcagggtctgcggca

SEQ ID NO: 3377243 - DNA, 25 bp, Homo sapien
aacccgcagggtctgcggcacctac

SEQ ID NO: 3377244 - DNA, 25 bp, Homo sapien
ttaacccgcagggtctgcggcacct

SEQ ID NO: 3377245 - DNA, 25 bp, Homo sapien
tctctcagagaaccctccaaagtgg

SEQ ID NO: 3377246 - DNA, 25 bp, Homo sapien
tggacctccagctgtgtgcacgagc

SEQ ID NO: 3377247 - DNA, 25 bp, Homo sapien
cttggaacttggctgacggagcaga

SEQ ID NO: 3377248 - DNA, 25 bp, Homo sapien
agaaagagagtcgagcgtgagcacc

SEQ ID NO: 3377249 - DNA, 25 bp, Homo sapien
ttctttcgaaactccgacgcgacat

SEQ ID NO: 3377250 - DNA, 25 bp, Homo sapien
gacgcgacatccaaccgagcggtgt

SEQ ID NO: 3377251 - DNA, 25 bp, Homo sapien
agcgcctaggaaggcgagcgaaccc

SEQ ID NO: 3377252 - DNA, 25 bp, Homo sapien
gagcgaacccaggtacatcagggcg

SEQ ID NO: 3377253 - DNA, 25 bp, Homo sapien
agggggaaggcgctgcccggactca

SEQ ID NO: 3377254 - DNA, 25 bp, Homo sapien
gggggaaggcgctgcccggactcac

SEQ ID NO: 3377255 - DNA, 25 bp, Homo sapien
gcgttcaggtgacgcccaggcctgt

SEQ ID NO: 3377256 - DNA, 25 bp, Homo sapien
ctagaccttcgggaccaacggtcag

SEQ ID NO: 3377257 - DNA, 25 bp, Homo sapien
cacttctagaccttcgggaccaacg

SEQ ID NO: 3377258 - DNA, 25 bp, Homo sapien
acaagcagacccgattcgcgtgcgt

SEQ ID NO: 3377259 - DNA, 25 bp, Homo sapien
ctgtcttcggggcttcgagaggcac

SEQ ID NO: 3377260 - DNA, 25 bp, Homo sapien
gccgaataagggtctgggcaggccc

SEQ ID NO: 3377261 - DNA, 25 bp, Homo sapien
ttcccacgactcagagcccacttat

SEQ ID NO: 3377262 - DNA, 25 bp, Homo sapien
ggccttcacgtcagcgagcccggtg

SEQ ID NO: 3377263 - DNA, 25 bp, Homo sapien
gtggagacagagaactcctcccgca

SEQ ID NO: 3377264 - DNA, 25 bp, Homo sapien
gggagctggaaactgctcgcgccat

SEQ ID NO: 3377265 - DNA, 25 bp, Homo sapien
ggaacgggagccattctagagccag

SEQ ID NO: 3377266 - DNA, 25 bp, Homo sapien
aacttgagaccccatcaagcagagc

SEQ ID NO: 3377267 - DNA, 25 bp, Homo sapien
agccaaagctccggaggccctggaa

SEQ ID NO: 3377268 - DNA, 25 bp, Homo sapien
gtgcacgtcccgaagcggcagccaa

SEQ ID NO: 3377269 - DNA, 25 bp, Homo sapien
gcgcttgactcggatgcgggcggca

SEQ ID NO: 3377270 - DNA, 25 bp, Homo sapien
gctctggcggtagcgcttgactcgg

SEQ ID NO: 3377271 - DNA, 25 bp, Homo sapien
ccttatctgtgaactggtagatctg

SEQ ID NO: 3377272 - DNA, 25 bp, Homo sapien
aactggtagatctggtgtgccagct

SEQ ID NO: 3377273 - DNA, 25 bp, Homo sapien
ggtagatctggtgtgccagcttctg

SEQ ID NO: 3377274 - DNA, 25 bp, Homo sapien
tccttatctgtgaactggtagatct

SEQ ID NO: 3377275 - DNA, 25 bp, Homo sapien
cggcgccggcggccgtagccctggg

SEQ ID NO: 3377276 - DNA, 25 bp, Homo sapien
cggcggccgtagccctgggggctga

SEQ ID NO: 3377277 - DNA, 25 bp, Homo sapien
ccggcggccgtagccctgggggctg

SEQ ID NO: 3377278 - DNA, 25 bp, Homo sapien
ggagcacttccactcgggggggctg

SEQ ID NO: 3377279 - DNA, 25 bp, Homo sapien
tggagccccgtgtgcttgtggctta

SEQ ID NO: 3377280 - DNA, 25 bp, Homo sapien
gctggagccccgtgtgcttgtggct

SEQ ID NO: 3377281 - DNA, 25 bp, Homo sapien
agccccgtgtgcttgtggcttagaa

SEQ ID NO: 3377282 - DNA, 25 bp, Homo sapien
gcaccagcgggatgcttgcgcgact

SEQ ID NO: 3377283 - DNA, 25 bp, Homo sapien
tcagggtctccgcagggctgtcaga

SEQ ID NO: 3377284 - DNA, 25 bp, Homo sapien
cacaccgctcgggaagtccttcgtc

SEQ ID NO: 3377285 - DNA, 25 bp, Homo sapien
ttgcgcgactattccttgtaccatg

SEQ ID NO: 3377286 - DNA, 25 bp, Homo sapien
gaacaactttacacctcgctgagac

SEQ ID NO: 3377287 - DNA, 25 bp, Homo sapien
caagtaatagtgaggcttgcgccct

SEQ ID NO: 3377288 - DNA, 25 bp, Homo sapien
taagcctggcaaacactcggattct

SEQ ID NO: 3377289 - DNA, 25 bp, Homo sapien
tgacacgccgtgagaaatcagtttg

SEQ ID NO: 3377290 - DNA, 25 bp, Homo sapien
cagctgcacgcagcgcagcgtgtgg

SEQ ID NO: 3377291 - DNA, 25 bp, Homo sapien
agcgcagcgtgtgggcgctgagtca

SEQ ID NO: 3377292 - DNA, 25 bp, Homo sapien
tgtaggaggacggccctggttggca

SEQ ID NO: 3377293 - DNA, 25 bp, Homo sapien
ggttccgccggcacgtccgtcctgc

SEQ ID NO: 3377294 - DNA, 25 bp, Homo sapien
cccagaaggccgtaggctaccctgg

SEQ ID NO: 3377295 - DNA, 25 bp, Homo sapien
ccagaaggccgtaggctaccctgga

SEQ ID NO: 3377296 - DNA, 25 bp, Homo sapien
cagaaggccgtaggctaccctggaa

SEQ ID NO: 3377297 - DNA, 25 bp, Homo sapien
tcccatgcacatgaagaccaagcct

SEQ ID NO: 3377298 - DNA, 25 bp, Homo sapien
aaacctctgtgagactcaggataac

SEQ ID NO: 3377299 - DNA, 25 bp, Homo sapien
gtgggaccaccagatagctatctag

SEQ ID NO: 3377300 - DNA, 25 bp, Homo sapien
tctggaacaagaccagtgggaccac

SEQ ID NO: 3377301 - DNA, 25 bp, Homo sapien
cctaatgttggataaatgtacaaaa

SEQ ID NO: 3377302 - DNA, 25 bp, Homo sapien
ttcctaatgttggataaatgtacaa

SEQ ID NO: 3377303 - DNA, 25 bp, Homo sapien
ctactttcctaatgttggataaatg

SEQ ID NO: 3377304 - DNA, 25 bp, Homo sapien
actttcctaatgttggataaatgta

SEQ ID NO: 3377305 - DNA, 25 bp, Homo sapien
gtgggtaaagcccaatccctgatgc

SEQ ID NO: 3377306 - DNA, 25 bp, Homo sapien
tccagtgtgggtaaagcccaatccc

SEQ ID NO: 3377307 - DNA, 25 bp, Homo sapien
ttccagtgtgggtaaagcccaatcc

SEQ ID NO: 3377308 - DNA, 25 bp, Homo sapien
agtgtgggtaaagcccaatccctga

SEQ ID NO: 3377309 - DNA, 25 bp, Homo sapien
ttctggctgtttgactggaaacaac

SEQ ID NO: 3377310 - DNA, 25 bp, Homo sapien
tctggctgtttgactggaaacaacc

SEQ ID NO: 3377311 - DNA, 25 bp, Homo sapien
ctatttctggctgtttgactggaaa

SEQ ID NO: 3377312 - DNA, 25 bp, Homo sapien
ggctgtttgactggaaacaaccctc

SEQ ID NO: 3377313 - DNA, 25 bp, Homo sapien
gtggtccacccatttcctctgtact

SEQ ID NO: 3377314 - DNA, 25 bp, Homo sapien
atctctgccagctgcctggccccac

SEQ ID NO: 3377315 - DNA, 25 bp, Homo sapien
cctctgtacttttcatctctgccag

SEQ ID NO: 3377316 - DNA, 25 bp, Homo sapien
ctctgccagctgcctggccccacat

SEQ ID NO: 3377317 - DNA, 25 bp, Homo sapien
tatgcatatttaccctaccacagcc

SEQ ID NO: 3377318 - DNA, 25 bp, Homo sapien
tatttacccttccatcttttgtgct

SEQ ID NO: 3377319 - DNA, 25 bp, Homo sapien
gcctacattcagacaatattacacc

SEQ ID NO: 3377320 - DNA, 25 bp, Homo sapien
tttttactgcacttatttggacatg

SEQ ID NO: 3377321 - DNA, 25 bp, Homo sapien
cattcttaattgtttctacatctac

SEQ ID NO: 3377322 - DNA, 25 bp, Homo sapien
cttaattgtttctacatctacttat

SEQ ID NO: 3377323 - DNA, 25 bp, Homo sapien
agcttcatacaaccaattctgtggg

SEQ ID NO: 3377324 - DNA, 25 bp, Homo sapien
attgtttctacatctacttattttg

SEQ ID NO: 3377325 - DNA, 25 bp, Homo sapien
gaacaaagatgctcctagtaccctt

SEQ ID NO: 3377326 - DNA, 25 bp, Homo sapien
gcttggtcttcctcgagaacagccc

SEQ ID NO: 3377327 - DNA, 25 bp, Homo sapien
gcaaggtccgaaagcagaacaggca

SEQ ID NO: 3377328 - DNA, 25 bp, Homo sapien
tctaagagcccaccgagagtcattt

SEQ ID NO: 3377329 - DNA, 25 bp, Homo sapien
ttccaagggcttcgagacatctgtt

SEQ ID NO: 3377330 - DNA, 25 bp, Homo sapien
agaggcagccaaaacaacccattgc

SEQ ID NO: 3377331 - DNA, 25 bp, Homo sapien
ttctcaatgcctctgcctgcggaaa

SEQ ID NO: 3377332 - DNA, 25 bp, Homo sapien
gcggaaagccacgacaaggacagat

SEQ ID NO: 3377333 - DNA, 25 bp, Homo sapien
gggaagcttttcctgtcacacaaca

SEQ ID NO: 3377334 - DNA, 25 bp, Homo sapien
gaaaaagtgagacttcttcgccaaa

SEQ ID NO: 3377335 - DNA, 25 bp, Homo sapien
taatagcaacaattggctgggcctt

SEQ ID NO: 3377336 - DNA, 25 bp, Homo sapien
ttctaatattgccactcactgcctg

SEQ ID NO: 3377337 - DNA, 25 bp, Homo sapien
tgcccagtccccaagtggttttgct

SEQ ID NO: 3377338 - DNA, 25 bp, Homo sapien
caagcaatcttctgaggatgacctg

SEQ ID NO: 3377339 - DNA, 25 bp, Homo sapien
taagcacttgcaagctcagacaatg

SEQ ID NO: 3377340 - DNA, 25 bp, Homo sapien
caacaggttgcaccatcatgaaacg

SEQ ID NO: 3377341 - DNA, 25 bp, Homo sapien
caaacttaacatgctcaaatccgaa

SEQ ID NO: 3377342 - DNA, 25 bp, Homo sapien
tctccatatgctgacaattcagctt

SEQ ID NO: 3377343 - DNA, 25 bp, Homo sapien
gaccttcgtggatgtctaacggaga

SEQ ID NO: 3377344 - DNA, 25 bp, Homo sapien
catttattcaagtgcctacctgacc

SEQ ID NO: 3377345 - DNA, 25 bp, Homo sapien
ctcctgcaggggcctacagtccgcc

SEQ ID NO: 3377346 - DNA, 25 bp, Homo sapien
ctttgagactctgcacgccctcagc

SEQ ID NO: 3377347 - DNA, 25 bp, Homo sapien
cctgcaggggcctacagtccgccat

SEQ ID NO: 3377348 - DNA, 25 bp, Homo sapien
ttgagactctgcacgccctcagcct

SEQ ID NO: 3377349 - DNA, 25 bp, Homo sapien
gtatttgttatgcagaggtggccaa

SEQ ID NO: 3377350 - DNA, 25 bp, Homo sapien
gaagagcccatctacaggtctgaag

SEQ ID NO: 3377351 - DNA, 25 bp, Homo sapien
ccttgagccgcttgagtaacttcca

SEQ ID NO: 3377352 - DNA, 25 bp, Homo sapien
taacttccaacctcctaggcagatg

SEQ ID NO: 3377353 - DNA, 25 bp, Homo sapien
tttccaggatagaaaacggcacaaa

SEQ ID NO: 3377354 - DNA, 25 bp, Homo sapien
tcactcatgtcaccatccaaggcag

SEQ ID NO: 3377355 - DNA, 25 bp, Homo sapien
catccaaggcaggtcaggtaactcc

SEQ ID NO: 3377356 - DNA, 25 bp, Homo sapien
aagaggagtggctgataatgcagcg

SEQ ID NO: 3377357 - DNA, 25 bp, Homo sapien
tgcattggcagaagactagtgaggt

SEQ ID NO: 3377358 - DNA, 25 bp, Homo sapien
ggtagcggaagtggttgcattggca

SEQ ID NO: 3377359 - DNA, 25 bp, Homo sapien
cagaagactagtgaggtggtgttca

SEQ ID NO: 3377360 - DNA, 25 bp, Homo sapien
gaagtggttgcattggcagaagact

SEQ ID NO: 3377361 - DNA, 25 bp, Homo sapien
aggtgacttgctccctgtagttgca

SEQ ID NO: 3377362 - DNA, 25 bp, Homo sapien
tagttgcagcaacccgcaagcattg

SEQ ID NO: 3377363 - DNA, 25 bp, Homo sapien
aacttttcccagcgcgagactctgg

SEQ ID NO: 3377364 - DNA, 25 bp, Homo sapien
gtctcggccccgcacaggtgacttg

SEQ ID NO: 3377365 - DNA, 25 bp, Homo sapien
cgcgccgccaacgggaaacttgaga

SEQ ID NO: 3377366 - DNA, 25 bp, Homo sapien
gccgcgccgccaacgggaaacttga

SEQ ID NO: 3377367 - DNA, 25 bp, Homo sapien
cgccgccaacgggaaacttgagagc

SEQ ID NO: 3377368 - DNA, 25 bp, Homo sapien
ccgcgccgccaacgggaaacttgag

SEQ ID NO: 3377369 - DNA, 25 bp, Homo sapien
agcgctgcggatccccggccaggag

SEQ ID NO: 3377370 - DNA, 25 bp, Homo sapien
cgggcgttcagagggcgcagcgctg

SEQ ID NO: 3377371 - DNA, 25 bp, Homo sapien
gggagggccgcctcagcagggagga

SEQ ID NO: 3377372 - DNA, 25 bp, Homo sapien
tggagcaaaggggacgcgctgggca

SEQ ID NO: 3377373 - DNA, 25 bp, Homo sapien
cgccggccgaaagggacggccgcag

SEQ ID NO: 3377374 - DNA, 25 bp, Homo sapien
gggctcgggccaccgcagaggcagg

SEQ ID NO: 3377375 - DNA, 25 bp, Homo sapien
caagggatcggaccggagtcagcgc

SEQ ID NO: 3377376 - DNA, 25 bp, Homo sapien
gacagggcaagggatcggaccggag

SEQ ID NO: 3377377 - DNA, 25 bp, Homo sapien
gatcggaccggagtcagcgccaccg

SEQ ID NO: 3377378 - DNA, 25 bp, Homo sapien
caacagccattagcagctctgctgg

SEQ ID NO: 3377379 - DNA, 25 bp, Homo sapien
acaacagccattagcagctctgctg

SEQ ID NO: 3377380 - DNA, 25 bp, Homo sapien
gactgtacacagccaggactccagc

SEQ ID NO: 3377381 - DNA, 25 bp, Homo sapien
cttctcccctatgaatggtacttct

SEQ ID NO: 3377382 - DNA, 25 bp, Homo sapien
tatgaatggtacttctcggtgactg

SEQ ID NO: 3377383 - DNA, 25 bp, Homo sapien
ccagatcaggaggaggaacatcctt

SEQ ID NO: 3377384 - DNA, 25 bp, Homo sapien
gctcaaagccttatttccctttcga

SEQ ID NO: 3377385 - DNA, 25 bp, Homo sapien
gcactgatcccaagctcaaagcctt

SEQ ID NO: 3377386 - DNA, 25 bp, Homo sapien
tgtggactgaagagcactgatccca

SEQ ID NO: 3377387 - DNA, 25 bp, Homo sapien
tgagcctaacttgttgctgcttctt

SEQ ID NO: 3377388 - DNA, 25 bp, Homo sapien
caatcgtgaggttgtgtcttactga

SEQ ID NO: 3377389 - DNA, 25 bp, Homo sapien
gagtcacctccgcatgtccaatcgt

SEQ ID NO: 3377390 - DNA, 25 bp, Homo sapien
tccgcatgtccaatcgtgaggttgt

SEQ ID NO: 3377391 - DNA, 25 bp, Homo sapien
gaggttgtgtcttactgagctcaca

SEQ ID NO: 3377392 - DNA, 25 bp, Homo sapien
gaacagacacatagcctcccagtga

SEQ ID NO: 3377393 - DNA, 25 bp, Homo sapien
gagtgggaaggctcagaacagacac

SEQ ID NO: 3377394 - DNA, 25 bp, Homo sapien
gcatcacagggtgcaaagctctgat

SEQ ID NO: 3377395 - DNA, 25 bp, Homo sapien
tctgtggtgctgttgaaatcctggg

SEQ ID NO: 3377396 - DNA, 25 bp, Homo sapien
ctcaagtgacccacaggagcaatcc

SEQ ID NO: 3377397 - DNA, 25 bp, Homo sapien
ctccgagcgctggctggactctgcc

SEQ ID NO: 3377398 - DNA, 25 bp, Homo sapien
cagctccgagcgctggctggactct

SEQ ID NO: 3377399 - DNA, 25 bp, Homo sapien
cctcaagtgacccacaggagcaatc

SEQ ID NO: 3377400 - DNA, 25 bp, Homo sapien
gggctggaaattctctcgtgaatat

SEQ ID NO: 3377401 - DNA, 25 bp, Homo sapien
tatgaaatatgagtggaaaatttcc

SEQ ID NO: 3377402 - DNA, 25 bp, Homo sapien
ggtatcctgaatgcagtgtcctggc

SEQ ID NO: 3377403 - DNA, 25 bp, Homo sapien
aagagccctgaagtccccaggtaat

SEQ ID NO: 3377404 - DNA, 25 bp, Homo sapien
tcagctgagtcagtgcgtgcgtgca

SEQ ID NO: 3377405 - DNA, 25 bp, Homo sapien
ggaggctcagctgagtcagtgcgtg

SEQ ID NO: 3377406 - DNA, 25 bp, Homo sapien
ctgtctgccggctggagtaggaggt

SEQ ID NO: 3377407 - DNA, 25 bp, Homo sapien
tgtctgccggctggagtaggaggtc

SEQ ID NO: 3377408 - DNA, 25 bp, Homo sapien
tgactggtcctgaagatgccactca

SEQ ID NO: 3377409 - DNA, 25 bp, Homo sapien
tgaagatgccactcaagtgatgcac

SEQ ID NO: 3377410 - DNA, 25 bp, Homo sapien
tggtcctgaagatgccactcaagtg

SEQ ID NO: 3377411 - DNA, 25 bp, Homo sapien
tggctccatgactggtcctgaagat

SEQ ID NO: 3377412 - DNA, 25 bp, Homo sapien
ggccaggcctgacaaggaaagctca

SEQ ID NO: 3377413 - DNA, 25 bp, Homo sapien
ccaggccaggcctgacaaggaaagc

SEQ ID NO: 3377414 - DNA, 25 bp, Homo sapien
caggccaggcctgacaaggaaagct

SEQ ID NO: 3377415 - DNA, 25 bp, Homo sapien
ccaggcctgacaaggaaagctcact

SEQ ID NO: 3377416 - DNA, 25 bp, Homo sapien
gccaacccgtccctccagagtgtct

SEQ ID NO: 3377417 - DNA, 25 bp, Homo sapien
acctgccaacccgtccctccagagt

SEQ ID NO: 3377418 - DNA, 25 bp, Homo sapien
gctcccacctgccaacccgtccctc

SEQ ID NO: 3377419 - DNA, 25 bp, Homo sapien
caacccgtccctccagagtgtctct

SEQ ID NO: 3377420 - DNA, 25 bp, Homo sapien
tgtgttagctcctaccctggacaga

SEQ ID NO: 3377421 - DNA, 25 bp, Homo sapien
ggccaggccaaagggagtttcacca

SEQ ID NO: 3377422 - DNA, 25 bp, Homo sapien
taacccacactattgagaggccagg

SEQ ID NO: 3377423 - DNA, 25 bp, Homo sapien
atgttgtccaggcaatttgggaggc

SEQ ID NO: 3377424 - DNA, 25 bp, Homo sapien
ttaatatgtacactctggccaggcg

SEQ ID NO: 3377425 - DNA, 25 bp, Homo sapien
acttaatatgtacactctggccagg

SEQ ID NO: 3377426 - DNA, 25 bp, Homo sapien
cttaatatgtacactctggccaggc

SEQ ID NO: 3377427 - DNA, 25 bp, Homo sapien
ttctctatccacctcctcgcatact

SEQ ID NO: 3377428 - DNA, 25 bp, Homo sapien
tttctctatccacctcctcgcatac

SEQ ID NO: 3377429 - DNA, 25 bp, Homo sapien
ccttggcttccttttgcccgatggg

SEQ ID NO: 3377430 - DNA, 25 bp, Homo sapien
gctcatccacttcagagatgttcag

SEQ ID NO: 3377431 - DNA, 25 bp, Homo sapien
tttttgcggtctccacagacttctg

SEQ ID NO: 3377432 - DNA, 25 bp, Homo sapien
tctcggagcactttagcaaacacct

SEQ ID NO: 3377433 - DNA, 25 bp, Homo sapien
tgggtctgcatgactctatgtacac

SEQ ID NO: 3377434 - DNA, 25 bp, Homo sapien
catgaggtgcctcatatcaggacac

SEQ ID NO: 3377435 - DNA, 25 bp, Homo sapien
ggacataccagtccccatgaggtgc

SEQ ID NO: 3377436 - DNA, 25 bp, Homo sapien
gactctatgtacacgaaaaccatgc

SEQ ID NO: 3377437 - DNA, 25 bp, Homo sapien
ccagggactctatctatcttgttca

SEQ ID NO: 3377438 - DNA, 25 bp, Homo sapien
gcacccggcaaatagtaagctgtgt

SEQ ID NO: 3377439 - DNA, 25 bp, Homo sapien
taattattgtctagacccagggact

SEQ ID NO: 3377440 - DNA, 25 bp, Homo sapien
tctgatcttctagttggaccctgac

SEQ ID NO: 3377441 - DNA, 25 bp, Homo sapien
gcagacagatgcaaactaagacacc

SEQ ID NO: 3377442 - DNA, 25 bp, Homo sapien
caactaagttccacaatggatccag

SEQ ID NO: 3377443 - DNA, 25 bp, Homo sapien
cgtctagtcaaatggcgcagacaga

SEQ ID NO: 3377444 - DNA, 25 bp, Homo sapien
cagtcctcaaggagcgtctagtcaa

SEQ ID NO: 3377445 - DNA, 25 bp, Homo sapien
cataattcctgcattcttcctcaaa

SEQ ID NO: 3377446 - DNA, 25 bp, Homo sapien
gaggtgtgttatccctaaactactg

SEQ ID NO: 3377447 - DNA, 25 bp, Homo sapien
tattatccagttatgatctcagagg

SEQ ID NO: 3377448 - DNA, 25 bp, Homo sapien
tcttgccagccttaactatatccta

SEQ ID NO: 3377449 - DNA, 25 bp, Homo sapien
ccgaagacttttacatcgatgttca

SEQ ID NO: 3377450 - DNA, 25 bp, Homo sapien
gcgcccggccgaagacttttacatc

SEQ ID NO: 3377451 - DNA, 25 bp, Homo sapien
tctgtttatgcgatggattacgctg

SEQ ID NO: 3377452 - DNA, 25 bp, Homo sapien
tatgcgatggattacgctgattgat

SEQ ID NO: 3377453 - DNA, 25 bp, Homo sapien
gtaatctccgctgatggtgacccgc

SEQ ID NO: 3377454 - DNA, 25 bp, Homo sapien
gtgacccgctggaactcaggcatgg

SEQ ID NO: 3377455 - DNA, 25 bp, Homo sapien
gactgggaccgaatcatcttgaaac

SEQ ID NO: 3377456 - DNA, 25 bp, Homo sapien
caatcttgctgtggcggcatttgca

SEQ ID NO: 3377457 - DNA, 25 bp, Homo sapien
tcttccggaggtgcagtatccgccc

SEQ ID NO: 3377458 - DNA, 25 bp, Homo sapien
tcccggatcattagggccttggcca

SEQ ID NO: 3377459 - DNA, 25 bp, Homo sapien
tactgggatgtgatccgcgggaagc

SEQ ID NO: 3377460 - DNA, 25 bp, Homo sapien
tatccgcccgcggatgacccaggta

SEQ ID NO: 3377461 - DNA, 25 bp, Homo sapien
cctagagcacatgtgaggagccaca

SEQ ID NO: 3377462 - DNA, 25 bp, Homo sapien
gaaggaacagaccatccctagagca

SEQ ID NO: 3377463 - DNA, 25 bp, Homo sapien
atctgtgcttggaaggaacagacca

SEQ ID NO: 3377464 - DNA, 25 bp, Homo sapien
catccctagagcacatgtgaggagc

SEQ ID NO: 3377465 - DNA, 25 bp, Homo sapien
gaggatgcccccctgcatgtggacc

SEQ ID NO: 3377466 - DNA, 25 bp, Homo sapien
catcatccaggcagtaggggtcttc

SEQ ID NO: 3377467 - DNA, 25 bp, Homo sapien
ccaccgtgtaggtctccaggtcggg

SEQ ID NO: 3377468 - DNA, 25 bp, Homo sapien
gggccatcggtgatgagagccagga

SEQ ID NO: 3377469 - DNA, 25 bp, Homo sapien
tatgctctgggctggtaactctctg

SEQ ID NO: 3377470 - DNA, 25 bp, Homo sapien
caaatagttatgctctgggctggta

SEQ ID NO: 3377471 - DNA, 25 bp, Homo sapien
agaggcacccaggtagctaccagca

SEQ ID NO: 3377472 - DNA, 25 bp, Homo sapien
acccaggtagctaccagcaagcaga

SEQ ID NO: 3377473 - DNA, 25 bp, Homo sapien
gaccatagttgagtcgcatcgagct

SEQ ID NO: 3377474 - DNA, 25 bp, Homo sapien
gagaccatagttgagtcgcatcgag

SEQ ID NO: 3377475 - DNA, 25 bp, Homo sapien
ccatagttgagtcgcatcgagctct

SEQ ID NO: 3377476 - DNA, 25 bp, Homo sapien
ggagatggggagagaccatagttga

SEQ ID NO: 3377477 - DNA, 25 bp, Homo sapien
tactcttcaactctttgaactcgga

SEQ ID NO: 3377478 - DNA, 25 bp, Homo sapien
tccagaaagttcagtcgccggtgac

SEQ ID NO: 3377479 - DNA, 25 bp, Homo sapien
cgtttaacatctcatgaaggctgaa

SEQ ID NO: 3377480 - DNA, 25 bp, Homo sapien
gaaggctgaacttggattccagaaa

SEQ ID NO: 3377481 - DNA, 25 bp, Homo sapien
agggacaccaatagccactttagac

SEQ ID NO: 3377482 - DNA, 25 bp, Homo sapien
tagacatacggaggccatcatccag

SEQ ID NO: 3377483 - DNA, 25 bp, Homo sapien
ttcacagataccacccacacagatc

SEQ ID NO: 3377484 - DNA, 25 bp, Homo sapien
caatagccactttagacatacggag

SEQ ID NO: 3377485 - DNA, 25 bp, Homo sapien
cttcctgccattaatcttgccattc

SEQ ID NO: 3377486 - DNA, 25 bp, Homo sapien
ccttcctgccattaatcttgccatt

SEQ ID NO: 3377487 - DNA, 25 bp, Homo sapien
tccttcctgccattaatcttgccat

SEQ ID NO: 3377488 - DNA, 25 bp, Homo sapien
ttcctgccattaatcttgccattct

SEQ ID NO: 3377489 - DNA, 25 bp, Homo sapien
gctgacagccattagaccacactct

SEQ ID NO: 3377490 - DNA, 25 bp, Homo sapien
aaccagatatttgatccactggacc

SEQ ID NO: 3377491 - DNA, 25 bp, Homo sapien
gcatctccaagtaatgccaaaccag

SEQ ID NO: 3377492 - DNA, 25 bp, Homo sapien
tggagctactgctgcggccgactgg

SEQ ID NO: 3377493 - DNA, 25 bp, Homo sapien
tgttgtgcagaccgtcccgatcact

SEQ ID NO: 3377494 - DNA, 25 bp, Homo sapien
ttgttcctccaagcacaactgaatg

SEQ ID NO: 3377495 - DNA, 25 bp, Homo sapien
cattgttgtgcagaccgtcccgatc

SEQ ID NO: 3377496 - DNA, 25 bp, Homo sapien
cttgttcctccaagcacaactgaat

SEQ ID NO: 3377497 - DNA, 25 bp, Homo sapien
tatgggcccatcagtctcaagataa

SEQ ID NO: 3377498 - DNA, 25 bp, Homo sapien
tgcagattggatcaggccattcccc

SEQ ID NO: 3377499 - DNA, 25 bp, Homo sapien
agttaacaaatgacctatgggccca

SEQ ID NO: 3377500 - DNA, 25 bp, Homo sapien
cattctgtgctgcagccgtgacaaa

SEQ ID NO: 3377501 - DNA, 25 bp, Homo sapien
ccaggccctgagtcaggccacctcc

SEQ ID NO: 3377502 - DNA, 25 bp, Homo sapien
caggccctgagtcaggccacctccc

SEQ ID NO: 3377503 - DNA, 25 bp, Homo sapien
ggctccgtctggtatgtgtgcttga

SEQ ID NO: 3377504 - DNA, 25 bp, Homo sapien
tccagtgagtccacagtgaggtcgt

SEQ ID NO: 3377505 - DNA, 25 bp, Homo sapien
gggtccatgtgcaggccgtcaaaca

SEQ ID NO: 3377506 - DNA, 25 bp, Homo sapien
tttggttcatgcaggcggccgcatg

SEQ ID NO: 3377507 - DNA, 25 bp, Homo sapien
ctcccggcaagcacaatcatggtgg

SEQ ID NO: 3377508 - DNA, 25 bp, Homo sapien
ctctcagtcagatagaagagaaagc

SEQ ID NO: 3377509 - DNA, 25 bp, Homo sapien
tctcagtcagatagaagagaaagct

SEQ ID NO: 3377510 - DNA, 25 bp, Homo sapien
ctgttattctctgaggccgcatgac

SEQ ID NO: 3377511 - DNA, 25 bp, Homo sapien
gcatgaaaccttagaaactcctgag

SEQ ID NO: 3377512 - DNA, 25 bp, Homo sapien
cagcttgggatcctttggcaaggcc

SEQ ID NO: 3377513 - DNA, 25 bp, Homo sapien
catggatcctcactcggtcagcttg

SEQ ID NO: 3377514 - DNA, 25 bp, Homo sapien
tatggccacaccgaaagacatcttc

SEQ ID NO: 3377515 - DNA, 25 bp, Homo sapien
caaagcggtggaatgtctgccggcc

SEQ ID NO: 3377516 - DNA, 25 bp, Homo sapien
ttttcaaatacaggtcacgcagctc

SEQ ID NO: 3377517 - DNA, 25 bp, Homo sapien
ccccacagggttgtatttggagttg

SEQ ID NO: 3377518 - DNA, 25 bp, Homo sapien
ttgaccatccgagcaaagtactctc

SEQ ID NO: 3377519 - DNA, 25 bp, Homo sapien
agggctgcctgctcctgtaagctct

SEQ ID NO: 3377520 - DNA, 25 bp, Homo sapien
ctgtaagctcttgttccactttagg

SEQ ID NO: 3377521 - DNA, 25 bp, Homo sapien
gcactcatctaaatccccagggctg

SEQ ID NO: 3377522 - DNA, 25 bp, Homo sapien
tcccaggctggaagcactcatctaa

SEQ ID NO: 3377523 - DNA, 25 bp, Homo sapien
aaccagtaggccaggttgggccact

SEQ ID NO: 3377524 - DNA, 25 bp, Homo sapien
gagccgtggctctgagtactggtac

SEQ ID NO: 3377525 - DNA, 25 bp, Homo sapien
catgttgggagagtagaccttgtgc

SEQ ID NO: 3377526 - DNA, 25 bp, Homo sapien
gaccttgtgctggatgaaccagtag

SEQ ID NO: 3377527 - DNA, 25 bp, Homo sapien
gaatcaagtcagatgggaccagaaa

SEQ ID NO: 3377528 - DNA, 25 bp, Homo sapien
aacacccagaatcaagtcagatggg

SEQ ID NO: 3377529 - DNA, 25 bp, Homo sapien
cagccccagtcacttcctcaggcac

SEQ ID NO: 3377530 - DNA, 25 bp, Homo sapien
gtcacttcctcaggcaccctgtgtc

SEQ ID NO: 3377531 - DNA, 25 bp, Homo sapien
gcaaagactcgcttgtcaggtggat

SEQ ID NO: 3377532 - DNA, 25 bp, Homo sapien
ggacagcaaagactcgcttgtcagg

SEQ ID NO: 3377533 - DNA, 25 bp, Homo sapien
ttgtcaggtggatccaacagcctgc

SEQ ID NO: 3377534 - DNA, 25 bp, Homo sapien
gactcgcttgtcaggtggatccaac

SEQ ID NO: 3377535 - DNA, 25 bp, Homo sapien
tgggggttgatagtggccttgaaaa

SEQ ID NO: 3377536 - DNA, 25 bp, Homo sapien
gaagaggtgaagctctcgatgatct

SEQ ID NO: 3377537 - DNA, 25 bp, Homo sapien
tctcgatgatcttgggggttgatag

SEQ ID NO: 3377538 - DNA, 25 bp, Homo sapien
ttgatagtggccttgaaaaggggca

SEQ ID NO: 3377539 - DNA, 25 bp, Homo sapien
tgtgagctatttccgctgggtcaag

SEQ ID NO: 3377540 - DNA, 25 bp, Homo sapien
cagaagcacgcacgagtgtgagcta

SEQ ID NO: 3377541 - DNA, 25 bp, Homo sapien
ggcactggcctgtatcaccatctga

SEQ ID NO: 3377542 - DNA, 25 bp, Homo sapien
cacgttgtggcgtctgaccaggcca

SEQ ID NO: 3377543 - DNA, 25 bp, Homo sapien
tacatcgctggagtcagcctgcctg

SEQ ID NO: 3377544 - DNA, 25 bp, Homo sapien
aattgaagctagcagcttcacaggg

SEQ ID NO: 3377545 - DNA, 25 bp, Homo sapien
ttcagggtacatcgctggagtcagc

SEQ ID NO: 3377546 - DNA, 25 bp, Homo sapien
tgtgtcaattgaagctagcagcttc

SEQ ID NO: 3377547 - DNA, 25 bp, Homo sapien
aggcttgctaccaggccacggcagt

SEQ ID NO: 3377548 - DNA, 25 bp, Homo sapien
cctgagtcactggagccttctggct

SEQ ID NO: 3377549 - DNA, 25 bp, Homo sapien
tccccaaccaagaacacatgcatgg

SEQ ID NO: 3377550 - DNA, 25 bp, Homo sapien
catgcatggagggtacgggctctca

SEQ ID NO: 3377551 - DNA, 25 bp, Homo sapien
gcctgggtgacagagcaagactcca

SEQ ID NO: 3377552 - DNA, 25 bp, Homo sapien
tgagccgagatcgcaccagcctggg

SEQ ID NO: 3377553 - DNA, 25 bp, Homo sapien
cctgggtgacagagcaagactccat

SEQ ID NO: 3377554 - DNA, 25 bp, Homo sapien
gccgagatcgcaccagcctgggtga

SEQ ID NO: 3377555 - DNA, 25 bp, Homo sapien
tctgctatgccgaggccagcctgca

SEQ ID NO: 3377556 - DNA, 25 bp, Homo sapien
aaagggtcctagtacacatcactca

SEQ ID NO: 3377557 - DNA, 25 bp, Homo sapien
ccaggtgaagggcaaagcagccatg

SEQ ID NO: 3377558 - DNA, 25 bp, Homo sapien
atcagcagcagcgacaagcgatgag

SEQ ID NO: 3377559 - DNA, 25 bp, Homo sapien
acaggagagtgccaagcccctgtgt

SEQ ID NO: 3377560 - DNA, 25 bp, Homo sapien
ggtgagacaggagagtgccaagccc

SEQ ID NO: 3377561 - DNA, 25 bp, Homo sapien
agacaggagagtgccaagcccctgt

SEQ ID NO: 3377562 - DNA, 25 bp, Homo sapien
tgagacaggagagtgccaagcccct

SEQ ID NO: 3377563 - DNA, 25 bp, Homo sapien
gatgaaaagtgggtacaacaccaag

SEQ ID NO: 3377564 - DNA, 25 bp, Homo sapien
aaggtctgccccttcggagcttcca

SEQ ID NO: 3377565 - DNA, 25 bp, Homo sapien
cctgcctgaggccatattcctccca

SEQ ID NO: 3377566 - DNA, 25 bp, Homo sapien
ccccttcggagcttccataggtact

SEQ ID NO: 3377567 - DNA, 25 bp, Homo sapien
tcccagagctcatagctgccagagg

SEQ ID NO: 3377568 - DNA, 25 bp, Homo sapien
gggtctgggcccctcaggttcacac

SEQ ID NO: 3377569 - DNA, 25 bp, Homo sapien
aggccaaggcaggaccaggactcag

SEQ ID NO: 3377570 - DNA, 25 bp, Homo sapien
gactcagcctcggttcagcctccca

SEQ ID NO: 3377571 - DNA, 25 bp, Homo sapien
tagctgtagggtgggttctgctcac

SEQ ID NO: 3377572 - DNA, 25 bp, Homo sapien
gggctcttgtcggaaaacatgtggt

SEQ ID NO: 3377573 - DNA, 25 bp, Homo sapien
gatgttggcatacatgtagtacagg

SEQ ID NO: 3377574 - DNA, 25 bp, Homo sapien
cagacgtccgggtttgggctcttgt

SEQ ID NO: 3377575 - DNA, 25 bp, Homo sapien
cacagtgcggccggaacaggaacgt

SEQ ID NO: 3377576 - DNA, 25 bp, Homo sapien
ccacagtgcggccggaacaggaacg

SEQ ID NO: 3377577 - DNA, 25 bp, Homo sapien
tctgagcaaggtagtagagatactg

SEQ ID NO: 3377578 - DNA, 25 bp, Homo sapien
gagaaacatgcagtcccttgtgtag

SEQ ID NO: 3377579 - DNA, 25 bp, Homo sapien
cagagggttcttggaatattcgagg

SEQ ID NO: 3377580 - DNA, 25 bp, Homo sapien
ccttgtgtaggaattccctcagagg

SEQ ID NO: 3377581 - DNA, 25 bp, Homo sapien
acttgcggctagtccccatgcatga

SEQ ID NO: 3377582 - DNA, 25 bp, Homo sapien
taagcaatggctggtcttgtcgaca

SEQ ID NO: 3377583 - DNA, 25 bp, Homo sapien
tgtcgacaccatcaaaacatgctgg

SEQ ID NO: 3377584 - DNA, 25 bp, Homo sapien
tgaatccttacagggtagggacaga

SEQ ID NO: 3377585 - DNA, 25 bp, Homo sapien
aatggcatattcttccataagtgct

SEQ ID NO: 3377586 - DNA, 25 bp, Homo sapien
tggcatattcttccataagtgcttc

SEQ ID NO: 3377587 - DNA, 25 bp, Homo sapien
ctgcaatggcatattcttccataag

SEQ ID NO: 3377588 - DNA, 25 bp, Homo sapien
gcaatggcatattcttccataagtg

SEQ ID NO: 3377589 - DNA, 25 bp, Homo sapien
acacaggtcgcaggtgctcagcttc

SEQ ID NO: 3377590 - DNA, 25 bp, Homo sapien
cagcacgctgttcctggcgatctca

SEQ ID NO: 3377591 - DNA, 25 bp, Homo sapien
ctggcgatctcacacaggtcgcagg

SEQ ID NO: 3377592 - DNA, 25 bp, Homo sapien
aggccgctctgcagcacgctgttcc

SEQ ID NO: 3377593 - DNA, 25 bp, Homo sapien
tgccatccggatctgagccacattt

SEQ ID NO: 3377594 - DNA, 25 bp, Homo sapien
ctagttggtcaaggcggtgatctct

SEQ ID NO: 3377595 - DNA, 25 bp, Homo sapien
gctgagctcattgcataaggtctca

SEQ ID NO: 3377596 - DNA, 25 bp, Homo sapien
taaggtctcatatcggaatgccatc

SEQ ID NO: 3377597 - DNA, 25 bp, Homo sapien
tgagcagtgcaaccaaaatcaccag

SEQ ID NO: 3377598 - DNA, 25 bp, Homo sapien
caagtatagacaagtgctcagctcc

SEQ ID NO: 3377599 - DNA, 25 bp, Homo sapien
aatgctttctacttggcccctggga

SEQ ID NO: 3377600 - DNA, 25 bp, Homo sapien
tcatgaggagattcacagaacaccc

SEQ ID NO: 3377601 - DNA, 25 bp, Homo sapien
taggaaggtccttgagcagcctctt

SEQ ID NO: 3377602 - DNA, 25 bp, Homo sapien
atatgctgaattgaccagtggaggg

SEQ ID NO: 3377603 - DNA, 25 bp, Homo sapien
taaagtcaaataagttcacaggcag

SEQ ID NO: 3377604 - DNA, 25 bp, Homo sapien
cttaagtactaagagcacatgtcct

SEQ ID NO: 3377605 - DNA, 25 bp, Homo sapien
aggaacaggtatcaagcacgcagca

SEQ ID NO: 3377606 - DNA, 25 bp, Homo sapien
tttactccgattatgtatagaacct

SEQ ID NO: 3377607 - DNA, 25 bp, Homo sapien
ttttccctatcctaactcagtaaca

SEQ ID NO: 3377608 - DNA, 25 bp, Homo sapien
taatgtgtgccttctaggatttgtg

SEQ ID NO: 3377609 - DNA, 25 bp, Homo sapien
ttctaggatttgtgaagtggtttca

SEQ ID NO: 3377610 - DNA, 25 bp, Homo sapien
aatagctaactactccctatggagg

SEQ ID NO: 3377611 - DNA, 25 bp, Homo sapien
tatcaacctggcaatgcacttggtg

SEQ ID NO: 3377612 - DNA, 25 bp, Homo sapien
cattcataatgggacagctaagtac

SEQ ID NO: 3377613 - DNA, 25 bp, Homo sapien
ccagtgactcaatagggcccaaacc

SEQ ID NO: 3377614 - DNA, 25 bp, Homo sapien
cttgccattaattctatccagtgta

SEQ ID NO: 3377615 - DNA, 25 bp, Homo sapien
tgtatgtctggtagttctcaactgg

SEQ ID NO: 3377616 - DNA, 25 bp, Homo sapien
cagactttgtggcagactttgtgaa

SEQ ID NO: 3377617 - DNA, 25 bp, Homo sapien
tttcatcctggatagttactattgc

SEQ ID NO: 3377618 - DNA, 25 bp, Homo sapien
aagattgtacactcctgtcctaggc

SEQ ID NO: 3377619 - DNA, 25 bp, Homo sapien
gagtttctcagaccgtatctctgtc

SEQ ID NO: 3377620 - DNA, 25 bp, Homo sapien
caggcccgcatgctccatttatggt

SEQ ID NO: 3377621 - DNA, 25 bp, Homo sapien
tatgtagtagtaggctaaaccatct

SEQ ID NO: 3377622 - DNA, 25 bp, Homo sapien
gcaaaggtatatggctcattcaggg

SEQ ID NO: 3377623 - DNA, 25 bp, Homo sapien
ctcacaagggcagtttcaggaaagg

SEQ ID NO: 3377624 - DNA, 25 bp, Homo sapien
ccaaggttggagcttactaaactca

SEQ ID NO: 3377625 - DNA, 25 bp, Homo sapien
ctctctgaattgtggctggagcaaa

SEQ ID NO: 3377626 - DNA, 25 bp, Homo sapien
aacatattagtgatagctcctatcc

SEQ ID NO: 3377627 - DNA, 25 bp, Homo sapien
ttatagtctagtggctgtactttgg

SEQ ID NO: 3377628 - DNA, 25 bp, Homo sapien
tgctataagcacaacagggaatgga

SEQ ID NO: 3377629 - DNA, 25 bp, Homo sapien
tgtactttggaacagtcagttttta

SEQ ID NO: 3377630 - DNA, 25 bp, Homo sapien
tgtcaggctagtctttggatgggaa

SEQ ID NO: 3377631 - DNA, 25 bp, Homo sapien
aagatatcacaagtcaagcagcagg

SEQ ID NO: 3377632 - DNA, 25 bp, Homo sapien
caggaatccgctctatatgcatgca

SEQ ID NO: 3377633 - DNA, 25 bp, Homo sapien
ctaaattaaagtggcttggcagggc

SEQ ID NO: 3377634 - DNA, 25 bp, Homo sapien
ggttgacgtctgtcgtcttgcgaat

SEQ ID NO: 3377635 - DNA, 25 bp, Homo sapien
attcgcaagacgacagacgtcaacc

SEQ ID NO: 3377636 - DNA, 25 bp, Homo sapien
cgcgggtcggtaggggcgctgcaga

SEQ ID NO: 3377637 - DNA, 25 bp, Homo sapien
agcgcgggtcggtaggggcgctgca

SEQ ID NO: 3377638 - DNA, 25 bp, Homo sapien
ctgcggagcgcgggtcggtaggggc

SEQ ID NO: 3377639 - DNA, 25 bp, Homo sapien
cggagcgcgggtcggtaggggcgct

SEQ ID NO: 3377640 - DNA, 25 bp, Homo sapien
tgacaggcgagactctccttcgccg

SEQ ID NO: 3377641 - DNA, 25 bp, Homo sapien
atctgggctcgaaagccctcaggag

SEQ ID NO: 3377642 - DNA, 25 bp, Homo sapien
ccctgctccgggagcgtgacaggcg

SEQ ID NO: 3377643 - DNA, 25 bp, Homo sapien
tgaccatctgggctcgaaagccctc

SEQ ID NO: 3377644 - DNA, 25 bp, Homo sapien
agatgggagtctgccaggctgtttc

SEQ ID NO: 3377645 - DNA, 25 bp, Homo sapien
ctccggagatggcaccaggagagat

SEQ ID NO: 3377646 - DNA, 25 bp, Homo sapien
tcagtgcggccttggtcgccagcgg

SEQ ID NO: 3377647 - DNA, 25 bp, Homo sapien
gggcgctccactttccgctccggag

SEQ ID NO: 3377648 - DNA, 25 bp, Homo sapien
ccaactgttgaccaaaccagggctc

SEQ ID NO: 3377649 - DNA, 25 bp, Homo sapien
cttggagcccaactgttgaccaaac

SEQ ID NO: 3377650 - DNA, 25 bp, Homo sapien
agcccaactgttgaccaaaccaggg

SEQ ID NO: 3377651 - DNA, 25 bp, Homo sapien
ggagcccaactgttgaccaaaccag

SEQ ID NO: 3377652 - DNA, 25 bp, Homo sapien
tgcggttgctattgactgacaccag

SEQ ID NO: 3377653 - DNA, 25 bp, Homo sapien
cagatacgctggaattctgaagcca

SEQ ID NO: 3377654 - DNA, 25 bp, Homo sapien
aagccactttagtatggaaatcaag

SEQ ID NO: 3377655 - DNA, 25 bp, Homo sapien
tctgccaagaactattgcggttgct

SEQ ID NO: 3377656 - DNA, 25 bp, Homo sapien
tattgactggtatctgggcagaggc

SEQ ID NO: 3377657 - DNA, 25 bp, Homo sapien
tgcctgcaagagatcttgccccaag

SEQ ID NO: 3377658 - DNA, 25 bp, Homo sapien
aggcaagaggcaaatttgatcctga

SEQ ID NO: 3377659 - DNA, 25 bp, Homo sapien
gaggcaaatttgatcctgatttgga

SEQ ID NO: 3377660 - DNA, 25 bp, Homo sapien
aggcatcagaaatgatgtcatctca

SEQ ID NO: 3377661 - DNA, 25 bp, Homo sapien
tagtaggcatcagaaatgatgtcat

SEQ ID NO: 3377662 - DNA, 25 bp, Homo sapien
ggcatcagaaatgatgtcatctcac

SEQ ID NO: 3377663 - DNA, 25 bp, Homo sapien
cattagtaggcatcagaaatgatgt

SEQ ID NO: 3377664 - DNA, 25 bp, Homo sapien
tcagtactccactgtgcatattctt

SEQ ID NO: 3377665 - DNA, 25 bp, Homo sapien
cagtactccactgtgcatattcttt

SEQ ID NO: 3377666 - DNA, 25 bp, Homo sapien
tactccactgtgcatattcttttac

SEQ ID NO: 3377667 - DNA, 25 bp, Homo sapien
gtactccactgtgcatattctttta

SEQ ID NO: 3377668 - DNA, 25 bp, Homo sapien
gacatgtccttctgagcccggtaag

SEQ ID NO: 3377669 - DNA, 25 bp, Homo sapien
ccaaggagtcactgagaccaaggct

SEQ ID NO: 3377670 - DNA, 25 bp, Homo sapien
gtttagcccctgaaagccatggaga

SEQ ID NO: 3377671 - DNA, 25 bp, Homo sapien
caaggctgaggatacgacagtacac

SEQ ID NO: 3377672 - DNA, 25 bp, Homo sapien
tgtgaccacatgcaagagtaaactt

SEQ ID NO: 3377673 - DNA, 25 bp, Homo sapien
catggcttcaatggcagacttacta

SEQ ID NO: 3377674 - DNA, 25 bp, Homo sapien
cagagccaacaacccttcaaaagtg

SEQ ID NO: 3377675 - DNA, 25 bp, Homo sapien
gataaataagatgcatgccaagcca

SEQ ID NO: 3377676 - DNA, 25 bp, Homo sapien
atggaagccatggtccagcctgagg

SEQ ID NO: 3377677 - DNA, 25 bp, Homo sapien
actgtagacaagcagccttgaaaag

SEQ ID NO: 3377678 - DNA, 25 bp, Homo sapien
caggaagggcttcactcagcagagt

SEQ ID NO: 3377679 - DNA, 25 bp, Homo sapien
tcagcagagtgaaaggaagagactt

SEQ ID NO: 3377680 - DNA, 25 bp, Homo sapien
tgttcttggaggtcatttcgtaatg

SEQ ID NO: 3377681 - DNA, 25 bp, Homo sapien
taatgaactgctcttcactcaccaa

SEQ ID NO: 3377682 - DNA, 25 bp, Homo sapien
cctgtggctagttcacaggaagata

SEQ ID NO: 3377683 - DNA, 25 bp, Homo sapien
gaagatacttgagagctggttacac

SEQ ID NO: 3377684 - DNA, 25 bp, Homo sapien
aagtatgacgatgtctgcctcccag

SEQ ID NO: 3377685 - DNA, 25 bp, Homo sapien
tattctactactctgggaagtccca

SEQ ID NO: 3377686 - DNA, 25 bp, Homo sapien
catggtgttggcagctcagcgttct

SEQ ID NO: 3377687 - DNA, 25 bp, Homo sapien
ccttcgtactcagtcctagggcagg

SEQ ID NO: 3377688 - DNA, 25 bp, Homo sapien
tccagggtgttacccagagactgtg

SEQ ID NO: 3377689 - DNA, 25 bp, Homo sapien
gctacaggcagcttgaatacagtct

SEQ ID NO: 3377690 - DNA, 25 bp, Homo sapien
aatgaacatgaagtgatcataagcc

SEQ ID NO: 3377691 - DNA, 25 bp, Homo sapien
tcataagccttcatattgctacagg

SEQ ID NO: 3377692 - DNA, 25 bp, Homo sapien
ggcacggtccatgtccctcacgctg

SEQ ID NO: 3377693 - DNA, 25 bp, Homo sapien
cacgctgggaaaggtatgcatgttc

SEQ ID NO: 3377694 - DNA, 25 bp, Homo sapien
gggtccctcgcacggcacggtccat

SEQ ID NO: 3377695 - DNA, 25 bp, Homo sapien
tccatgtccctcacgctgggaaagg

SEQ ID NO: 3377696 - DNA, 25 bp, Homo sapien
agtttatgtaatgcacctgcacatg

SEQ ID NO: 3377697 - DNA, 25 bp, Homo sapien
caggagaaaacagaccttttagcaa

SEQ ID NO: 3377698 - DNA, 25 bp, Homo sapien
acagaccttttagcaacaggaatcc

SEQ ID NO: 3377699 - DNA, 25 bp, Homo sapien
gaaaacagaccttttagcaacagga

SEQ ID NO: 3377700 - DNA, 25 bp, Homo sapien
tagcaggagaaaacagaccttttag

SEQ ID NO: 3377701 - DNA, 25 bp, Homo sapien
tgccttggaccagatctctccatgg

SEQ ID NO: 3377702 - DNA, 25 bp, Homo sapien
aggttggtgccttggaccagatctc

SEQ ID NO: 3377703 - DNA, 25 bp, Homo sapien
cacagtaggaggctctttctcagtc

SEQ ID NO: 3377704 - DNA, 25 bp, Homo sapien
gacacagtaggaggctctttctcag

SEQ ID NO: 3377705 - DNA, 25 bp, Homo sapien
ttcatagacttgaccaaggccgggt

SEQ ID NO: 3377706 - DNA, 25 bp, Homo sapien
tctgtagcggacaaagagaacttat

SEQ ID NO: 3377707 - DNA, 25 bp, Homo sapien
tgcacttgcagtctataacacacgc

SEQ ID NO: 3377708 - DNA, 25 bp, Homo sapien
tcagggtttcagctacaagaatgcc

SEQ ID NO: 3377709 - DNA, 25 bp, Homo sapien
gacttgacccaatgcttcccaacgg

SEQ ID NO: 3377710 - DNA, 25 bp, Homo sapien
gcaaatccaaggagtttagccactg

SEQ ID NO: 3377711 - DNA, 25 bp, Homo sapien
aacggctactcctctgctaagaaag

SEQ ID NO: 3377712 - DNA, 25 bp, Homo sapien
gtaactctgttcatagtccaaaacg

SEQ ID NO: 3377713 - DNA, 25 bp, Homo sapien
gtatctgcatatcccaagctcatcg

SEQ ID NO: 3377714 - DNA, 25 bp, Homo sapien
ccaggtgggatagacgctttttaag

SEQ ID NO: 3377715 - DNA, 25 bp, Homo sapien
tcatccaaactgacctgagccaggt

SEQ ID NO: 3377716 - DNA, 25 bp, Homo sapien
tatctgatctccttggtcaaagacc

SEQ ID NO: 3377717 - DNA, 25 bp, Homo sapien
gaatttggcatggaagacacagaca

SEQ ID NO: 3377718 - DNA, 25 bp, Homo sapien
tgcaggctcaactgtaggccactct

SEQ ID NO: 3377719 - DNA, 25 bp, Homo sapien
cccgacaaccgaagtgtaggtcctg

SEQ ID NO: 3377720 - DNA, 25 bp, Homo sapien
tgtaggccactctttagccctcata

SEQ ID NO: 3377721 - DNA, 25 bp, Homo sapien
tgctgctaccacctaccagaggaca

SEQ ID NO: 3377722 - DNA, 25 bp, Homo sapien
catcctctctcctgcgagagtgacc

SEQ ID NO: 3377723 - DNA, 25 bp, Homo sapien
atcctctctcctgcgagagtgacca

SEQ ID NO: 3377724 - DNA, 25 bp, Homo sapien
gcatcctctctcctgcgagagtgac

SEQ ID NO: 3377725 - DNA, 25 bp, Homo sapien
ctaggatgaacaccagagtctctct

SEQ ID NO: 3377726 - DNA, 25 bp, Homo sapien
tgcaggagacaaatctgggagctct

SEQ ID NO: 3377727 - DNA, 25 bp, Homo sapien
ctctgagccactaggatgaacacca

SEQ ID NO: 3377728 - DNA, 25 bp, Homo sapien
cacagcaaagaccaggactgagtct

SEQ ID NO: 3377729 - DNA, 25 bp, Homo sapien
ctgggactgagcacagcacagacat

SEQ ID NO: 3377730 - DNA, 25 bp, Homo sapien
tgagcacagcacagacatggggcaa

SEQ ID NO: 3377731 - DNA, 25 bp, Homo sapien
gcacagacatggggcaagcccagca

SEQ ID NO: 3377732 - DNA, 25 bp, Homo sapien
acagacatggggcaagcccagcaca

SEQ ID NO: 3377733 - DNA, 25 bp, Homo sapien
tgaccacagcacggacctgggactg

SEQ ID NO: 3377734 - DNA, 25 bp, Homo sapien
ggactgaccacagcacggacctggg

SEQ ID NO: 3377735 - DNA, 25 bp, Homo sapien
gggactgaccacagcacggacctgg

SEQ ID NO: 3377736 - DNA, 25 bp, Homo sapien
gaccacagcacggacctgggactga

SEQ ID NO: 3377737 - DNA, 25 bp, Homo sapien
tccttgaccccaggatgatgactca

SEQ ID NO: 3377738 - DNA, 25 bp, Homo sapien
gatgatgactcatgtcactcttgag

SEQ ID NO: 3377739 - DNA, 25 bp, Homo sapien
catgtcactcttgagtgagtgactc

SEQ ID NO: 3377740 - DNA, 25 bp, Homo sapien
gaccccaggatgatgactcatgtca

SEQ ID NO: 3377741 - DNA, 25 bp, Homo sapien
ttgccaggacccctaataccagagt

SEQ ID NO: 3377742 - DNA, 25 bp, Homo sapien
ggacccctaataccagagtctgtgc

SEQ ID NO: 3377743 - DNA, 25 bp, Homo sapien
catgggaatgggcaatcccaggtgc

SEQ ID NO: 3377744 - DNA, 25 bp, Homo sapien
cccaggtgctggattgccaggaccc

SEQ ID NO: 3377745 - DNA, 25 bp, Homo sapien
gacttccagttcctcggagaggggc

SEQ ID NO: 3377746 - DNA, 25 bp, Homo sapien
ggggctgcgtctcggctgctgttgt

SEQ ID NO: 3377747 - DNA, 25 bp, Homo sapien
agaggggctgcgtctcggctgctgt

SEQ ID NO: 3377748 - DNA, 25 bp, Homo sapien
caggggatgccgtgagaaggacttc

SEQ ID NO: 3377749 - DNA, 25 bp, Homo sapien
ttagatgatcacagtcgcagctgct

SEQ ID NO: 3377750 - DNA, 25 bp, Homo sapien
tagatgatcacagtcgcagctgctt

SEQ ID NO: 3377751 - DNA, 25 bp, Homo sapien
acagtcgcagctgcttcctgtctac

SEQ ID NO: 3377752 - DNA, 25 bp, Homo sapien
tgatcacagtcgcagctgcttcctg

SEQ ID NO: 3377753 - DNA, 25 bp, Homo sapien
agccaatcattgtcccggtcttggg

SEQ ID NO: 3377754 - DNA, 25 bp, Homo sapien
cacagggctgcgagcctgttcacac

SEQ ID NO: 3377755 - DNA, 25 bp, Homo sapien
ctcagtcggcaaggtgtgagcttcc

SEQ ID NO: 3377756 - DNA, 25 bp, Homo sapien
tgggagtctccaccctaaactctgg

SEQ ID NO: 3377757 - DNA, 25 bp, Homo sapien
agttcagctcagagtctattggtga

SEQ ID NO: 3377758 - DNA, 25 bp, Homo sapien
tcagctcagagtctattggtgaaaa

SEQ ID NO: 3377759 - DNA, 25 bp, Homo sapien
cagttcagctcagagtctattggtg

SEQ ID NO: 3377760 - DNA, 25 bp, Homo sapien
tgcagttcagctcagagtctattgg

SEQ ID NO: 3377761 - DNA, 25 bp, Homo sapien
aacctcttctggtcctgtgttagca

SEQ ID NO: 3377762 - DNA, 25 bp, Homo sapien
gacaaactggtgaagccttagccag

SEQ ID NO: 3377763 - DNA, 25 bp, Homo sapien
aaaacctcttctggtcctgtgttag

SEQ ID NO: 3377764 - DNA, 25 bp, Homo sapien
tgaagccttagccagaaaaacctct

SEQ ID NO: 3377765 - DNA, 25 bp, Homo sapien
aactgctgaggcatctccaggcagt

SEQ ID NO: 3377766 - DNA, 25 bp, Homo sapien
cagagctctctttactcagtctttt

SEQ ID NO: 3377767 - DNA, 25 bp, Homo sapien
ctggccttaacctgccctcagagct

SEQ ID NO: 3377768 - DNA, 25 bp, Homo sapien
cagaacagctccagcaaaactgctg

SEQ ID NO: 3377769 - DNA, 25 bp, Homo sapien
ctctgccaaccctagaggaagggcc

SEQ ID NO: 3377770 - DNA, 25 bp, Homo sapien
acaaagcctgccagccataccccag

SEQ ID NO: 3377771 - DNA, 25 bp, Homo sapien
cccaaactctgccaaccctagagga

SEQ ID NO: 3377772 - DNA, 25 bp, Homo sapien
agcctgccagccataccccagccag

SEQ ID NO: 3377773 - DNA, 25 bp, Homo sapien
caggctcagtattttatcccatggg

SEQ ID NO: 3377774 - DNA, 25 bp, Homo sapien
gttcaatccacagttacaccgattt

SEQ ID NO: 3377775 - DNA, 25 bp, Homo sapien
gttacaccgatttgcccccagataa

SEQ ID NO: 3377776 - DNA, 25 bp, Homo sapien
caggatcctgcaggctcagtatttt

SEQ ID NO: 3377777 - DNA, 25 bp, Homo sapien
ctaaatctggagttaggagaagagg

SEQ ID NO: 3377778 - DNA, 25 bp, Homo sapien
caggaatattgtgtagcttggactc

SEQ ID NO: 3377779 - DNA, 25 bp, Homo sapien
gatatccagaaacgtcccttgcctt

SEQ ID NO: 3377780 - DNA, 25 bp, Homo sapien
gagggacccgggcaagagatatcca

SEQ ID NO: 3377781 - DNA, 25 bp, Homo sapien
gccacttctgcaagggaccatttct

SEQ ID NO: 3377782 - DNA, 25 bp, Homo sapien
agtggcaggcatgaattagcatttc

SEQ ID NO: 3377783 - DNA, 25 bp, Homo sapien
ggacctggtaacagcaagtggcagg

SEQ ID NO: 3377784 - DNA, 25 bp, Homo sapien
gccatttgcagggttaaagttcttg

SEQ ID NO: 3377785 - DNA, 25 bp, Homo sapien
agtgtccagtggcacgagttgccat

SEQ ID NO: 3377786 - DNA, 25 bp, Homo sapien
tgaggccagctggtcggctttccct

SEQ ID NO: 3377787 - DNA, 25 bp, Homo sapien
agggtgagcgactgccccaaaggcc

SEQ ID NO: 3377788 - DNA, 25 bp, Homo sapien
ccagtttctcttggcgctggcccag

SEQ ID NO: 3377789 - DNA, 25 bp, Homo sapien
cacaagcagttagggcacaagtttc

SEQ ID NO: 3377790 - DNA, 25 bp, Homo sapien
aagcagttagggcacaagtttcttg

SEQ ID NO: 3377791 - DNA, 25 bp, Homo sapien
caagcagttagggcacaagtttctt

SEQ ID NO: 3377792 - DNA, 25 bp, Homo sapien
ccacaagcagttagggcacaagttt

SEQ ID NO: 3377793 - DNA, 25 bp, Homo sapien
tttcgactttcagggtgtggagatg

SEQ ID NO: 3377794 - DNA, 25 bp, Homo sapien
gcagctttaagtttcgactttcagg

SEQ ID NO: 3377795 - DNA, 25 bp, Homo sapien
tcttttgagttggaactgggcagct

SEQ ID NO: 3377796 - DNA, 25 bp, Homo sapien
tccagggtagcctccatcttttgag

SEQ ID NO: 3377797 - DNA, 25 bp, Homo sapien
agggagcagatggaatcaaggatac

SEQ ID NO: 3377798 - DNA, 25 bp, Homo sapien
gctactccacctctcagagatactc

SEQ ID NO: 3377799 - DNA, 25 bp, Homo sapien
tgtttagtatctccagctactccac

SEQ ID NO: 3377800 - DNA, 25 bp, Homo sapien
ctctgtaggaatggctctaatttgt

SEQ ID NO: 3377801 - DNA, 25 bp, Homo sapien
ggctctaatttgtttagtatctcca

SEQ ID NO: 3377802 - DNA, 25 bp, Homo sapien
agtggcagctaggcccacacttttc

SEQ ID NO: 3377803 - DNA, 25 bp, Homo sapien
ccagtggcagctaggcccacacttt

SEQ ID NO: 3377804 - DNA, 25 bp, Homo sapien
cagtggcagctaggcccacactttt

SEQ ID NO: 3377805 - DNA, 25 bp, Homo sapien
gtggcagctaggcccacacttttcc

SEQ ID NO: 3377806 - DNA, 25 bp, Homo sapien
gctgggccacaattgtcatccctca

SEQ ID NO: 3377807 - DNA, 25 bp, Homo sapien
gccacaattgtcatccctcactggg

SEQ ID NO: 3377808 - DNA, 25 bp, Homo sapien
ggaactgccggtggtcgtctgtcca

SEQ ID NO: 3377809 - DNA, 25 bp, Homo sapien
ctgccggtggtcgtctgtccagagt

SEQ ID NO: 3377810 - DNA, 25 bp, Homo sapien
ggtcctggtgaaccccagagtctct

SEQ ID NO: 3377811 - DNA, 25 bp, Homo sapien
cttgtggtcctggtgaaccccagag

SEQ ID NO: 3377812 - DNA, 25 bp, Homo sapien
tgtggtcctggtgaaccccagagtc

SEQ ID NO: 3377813 - DNA, 25 bp, Homo sapien
cccagagtctctggcacgggtcaca

SEQ ID NO: 3377814 - DNA, 25 bp, Homo sapien
aaacaccactgcattcagacctgcc

SEQ ID NO: 3377815 - DNA, 25 bp, Homo sapien
aacaccactgcattcagacctgcct

SEQ ID NO: 3377816 - DNA, 25 bp, Homo sapien
agtcaaatgaaacagtgggaggaga

SEQ ID NO: 3377817 - DNA, 25 bp, Homo sapien
gctagtcaaatgaaacagtgggagg

SEQ ID NO: 3377818 - DNA, 25 bp, Homo sapien
gcaggacctaaatcctctcggaagg

SEQ ID NO: 3377819 - DNA, 25 bp, Homo sapien
tctcattggcaggacctaaatcctc

SEQ ID NO: 3377820 - DNA, 25 bp, Homo sapien
taaatcctctcggaagggttgcctg

SEQ ID NO: 3377821 - DNA, 25 bp, Homo sapien
cctctcggaagggttgcctgcaagg

SEQ ID NO: 3377822 - DNA, 25 bp, Homo sapien
cttgagtcgggatctgaacaatggg

SEQ ID NO: 3377823 - DNA, 25 bp, Homo sapien
caatggggttgctgccacgtatgat

SEQ ID NO: 3377824 - DNA, 25 bp, Homo sapien
tttctctggacacccttgagtcggg

SEQ ID NO: 3377825 - DNA, 25 bp, Homo sapien
tagccacaatctcatagtgaaagga

SEQ ID NO: 3377826 - DNA, 25 bp, Homo sapien
tactctgtacaagtgccaccccaca

SEQ ID NO: 3377827 - DNA, 25 bp, Homo sapien
actctgtacaagtgccaccccacag

SEQ ID NO: 3377828 - DNA, 25 bp, Homo sapien
ctctgtacaagtgccaccccacagc

SEQ ID NO: 3377829 - DNA, 25 bp, Homo sapien
ctactctgtacaagtgccaccccac

SEQ ID NO: 3377830 - DNA, 25 bp, Homo sapien
ccgaagtactgggactgcaccccac

SEQ ID NO: 3377831 - DNA, 25 bp, Homo sapien
agtactgggactgcaccccaccagg

SEQ ID NO: 3377832 - DNA, 25 bp, Homo sapien
gaagtactgggactgcaccccacca

SEQ ID NO: 3377833 - DNA, 25 bp, Homo sapien
cccgaagtactgggactgcacccca

SEQ ID NO: 3377834 - DNA, 25 bp, Homo sapien
agctttaggaactttttgagttgct

SEQ ID NO: 3377835 - DNA, 25 bp, Homo sapien
gctttaggaactttttgagttgctc

SEQ ID NO: 3377836 - DNA, 25 bp, Homo sapien
ttttttgtggagaggaaggtgggca

SEQ ID NO: 3377837 - DNA, 25 bp, Homo sapien
gaggaaggtgggcagagtcttgctc

SEQ ID NO: 3377838 - DNA, 25 bp, Homo sapien
ggagaggaaggtgggcagagtcttg

SEQ ID NO: 3377839 - DNA, 25 bp, Homo sapien
cctcctgacttggcttctcaagtag

SEQ ID NO: 3377840 - DNA, 25 bp, Homo sapien
caacatcatttatacagtacttatg

SEQ ID NO: 3377841 - DNA, 25 bp, Homo sapien
gggtactgttatagtccgcatttta

SEQ ID NO: 3377842 - DNA, 25 bp, Homo sapien
tatacagtacttatgatgtgtcagg

SEQ ID NO: 3377843 - DNA, 25 bp, Homo sapien
gcacccaacctctagactgttttta

SEQ ID NO: 3377844 - DNA, 25 bp, Homo sapien
tgtaagaagatctagtatatttgtg

SEQ ID NO: 3377845 - DNA, 25 bp, Homo sapien
gatctagtatatttgtgatttaagt

SEQ ID NO: 3377846 - DNA, 25 bp, Homo sapien
gaagatctagtatatttgtgattta

SEQ ID NO: 3377847 - DNA, 25 bp, Homo sapien
ttaagtaaaattgcagatgaggcca

SEQ ID NO: 3377848 - DNA, 25 bp, Homo sapien
tggcccccgttaggtgtaagtcata

SEQ ID NO: 3377849 - DNA, 25 bp, Homo sapien
tcgtttcgcaacccatcttttggcc

SEQ ID NO: 3377850 - DNA, 25 bp, Homo sapien
tgaaaacttggaaggcgtagccgct

SEQ ID NO: 3377851 - DNA, 25 bp, Homo sapien
tggcgcggccccgaatgaaaacttg

SEQ ID NO: 3377852 - DNA, 25 bp, Homo sapien
gatgggcctggccaatcctgttttc

SEQ ID NO: 3377853 - DNA, 25 bp, Homo sapien
gcctgcaggaccttcggaaccatct

SEQ ID NO: 3377854 - DNA, 25 bp, Homo sapien
gggtcaaaaggcgagcaagtgtctc

SEQ ID NO: 3377855 - DNA, 25 bp, Homo sapien
tcagccgcttaaacaacgagcagcg

SEQ ID NO: 3377856 - DNA, 25 bp, Homo sapien
gctaatccagaggtgagtgacggct

SEQ ID NO: 3377857 - DNA, 25 bp, Homo sapien
tagtctccgcttcaggctaatccag

SEQ ID NO: 3377858 - DNA, 25 bp, Homo sapien
tcagtgtcccggaggggaatctcga

SEQ ID NO: 3377859 - DNA, 25 bp, Homo sapien
cgtcagtgtcccggaggggaatctc

SEQ ID NO: 3377860 - DNA, 25 bp, Homo sapien
ctcgtcagtgtcccggaggggaatc

SEQ ID NO: 3377861 - DNA, 25 bp, Homo sapien
cagtgtcccggaggggaatctcgat

SEQ ID NO: 3377862 - DNA, 25 bp, Homo sapien
gcgcactgtcaaattcgaacaggct

SEQ ID NO: 3377863 - DNA, 25 bp, Homo sapien
taggaaaagagtagcgcactgtcaa

SEQ ID NO: 3377864 - DNA, 25 bp, Homo sapien
ctggagaggaactttcaagaactcc

SEQ ID NO: 3377865 - DNA, 25 bp, Homo sapien
gagaggaactttcaagaactccttc

SEQ ID NO: 3377866 - DNA, 25 bp, Homo sapien
tcctgtttcagaatactgataactt

SEQ ID NO: 3377867 - DNA, 25 bp, Homo sapien
cagttgtgtgtgttcctgtttcaga

SEQ ID NO: 3377868 - DNA, 25 bp, Homo sapien
tctccctccggtaactgatcgaagt

SEQ ID NO: 3377869 - DNA, 25 bp, Homo sapien
cgccaaagcaatccatatgtgcagt

SEQ ID NO: 3377870 - DNA, 25 bp, Homo sapien
aaattgccatctatacgtgctgctt

SEQ ID NO: 3377871 - DNA, 25 bp, Homo sapien
tacgctgccaatgtatccaagcaag

SEQ ID NO: 3377872 - DNA, 25 bp, Homo sapien
tccgagcctgttgtacataatacgc

SEQ ID NO: 3377873 - DNA, 25 bp, Homo sapien
catggtctctatagtccaaattgcc

SEQ ID NO: 3377874 - DNA, 25 bp, Homo sapien
ttttgctttcatgtgcttttctccc

SEQ ID NO: 3377875 - DNA, 25 bp, Homo sapien
gcttttctcccttcataaatggaaa

SEQ ID NO: 3377876 - DNA, 25 bp, Homo sapien
ttctcccttcataaatggaaagaaa

SEQ ID NO: 3377877 - DNA, 25 bp, Homo sapien
tttgctttcatgtgcttttctccct

SEQ ID NO: 3377878 - DNA, 25 bp, Homo sapien
caccctcaagtaggcagaagcaggc

SEQ ID NO: 3377879 - DNA, 25 bp, Homo sapien
gatccattttgtcaccctcaagtag

SEQ ID NO: 3377880 - DNA, 25 bp, Homo sapien
tcagcttgatccattttgtcaccct

SEQ ID NO: 3377881 - DNA, 25 bp, Homo sapien
ggagactgattgagtacaaaatgaa

SEQ ID NO: 3377882 - DNA, 25 bp, Homo sapien
tggctcttcagaagtgtataaccaa

SEQ ID NO: 3377883 - DNA, 25 bp, Homo sapien
ataactttaagttgtctaagtagag

SEQ ID NO: 3377884 - DNA, 25 bp, Homo sapien
gcacttgtaccactgaacttcaata

SEQ ID NO: 3377885 - DNA, 25 bp, Homo sapien
cagaagtgtataaccaattactctt

SEQ ID NO: 3377886 - DNA, 25 bp, Homo sapien
tggacatcctgggttagtacgcaat

SEQ ID NO: 3377887 - DNA, 25 bp, Homo sapien
tacgcaatgctttcttatagtaagc

SEQ ID NO: 3377888 - DNA, 25 bp, Homo sapien
tatagtaagcaagagctcctctgta

SEQ ID NO: 3377889 - DNA, 25 bp, Homo sapien
tcctctgtaatccttcttgttgaag

SEQ ID NO: 3377890 - DNA, 25 bp, Homo sapien
cagtccaaccaatgctcccacgcat

SEQ ID NO: 3377891 - DNA, 25 bp, Homo sapien
ctcccacgcatttggaattgagttc

SEQ ID NO: 3377892 - DNA, 25 bp, Homo sapien
gaatgccagacgagctttttccagt

SEQ ID NO: 3377893 - DNA, 25 bp, Homo sapien
tctgctgaatgccagacgagctttt

SEQ ID NO: 3377894 - DNA, 25 bp, Homo sapien
aatcataggtttgacgacaaggacc

SEQ ID NO: 3377895 - DNA, 25 bp, Homo sapien
ccatcttgtgactataaggtgacag

SEQ ID NO: 3377896 - DNA, 25 bp, Homo sapien
agttttagataagaggctgtgggcc

SEQ ID NO: 3377897 - DNA, 25 bp, Homo sapien
gaattgtaaccctatcctactagtg

SEQ ID NO: 3377898 - DNA, 25 bp, Homo sapien
cacctttggttttattgatccgagc

SEQ ID NO: 3377899 - DNA, 25 bp, Homo sapien
tcatgattgatctacaccagtccag

SEQ ID NO: 3377900 - DNA, 25 bp, Homo sapien
tatcacaattggaggaacgctatcg

SEQ ID NO: 3377901 - DNA, 25 bp, Homo sapien
tgtgactgatactggtggattaccc

SEQ ID NO: 3377902 - DNA, 25 bp, Homo sapien
ggttcaataccatagggttgctagg

SEQ ID NO: 3377903 - DNA, 25 bp, Homo sapien
agaaaaagtgatttgccaaatggtt

SEQ ID NO: 3377904 - DNA, 25 bp, Homo sapien
gaagctggacaccatttttaatgga

SEQ ID NO: 3377905 - DNA, 25 bp, Homo sapien
gatcaatagtataggctctggaaag

SEQ ID NO: 3377906 - DNA, 25 bp, Homo sapien
acttctgtattatggaatgcatgga

SEQ ID NO: 3377907 - DNA, 25 bp, Homo sapien
aacatggaatgatctagctagctga

SEQ ID NO: 3377908 - DNA, 25 bp, Homo sapien
tattatggaatgcatggagggccag

SEQ ID NO: 3377909 - DNA, 25 bp, Homo sapien
aatgatctagctagctgatagcagc

SEQ ID NO: 3377910 - DNA, 25 bp, Homo sapien
tctgaggcagcatagagagagccga

SEQ ID NO: 3377911 - DNA, 25 bp, Homo sapien
aaaatgggagcacaaaagaggatga

SEQ ID NO: 3377912 - DNA, 25 bp, Homo sapien
taggataagctttcaaaaccttctc

SEQ ID NO: 3377913 - DNA, 25 bp, Homo sapien
caaactgtgtggcttgataatagta

SEQ ID NO: 3377914 - DNA, 25 bp, Homo sapien
ctgtatatcagtctgttctaagatt

SEQ ID NO: 3377915 - DNA, 25 bp, Homo sapien
agcttcaacatcatcgggatactgt

SEQ ID NO: 3377916 - DNA, 25 bp, Homo sapien
catcatcgggatactgttctgtgac

SEQ ID NO: 3377917 - DNA, 25 bp, Homo sapien
tttgtgccaattcaatccaagcttc

SEQ ID NO: 3377918 - DNA, 25 bp, Homo sapien
ggtgtaagtggaagagagacactac

SEQ ID NO: 3377919 - DNA, 25 bp, Homo sapien
gattgacagaaaaaggtgtaagtgg

SEQ ID NO: 3377920 - DNA, 25 bp, Homo sapien
ttgacagaaaaaggtgtaagtggaa

SEQ ID NO: 3377921 - DNA, 25 bp, Homo sapien
attgacagaaaaaggtgtaagtgga

SEQ ID NO: 3377922 - DNA, 25 bp, Homo sapien
tctcctgaaggattcgtgttgctgt

SEQ ID NO: 3377923 - DNA, 25 bp, Homo sapien
tctggaggaacatcggcctgcactt

SEQ ID NO: 3377924 - DNA, 25 bp, Homo sapien
tgctgttccataggctgaaagggca

SEQ ID NO: 3377925 - DNA, 25 bp, Homo sapien
acccacattattgagaatctctgga

SEQ ID NO: 3377926 - DNA, 25 bp, Homo sapien
taatgctcatcgtgttccgcttctg

SEQ ID NO: 3377927 - DNA, 25 bp, Homo sapien
gcttttgcacggtccaatgacgcca

SEQ ID NO: 3377928 - DNA, 25 bp, Homo sapien
tatatgacgtggtaacggaaatggc

SEQ ID NO: 3377929 - DNA, 25 bp, Homo sapien
tatagcctggcgagattatatgacg

SEQ ID NO: 3377930 - DNA, 25 bp, Homo sapien
tcttgtgggaatgaacggatttcat

SEQ ID NO: 3377931 - DNA, 25 bp, Homo sapien
cttgtgggaatgaacggatttcatt

SEQ ID NO: 3377932 - DNA, 25 bp, Homo sapien
ttgtgggaatgaacggatttcatta

SEQ ID NO: 3377933 - DNA, 25 bp, Homo sapien
tctagccatggctcctaggcgcaaa

SEQ ID NO: 3377934 - DNA, 25 bp, Homo sapien
ctgattaatctgaagagcttcctta

SEQ ID NO: 3377935 - DNA, 25 bp, Homo sapien
tctgaagcctcataaaagtttccct

SEQ ID NO: 3377936 - DNA, 25 bp, Homo sapien
tgaagagcttccttaaaccaatctg

SEQ ID NO: 3377937 - DNA, 25 bp, Homo sapien
tatcgaactactaatgctaaagcta

SEQ ID NO: 3377938 - DNA, 25 bp, Homo sapien
taatgctaaagctaagttatacaaa

SEQ ID NO: 3377939 - DNA, 25 bp, Homo sapien
tcgaactactaatgctaaagctaag

SEQ ID NO: 3377940 - DNA, 25 bp, Homo sapien
aatttatcgaactactaatgctaaa

SEQ ID NO: 3377941 - DNA, 25 bp, Homo sapien
aactatattacaacagtggttttct

SEQ ID NO: 3377942 - DNA, 25 bp, Homo sapien
cttcccacaatagctgattactgaa

SEQ ID NO: 3377943 - DNA, 25 bp, Homo sapien
gaagaggtttacaaactatattaca

SEQ ID NO: 3377944 - DNA, 25 bp, Homo sapien
ttgacagagatcaatcatcttccca

SEQ ID NO: 3377945 - DNA, 25 bp, Homo sapien
tgcccaggaccccattcttgttttg

SEQ ID NO: 3377946 - DNA, 25 bp, Homo sapien
tcgatctcgggtgggctgatgtaaa

SEQ ID NO: 3377947 - DNA, 25 bp, Homo sapien
tttggagccacacgttgccaagggc

SEQ ID NO: 3377948 - DNA, 25 bp, Homo sapien
tgccaagggctagcatagaataggt

SEQ ID NO: 3377949 - DNA, 25 bp, Homo sapien
ttgtttgtagatggccagagcacga

SEQ ID NO: 3377950 - DNA, 25 bp, Homo sapien
tgtagatggccagagcacgatcttg

SEQ ID NO: 3377951 - DNA, 25 bp, Homo sapien
gagtacttgtttgtagatggccaga

SEQ ID NO: 3377952 - DNA, 25 bp, Homo sapien
agatggccagagcacgatcttgatg

SEQ ID NO: 3377953 - DNA, 25 bp, Homo sapien
caaattgttatgggtactcaagtct

SEQ ID NO: 3377954 - DNA, 25 bp, Homo sapien
tgttatgggtactcaagtcttataa

SEQ ID NO: 3377955 - DNA, 25 bp, Homo sapien
atgggtactcaagtcttataatcac

SEQ ID NO: 3377956 - DNA, 25 bp, Homo sapien
aattgttatgggtactcaagtctta

SEQ ID NO: 3377957 - DNA, 25 bp, Homo sapien
tctgaacggcgctgatgtactgctt

SEQ ID NO: 3377958 - DNA, 25 bp, Homo sapien
tgggcaaatacatcacgagcttcac

SEQ ID NO: 3377959 - DNA, 25 bp, Homo sapien
agatgtgtgctaagttcagccacac

SEQ ID NO: 3377960 - DNA, 25 bp, Homo sapien
cgagcttcacgaaaatatcctttgt

SEQ ID NO: 3377961 - DNA, 25 bp, Homo sapien
ttgccacacttgaagagggcccggg

SEQ ID NO: 3377962 - DNA, 25 bp, Homo sapien
ttttggtgcttatagaactttcgga

SEQ ID NO: 3377963 - DNA, 25 bp, Homo sapien
ggtgcttatagaactttcggaggca

SEQ ID NO: 3377964 - DNA, 25 bp, Homo sapien
gccaaatagagtacaacttcagtgt

SEQ ID NO: 3377965 - DNA, 25 bp, Homo sapien
ggaccaaggccacattaaacataag

SEQ ID NO: 3377966 - DNA, 25 bp, Homo sapien
aggacagaggtagctaatctttgca

SEQ ID NO: 3377967 - DNA, 25 bp, Homo sapien
aagaactgtatcactgggtgccaca

SEQ ID NO: 3377968 - DNA, 25 bp, Homo sapien
taaacataagaactgtatcactggg

SEQ ID NO: 3377969 - DNA, 25 bp, Homo sapien
gcttctgtagcagcaagggccaaat

SEQ ID NO: 3377970 - DNA, 25 bp, Homo sapien
agcagcaagggccaaatcaaatctc

SEQ ID NO: 3377971 - DNA, 25 bp, Homo sapien
ctggcttctgtagcagcaagggcca

SEQ ID NO: 3377972 - DNA, 25 bp, Homo sapien
ctgtagcagcaagggccaaatcaaa

SEQ ID NO: 3377973 - DNA, 25 bp, Homo sapien
tgtggaaggtcaggaacctctgttc

SEQ ID NO: 3377974 - DNA, 25 bp, Homo sapien
agtttatcataagccaatactgcca

SEQ ID NO: 3377975 - DNA, 25 bp, Homo sapien
gcaaagattagagagtccccaagag

SEQ ID NO: 3377976 - DNA, 25 bp, Homo sapien
tccccaagagaagtgtgaaagactg

SEQ ID NO: 3377977 - DNA, 25 bp, Homo sapien
acatgaatgtaactactatattaaa

SEQ ID NO: 3377978 - DNA, 25 bp, Homo sapien
aacatgaatgtaactactatattaa

SEQ ID NO: 3377979 - DNA, 25 bp, Homo sapien
aacatttcaggtttagagaaacatg

SEQ ID NO: 3377980 - DNA, 25 bp, Homo sapien
tttcaggtttagagaaacatgaatg

SEQ ID NO: 3377981 - DNA, 25 bp, Homo sapien
gaagtttctgccttaacagctcctt

SEQ ID NO: 3377982 - DNA, 25 bp, Homo sapien
agaagtttctgccttaacagctcct

SEQ ID NO: 3377983 - DNA, 25 bp, Homo sapien
ttcatcttgtttgcgtgcccgggcc

SEQ ID NO: 3377984 - DNA, 25 bp, Homo sapien
cccgggccacatggtactgggcctg

SEQ ID NO: 3377985 - DNA, 25 bp, Homo sapien
gtatgcatgcacacaattcattaat

SEQ ID NO: 3377986 - DNA, 25 bp, Homo sapien
tcattaattccagtataactggaaa

SEQ ID NO: 3377987 - DNA, 25 bp, Homo sapien
tccagtataactggaaaatacaaga

SEQ ID NO: 3377988 - DNA, 25 bp, Homo sapien
taaacatacaaagtgtatgcatgca

SEQ ID NO: 3377989 - DNA, 25 bp, Homo sapien
ttggtcttctccacatactgggccc

SEQ ID NO: 3377990 - DNA, 25 bp, Homo sapien
gtcttctccacatactgggcccgct

SEQ ID NO: 3377991 - DNA, 25 bp, Homo sapien
tctccacatactgggcccgctgttc

SEQ ID NO: 3377992 - DNA, 25 bp, Homo sapien
tggtcttctccacatactgggcccg

SEQ ID NO: 3377993 - DNA, 25 bp, Homo sapien
tcttctcttttgttgcttcagtctc

SEQ ID NO: 3377994 - DNA, 25 bp, Homo sapien
ttctcttttgttgcttcagtctcac

SEQ ID NO: 3377995 - DNA, 25 bp, Homo sapien
caccaccaccacctcttttcttctc

SEQ ID NO: 3377996 - DNA, 25 bp, Homo sapien
tttcttctcttttgttgcttcagtc

SEQ ID NO: 3377997 - DNA, 25 bp, Homo sapien
tgcccggcccaaatgaaggatcttt

SEQ ID NO: 3377998 - DNA, 25 bp, Homo sapien
tggctaggcccaattagacttctaa

SEQ ID NO: 3377999 - DNA, 25 bp, Homo sapien
taattgagacgaaagtctcaactgg

SEQ ID NO: 3378000 - DNA, 25 bp, Homo sapien
gtgcccggcccaaatgaaggatctt

SEQ ID NO: 3378001 - DNA, 25 bp, Homo sapien
cttcttgttcactgccactaccctt

SEQ ID NO: 3378002 - DNA, 25 bp, Homo sapien
tataggtaggtcatcatcagtgtca

SEQ ID NO: 3378003 - DNA, 25 bp, Homo sapien
ttcttgttcactgccactacccttt

SEQ ID NO: 3378004 - DNA, 25 bp, Homo sapien
taggtaggtcatcatcagtgtcatc

SEQ ID NO: 3378005 - DNA, 25 bp, Homo sapien
cccaaatatagtcggccaagggttg

SEQ ID NO: 3378006 - DNA, 25 bp, Homo sapien
agggcagtctaggtaagataactga

SEQ ID NO: 3378007 - DNA, 25 bp, Homo sapien
gtgtcttaatgtagtagcaggttct

SEQ ID NO: 3378008 - DNA, 25 bp, Homo sapien
tgggaagggcagtctaggtaagata

SEQ ID NO: 3378009 - DNA, 25 bp, Homo sapien
tgctgagctctcattaatttgcatt

SEQ ID NO: 3378010 - DNA, 25 bp, Homo sapien
tatgcaatgtctgctgattagtcac

SEQ ID NO: 3378011 - DNA, 25 bp, Homo sapien
tatgtatttatgcaatgtctgctga

SEQ ID NO: 3378012 - DNA, 25 bp, Homo sapien
aaactatgtatttatgcaatgtctg

SEQ ID NO: 3378013 - DNA, 25 bp, Homo sapien
tctctgcttttggtggacgtcgttt

SEQ ID NO: 3378014 - DNA, 25 bp, Homo sapien
ctctgcttttggtggacgtcgtttt

SEQ ID NO: 3378015 - DNA, 25 bp, Homo sapien
gatggaggcagacgttctggcttgg

SEQ ID NO: 3378016 - DNA, 25 bp, Homo sapien
gagtcatcacttgatgaaattatgg

SEQ ID NO: 3378017 - DNA, 25 bp, Homo sapien
ttaagtttatcctcatccgaagagt

SEQ ID NO: 3378018 - DNA, 25 bp, Homo sapien
tcctcatccgaagagtcatcacttg

SEQ ID NO: 3378019 - DNA, 25 bp, Homo sapien
gctcagaaccggagggccttctctt

SEQ ID NO: 3378020 - DNA, 25 bp, Homo sapien
tgatctgaccgctgtcttcgtggcc

SEQ ID NO: 3378021 - DNA, 25 bp, Homo sapien
gatctgattcggcacttggagaagc

SEQ ID NO: 3378022 - DNA, 25 bp, Homo sapien
tatcagatcctctctccgattcgtg

SEQ ID NO: 3378023 - DNA, 25 bp, Homo sapien
cacgagagactcaaatattggactc

SEQ ID NO: 3378024 - DNA, 25 bp, Homo sapien
gaatagtctcatttgcacgagagac

SEQ ID NO: 3378025 - DNA, 25 bp, Homo sapien
tcctccagagatgaagcttattgat

SEQ ID NO: 3378026 - DNA, 25 bp, Homo sapien
cacatatgataggtggaattgtacc

SEQ ID NO: 3378027 - DNA, 25 bp, Homo sapien
tcttgaagtgtgctactggagtcct

SEQ ID NO: 3378028 - DNA, 25 bp, Homo sapien
gatctctggataagcttagctgtcc

SEQ ID NO: 3378029 - DNA, 25 bp, Homo sapien
ggattacttctaacattggcatgga

SEQ ID NO: 3378030 - DNA, 25 bp, Homo sapien
gaatttggaggaacatagctacaca

SEQ ID NO: 3378031 - DNA, 25 bp, Homo sapien
gtagacttaatttcaatactataat

SEQ ID NO: 3378032 - DNA, 25 bp, Homo sapien
gacttgataaattaagtagacttaa

SEQ ID NO: 3378033 - DNA, 25 bp, Homo sapien
taagtagacttaatttcaatactat

SEQ ID NO: 3378034 - DNA, 25 bp, Homo sapien
tgacttgataaattaagtagactta

SEQ ID NO: 3378035 - DNA, 25 bp, Homo sapien
atgacttgataaattaagtagactt

SEQ ID NO: 3378036 - DNA, 25 bp, Homo sapien
catgacttgataaattaagtagact

SEQ ID NO: 3378037 - DNA, 25 bp, Homo sapien
tatagtattgaaattaagtctactt

SEQ ID NO: 3378038 - DNA, 25 bp, Homo sapien
tagtattgaaattaagtctacttaa

SEQ ID NO: 3378039 - DNA, 25 bp, Homo sapien
ttaagtctacttaatttatcaagtc

SEQ ID NO: 3378040 - DNA, 25 bp, Homo sapien
agtctacttaatttatcaagtcatg

SEQ ID NO: 3378041 - DNA, 25 bp, Homo sapien
attatagtattgaaattaagtctac

SEQ ID NO: 3378042 - DNA, 25 bp, Homo sapien
taagtctacttaatttatcaagtca

SEQ ID NO: 3378043 - DNA, 25 bp, Homo sapien
gtagacttaatttcaatactataat

SEQ ID NO: 3378044 - DNA, 25 bp, Homo sapien
gacttgataaattaagtagacttaa

SEQ ID NO: 3378045 - DNA, 25 bp, Homo sapien
tcagggcatgaacatgacttgataa

SEQ ID NO: 3378046 - DNA, 25 bp, Homo sapien
tacaagtatataaaatcagggcatg

SEQ ID NO: 3378047 - DNA, 25 bp, Homo sapien
aaatcagggcatgaacatgacttga

SEQ ID NO: 3378048 - DNA, 25 bp, Homo sapien
catgacttgataaattaagtagact

SEQ ID NO: 3378049 - DNA, 25 bp, Homo sapien
tcaagtcatgttcatgccctgattt

SEQ ID NO: 3378050 - DNA, 25 bp, Homo sapien
ttatcaagtcatgttcatgccctga

SEQ ID NO: 3378051 - DNA, 25 bp, Homo sapien
ttaagtctacttaatttatcaagtc

SEQ ID NO: 3378052 - DNA, 25 bp, Homo sapien
catgccctgattttatatacttgta

SEQ ID NO: 3378053 - DNA, 25 bp, Homo sapien
agtctacttaatttatcaagtcatg

SEQ ID NO: 3378054 - DNA, 25 bp, Homo sapien
attatagtattgaaattaagtctac

SEQ ID NO: 3378055 - DNA, 25 bp, Homo sapien
gcacataaagcccattactagaggt

SEQ ID NO: 3378056 - DNA, 25 bp, Homo sapien
ttacggcaacaaccatcaattacag

SEQ ID NO: 3378057 - DNA, 25 bp, Homo sapien
cagcctatgataactggcagcaaag

SEQ ID NO: 3378058 - DNA, 25 bp, Homo sapien
cacttcaagggcattaacgatctct

SEQ ID NO: 3378059 - DNA, 25 bp, Homo sapien
aaaaagacttgtgcacttgcccagg

SEQ ID NO: 3378060 - DNA, 25 bp, Homo sapien
ggtccttgcaatagactgcctctgc

SEQ ID NO: 3378061 - DNA, 25 bp, Homo sapien
tagaggtagaaatacaggcaatata

SEQ ID NO: 3378062 - DNA, 25 bp, Homo sapien
ctagaggtagaaatacaggcaatat

SEQ ID NO: 3378063 - DNA, 25 bp, Homo sapien
atattgcctgtatttctacctctag

SEQ ID NO: 3378064 - DNA, 25 bp, Homo sapien
tatattgcctgtatttctacctcta

SEQ ID NO: 3378065 - DNA, 25 bp, Homo sapien
aactgaatagcaacactgaatactg

SEQ ID NO: 3378066 - DNA, 25 bp, Homo sapien
ctttgctgccagttatcataggctg

SEQ ID NO: 3378067 - DNA, 25 bp, Homo sapien
tgagcctgggcaagtgcacaagtct

SEQ ID NO: 3378068 - DNA, 25 bp, Homo sapien
gcagaggcagtctattgcaaggacc

SEQ ID NO: 3378069 - DNA, 25 bp, Homo sapien
tgagagatcgttaatgcccttgaag

SEQ ID NO: 3378070 - DNA, 25 bp, Homo sapien
ctgtaattgatggttgttgccgtaa

SEQ ID NO: 3378071 - DNA, 25 bp, Homo sapien
gtgtttgagtgcgtggtggttgtgc

SEQ ID NO: 3378072 - DNA, 25 bp, Homo sapien
gtggtgtttgagtgcgtggtggttg

SEQ ID NO: 3378073 - DNA, 25 bp, Homo sapien
tggtgtttgagtgcgtggtggttgt

SEQ ID NO: 3378074 - DNA, 25 bp, Homo sapien
caaccaccacgcactcaaacaccac

SEQ ID NO: 3378075 - DNA, 25 bp, Homo sapien
gcacaaccaccacgcactcaaacac

SEQ ID NO: 3378076 - DNA, 25 bp, Homo sapien
acaaccaccacgcactcaaacacca

SEQ ID NO: 3378077 - DNA, 25 bp, Homo sapien
tgagtgcgtggtggttgtgcactag

SEQ ID NO: 3378078 - DNA, 25 bp, Homo sapien
gtgtttgagtgcgtggtggttgtgc

SEQ ID NO: 3378079 - DNA, 25 bp, Homo sapien
gtttgagtgcgtggtggttgtgcac

SEQ ID NO: 3378080 - DNA, 25 bp, Homo sapien
tttgagtgcgtggtggttgtgcact

SEQ ID NO: 3378081 - DNA, 25 bp, Homo sapien
tgtttgagtgcgtggtggttgtgca

SEQ ID NO: 3378082 - DNA, 25 bp, Homo sapien
tggtgtttgagtgcgtggtggttgt

SEQ ID NO: 3378083 - DNA, 25 bp, Homo sapien
ctagtgcacaaccaccacgcactca

SEQ ID NO: 3378084 - DNA, 25 bp, Homo sapien
tagtgcacaaccaccacgcactcaa

SEQ ID NO: 3378085 - DNA, 25 bp, Homo sapien
gtgcacaaccaccacgcactcaaac

SEQ ID NO: 3378086 - DNA, 25 bp, Homo sapien
tgcacaaccaccacgcactcaaaca

SEQ ID NO: 3378087 - DNA, 25 bp, Homo sapien
gcacaaccaccacgcactcaaacac

SEQ ID NO: 3378088 - DNA, 25 bp, Homo sapien
acaaccaccacgcactcaaacacca

SEQ ID NO: 3378089 - DNA, 25 bp, Homo sapien
cataaagtcctcttaataacgcgtc

SEQ ID NO: 3378090 - DNA, 25 bp, Homo sapien
aaaccgaggtggcatatccttcgac

SEQ ID NO: 3378091 - DNA, 25 bp, Homo sapien
tatccttcgactgtccttgcagctg

SEQ ID NO: 3378092 - DNA, 25 bp, Homo sapien
tatggtagagctggcttagccccta

SEQ ID NO: 3378093 - DNA, 25 bp, Homo sapien
gagaaaaacgtcaagaactccagca

SEQ ID NO: 3378094 - DNA, 25 bp, Homo sapien
gggatgagccaagccataaagttag

SEQ ID NO: 3378095 - DNA, 25 bp, Homo sapien
taactttatggcttggctcatccct

SEQ ID NO: 3378096 - DNA, 25 bp, Homo sapien
tctgggcaaattcagttaaactaac

SEQ ID NO: 3378097 - DNA, 25 bp, Homo sapien
gacgcgttattaagaggactttatg

SEQ ID NO: 3378098 - DNA, 25 bp, Homo sapien
ttaatgcagatgaggtacatttgcc

SEQ ID NO: 3378099 - DNA, 25 bp, Homo sapien
caaggacagtcgaaggatatgccac

SEQ ID NO: 3378100 - DNA, 25 bp, Homo sapien
tctaccataaccagagtcagggact

SEQ ID NO: 3378101 - DNA, 25 bp, Homo sapien
cttgacgaggccagcgactagatga

SEQ ID NO: 3378102 - DNA, 25 bp, Homo sapien
caggcgcaagttagggaagtgcttc

SEQ ID NO: 3378103 - DNA, 25 bp, Homo sapien
tgtacaggactagcacttgcaggcg

SEQ ID NO: 3378104 - DNA, 25 bp, Homo sapien
cctgggaacaaaagagcggagcatt

SEQ ID NO: 3378105 - DNA, 25 bp, Homo sapien
aaattccccggtgttcaaggatgca

SEQ ID NO: 3378106 - DNA, 25 bp, Homo sapien
tagatgaggtctctccgaaagctct

SEQ ID NO: 3378107 - DNA, 25 bp, Homo sapien
aatgctccgctcttttgttcccagg

SEQ ID NO: 3378108 - DNA, 25 bp, Homo sapien
gctgaagagctttcggagagacctc

SEQ ID NO: 3378109 - DNA, 25 bp, Homo sapien
ttcctgcttggagaacaaagagctg

SEQ ID NO: 3378110 - DNA, 25 bp, Homo sapien
gaagcacttccctaacttgcgcctg

SEQ ID NO: 3378111 - DNA, 25 bp, Homo sapien
tagtcgctggcctcgtcaaggcagt

SEQ ID NO: 3378112 - DNA, 25 bp, Homo sapien
gcaagtgctagtcctgtacacccgg

SEQ ID NO: 3378113 - DNA, 25 bp, Homo sapien
tcttcccatattcccggtgagaaaa

SEQ ID NO: 3378114 - DNA, 25 bp, Homo sapien
tcccatattcccggtgagaaaacga

SEQ ID NO: 3378115 - DNA, 25 bp, Homo sapien
catattcccggtgagaaaacgaggt

SEQ ID NO: 3378116 - DNA, 25 bp, Homo sapien
ccatattcccggtgagaaaacgagg

SEQ ID NO: 3378117 - DNA, 25 bp, Homo sapien
agtataaatagttcaacttgccggc

SEQ ID NO: 3378118 - DNA, 25 bp, Homo sapien
aaaagcttaatcctatttcttatgg

SEQ ID NO: 3378119 - DNA, 25 bp, Homo sapien
caacttgccggctttgaaaagctta

SEQ ID NO: 3378120 - DNA, 25 bp, Homo sapien
aatagttcaacttgccggctttgaa

SEQ ID NO: 3378121 - DNA, 25 bp, Homo sapien
gactattctatagcaaagatctaca

SEQ ID NO: 3378122 - DNA, 25 bp, Homo sapien
ggaccaggtgctctaataccaagag

SEQ ID NO: 3378123 - DNA, 25 bp, Homo sapien
taacagtaaagtagggaatggtgac

SEQ ID NO: 3378124 - DNA, 25 bp, Homo sapien
gttaaaaaccttcagagccacacca

SEQ ID NO: 3378125 - DNA, 25 bp, Homo sapien
caggcatgtgggacacaggctaatt

SEQ ID NO: 3378126 - DNA, 25 bp, Homo sapien
caatgaactaaaagctaaattccag

SEQ ID NO: 3378127 - DNA, 25 bp, Homo sapien
tggaaaactagcagacttaagtggg

SEQ ID NO: 3378128 - DNA, 25 bp, Homo sapien
taagataggatttcgctctgttacc

SEQ ID NO: 3378129 - DNA, 25 bp, Homo sapien
gagaggcctaacataccaacattgt

SEQ ID NO: 3378130 - DNA, 25 bp, Homo sapien
tacaatgggtaccacagaaacacaa

SEQ ID NO: 3378131 - DNA, 25 bp, Homo sapien
gaacaattacatgccagcaaactgg

SEQ ID NO: 3378132 - DNA, 25 bp, Homo sapien
tgcaagtatgtggaattaacactcc

SEQ ID NO: 3378133 - DNA, 25 bp, Homo sapien
gtggctcccgaaagcaccagtagtc

SEQ ID NO: 3378134 - DNA, 25 bp, Homo sapien
agtagcacgggactatgagagcctg

SEQ ID NO: 3378135 - DNA, 25 bp, Homo sapien
taaaccagcttcattagtagcacgg

SEQ ID NO: 3378136 - DNA, 25 bp, Homo sapien
tcaggaatacccaagcattgcaagg

SEQ ID NO: 3378137 - DNA, 25 bp, Homo sapien
taagtccagagaaacagtacctaac

SEQ ID NO: 3378138 - DNA, 25 bp, Homo sapien
gtatctcgcaaaacttggaactgtg

SEQ ID NO: 3378139 - DNA, 25 bp, Homo sapien
gaattgttgctagccctgaagggac

SEQ ID NO: 3378140 - DNA, 25 bp, Homo sapien
acataccatgagacagggctgataa

SEQ ID NO: 3378141 - DNA, 25 bp, Homo sapien
ttacctgaggagattggtcactggg

SEQ ID NO: 3378142 - DNA, 25 bp, Homo sapien
gtcattagacattgtttacctgagg

SEQ ID NO: 3378143 - DNA, 25 bp, Homo sapien
caagacctagttttagagacattga

SEQ ID NO: 3378144 - DNA, 25 bp, Homo sapien
tgattgtagtgaaagaactgcttca

SEQ ID NO: 3378145 - DNA, 25 bp, Homo sapien
tctggcaacgagagggatcctgatc

SEQ ID NO: 3378146 - DNA, 25 bp, Homo sapien
ctgagggtattgttcccagccggaa

SEQ ID NO: 3378147 - DNA, 25 bp, Homo sapien
ccagtcgtggcaatctgtgggcagc

SEQ ID NO: 3378148 - DNA, 25 bp, Homo sapien
tgatcttttacgtgaaccagcagct

SEQ ID NO: 3378149 - DNA, 25 bp, Homo sapien
agccgctccgctatcacctaggtag

SEQ ID NO: 3378150 - DNA, 25 bp, Homo sapien
ggaatctgcattctcgacaagcgtc

SEQ ID NO: 3378151 - DNA, 25 bp, Homo sapien
tatcacctaggtagcacggccgctg

SEQ ID NO: 3378152 - DNA, 25 bp, Homo sapien
aatctgcattctcgacaagcgtccg

SEQ ID NO: 3378153 - DNA, 25 bp, Homo sapien
tgataaatgcacagcagccgaggtt

SEQ ID NO: 3378154 - DNA, 25 bp, Homo sapien
agctgcagcccacaaaaagagtatt

SEQ ID NO: 3378155 - DNA, 25 bp, Homo sapien
gagggcgccactgtgatgcaaagac

SEQ ID NO: 3378156 - DNA, 25 bp, Homo sapien
agttggcagctgtgtaaactggacc

SEQ ID NO: 3378157 - DNA, 25 bp, Homo sapien
gaagggcacagaaccatggcttaaa

SEQ ID NO: 3378158 - DNA, 25 bp, Homo sapien
tgcagtgcctgaaaatacgatccaa

SEQ ID NO: 3378159 - DNA, 25 bp, Homo sapien
gaagcgtatctatttcaaggtgcct

SEQ ID NO: 3378160 - DNA, 25 bp, Homo sapien
taagaaaaacgaaagctgcccttgc

SEQ ID NO: 3378161 - DNA, 25 bp, Homo sapien
aagactaccctgggcaacatgacga

SEQ ID NO: 3378162 - DNA, 25 bp, Homo sapien
actaccctgggcaacatgacgagac

SEQ ID NO: 3378163 - DNA, 25 bp, Homo sapien
tcaagactaccctgggcaacatgac

SEQ ID NO: 3378164 - DNA, 25 bp, Homo sapien
gactaccctgggcaacatgacgaga

SEQ ID NO: 3378165 - DNA, 25 bp, Homo sapien
gagaacttttttgtggtatgctcaa

SEQ ID NO: 3378166 - DNA, 25 bp, Homo sapien
ggatgggaggacacaaaatgagaac

SEQ ID NO: 3378167 - DNA, 25 bp, Homo sapien
aatgagaacttttttgtggtatgct

SEQ ID NO: 3378168 - DNA, 25 bp, Homo sapien
gaacttttttgtggtatgctcaatt

SEQ ID NO: 3378169 - DNA, 25 bp, Homo sapien
gctaactaaatccaatcacatatca

SEQ ID NO: 3378170 - DNA, 25 bp, Homo sapien
tacagaccagtatccctgatagaca

SEQ ID NO: 3378171 - DNA, 25 bp, Homo sapien
gccatagacgacaaactcacactga

SEQ ID NO: 3378172 - DNA, 25 bp, Homo sapien
tgtgaagccagtatcatccaaatac

SEQ ID NO: 3378173 - DNA, 25 bp, Homo sapien
aagtaaatgactcgcacagatggtg

SEQ ID NO: 3378174 - DNA, 25 bp, Homo sapien
aacagtttgaggacaactagcccca

SEQ ID NO: 3378175 - DNA, 25 bp, Homo sapien
tgttaaagcaccttctggccaggcg

SEQ ID NO: 3378176 - DNA, 25 bp, Homo sapien
tagtgacccctattggcagaactga

SEQ ID NO: 3378177 - DNA, 25 bp, Homo sapien
gcatagatgtcatcccactcacagt

SEQ ID NO: 3378178 - DNA, 25 bp, Homo sapien
cactcacagtccttgttgtcatctg

SEQ ID NO: 3378179 - DNA, 25 bp, Homo sapien
taccacaatggtaaaatgcagcagc

SEQ ID NO: 3378180 - DNA, 25 bp, Homo sapien
cctgtaaggtttccagtgcatagat

SEQ ID NO: 3378181 - DNA, 25 bp, Homo sapien
atcaagacaatgcatgcacaggagg

SEQ ID NO: 3378182 - DNA, 25 bp, Homo sapien
ctcagggtcgccatcacggtcctac

SEQ ID NO: 3378183 - DNA, 25 bp, Homo sapien
cgtacatctactctccttctaaaat

SEQ ID NO: 3378184 - DNA, 25 bp, Homo sapien
cccgcagtgccctcaggcttgctag

SEQ ID NO: 3378185 - DNA, 25 bp, Homo sapien
tgcttttgccagaaggagaagcctc

SEQ ID NO: 3378186 - DNA, 25 bp, Homo sapien
ttaaattcaggaatatgcttttgcc

SEQ ID NO: 3378187 - DNA, 25 bp, Homo sapien
ctcagtaaagcctctgatgccgctt

SEQ ID NO: 3378188 - DNA, 25 bp, Homo sapien
ttttgccagaaggagaagcctcctg

SEQ ID NO: 3378189 - DNA, 25 bp, Homo sapien
acaatttggaagctgcctagtggca

SEQ ID NO: 3378190 - DNA, 25 bp, Homo sapien
cagcttaggccttggctggctgagc

SEQ ID NO: 3378191 - DNA, 25 bp, Homo sapien
gatgagctgcccctgacagcaagac

SEQ ID NO: 3378192 - DNA, 25 bp, Homo sapien
tgagcaataaagcaggccctcttgg

SEQ ID NO: 3378193 - DNA, 25 bp, Homo sapien
ttaagcgaaggcctcacagatcatg

SEQ ID NO: 3378194 - DNA, 25 bp, Homo sapien
taacatttgctattgagcgccaggc

SEQ ID NO: 3378195 - DNA, 25 bp, Homo sapien
tatgaagacgttcacccagcaggac

SEQ ID NO: 3378196 - DNA, 25 bp, Homo sapien
caggcatcgtcctacaggcttcgaa

SEQ ID NO: 3378197 - DNA, 25 bp, Homo sapien
gtccctggagacagcacaagtcaag

SEQ ID NO: 3378198 - DNA, 25 bp, Homo sapien
cacaagtcaaggcacttgaggactc

SEQ ID NO: 3378199 - DNA, 25 bp, Homo sapien
tgctgctccaaatagcgcagacaag

SEQ ID NO: 3378200 - DNA, 25 bp, Homo sapien
acttgaggactctcagttgtgtgta

SEQ ID NO: 3378201 - DNA, 25 bp, Homo sapien
cctccctatctcattgaggtcagag

SEQ ID NO: 3378202 - DNA, 25 bp, Homo sapien
ctccctatctcattgaggtcagagt

SEQ ID NO: 3378203 - DNA, 25 bp, Homo sapien
gacagctctgtcccgaactcagttt

SEQ ID NO: 3378204 - DNA, 25 bp, Homo sapien
cagctctgtcccgaactcagtttct

SEQ ID NO: 3378205 - DNA, 25 bp, Homo sapien
ggacagctctgtcccgaactcagtt

SEQ ID NO: 3378206 - DNA, 25 bp, Homo sapien
gctctgtcccgaactcagtttctga

SEQ ID NO: 3378207 - DNA, 25 bp, Homo sapien
cctggtcatgcacccgggcattggc

SEQ ID NO: 3378208 - DNA, 25 bp, Homo sapien
ttccctggtcatgcacccgggcatt

SEQ ID NO: 3378209 - DNA, 25 bp, Homo sapien
aggtcctgatcctcggagtccctca

SEQ ID NO: 3378210 - DNA, 25 bp, Homo sapien
tggcctcaacttaggtcctgatcct

SEQ ID NO: 3378211 - DNA, 25 bp, Homo sapien
cagatttctggctccggttcccagc

SEQ ID NO: 3378212 - DNA, 25 bp, Homo sapien
gatttctggctccggttcccagctg

SEQ ID NO: 3378213 - DNA, 25 bp, Homo sapien
agatttctggctccggttcccagct

SEQ ID NO: 3378214 - DNA, 25 bp, Homo sapien
ctgaggggtgaaccagggacagcct

SEQ ID NO: 3378215 - DNA, 25 bp, Homo sapien
tcatccctgtgttttggcctgttcc

SEQ ID NO: 3378216 - DNA, 25 bp, Homo sapien
atccacagaacttcatccctgtgtt

SEQ ID NO: 3378217 - DNA, 25 bp, Homo sapien
catccctgtgttttggcctgttcca

SEQ ID NO: 3378218 - DNA, 25 bp, Homo sapien
tccctgtgttttggcctgttccagg

SEQ ID NO: 3378219 - DNA, 25 bp, Homo sapien
gaatgtttgacttttcataagccat

SEQ ID NO: 3378220 - DNA, 25 bp, Homo sapien
gccaacgggaagagaagaatgtttg

SEQ ID NO: 3378221 - DNA, 25 bp, Homo sapien
ctgccaacgggaagagaagaatgtt

SEQ ID NO: 3378222 - DNA, 25 bp, Homo sapien
aagaatgtttgacttttcataagcc

SEQ ID NO: 3378223 - DNA, 25 bp, Homo sapien
acggagttactcagctccccagtca

SEQ ID NO: 3378224 - DNA, 25 bp, Homo sapien
gacggagttactcagctccccagtc

SEQ ID NO: 3378225 - DNA, 25 bp, Homo sapien
gatgtagaagcccaccactgtcact

SEQ ID NO: 3378226 - DNA, 25 bp, Homo sapien
agctggatggagaccctcttcgcaa

SEQ ID NO: 3378227 - DNA, 25 bp, Homo sapien
tcgcaacaccaatgactgaaccact

SEQ ID NO: 3378228 - DNA, 25 bp, Homo sapien
ctgctgctatacaccatcactgtga

SEQ ID NO: 3378229 - DNA, 25 bp, Homo sapien
actcagtgctcggtttttgactttc

SEQ ID NO: 3378230 - DNA, 25 bp, Homo sapien
agagaaagactcagtgctcggtttt

SEQ ID NO: 3378231 - DNA, 25 bp, Homo sapien
ttgtgaaatagttcagtagtaatag

SEQ ID NO: 3378232 - DNA, 25 bp, Homo sapien
aatgggtttgtgaaatagttcagta

SEQ ID NO: 3378233 - DNA, 25 bp, Homo sapien
ctggaatgcaatctgggattcttca

SEQ ID NO: 3378234 - DNA, 25 bp, Homo sapien
ttcttcagaacgtgtccctccagtt

SEQ ID NO: 3378235 - DNA, 25 bp, Homo sapien
ggaatgcaatctgggattcttcaga

SEQ ID NO: 3378236 - DNA, 25 bp, Homo sapien
tgggattcttcagaacgtgtccctc

SEQ ID NO: 3378237 - DNA, 25 bp, Homo sapien
tcagggtccagagtgaaggagcttc

SEQ ID NO: 3378238 - DNA, 25 bp, Homo sapien
cactgagggtcattatggaggttcc

SEQ ID NO: 3378239 - DNA, 25 bp, Homo sapien
caattgcaagcagttggtccccagg

SEQ ID NO: 3378240 - DNA, 25 bp, Homo sapien
ccctcctggcgcgtagatgtgttta

SEQ ID NO: 3378241 - DNA, 25 bp, Homo sapien
cactggcagttattctgcatggaaa

SEQ ID NO: 3378242 - DNA, 25 bp, Homo sapien
gattttcctaccagcagggaacaag

SEQ ID NO: 3378243 - DNA, 25 bp, Homo sapien
caggagtattctggtcccactggca

SEQ ID NO: 3378244 - DNA, 25 bp, Homo sapien
gcttcccatgcagattttcctacca

SEQ ID NO: 3378245 - DNA, 25 bp, Homo sapien
cattcaattgtagagggatgctcaa

SEQ ID NO: 3378246 - DNA, 25 bp, Homo sapien
agtagaccctcgatacatgctggtg

SEQ ID NO: 3378247 - DNA, 25 bp, Homo sapien
gaagtgaaccattaattccgcctgg

SEQ ID NO: 3378248 - DNA, 25 bp, Homo sapien
tcagcgatagataacagtagaccct

SEQ ID NO: 3378249 - DNA, 25 bp, Homo sapien
ctttcttttcaatggaaatctgatc

SEQ ID NO: 3378250 - DNA, 25 bp, Homo sapien
tcaatggaaatctgatcatcagcat

SEQ ID NO: 3378251 - DNA, 25 bp, Homo sapien
tttcaatggaaatctgatcatcagc

SEQ ID NO: 3378252 - DNA, 25 bp, Homo sapien
tcttttcaatggaaatctgatcatc

SEQ ID NO: 3378253 - DNA, 25 bp, Homo sapien
ttctgacaattacaacaacaccccc

SEQ ID NO: 3378254 - DNA, 25 bp, Homo sapien
tttctgacaattacaacaacacccc

SEQ ID NO: 3378255 - DNA, 25 bp, Homo sapien
tgacaattacaacaacacccccacc

SEQ ID NO: 3378256 - DNA, 25 bp, Homo sapien
tctgacaattacaacaacaccccca

SEQ ID NO: 3378257 - DNA, 25 bp, Homo sapien
aagcggagactgttggaagactgta

SEQ ID NO: 3378258 - DNA, 25 bp, Homo sapien
tagcctgagaaacgttcatctgtct

SEQ ID NO: 3378259 - DNA, 25 bp, Homo sapien
ttagggttcgctcggctcggactag

SEQ ID NO: 3378260 - DNA, 25 bp, Homo sapien
gactgtagtctggaaggtttagact

SEQ ID NO: 3378261 - DNA, 25 bp, Homo sapien
tttagcttcctcgcaataggttaga

SEQ ID NO: 3378262 - DNA, 25 bp, Homo sapien
tttttagcttcctcgcaataggtta

SEQ ID NO: 3378263 - DNA, 25 bp, Homo sapien
ttttagcttcctcgcaataggttag

SEQ ID NO: 3378264 - DNA, 25 bp, Homo sapien
gtaaggccttcaacaagctcaccaa

SEQ ID NO: 3378265 - DNA, 25 bp, Homo sapien
aaggccaagacgaacactacctcca

SEQ ID NO: 3378266 - DNA, 25 bp, Homo sapien
tctcccaggtagtcaaaggccaaga

SEQ ID NO: 3378267 - DNA, 25 bp, Homo sapien
gaataactacaaattagcagggtgg

SEQ ID NO: 3378268 - DNA, 25 bp, Homo sapien
cccaacctaagggcaagctgggcct

SEQ ID NO: 3378269 - DNA, 25 bp, Homo sapien
caacctaagggcaagctgggcctga

SEQ ID NO: 3378270 - DNA, 25 bp, Homo sapien
aacctaagggcaagctgggcctgag

SEQ ID NO: 3378271 - DNA, 25 bp, Homo sapien
agcccccaacctaagggcaagctgg

SEQ ID NO: 3378272 - DNA, 25 bp, Homo sapien
tggtctgttggtcttttccccatac

SEQ ID NO: 3378273 - DNA, 25 bp, Homo sapien
aagagaggaacatgcgtcaggacta

SEQ ID NO: 3378274 - DNA, 25 bp, Homo sapien
taacatctgctctcaagatgctcat

SEQ ID NO: 3378275 - DNA, 25 bp, Homo sapien
cgtcaggactactgtggtctgttgg

SEQ ID NO: 3378276 - DNA, 25 bp, Homo sapien
cttagacactcggagttgttgcttc

SEQ ID NO: 3378277 - DNA, 25 bp, Homo sapien
agacactcggagttgttgcttccag

SEQ ID NO: 3378278 - DNA, 25 bp, Homo sapien
tgtcttagacactcggagttgttgc

SEQ ID NO: 3378279 - DNA, 25 bp, Homo sapien
cttgtcttagacactcggagttgtt

SEQ ID NO: 3378280 - DNA, 25 bp, Homo sapien
caaatggttgatgatacgtaggtac

SEQ ID NO: 3378281 - DNA, 25 bp, Homo sapien
gagagagtaagttcaaggcaagtcc

SEQ ID NO: 3378282 - DNA, 25 bp, Homo sapien
tctggcacctttaacgatggcctgc

SEQ ID NO: 3378283 - DNA, 25 bp, Homo sapien
agttcaaggcaagtccaaatggttg

SEQ ID NO: 3378284 - DNA, 25 bp, Homo sapien
tggattaaatgtgctccaacaaggt

SEQ ID NO: 3378285 - DNA, 25 bp, Homo sapien
atgtgctccaacaaggttccccagg

SEQ ID NO: 3378286 - DNA, 25 bp, Homo sapien
tggtcttcttgttagcagggggcat

SEQ ID NO: 3378287 - DNA, 25 bp, Homo sapien
caactggattaaatgtgctccaaca

SEQ ID NO: 3378288 - DNA, 25 bp, Homo sapien
tctgctggacactctctgatttgtc

SEQ ID NO: 3378289 - DNA, 25 bp, Homo sapien
gatcactatctgctggacactctct

SEQ ID NO: 3378290 - DNA, 25 bp, Homo sapien
caccctgatcactatctgctggaca

SEQ ID NO: 3378291 - DNA, 25 bp, Homo sapien
accaccctgatcactatctgctgga

SEQ ID NO: 3378292 - DNA, 25 bp, Homo sapien
ggtgacctgcaagtggaccaagcct

SEQ ID NO: 3378293 - DNA, 25 bp, Homo sapien
tatgatgaccacagaaaagttgacc

SEQ ID NO: 3378294 - DNA, 25 bp, Homo sapien
tctcccaagtgggtcagtgtttgga

SEQ ID NO: 3378295 - DNA, 25 bp, Homo sapien
agatctggtaccatgctgcctcatt

SEQ ID NO: 3378296 - DNA, 25 bp, Homo sapien
tcagaaacgttcttcgccaatcaca

SEQ ID NO: 3378297 - DNA, 25 bp, Homo sapien
aacgttcttcgccaatcacacaggg

SEQ ID NO: 3378298 - DNA, 25 bp, Homo sapien
ggcttcccagttgctagtcccattt

SEQ ID NO: 3378299 - DNA, 25 bp, Homo sapien
gccaatcacacagggcttcccagtt

SEQ ID NO: 3378300 - DNA, 25 bp, Homo sapien
tgttccagaaatcccacttctagga

SEQ ID NO: 3378301 - DNA, 25 bp, Homo sapien
ttgttccagaaatcccacttctagg

SEQ ID NO: 3378302 - DNA, 25 bp, Homo sapien
tttgttccagaaatcccacttctag

SEQ ID NO: 3378303 - DNA, 25 bp, Homo sapien
cttttgttccagaaatcccacttct

SEQ ID NO: 3378304 - DNA, 25 bp, Homo sapien
ctagatgacatagatagactccatc

SEQ ID NO: 3378305 - DNA, 25 bp, Homo sapien
cctagatgacatagatagactccat

SEQ ID NO: 3378306 - DNA, 25 bp, Homo sapien
tcacagtttctgatctgagaggagc

SEQ ID NO: 3378307 - DNA, 25 bp, Homo sapien
ctgccaggttttctcgcttgtccag

SEQ ID NO: 3378308 - DNA, 25 bp, Homo sapien
tttacaatgttggaggcataatcac

SEQ ID NO: 3378309 - DNA, 25 bp, Homo sapien
taattacccgcacgcatccattgtc

SEQ ID NO: 3378310 - DNA, 25 bp, Homo sapien
tatactaatgtcattgacagcctgg

SEQ ID NO: 3378311 - DNA, 25 bp, Homo sapien
caggagagactaaggtggcaaaaac

SEQ ID NO: 3378312 - DNA, 25 bp, Homo sapien
aaagctccgtgagtaagcccagcac

SEQ ID NO: 3378313 - DNA, 25 bp, Homo sapien
agaaagctccgtgagtaagcccagc

SEQ ID NO: 3378314 - DNA, 25 bp, Homo sapien
gctccgtgagtaagcccagcaccag

SEQ ID NO: 3378315 - DNA, 25 bp, Homo sapien
tcccagaaagctccgtgagtaagcc

SEQ ID NO: 3378316 - DNA, 25 bp, Homo sapien
agaagtgcagaatgtattcttccga

SEQ ID NO: 3378317 - DNA, 25 bp, Homo sapien
tttcccatgttgaagtttatttgac

SEQ ID NO: 3378318 - DNA, 25 bp, Homo sapien
tcaatccctggagtttatcctgaag

SEQ ID NO: 3378319 - DNA, 25 bp, Homo sapien
ttatcctgaagtctctggtaagaga

SEQ ID NO: 3378320 - DNA, 25 bp, Homo sapien
tccccatcatgcttggaaaaacctc

SEQ ID NO: 3378321 - DNA, 25 bp, Homo sapien
gataccagtatctgtcctccctaga

SEQ ID NO: 3378322 - DNA, 25 bp, Homo sapien
tgtgccctggctagtttgctttctc

SEQ ID NO: 3378323 - DNA, 25 bp, Homo sapien
aggccaggacagcttttggcaagct

SEQ ID NO: 3378324 - DNA, 25 bp, Homo sapien
tgctgtgtatcccatcctcgctcca

SEQ ID NO: 3378325 - DNA, 25 bp, Homo sapien
catcctcgctccaaacttgagccca

SEQ ID NO: 3378326 - DNA, 25 bp, Homo sapien
ataactggctgtcttccctgctgtg

SEQ ID NO: 3378327 - DNA, 25 bp, Homo sapien
cctgtccccataactggctgtcttc

SEQ ID NO: 3378328 - DNA, 25 bp, Homo sapien
ctctgaggctctttctgagcccagt

SEQ ID NO: 3378329 - DNA, 25 bp, Homo sapien
tctgaggctctttctgagcccagtt

SEQ ID NO: 3378330 - DNA, 25 bp, Homo sapien
cagctctgaggctctttctgagccc

SEQ ID NO: 3378331 - DNA, 25 bp, Homo sapien
agctctgaggctctttctgagccca

SEQ ID NO: 3378332 - DNA, 25 bp, Homo sapien
acgcctggatatgtgagcccgagca

SEQ ID NO: 3378333 - DNA, 25 bp, Homo sapien
taccagtgtgttcatttgcagccag

SEQ ID NO: 3378334 - DNA, 25 bp, Homo sapien
ggatcggcgtctaaaccagttacca

SEQ ID NO: 3378335 - DNA, 25 bp, Homo sapien
agggctctcagtgccaagacgcctg

SEQ ID NO: 3378336 - DNA, 25 bp, Homo sapien
gaaaacaagtaagcagagggctggc

SEQ ID NO: 3378337 - DNA, 25 bp, Homo sapien
gagagtagagctccaaagtgaaatt

SEQ ID NO: 3378338 - DNA, 25 bp, Homo sapien
cctattgtaacgcatgggcaagcca

SEQ ID NO: 3378339 - DNA, 25 bp, Homo sapien
ctgggcccatgttcacagagaaaac

SEQ ID NO: 3378340 - DNA, 25 bp, Homo sapien
aggctcagggagaccgcatctctga

SEQ ID NO: 3378341 - DNA, 25 bp, Homo sapien
tgcactttccataggctcagggaga

SEQ ID NO: 3378342 - DNA, 25 bp, Homo sapien
gagaccgcatctctgattgatgtca

SEQ ID NO: 3378343 - DNA, 25 bp, Homo sapien
tgtctccttggagctattatttctc

SEQ ID NO: 3378344 - DNA, 25 bp, Homo sapien
ataaagcacgggcttttgtgctgcc

SEQ ID NO: 3378345 - DNA, 25 bp, Homo sapien
gacattgactgacccctcttcataa

SEQ ID NO: 3378346 - DNA, 25 bp, Homo sapien
atcaaaacgacattgactgacccct

SEQ ID NO: 3378347 - DNA, 25 bp, Homo sapien
gacccctcttcataaagcacgggct

SEQ ID NO: 3378348 - DNA, 25 bp, Homo sapien
cgagttaggctgtttctctgatggc

SEQ ID NO: 3378349 - DNA, 25 bp, Homo sapien
cagccttttgagacaacgagttagg

SEQ ID NO: 3378350 - DNA, 25 bp, Homo sapien
aacctggacaggacccaagggtcag

SEQ ID NO: 3378351 - DNA, 25 bp, Homo sapien
cagagtcacaggaatgcctgaaatc

SEQ ID NO: 3378352 - DNA, 25 bp, Homo sapien
ctttgtatactcccagtgcagacca

SEQ ID NO: 3378353 - DNA, 25 bp, Homo sapien
tctttgtatactcccagtgcagacc

SEQ ID NO: 3378354 - DNA, 25 bp, Homo sapien
ttgtatactcccagtgcagaccaca

SEQ ID NO: 3378355 - DNA, 25 bp, Homo sapien
tttgtatactcccagtgcagaccac

SEQ ID NO: 3378356 - DNA, 25 bp, Homo sapien
tgactatcaggcgaacaaggaaggt

SEQ ID NO: 3378357 - DNA, 25 bp, Homo sapien
cctgggatcaacatggaacttttcc

SEQ ID NO: 3378358 - DNA, 25 bp, Homo sapien
caggcgaacaaggaaggtaaggaat

SEQ ID NO: 3378359 - DNA, 25 bp, Homo sapien
ccctgggatcaacatggaacttttc

SEQ ID NO: 3378360 - DNA, 25 bp, Homo sapien
gactgtgatgttaaggttcttgtta

SEQ ID NO: 3378361 - DNA, 25 bp, Homo sapien
tctggctcagataatcaagagctga

SEQ ID NO: 3378362 - DNA, 25 bp, Homo sapien
tgctcttcaaaccagtctgtctggc

SEQ ID NO: 3378363 - DNA, 25 bp, Homo sapien
gtctgtctggctcagataatcaaga

SEQ ID NO: 3378364 - DNA, 25 bp, Homo sapien
gccaccaatgggccagacagggaag

SEQ ID NO: 3378365 - DNA, 25 bp, Homo sapien
aatgagagccaccaatgggccagac

SEQ ID NO: 3378366 - DNA, 25 bp, Homo sapien
tgagagccaccaatgggccagacag

SEQ ID NO: 3378367 - DNA, 25 bp, Homo sapien
agagccaccaatgggccagacaggg

SEQ ID NO: 3378368 - DNA, 25 bp, Homo sapien
ggaacagacgtttcaggtcctgaaa

SEQ ID NO: 3378369 - DNA, 25 bp, Homo sapien
aggagcctctgaaaactcggagtat

SEQ ID NO: 3378370 - DNA, 25 bp, Homo sapien
gagcctctgaaaactcggagtatct

SEQ ID NO: 3378371 - DNA, 25 bp, Homo sapien
ctgtggatgggaacagacgtttcag

SEQ ID NO: 3378372 - DNA, 25 bp, Homo sapien
tttatgagcaaaccaagttatccat

SEQ ID NO: 3378373 - DNA, 25 bp, Homo sapien
catttttatgttctgcagctatcaa

SEQ ID NO: 3378374 - DNA, 25 bp, Homo sapien
gctttcagtgcttcaacatgccttg

SEQ ID NO: 3378375 - DNA, 25 bp, Homo sapien
catgccttgacttattcagaatctg

SEQ ID NO: 3378376 - DNA, 25 bp, Homo sapien
ggaagcaccattttcagaatgtcta

SEQ ID NO: 3378377 - DNA, 25 bp, Homo sapien
ttgatacggacaaacaacctgttcc

SEQ ID NO: 3378378 - DNA, 25 bp, Homo sapien
gataaaaggcaaatgtgattccaaa

SEQ ID NO: 3378379 - DNA, 25 bp, Homo sapien
taggtgttttctcaacaggcacaaa

SEQ ID NO: 3378380 - DNA, 25 bp, Homo sapien
ttaggtgttttctcaacaggcacaa

SEQ ID NO: 3378381 - DNA, 25 bp, Homo sapien
ataatggctgttgttgttatcagtg

SEQ ID NO: 3378382 - DNA, 25 bp, Homo sapien
gacaggttctactagattcttcagt

SEQ ID NO: 3378383 - DNA, 25 bp, Homo sapien
aggacaggttctactagattcttca

SEQ ID NO: 3378384 - DNA, 25 bp, Homo sapien
tggctgttgttgttatcagtgtcaa

SEQ ID NO: 3378385 - DNA, 25 bp, Homo sapien
tcaaaggtactccagggtggatact

SEQ ID NO: 3378386 - DNA, 25 bp, Homo sapien
aaaggtactccagggtggatactgg

SEQ ID NO: 3378387 - DNA, 25 bp, Homo sapien
caaaggtactccagggtggatactg

SEQ ID NO: 3378388 - DNA, 25 bp, Homo sapien
aactgagataaagggcaggcctttg

SEQ ID NO: 3378389 - DNA, 25 bp, Homo sapien
ctttgggagtgataaagctttaatt

SEQ ID NO: 3378390 - DNA, 25 bp, Homo sapien
cacagaatggtccatagcatccaaa

SEQ ID NO: 3378391 - DNA, 25 bp, Homo sapien
gaaaacccagggacagatttgatat

SEQ ID NO: 3378392 - DNA, 25 bp, Homo sapien
tatatcagtcctaatccagaaaggc

SEQ ID NO: 3378393 - DNA, 25 bp, Homo sapien
ttcagccactttgaacaggtaggca

SEQ ID NO: 3378394 - DNA, 25 bp, Homo sapien
caggtaggcatatgtctccgtgtga

SEQ ID NO: 3378395 - DNA, 25 bp, Homo sapien
tgtaacccaagacgatgctgtcaat

SEQ ID NO: 3378396 - DNA, 25 bp, Homo sapien
atgacatttctggagggaggtgtca

SEQ ID NO: 3378397 - DNA, 25 bp, Homo sapien
gaatgacatttctggagggaggtgt

SEQ ID NO: 3378398 - DNA, 25 bp, Homo sapien
catttggaatgacatttctggaggg

SEQ ID NO: 3378399 - DNA, 25 bp, Homo sapien
cagtgaacatttggaatgacatttc

SEQ ID NO: 3378400 - DNA, 25 bp, Homo sapien
taggaagcggattaggacccaacca

SEQ ID NO: 3378401 - DNA, 25 bp, Homo sapien
tcgtagtcagcatctgcggccgtgg

SEQ ID NO: 3378402 - DNA, 25 bp, Homo sapien
gacacctctgaggtcgtgcaaatag

SEQ ID NO: 3378403 - DNA, 25 bp, Homo sapien
ccgtggcgtcaaccagtaggaagcg

SEQ ID NO: 3378404 - DNA, 25 bp, Homo sapien
caagatttccgtggcaccgagagcc

SEQ ID NO: 3378405 - DNA, 25 bp, Homo sapien
agtccagcacgcaaggcttccatgg

SEQ ID NO: 3378406 - DNA, 25 bp, Homo sapien
tggtttcagtgtctggtagaggaaa

SEQ ID NO: 3378407 - DNA, 25 bp, Homo sapien
ggaaagttgcctttatgcaccttcc

SEQ ID NO: 3378408 - DNA, 25 bp, Homo sapien
cagtgcttctgggccggcgatggtg

SEQ ID NO: 3378409 - DNA, 25 bp, Homo sapien
agagctgccatagacacccacccct

SEQ ID NO: 3378410 - DNA, 25 bp, Homo sapien
ccggcgatggtgtgctgagcagagc

SEQ ID NO: 3378411 - DNA, 25 bp, Homo sapien
ctgctcgccagctgagggcagctct

SEQ ID NO: 3378412 - DNA, 25 bp, Homo sapien
ccagacagcagaaggcactccagga

SEQ ID NO: 3378413 - DNA, 25 bp, Homo sapien
ggctgcagcaatgggagtccagaca

SEQ ID NO: 3378414 - DNA, 25 bp, Homo sapien
tggtgggctgcagcaatgggagtcc

SEQ ID NO: 3378415 - DNA, 25 bp, Homo sapien
gcagcaatgggagtccagacagcag

SEQ ID NO: 3378416 - DNA, 25 bp, Homo sapien
gcaaaatccatagaagttgcaagtc

SEQ ID NO: 3378417 - DNA, 25 bp, Homo sapien
cagaaagtctggtggcaaaatccat

SEQ ID NO: 3378418 - DNA, 25 bp, Homo sapien
tctctttaacgcagaaggctacaca

SEQ ID NO: 3378419 - DNA, 25 bp, Homo sapien
tacagattattagggctgcaagcac

SEQ ID NO: 3378420 - DNA, 25 bp, Homo sapien
gagccatgagccaaagaaacctttt

SEQ ID NO: 3378421 - DNA, 25 bp, Homo sapien
tttcttcacaaattatccagcctca

SEQ ID NO: 3378422 - DNA, 25 bp, Homo sapien
cttttttcttcacaaattatccagc

SEQ ID NO: 3378423 - DNA, 25 bp, Homo sapien
cttccatcacgagtggaagcagcct

SEQ ID NO: 3378424 - DNA, 25 bp, Homo sapien
tagtccaagagaaatacgatggccg

SEQ ID NO: 3378425 - DNA, 25 bp, Homo sapien
gatcaggatttattgcagggtagca

SEQ ID NO: 3378426 - DNA, 25 bp, Homo sapien
ggagaccagttcacaggctatcaga

SEQ ID NO: 3378427 - DNA, 25 bp, Homo sapien
cagggccctcaacaacaaagttgaa

SEQ ID NO: 3378428 - DNA, 25 bp, Homo sapien
tgtttcgagatgtggcatcccatgg

SEQ ID NO: 3378429 - DNA, 25 bp, Homo sapien
ccagggacacggtgatagaagcaca

SEQ ID NO: 3378430 - DNA, 25 bp, Homo sapien
tatggcagttccagtaatagcagca

SEQ ID NO: 3378431 - DNA, 25 bp, Homo sapien
catgtcatgatctgcactgtggtgc

SEQ ID NO: 3378432 - DNA, 25 bp, Homo sapien
gatgagccacgtgggctgctgtaaa

SEQ ID NO: 3378433 - DNA, 25 bp, Homo sapien
tatctgtgtccgttcctataatttc

SEQ ID NO: 3378434 - DNA, 25 bp, Homo sapien
tcctcacactcgatgagccacgtgg

SEQ ID NO: 3378435 - DNA, 25 bp, Homo sapien
tataatttcctcacactcgatgagc

SEQ ID NO: 3378436 - DNA, 25 bp, Homo sapien
actcttgctgaggggcctgaaacat

SEQ ID NO: 3378437 - DNA, 25 bp, Homo sapien
gtttgtcttgtccactcttgctgag

SEQ ID NO: 3378438 - DNA, 25 bp, Homo sapien
ccactcttgctgaggggcctgaaac

SEQ ID NO: 3378439 - DNA, 25 bp, Homo sapien
aaagatgtttgtcttgtccactctt

SEQ ID NO: 3378440 - DNA, 25 bp, Homo sapien
ctgaatctgtgcagtaggaggctcc

SEQ ID NO: 3378441 - DNA, 25 bp, Homo sapien
ccctgatcgactgcacctgggcagt

SEQ ID NO: 3378442 - DNA, 25 bp, Homo sapien
taggaggctcccctgatcgactgca

SEQ ID NO: 3378443 - DNA, 25 bp, Homo sapien
tgcagtaggaggctcccctgatcga

SEQ ID NO: 3378444 - DNA, 25 bp, Homo sapien
tggacagctcaaggcaccttttggg

SEQ ID NO: 3378445 - DNA, 25 bp, Homo sapien
agtgcagggcttcggtttgtctctt

SEQ ID NO: 3378446 - DNA, 25 bp, Homo sapien
ctggacagctcaaggcaccttttgg

SEQ ID NO: 3378447 - DNA, 25 bp, Homo sapien
tccagtgcagggcttcggtttgtct

SEQ ID NO: 3378448 - DNA, 25 bp, Homo sapien
ctggatggctagccagaggccccat

SEQ ID NO: 3378449 - DNA, 25 bp, Homo sapien
gctggatggctagccagaggcccca

SEQ ID NO: 3378450 - DNA, 25 bp, Homo sapien
tgctggatggctagccagaggcccc

SEQ ID NO: 3378451 - DNA, 25 bp, Homo sapien
actgccgaagcccaagaggaagggc

SEQ ID NO: 3378452 - DNA, 25 bp, Homo sapien
gaggaagggcagttgcgccgaaggg

SEQ ID NO: 3378453 - DNA, 25 bp, Homo sapien
agttgcgccgaaggggcagcagcca

SEQ ID NO: 3378454 - DNA, 25 bp, Homo sapien
ccaagaggggatcggtgcagttttc

SEQ ID NO: 3378455 - DNA, 25 bp, Homo sapien
cacagtccgatggtgagtagactca

SEQ ID NO: 3378456 - DNA, 25 bp, Homo sapien
tcagatggaaactacggaaagggag

SEQ ID NO: 3378457 - DNA, 25 bp, Homo sapien
gatcattaacgaatactgagcccag

SEQ ID NO: 3378458 - DNA, 25 bp, Homo sapien
caacaaggaggataccgacagaggc

SEQ ID NO: 3378459 - DNA, 25 bp, Homo sapien
tgcggggacacagtgcccactaggt

SEQ ID NO: 3378460 - DNA, 25 bp, Homo sapien
tcttgagcagttcttcagatagatg

SEQ ID NO: 3378461 - DNA, 25 bp, Homo sapien
gatagatgcggggacacagtgccca

SEQ ID NO: 3378462 - DNA, 25 bp, Homo sapien
gagcagttcttcagatagatgcggg

SEQ ID NO: 3378463 - DNA, 25 bp, Homo sapien
gggtggaggcatgtcaagcctggag

SEQ ID NO: 3378464 - DNA, 25 bp, Homo sapien
gtggaggcatgtcaagcctggaggg

SEQ ID NO: 3378465 - DNA, 25 bp, Homo sapien
acagctgatccctctcaggtgcaag

SEQ ID NO: 3378466 - DNA, 25 bp, Homo sapien
tggaagtatgctgcgaagggtacgg

SEQ ID NO: 3378467 - DNA, 25 bp, Homo sapien
ctgcaagagcaagccagcctcagtc

SEQ ID NO: 3378468 - DNA, 25 bp, Homo sapien
aaaccatttggttcttcagcacgaa

SEQ ID NO: 3378469 - DNA, 25 bp, Homo sapien
caattagaaggtgccagtgatgcct

SEQ ID NO: 3378470 - DNA, 25 bp, Homo sapien
tggcgcctgcttgtactgtagaaac

SEQ ID NO: 3378471 - DNA, 25 bp, Homo sapien
gaggtatctggctttagagcccaca

SEQ ID NO: 3378472 - DNA, 25 bp, Homo sapien
gaactggaggccagaaacgctgaag

SEQ ID NO: 3378473 - DNA, 25 bp, Homo sapien
gaaacgctgaagttcactctattca

SEQ ID NO: 3378474 - DNA, 25 bp, Homo sapien
agcagagttcaggaactggaggcca

SEQ ID NO: 3378475 - DNA, 25 bp, Homo sapien
ggccagaaacgctgaagttcactct

SEQ ID NO: 3378476 - DNA, 25 bp, Homo sapien
ggaaacatcgtggaagtgaggaaca

SEQ ID NO: 3378477 - DNA, 25 bp, Homo sapien
caagtgactcactgtgggtagcaat

SEQ ID NO: 3378478 - DNA, 25 bp, Homo sapien
tgccacctgggctaatgagtagaat

SEQ ID NO: 3378479 - DNA, 25 bp, Homo sapien
ccggagaaggcgatgcctaagctaa

SEQ ID NO: 3378480 - DNA, 25 bp, Homo sapien
caaaatcttggctacaatcaaggtg

SEQ ID NO: 3378481 - DNA, 25 bp, Homo sapien
ctgtctgtgtgtatgaccaacttca

SEQ ID NO: 3378482 - DNA, 25 bp, Homo sapien
gacacatgtgatggtctttatgccc

SEQ ID NO: 3378483 - DNA, 25 bp, Homo sapien
tgtattaattgtctaagcctcctgc

SEQ ID NO: 3378484 - DNA, 25 bp, Homo sapien
ttcaaggcaagagctgatagcaagt

SEQ ID NO: 3378485 - DNA, 25 bp, Homo sapien
gccacaaggagcgatgcattctttt

SEQ ID NO: 3378486 - DNA, 25 bp, Homo sapien
gcaagtgtcccagattacaatactg

SEQ ID NO: 3378487 - DNA, 25 bp, Homo sapien
caagagctgatagcaagtgtcccag

SEQ ID NO: 3378488 - DNA, 25 bp, Homo sapien
caaatccagctcagaagccaccaaa

SEQ ID NO: 3378489 - DNA, 25 bp, Homo sapien
acgggaaccctggccacaaatccag

SEQ ID NO: 3378490 - DNA, 25 bp, Homo sapien
ggccacaaatccagctcagaagcca

SEQ ID NO: 3378491 - DNA, 25 bp, Homo sapien
ctggccacaaatccagctcagaagc

SEQ ID NO: 3378492 - DNA, 25 bp, Homo sapien
ggattcagagttcccatccctgtga

SEQ ID NO: 3378493 - DNA, 25 bp, Homo sapien
tcagcgcctggtggaaaggaaagcc

SEQ ID NO: 3378494 - DNA, 25 bp, Homo sapien
tggtttggaccagcacatatcactg

SEQ ID NO: 3378495 - DNA, 25 bp, Homo sapien
aaagcctcttggcttcgggcaccct

SEQ ID NO: 3378496 - DNA, 25 bp, Homo sapien
cgatggctgcggcattaatatcaat

SEQ ID NO: 3378497 - DNA, 25 bp, Homo sapien
ggcattgctgtaggcacttaatgtg

SEQ ID NO: 3378498 - DNA, 25 bp, Homo sapien
aagctgctgtcaaacatggctagcg

SEQ ID NO: 3378499 - DNA, 25 bp, Homo sapien
cttgaaagcaattaaacttggcatt

SEQ ID NO: 3378500 - DNA, 25 bp, Homo sapien
tggtccctccatatgaggtgacctg

SEQ ID NO: 3378501 - DNA, 25 bp, Homo sapien
tagtaaggctgtcccactgggctag

SEQ ID NO: 3378502 - DNA, 25 bp, Homo sapien
caaggtaacagtcaaaagatggctc

SEQ ID NO: 3378503 - DNA, 25 bp, Homo sapien
tgggctagagcaaacgacaaggtaa

SEQ ID NO: 3378504 - DNA, 25 bp, Homo sapien
cctgccatgctgaacgcctcaatga

SEQ ID NO: 3378505 - DNA, 25 bp, Homo sapien
acccaggaggcctgtgacacagtgg

SEQ ID NO: 3378506 - DNA, 25 bp, Homo sapien
gcctcaatgacagaagaaacctcct

SEQ ID NO: 3378507 - DNA, 25 bp, Homo sapien
gccccattgttcaggctgcctgagc

SEQ ID NO: 3378508 - DNA, 25 bp, Homo sapien
ctgcctgggagatgccaaaggagtt

SEQ ID NO: 3378509 - DNA, 25 bp, Homo sapien
gagatgccaaaggagttgtcatcca

SEQ ID NO: 3378510 - DNA, 25 bp, Homo sapien
cctgggagatgccaaaggagttgtc

SEQ ID NO: 3378511 - DNA, 25 bp, Homo sapien
tgggagatgccaaaggagttgtcat

SEQ ID NO: 3378512 - DNA, 25 bp, Homo sapien
gcagctcccaccgatgtatatcagt

SEQ ID NO: 3378513 - DNA, 25 bp, Homo sapien
tagagatagtcaaagcttaaatggc

SEQ ID NO: 3378514 - DNA, 25 bp, Homo sapien
tcccagtggagcatctgagttaagg

SEQ ID NO: 3378515 - DNA, 25 bp, Homo sapien
tgaagggcgatatcttgcaagggca

SEQ ID NO: 3378516 - DNA, 25 bp, Homo sapien
ctctggccttaaagtcagtgcccat

SEQ ID NO: 3378517 - DNA, 25 bp, Homo sapien
aggaatcagcatcccagttaccatg

SEQ ID NO: 3378518 - DNA, 25 bp, Homo sapien
aaagagggctgggagtagtgacctt

SEQ ID NO: 3378519 - DNA, 25 bp, Homo sapien
caaaggaaggaatcagcatcccagt

SEQ ID NO: 3378520 - DNA, 25 bp, Homo sapien
tcatgctacattccgtccaggacca

SEQ ID NO: 3378521 - DNA, 25 bp, Homo sapien
gaccaggctcgaatgggttcatcta

SEQ ID NO: 3378522 - DNA, 25 bp, Homo sapien
tgggcagacactctcgaaagcgatg

SEQ ID NO: 3378523 - DNA, 25 bp, Homo sapien
caagtatgatctttcggaaggagcc

SEQ ID NO: 3378524 - DNA, 25 bp, Homo sapien
tctacactgttgtgaaggaccaggc

SEQ ID NO: 3378525 - DNA, 25 bp, Homo sapien
gaatactgggattacgagtcacatg

SEQ ID NO: 3378526 - DNA, 25 bp, Homo sapien
taccagctggttcgaaaattaggcc

SEQ ID NO: 3378527 - DNA, 25 bp, Homo sapien
tgtctgacatgtcgggacccgtgcc

SEQ ID NO: 3378528 - DNA, 25 bp, Homo sapien
gatgttaatacacacagacctcgag

SEQ ID NO: 3378529 - DNA, 25 bp, Homo sapien
gccagatctccaaacatcaagtcca

SEQ ID NO: 3378530 - DNA, 25 bp, Homo sapien
tgccagatctccaaacatcaagtcc

SEQ ID NO: 3378531 - DNA, 25 bp, Homo sapien
atcaagtccagctttgtccgccaac

SEQ ID NO: 3378532 - DNA, 25 bp, Homo sapien
ggcctgtgcttcctcaaacacagga

SEQ ID NO: 3378533 - DNA, 25 bp, Homo sapien
gcctgtgcttcctcaaacacaggaa

SEQ ID NO: 3378534 - DNA, 25 bp, Homo sapien
tcaggcctgtgcttcctcaaacaca

SEQ ID NO: 3378535 - DNA, 25 bp, Homo sapien
caggcctgtgcttcctcaaacacag

SEQ ID NO: 3378536 - DNA, 25 bp, Homo sapien
gagaagaggttaatatggagccagc

SEQ ID NO: 3378537 - DNA, 25 bp, Homo sapien
cataaatatcgtgcagtaattccac

SEQ ID NO: 3378538 - DNA, 25 bp, Homo sapien
gaagaggttaatatggagccagctg

SEQ ID NO: 3378539 - DNA, 25 bp, Homo sapien
aaatatcgtgcagtaattccacatc

SEQ ID NO: 3378540 - DNA, 25 bp, Homo sapien
gaactagctccatgcagtccaggag

SEQ ID NO: 3378541 - DNA, 25 bp, Homo sapien
gccccagtggaactagctccatgca

SEQ ID NO: 3378542 - DNA, 25 bp, Homo sapien
caaaggccccagtggaactagctcc

SEQ ID NO: 3378543 - DNA, 25 bp, Homo sapien
cagtggaactagctccatgcagtcc

SEQ ID NO: 3378544 - DNA, 25 bp, Homo sapien
tcttaacacgtttgcaatcagtagc

SEQ ID NO: 3378545 - DNA, 25 bp, Homo sapien
taacacgtttgcaatcagtagccat

SEQ ID NO: 3378546 - DNA, 25 bp, Homo sapien
tgtgcctgggatactgatttgcttt

SEQ ID NO: 3378547 - DNA, 25 bp, Homo sapien
tcttcttcttaacacgtttgcaatc

SEQ ID NO: 3378548 - DNA, 25 bp, Homo sapien
caagacgtttcaagtgtctgtggca

SEQ ID NO: 3378549 - DNA, 25 bp, Homo sapien
cagttggttgtatagagctgaccgc

SEQ ID NO: 3378550 - DNA, 25 bp, Homo sapien
tttcctcttcgaccaagacgtttca

SEQ ID NO: 3378551 - DNA, 25 bp, Homo sapien
tgtccagtggacatcctttcctctt

SEQ ID NO: 3378552 - DNA, 25 bp, Homo sapien
tccagcatgctgagtccttcttgta

SEQ ID NO: 3378553 - DNA, 25 bp, Homo sapien
tcccagggactcaaggtggcctctg

SEQ ID NO: 3378554 - DNA, 25 bp, Homo sapien
ttgtagattcccacgcactcccagg

SEQ ID NO: 3378555 - DNA, 25 bp, Homo sapien
tctctgtgatgctctcactgtgctg

SEQ ID NO: 3378556 - DNA, 25 bp, Homo sapien
cactaagatttaccttggctttgag

SEQ ID NO: 3378557 - DNA, 25 bp, Homo sapien
atttaccttggctttgagggtcctg

SEQ ID NO: 3378558 - DNA, 25 bp, Homo sapien
tcctggtagcagagcacagctcagc

SEQ ID NO: 3378559 - DNA, 25 bp, Homo sapien
taccttggctttgagggtcctggta

SEQ ID NO: 3378560 - DNA, 25 bp, Homo sapien
tctattgggagcgaccctgaagggt

SEQ ID NO: 3378561 - DNA, 25 bp, Homo sapien
cttgcaggtgctctttctattggga

SEQ ID NO: 3378562 - DNA, 25 bp, Homo sapien
gtgttctgccagagagtaactttct

SEQ ID NO: 3378563 - DNA, 25 bp, Homo sapien
cattttcaggttcccagtgtacaag

SEQ ID NO: 3378564 - DNA, 25 bp, Homo sapien
catcacaagccggtgcatgtgaatg

SEQ ID NO: 3378565 - DNA, 25 bp, Homo sapien
gaggcatcacaagccggtgcatgtg

SEQ ID NO: 3378566 - DNA, 25 bp, Homo sapien
tagaggcatcacaagccggtgcatg

SEQ ID NO: 3378567 - DNA, 25 bp, Homo sapien
cacaagccggtgcatgtgaatgagc

SEQ ID NO: 3378568 - DNA, 25 bp, Homo sapien
ttgtcattttgatgcaggccaaatg

SEQ ID NO: 3378569 - DNA, 25 bp, Homo sapien
tcattttgatgcaggccaaatgacc

SEQ ID NO: 3378570 - DNA, 25 bp, Homo sapien
cttgcatgctagttgatgctctgca

SEQ ID NO: 3378571 - DNA, 25 bp, Homo sapien
agtgtttgtcattttgatgcaggcc

SEQ ID NO: 3378572 - DNA, 25 bp, Homo sapien
cactgcacccttgatttcaaggaag

SEQ ID NO: 3378573 - DNA, 25 bp, Homo sapien
gctccatgacttcagagatgacctc

SEQ ID NO: 3378574 - DNA, 25 bp, Homo sapien
tccatgggagtaagctatcacagcc

SEQ ID NO: 3378575 - DNA, 25 bp, Homo sapien
tgggaatctgtttccgctccatgac

SEQ ID NO: 3378576 - DNA, 25 bp, Homo sapien
tggaaacctgagttaccggtgccat

SEQ ID NO: 3378577 - DNA, 25 bp, Homo sapien
tctattgcataattgcccctggaaa

SEQ ID NO: 3378578 - DNA, 25 bp, Homo sapien
gagttttatctattgcataattgcc

SEQ ID NO: 3378579 - DNA, 25 bp, Homo sapien
ctggaaacctgagttaccggtgcca

SEQ ID NO: 3378580 - DNA, 25 bp, Homo sapien
gcccgaatgtcaaaaggaagctgtc

SEQ ID NO: 3378581 - DNA, 25 bp, Homo sapien
ggaaattccatactggctggctgct

SEQ ID NO: 3378582 - DNA, 25 bp, Homo sapien
ttctgaggcccgaatgtcaaaagga

SEQ ID NO: 3378583 - DNA, 25 bp, Homo sapien
tccatagcttctgaggcccgaatgt

SEQ ID NO: 3378584 - DNA, 25 bp, Homo sapien
caaaccatggttcctgagatggagt

SEQ ID NO: 3378585 - DNA, 25 bp, Homo sapien
ttgaatcccacacggtgtgctcagc

SEQ ID NO: 3378586 - DNA, 25 bp, Homo sapien
tttagcacgttgaatcccacacggt

SEQ ID NO: 3378587 - DNA, 25 bp, Homo sapien
tcagcccagtgctaagctctccagg

SEQ ID NO: 3378588 - DNA, 25 bp, Homo sapien
actcatgccccagttggagttgtta

SEQ ID NO: 3378589 - DNA, 25 bp, Homo sapien
ggttgcgagggccatctgttccttg

SEQ ID NO: 3378590 - DNA, 25 bp, Homo sapien
catcctaatagttggcaggaaggcg

SEQ ID NO: 3378591 - DNA, 25 bp, Homo sapien
agttgttactgccattgtgtttttc

SEQ ID NO: 3378592 - DNA, 25 bp, Homo sapien
tacttaggtgggcacatgtacctta

SEQ ID NO: 3378593 - DNA, 25 bp, Homo sapien
tatcgtttgtgagcaagttcctggc

SEQ ID NO: 3378594 - DNA, 25 bp, Homo sapien
cctagtctggcatggttgctgtaaa

SEQ ID NO: 3378595 - DNA, 25 bp, Homo sapien
ccttggcttggctgatacttaggtg

SEQ ID NO: 3378596 - DNA, 25 bp, Homo sapien
caatataggagataggatatcccct

SEQ ID NO: 3378597 - DNA, 25 bp, Homo sapien
ccttccatctcatgaagcttttggc

SEQ ID NO: 3378598 - DNA, 25 bp, Homo sapien
gagaccatgatgaggatacaatata

SEQ ID NO: 3378599 - DNA, 25 bp, Homo sapien
catgggcatcttccaagtgggttta

SEQ ID NO: 3378600 - DNA, 25 bp, Homo sapien
agaactgtagacatttgcactggaa

SEQ ID NO: 3378601 - DNA, 25 bp, Homo sapien
caaaagccgggaaacatgagaagcc

SEQ ID NO: 3378602 - DNA, 25 bp, Homo sapien
gaactgtagacatttgcactggaaa

SEQ ID NO: 3378603 - DNA, 25 bp, Homo sapien
gaacagtctgggcaaaagccgggaa

SEQ ID NO: 3378604 - DNA, 25 bp, Homo sapien
tatttcattgagtgtgaccttgtgc

SEQ ID NO: 3378605 - DNA, 25 bp, Homo sapien
tccttttcgaattcctatgtcctca

SEQ ID NO: 3378606 - DNA, 25 bp, Homo sapien
tctctccgtatgtcctcttatctct

SEQ ID NO: 3378607 - DNA, 25 bp, Homo sapien
tctgcttgaccacagttttcaaagc

SEQ ID NO: 3378608 - DNA, 25 bp, Homo sapien
gtttcactgaagactcgcctctcgg

SEQ ID NO: 3378609 - DNA, 25 bp, Homo sapien
gcctctcggtccttacgtgttcaga

SEQ ID NO: 3378610 - DNA, 25 bp, Homo sapien
ggcaaacggctctctgtgggtgttt

SEQ ID NO: 3378611 - DNA, 25 bp, Homo sapien
taggaacccatttctcttacggcat

SEQ ID NO: 3378612 - DNA, 25 bp, Homo sapien
ggatactgtggagcccagcacctgt

SEQ ID NO: 3378613 - DNA, 25 bp, Homo sapien
ctgagtgataaggaagaaaaggata

SEQ ID NO: 3378614 - DNA, 25 bp, Homo sapien
gaaaaggatactgtggagcccagca

SEQ ID NO: 3378615 - DNA, 25 bp, Homo sapien
aagaaaaggatactgtggagcccag

SEQ ID NO: 3378616 - DNA, 25 bp, Homo sapien
tgagtcttcatccagatttgggaag

SEQ ID NO: 3378617 - DNA, 25 bp, Homo sapien
tgcttaacagcacccctgagtcttc

SEQ ID NO: 3378618 - DNA, 25 bp, Homo sapien
gcacccctgagtcttcatccagatt

SEQ ID NO: 3378619 - DNA, 25 bp, Homo sapien
tcttgcttaacagcacccctgagtc

SEQ ID NO: 3378620 - DNA, 25 bp, Homo sapien
ttctaatgggcactgcttgttcgat

SEQ ID NO: 3378621 - DNA, 25 bp, Homo sapien
tgggcactgcttgttcgatggtaat

SEQ ID NO: 3378622 - DNA, 25 bp, Homo sapien
cgatggtaattaactgggtattggg

SEQ ID NO: 3378623 - DNA, 25 bp, Homo sapien
gcttgttcgatggtaattaactggg

SEQ ID NO: 3378624 - DNA, 25 bp, Homo sapien
tgactggcggcctggcaagttagga

SEQ ID NO: 3378625 - DNA, 25 bp, Homo sapien
ttgctgtttcgcactcaggagacag

SEQ ID NO: 3378626 - DNA, 25 bp, Homo sapien
aggacttgctgtttcgcactcagga

SEQ ID NO: 3378627 - DNA, 25 bp, Homo sapien
ggcctggcaagttaggacttgctgt

SEQ ID NO: 3378628 - DNA, 25 bp, Homo sapien
gtgagaacctcagaatggactccac

SEQ ID NO: 3378629 - DNA, 25 bp, Homo sapien
cccgaggtctgtgagaacctcagaa

SEQ ID NO: 3378630 - DNA, 25 bp, Homo sapien
ccgaggtctgtgagaacctcagaat

SEQ ID NO: 3378631 - DNA, 25 bp, Homo sapien
agaacctcagaatggactccaccac

SEQ ID NO: 3378632 - DNA, 25 bp, Homo sapien
ctcatttcctagctccttggtggag

SEQ ID NO: 3378633 - DNA, 25 bp, Homo sapien
gggttagtctcatttcctagctcct

SEQ ID NO: 3378634 - DNA, 25 bp, Homo sapien
tcaactttcaaaccaaattgaagcc

SEQ ID NO: 3378635 - DNA, 25 bp, Homo sapien
ctggtgggttagtctcatttcctag

SEQ ID NO: 3378636 - DNA, 25 bp, Homo sapien
ctctctgctcttgaacgctgacttg

SEQ ID NO: 3378637 - DNA, 25 bp, Homo sapien
aaaaatagcctttctgatggtgccg

SEQ ID NO: 3378638 - DNA, 25 bp, Homo sapien
ttccatgataactcctagcaacggg

SEQ ID NO: 3378639 - DNA, 25 bp, Homo sapien
gatggtgccgcatccggtctttgct

SEQ ID NO: 3378640 - DNA, 25 bp, Homo sapien
ctcatctccagtagatcccttactt

SEQ ID NO: 3378641 - DNA, 25 bp, Homo sapien
atttggcatcactggtaccattaga

SEQ ID NO: 3378642 - DNA, 25 bp, Homo sapien
tctccagtagatcccttacttactg

SEQ ID NO: 3378643 - DNA, 25 bp, Homo sapien
catcactggtaccattagataagag

SEQ ID NO: 3378644 - DNA, 25 bp, Homo sapien
acagcctcagtggaattactgggcc

SEQ ID NO: 3378645 - DNA, 25 bp, Homo sapien
gccatggcccattgtttcagcaaag

SEQ ID NO: 3378646 - DNA, 25 bp, Homo sapien
gaaggatgtgcccaaatttgtgatg

SEQ ID NO: 3378647 - DNA, 25 bp, Homo sapien
aacaatgaacacagcctcagtggaa

SEQ ID NO: 3378648 - DNA, 25 bp, Homo sapien
tcatcttggtttggcaaccctttca

SEQ ID NO: 3378649 - DNA, 25 bp, Homo sapien
gttcattacctgtttggtgtctttc

SEQ ID NO: 3378650 - DNA, 25 bp, Homo sapien
tctcatcttggtttggcaacccttt

SEQ ID NO: 3378651 - DNA, 25 bp, Homo sapien
tgcttcatgttcattacctgtttgg

SEQ ID NO: 3378652 - DNA, 25 bp, Homo sapien
gctaatatgtgtcaacagaaggtct

SEQ ID NO: 3378653 - DNA, 25 bp, Homo sapien
tacatttctccaacaaggactcatg

SEQ ID NO: 3378654 - DNA, 25 bp, Homo sapien
gattgaggcccggtaaattacatga

SEQ ID NO: 3378655 - DNA, 25 bp, Homo sapien
gtaacaaagtgagcatagaagaggc

SEQ ID NO: 3378656 - DNA, 25 bp, Homo sapien
tttggagggtcaattttgctaatca

SEQ ID NO: 3378657 - DNA, 25 bp, Homo sapien
aatgtgctctctatattgcagatga

SEQ ID NO: 3378658 - DNA, 25 bp, Homo sapien
gtttccatggttatcgcctcctcgc

SEQ ID NO: 3378659 - DNA, 25 bp, Homo sapien
tcatcactaatcttggagattttcc

SEQ ID NO: 3378660 - DNA, 25 bp, Homo sapien
tgcaaatatagggtgcacggcattc

SEQ ID NO: 3378661 - DNA, 25 bp, Homo sapien
ctgcaaatatagggtgcacggcatt

SEQ ID NO: 3378662 - DNA, 25 bp, Homo sapien
accagccgcacagggcccttgattt

SEQ ID NO: 3378663 - DNA, 25 bp, Homo sapien
gcagaaactgtgtttccagctatta

SEQ ID NO: 3378664 - DNA, 25 bp, Homo sapien
ctattaaggagtcggcttccagggc

SEQ ID NO: 3378665 - DNA, 25 bp, Homo sapien
cttccagggcgattggtgataggaa

SEQ ID NO: 3378666 - DNA, 25 bp, Homo sapien
tggcccaggtgggctgctgacttac

SEQ ID NO: 3378667 - DNA, 25 bp, Homo sapien
ctggcccaggtgggctgctgactta

SEQ ID NO: 3378668 - DNA, 25 bp, Homo sapien
tattctcaacacagttcctaggatt

SEQ ID NO: 3378669 - DNA, 25 bp, Homo sapien
ccattattctcaacacagttcctag

SEQ ID NO: 3378670 - DNA, 25 bp, Homo sapien
tctcaacacagttcctaggattttg

SEQ ID NO: 3378671 - DNA, 25 bp, Homo sapien
attattctcaacacagttcctagga

SEQ ID NO: 3378672 - DNA, 25 bp, Homo sapien
cctctgatattgttgttgatctccc

SEQ ID NO: 3378673 - DNA, 25 bp, Homo sapien
cacgttagagtcgaagcctctgata

SEQ ID NO: 3378674 - DNA, 25 bp, Homo sapien
tcaaaaatagaaatgctgccaccgt

SEQ ID NO: 3378675 - DNA, 25 bp, Homo sapien
tggagatcttaaagtgtcctggaca

SEQ ID NO: 3378676 - DNA, 25 bp, Homo sapien
tgactcggtgttcctggagatgacc

SEQ ID NO: 3378677 - DNA, 25 bp, Homo sapien
tgtccctgcatctccgtgactcggt

SEQ ID NO: 3378678 - DNA, 25 bp, Homo sapien
agatgaccctgtggaaaagcctgtg

SEQ ID NO: 3378679 - DNA, 25 bp, Homo sapien
cagtcaacgtcacatctgtgtggag

SEQ ID NO: 3378680 - DNA, 25 bp, Homo sapien
cagtgcccatgtgtaaccactccac

SEQ ID NO: 3378681 - DNA, 25 bp, Homo sapien
cggccagtgcccatgtgtaaccact

SEQ ID NO: 3378682 - DNA, 25 bp, Homo sapien
ggccagtgcccatgtgtaaccactc

SEQ ID NO: 3378683 - DNA, 25 bp, Homo sapien
gccagtgcccatgtgtaaccactcc

SEQ ID NO: 3378684 - DNA, 25 bp, Homo sapien
tgacaaggttctctaaaagctcaag

SEQ ID NO: 3378685 - DNA, 25 bp, Homo sapien
gacagcctggttcttatggttagtg

SEQ ID NO: 3378686 - DNA, 25 bp, Homo sapien
aaatgatgtgactgccaaggctccc

SEQ ID NO: 3378687 - DNA, 25 bp, Homo sapien
gtatgtgcccgcacggacagcctgg

SEQ ID NO: 3378688 - DNA, 25 bp, Homo sapien
ttttctcacttgctcatatttgagg

SEQ ID NO: 3378689 - DNA, 25 bp, Homo sapien
ttgttttgccatagatgtctgcaag

SEQ ID NO: 3378690 - DNA, 25 bp, Homo sapien
tccttgttttgccatagatgtctgc

SEQ ID NO: 3378691 - DNA, 25 bp, Homo sapien
cacttgctcatatttgagggctggt

SEQ ID NO: 3378692 - DNA, 25 bp, Homo sapien
caattttgcattggctctcaagttc

SEQ ID NO: 3378693 - DNA, 25 bp, Homo sapien
gggagcatccattggcaattttgca

SEQ ID NO: 3378694 - DNA, 25 bp, Homo sapien
tctacaaggcccctgcttattttgg

SEQ ID NO: 3378695 - DNA, 25 bp, Homo sapien
tttgcattggctctcaagttcaaca

SEQ ID NO: 3378696 - DNA, 25 bp, Homo sapien
ttgcttaaagggcatgagttctcct

SEQ ID NO: 3378697 - DNA, 25 bp, Homo sapien
ttgttgttgcttaaagggcatgagt

SEQ ID NO: 3378698 - DNA, 25 bp, Homo sapien
gttgttgcttaaagggcatgagttc

SEQ ID NO: 3378699 - DNA, 25 bp, Homo sapien
ttaaagggcatgagttctcctattc

SEQ ID NO: 3378700 - DNA, 25 bp, Homo sapien
tttaatagctaatctggcccctggc

SEQ ID NO: 3378701 - DNA, 25 bp, Homo sapien
gtgaggctgcccaaagtgactaaag

SEQ ID NO: 3378702 - DNA, 25 bp, Homo sapien
tatacccgaagcataatgattactc

SEQ ID NO: 3378703 - DNA, 25 bp, Homo sapien
gatgagtgatccgtgcttagtggat

SEQ ID NO: 3378704 - DNA, 25 bp, Homo sapien
gctattcttacaagatgccactagg

SEQ ID NO: 3378705 - DNA, 25 bp, Homo sapien
gcaaaggccttagcagtgcctgaca

SEQ ID NO: 3378706 - DNA, 25 bp, Homo sapien
tctccatggactagataggccaggt

SEQ ID NO: 3378707 - DNA, 25 bp, Homo sapien
tgcctgacacacagtggattattag

SEQ ID NO: 3378708 - DNA, 25 bp, Homo sapien
cccagggtagcagtaaattgatatt

SEQ ID NO: 3378709 - DNA, 25 bp, Homo sapien
tggagtgtacaggtggctccttgcc

SEQ ID NO: 3378710 - DNA, 25 bp, Homo sapien
gagtgtacaggtggctccttgcctt

SEQ ID NO: 3378711 - DNA, 25 bp, Homo sapien
tgccccagggtagcagtaaattgat

SEQ ID NO: 3378712 - DNA, 25 bp, Homo sapien
aaggtttatctgcgttatagcatgt

SEQ ID NO: 3378713 - DNA, 25 bp, Homo sapien
ccataccctcatcccctggtaacct

SEQ ID NO: 3378714 - DNA, 25 bp, Homo sapien
gtttatctgcgttatagcatgtatc

SEQ ID NO: 3378715 - DNA, 25 bp, Homo sapien
taccctcatcccctggtaacctata

SEQ ID NO: 3378716 - DNA, 25 bp, Homo sapien
tgttagctgggcacttttctgcctt

SEQ ID NO: 3378717 - DNA, 25 bp, Homo sapien
ctgttagctgggcacttttctgcct

SEQ ID NO: 3378718 - DNA, 25 bp, Homo sapien
gtctgttagctgggcacttttctgc

SEQ ID NO: 3378719 - DNA, 25 bp, Homo sapien
tctgttagctgggcacttttctgcc

SEQ ID NO: 3378720 - DNA, 25 bp, Homo sapien
cttgtgggagaagacaataagttca

SEQ ID NO: 3378721 - DNA, 25 bp, Homo sapien
ttgtgggagaagacaataagttcat

SEQ ID NO: 3378722 - DNA, 25 bp, Homo sapien
tccttccaaggccagaggtcctatc

SEQ ID NO: 3378723 - DNA, 25 bp, Homo sapien
taatttctcacagataagggttttg

SEQ ID NO: 3378724 - DNA, 25 bp, Homo sapien
tctcacagataagggttttgaggaa

SEQ ID NO: 3378725 - DNA, 25 bp, Homo sapien
gaggaaagataactgaaatgtgtaa

SEQ ID NO: 3378726 - DNA, 25 bp, Homo sapien
cctctcaatttcgtagcggtttaat

SEQ ID NO: 3378727 - DNA, 25 bp, Homo sapien
gtagtatgttgttggtattactcac

SEQ ID NO: 3378728 - DNA, 25 bp, Homo sapien
tattggcatgtagtatgttgttggt

SEQ ID NO: 3378729 - DNA, 25 bp, Homo sapien
gcatgtagtatgttgttggtattac

SEQ ID NO: 3378730 - DNA, 25 bp, Homo sapien
tatgttgttggtattactcacaaag

SEQ ID NO: 3378731 - DNA, 25 bp, Homo sapien
ttctcagtgaccatgtagggcactg

SEQ ID NO: 3378732 - DNA, 25 bp, Homo sapien
tcacagggaccatgggcaggcagca

SEQ ID NO: 3378733 - DNA, 25 bp, Homo sapien
cacagggaccatgggcaggcagcat

SEQ ID NO: 3378734 - DNA, 25 bp, Homo sapien
caggcagcatcatgtttctcagtga

SEQ ID NO: 3378735 - DNA, 25 bp, Homo sapien
ccaataagttcctcagttccaggca

SEQ ID NO: 3378736 - DNA, 25 bp, Homo sapien
cttggttcctggcagtcactcccaa

SEQ ID NO: 3378737 - DNA, 25 bp, Homo sapien
tggcagtcactcccaataagttcct

SEQ ID NO: 3378738 - DNA, 25 bp, Homo sapien
caataagttcctcagttccaggcat

SEQ ID NO: 3378739 - DNA, 25 bp, Homo sapien
cagagcagtggaggaattgacagat

SEQ ID NO: 3378740 - DNA, 25 bp, Homo sapien
gagccttctgtttagtgttcagtgg

SEQ ID NO: 3378741 - DNA, 25 bp, Homo sapien
ggtgatgacttaatgccctggctgt

SEQ ID NO: 3378742 - DNA, 25 bp, Homo sapien
gacagatttgcagagggagccttct

SEQ ID NO: 3378743 - DNA, 25 bp, Homo sapien
tcaaaattgcattgttggcctttgg

SEQ ID NO: 3378744 - DNA, 25 bp, Homo sapien
gagtaccacctgaggatcgagccag

SEQ ID NO: 3378745 - DNA, 25 bp, Homo sapien
agccaggcgcagtagaactcggaaa

SEQ ID NO: 3378746 - DNA, 25 bp, Homo sapien
tcactgtcaggactggcattcctca

SEQ ID NO: 3378747 - DNA, 25 bp, Homo sapien
gccaccgtcaatggtgcgtgtacat

SEQ ID NO: 3378748 - DNA, 25 bp, Homo sapien
tgaaactctgagtaaatagaagcca

SEQ ID NO: 3378749 - DNA, 25 bp, Homo sapien
tagaagccaccgtcaatggtgcgtg

SEQ ID NO: 3378750 - DNA, 25 bp, Homo sapien
gtaaatagaagccaccgtcaatggt

SEQ ID NO: 3378751 - DNA, 25 bp, Homo sapien
catcattgtcagtgggggtgctggc

SEQ ID NO: 3378752 - DNA, 25 bp, Homo sapien
agcctgtgggtgcacgtaaatcaag

SEQ ID NO: 3378753 - DNA, 25 bp, Homo sapien
cctgtgggtgcacgtaaatcaagaa

SEQ ID NO: 3378754 - DNA, 25 bp, Homo sapien
tgttagagacctttgtgacagcctc

SEQ ID NO: 3378755 - DNA, 25 bp, Homo sapien
tagagacctttgtgacagcctctcc

SEQ ID NO: 3378756 - DNA, 25 bp, Homo sapien
tggcaggcaaaagcaacgcgggaat

SEQ ID NO: 3378757 - DNA, 25 bp, Homo sapien
taaactgagtgctgatcgtcccaat

SEQ ID NO: 3378758 - DNA, 25 bp, Homo sapien
cccagtatgggtcgtatgcttcatg

SEQ ID NO: 3378759 - DNA, 25 bp, Homo sapien
tcgtcccaatagacacacaagtgtg

SEQ ID NO: 3378760 - DNA, 25 bp, Homo sapien
tctggaagactaacaatctccttcc

SEQ ID NO: 3378761 - DNA, 25 bp, Homo sapien
ttttctggaagactaacaatctcct

SEQ ID NO: 3378762 - DNA, 25 bp, Homo sapien
cttttctggaagactaacaatctcc

SEQ ID NO: 3378763 - DNA, 25 bp, Homo sapien
ttcttttctggaagactaacaatct

SEQ ID NO: 3378764 - DNA, 25 bp, Homo sapien
gagacagccatgcaaacgcttttcg

SEQ ID NO: 3378765 - DNA, 25 bp, Homo sapien
ccctttagcaaagcgcctggacgtc

SEQ ID NO: 3378766 - DNA, 25 bp, Homo sapien
tcagccccgggaggtacagaattgg

SEQ ID NO: 3378767 - DNA, 25 bp, Homo sapien
tagctcaagagagaatggcagcggc

SEQ ID NO: 3378768 - DNA, 25 bp, Homo sapien
cgggaccagttggttctcctcgccg

SEQ ID NO: 3378769 - DNA, 25 bp, Homo sapien
ttcgggaccagttggttctcctcgc

SEQ ID NO: 3378770 - DNA, 25 bp, Homo sapien
tcgggaccagttggttctcctcgcc

SEQ ID NO: 3378771 - DNA, 25 bp, Homo sapien
ggacctgtcccggagcttcaaggat

SEQ ID NO: 3378772 - DNA, 25 bp, Homo sapien
aagtgagttctagcactaggtctgc

SEQ ID NO: 3378773 - DNA, 25 bp, Homo sapien
gtcactttcaatcttctgggcctaa

SEQ ID NO: 3378774 - DNA, 25 bp, Homo sapien
cagagaattcgaacagcagaagagg

SEQ ID NO: 3378775 - DNA, 25 bp, Homo sapien
gacatacggcagaatgaaacgggtg

SEQ ID NO: 3378776 - DNA, 25 bp, Homo sapien
ggcaactatcaaaagatggcagcta

SEQ ID NO: 3378777 - DNA, 25 bp, Homo sapien
cagtaaatatgcaccttatccttga

SEQ ID NO: 3378778 - DNA, 25 bp, Homo sapien
cagaaaaggtcagttctcaggctac

SEQ ID NO: 3378779 - DNA, 25 bp, Homo sapien
gaatagtgatattcccaggcacctg

SEQ ID NO: 3378780 - DNA, 25 bp, Homo sapien
taaataatggcttagaacccttcag

SEQ ID NO: 3378781 - DNA, 25 bp, Homo sapien
gagggtactcctaagaacgtgcaac

SEQ ID NO: 3378782 - DNA, 25 bp, Homo sapien
gagactgaaagaggactgcctgttt

SEQ ID NO: 3378783 - DNA, 25 bp, Homo sapien
gatttaacatacagcaacagtaatc

SEQ ID NO: 3378784 - DNA, 25 bp, Homo sapien
caatgtcacaatagagacctacaca

SEQ ID NO: 3378785 - DNA, 25 bp, Homo sapien
aatagagacctacacaaatatgcac

SEQ ID NO: 3378786 - DNA, 25 bp, Homo sapien
gagataaatagatcaatgtcacaat

SEQ ID NO: 3378787 - DNA, 25 bp, Homo sapien
caaattagacctaatctaaagacta

SEQ ID NO: 3378788 - DNA, 25 bp, Homo sapien
tgtcttagtactgggaccaaattag

SEQ ID NO: 3378789 - DNA, 25 bp, Homo sapien
tagtactgggaccaaattagaccta

SEQ ID NO: 3378790 - DNA, 25 bp, Homo sapien
tgggaccaaattagacctaatctaa

SEQ ID NO: 3378791 - DNA, 25 bp, Homo sapien
caaagatattttgtctgcatctcca

SEQ ID NO: 3378792 - DNA, 25 bp, Homo sapien
atttcatcaaagatattttgtctgc

SEQ ID NO: 3378793 - DNA, 25 bp, Homo sapien
tcaaagatattttgtctgcatctcc

SEQ ID NO: 3378794 - DNA, 25 bp, Homo sapien
tcatcaaagatattttgtctgcatc

SEQ ID NO: 3378795 - DNA, 25 bp, Homo sapien
cttgtataatacataagactctagg

SEQ ID NO: 3378796 - DNA, 25 bp, Homo sapien
tgctggtaaatttaaagtgatccgt

SEQ ID NO: 3378797 - DNA, 25 bp, Homo sapien
ttatgtagcctactttgttggccac

SEQ ID NO: 3378798 - DNA, 25 bp, Homo sapien
gctttctgactggagtagatgctgg

SEQ ID NO: 3378799 - DNA, 25 bp, Homo sapien
cagcagtattgattccatttcccca

SEQ ID NO: 3378800 - DNA, 25 bp, Homo sapien
tcagcagtattgattccatttcccc

SEQ ID NO: 3378801 - DNA, 25 bp, Homo sapien
gcagtattgattccatttccccaca

SEQ ID NO: 3378802 - DNA, 25 bp, Homo sapien
cagtattgattccatttccccacac

SEQ ID NO: 3378803 - DNA, 25 bp, Homo sapien
ctttcctggctcaaaattagcgtcg

SEQ ID NO: 3378804 - DNA, 25 bp, Homo sapien
ttagcgtcgagaagtgacttgtcac

SEQ ID NO: 3378805 - DNA, 25 bp, Homo sapien
gttcaccatctttatctgtcaaatg

SEQ ID NO: 3378806 - DNA, 25 bp, Homo sapien
cagcagtatttgaggttgttcacca

SEQ ID NO: 3378807 - DNA, 25 bp, Homo sapien
actgcatcctcaagtagtaggtgac

SEQ ID NO: 3378808 - DNA, 25 bp, Homo sapien
gaaactgcatcctcaagtagtaggt

SEQ ID NO: 3378809 - DNA, 25 bp, Homo sapien
tgggaaactgcatcctcaagtagta

SEQ ID NO: 3378810 - DNA, 25 bp, Homo sapien
aaactgcatcctcaagtagtaggtg

SEQ ID NO: 3378811 - DNA, 25 bp, Homo sapien
ctataaacctgtcatgaacactgtc

SEQ ID NO: 3378812 - DNA, 25 bp, Homo sapien
tagatgagtaggagtagctttggct

SEQ ID NO: 3378813 - DNA, 25 bp, Homo sapien
ccttctcttggaagcggacctataa

SEQ ID NO: 3378814 - DNA, 25 bp, Homo sapien
gctttggctgacataatcactggta

SEQ ID NO: 3378815 - DNA, 25 bp, Homo sapien
aatagcaagtcattgcttggtttac

SEQ ID NO: 3378816 - DNA, 25 bp, Homo sapien
agcaagtcattgcttggtttactag

SEQ ID NO: 3378817 - DNA, 25 bp, Homo sapien
tcaaatagcaagtcattgcttggtt

SEQ ID NO: 3378818 - DNA, 25 bp, Homo sapien
caaatagcaagtcattgcttggttt

SEQ ID NO: 3378819 - DNA, 25 bp, Homo sapien
atccaaagctccttgtaacatctgt

SEQ ID NO: 3378820 - DNA, 25 bp, Homo sapien
ccaaagctccttgtaacatctgtgg

SEQ ID NO: 3378821 - DNA, 25 bp, Homo sapien
gcctttgaagttggtatggaatact

SEQ ID NO: 3378822 - DNA, 25 bp, Homo sapien
aatacttgtcactggatcttcttca

SEQ ID NO: 3378823 - DNA, 25 bp, Homo sapien
gcatagttcttgtacatcatgctgc

SEQ ID NO: 3378824 - DNA, 25 bp, Homo sapien
gactctgcatagttcttgtacatca

SEQ ID NO: 3378825 - DNA, 25 bp, Homo sapien
tctgcatagttcttgtacatcatgc

SEQ ID NO: 3378826 - DNA, 25 bp, Homo sapien
tgcatagttcttgtacatcatgctg

SEQ ID NO: 3378827 - DNA, 25 bp, Homo sapien
ccatttctgttccaaagcatcaaac

SEQ ID NO: 3378828 - DNA, 25 bp, Homo sapien
catttctgttccaaagcatcaaaca

SEQ ID NO: 3378829 - DNA, 25 bp, Homo sapien
cttccatttctgttccaaagcatca

SEQ ID NO: 3378830 - DNA, 25 bp, Homo sapien
tgcttccatttctgttccaaagcat

SEQ ID NO: 3378831 - DNA, 25 bp, Homo sapien
tcaagatatgtgtcgattcgccagc

SEQ ID NO: 3378832 - DNA, 25 bp, Homo sapien
cacattccagacatctcacgtagtc

SEQ ID NO: 3378833 - DNA, 25 bp, Homo sapien
cttggctggacccataaggtcggat

SEQ ID NO: 3378834 - DNA, 25 bp, Homo sapien
ggtcggatgaccaatggaatatcaa

SEQ ID NO: 3378835 - DNA, 25 bp, Homo sapien
cttctcaactacaggaatcactggg

SEQ ID NO: 3378836 - DNA, 25 bp, Homo sapien
tatttaatcaaggacaccttcccca

SEQ ID NO: 3378837 - DNA, 25 bp, Homo sapien
gcagaagtctcccagcactcattat

SEQ ID NO: 3378838 - DNA, 25 bp, Homo sapien
tacagactagtattgaacagaactc

SEQ ID NO: 3378839 - DNA, 25 bp, Homo sapien
aaagggctctgccatattagtgcca

SEQ ID NO: 3378840 - DNA, 25 bp, Homo sapien
taaagggcaggagtatctcagtact

SEQ ID NO: 3378841 - DNA, 25 bp, Homo sapien
gaagctccttgttagtgctgcgcag

SEQ ID NO: 3378842 - DNA, 25 bp, Homo sapien
cactggcaggcacaagttgatgtaa

SEQ ID NO: 3378843 - DNA, 25 bp, Homo sapien
cattccctaggaagaaagcagtctc

SEQ ID NO: 3378844 - DNA, 25 bp, Homo sapien
tacctatcagtaagagagggaggcg

SEQ ID NO: 3378845 - DNA, 25 bp, Homo sapien
tcaggtaagaatagtgtcacaggac

SEQ ID NO: 3378846 - DNA, 25 bp, Homo sapien
tgaccagtcttgaatcccggaaatc

SEQ ID NO: 3378847 - DNA, 25 bp, Homo sapien
gttttgaacacataggtccagtaca

SEQ ID NO: 3378848 - DNA, 25 bp, Homo sapien
ttgtagttttgaacacataggtcca

SEQ ID NO: 3378849 - DNA, 25 bp, Homo sapien
aacctgtctttatccccgcctctct

SEQ ID NO: 3378850 - DNA, 25 bp, Homo sapien
cacataggtccagtacattttttgt

SEQ ID NO: 3378851 - DNA, 25 bp, Homo sapien
tgtagactgtacttttggtagcaaa

SEQ ID NO: 3378852 - DNA, 25 bp, Homo sapien
actctttgcttagcccagatctgga

SEQ ID NO: 3378853 - DNA, 25 bp, Homo sapien
tcatatgggctttcagagagtaaat

SEQ ID NO: 3378854 - DNA, 25 bp, Homo sapien
tggagattctctttatcatatgggc

SEQ ID NO: 3378855 - DNA, 25 bp, Homo sapien
aaaatactgatttgggccatccaga

SEQ ID NO: 3378856 - DNA, 25 bp, Homo sapien
cacttcttcttacaacgttcacaaa

SEQ ID NO: 3378857 - DNA, 25 bp, Homo sapien
catccagaatctctggctgaataaa

SEQ ID NO: 3378858 - DNA, 25 bp, Homo sapien
cttccgtgcatcacacttcttctta

SEQ ID NO: 3378859 - DNA, 25 bp, Homo sapien
tgtcattcgatcattcagtttaatc

SEQ ID NO: 3378860 - DNA, 25 bp, Homo sapien
tagttcctcgggaaatgtcattcga

SEQ ID NO: 3378861 - DNA, 25 bp, Homo sapien
tcctatgcatggttgtataatcaaa

SEQ ID NO: 3378862 - DNA, 25 bp, Homo sapien
aaagtactcatatctagttcctcgg

SEQ ID NO: 3378863 - DNA, 25 bp, Homo sapien
tggagaaatcgttgctcatctgatc

SEQ ID NO: 3378864 - DNA, 25 bp, Homo sapien
agttccactattggtttcaagacag

SEQ ID NO: 3378865 - DNA, 25 bp, Homo sapien
tctgatcactgtgacaactaccttc

SEQ ID NO: 3378866 - DNA, 25 bp, Homo sapien
caacaccatcatcattggagaaatc

SEQ ID NO: 3378867 - DNA, 25 bp, Homo sapien
aaagaggagacattatactgaagcc

SEQ ID NO: 3378868 - DNA, 25 bp, Homo sapien
tatagatgtaagtgcctacattaaa

SEQ ID NO: 3378869 - DNA, 25 bp, Homo sapien
caataacctaactttataccacaag

SEQ ID NO: 3378870 - DNA, 25 bp, Homo sapien
caaacccttagctaggctaagaaag

SEQ ID NO: 3378871 - DNA, 25 bp, Homo sapien
gcagcgctcccagaatgaaccataa

SEQ ID NO: 3378872 - DNA, 25 bp, Homo sapien
cataataatgaccaccagcagcgct

SEQ ID NO: 3378873 - DNA, 25 bp, Homo sapien
cattgaagctgtaccactgctcatc

SEQ ID NO: 3378874 - DNA, 25 bp, Homo sapien
cctgctgacatgttgatcattgaag

SEQ ID NO: 3378875 - DNA, 25 bp, Homo sapien
cctgaagatccaccatgtgttttct

SEQ ID NO: 3378876 - DNA, 25 bp, Homo sapien
gaaagcactagaataatatcctctg

SEQ ID NO: 3378877 - DNA, 25 bp, Homo sapien
cttgcgaaagcactagaataatatc

SEQ ID NO: 3378878 - DNA, 25 bp, Homo sapien
gcgaaagcactagaataatatcctc

SEQ ID NO: 3378879 - DNA, 25 bp, Homo sapien
gctggatccttcagtctatagatca

SEQ ID NO: 3378880 - DNA, 25 bp, Homo sapien
cagtctatagatcagcatatatgca

SEQ ID NO: 3378881 - DNA, 25 bp, Homo sapien
tccttcagtctatagatcagcatat

SEQ ID NO: 3378882 - DNA, 25 bp, Homo sapien
gatccttcagtctatagatcagcat

SEQ ID NO: 3378883 - DNA, 25 bp, Homo sapien
tgccttctgacatgactgaaagctc

SEQ ID NO: 3378884 - DNA, 25 bp, Homo sapien
tgctcccatattgccttctgacatg

SEQ ID NO: 3378885 - DNA, 25 bp, Homo sapien
tagcaatgcgaggacagcctgatat

SEQ ID NO: 3378886 - DNA, 25 bp, Homo sapien
aaccccggaacttgcttgctcctgc

SEQ ID NO: 3378887 - DNA, 25 bp, Homo sapien
taaaaacaggataagacagtgtcac

SEQ ID NO: 3378888 - DNA, 25 bp, Homo sapien
ttaacagggacacatggttaggtcc

SEQ ID NO: 3378889 - DNA, 25 bp, Homo sapien
ggctccagaacaactccagtatgtg

SEQ ID NO: 3378890 - DNA, 25 bp, Homo sapien
gaatacaagcttcgtccagaaaagg

SEQ ID NO: 3378891 - DNA, 25 bp, Homo sapien
ttgcatgtattgcgctcaatttctc

SEQ ID NO: 3378892 - DNA, 25 bp, Homo sapien
cttgcatgtattgcgctcaatttct

SEQ ID NO: 3378893 - DNA, 25 bp, Homo sapien
tatccttatgaacctccaatttatt

SEQ ID NO: 3378894 - DNA, 25 bp, Homo sapien
ttgtaggatgcaaacagaataattt

SEQ ID NO: 3378895 - DNA, 25 bp, Homo sapien
cctttaatgtcttatccttatgaac

SEQ ID NO: 3378896 - DNA, 25 bp, Homo sapien
tttccatcattacttgttttgtagg

SEQ ID NO: 3378897 - DNA, 25 bp, Homo sapien
aaatacacagtgttttagtctgttg

SEQ ID NO: 3378898 - DNA, 25 bp, Homo sapien
aataacattacaataggccctaaca

SEQ ID NO: 3378899 - DNA, 25 bp, Homo sapien
caataggccctaacaaaatccacac

SEQ ID NO: 3378900 - DNA, 25 bp, Homo sapien
ttacaataggccctaacaaaatcca

SEQ ID NO: 3378901 - DNA, 25 bp, Homo sapien
tagtagaagccccattggtgtatct

SEQ ID NO: 3378902 - DNA, 25 bp, Homo sapien
tttaacaaggcgacagcaatccagg

SEQ ID NO: 3378903 - DNA, 25 bp, Homo sapien
tgaccgttctagataatcatgaaac

SEQ ID NO: 3378904 - DNA, 25 bp, Homo sapien
aacatatatgttgacttgacgccac

SEQ ID NO: 3378905 - DNA, 25 bp, Homo sapien
gaaaacctgatcaggctttctcgtc

SEQ ID NO: 3378906 - DNA, 25 bp, Homo sapien
ctgatcaggctttctcgtctccaac

SEQ ID NO: 3378907 - DNA, 25 bp, Homo sapien
taagattggaaaacctgatcaggct

SEQ ID NO: 3378908 - DNA, 25 bp, Homo sapien
tttataagattggaaaacctgatca

SEQ ID NO: 3378909 - DNA, 25 bp, Homo sapien
ggagcagctacagattctgccttta

SEQ ID NO: 3378910 - DNA, 25 bp, Homo sapien
cacgaacagttataggagcagctac

SEQ ID NO: 3378911 - DNA, 25 bp, Homo sapien
gatcaacaacatgaactttcaccat

SEQ ID NO: 3378912 - DNA, 25 bp, Homo sapien
taactgtctgatttaagtaagcacg

SEQ ID NO: 3378913 - DNA, 25 bp, Homo sapien
gttccagcactattctcattgtttc

SEQ ID NO: 3378914 - DNA, 25 bp, Homo sapien
ggagacactgagaagacgcaaatca

SEQ ID NO: 3378915 - DNA, 25 bp, Homo sapien
ttgtttcagcaggtaaatggatggc

SEQ ID NO: 3378916 - DNA, 25 bp, Homo sapien
cattgtagcagcgttccagcactat

SEQ ID NO: 3378917 - DNA, 25 bp, Homo sapien
taatctgggcgaagtaggtggttaa

SEQ ID NO: 3378918 - DNA, 25 bp, Homo sapien
tcttaccctaaagtaatgtactgga

SEQ ID NO: 3378919 - DNA, 25 bp, Homo sapien
caaattgaaaccagtacgctaaccg

SEQ ID NO: 3378920 - DNA, 25 bp, Homo sapien
ttcgtacttggcataaatttggcaa

SEQ ID NO: 3378921 - DNA, 25 bp, Homo sapien
aagtctcggagctttcaacaaacac

SEQ ID NO: 3378922 - DNA, 25 bp, Homo sapien
aatccaaagtctcggagctttcaac

SEQ ID NO: 3378923 - DNA, 25 bp, Homo sapien
caaagtctcggagctttcaacaaac

SEQ ID NO: 3378924 - DNA, 25 bp, Homo sapien
ctggtaatccaaagtctcggagctt

SEQ ID NO: 3378925 - DNA, 25 bp, Homo sapien
cataaatgagagtctgcaaaggcca

SEQ ID NO: 3378926 - DNA, 25 bp, Homo sapien
tccattagccaaagggatctgagca

SEQ ID NO: 3378927 - DNA, 25 bp, Homo sapien
tttgcatgccgatccaggagtttcc

SEQ ID NO: 3378928 - DNA, 25 bp, Homo sapien
gagctaagaatatcactgtccactg

SEQ ID NO: 3378929 - DNA, 25 bp, Homo sapien
catctgcagcataaggttcagcttt

SEQ ID NO: 3378930 - DNA, 25 bp, Homo sapien
ccttcatctgcagcataaggttcag

SEQ ID NO: 3378931 - DNA, 25 bp, Homo sapien
agaaccttcatctgcagcataaggt

SEQ ID NO: 3378932 - DNA, 25 bp, Homo sapien
tgcagcataaggttcagctttgaaa

SEQ ID NO: 3378933 - DNA, 25 bp, Homo sapien
gatgctgtttcaaggaccgtttttc

SEQ ID NO: 3378934 - DNA, 25 bp, Homo sapien
cacaggtctaagaacagtgttcatt

SEQ ID NO: 3378935 - DNA, 25 bp, Homo sapien
caaatgatcttagaactaagtacct

SEQ ID NO: 3378936 - DNA, 25 bp, Homo sapien
agtgttcattacaactgcgtcaata

SEQ ID NO: 3378937 - DNA, 25 bp, Homo sapien
gaactgcgtatactgtgcatagtgc

SEQ ID NO: 3378938 - DNA, 25 bp, Homo sapien
gattattgcctgagtgaactgcgta

SEQ ID NO: 3378939 - DNA, 25 bp, Homo sapien
tgtgaggcactgtaactgaccctta

SEQ ID NO: 3378940 - DNA, 25 bp, Homo sapien
tataactgctatcttaaggaccatc

SEQ ID NO: 3378941 - DNA, 25 bp, Homo sapien
tccaacaaagggctctaaatgttgt

SEQ ID NO: 3378942 - DNA, 25 bp, Homo sapien
tcgaaagaccttgaagtgagaggac

SEQ ID NO: 3378943 - DNA, 25 bp, Homo sapien
tgaaagtgtctcattcagccggacg

SEQ ID NO: 3378944 - DNA, 25 bp, Homo sapien
gattgctggcatacactcgaaagac

SEQ ID NO: 3378945 - DNA, 25 bp, Homo sapien
gttcattgaccaaaagctggtatac

SEQ ID NO: 3378946 - DNA, 25 bp, Homo sapien
ttgttcattgaccaaaagctggtat

SEQ ID NO: 3378947 - DNA, 25 bp, Homo sapien
tgttcattgaccaaaagctggtata

SEQ ID NO: 3378948 - DNA, 25 bp, Homo sapien
ttcattgaccaaaagctggtatact

SEQ ID NO: 3378949 - DNA, 25 bp, Homo sapien
taattcctcttttgattgccgtaca

SEQ ID NO: 3378950 - DNA, 25 bp, Homo sapien
ttcctttagcaaacacagcatctag

SEQ ID NO: 3378951 - DNA, 25 bp, Homo sapien
cttttgattgccgtacagtcattcc

SEQ ID NO: 3378952 - DNA, 25 bp, Homo sapien
gccgtacagtcattcctttagcaaa

SEQ ID NO: 3378953 - DNA, 25 bp, Homo sapien
cttcaaggaaaacctcccagttgct

SEQ ID NO: 3378954 - DNA, 25 bp, Homo sapien
ttcaaggaaaacctcccagttgctg

SEQ ID NO: 3378955 - DNA, 25 bp, Homo sapien
ggaaccaaccctgttgacagcctga

SEQ ID NO: 3378956 - DNA, 25 bp, Homo sapien
taagcagttacattaggacacaggg

SEQ ID NO: 3378957 - DNA, 25 bp, Homo sapien
gccacctggcttaggacacaaatag

SEQ ID NO: 3378958 - DNA, 25 bp, Homo sapien
aaatagggtctttccagtgatactc

SEQ ID NO: 3378959 - DNA, 25 bp, Homo sapien
ccaacttaacttgtcaattaatcag

SEQ ID NO: 3378960 - DNA, 25 bp, Homo sapien
atttatggttgaattagacctgaag

SEQ ID NO: 3378961 - DNA, 25 bp, Homo sapien
atggttgaattagacctgaagcagc

SEQ ID NO: 3378962 - DNA, 25 bp, Homo sapien
ctcccaacttaacttgtcaattaat

SEQ ID NO: 3378963 - DNA, 25 bp, Homo sapien
gaaatcacaatctggagcacttgcc

SEQ ID NO: 3378964 - DNA, 25 bp, Homo sapien
agtgattattccctacgaccccaga

SEQ ID NO: 3378965 - DNA, 25 bp, Homo sapien
gcagtgtctggcaaattacaggtca

SEQ ID NO: 3378966 - DNA, 25 bp, Homo sapien
gaaataatactgatgcaggcaccca

SEQ ID NO: 3378967 - DNA, 25 bp, Homo sapien
caaaactgcaagctgtgacatggac

SEQ ID NO: 3378968 - DNA, 25 bp, Homo sapien
ctactgctttccaatacaacctcct

SEQ ID NO: 3378969 - DNA, 25 bp, Homo sapien
ctctcgcaattcgtccacactactg

SEQ ID NO: 3378970 - DNA, 25 bp, Homo sapien
cttctctcgcaattcgtccacacta

SEQ ID NO: 3378971 - DNA, 25 bp, Homo sapien
cgcaattcgtccacactactgcttt

SEQ ID NO: 3378972 - DNA, 25 bp, Homo sapien
tgtgccacaaggtgtgacagaaacc

SEQ ID NO: 3378973 - DNA, 25 bp, Homo sapien
caagtaacagaaagtgaggatccac

SEQ ID NO: 3378974 - DNA, 25 bp, Homo sapien
aggagcctgaacaaccagagtgtgc

SEQ ID NO: 3378975 - DNA, 25 bp, Homo sapien
gaggatccacttctgaatggccagg

SEQ ID NO: 3378976 - DNA, 25 bp, Homo sapien
gtttctaaaacatgtaaaatcagat

SEQ ID NO: 3378977 - DNA, 25 bp, Homo sapien
cgtttctaaaacatgtaaaatcaga

SEQ ID NO: 3378978 - DNA, 25 bp, Homo sapien
ttctaaaacatgtaaaatcagatta

SEQ ID NO: 3378979 - DNA, 25 bp, Homo sapien
ctaaaacatgtaaaatcagattaat

SEQ ID NO: 3378980 - DNA, 25 bp, Homo sapien
tttaccccacaaacagaaatagctc

SEQ ID NO: 3378981 - DNA, 25 bp, Homo sapien
taccccacaaacagaaatagctcag

SEQ ID NO: 3378982 - DNA, 25 bp, Homo sapien
caaataccatgtcccagaaatacca

SEQ ID NO: 3378983 - DNA, 25 bp, Homo sapien
agaaaaagcagaaagcggccaccct

SEQ ID NO: 3378984 - DNA, 25 bp, Homo sapien
aaggaatcccactgatttcactaag

SEQ ID NO: 3378985 - DNA, 25 bp, Homo sapien
aaaggaatcccactgatttcactaa

SEQ ID NO: 3378986 - DNA, 25 bp, Homo sapien
ccaaaggaatcccactgatttcact

SEQ ID NO: 3378987 - DNA, 25 bp, Homo sapien
caaaggaatcccactgatttcacta

SEQ ID NO: 3378988 - DNA, 25 bp, Homo sapien
taaagaggccagacattcagggtag

SEQ ID NO: 3378989 - DNA, 25 bp, Homo sapien
tatcacagggaaatgttcctctacc

SEQ ID NO: 3378990 - DNA, 25 bp, Homo sapien
gtctaaatcctgatgaatatcaagg

SEQ ID NO: 3378991 - DNA, 25 bp, Homo sapien
catcatcacagatataaagaggcca

SEQ ID NO: 3378992 - DNA, 25 bp, Homo sapien
tatttctaccggttagtgccgctcc

SEQ ID NO: 3378993 - DNA, 25 bp, Homo sapien
catattagtccagtagagccctcca

SEQ ID NO: 3378994 - DNA, 25 bp, Homo sapien
taaaagtggcggagaataacttcca

SEQ ID NO: 3378995 - DNA, 25 bp, Homo sapien
gaatgctatgatgctcctcagcaag

SEQ ID NO: 3378996 - DNA, 25 bp, Homo sapien
tgagtatgttacacgatgtccagtc

SEQ ID NO: 3378997 - DNA, 25 bp, Homo sapien
ggtgctccatccagatatattttta

SEQ ID NO: 3378998 - DNA, 25 bp, Homo sapien
gtcttctggagtcgactgctttctt

SEQ ID NO: 3378999 - DNA, 25 bp, Homo sapien
agtgctttctctttacgaggtgagt

SEQ ID NO: 3379000 - DNA, 25 bp, Homo sapien
gtgtagggcagtccaatcagtgctg

SEQ ID NO: 3379001 - DNA, 25 bp, Homo sapien
gattccgagtcaaaacagtggccca

SEQ ID NO: 3379002 - DNA, 25 bp, Homo sapien
tatagtgcacaacatgattccgagt

SEQ ID NO: 3379003 - DNA, 25 bp, Homo sapien
ccaaaatggcactacccagtggtag

SEQ ID NO: 3379004 - DNA, 25 bp, Homo sapien
tgagcatcctgtttgaggctagttt

SEQ ID NO: 3379005 - DNA, 25 bp, Homo sapien
catttgtccgcaataaaagaagttt

SEQ ID NO: 3379006 - DNA, 25 bp, Homo sapien
ttactagcggctatgtgcacatttg

SEQ ID NO: 3379007 - DNA, 25 bp, Homo sapien
gaggctagttttactagcggctatg

SEQ ID NO: 3379008 - DNA, 25 bp, Homo sapien
ctgctgggatcggtctaagggaaac

SEQ ID NO: 3379009 - DNA, 25 bp, Homo sapien
gctttccaagagtcaacacacgttg

SEQ ID NO: 3379010 - DNA, 25 bp, Homo sapien
caattccttactgggttacggctgg

SEQ ID NO: 3379011 - DNA, 25 bp, Homo sapien
ttacaacactgcagcaatctgagct

SEQ ID NO: 3379012 - DNA, 25 bp, Homo sapien
taatcatggcagatagttgaactgc

SEQ ID NO: 3379013 - DNA, 25 bp, Homo sapien
caagggcaacgacaatcctatggga

SEQ ID NO: 3379014 - DNA, 25 bp, Homo sapien
cagagaaacctcattaacaagggca

SEQ ID NO: 3379015 - DNA, 25 bp, Homo sapien
cctatgggacctagcactgaggaac

SEQ ID NO: 3379016 - DNA, 25 bp, Homo sapien
aattagatggtatgtcaaaatttat

SEQ ID NO: 3379017 - DNA, 25 bp, Homo sapien
attagatggtatgtcaaaatttatg

SEQ ID NO: 3379018 - DNA, 25 bp, Homo sapien
aaattagatggtatgtcaaaattta

SEQ ID NO: 3379019 - DNA, 25 bp, Homo sapien
taaacagcatctggcatgaaaaagt

SEQ ID NO: 3379020 - DNA, 25 bp, Homo sapien
tgttttattggcatgttcattgttg

SEQ ID NO: 3379021 - DNA, 25 bp, Homo sapien
tattggcatgttcattgttgtaaac

SEQ ID NO: 3379022 - DNA, 25 bp, Homo sapien
gttgtaaacagcatctggcatgaaa

SEQ ID NO: 3379023 - DNA, 25 bp, Homo sapien
tgagtgcccgccttagaaacacagg

SEQ ID NO: 3379024 - DNA, 25 bp, Homo sapien
tacaattcctaactgtggcctggca

SEQ ID NO: 3379025 - DNA, 25 bp, Homo sapien
gataagagatcatgaggctccaccg

SEQ ID NO: 3379026 - DNA, 25 bp, Homo sapien
tacagatcagctacacacggcatgg

SEQ ID NO: 3379027 - DNA, 25 bp, Homo sapien
caaaattagggccttgacgctgaac

SEQ ID NO: 3379028 - DNA, 25 bp, Homo sapien
tccacgtaatgtggtttagactaca

SEQ ID NO: 3379029 - DNA, 25 bp, Homo sapien
gctaattcagagtatcctctagtcc

SEQ ID NO: 3379030 - DNA, 25 bp, Homo sapien
gaactacagtatccaatcaaaaagg

SEQ ID NO: 3379031 - DNA, 25 bp, Homo sapien
gccctaccacagaaagagtctttga

SEQ ID NO: 3379032 - DNA, 25 bp, Homo sapien
tgacattgaggaggaaaccaatcct

SEQ ID NO: 3379033 - DNA, 25 bp, Homo sapien
tgatgaaccatagcctgcaggagaa

SEQ ID NO: 3379034 - DNA, 25 bp, Homo sapien
caggagctatttgcatgatgaacca

SEQ ID NO: 3379035 - DNA, 25 bp, Homo sapien
tgtgatcaaattgcgcccacctaga

SEQ ID NO: 3379036 - DNA, 25 bp, Homo sapien
ctataggtcactggcattccttggc

SEQ ID NO: 3379037 - DNA, 25 bp, Homo sapien
ttctacaggtgggaaaggttctcca

SEQ ID NO: 3379038 - DNA, 25 bp, Homo sapien
tcaaatcctgcaatgacagttctgt

SEQ ID NO: 3379039 - DNA, 25 bp, Homo sapien
caaagacagtcaacccgatgtggga

SEQ ID NO: 3379040 - DNA, 25 bp, Homo sapien
tatgcgactgcgaacactgaactct

SEQ ID NO: 3379041 - DNA, 25 bp, Homo sapien
gaagacaattatcaaccacgtggag

SEQ ID NO: 3379042 - DNA, 25 bp, Homo sapien
cagatgccgtcaggtaaactgctca

SEQ ID NO: 3379043 - DNA, 25 bp, Homo sapien
cacagctagtgaagaccagagcagt

SEQ ID NO: 3379044 - DNA, 25 bp, Homo sapien
cagacagccgtttgttctacatggc

SEQ ID NO: 3379045 - DNA, 25 bp, Homo sapien
catctggttgtgactctaagctcag

SEQ ID NO: 3379046 - DNA, 25 bp, Homo sapien
tcattgttctcctcgtccatcaggg

SEQ ID NO: 3379047 - DNA, 25 bp, Homo sapien
taaagctgccggttcgtaggcctga

SEQ ID NO: 3379048 - DNA, 25 bp, Homo sapien
tcgtaggcctgagcctgacagcagg

SEQ ID NO: 3379049 - DNA, 25 bp, Homo sapien
tcaatggccattcctgtcatcatgt

SEQ ID NO: 3379050 - DNA, 25 bp, Homo sapien
tcaagcctgatacctcaaaagggcg

SEQ ID NO: 3379051 - DNA, 25 bp, Homo sapien
tgcagtgttgatcagagcagcagag

SEQ ID NO: 3379052 - DNA, 25 bp, Homo sapien
tgccggaggtccaggcctgcccggc

SEQ ID NO: 3379053 - DNA, 25 bp, Homo sapien
ttgcagtgttgatcagagcagcaga

SEQ ID NO: 3379054 - DNA, 25 bp, Homo sapien
agcctggagtttggagcagctgaaa

SEQ ID NO: 3379055 - DNA, 25 bp, Homo sapien
gctctgcatccagacgctgtaggtc

SEQ ID NO: 3379056 - DNA, 25 bp, Homo sapien
ggcctgtgggccctgagcagataca

SEQ ID NO: 3379057 - DNA, 25 bp, Homo sapien
gacacaagggtaggacagttggagc

SEQ ID NO: 3379058 - DNA, 25 bp, Homo sapien
gatgcgggctgactgttcccagggc

SEQ ID NO: 3379059 - DNA, 25 bp, Homo sapien
gatgtcagaatcacagatgcgggct

SEQ ID NO: 3379060 - DNA, 25 bp, Homo sapien
acagatgcgggctgactgttcccag

SEQ ID NO: 3379061 - DNA, 25 bp, Homo sapien
cttttatgatgtcagaatcacagat

SEQ ID NO: 3379062 - DNA, 25 bp, Homo sapien
ttgacagcagcgtagcccagatagg

SEQ ID NO: 3379063 - DNA, 25 bp, Homo sapien
agatgtaggagtgcccagctcatcc

SEQ ID NO: 3379064 - DNA, 25 bp, Homo sapien
atctcccagatggaccatttgacag

SEQ ID NO: 3379065 - DNA, 25 bp, Homo sapien
tcagatgtaggagtgcccagctcat

SEQ ID NO: 3379066 - DNA, 25 bp, Homo sapien
agatctcattgctctgtctactgtc

SEQ ID NO: 3379067 - DNA, 25 bp, Homo sapien
gatctcattgctctgtctactgtca

SEQ ID NO: 3379068 - DNA, 25 bp, Homo sapien
tcagatctcattgctctgtctactg

SEQ ID NO: 3379069 - DNA, 25 bp, Homo sapien
cagatctcattgctctgtctactgt

SEQ ID NO: 3379070 - DNA, 25 bp, Homo sapien
tgagtcctaccagtcactagtgtga

SEQ ID NO: 3379071 - DNA, 25 bp, Homo sapien
tacagtactgtgcaggtcaaatgac

SEQ ID NO: 3379072 - DNA, 25 bp, Homo sapien
tctgacaataattaaccaacaggtt

SEQ ID NO: 3379073 - DNA, 25 bp, Homo sapien
gcattgctcatctgcgactgaagaa

SEQ ID NO: 3379074 - DNA, 25 bp, Homo sapien
tgtataggaagcatactggcttcta

SEQ ID NO: 3379075 - DNA, 25 bp, Homo sapien
aggaagcatactggcttctagggag

SEQ ID NO: 3379076 - DNA, 25 bp, Homo sapien
taggaagcatactggcttctaggga

SEQ ID NO: 3379077 - DNA, 25 bp, Homo sapien
tataggaagcatactggcttctagg

SEQ ID NO: 3379078 - DNA, 25 bp, Homo sapien
tctgggatccaaaagcaaggacctg

SEQ ID NO: 3379079 - DNA, 25 bp, Homo sapien
gaaagggcaacactactccatggct

SEQ ID NO: 3379080 - DNA, 25 bp, Homo sapien
gcatggttctggtgtgggccctcta

SEQ ID NO: 3379081 - DNA, 25 bp, Homo sapien
taatgctatgccagttgccaggccc

SEQ ID NO: 3379082 - DNA, 25 bp, Homo sapien
atgacagattgatgtcagagctgcc

SEQ ID NO: 3379083 - DNA, 25 bp, Homo sapien
tctaaaagtgtcctctggaatgaca

SEQ ID NO: 3379084 - DNA, 25 bp, Homo sapien
atctaaaagtgtcctctggaatgac

SEQ ID NO: 3379085 - DNA, 25 bp, Homo sapien
cctctggaatgacagattgatgtca

SEQ ID NO: 3379086 - DNA, 25 bp, Homo sapien
ctgctggccgcctgctagtttatca

SEQ ID NO: 3379087 - DNA, 25 bp, Homo sapien
tggccgcctgctagtttatcaaacc

SEQ ID NO: 3379088 - DNA, 25 bp, Homo sapien
tagtttatcaaacccctccacatgg

SEQ ID NO: 3379089 - DNA, 25 bp, Homo sapien
aggcggagcagggatcttcctgttg

SEQ ID NO: 3379090 - DNA, 25 bp, Homo sapien
gtgggccctgccatttgtgaaccgg

SEQ ID NO: 3379091 - DNA, 25 bp, Homo sapien
tgccatttgtgaaccggatgggcag

SEQ ID NO: 3379092 - DNA, 25 bp, Homo sapien
gtgatgctcagagttctagatgcca

SEQ ID NO: 3379093 - DNA, 25 bp, Homo sapien
ccggatgggcagtagtggatggtga

SEQ ID NO: 3379094 - DNA, 25 bp, Homo sapien
agagccagggtacacagcgtgcaca

SEQ ID NO: 3379095 - DNA, 25 bp, Homo sapien
tttcgtagactcaatgacacagacc

SEQ ID NO: 3379096 - DNA, 25 bp, Homo sapien
tgttcccatcttcggaggccctttg

SEQ ID NO: 3379097 - DNA, 25 bp, Homo sapien
ccctttggtcctcatatttcgtaga

SEQ ID NO: 3379098 - DNA, 25 bp, Homo sapien
tcagcattggtacagggactgggtg

SEQ ID NO: 3379099 - DNA, 25 bp, Homo sapien
cctgaggagcccctgttccatccac

SEQ ID NO: 3379100 - DNA, 25 bp, Homo sapien
ggactgggtggaaggcgagttctga

SEQ ID NO: 3379101 - DNA, 25 bp, Homo sapien
tgaggagcccctgttccatccactg

SEQ ID NO: 3379102 - DNA, 25 bp, Homo sapien
gatgggcagtgcttgcaggctcaca

SEQ ID NO: 3379103 - DNA, 25 bp, Homo sapien
taagttgagtgaagagtacccaggg

SEQ ID NO: 3379104 - DNA, 25 bp, Homo sapien
tcagggtccctgaatgacactggaa

SEQ ID NO: 3379105 - DNA, 25 bp, Homo sapien
tgtggtcaagcacaacaacgatgcc

SEQ ID NO: 3379106 - DNA, 25 bp, Homo sapien
taagctttgacagtagggtctccat

SEQ ID NO: 3379107 - DNA, 25 bp, Homo sapien
gaaatcgaattgttccacccacgga

SEQ ID NO: 3379108 - DNA, 25 bp, Homo sapien
gtggttcatcaaaattccccagagg

SEQ ID NO: 3379109 - DNA, 25 bp, Homo sapien
tgcccaaagacgcagccggagataa

SEQ ID NO: 3379110 - DNA, 25 bp, Homo sapien
atcctgacaaggcttggcccccaga

SEQ ID NO: 3379111 - DNA, 25 bp, Homo sapien
caggcatcatattggcaggcaggct

SEQ ID NO: 3379112 - DNA, 25 bp, Homo sapien
aagggcagatggagctccatctggg

SEQ ID NO: 3379113 - DNA, 25 bp, Homo sapien
agagaaagcttggtcttgtttggag

SEQ ID NO: 3379114 - DNA, 25 bp, Homo sapien
tttcactgttttagctttccagcct

SEQ ID NO: 3379115 - DNA, 25 bp, Homo sapien
ctttcactgttttagctttccagcc

SEQ ID NO: 3379116 - DNA, 25 bp, Homo sapien
gctggcgacaaagctcagaagggcc

SEQ ID NO: 3379117 - DNA, 25 bp, Homo sapien
tggtccttgaggcagtgatcactgg

SEQ ID NO: 3379118 - DNA, 25 bp, Homo sapien
gtacaagctcattcataccagggct

SEQ ID NO: 3379119 - DNA, 25 bp, Homo sapien
agaggaaaccaagacgcagcgaggt

SEQ ID NO: 3379120 - DNA, 25 bp, Homo sapien
gatacttgttttcaggtgggtaaca

SEQ ID NO: 3379121 - DNA, 25 bp, Homo sapien
gaacttcctctttgaagcaggaagt

SEQ ID NO: 3379122 - DNA, 25 bp, Homo sapien
gctctgacaggaggagtctctggct

SEQ ID NO: 3379123 - DNA, 25 bp, Homo sapien
aacagcatctggcttctgaaggaac

SEQ ID NO: 3379124 - DNA, 25 bp, Homo sapien
ttgcaagcacatccccgtttgagca

SEQ ID NO: 3379125 - DNA, 25 bp, Homo sapien
gctttctcggtactcacactctcag

SEQ ID NO: 3379126 - DNA, 25 bp, Homo sapien
tctgtgtctggcgaactcctcatcc

SEQ ID NO: 3379127 - DNA, 25 bp, Homo sapien
caagcccagtgccatgctttctcgg

SEQ ID NO: 3379128 - DNA, 25 bp, Homo sapien
cgtgcagtttgttaaattaggtgaa

SEQ ID NO: 3379129 - DNA, 25 bp, Homo sapien
ggagttgctttgcttctcgtgcagt

SEQ ID NO: 3379130 - DNA, 25 bp, Homo sapien
tgtatgctccgggagttgctttgct

SEQ ID NO: 3379131 - DNA, 25 bp, Homo sapien
gctttgcttctcgtgcagtttgtta

SEQ ID NO: 3379132 - DNA, 25 bp, Homo sapien
caaggtaccttgtaatgggcataag

SEQ ID NO: 3379133 - DNA, 25 bp, Homo sapien
ggtctcagagcatacctttgcccaa

SEQ ID NO: 3379134 - DNA, 25 bp, Homo sapien
catcacagtgatgttgtcaggcttc

SEQ ID NO: 3379135 - DNA, 25 bp, Homo sapien
ccaaatcctggtgatccagggcaaa

SEQ ID NO: 3379136 - DNA, 25 bp, Homo sapien
tgtccacataaacccgaagcccatt

SEQ ID NO: 3379137 - DNA, 25 bp, Homo sapien
taagtagtctagctttagccccaga

SEQ ID NO: 3379138 - DNA, 25 bp, Homo sapien
aaccagagcaaacagcgatggagtg

SEQ ID NO: 3379139 - DNA, 25 bp, Homo sapien
tcccagccagatgtagcaaccagag

SEQ ID NO: 3379140 - DNA, 25 bp, Homo sapien
cctcacacaagccacccttgctgac

SEQ ID NO: 3379141 - DNA, 25 bp, Homo sapien
cacaagccacccttgctgaccatct

SEQ ID NO: 3379142 - DNA, 25 bp, Homo sapien
cacctcacacaagccacccttgctg

SEQ ID NO: 3379143 - DNA, 25 bp, Homo sapien
tcacacaagccacccttgctgacca

SEQ ID NO: 3379144 - DNA, 25 bp, Homo sapien
cgccgctgccgccggcgcacgtggg

SEQ ID NO: 3379145 - DNA, 25 bp, Homo sapien
gcaggcttagccagccgagcgcctg

SEQ ID NO: 3379146 - DNA, 25 bp, Homo sapien
gcccggcgcaggcttagccagccga

SEQ ID NO: 3379147 - DNA, 25 bp, Homo sapien
gggcgcagcgatcgggccccgcggg

SEQ ID NO: 3379148 - DNA, 25 bp, Homo sapien
tcgggccccgcgggccactgacaga

SEQ ID NO: 3379149 - DNA, 25 bp, Homo sapien
gggccaattcgcctctggcttttct

SEQ ID NO: 3379150 - DNA, 25 bp, Homo sapien
aacctggcacaaacactggagggcc

SEQ ID NO: 3379151 - DNA, 25 bp, Homo sapien
gtgcaggtgtcagggaacctggcac

SEQ ID NO: 3379152 - DNA, 25 bp, Homo sapien
cactggagggccaattcgcctctgg

SEQ ID NO: 3379153 - DNA, 25 bp, Homo sapien
gggcattgcacaggactaccctgga

SEQ ID NO: 3379154 - DNA, 25 bp, Homo sapien
ggcccacttgttgggtcgactgcca

SEQ ID NO: 3379155 - DNA, 25 bp, Homo sapien
gactaccctggagaccggaggccca

SEQ ID NO: 3379156 - DNA, 25 bp, Homo sapien
ttacggtattagagtctccagggca

SEQ ID NO: 3379157 - DNA, 25 bp, Homo sapien
cggtttgtcccgtgatgatggtagt

SEQ ID NO: 3379158 - DNA, 25 bp, Homo sapien
caccactgagatgggcggtttgtcc

SEQ ID NO: 3379159 - DNA, 25 bp, Homo sapien
aaatcagaccccatggttgacccaa

SEQ ID NO: 3379160 - DNA, 25 bp, Homo sapien
tttagacgcaaagacaggtacagtg

SEQ ID NO: 3379161 - DNA, 25 bp, Homo sapien
cgactgccctatttattcccctcaa

SEQ ID NO: 3379162 - DNA, 25 bp, Homo sapien
aggagctcagcacctcgactgccct

SEQ ID NO: 3379163 - DNA, 25 bp, Homo sapien
acacagacagggaactcctgctcct

SEQ ID NO: 3379164 - DNA, 25 bp, Homo sapien
gctccagcagtagcccccagaggag

SEQ ID NO: 3379165 - DNA, 25 bp, Homo sapien
caatggtggaatgggttagtgacca

SEQ ID NO: 3379166 - DNA, 25 bp, Homo sapien
gagaggatgtgtccatagaaacagg

SEQ ID NO: 3379167 - DNA, 25 bp, Homo sapien
tgatacagatcccaggctagccaga

SEQ ID NO: 3379168 - DNA, 25 bp, Homo sapien
tgagatcagacaccctgagagcgca

SEQ ID NO: 3379169 - DNA, 25 bp, Homo sapien
taaagcatctcaggtctggcaaagc

SEQ ID NO: 3379170 - DNA, 25 bp, Homo sapien
cactccactgaactgggcagacgag

SEQ ID NO: 3379171 - DNA, 25 bp, Homo sapien
caccatgggcctatgttttcaaagg

SEQ ID NO: 3379172 - DNA, 25 bp, Homo sapien
caattataggtacctggactggcca

SEQ ID NO: 3379173 - DNA, 25 bp, Homo sapien
gcagtacactagcagggatccatgg

SEQ ID NO: 3379174 - DNA, 25 bp, Homo sapien
gatgggtgttgcctcagagcagccc

SEQ ID NO: 3379175 - DNA, 25 bp, Homo sapien
tcctgggtgagatatggtgccacac

SEQ ID NO: 3379176 - DNA, 25 bp, Homo sapien
gctgggactgcgaggaacattaaaa

SEQ ID NO: 3379177 - DNA, 25 bp, Homo sapien
tatcgttgcttgtctcacttactca

SEQ ID NO: 3379178 - DNA, 25 bp, Homo sapien
agatgatctactcccgtatcccatg

SEQ ID NO: 3379179 - DNA, 25 bp, Homo sapien
gacgactatagtccctgtcacaaag

SEQ ID NO: 3379180 - DNA, 25 bp, Homo sapien
gattctgacttaatagggacgacta

SEQ ID NO: 3379181 - DNA, 25 bp, Homo sapien
ccccggagccatgcccattatgaga

SEQ ID NO: 3379182 - DNA, 25 bp, Homo sapien
tatgagaggcataagctatgcatcc

SEQ ID NO: 3379183 - DNA, 25 bp, Homo sapien
gaagttaccgaaaccaacagcgagc

SEQ ID NO: 3379184 - DNA, 25 bp, Homo sapien
taataacagccctcaacaagtgcct

SEQ ID NO: 3379185 - DNA, 25 bp, Homo sapien
ctctttctgggatgagacacacacg

SEQ ID NO: 3379186 - DNA, 25 bp, Homo sapien
ggattctcaggcatcacagtggtta

SEQ ID NO: 3379187 - DNA, 25 bp, Homo sapien
gatgagacacacacgggttgccatg

SEQ ID NO: 3379188 - DNA, 25 bp, Homo sapien
catcacagtggttaaagtcttctct

SEQ ID NO: 3379189 - DNA, 25 bp, Homo sapien
tcttatagagacctcacgtgtggcc

SEQ ID NO: 3379190 - DNA, 25 bp, Homo sapien
cagtgagcagcaccatcgtgactct

SEQ ID NO: 3379191 - DNA, 25 bp, Homo sapien
aaaatgtgcacttagtcaggttcca

SEQ ID NO: 3379192 - DNA, 25 bp, Homo sapien
gcagccaaatccttcgagtcaaatt

SEQ ID NO: 3379193 - DNA, 25 bp, Homo sapien
catacagaattcaggacagtgctgg

SEQ ID NO: 3379194 - DNA, 25 bp, Homo sapien
tgaacacttccttacagcatcatgt

SEQ ID NO: 3379195 - DNA, 25 bp, Homo sapien
ctagggaacctcatagaaagtagtt

SEQ ID NO: 3379196 - DNA, 25 bp, Homo sapien
ggaagggctgacctagcactcagaa

SEQ ID NO: 3379197 - DNA, 25 bp, Homo sapien
gacaaacagtctcttctcaaaactt

SEQ ID NO: 3379198 - DNA, 25 bp, Homo sapien
ttcattcgttaccagagagcagggc

SEQ ID NO: 3379199 - DNA, 25 bp, Homo sapien
tcttcattcgttaccagagagcagg

SEQ ID NO: 3379200 - DNA, 25 bp, Homo sapien
ccacatgacaaacagtctcttctca

SEQ ID NO: 3379201 - DNA, 25 bp, Homo sapien
ggttcaggagtcgtgtgcggcagtg

SEQ ID NO: 3379202 - DNA, 25 bp, Homo sapien
gacacaggtgaacagcatgaagtat

SEQ ID NO: 3379203 - DNA, 25 bp, Homo sapien
caggtgaacagcatgaagtatctgg

SEQ ID NO: 3379204 - DNA, 25 bp, Homo sapien
tcgtgtgcggcagtggtgcggcgag

SEQ ID NO: 3379205 - DNA, 25 bp, Homo sapien
tccagagggtctaggtccaggtgtc

SEQ ID NO: 3379206 - DNA, 25 bp, Homo sapien
gggaaccacgcttatccaatttgta

SEQ ID NO: 3379207 - DNA, 25 bp, Homo sapien
tggatgcctggacaaagttctcaaa

SEQ ID NO: 3379208 - DNA, 25 bp, Homo sapien
gagggtacctttgcacgtggatgcc

SEQ ID NO: 3379209 - DNA, 25 bp, Homo sapien
gcttgaaagggctgccaatcacagt

SEQ ID NO: 3379210 - DNA, 25 bp, Homo sapien
caatcatgtgatgcttgaaagggct

SEQ ID NO: 3379211 - DNA, 25 bp, Homo sapien
catgtgatgcttgaaagggctgcca

SEQ ID NO: 3379212 - DNA, 25 bp, Homo sapien
tgatgcttgaaagggctgccaatca

SEQ ID NO: 3379213 - DNA, 25 bp, Homo sapien
ggtgttaccctaatacagagccagt

SEQ ID NO: 3379214 - DNA, 25 bp, Homo sapien
tggtgctcagcatatggcagcggct

SEQ ID NO: 3379215 - DNA, 25 bp, Homo sapien
tatacacgcacatatggtggcacgg

SEQ ID NO: 3379216 - DNA, 25 bp, Homo sapien
agattttggaactggcacctgagcc

SEQ ID NO: 3379217 - DNA, 25 bp, Homo sapien
cctggtaaggtgtagggcactggaa

SEQ ID NO: 3379218 - DNA, 25 bp, Homo sapien
ctgggaaggagagcgttaaactgct

SEQ ID NO: 3379219 - DNA, 25 bp, Homo sapien
gggaaggagagcgttaaactgcttc

SEQ ID NO: 3379220 - DNA, 25 bp, Homo sapien
gtctgggaaggagagcgttaaactg

SEQ ID NO: 3379221 - DNA, 25 bp, Homo sapien
gaaggagagcgttaaactgcttcat

SEQ ID NO: 3379222 - DNA, 25 bp, Homo sapien
ggaggctgaactgaacctggtactc

SEQ ID NO: 3379223 - DNA, 25 bp, Homo sapien
tcttacaaattcagcgcaggagaac

SEQ ID NO: 3379224 - DNA, 25 bp, Homo sapien
ctgcagctgaatgcactcttacaaa

SEQ ID NO: 3379225 - DNA, 25 bp, Homo sapien
gaatcaggctcagtgaactgcccag

SEQ ID NO: 3379226 - DNA, 25 bp, Homo sapien
cagcagcaccagaagaaaggccagt

SEQ ID NO: 3379227 - DNA, 25 bp, Homo sapien
tgtggccgtgtgcagcagcaccaga

SEQ ID NO: 3379228 - DNA, 25 bp, Homo sapien
gaaaggccagtggtatgcccttcat

SEQ ID NO: 3379229 - DNA, 25 bp, Homo sapien
agaaaggccagtggtatgcccttca

SEQ ID NO: 3379230 - DNA, 25 bp, Homo sapien
ctctcccgggctggaatttcagaga

SEQ ID NO: 3379231 - DNA, 25 bp, Homo sapien
cagagaagcagctgactaccacatt

SEQ ID NO: 3379232 - DNA, 25 bp, Homo sapien
agagaagcagctgactaccacattt

SEQ ID NO: 3379233 - DNA, 25 bp, Homo sapien
tggcaagagggctgtcatctccctg

SEQ ID NO: 3379234 - DNA, 25 bp, Homo sapien
ctgtaacggaagacctccccctgca

SEQ ID NO: 3379235 - DNA, 25 bp, Homo sapien
tgtaacggaagacctccccctgcag

SEQ ID NO: 3379236 - DNA, 25 bp, Homo sapien
agctggcaagagggctgtcatctcc

SEQ ID NO: 3379237 - DNA, 25 bp, Homo sapien
cagcaaaagtgcaggcgccagttaa

SEQ ID NO: 3379238 - DNA, 25 bp, Homo sapien
tcttaagcactggagagctctcagc

SEQ ID NO: 3379239 - DNA, 25 bp, Homo sapien
aagtttccagcaaaagtgcaggcgc

SEQ ID NO: 3379240 - DNA, 25 bp, Homo sapien
tattcctgcgtaggcaagatcttgt

SEQ ID NO: 3379241 - DNA, 25 bp, Homo sapien
gctgctcatgggcccgtgggcctca

SEQ ID NO: 3379242 - DNA, 25 bp, Homo sapien
gacctccctgccgctgatgtctggg

SEQ ID NO: 3379243 - DNA, 25 bp, Homo sapien
aggagggcagatgggtacacagccc

SEQ ID NO: 3379244 - DNA, 25 bp, Homo sapien
aaggggacctccctgccgctgatgt

SEQ ID NO: 3379245 - DNA, 25 bp, Homo sapien
ggaatgtagttttgagtcaacttgc

SEQ ID NO: 3379246 - DNA, 25 bp, Homo sapien
cagcggaatgtagttttgagtcaac

SEQ ID NO: 3379247 - DNA, 25 bp, Homo sapien
aatgtagttttgagtcaacttgcag

SEQ ID NO: 3379248 - DNA, 25 bp, Homo sapien
gcggaatgtagttttgagtcaactt

SEQ ID NO: 3379249 - DNA, 25 bp, Homo sapien
caacccacttcttgacatggtgcat

SEQ ID NO: 3379250 - DNA, 25 bp, Homo sapien
ggaacctgcaaacacaacccacttc

SEQ ID NO: 3379251 - DNA, 25 bp, Homo sapien
tcctccccaggggaacctgcaaaca

SEQ ID NO: 3379252 - DNA, 25 bp, Homo sapien
gtgtgacttctgctcctccccaggg

SEQ ID NO: 3379253 - DNA, 25 bp, Homo sapien
aaccttccagagagtttgtagacac

SEQ ID NO: 3379254 - DNA, 25 bp, Homo sapien
tggttggaaccttccagagagtttg

SEQ ID NO: 3379255 - DNA, 25 bp, Homo sapien
ttggaaccttccagagagtttgtag

SEQ ID NO: 3379256 - DNA, 25 bp, Homo sapien
ggaaccttccagagagtttgtagac

SEQ ID NO: 3379257 - DNA, 25 bp, Homo sapien
atagaacttcttggctcccaggcca

SEQ ID NO: 3379258 - DNA, 25 bp, Homo sapien
ccagaggtgtagcacgttgttccgg

SEQ ID NO: 3379259 - DNA, 25 bp, Homo sapien
gaaggtcatggatggtgaaaggcca

SEQ ID NO: 3379260 - DNA, 25 bp, Homo sapien
cccaggtaggcaagttcaatggcag

SEQ ID NO: 3379261 - DNA, 25 bp, Homo sapien
tactgagcgggattatgcaccaaga

SEQ ID NO: 3379262 - DNA, 25 bp, Homo sapien
gaatgctacataatcactgccgctc

SEQ ID NO: 3379263 - DNA, 25 bp, Homo sapien
tgagcacagcagtataccaacaatg

SEQ ID NO: 3379264 - DNA, 25 bp, Homo sapien
taactcttacagtggccctttggaa

SEQ ID NO: 3379265 - DNA, 25 bp, Homo sapien
aggatgagctgtagttggcgaatac

SEQ ID NO: 3379266 - DNA, 25 bp, Homo sapien
cagggccaccttgaataggatgagc

SEQ ID NO: 3379267 - DNA, 25 bp, Homo sapien
ccaccttgaataggatgagctgtag

SEQ ID NO: 3379268 - DNA, 25 bp, Homo sapien
aataggatgagctgtagttggcgaa

SEQ ID NO: 3379269 - DNA, 25 bp, Homo sapien
aggaggctctagaaccttcacgaac

SEQ ID NO: 3379270 - DNA, 25 bp, Homo sapien
cttcacgaactccacattcacatgg

SEQ ID NO: 3379271 - DNA, 25 bp, Homo sapien
tcacgaactccacattcacatggat

SEQ ID NO: 3379272 - DNA, 25 bp, Homo sapien
tctagaaccttcacgaactccacat

SEQ ID NO: 3379273 - DNA, 25 bp, Homo sapien
ccaaccagctcccagtaagaataac

SEQ ID NO: 3379274 - DNA, 25 bp, Homo sapien
ccaaacagcaaacctaaagtcatag

SEQ ID NO: 3379275 - DNA, 25 bp, Homo sapien
cctaaagtcatagcaatggtaaaaa

SEQ ID NO: 3379276 - DNA, 25 bp, Homo sapien
ggcttaatcataaatccccttggag

SEQ ID NO: 3379277 - DNA, 25 bp, Homo sapien
ttgccaaagtagcaaccccttggga

SEQ ID NO: 3379278 - DNA, 25 bp, Homo sapien
tgccaaagtagcaaccccttgggac

SEQ ID NO: 3379279 - DNA, 25 bp, Homo sapien
caaagtagcaaccccttgggacagg

SEQ ID NO: 3379280 - DNA, 25 bp, Homo sapien
ccaaagtagcaaccccttgggacag

SEQ ID NO: 3379281 - DNA, 25 bp, Homo sapien
ctcaaactccgacagagaatggtct

SEQ ID NO: 3379282 - DNA, 25 bp, Homo sapien
tcggcaccaatgatgacgtcaaact

SEQ ID NO: 3379283 - DNA, 25 bp, Homo sapien
ttccagggtgttcctgcggccatcg

SEQ ID NO: 3379284 - DNA, 25 bp, Homo sapien
gggagaaattctgcccgccagccaa

SEQ ID NO: 3379285 - DNA, 25 bp, Homo sapien
ttcccacaccaagaagaagagtctt

SEQ ID NO: 3379286 - DNA, 25 bp, Homo sapien
ccacaccaagaagaagagtcttcac

SEQ ID NO: 3379287 - DNA, 25 bp, Homo sapien
cccattcccacaccaagaagaagag

SEQ ID NO: 3379288 - DNA, 25 bp, Homo sapien
ccattcccacaccaagaagaagagt

SEQ ID NO: 3379289 - DNA, 25 bp, Homo sapien
cagcttcccacggaattcttttctt

SEQ ID NO: 3379290 - DNA, 25 bp, Homo sapien
aagttggcggtgatggcaatcgcca

SEQ ID NO: 3379291 - DNA, 25 bp, Homo sapien
ggcaatcgccagcttcccacggaat

SEQ ID NO: 3379292 - DNA, 25 bp, Homo sapien
gtttatgaagttggcggtgatggca

SEQ ID NO: 3379293 - DNA, 25 bp, Homo sapien
aacaggcatcaatgcagagggcccc

SEQ ID NO: 3379294 - DNA, 25 bp, Homo sapien
cactgttgtgaaacgatggccgaag

SEQ ID NO: 3379295 - DNA, 25 bp, Homo sapien
gaatcaggaaggtcgcgactgtcac

SEQ ID NO: 3379296 - DNA, 25 bp, Homo sapien
tgtcactgtctgagggcactgttgt

SEQ ID NO: 3379297 - DNA, 25 bp, Homo sapien
gtgggtgcagtccttgtagtaaaca

SEQ ID NO: 3379298 - DNA, 25 bp, Homo sapien
tgtcattacaaaatagtgggtgcag

SEQ ID NO: 3379299 - DNA, 25 bp, Homo sapien
gtgcagtccttgtagtaaacaatgt

SEQ ID NO: 3379300 - DNA, 25 bp, Homo sapien
gtcattacaaaatagtgggtgcagt

SEQ ID NO: 3379301 - DNA, 25 bp, Homo sapien
gaaatcgcagccaagaggtacgtac

SEQ ID NO: 3379302 - DNA, 25 bp, Homo sapien
cgaagtcgggaaatcgcagccaaga

SEQ ID NO: 3379303 - DNA, 25 bp, Homo sapien
agcccaggtcgcgaagtcgggaaat

SEQ ID NO: 3379304 - DNA, 25 bp, Homo sapien
atgtcaccagcccaggtcgcgaagt

SEQ ID NO: 3379305 - DNA, 25 bp, Homo sapien
ttaagcatgaagtcgcaaggccacg

SEQ ID NO: 3379306 - DNA, 25 bp, Homo sapien
gttactaatgccacccagacggctg

SEQ ID NO: 3379307 - DNA, 25 bp, Homo sapien
ggtgaccttagcatcccaggaggcc

SEQ ID NO: 3379308 - DNA, 25 bp, Homo sapien
ggttgtacacctgtccgaagaagct

SEQ ID NO: 3379309 - DNA, 25 bp, Homo sapien
accagctcaggagctgctcccaggg

SEQ ID NO: 3379310 - DNA, 25 bp, Homo sapien
aggctcctcagcaccagctcaggag

SEQ ID NO: 3379311 - DNA, 25 bp, Homo sapien
cttgaggctcctcagcaccagctca

SEQ ID NO: 3379312 - DNA, 25 bp, Homo sapien
ctcctcagcaccagctcaggagctg

SEQ ID NO: 3379313 - DNA, 25 bp, Homo sapien
tcttggagcaaacaacgagcacatt

SEQ ID NO: 3379314 - DNA, 25 bp, Homo sapien
gccccatgtgggaagtgaccgatga

SEQ ID NO: 3379315 - DNA, 25 bp, Homo sapien
gagtgtacacacgaaatccctagcc

SEQ ID NO: 3379316 - DNA, 25 bp, Homo sapien
cctggagggacactagcaatgaaac

SEQ ID NO: 3379317 - DNA, 25 bp, Homo sapien
caaagtctaaggatggcagctggta

SEQ ID NO: 3379318 - DNA, 25 bp, Homo sapien
gcttcccgggcataggatagcaggt

SEQ ID NO: 3379319 - DNA, 25 bp, Homo sapien
ccagggccgcgttctctgaggcata

SEQ ID NO: 3379320 - DNA, 25 bp, Homo sapien
cccatagtggttcatggcaaagtct

SEQ ID NO: 3379321 - DNA, 25 bp, Homo sapien
tcttcaccatccatgccgtgtcaaa

SEQ ID NO: 3379322 - DNA, 25 bp, Homo sapien
ccatgccgtgtcaaaggctgccagg

SEQ ID NO: 3379323 - DNA, 25 bp, Homo sapien
accatccatgccgtgtcaaaggctg

SEQ ID NO: 3379324 - DNA, 25 bp, Homo sapien
catccatgccgtgtcaaaggctgcc

SEQ ID NO: 3379325 - DNA, 25 bp, Homo sapien
tgggtccaacgtgtactgctcaaag

SEQ ID NO: 3379326 - DNA, 25 bp, Homo sapien
ttctccggggttgtctgaggtaaca

SEQ ID NO: 3379327 - DNA, 25 bp, Homo sapien
tctgaggtaacagccggtagagact

SEQ ID NO: 3379328 - DNA, 25 bp, Homo sapien
cagtgtgagttgaggtttgggtacc

SEQ ID NO: 3379329 - DNA, 25 bp, Homo sapien
cagagtgattcagacagagccccag

SEQ ID NO: 3379330 - DNA, 25 bp, Homo sapien
gcagagtgattcagacagagcccca

SEQ ID NO: 3379331 - DNA, 25 bp, Homo sapien
cttagtcccaggaatggaccaaaat

SEQ ID NO: 3379332 - DNA, 25 bp, Homo sapien
tggtggccttagtcccaggaatgga

SEQ ID NO: 3379333 - DNA, 25 bp, Homo sapien
tggccttagtcccaggaatggacca

SEQ ID NO: 3379334 - DNA, 25 bp, Homo sapien
gccttggtggccttagtcccaggaa

SEQ ID NO: 3379335 - DNA, 25 bp, Homo sapien
tctctcgagagggtagtgctccagc

SEQ ID NO: 3379336 - DNA, 25 bp, Homo sapien
ggttgacagatctcctcaccgagcc

SEQ ID NO: 3379337 - DNA, 25 bp, Homo sapien
tcaccgagcccagtctctcgagagg

SEQ ID NO: 3379338 - DNA, 25 bp, Homo sapien
ccagctccttagtgatatacaaatg

SEQ ID NO: 3379339 - DNA, 25 bp, Homo sapien
acacggtctgccctggcgctccctt

SEQ ID NO: 3379340 - DNA, 25 bp, Homo sapien
caggaatctcacacggtctgccctg

SEQ ID NO: 3379341 - DNA, 25 bp, Homo sapien
tctgcaggaatctcacacggtctgc

SEQ ID NO: 3379342 - DNA, 25 bp, Homo sapien
ccaggacgagcggccccaaggcaag

SEQ ID NO: 3379343 - DNA, 25 bp, Homo sapien
tcaggtcggtgacgttgacatgctg

SEQ ID NO: 3379344 - DNA, 25 bp, Homo sapien
gacatgctggtagccctctgtctgc

SEQ ID NO: 3379345 - DNA, 25 bp, Homo sapien
ggccaacccactgcgccaggatgtg

SEQ ID NO: 3379346 - DNA, 25 bp, Homo sapien
tcaggagcttgctgggccggatatc

SEQ ID NO: 3379347 - DNA, 25 bp, Homo sapien
gtgggcacctgtaatcccagctact

SEQ ID NO: 3379348 - DNA, 25 bp, Homo sapien
aacatggcaaaactctatctctact

SEQ ID NO: 3379349 - DNA, 25 bp, Homo sapien
tagccgggtgtggtggtgggcacct

SEQ ID NO: 3379350 - DNA, 25 bp, Homo sapien
agctcagttcgagaccaggctggcc

SEQ ID NO: 3379351 - DNA, 25 bp, Homo sapien
tgccccggaagagctcgtagaactt

SEQ ID NO: 3379352 - DNA, 25 bp, Homo sapien
cttggagaggtacatgaccatgctg

SEQ ID NO: 3379353 - DNA, 25 bp, Homo sapien
tcactggagggatcccaaactctcg

SEQ ID NO: 3379354 - DNA, 25 bp, Homo sapien
aatgcgagctggttgttctccacag

SEQ ID NO: 3379355 - DNA, 25 bp, Homo sapien
ttctccatagtttttgcgccaagaa

SEQ ID NO: 3379356 - DNA, 25 bp, Homo sapien
atgatttggccaagctgaggtcagc

SEQ ID NO: 3379357 - DNA, 25 bp, Homo sapien
tctccatagtttttgcgccaagaat

SEQ ID NO: 3379358 - DNA, 25 bp, Homo sapien
aaatggatgatttggccaagctgag

SEQ ID NO: 3379359 - DNA, 25 bp, Homo sapien
gaacctctttattaggctccgagct

SEQ ID NO: 3379360 - DNA, 25 bp, Homo sapien
gaagttgacctataggagagcccaa

SEQ ID NO: 3379361 - DNA, 25 bp, Homo sapien
aaactgatggccgtcatgttccaga

SEQ ID NO: 3379362 - DNA, 25 bp, Homo sapien
aatatgttctatcagctcgctacca

SEQ ID NO: 3379363 - DNA, 25 bp, Homo sapien
agctcaattcccatatcaatatatt

SEQ ID NO: 3379364 - DNA, 25 bp, Homo sapien
ctcaattcccatatcaatatattcc

SEQ ID NO: 3379365 - DNA, 25 bp, Homo sapien
gctcaattcccatatcaatatattc

SEQ ID NO: 3379366 - DNA, 25 bp, Homo sapien
aagcggcactcttgactcccctaag

SEQ ID NO: 3379367 - DNA, 25 bp, Homo sapien
ccctaagccttcttcaaacctctgc

SEQ ID NO: 3379368 - DNA, 25 bp, Homo sapien
cagccttggaaagcggcactcttga

SEQ ID NO: 3379369 - DNA, 25 bp, Homo sapien
tggcccagccttggaaagcggcact

SEQ ID NO: 3379370 - DNA, 25 bp, Homo sapien
tcagctctgaatcctggactgagat

SEQ ID NO: 3379371 - DNA, 25 bp, Homo sapien
cagctctgaatcctggactgagatt

SEQ ID NO: 3379372 - DNA, 25 bp, Homo sapien
ctctgaatcctggactgagattgcg

SEQ ID NO: 3379373 - DNA, 25 bp, Homo sapien
gctctgaatcctggactgagattgc

SEQ ID NO: 3379374 - DNA, 25 bp, Homo sapien
tgggactgttccacgggagcctata

SEQ ID NO: 3379375 - DNA, 25 bp, Homo sapien
ccatgggcttatgaagggcattcct

SEQ ID NO: 3379376 - DNA, 25 bp, Homo sapien
gaagcactgattctcaactaagagc

SEQ ID NO: 3379377 - DNA, 25 bp, Homo sapien
tgtactcaacaagcccagggtggga

SEQ ID NO: 3379378 - DNA, 25 bp, Homo sapien
ctcctggttgtctgaaacaacaacc

SEQ ID NO: 3379379 - DNA, 25 bp, Homo sapien
tggttgtctgaaacaacaaccctag

SEQ ID NO: 3379380 - DNA, 25 bp, Homo sapien
tcctggttgtctgaaacaacaaccc

SEQ ID NO: 3379381 - DNA, 25 bp, Homo sapien
cctggttgtctgaaacaacaaccct

SEQ ID NO: 3379382 - DNA, 25 bp, Homo sapien
tccgtctccgtttgttcatgtcatt

SEQ ID NO: 3379383 - DNA, 25 bp, Homo sapien
agcccttccgtctccgtttgttcat

SEQ ID NO: 3379384 - DNA, 25 bp, Homo sapien
tcatgtcattctctccggtttgacc

SEQ ID NO: 3379385 - DNA, 25 bp, Homo sapien
tcattctctccggtttgaccatcca

SEQ ID NO: 3379386 - DNA, 25 bp, Homo sapien
tgtttttccatcacgccaagcttgg

SEQ ID NO: 3379387 - DNA, 25 bp, Homo sapien
tggttgtcaggaaacgagcctctgt

SEQ ID NO: 3379388 - DNA, 25 bp, Homo sapien
aagcgtgatccaaaaccccaactgt

SEQ ID NO: 3379389 - DNA, 25 bp, Homo sapien
gagcctctgtttaaagccacactgt

SEQ ID NO: 3379390 - DNA, 25 bp, Homo sapien
cagctgattcgccatggacttgact

SEQ ID NO: 3379391 - DNA, 25 bp, Homo sapien
ctcttgattggagcccaagctacgg

SEQ ID NO: 3379392 - DNA, 25 bp, Homo sapien
gacttgactttgttctgatttccac

SEQ ID NO: 3379393 - DNA, 25 bp, Homo sapien
gggttccgagtgctctcctcaaact

SEQ ID NO: 3379394 - DNA, 25 bp, Homo sapien
aggaagagcacaggaccggcttacc

SEQ ID NO: 3379395 - DNA, 25 bp, Homo sapien
ttacctatccctgagacacggcgtt

SEQ ID NO: 3379396 - DNA, 25 bp, Homo sapien
aggaccggcttacctatccctgaga

SEQ ID NO: 3379397 - DNA, 25 bp, Homo sapien
aagagcacaggaccggcttacctat

SEQ ID NO: 3379398 - DNA, 25 bp, Homo sapien
tctgtcccacccagctgtaggtcag

SEQ ID NO: 3379399 - DNA, 25 bp, Homo sapien
tagaaggcagggtagcgaaattttc

SEQ ID NO: 3379400 - DNA, 25 bp, Homo sapien
gcagacacttgcttgagctctctga

SEQ ID NO: 3379401 - DNA, 25 bp, Homo sapien
tgctcaggcactcactgccagcaga

SEQ ID NO: 3379402 - DNA, 25 bp, Homo sapien
gagccgccttctccttaatgttctt

SEQ ID NO: 3379403 - DNA, 25 bp, Homo sapien
gaaatccccgtgtccaaacatggag

SEQ ID NO: 3379404 - DNA, 25 bp, Homo sapien
aaggtgagccgccttctccttaatg

SEQ ID NO: 3379405 - DNA, 25 bp, Homo sapien
ggaggcaaggtgagccgccttctcc

SEQ ID NO: 3379406 - DNA, 25 bp, Homo sapien
ctgcgagcttaggagaggagaaccc

SEQ ID NO: 3379407 - DNA, 25 bp, Homo sapien
tcccttgtcacaccgaaatagctca

SEQ ID NO: 3379408 - DNA, 25 bp, Homo sapien
tggctcctggttacactgcattctg

SEQ ID NO: 3379409 - DNA, 25 bp, Homo sapien
gacaccgatgccaattaccaaagcc

SEQ ID NO: 3379410 - DNA, 25 bp, Homo sapien
atcaggagacggaaggcgagaggga

SEQ ID NO: 3379411 - DNA, 25 bp, Homo sapien
gaggatgagtatgagacaggccttt

SEQ ID NO: 3379412 - DNA, 25 bp, Homo sapien
gacaggcctttagagagtagtttat

SEQ ID NO: 3379413 - DNA, 25 bp, Homo sapien
gaagaagcagctggatcaggagacg

SEQ ID NO: 3379414 - DNA, 25 bp, Homo sapien
gaacatgcagggaatagggaaagca

SEQ ID NO: 3379415 - DNA, 25 bp, Homo sapien
caggctcaagatgtttgtgcaggtc

SEQ ID NO: 3379416 - DNA, 25 bp, Homo sapien
atagggaaagcaaattgttcaggac

SEQ ID NO: 3379417 - DNA, 25 bp, Homo sapien
ggtcaagtggagcatgagaacatct

SEQ ID NO: 3379418 - DNA, 25 bp, Homo sapien
ctccttctggcagcggcacgtgcag

SEQ ID NO: 3379419 - DNA, 25 bp, Homo sapien
agcactccttctggcagcggcacgt

SEQ ID NO: 3379420 - DNA, 25 bp, Homo sapien
ttctggcagcggcacgtgcagcatg

SEQ ID NO: 3379421 - DNA, 25 bp, Homo sapien
agcggcacgtgcagcatgacacaca

SEQ ID NO: 3379422 - DNA, 25 bp, Homo sapien
gtgagagccctcaagactccctgtg

SEQ ID NO: 3379423 - DNA, 25 bp, Homo sapien
gaaagacagactctgccaaggatct

SEQ ID NO: 3379424 - DNA, 25 bp, Homo sapien
cacagaagagggctggtttggtggg

SEQ ID NO: 3379425 - DNA, 25 bp, Homo sapien
gtaactaacggctgatagggagctg

SEQ ID NO: 3379426 - DNA, 25 bp, Homo sapien
gagctcaacggcatggcaaacagcc

SEQ ID NO: 3379427 - DNA, 25 bp, Homo sapien
ccaatagccattccatgggccagag

SEQ ID NO: 3379428 - DNA, 25 bp, Homo sapien
tcctgcaagagctcaacggcatggc

SEQ ID NO: 3379429 - DNA, 25 bp, Homo sapien
tgcccagctgtgcaaacgctcagtg

SEQ ID NO: 3379430 - DNA, 25 bp, Homo sapien
tacaggatacttcaggcattttgca

SEQ ID NO: 3379431 - DNA, 25 bp, Homo sapien
taccaggtcaaacaaaggcgggatg

SEQ ID NO: 3379432 - DNA, 25 bp, Homo sapien
gcagtattccagttaccctcaagag

SEQ ID NO: 3379433 - DNA, 25 bp, Homo sapien
cccaggatagaaggaggaacagtga

SEQ ID NO: 3379434 - DNA, 25 bp, Homo sapien
gaggatgcactgttctcaaatggct

SEQ ID NO: 3379435 - DNA, 25 bp, Homo sapien
ctgaggatgcactgttctcaaatgg

SEQ ID NO: 3379436 - DNA, 25 bp, Homo sapien
cactgttctcaaatggctgggatga

SEQ ID NO: 3379437 - DNA, 25 bp, Homo sapien
gatgcactgttctcaaatggctggg

SEQ ID NO: 3379438 - DNA, 25 bp, Homo sapien
tctagatagaaacacggcgacgcag

SEQ ID NO: 3379439 - DNA, 25 bp, Homo sapien
gatcatatgcgcttaactcccagag

SEQ ID NO: 3379440 - DNA, 25 bp, Homo sapien
gactcctgaaagaacctgggccatg

SEQ ID NO: 3379441 - DNA, 25 bp, Homo sapien
gatggtccccgcctagatatcagag

SEQ ID NO: 3379442 - DNA, 25 bp, Homo sapien
gaagccaaccccaaaggccaatgtg

SEQ ID NO: 3379443 - DNA, 25 bp, Homo sapien
ccaatgtgaaggtgaatgttgccct

SEQ ID NO: 3379444 - DNA, 25 bp, Homo sapien
gaaatcagtactgggtctcctacct

SEQ ID NO: 3379445 - DNA, 25 bp, Homo sapien
tggaagcacccttaaggaaatcagt

SEQ ID NO: 3379446 - DNA, 25 bp, Homo sapien
tgagacttggcgtaaagcacagaac

SEQ ID NO: 3379447 - DNA, 25 bp, Homo sapien
cgctcgtagaactcagggaaaacct

SEQ ID NO: 3379448 - DNA, 25 bp, Homo sapien
cctttgctggaacgaggtgactctt

SEQ ID NO: 3379449 - DNA, 25 bp, Homo sapien
cacacactgacctacaagggcggag

SEQ ID NO: 3379450 - DNA, 25 bp, Homo sapien
gatcattcatgtacagattgaccag

SEQ ID NO: 3379451 - DNA, 25 bp, Homo sapien
cagattgaccaggacttcagctgca

SEQ ID NO: 3379452 - DNA, 25 bp, Homo sapien
ggcctgggccttaggtctgtgatca

SEQ ID NO: 3379453 - DNA, 25 bp, Homo sapien
gcagcccctattccgctggacactt

SEQ ID NO: 3379454 - DNA, 25 bp, Homo sapien
tggacaaaggtcctgaaactggccc

SEQ ID NO: 3379455 - DNA, 25 bp, Homo sapien
tgttaactgtactcccagacaggcc

SEQ ID NO: 3379456 - DNA, 25 bp, Homo sapien
cacagagtctgttcaggttggacac

SEQ ID NO: 3379457 - DNA, 25 bp, Homo sapien
gagggccattcaattatgctcacgg

SEQ ID NO: 3379458 - DNA, 25 bp, Homo sapien
cagcggaaacactcccggtggaaga

SEQ ID NO: 3379459 - DNA, 25 bp, Homo sapien
tcgcagtcaaaggtgtaggcggcca

SEQ ID NO: 3379460 - DNA, 25 bp, Homo sapien
agccgttccatcacgtacacacgtt

SEQ ID NO: 3379461 - DNA, 25 bp, Homo sapien
tacagaagtaacacgtgtcgctgcc

SEQ ID NO: 3379462 - DNA, 25 bp, Homo sapien
gggacaggaacccgagccaaggtca

SEQ ID NO: 3379463 - DNA, 25 bp, Homo sapien
cagagggacaggaacccgagccaag

SEQ ID NO: 3379464 - DNA, 25 bp, Homo sapien
gacaggaacccgagccaaggtcaca

SEQ ID NO: 3379465 - DNA, 25 bp, Homo sapien
agagggacaggaacccgagccaagg

SEQ ID NO: 3379466 - DNA, 25 bp, Homo sapien
ggtatgccgtaccacagtgctgatg

SEQ ID NO: 3379467 - DNA, 25 bp, Homo sapien
catacttccttttgggtatgtttgg

SEQ ID NO: 3379468 - DNA, 25 bp, Homo sapien
cacagtgctgatgctaccccttccc

SEQ ID NO: 3379469 - DNA, 25 bp, Homo sapien
caggacctggtatgccgtaccacag

SEQ ID NO: 3379470 - DNA, 25 bp, Homo sapien
tgttgcttcaactctgcccgtctct

SEQ ID NO: 3379471 - DNA, 25 bp, Homo sapien
ctctgcccgtctcttccgttgtttg

SEQ ID NO: 3379472 - DNA, 25 bp, Homo sapien
cgtctcttccgttgtttgctattgg

SEQ ID NO: 3379473 - DNA, 25 bp, Homo sapien
tgcccgtctcttccgttgtttgcta

SEQ ID NO: 3379474 - DNA, 25 bp, Homo sapien
tatagactagaatcttccaaaggca

SEQ ID NO: 3379475 - DNA, 25 bp, Homo sapien
gaccataggagtcacgagccttcaa

SEQ ID NO: 3379476 - DNA, 25 bp, Homo sapien
tgaagccggtgctgaacacgggcac

SEQ ID NO: 3379477 - DNA, 25 bp, Homo sapien
ttccagaggactacttcaacaaagc

SEQ ID NO: 3379478 - DNA, 25 bp, Homo sapien
cgcaagaactttcggtgggagtgtc

SEQ ID NO: 3379479 - DNA, 25 bp, Homo sapien
aactttcggtgggagtgtctctccg

SEQ ID NO: 3379480 - DNA, 25 bp, Homo sapien
gcggccactgcgcaagaactttcgg

SEQ ID NO: 3379481 - DNA, 25 bp, Homo sapien
cactgcgcaagaactttcggtggga

SEQ ID NO: 3379482 - DNA, 25 bp, Homo sapien
gttgcagatgctctcgagggagccc

SEQ ID NO: 3379483 - DNA, 25 bp, Homo sapien
gacctcagagaacgcccagaggagt

SEQ ID NO: 3379484 - DNA, 25 bp, Homo sapien
tagcagtagttgtaagcattgtccc

SEQ ID NO: 3379485 - DNA, 25 bp, Homo sapien
tgtccctgatatggaggccagcagc

SEQ ID NO: 3379486 - DNA, 25 bp, Homo sapien
tcagcggagcttgactgggaagcac

SEQ ID NO: 3379487 - DNA, 25 bp, Homo sapien
gcaggcagtggctttgataactcac

SEQ ID NO: 3379488 - DNA, 25 bp, Homo sapien
gcggaggtggcccatgtgaaattct

SEQ ID NO: 3379489 - DNA, 25 bp, Homo sapien
tagatgttcaccctgataaggccag

SEQ ID NO: 3379490 - DNA, 25 bp, Homo sapien
cctggccctagcaccgtgagtagat

SEQ ID NO: 3379491 - DNA, 25 bp, Homo sapien
gcagctaagcagtcaggatgtccac

SEQ ID NO: 3379492 - DNA, 25 bp, Homo sapien
accacatatgtgtggcagcggagca

SEQ ID NO: 3379493 - DNA, 25 bp, Homo sapien
gatatggtagagcttcccctggagg

SEQ ID NO: 3379494 - DNA, 25 bp, Homo sapien
ggacagagtcttccactccacttgg

SEQ ID NO: 3379495 - DNA, 25 bp, Homo sapien
tctagtgataactccacagagctat

SEQ ID NO: 3379496 - DNA, 25 bp, Homo sapien
cagagctatcttgggcccagcaact

SEQ ID NO: 3379497 - DNA, 25 bp, Homo sapien
tccagatacactgcgcaccgtagat

SEQ ID NO: 3379498 - DNA, 25 bp, Homo sapien
tctggcggccccttgattgttcagc

SEQ ID NO: 3379499 - DNA, 25 bp, Homo sapien
tccttatggctgtacacgacagtca

SEQ ID NO: 3379500 - DNA, 25 bp, Homo sapien
gactcgggcttcatggaacactcca

SEQ ID NO: 3379501 - DNA, 25 bp, Homo sapien
gaagataatcacaataacatggccg

SEQ ID NO: 3379502 - DNA, 25 bp, Homo sapien
caagtcatcggactgagaacagtgc

SEQ ID NO: 3379503 - DNA, 25 bp, Homo sapien
gcaccggagttgaaaataaggccac

SEQ ID NO: 3379504 - DNA, 25 bp, Homo sapien
cttgtttacgagagtggatgcacac

SEQ ID NO: 3379505 - DNA, 25 bp, Homo sapien
gattaacatcacgagaaggcaccgg

SEQ ID NO: 3379506 - DNA, 25 bp, Homo sapien
tcttgaatatgttgcggaggcctag

SEQ ID NO: 3379507 - DNA, 25 bp, Homo sapien
tcagccaagaagtgggtgtagcact

SEQ ID NO: 3379508 - DNA, 25 bp, Homo sapien
cagccaagaagtgggtgtagcactg

SEQ ID NO: 3379509 - DNA, 25 bp, Homo sapien
ccaagaagtgggtgtagcactggaa

SEQ ID NO: 3379510 - DNA, 25 bp, Homo sapien
aagaagtgggtgtagcactggaagg

SEQ ID NO: 3379511 - DNA, 25 bp, Homo sapien
agttagtgcaaccagtactgctggc

SEQ ID NO: 3379512 - DNA, 25 bp, Homo sapien
tagtgcaaccagtactgctggcgga

SEQ ID NO: 3379513 - DNA, 25 bp, Homo sapien
aaccagtactgctggcggagaggac

SEQ ID NO: 3379514 - DNA, 25 bp, Homo sapien
tgcaaccagtactgctggcggagag

SEQ ID NO: 3379515 - DNA, 25 bp, Homo sapien
gaaagtaggtagcttcgcagacgca

SEQ ID NO: 3379516 - DNA, 25 bp, Homo sapien
tgagaccgcgagtgttgcctaggac

SEQ ID NO: 3379517 - DNA, 25 bp, Homo sapien
caaatacagtgagcgtgcagcatgc

SEQ ID NO: 3379518 - DNA, 25 bp, Homo sapien
tgtttcatgatcaaggtcgaccctc

SEQ ID NO: 3379519 - DNA, 25 bp, Homo sapien
tgacattctataaagggagggagac

SEQ ID NO: 3379520 - DNA, 25 bp, Homo sapien
caaaatacagggttccgtgtggcac

SEQ ID NO: 3379521 - DNA, 25 bp, Homo sapien
taccataaataaagctaaacattgt

SEQ ID NO: 3379522 - DNA, 25 bp, Homo sapien
gattaccaaaggtcacagacatgcg

SEQ ID NO: 3379523 - DNA, 25 bp, Homo sapien
ctgtgcaccagcgtgaagtgttcca

SEQ ID NO: 3379524 - DNA, 25 bp, Homo sapien
cactcagctgtgcaccagcgtgaag

SEQ ID NO: 3379525 - DNA, 25 bp, Homo sapien
caccagcgtgaagtgttccagacca

SEQ ID NO: 3379526 - DNA, 25 bp, Homo sapien
ccagcgtgaagtgttccagaccaac

SEQ ID NO: 3379527 - DNA, 25 bp, Homo sapien
ttgaaaggcaaccaagacccctgcc

SEQ ID NO: 3379528 - DNA, 25 bp, Homo sapien
aatattttttgagggcccactatgt

SEQ ID NO: 3379529 - DNA, 25 bp, Homo sapien
tatgtgctaagtgcaattctgtcgg

SEQ ID NO: 3379530 - DNA, 25 bp, Homo sapien
tctgtcggggttatacaagcattga

SEQ ID NO: 3379531 - DNA, 25 bp, Homo sapien
ggctggctgctctttaagagtttgc

SEQ ID NO: 3379532 - DNA, 25 bp, Homo sapien
gctggctgctctttaagagtttgcc

SEQ ID NO: 3379533 - DNA, 25 bp, Homo sapien
tggctgctctttaagagtttgcctg

SEQ ID NO: 3379534 - DNA, 25 bp, Homo sapien
ctggctgctctttaagagtttgcct

SEQ ID NO: 3379535 - DNA, 25 bp, Homo sapien
gcacagtgctgggtatcaccgcagc

SEQ ID NO: 3379536 - DNA, 25 bp, Homo sapien
tgctgggtatcaccgcagctgggcc

SEQ ID NO: 3379537 - DNA, 25 bp, Homo sapien
ggccagccagtgagtgcacagtgct

SEQ ID NO: 3379538 - DNA, 25 bp, Homo sapien
aggccagccagtgagtgcacagtgc

SEQ ID NO: 3379539 - DNA, 25 bp, Homo sapien
cttcttgtcctccgtgccacctctg

SEQ ID NO: 3379540 - DNA, 25 bp, Homo sapien
cttgtcctccgtgccacctctggaa

SEQ ID NO: 3379541 - DNA, 25 bp, Homo sapien
tcttgtcctccgtgccacctctgga

SEQ ID NO: 3379542 - DNA, 25 bp, Homo sapien
ttcttgtcctccgtgccacctctgg

SEQ ID NO: 3379543 - DNA, 25 bp, Homo sapien
tgatcctcactgaggtccactcgga

SEQ ID NO: 3379544 - DNA, 25 bp, Homo sapien
tcctcactgaggtccactcggaggg

SEQ ID NO: 3379545 - DNA, 25 bp, Homo sapien
ctcactgaggtccactcggagggca

SEQ ID NO: 3379546 - DNA, 25 bp, Homo sapien
ctgctgtcttcgctggtgaccagga

SEQ ID NO: 3379547 - DNA, 25 bp, Homo sapien
tagatgcggggatcctggccgccag

SEQ ID NO: 3379548 - DNA, 25 bp, Homo sapien
gcctcccctagggacgtgtgcggta

SEQ ID NO: 3379549 - DNA, 25 bp, Homo sapien
agggcctcccctagggacgtgtgcg

SEQ ID NO: 3379550 - DNA, 25 bp, Homo sapien
tcccctagggacgtgtgcggtagat

SEQ ID NO: 3379551 - DNA, 25 bp, Homo sapien
tggcgatgcaggacaagttgagctc

SEQ ID NO: 3379552 - DNA, 25 bp, Homo sapien
caggacaagttgagctccagctctc

SEQ ID NO: 3379553 - DNA, 25 bp, Homo sapien
accaggtggcgatgcaggacaagtt

SEQ ID NO: 3379554 - DNA, 25 bp, Homo sapien
gatgcaggacaagttgagctccagc

SEQ ID NO: 3379555 - DNA, 25 bp, Homo sapien
tgtggtccacctagcaatgataaaa

SEQ ID NO: 3379556 - DNA, 25 bp, Homo sapien
tattctggcgttaaactggactgtc

SEQ ID NO: 3379557 - DNA, 25 bp, Homo sapien
gagcttaactgtacaatgtggtcca

SEQ ID NO: 3379558 - DNA, 25 bp, Homo sapien
tgtttgagagtcacgcattctaccc

SEQ ID NO: 3379559 - DNA, 25 bp, Homo sapien
ggaatttatctcctatagctcaatt

SEQ ID NO: 3379560 - DNA, 25 bp, Homo sapien
ggaggaagagtccattaaatgtgta

SEQ ID NO: 3379561 - DNA, 25 bp, Homo sapien
tgtgtagagtaagtaggaatttatc

SEQ ID NO: 3379562 - DNA, 25 bp, Homo sapien
gctcaattaccacaagtcaatagac

SEQ ID NO: 3379563 - DNA, 25 bp, Homo sapien
gactggaagctattggcccgttgca

SEQ ID NO: 3379564 - DNA, 25 bp, Homo sapien
ggagactggaagctattggcccgtt

SEQ ID NO: 3379565 - DNA, 25 bp, Homo sapien
gagactggaagctattggcccgttg

SEQ ID NO: 3379566 - DNA, 25 bp, Homo sapien
ctggaagctattggcccgttgcaga

SEQ ID NO: 3379567 - DNA, 25 bp, Homo sapien
aacggctgcccctgagaattaacca

SEQ ID NO: 3379568 - DNA, 25 bp, Homo sapien
ttaaccagagatcttctgcccagcc

SEQ ID NO: 3379569 - DNA, 25 bp, Homo sapien
catgtaaggaatgagaacggctgcc

SEQ ID NO: 3379570 - DNA, 25 bp, Homo sapien
ccatgccagagagataccatgtaag

SEQ ID NO: 3379571 - DNA, 25 bp, Homo sapien
cgttctcgatattctgtcctgcctt

SEQ ID NO: 3379572 - DNA, 25 bp, Homo sapien
ccccatacatcaatgcgaacatgtg

SEQ ID NO: 3379573 - DNA, 25 bp, Homo sapien
tgtgtcccagccgtgggctctgaac

SEQ ID NO: 3379574 - DNA, 25 bp, Homo sapien
gaacatgtgcgactgtgtgtcccag

SEQ ID NO: 3379575 - DNA, 25 bp, Homo sapien
ggaggtgacatagttcttttgttca

SEQ ID NO: 3379576 - DNA, 25 bp, Homo sapien
aggtgacatagttcttttgttcact

SEQ ID NO: 3379577 - DNA, 25 bp, Homo sapien
gaggtgacatagttcttttgttcac

SEQ ID NO: 3379578 - DNA, 25 bp, Homo sapien
tacaggggaatttccctgggtgctc

SEQ ID NO: 3379579 - DNA, 25 bp, Homo sapien
tgggaggacttggatgacctctcga

SEQ ID NO: 3379580 - DNA, 25 bp, Homo sapien
ggatgacctctcgagacttgcgaga

SEQ ID NO: 3379581 - DNA, 25 bp, Homo sapien
gtgctccttgggctacggctcgcct

SEQ ID NO: 3379582 - DNA, 25 bp, Homo sapien
accagggctcaccaggcagtactct

SEQ ID NO: 3379583 - DNA, 25 bp, Homo sapien
ctctgcagggtctgagaggccatct

SEQ ID NO: 3379584 - DNA, 25 bp, Homo sapien
ggctcaccaggcagtactctgccca

SEQ ID NO: 3379585 - DNA, 25 bp, Homo sapien
ctgcagggtctgagaggccatcttc

SEQ ID NO: 3379586 - DNA, 25 bp, Homo sapien
aggcccaacttctcctttaccagca

SEQ ID NO: 3379587 - DNA, 25 bp, Homo sapien
gggtctctgtggttgcttccgatgt

SEQ ID NO: 3379588 - DNA, 25 bp, Homo sapien
gttgcttccgatgtccccaagaggg

SEQ ID NO: 3379589 - DNA, 25 bp, Homo sapien
ctgtggttgcttccgatgtccccaa

SEQ ID NO: 3379590 - DNA, 25 bp, Homo sapien
ggatggagtcattccaatccaacaa

SEQ ID NO: 3379591 - DNA, 25 bp, Homo sapien
tctcagcacttttctgggaaattcg

SEQ ID NO: 3379592 - DNA, 25 bp, Homo sapien
gactggttttagcacacggcctcct

SEQ ID NO: 3379593 - DNA, 25 bp, Homo sapien
tgaggtgcacactctcagggatgga

SEQ ID NO: 3379594 - DNA, 25 bp, Homo sapien
gggttggcaggggctctcctgctgc

SEQ ID NO: 3379595 - DNA, 25 bp, Homo sapien
ctgggttggcaggggctctcctgct

SEQ ID NO: 3379596 - DNA, 25 bp, Homo sapien
tgggttggcaggggctctcctgctg

SEQ ID NO: 3379597 - DNA, 25 bp, Homo sapien
ggttggcaggggctctcctgctgcc

SEQ ID NO: 3379598 - DNA, 25 bp, Homo sapien
gatggcattggctatgagccgcagt

SEQ ID NO: 3379599 - DNA, 25 bp, Homo sapien
ggaggcacgtttcgctccccttgag

SEQ ID NO: 3379600 - DNA, 25 bp, Homo sapien
gctctagagaccttcggatggcatt

SEQ ID NO: 3379601 - DNA, 25 bp, Homo sapien
tccgaaggctgaatgagcgagtgca

SEQ ID NO: 3379602 - DNA, 25 bp, Homo sapien
aagaccttggatggccgattgggca

SEQ ID NO: 3379603 - DNA, 25 bp, Homo sapien
tgcaggaaagaccttggatggccga

SEQ ID NO: 3379604 - DNA, 25 bp, Homo sapien
aggaaagaccttggatggccgattg

SEQ ID NO: 3379605 - DNA, 25 bp, Homo sapien
aaagaccttggatggccgattgggc

SEQ ID NO: 3379606 - DNA, 25 bp, Homo sapien
aggagtgtggggacatcttcaatct

SEQ ID NO: 3379607 - DNA, 25 bp, Homo sapien
aaaagatttgtctttgagtctgagg

SEQ ID NO: 3379608 - DNA, 25 bp, Homo sapien
tgcacctcccgctgtaggaggagga

SEQ ID NO: 3379609 - DNA, 25 bp, Homo sapien
agctgcctggcgcagggaggtgctt

SEQ ID NO: 3379610 - DNA, 25 bp, Homo sapien
cgcagggaggtgcttttgaaaggct

SEQ ID NO: 3379611 - DNA, 25 bp, Homo sapien
gaggtgcttttgaaaggctgcagca

SEQ ID NO: 3379612 - DNA, 25 bp, Homo sapien
gaagaggaagcctctgttacctgtg

SEQ ID NO: 3379613 - DNA, 25 bp, Homo sapien
gaggaagcctctgttacctgtgctc

SEQ ID NO: 3379614 - DNA, 25 bp, Homo sapien
aagaggaagcctctgttacctgtgc

SEQ ID NO: 3379615 - DNA, 25 bp, Homo sapien
aggaagcctctgttacctgtgctct

SEQ ID NO: 3379616 - DNA, 25 bp, Homo sapien
ggaaagctggggatcaaattcttca

SEQ ID NO: 3379617 - DNA, 25 bp, Homo sapien
ctttaactgcaaggaaagctgggga

SEQ ID NO: 3379618 - DNA, 25 bp, Homo sapien
gaaagctggggatcaaattcttcat

SEQ ID NO: 3379619 - DNA, 25 bp, Homo sapien
aggaaagctggggatcaaattcttc

SEQ ID NO: 3379620 - DNA, 25 bp, Homo sapien
ctgagccttatagagtcttttcaat

SEQ ID NO: 3379621 - DNA, 25 bp, Homo sapien
gcctcacaccctggatctcagaagc

SEQ ID NO: 3379622 - DNA, 25 bp, Homo sapien
cctcacaccctggatctcagaagcc

SEQ ID NO: 3379623 - DNA, 25 bp, Homo sapien
tgcttctcctcgcaacgccttctcc

SEQ ID NO: 3379624 - DNA, 25 bp, Homo sapien
tctcctcgcaacgccttctccagcc

SEQ ID NO: 3379625 - DNA, 25 bp, Homo sapien
cgggattaagtgtttgttatattct

SEQ ID NO: 3379626 - DNA, 25 bp, Homo sapien
tcacccttagattgccagatttaaa

SEQ ID NO: 3379627 - DNA, 25 bp, Homo sapien
taatttttcaatatggtagttgtaa

SEQ ID NO: 3379628 - DNA, 25 bp, Homo sapien
tattgaaaagaccataagattttcc

SEQ ID NO: 3379629 - DNA, 25 bp, Homo sapien
ggagctccgactcatatcgcattaa

SEQ ID NO: 3379630 - DNA, 25 bp, Homo sapien
cagaaccagcttaaaccattcctgc

SEQ ID NO: 3379631 - DNA, 25 bp, Homo sapien
aaagctgtgcttcatcctgtgtgcc

SEQ ID NO: 3379632 - DNA, 25 bp, Homo sapien
tgattaggagctccgactcatatcg

SEQ ID NO: 3379633 - DNA, 25 bp, Homo sapien
tccttgagcattttctctctcagtt

SEQ ID NO: 3379634 - DNA, 25 bp, Homo sapien
ccagtctgctttgatgatcttctaa

SEQ ID NO: 3379635 - DNA, 25 bp, Homo sapien
tctctcagtttctgctccagtctgc

SEQ ID NO: 3379636 - DNA, 25 bp, Homo sapien
gatcttctaattccagttcctgggc

SEQ ID NO: 3379637 - DNA, 25 bp, Homo sapien
ataattggcctgaggcatttggttg

SEQ ID NO: 3379638 - DNA, 25 bp, Homo sapien
gataattggcctgaggcatttggtt

SEQ ID NO: 3379639 - DNA, 25 bp, Homo sapien
taattggcctgaggcatttggttgc

SEQ ID NO: 3379640 - DNA, 25 bp, Homo sapien
tcaagtcctgctcagctgacagcct

SEQ ID NO: 3379641 - DNA, 25 bp, Homo sapien
tctctgatgcgttgttcctctaagg

SEQ ID NO: 3379642 - DNA, 25 bp, Homo sapien
caatcacttgcatcagctcggtgaa

SEQ ID NO: 3379643 - DNA, 25 bp, Homo sapien
tctaaggaatcgacgagtttgtccc

SEQ ID NO: 3379644 - DNA, 25 bp, Homo sapien
tgtggtgcacttggcctgatccggt

SEQ ID NO: 3379645 - DNA, 25 bp, Homo sapien
cagaaagacccatgagggtgtgtgg

SEQ ID NO: 3379646 - DNA, 25 bp, Homo sapien
tgatccggtcccaacgtgcagccag

SEQ ID NO: 3379647 - DNA, 25 bp, Homo sapien
aaaatgcagtaaggtataacaagtt

SEQ ID NO: 3379648 - DNA, 25 bp, Homo sapien
taacctaatctttaaactgcggctg

SEQ ID NO: 3379649 - DNA, 25 bp, Homo sapien
ccctggattgaattaacacctgcta

SEQ ID NO: 3379650 - DNA, 25 bp, Homo sapien
ttccagggtccataaaaagcatagc

SEQ ID NO: 3379651 - DNA, 25 bp, Homo sapien
gaaaacaatgctggtcatctgccaa

SEQ ID NO: 3379652 - DNA, 25 bp, Homo sapien
gagccaactgttgcagagcaccttt

SEQ ID NO: 3379653 - DNA, 25 bp, Homo sapien
agaaatttggtctccagtcagagcc

SEQ ID NO: 3379654 - DNA, 25 bp, Homo sapien
tgagagcggccaaatacacaaccaa

SEQ ID NO: 3379655 - DNA, 25 bp, Homo sapien
taaacacttgccgaaatgagagcgg

SEQ ID NO: 3379656 - DNA, 25 bp, Homo sapien
gagcacagcctgtgaaagcaagtga

SEQ ID NO: 3379657 - DNA, 25 bp, Homo sapien
aatcctactcatattgcatacaaag

SEQ ID NO: 3379658 - DNA, 25 bp, Homo sapien
taacttggccagataaaactgagcc

SEQ ID NO: 3379659 - DNA, 25 bp, Homo sapien
ctcatctattaacagaatactaggg

SEQ ID NO: 3379660 - DNA, 25 bp, Homo sapien
tcaatggtttgggagagcaagctta

SEQ ID NO: 3379661 - DNA, 25 bp, Homo sapien
tactgcccaagaagccctgtgatag

SEQ ID NO: 3379662 - DNA, 25 bp, Homo sapien
gaaccccatgggcattcagaggatg

SEQ ID NO: 3379663 - DNA, 25 bp, Homo sapien
gcaattaacatggtgcatcttggca

SEQ ID NO: 3379664 - DNA, 25 bp, Homo sapien
ccctgctgaggtagttctctgatca

SEQ ID NO: 3379665 - DNA, 25 bp, Homo sapien
tgaattgtcatttgcctccagaatg

SEQ ID NO: 3379666 - DNA, 25 bp, Homo sapien
ctgctgaattgtcatttgcctccag

SEQ ID NO: 3379667 - DNA, 25 bp, Homo sapien
gtagttctctgatcagccacctggg

SEQ ID NO: 3379668 - DNA, 25 bp, Homo sapien
gaatagttcccaattgttggagcaa

SEQ ID NO: 3379669 - DNA, 25 bp, Homo sapien
ctatagcagtgcacaaataacacat

SEQ ID NO: 3379670 - DNA, 25 bp, Homo sapien
ttttacaagctactcagcagtgagg

SEQ ID NO: 3379671 - DNA, 25 bp, Homo sapien
gaaatcgtacactttcccctgtatg

SEQ ID NO: 3379672 - DNA, 25 bp, Homo sapien
gatcctggaagtagggtcattgcca

SEQ ID NO: 3379673 - DNA, 25 bp, Homo sapien
ggcgacaaagaatcctcccctagag

SEQ ID NO: 3379674 - DNA, 25 bp, Homo sapien
tgggcacctaatccaatgagacttg

SEQ ID NO: 3379675 - DNA, 25 bp, Homo sapien
cagagggaacatggctcagcagaca

SEQ ID NO: 3379676 - DNA, 25 bp, Homo sapien
cagaagttgtgctcgtgactgatga

SEQ ID NO: 3379677 - DNA, 25 bp, Homo sapien
tgggtgaacacctaatccaaagggc

SEQ ID NO: 3379678 - DNA, 25 bp, Homo sapien
ctgcactaagctggagagactgttg

SEQ ID NO: 3379679 - DNA, 25 bp, Homo sapien
cattcgcaatcaaaactagggtggc

SEQ ID NO: 3379680 - DNA, 25 bp, Homo sapien
gaattattccaagcatttgaggcag

SEQ ID NO: 3379681 - DNA, 25 bp, Homo sapien
ccttgcaggacaggaggacgtgtgt

SEQ ID NO: 3379682 - DNA, 25 bp, Homo sapien
ctgggttgccccaagcagggaggat

SEQ ID NO: 3379683 - DNA, 25 bp, Homo sapien
tgcggctttccaaacggaagcggaa

SEQ ID NO: 3379684 - DNA, 25 bp, Homo sapien
ctggcgctgggcggacgcagcgggc

SEQ ID NO: 3379685 - DNA, 25 bp, Homo sapien
ggcgctgggcggacgcagcgggcgg

SEQ ID NO: 3379686 - DNA, 25 bp, Homo sapien
gagctggcgctgggcggacgcagcg

SEQ ID NO: 3379687 - DNA, 25 bp, Homo sapien
agctggcgctgggcggacgcagcgg

SEQ ID NO: 3379688 - DNA, 25 bp, Homo sapien
gcgcggcgcaggctgccgcgggccg

SEQ ID NO: 3379689 - DNA, 25 bp, Homo sapien
cgcaggctgccgcgggccggtcggg

SEQ ID NO: 3379690 - DNA, 25 bp, Homo sapien
gcggcgcaggctgccgcgggccggt

SEQ ID NO: 3379691 - DNA, 25 bp, Homo sapien
caggctgccgcgggccggtcgggac

SEQ ID NO: 3379692 - DNA, 25 bp, Homo sapien
aaggcgacttctgcggggaggtggc

SEQ ID NO: 3379693 - DNA, 25 bp, Homo sapien
gggcgacttgggagtgggagacttg

SEQ ID NO: 3379694 - DNA, 25 bp, Homo sapien
ttggggacagaaggcgacttctgcg

SEQ ID NO: 3379695 - DNA, 25 bp, Homo sapien
aatcatctttcttgcgggacggggg

SEQ ID NO: 3379696 - DNA, 25 bp, Homo sapien
attttaaggaccaatgaaggcaacg

SEQ ID NO: 3379697 - DNA, 25 bp, Homo sapien
aatgaaggcaacgagtaagagcgac

SEQ ID NO: 3379698 - DNA, 25 bp, Homo sapien
agtaagagcgacggcgcccaggaaa

SEQ ID NO: 3379699 - DNA, 25 bp, Homo sapien
gaccaatgaaggcaacgagtaagag

SEQ ID NO: 3379700 - DNA, 25 bp, Homo sapien
ctgccagaggacgtcagcaggtcca

SEQ ID NO: 3379701 - DNA, 25 bp, Homo sapien
agaggccaaagccacgacgccgctg

SEQ ID NO: 3379702 - DNA, 25 bp, Homo sapien
tcagccctcgggatggacaaaagat

SEQ ID NO: 3379703 - DNA, 25 bp, Homo sapien
caaaagatcccgaagaggccaaagc

SEQ ID NO: 3379704 - DNA, 25 bp, Homo sapien
aaatctttaacgtgatggatatccc

SEQ ID NO: 3379705 - DNA, 25 bp, Homo sapien
ccatttgatataagaagacctagtg

SEQ ID NO: 3379706 - DNA, 25 bp, Homo sapien
gaattccagtggtctagcatagaga

SEQ ID NO: 3379707 - DNA, 25 bp, Homo sapien
caagtacagtgattttgtccgaggc

SEQ ID NO: 3379708 - DNA, 25 bp, Homo sapien
aagatgcagcatgtctctggtgtcc

SEQ ID NO: 3379709 - DNA, 25 bp, Homo sapien
tcagataactcataaggctcaggac

SEQ ID NO: 3379710 - DNA, 25 bp, Homo sapien
gctcaggactgaggagatgtgcact

SEQ ID NO: 3379711 - DNA, 25 bp, Homo sapien
tgaaacacctaatacaagatgcagc

SEQ ID NO: 3379712 - DNA, 25 bp, Homo sapien
tgagtaaaaacttgtgcaaccacac

SEQ ID NO: 3379713 - DNA, 25 bp, Homo sapien
gcatccaggcaaccacataatagtt

SEQ ID NO: 3379714 - DNA, 25 bp, Homo sapien
gcgtgccactcaagagcaagcttct

SEQ ID NO: 3379715 - DNA, 25 bp, Homo sapien
gtgacatacgccacattcaggctgg

SEQ ID NO: 3379716 - DNA, 25 bp, Homo sapien
tatattaaacggtgagccaactggg

SEQ ID NO: 3379717 - DNA, 25 bp, Homo sapien
taagcactggtaccctggaatatcc

SEQ ID NO: 3379718 - DNA, 25 bp, Homo sapien
tgagttgcacctagatacccagacg

SEQ ID NO: 3379719 - DNA, 25 bp, Homo sapien
tcaaaactaaggactcaggctgctc

SEQ ID NO: 3379720 - DNA, 25 bp, Homo sapien
tttaattgcagttttagagcgttaa

SEQ ID NO: 3379721 - DNA, 25 bp, Homo sapien
taattgcagttttagagcgttaaga

SEQ ID NO: 3379722 - DNA, 25 bp, Homo sapien
tgcagttttagagcgttaagatcct

SEQ ID NO: 3379723 - DNA, 25 bp, Homo sapien
ttttagagcgttaagatcctccagc

SEQ ID NO: 3379724 - DNA, 25 bp, Homo sapien
gagagcctggtttgtgacagcccat

SEQ ID NO: 3379725 - DNA, 25 bp, Homo sapien
tgttctgggcctgacctgttccata

SEQ ID NO: 3379726 - DNA, 25 bp, Homo sapien
gcagagctgttggacgacaagccca

SEQ ID NO: 3379727 - DNA, 25 bp, Homo sapien
taacaaaacatctggctaggcgagg

SEQ ID NO: 3379728 - DNA, 25 bp, Homo sapien
catctgtggtcaattttccacactt

SEQ ID NO: 3379729 - DNA, 25 bp, Homo sapien
tattccataaaaggtaaaggaggca

SEQ ID NO: 3379730 - DNA, 25 bp, Homo sapien
ttacatctgtggtcaattttccaca

SEQ ID NO: 3379731 - DNA, 25 bp, Homo sapien
tccacactttattccataaaaggta

SEQ ID NO: 3379732 - DNA, 25 bp, Homo sapien
ggtagcctgcacacaagtcctaagg

SEQ ID NO: 3379733 - DNA, 25 bp, Homo sapien
ccttggatttatgaacacgtagaac

SEQ ID NO: 3379734 - DNA, 25 bp, Homo sapien
tcctaaggccaaccttggatttatg

SEQ ID NO: 3379735 - DNA, 25 bp, Homo sapien
accagagggcacttggaaaatcaga

SEQ ID NO: 3379736 - DNA, 25 bp, Homo sapien
tcccttcatatctgctccgcccact

SEQ ID NO: 3379737 - DNA, 25 bp, Homo sapien
gacctctggatccctcaaagtctcc

SEQ ID NO: 3379738 - DNA, 25 bp, Homo sapien
tgtgaccttcaatacaaatgccttc

SEQ ID NO: 3379739 - DNA, 25 bp, Homo sapien
gagcctccaggggttgcttgtgacc

SEQ ID NO: 3379740 - DNA, 25 bp, Homo sapien
tctttcatgggtaaggaagccaaca

SEQ ID NO: 3379741 - DNA, 25 bp, Homo sapien
caaggcgactttcccactagttgag

SEQ ID NO: 3379742 - DNA, 25 bp, Homo sapien
caagaatgagcaggttgcagaatcc

SEQ ID NO: 3379743 - DNA, 25 bp, Homo sapien
caaatccgggaacagaacatgctct

SEQ ID NO: 3379744 - DNA, 25 bp, Homo sapien
ggaaactctctcctgtcatcgatga

SEQ ID NO: 3379745 - DNA, 25 bp, Homo sapien
tgtatgtcccttgtatcaggtgcat

SEQ ID NO: 3379746 - DNA, 25 bp, Homo sapien
ttgtatgtcccttgtatcaggtgca

SEQ ID NO: 3379747 - DNA, 25 bp, Homo sapien
aaactctctcctgtcatcgatgatg

SEQ ID NO: 3379748 - DNA, 25 bp, Homo sapien
tcactgtttagccaaccatgtgatg

SEQ ID NO: 3379749 - DNA, 25 bp, Homo sapien
aaggagatggaagcaccattggatg

SEQ ID NO: 3379750 - DNA, 25 bp, Homo sapien
gatgcggctgtcctccaattgctcg

SEQ ID NO: 3379751 - DNA, 25 bp, Homo sapien
ccaattgctcgtaggcatggaagga

SEQ ID NO: 3379752 - DNA, 25 bp, Homo sapien
cacagacaccgactatttcatagaa

SEQ ID NO: 3379753 - DNA, 25 bp, Homo sapien
ccacattcacagacaccgactattt

SEQ ID NO: 3379754 - DNA, 25 bp, Homo sapien
tgacattcacatagggtaccagcca

SEQ ID NO: 3379755 - DNA, 25 bp, Homo sapien
acatagggtaccagccagtcaccac

SEQ ID NO: 3379756 - DNA, 25 bp, Homo sapien
caattgccagcatagacttgcaaga

SEQ ID NO: 3379757 - DNA, 25 bp, Homo sapien
tacactcactgatagctgcagttgg

SEQ ID NO: 3379758 - DNA, 25 bp, Homo sapien
gaaatcctaagcacaaggcagccac

SEQ ID NO: 3379759 - DNA, 25 bp, Homo sapien
aagagttctttcacctcaatacact

SEQ ID NO: 3379760 - DNA, 25 bp, Homo sapien
caggttgatggcgttcattccctcc

SEQ ID NO: 3379761 - DNA, 25 bp, Homo sapien
aggttgatggcgttcattccctcct

SEQ ID NO: 3379762 - DNA, 25 bp, Homo sapien
gcaggttgatggcgttcattccctc

SEQ ID NO: 3379763 - DNA, 25 bp, Homo sapien
agctcaaagggaattgggctgaggg

SEQ ID NO: 3379764 - DNA, 25 bp, Homo sapien
gtccagctcaaagggaattgggctg

SEQ ID NO: 3379765 - DNA, 25 bp, Homo sapien
tccagctcaaagggaattgggctga

SEQ ID NO: 3379766 - DNA, 25 bp, Homo sapien
ccagctcaaagggaattgggctgag

SEQ ID NO: 3379767 - DNA, 25 bp, Homo sapien
gggtcactgcgtgagtttggatcca

SEQ ID NO: 3379768 - DNA, 25 bp, Homo sapien
catcagttcttgaagcttggggtca

SEQ ID NO: 3379769 - DNA, 25 bp, Homo sapien
ccaccattgttcgcacctcattctc

SEQ ID NO: 3379770 - DNA, 25 bp, Homo sapien
tcactgcgtgagtttggatccacca

SEQ ID NO: 3379771 - DNA, 25 bp, Homo sapien
ttaccttctctcaggggctcgtggg

SEQ ID NO: 3379772 - DNA, 25 bp, Homo sapien
ttttaccttctctcaggggctcgtg

SEQ ID NO: 3379773 - DNA, 25 bp, Homo sapien
gggctgccatgactttttaccttct

SEQ ID NO: 3379774 - DNA, 25 bp, Homo sapien
gcaggggctgccatgactttttacc

SEQ ID NO: 3379775 - DNA, 25 bp, Homo sapien
caatcggttacgttttcgatggcca

SEQ ID NO: 3379776 - DNA, 25 bp, Homo sapien
tacgttttcgatggccatctgctag

SEQ ID NO: 3379777 - DNA, 25 bp, Homo sapien
gatggccatctgctagacaactcac

SEQ ID NO: 3379778 - DNA, 25 bp, Homo sapien
ttcgatggccatctgctagacaact

SEQ ID NO: 3379779 - DNA, 25 bp, Homo sapien
gagatggcccaaccctcacatgggt

SEQ ID NO: 3379780 - DNA, 25 bp, Homo sapien
atctcctctgagatgactgccctca

SEQ ID NO: 3379781 - DNA, 25 bp, Homo sapien
tcagtcctccagtccctagtgagat

SEQ ID NO: 3379782 - DNA, 25 bp, Homo sapien
gggtcagggcacagactcccttcag

SEQ ID NO: 3379783 - DNA, 25 bp, Homo sapien
aggaaaggccagatacccaacatgc

SEQ ID NO: 3379784 - DNA, 25 bp, Homo sapien
gcagtcatctatggatgcagcacag

SEQ ID NO: 3379785 - DNA, 25 bp, Homo sapien
ctccggttgtgatccaggggagcaa

SEQ ID NO: 3379786 - DNA, 25 bp, Homo sapien
tcaggaaaggccagatacccaacat

SEQ ID NO: 3379787 - DNA, 25 bp, Homo sapien
gatttcaaggtggtcaaagcagcct

SEQ ID NO: 3379788 - DNA, 25 bp, Homo sapien
ggtctcctgagcaagtagtagcata

SEQ ID NO: 3379789 - DNA, 25 bp, Homo sapien
tacccattctagcatggtgagcgcc

SEQ ID NO: 3379790 - DNA, 25 bp, Homo sapien
ggtgagcgccctctgataggagcaa

SEQ ID NO: 3379791 - DNA, 25 bp, Homo sapien
cgaaaagcttctgcaggacttgtcc

SEQ ID NO: 3379792 - DNA, 25 bp, Homo sapien
tctgcaggacttgtccatcatacaa

SEQ ID NO: 3379793 - DNA, 25 bp, Homo sapien
aaagcttctgcaggacttgtccatc

SEQ ID NO: 3379794 - DNA, 25 bp, Homo sapien
gcaggacttgtccatcatacaaatc

SEQ ID NO: 3379795 - DNA, 25 bp, Homo sapien
atccattgcagcactcaactctcct

SEQ ID NO: 3379796 - DNA, 25 bp, Homo sapien
tccattgcagcactcaactctccta

SEQ ID NO: 3379797 - DNA, 25 bp, Homo sapien
ccattgcagcactcaactctcctac

SEQ ID NO: 3379798 - DNA, 25 bp, Homo sapien
cactgagctgttattccatgctcca

SEQ ID NO: 3379799 - DNA, 25 bp, Homo sapien
tagctacaagtaggtgatccaacca

SEQ ID NO: 3379800 - DNA, 25 bp, Homo sapien
taaactgagaataactccttctagc

SEQ ID NO: 3379801 - DNA, 25 bp, Homo sapien
tccaaccacctgcaattaaacacac

SEQ ID NO: 3379802 - DNA, 25 bp, Homo sapien
gagcaggcccacctagtcatggaga

SEQ ID NO: 3379803 - DNA, 25 bp, Homo sapien
gcttgtacgcaatgcctaacgtggg

SEQ ID NO: 3379804 - DNA, 25 bp, Homo sapien
catatgctagacaacctgatggtgc

SEQ ID NO: 3379805 - DNA, 25 bp, Homo sapien
tctaaatgtgactatagggccaggc

SEQ ID NO: 3379806 - DNA, 25 bp, Homo sapien
cactagtgacctgggacaacttgta

SEQ ID NO: 3379807 - DNA, 25 bp, Homo sapien
agtatttgtgggatgaatctacaga

SEQ ID NO: 3379808 - DNA, 25 bp, Homo sapien
catacccagtctatagctcaacagt

SEQ ID NO: 3379809 - DNA, 25 bp, Homo sapien
tggtggcttacgctcatgtctttgg

SEQ ID NO: 3379810 - DNA, 25 bp, Homo sapien
gcaatctctgactgggtgacctcag

SEQ ID NO: 3379811 - DNA, 25 bp, Homo sapien
tttgcttctgagcaatctctgactg

SEQ ID NO: 3379812 - DNA, 25 bp, Homo sapien
tctgagcaatctctgactgggtgac

SEQ ID NO: 3379813 - DNA, 25 bp, Homo sapien
tgcttctgagcaatctctgactggg

SEQ ID NO: 3379814 - DNA, 25 bp, Homo sapien
tgtacttcgcatgcactaggcccat

SEQ ID NO: 3379815 - DNA, 25 bp, Homo sapien
gtcaagccatttacaccagagaagg

SEQ ID NO: 3379816 - DNA, 25 bp, Homo sapien
agcttcacggctcttcattacaggg

SEQ ID NO: 3379817 - DNA, 25 bp, Homo sapien
caatgaatgctctatcctcctggga

SEQ ID NO: 3379818 - DNA, 25 bp, Homo sapien
aattggtgcgcggaaatactgagac

SEQ ID NO: 3379819 - DNA, 25 bp, Homo sapien
aatactgagacagagcaacgagcag

SEQ ID NO: 3379820 - DNA, 25 bp, Homo sapien
ctggaccacaaccacttggatggaa

SEQ ID NO: 3379821 - DNA, 25 bp, Homo sapien
gaaacatggtctgggagtcgaattg

SEQ ID NO: 3379822 - DNA, 25 bp, Homo sapien
caaatgtgttccagaggccatccag

SEQ ID NO: 3379823 - DNA, 25 bp, Homo sapien
tctgacagggcaaagtctaccagcc

SEQ ID NO: 3379824 - DNA, 25 bp, Homo sapien
ttatttcaatgggaggaatggcccc

SEQ ID NO: 3379825 - DNA, 25 bp, Homo sapien
taatagattacgtggtcaccctcgg

SEQ ID NO: 3379826 - DNA, 25 bp, Homo sapien
gatttgccgagactggaggattcct

SEQ ID NO: 3379827 - DNA, 25 bp, Homo sapien
ttcctcttggatttgccgagactgg

SEQ ID NO: 3379828 - DNA, 25 bp, Homo sapien
cctcttggatttgccgagactggag

SEQ ID NO: 3379829 - DNA, 25 bp, Homo sapien
cttggatttgccgagactggaggat

SEQ ID NO: 3379830 - DNA, 25 bp, Homo sapien
aatcgctggcaacaatggtgttgac

SEQ ID NO: 3379831 - DNA, 25 bp, Homo sapien
agaatcgctggcaacaatggtgttg

SEQ ID NO: 3379832 - DNA, 25 bp, Homo sapien
tctgtgttccattacagaatcgctg

SEQ ID NO: 3379833 - DNA, 25 bp, Homo sapien
tccattacagaatcgctggcaacaa

SEQ ID NO: 3379834 - DNA, 25 bp, Homo sapien
cattgacccagggtaggttttctca

SEQ ID NO: 3379835 - DNA, 25 bp, Homo sapien
gttttctcaaagagtgcaggaactg

SEQ ID NO: 3379836 - DNA, 25 bp, Homo sapien
ctgccattgacccagggtaggtttt

SEQ ID NO: 3379837 - DNA, 25 bp, Homo sapien
taggttttctcaaagagtgcaggaa

SEQ ID NO: 3379838 - DNA, 25 bp, Homo sapien
actttcaagacaactgtgcaggtgt

SEQ ID NO: 3379839 - DNA, 25 bp, Homo sapien
taagcacttgcaagtagtgcactgg

SEQ ID NO: 3379840 - DNA, 25 bp, Homo sapien
taggtagtcttcttcccgccagtaa

SEQ ID NO: 3379841 - DNA, 25 bp, Homo sapien
caatgatggcctgataactttcaag

SEQ ID NO: 3379842 - DNA, 25 bp, Homo sapien
ctgggagcctgtgtctgtgtccgtg

SEQ ID NO: 3379843 - DNA, 25 bp, Homo sapien
gtgtctgtgtccgtgcatgtgtaca

SEQ ID NO: 3379844 - DNA, 25 bp, Homo sapien
tgtctgtgtccgtgcatgtgtacat

SEQ ID NO: 3379845 - DNA, 25 bp, Homo sapien
gagcctgtgtctgtgtccgtgcatg

SEQ ID NO: 3379846 - DNA, 25 bp, Homo sapien
tgtctggggcatggtcgaacaaggt

SEQ ID NO: 3379847 - DNA, 25 bp, Homo sapien
catggtcgaacaaggtgtcaaaggc

SEQ ID NO: 3379848 - DNA, 25 bp, Homo sapien
tcaccacattcagcttgtctggggc

SEQ ID NO: 3379849 - DNA, 25 bp, Homo sapien
gggcatggtcgaacaaggtgtcaaa

SEQ ID NO: 3379850 - DNA, 25 bp, Homo sapien
gtgacctccaggttcagtttattca

SEQ ID NO: 3379851 - DNA, 25 bp, Homo sapien
gacctccaggttcagtttattcagg

SEQ ID NO: 3379852 - DNA, 25 bp, Homo sapien
tgacctccaggttcagtttattcag

SEQ ID NO: 3379853 - DNA, 25 bp, Homo sapien
tgtgacctccaggttcagtttattc

SEQ ID NO: 3379854 - DNA, 25 bp, Homo sapien
gaactatgtgctgagggccctggca

SEQ ID NO: 3379855 - DNA, 25 bp, Homo sapien
cagaactatgtgctgagggccctgg

SEQ ID NO: 3379856 - DNA, 25 bp, Homo sapien
agaactatgtgctgagggccctggc

SEQ ID NO: 3379857 - DNA, 25 bp, Homo sapien
cttctgttcaaagctgtccggggtc

SEQ ID NO: 3379858 - DNA, 25 bp, Homo sapien
tgttcaaagctgtccggggtcagga

SEQ ID NO: 3379859 - DNA, 25 bp, Homo sapien
tctgttcaaagctgtccggggtcag

SEQ ID NO: 3379860 - DNA, 25 bp, Homo sapien
gttcaaagctgtccggggtcaggaa

SEQ ID NO: 3379861 - DNA, 25 bp, Homo sapien
gcttttccaaccctccatcttgcat

SEQ ID NO: 3379862 - DNA, 25 bp, Homo sapien
tcttgcatgagctcaaaggcaaagg

SEQ ID NO: 3379863 - DNA, 25 bp, Homo sapien
ttccaaccctccatcttgcatgagc

SEQ ID NO: 3379864 - DNA, 25 bp, Homo sapien
tttccaaccctccatcttgcatgag

SEQ ID NO: 3379865 - DNA, 25 bp, Homo sapien
tgcacgtgtgcactcctagcaggag

SEQ ID NO: 3379866 - DNA, 25 bp, Homo sapien
gactactaagagaagcgtgcctcct

SEQ ID NO: 3379867 - DNA, 25 bp, Homo sapien
tccgcatctgtaaggagagaagcag

SEQ ID NO: 3379868 - DNA, 25 bp, Homo sapien
cacgcatggcatgtgtgggatttca

SEQ ID NO: 3379869 - DNA, 25 bp, Homo sapien
caaataccaggaagttactccaggg

SEQ ID NO: 3379870 - DNA, 25 bp, Homo sapien
tactggagccagactatgataggcc

SEQ ID NO: 3379871 - DNA, 25 bp, Homo sapien
gatgtacactgcacaactccaaggc

SEQ ID NO: 3379872 - DNA, 25 bp, Homo sapien
catggactgcaaggtaaacagggcc

SEQ ID NO: 3379873 - DNA, 25 bp, Homo sapien
cacagggatccttcaagagtaggca

SEQ ID NO: 3379874 - DNA, 25 bp, Homo sapien
ggagaaattacaccaagccactggg

SEQ ID NO: 3379875 - DNA, 25 bp, Homo sapien
tctagcaatgctctggtcaataccc

SEQ ID NO: 3379876 - DNA, 25 bp, Homo sapien
gagaaggtaataaatgccctgggat

SEQ ID NO: 3379877 - DNA, 25 bp, Homo sapien
catgttcggggcagatgggtagagt

SEQ ID NO: 3379878 - DNA, 25 bp, Homo sapien
agtgggcagcgagaattcagagcag

SEQ ID NO: 3379879 - DNA, 25 bp, Homo sapien
cagggggcagtgagggtagaggtgc

SEQ ID NO: 3379880 - DNA, 25 bp, Homo sapien
gggtagagtgggcagcgagaattca

SEQ ID NO: 3379881 - DNA, 25 bp, Homo sapien
ccaattgtttccatggggccacatg

SEQ ID NO: 3379882 - DNA, 25 bp, Homo sapien
tgttccaaagctggcatacactgcc

SEQ ID NO: 3379883 - DNA, 25 bp, Homo sapien
ggccacatgttccaaagctggcata

SEQ ID NO: 3379884 - DNA, 25 bp, Homo sapien
cacatgttccaaagctggcatacac

SEQ ID NO: 3379885 - DNA, 25 bp, Homo sapien
cgtagtgtagatttcaggtcacagt

SEQ ID NO: 3379886 - DNA, 25 bp, Homo sapien
tggtgaagaggttgtacaacactcg

SEQ ID NO: 3379887 - DNA, 25 bp, Homo sapien
gaggttgtacaacactcgtagtgta

SEQ ID NO: 3379888 - DNA, 25 bp, Homo sapien
ccacgttacggtacttggtgaagag

SEQ ID NO: 3379889 - DNA, 25 bp, Homo sapien
cagtttccactatctctgggttgca

SEQ ID NO: 3379890 - DNA, 25 bp, Homo sapien
taagctggttcccaaatcatggagg

SEQ ID NO: 3379891 - DNA, 25 bp, Homo sapien
gagcacagtgcaagagacaggaata

SEQ ID NO: 3379892 - DNA, 25 bp, Homo sapien
ccttcattgctaggttggtccccag

SEQ ID NO: 3379893 - DNA, 25 bp, Homo sapien
gcaaaaccttgatgattggactcag

SEQ ID NO: 3379894 - DNA, 25 bp, Homo sapien
aacacctacgtcaatgggagtcctg

SEQ ID NO: 3379895 - DNA, 25 bp, Homo sapien
gagtaacccacgcaaagaaactgct

SEQ ID NO: 3379896 - DNA, 25 bp, Homo sapien
gatgacagcattagaaaaccaggcc

SEQ ID NO: 3379897 - DNA, 25 bp, Homo sapien
cccagtgagcctatgaagtgttgat

SEQ ID NO: 3379898 - DNA, 25 bp, Homo sapien
tacatgcctagagtatctctggcag

SEQ ID NO: 3379899 - DNA, 25 bp, Homo sapien
ggaggcttaggttttccactagata

SEQ ID NO: 3379900 - DNA, 25 bp, Homo sapien
tacccagggtaatacaatatccaag

SEQ ID NO: 3379901 - DNA, 25 bp, Homo sapien
tccacttaggcacggcaaaactgtt

SEQ ID NO: 3379902 - DNA, 25 bp, Homo sapien
taaaggcagcggatctcaaattagt

SEQ ID NO: 3379903 - DNA, 25 bp, Homo sapien
tagttttgatcagcctccacttagg

SEQ ID NO: 3379904 - DNA, 25 bp, Homo sapien
gacatatccctcttgcctatctagg

SEQ ID NO: 3379905 - DNA, 25 bp, Homo sapien
tatgcgaccaccactgtagtaaagc

SEQ ID NO: 3379906 - DNA, 25 bp, Homo sapien
tcttgcaggatcctactgggaagcc

SEQ ID NO: 3379907 - DNA, 25 bp, Homo sapien
tggtaagacccaaatctgcaagtat

SEQ ID NO: 3379908 - DNA, 25 bp, Homo sapien
gttgtcatgaacacgtgaacacgca

SEQ ID NO: 3379909 - DNA, 25 bp, Homo sapien
tattgctgacgtagctttccccaga

SEQ ID NO: 3379910 - DNA, 25 bp, Homo sapien
aaatgccactttgccggagacttct

SEQ ID NO: 3379911 - DNA, 25 bp, Homo sapien
ttttagtacttctccatcgcgacag

SEQ ID NO: 3379912 - DNA, 25 bp, Homo sapien
gaaaaatcagcactcccgatgcctg

SEQ ID NO: 3379913 - DNA, 25 bp, Homo sapien
tgccgttggtaaaacaggagtcctc

SEQ ID NO: 3379914 - DNA, 25 bp, Homo sapien
taattgaccgtgttcagtaaggcta

SEQ ID NO: 3379915 - DNA, 25 bp, Homo sapien
cgcctactcaatgtgatgaccatga

SEQ ID NO: 3379916 - DNA, 25 bp, Homo sapien
tatagtttgtcaagcccacaggctg

SEQ ID NO: 3379917 - DNA, 25 bp, Homo sapien
gagccaccgtgctcggcccatggat

SEQ ID NO: 3379918 - DNA, 25 bp, Homo sapien
agccaccgtgctcggcccatggatt

SEQ ID NO: 3379919 - DNA, 25 bp, Homo sapien
accgtgctcggcccatggatttttt

SEQ ID NO: 3379920 - DNA, 25 bp, Homo sapien
ccaccgtgctcggcccatggatttt

SEQ ID NO: 3379921 - DNA, 25 bp, Homo sapien
aaatgccagtatcaaagccagtgcc

SEQ ID NO: 3379922 - DNA, 25 bp, Homo sapien
tagcagccagagagttgtgcagccc

SEQ ID NO: 3379923 - DNA, 25 bp, Homo sapien
tcttggccatgggtctagacaacac

SEQ ID NO: 3379924 - DNA, 25 bp, Homo sapien
tccaaccaaggagatttcaagcggg

SEQ ID NO: 3379925 - DNA, 25 bp, Homo sapien
caacccattttgtgcggagactttc

SEQ ID NO: 3379926 - DNA, 25 bp, Homo sapien
aactagggaccctcagtggtatctg

SEQ ID NO: 3379927 - DNA, 25 bp, Homo sapien
tacctcaaatgagctgcacctgtca

SEQ ID NO: 3379928 - DNA, 25 bp, Homo sapien
cacttcatcagtgttagggcgggtc

SEQ ID NO: 3379929 - DNA, 25 bp, Homo sapien
catgaaggagcaattggtagaactg

SEQ ID NO: 3379930 - DNA, 25 bp, Homo sapien
ggagaggaccagtgcaaaacagatg

SEQ ID NO: 3379931 - DNA, 25 bp, Homo sapien
cagaagttttggcagggaatacaca

SEQ ID NO: 3379932 - DNA, 25 bp, Homo sapien
taagagtcattgcaatatctgggca

SEQ ID NO: 3379933 - DNA, 25 bp, Homo sapien
tacctgacaggttagcatctacatg

SEQ ID NO: 3379934 - DNA, 25 bp, Homo sapien
tcatcactgagttgcggtctcctga

SEQ ID NO: 3379935 - DNA, 25 bp, Homo sapien
tagatttgaagccagctggcgaacc

SEQ ID NO: 3379936 - DNA, 25 bp, Homo sapien
tgtgcatggtacatggctggagtcc

SEQ ID NO: 3379937 - DNA, 25 bp, Homo sapien
tcagaacctagggacgtggcttttc

SEQ ID NO: 3379938 - DNA, 25 bp, Homo sapien
gaagctggagtcagacagttctacc

SEQ ID NO: 3379939 - DNA, 25 bp, Homo sapien
taacatggacttggtactaccctca

SEQ ID NO: 3379940 - DNA, 25 bp, Homo sapien
ttagaacatagccaaggactcccgc

SEQ ID NO: 3379941 - DNA, 25 bp, Homo sapien
aggtggaagttgcaggtagaggctt

SEQ ID NO: 3379942 - DNA, 25 bp, Homo sapien
ggcactgagggtccacaagtatgtt

SEQ ID NO: 3379943 - DNA, 25 bp, Homo sapien
aataatgtcattggggcactgaggg

SEQ ID NO: 3379944 - DNA, 25 bp, Homo sapien
gcactgagggtccacaagtatgttc

SEQ ID NO: 3379945 - DNA, 25 bp, Homo sapien
ttgctgccacagcttgaaacagtga

SEQ ID NO: 3379946 - DNA, 25 bp, Homo sapien
taagacccagggattagctttcctg

SEQ ID NO: 3379947 - DNA, 25 bp, Homo sapien
aagcagctgttaagaagattcccac

SEQ ID NO: 3379948 - DNA, 25 bp, Homo sapien
tcagacagccactctagaagcagct

SEQ ID NO: 3379949 - DNA, 25 bp, Homo sapien
tgtttaataatatcgttacttcagc

SEQ ID NO: 3379950 - DNA, 25 bp, Homo sapien
catcttatcgaagtctgcaggacat

SEQ ID NO: 3379951 - DNA, 25 bp, Homo sapien
gctgctatttctatgagattatcca

SEQ ID NO: 3379952 - DNA, 25 bp, Homo sapien
taataatatcgttacttcagctgct

SEQ ID NO: 3379953 - DNA, 25 bp, Homo sapien
aattcatcaagctagttattgcctg

SEQ ID NO: 3379954 - DNA, 25 bp, Homo sapien
catcaagctagttattgcctgaata

SEQ ID NO: 3379955 - DNA, 25 bp, Homo sapien
ttcatcaagctagttattgcctgaa

SEQ ID NO: 3379956 - DNA, 25 bp, Homo sapien
tcaattcatcaagctagttattgcc

SEQ ID NO: 3379957 - DNA, 25 bp, Homo sapien
ccttcggtgtgtaaatattgctggt

SEQ ID NO: 3379958 - DNA, 25 bp, Homo sapien
aacaatatcacagccccccaaatgg

SEQ ID NO: 3379959 - DNA, 25 bp, Homo sapien
caaatggccatactcgtgccttcgg

SEQ ID NO: 3379960 - DNA, 25 bp, Homo sapien
aaaactcctcaataacaatatcaca

SEQ ID NO: 3379961 - DNA, 25 bp, Homo sapien
ttatatgagctaagatctccagcac

SEQ ID NO: 3379962 - DNA, 25 bp, Homo sapien
tcttctttggcctattaatatggtg

SEQ ID NO: 3379963 - DNA, 25 bp, Homo sapien
aaccagtgacagtgaatatcctatc

SEQ ID NO: 3379964 - DNA, 25 bp, Homo sapien
gggtctccacatacctgtggaggta

SEQ ID NO: 3379965 - DNA, 25 bp, Homo sapien
gccctccgtctcccggcgcgggctc

SEQ ID NO: 3379966 - DNA, 25 bp, Homo sapien
cgagtccgaggcaaacttcggcgcc

SEQ ID NO: 3379967 - DNA, 25 bp, Homo sapien
ggcgtcactgcatggcctgtgcctg

SEQ ID NO: 3379968 - DNA, 25 bp, Homo sapien
tgaaatgaacgccaggaccgaactc

SEQ ID NO: 3379969 - DNA, 25 bp, Homo sapien
cggcgcgagcgatgctaagaatgtt

SEQ ID NO: 3379970 - DNA, 25 bp, Homo sapien
tcctgggtttggtggtaactgcgac

SEQ ID NO: 3379971 - DNA, 25 bp, Homo sapien
aactgcgactcagtcttttttggac

SEQ ID NO: 3379972 - DNA, 25 bp, Homo sapien
tttccacttgaatgtgcaatgaagc

SEQ ID NO: 3379973 - DNA, 25 bp, Homo sapien
cacttgaatgtgcaatgaagcggcg

SEQ ID NO: 3379974 - DNA, 25 bp, Homo sapien
gaaaacaagtgttgctgttacgaac

SEQ ID NO: 3379975 - DNA, 25 bp, Homo sapien
tagaagtgtacccagattttctccc

SEQ ID NO: 3379976 - DNA, 25 bp, Homo sapien
tcctcattgttttcgactcattaaa

SEQ ID NO: 3379977 - DNA, 25 bp, Homo sapien
taaagcgggactctggacttttgaa

SEQ ID NO: 3379978 - DNA, 25 bp, Homo sapien
tgcacatgctaaggtgggaaccact

SEQ ID NO: 3379979 - DNA, 25 bp, Homo sapien
gcttcccctggatcgaaaggtgaga

SEQ ID NO: 3379980 - DNA, 25 bp, Homo sapien
gaaccatcctgagttagccatgtaa

SEQ ID NO: 3379981 - DNA, 25 bp, Homo sapien
gctgtaaaagctccatggaggctgc

SEQ ID NO: 3379982 - DNA, 25 bp, Homo sapien
taatctgtaaactctgccgggcagg

SEQ ID NO: 3379983 - DNA, 25 bp, Homo sapien
ggtgagcgcatgcaacatcaagggt

SEQ ID NO: 3379984 - DNA, 25 bp, Homo sapien
taggaatgctcactactgactctgg

SEQ ID NO: 3379985 - DNA, 25 bp, Homo sapien
atcaagggtcattaccaccacctgg

SEQ ID NO: 3379986 - DNA, 25 bp, Homo sapien
ggtaggtcactaaacttctctgagc

SEQ ID NO: 3379987 - DNA, 25 bp, Homo sapien
gctagaagtggagagaccaagaccc

SEQ ID NO: 3379988 - DNA, 25 bp, Homo sapien
caggacctttctgcctaagggctca

SEQ ID NO: 3379989 - DNA, 25 bp, Homo sapien
tatatgggcttgagacagaacctgg

SEQ ID NO: 3379990 - DNA, 25 bp, Homo sapien
tgaacctgcactataacccataagg

SEQ ID NO: 3379991 - DNA, 25 bp, Homo sapien
ttcaatccagtgttaaagagagcag

SEQ ID NO: 3379992 - DNA, 25 bp, Homo sapien
cacaagttcataagcataatgcgga

SEQ ID NO: 3379993 - DNA, 25 bp, Homo sapien
tgagacacttctccgcgagtcagca

SEQ ID NO: 3379994 - DNA, 25 bp, Homo sapien
gccaggagtttacaagaatagccat

SEQ ID NO: 3379995 - DNA, 25 bp, Homo sapien
cacagctgctggatgatggtagtca

SEQ ID NO: 3379996 - DNA, 25 bp, Homo sapien
gatgctacagaagaggtacttggca

SEQ ID NO: 3379997 - DNA, 25 bp, Homo sapien
tacttggcactctacttcacagctg

SEQ ID NO: 3379998 - DNA, 25 bp, Homo sapien
tttttcagatttatcacagggaagc

SEQ ID NO: 3379999 - DNA, 25 bp, Homo sapien
tcatgaaccgtagaaggacatgtgc

SEQ ID NO: 3380000 - DNA, 25 bp, Homo sapien
gacatgtgcatcagggctagcccat

SEQ ID NO: 3380001 - DNA, 25 bp, Homo sapien
aaggacatgtgcatcagggctagcc

SEQ ID NO: 3380002 - DNA, 25 bp, Homo sapien
cgtagaaggacatgtgcatcagggc

SEQ ID NO: 3380003 - DNA, 25 bp, Homo sapien
cttcatcttcacaccggtcacgctc

SEQ ID NO: 3380004 - DNA, 25 bp, Homo sapien
atcttcacaccggtcacgctcttca

SEQ ID NO: 3380005 - DNA, 25 bp, Homo sapien
tcttcacaccggtcacgctcttcat

SEQ ID NO: 3380006 - DNA, 25 bp, Homo sapien
tcatcttcacaccggtcacgctctt

SEQ ID NO: 3380007 - DNA, 25 bp, Homo sapien
tgaggagctttcatgaagaaagagg

SEQ ID NO: 3380008 - DNA, 25 bp, Homo sapien
ctgaggagctttcatgaagaaagag

SEQ ID NO: 3380009 - DNA, 25 bp, Homo sapien
gaaaaaacctaaatgggctagcata

SEQ ID NO: 3380010 - DNA, 25 bp, Homo sapien
aattaggcttgtgctgtatggttcc

SEQ ID NO: 3380011 - DNA, 25 bp, Homo sapien
taagctcctcatcaaaagatctgtg

SEQ ID NO: 3380012 - DNA, 25 bp, Homo sapien
tgtgcctccaggatgcgttagaact

SEQ ID NO: 3380013 - DNA, 25 bp, Homo sapien
taggaaatgctgcaaagttcactgt

SEQ ID NO: 3380014 - DNA, 25 bp, Homo sapien
cacagccataccagggacctaaaac

SEQ ID NO: 3380015 - DNA, 25 bp, Homo sapien
ttcagttaatcaaagagctggaacc

SEQ ID NO: 3380016 - DNA, 25 bp, Homo sapien
tgtcatccaattcaacaggcctcta

SEQ ID NO: 3380017 - DNA, 25 bp, Homo sapien
aacaaagacataactgggcacaggg

SEQ ID NO: 3380018 - DNA, 25 bp, Homo sapien
cggaggcctaggcaaaaggatctct

SEQ ID NO: 3380019 - DNA, 25 bp, Homo sapien
ttttcgctccattataaagtgacca

SEQ ID NO: 3380020 - DNA, 25 bp, Homo sapien
cagagtcaggatcattagatgtcac

SEQ ID NO: 3380021 - DNA, 25 bp, Homo sapien
gaatacacattccaccactttgtag

SEQ ID NO: 3380022 - DNA, 25 bp, Homo sapien
cctaatgcttattcagacgagactc

SEQ ID NO: 3380023 - DNA, 25 bp, Homo sapien
ttgcccttctcgaatcctccaggaa

SEQ ID NO: 3380024 - DNA, 25 bp, Homo sapien
gaatctactggctagctaaggagaa

SEQ ID NO: 3380025 - DNA, 25 bp, Homo sapien
agggagctgttcatgtctctgcaga

SEQ ID NO: 3380026 - DNA, 25 bp, Homo sapien
tgagaaaaaaccgtagactcgactc

SEQ ID NO: 3380027 - DNA, 25 bp, Homo sapien
aaccgtagactcgactcatctttcc

SEQ ID NO: 3380028 - DNA, 25 bp, Homo sapien
gaggatgagaaaaaaccgtagactc

SEQ ID NO: 3380029 - DNA, 25 bp, Homo sapien
taaaccacgcatgcgggccaagtgt

SEQ ID NO: 3380030 - DNA, 25 bp, Homo sapien
ggcccagtgtcaggttaccacaaaa

SEQ ID NO: 3380031 - DNA, 25 bp, Homo sapien
gccgcacagtctgaggtcttcactg

SEQ ID NO: 3380032 - DNA, 25 bp, Homo sapien
taacagtgggcctgcctaaaccacg

SEQ ID NO: 3380033 - DNA, 25 bp, Homo sapien
tgttgcccaggctcatttcaaactg

SEQ ID NO: 3380034 - DNA, 25 bp, Homo sapien
atttcggttttttggcctcactatg

SEQ ID NO: 3380035 - DNA, 25 bp, Homo sapien
tgcccaggctcatttcaaactgctg

SEQ ID NO: 3380036 - DNA, 25 bp, Homo sapien
ccaggctcatttcaaactgctggcc

SEQ ID NO: 3380037 - DNA, 25 bp, Homo sapien
gggattttccaagccgaagcctgga

SEQ ID NO: 3380038 - DNA, 25 bp, Homo sapien
tgccgctccagctgctgggctcaat

SEQ ID NO: 3380039 - DNA, 25 bp, Homo sapien
cactgccgctccagctgctgggctc

SEQ ID NO: 3380040 - DNA, 25 bp, Homo sapien
tttcggcagggctctcactgccgct

SEQ ID NO: 3380041 - DNA, 25 bp, Homo sapien
gttttcggcagggctctcactgccg

SEQ ID NO: 3380042 - DNA, 25 bp, Homo sapien
acatggtggatagatagccagggcc

SEQ ID NO: 3380043 - DNA, 25 bp, Homo sapien
cctgaaagctttgctcgatgtcggg

SEQ ID NO: 3380044 - DNA, 25 bp, Homo sapien
catcattgtcaattggcttatctgc

SEQ ID NO: 3380045 - DNA, 25 bp, Homo sapien
catacattttgccttcgtctgataa

SEQ ID NO: 3380046 - DNA, 25 bp, Homo sapien
tcaaaggagtgttccaggccactta

SEQ ID NO: 3380047 - DNA, 25 bp, Homo sapien
caaaggagtgttccaggccacttac

SEQ ID NO: 3380048 - DNA, 25 bp, Homo sapien
ctagttgaagccacagtctcctacg

SEQ ID NO: 3380049 - DNA, 25 bp, Homo sapien
tagttgaagccacagtctcctacgg

SEQ ID NO: 3380050 - DNA, 25 bp, Homo sapien
agttgaagccacagtctcctacggc

SEQ ID NO: 3380051 - DNA, 25 bp, Homo sapien
ttgaagccacagtctcctacggctc

SEQ ID NO: 3380052 - DNA, 25 bp, Homo sapien
tataggcaaattggttaaatccacc

SEQ ID NO: 3380053 - DNA, 25 bp, Homo sapien
caaattggttaaatccaccagggct

SEQ ID NO: 3380054 - DNA, 25 bp, Homo sapien
tctcaatggagaacaatacaaaatt

SEQ ID NO: 3380055 - DNA, 25 bp, Homo sapien
tgacaaaagttaacttgtgctttga

SEQ ID NO: 3380056 - DNA, 25 bp, Homo sapien
tgcttgctcaaaaggactgtcccat

SEQ ID NO: 3380057 - DNA, 25 bp, Homo sapien
ccaacacggtcactaaatgtgctgc

SEQ ID NO: 3380058 - DNA, 25 bp, Homo sapien
tcttctgagccccaattaggataca

SEQ ID NO: 3380059 - DNA, 25 bp, Homo sapien
gcaggacagtgcatccaacgcatct

SEQ ID NO: 3380060 - DNA, 25 bp, Homo sapien
gcaaagctcctcatgtcgaccagag

SEQ ID NO: 3380061 - DNA, 25 bp, Homo sapien
cttccaaggtagcagtagaagcaaa

SEQ ID NO: 3380062 - DNA, 25 bp, Homo sapien
gcagtagaagcaaagctcctcatgt

SEQ ID NO: 3380063 - DNA, 25 bp, Homo sapien
tcctcatgtcgaccagagacaggga

SEQ ID NO: 3380064 - DNA, 25 bp, Homo sapien
agaggcagctcccagtcaaccaggg

SEQ ID NO: 3380065 - DNA, 25 bp, Homo sapien
gcagctcccagtcaaccagggcagt

SEQ ID NO: 3380066 - DNA, 25 bp, Homo sapien
tcttaaggggtccagtctccaccac

SEQ ID NO: 3380067 - DNA, 25 bp, Homo sapien
gagactcccaagtcaactgtctctc

SEQ ID NO: 3380068 - DNA, 25 bp, Homo sapien
tcctacgaccaagccataacaactg

SEQ ID NO: 3380069 - DNA, 25 bp, Homo sapien
cctagggctaggcaatgagttctca

SEQ ID NO: 3380070 - DNA, 25 bp, Homo sapien
gagcctctgaacagcatgcctcatg

SEQ ID NO: 3380071 - DNA, 25 bp, Homo sapien
tgggttccctcacaagtaatatgca

SEQ ID NO: 3380072 - DNA, 25 bp, Homo sapien
tcccatgcatgaccagagcctcctg

SEQ ID NO: 3380073 - DNA, 25 bp, Homo sapien
ctgaaatctttccatctctaatctc

SEQ ID NO: 3380074 - DNA, 25 bp, Homo sapien
tatttgtggccacacctcgaaactc

SEQ ID NO: 3380075 - DNA, 25 bp, Homo sapien
gcccacattcacatcagttgaccgt

SEQ ID NO: 3380076 - DNA, 25 bp, Homo sapien
acactttaccactgtgaagttcagc

SEQ ID NO: 3380077 - DNA, 25 bp, Homo sapien
gcatctaagtgattaatcaagtcac

SEQ ID NO: 3380078 - DNA, 25 bp, Homo sapien
ctgtgaagttcagcatctaagtgat

SEQ ID NO: 3380079 - DNA, 25 bp, Homo sapien
attaatcaagtcactgtggatgagc

SEQ ID NO: 3380080 - DNA, 25 bp, Homo sapien
aaagaaatccctcagcacctggttt

SEQ ID NO: 3380081 - DNA, 25 bp, Homo sapien
gctctcatctatgtgtcggtgtcca

SEQ ID NO: 3380082 - DNA, 25 bp, Homo sapien
ggctggcccatgtaactataactat

SEQ ID NO: 3380083 - DNA, 25 bp, Homo sapien
acaggtatagttttggaccaactga

SEQ ID NO: 3380084 - DNA, 25 bp, Homo sapien
gggcagcaggtttcgctatcacacc

SEQ ID NO: 3380085 - DNA, 25 bp, Homo sapien
caattgggacctttgtaaatggcca

SEQ ID NO: 3380086 - DNA, 25 bp, Homo sapien
tgttaaatattaccccagaagctgt

SEQ ID NO: 3380087 - DNA, 25 bp, Homo sapien
taggcatacagtgagcaattgggac

SEQ ID NO: 3380088 - DNA, 25 bp, Homo sapien
taaacaacaatctcttctaagcggt

SEQ ID NO: 3380089 - DNA, 25 bp, Homo sapien
acaatctcttctaagcggtcatgga

SEQ ID NO: 3380090 - DNA, 25 bp, Homo sapien
ttctaagcggtcatggaagctactg

SEQ ID NO: 3380091 - DNA, 25 bp, Homo sapien
cataaacaacaatctcttctaagcg

SEQ ID NO: 3380092 - DNA, 25 bp, Homo sapien
taaggaaaggtccagtcagatcctc

SEQ ID NO: 3380093 - DNA, 25 bp, Homo sapien
aagggatccgacttcactcttcgca

SEQ ID NO: 3380094 - DNA, 25 bp, Homo sapien
tccctgctagctaatggttttgagc

SEQ ID NO: 3380095 - DNA, 25 bp, Homo sapien
ttgttgtcacatctaaggctttgcc

SEQ ID NO: 3380096 - DNA, 25 bp, Homo sapien
acccctgaggatacggtgagagacc

SEQ ID NO: 3380097 - DNA, 25 bp, Homo sapien
ccagcagccggtgatcctttcaaaa

SEQ ID NO: 3380098 - DNA, 25 bp, Homo sapien
tattccaaatggcatgcaggtctca

SEQ ID NO: 3380099 - DNA, 25 bp, Homo sapien
tgaaagcccatatccttacagaggg

SEQ ID NO: 3380100 - DNA, 25 bp, Homo sapien
cctacagaggtaatgagctgaaacc

SEQ ID NO: 3380101 - DNA, 25 bp, Homo sapien
gctgaaacctgtagcatacatgctg

SEQ ID NO: 3380102 - DNA, 25 bp, Homo sapien
gaaagctgtcaccaacgagtgatag

SEQ ID NO: 3380103 - DNA, 25 bp, Homo sapien
agcaggcactgtaggtagcacggcc

SEQ ID NO: 3380104 - DNA, 25 bp, Homo sapien
catgatacccatgctctctgatgcc

SEQ ID NO: 3380105 - DNA, 25 bp, Homo sapien
tgacaaggcccttatcagtgcattc

SEQ ID NO: 3380106 - DNA, 25 bp, Homo sapien
cgtctataagaaggacctgcccacc

SEQ ID NO: 3380107 - DNA, 25 bp, Homo sapien
agagtaactcacatcataacaaggg

SEQ ID NO: 3380108 - DNA, 25 bp, Homo sapien
caaacacagcttgagggaaatctcc

SEQ ID NO: 3380109 - DNA, 25 bp, Homo sapien
tccatgtgcctcaaggagtgtccca

SEQ ID NO: 3380110 - DNA, 25 bp, Homo sapien
agagaggtgatctcaaatagtctcc

SEQ ID NO: 3380111 - DNA, 25 bp, Homo sapien
caccaaacaactttctgatcagaga

SEQ ID NO: 3380112 - DNA, 25 bp, Homo sapien
caaagagactatcacgctaatgagg

SEQ ID NO: 3380113 - DNA, 25 bp, Homo sapien
ctatcagagttagccaaagcaagcg

SEQ ID NO: 3380114 - DNA, 25 bp, Homo sapien
tgtactgggtgcttaggacatgcca

SEQ ID NO: 3380115 - DNA, 25 bp, Homo sapien
tgaacatgacatagaccagacctgg

SEQ ID NO: 3380116 - DNA, 25 bp, Homo sapien
tgttggcgtcctataaaccaacagg

SEQ ID NO: 3380117 - DNA, 25 bp, Homo sapien
tgcttcaggacaagtgttggcgtcc

SEQ ID NO: 3380118 - DNA, 25 bp, Homo sapien
gcaatctgtgatacgtaccgcctaa

SEQ ID NO: 3380119 - DNA, 25 bp, Homo sapien
ccaaatccacaacgctgcttcagga

SEQ ID NO: 3380120 - DNA, 25 bp, Homo sapien
aacagcctcaagattttgcctatgg

SEQ ID NO: 3380121 - DNA, 25 bp, Homo sapien
cctgacctgacaatgaacaactact

SEQ ID NO: 3380122 - DNA, 25 bp, Homo sapien
tagcacaacctgcaattcctacagg

SEQ ID NO: 3380123 - DNA, 25 bp, Homo sapien
ggagccaacctaccaattcgtttga

SEQ ID NO: 3380124 - DNA, 25 bp, Homo sapien
tgcaaaaagggagagctttcacatt

SEQ ID NO: 3380125 - DNA, 25 bp, Homo sapien
tatttgagcggacagaaacagaact

SEQ ID NO: 3380126 - DNA, 25 bp, Homo sapien
gatatttgtctgtgctgtgatgctc

SEQ ID NO: 3380127 - DNA, 25 bp, Homo sapien
ggtatcctacagagaattcgtttcc

SEQ ID NO: 3380128 - DNA, 25 bp, Homo sapien
cacaatgtgtgggtaagaaacctct

SEQ ID NO: 3380129 - DNA, 25 bp, Homo sapien
gacaaagctgcattgtgggcattaa

SEQ ID NO: 3380130 - DNA, 25 bp, Homo sapien
tttgcagctaataaccacaatgtgt

SEQ ID NO: 3380131 - DNA, 25 bp, Homo sapien
tgtcattataaacaaacgccgcttt

SEQ ID NO: 3380132 - DNA, 25 bp, Homo sapien
actgagttctatccagaaggcttac

SEQ ID NO: 3380133 - DNA, 25 bp, Homo sapien
ctgagttctatccagaaggcttaca

SEQ ID NO: 3380134 - DNA, 25 bp, Homo sapien
ttttgcattggctaggaatacaaca

SEQ ID NO: 3380135 - DNA, 25 bp, Homo sapien
gcacaacacaagaagtccctaaacg

SEQ ID NO: 3380136 - DNA, 25 bp, Homo sapien
tcaccagtgtcaaaagatgtctcac

SEQ ID NO: 3380137 - DNA, 25 bp, Homo sapien
caacaacttctgctaaaggtggagg

SEQ ID NO: 3380138 - DNA, 25 bp, Homo sapien
caaaccgatggctcttaagggcgag

SEQ ID NO: 3380139 - DNA, 25 bp, Homo sapien
tctactgggtcaaaatccgctggat

SEQ ID NO: 3380140 - DNA, 25 bp, Homo sapien
tacctcaatcagcaataacaaaccg

SEQ ID NO: 3380141 - DNA, 25 bp, Homo sapien
gagtttctctggatcagagcctctg

SEQ ID NO: 3380142 - DNA, 25 bp, Homo sapien
gaatgagtgttctgcatcatgccct

SEQ ID NO: 3380143 - DNA, 25 bp, Homo sapien
tcatgcccttggcacaaggtaatgc

SEQ ID NO: 3380144 - DNA, 25 bp, Homo sapien
aatgctttcatgatccagtagctgg

SEQ ID NO: 3380145 - DNA, 25 bp, Homo sapien
aaggttagcttcatagaggttgaac

SEQ ID NO: 3380146 - DNA, 25 bp, Homo sapien
caagtctatttggttgcaatatgtc

SEQ ID NO: 3380147 - DNA, 25 bp, Homo sapien
caattgacttggacaactgctagca

SEQ ID NO: 3380148 - DNA, 25 bp, Homo sapien
cagatgtggtagttattagtggtcc

SEQ ID NO: 3380149 - DNA, 25 bp, Homo sapien
tgaaggagagcagtatcaaatgaat

SEQ ID NO: 3380150 - DNA, 25 bp, Homo sapien
gggaattgtcccaagtctatgaaaa

SEQ ID NO: 3380151 - DNA, 25 bp, Homo sapien
tctgtcctaacttgcttgtgtggtg

SEQ ID NO: 3380152 - DNA, 25 bp, Homo sapien
tgtttccccagtttgagcggcacag

SEQ ID NO: 3380153 - DNA, 25 bp, Homo sapien
ggtgacgtgtcttttgtcaaaagga

SEQ ID NO: 3380154 - DNA, 25 bp, Homo sapien
taaggctacaaccagaaggatcttt

SEQ ID NO: 3380155 - DNA, 25 bp, Homo sapien
tgaaacaaacccttccattacgcga

SEQ ID NO: 3380156 - DNA, 25 bp, Homo sapien
aaagctgcctccgaactgttttcct

SEQ ID NO: 3380157 - DNA, 25 bp, Homo sapien
ccgtttctggtctcttaaagctgcc

SEQ ID NO: 3380158 - DNA, 25 bp, Homo sapien
agcagttacaagaggtttagcatcc

SEQ ID NO: 3380159 - DNA, 25 bp, Homo sapien
aatccaatttagcagttacaagagg

SEQ ID NO: 3380160 - DNA, 25 bp, Homo sapien
gcttttatggtcttgtccaacagca

SEQ ID NO: 3380161 - DNA, 25 bp, Homo sapien
tgtccaacagcagctgatacttcat

SEQ ID NO: 3380162 - DNA, 25 bp, Homo sapien
cagatcaaagctagcaaagggccag

SEQ ID NO: 3380163 - DNA, 25 bp, Homo sapien
tggatgattcgtgcctttcacaggc

SEQ ID NO: 3380164 - DNA, 25 bp, Homo sapien
gctgtaagcatgctcggctgctgga

SEQ ID NO: 3380165 - DNA, 25 bp, Homo sapien
tctttcctgtgtggtatgctgagca

SEQ ID NO: 3380166 - DNA, 25 bp, Homo sapien
tagatggcggcagaatccagccatg

SEQ ID NO: 3380167 - DNA, 25 bp, Homo sapien
aactaattaagcagtggagtcggga

SEQ ID NO: 3380168 - DNA, 25 bp, Homo sapien
tatacatgctgaaactgcagttcaa

SEQ ID NO: 3380169 - DNA, 25 bp, Homo sapien
ccatgaaatggactgaattgtacac

SEQ ID NO: 3380170 - DNA, 25 bp, Homo sapien
gagatggtgggaggctatagaaagt

SEQ ID NO: 3380171 - DNA, 25 bp, Homo sapien
tagaaagttgggcttttgcagggaa

SEQ ID NO: 3380172 - DNA, 25 bp, Homo sapien
cactattgcggagtttagagatggt

SEQ ID NO: 3380173 - DNA, 25 bp, Homo sapien
gctaaatgaaacactattgcggagt

SEQ ID NO: 3380174 - DNA, 25 bp, Homo sapien
cacaactgctgtcatggcctgtact

SEQ ID NO: 3380175 - DNA, 25 bp, Homo sapien
acaactgctgtcatggcctgtactg

SEQ ID NO: 3380176 - DNA, 25 bp, Homo sapien
ctctcagatggttgtacagattttg

SEQ ID NO: 3380177 - DNA, 25 bp, Homo sapien
cttgaaggctcgctgacaacagagc

SEQ ID NO: 3380178 - DNA, 25 bp, Homo sapien
cacaggacaagaacctctaaattca

SEQ ID NO: 3380179 - DNA, 25 bp, Homo sapien
tgagaactaccaatatcccctgtag

SEQ ID NO: 3380180 - DNA, 25 bp, Homo sapien
gaatttaccatgaggtgggttacca

SEQ ID NO: 3380181 - DNA, 25 bp, Homo sapien
gatgtatctggctatcaattcattc

SEQ ID NO: 3380182 - DNA, 25 bp, Homo sapien
ttgcctgtcctgagtttgatgtatc

SEQ ID NO: 3380183 - DNA, 25 bp, Homo sapien
tgttttctggtcctcgtcttgcctg

SEQ ID NO: 3380184 - DNA, 25 bp, Homo sapien
ttctggtcctcgtcttgcctgtcct

SEQ ID NO: 3380185 - DNA, 25 bp, Homo sapien
tctctgacttgacgagggccactag

SEQ ID NO: 3380186 - DNA, 25 bp, Homo sapien
taaaaagcaacagttccctggacgc

SEQ ID NO: 3380187 - DNA, 25 bp, Homo sapien
tacagtacaggagcggttcatacac

SEQ ID NO: 3380188 - DNA, 25 bp, Homo sapien
gaattcctgatactgctctgcacag

SEQ ID NO: 3380189 - DNA, 25 bp, Homo sapien
taaaagttcagcgactcagactgtg

SEQ ID NO: 3380190 - DNA, 25 bp, Homo sapien
ctcagtatcaggagggaaaatccct

SEQ ID NO: 3380191 - DNA, 25 bp, Homo sapien
gttaggaatacacagtcccagccag

SEQ ID NO: 3380192 - DNA, 25 bp, Homo sapien
tggaaagacccagttagcagagcta

SEQ ID NO: 3380193 - DNA, 25 bp, Homo sapien
taatggcggcttgaatttctcgaac

SEQ ID NO: 3380194 - DNA, 25 bp, Homo sapien
aatggcggcttgaatttctcgaact

SEQ ID NO: 3380195 - DNA, 25 bp, Homo sapien
cttaatggcggcttgaatttctcga

SEQ ID NO: 3380196 - DNA, 25 bp, Homo sapien
tggcggcttgaatttctcgaacttt

SEQ ID NO: 3380197 - DNA, 25 bp, Homo sapien
gatgaaaagccccctacaagtgggc

SEQ ID NO: 3380198 - DNA, 25 bp, Homo sapien
tggagatgaaaagccccctacaagt

SEQ ID NO: 3380199 - DNA, 25 bp, Homo sapien
tgaaaagccccctacaagtgggcaa

SEQ ID NO: 3380200 - DNA, 25 bp, Homo sapien
catggagatgaaaagccccctacaa

SEQ ID NO: 3380201 - DNA, 25 bp, Homo sapien
aaatcacgagatttccttctggcaa

SEQ ID NO: 3380202 - DNA, 25 bp, Homo sapien
ctttagcttggaatgaaaatcacga

SEQ ID NO: 3380203 - DNA, 25 bp, Homo sapien
cgagatttccttctggcaagaacct

SEQ ID NO: 3380204 - DNA, 25 bp, Homo sapien
tggaatgaaaatcacgagatttcct

SEQ ID NO: 3380205 - DNA, 25 bp, Homo sapien
gtgagatgcatagcaaccacaagcc

SEQ ID NO: 3380206 - DNA, 25 bp, Homo sapien
agtcaccatggaaaacaggaagtga

SEQ ID NO: 3380207 - DNA, 25 bp, Homo sapien
tgcatagcaaccacaagccaaaaag

SEQ ID NO: 3380208 - DNA, 25 bp, Homo sapien
acaggaagtgagatgcatagcaacc

SEQ ID NO: 3380209 - DNA, 25 bp, Homo sapien
tctgtgctgaaaagttatcaagacc

SEQ ID NO: 3380210 - DNA, 25 bp, Homo sapien
ttaatgtgaggctagtacagaaaca

SEQ ID NO: 3380211 - DNA, 25 bp, Homo sapien
gaaactaggttacgagaatcccagc

SEQ ID NO: 3380212 - DNA, 25 bp, Homo sapien
caaagaaatgtaaacagctctcaca

SEQ ID NO: 3380213 - DNA, 25 bp, Homo sapien
ctacatcttcccaggcaaagcacag

SEQ ID NO: 3380214 - DNA, 25 bp, Homo sapien
ttcccaggcaaagcacagtgtctct

SEQ ID NO: 3380215 - DNA, 25 bp, Homo sapien
catcttcccaggcaaagcacagtgt

SEQ ID NO: 3380216 - DNA, 25 bp, Homo sapien
tcttcccaggcaaagcacagtgtct

SEQ ID NO: 3380217 - DNA, 25 bp, Homo sapien
tccacagagggacagacaaatgcaa

SEQ ID NO: 3380218 - DNA, 25 bp, Homo sapien
tccattgcgggtaagccacttttcc

SEQ ID NO: 3380219 - DNA, 25 bp, Homo sapien
tctggtttcggtcttcacatgagga

SEQ ID NO: 3380220 - DNA, 25 bp, Homo sapien
tttgtctaccccttcgacgtctgag

SEQ ID NO: 3380221 - DNA, 25 bp, Homo sapien
gctctctgtaaaggctggaagggac

SEQ ID NO: 3380222 - DNA, 25 bp, Homo sapien
gggacagcataagaggtagacacct

SEQ ID NO: 3380223 - DNA, 25 bp, Homo sapien
attcaatggaatagcctaagaggcc

SEQ ID NO: 3380224 - DNA, 25 bp, Homo sapien
tccctggaaagtaaagagaagctta

SEQ ID NO: 3380225 - DNA, 25 bp, Homo sapien
tgtggctaccgtgagcttctgaaaa

SEQ ID NO: 3380226 - DNA, 25 bp, Homo sapien
aacacactcgagaagtgaaccagag

SEQ ID NO: 3380227 - DNA, 25 bp, Homo sapien
gaaaacagcaagaaaggactgcctt

SEQ ID NO: 3380228 - DNA, 25 bp, Homo sapien
cttggctgtggctaccgtgagcttc

SEQ ID NO: 3380229 - DNA, 25 bp, Homo sapien
cacggagcaacacagagtgaagtga

SEQ ID NO: 3380230 - DNA, 25 bp, Homo sapien
tcctgcactgctaacagccaagtcc

SEQ ID NO: 3380231 - DNA, 25 bp, Homo sapien
gctcagggggcttcacggagcaaca

SEQ ID NO: 3380232 - DNA, 25 bp, Homo sapien
gtgaagtgaagtacgtctaccttcc

SEQ ID NO: 3380233 - DNA, 25 bp, Homo sapien
gaccagtactctttgggaaggcaga

SEQ ID NO: 3380234 - DNA, 25 bp, Homo sapien
gaaaatgaacctcatcctggaccag

SEQ ID NO: 3380235 - DNA, 25 bp, Homo sapien
gcttgtggcaccagatatccctgga

SEQ ID NO: 3380236 - DNA, 25 bp, Homo sapien
gctggattctgctcgggacctgaaa

SEQ ID NO: 3380237 - DNA, 25 bp, Homo sapien
caccaactccattccccatcaacat

SEQ ID NO: 3380238 - DNA, 25 bp, Homo sapien
acaccaactccattccccatcaaca

SEQ ID NO: 3380239 - DNA, 25 bp, Homo sapien
catcccctcagagggtagcccatga

SEQ ID NO: 3380240 - DNA, 25 bp, Homo sapien
gagggtagcccatgaacagaaacca

SEQ ID NO: 3380241 - DNA, 25 bp, Homo sapien
cctcagagggtagcccatgaacaga

SEQ ID NO: 3380242 - DNA, 25 bp, Homo sapien
tgctcctcgcttgtccatcccctca

SEQ ID NO: 3380243 - DNA, 25 bp, Homo sapien
gcaatgattgagaagggcacccaac

SEQ ID NO: 3380244 - DNA, 25 bp, Homo sapien
tccagggaacgtcaaagggagcttc

SEQ ID NO: 3380245 - DNA, 25 bp, Homo sapien
tagagggtctatattccaggcccaa

SEQ ID NO: 3380246 - DNA, 25 bp, Homo sapien
taaaggctaccggtgccaatagagg

SEQ ID NO: 3380247 - DNA, 25 bp, Homo sapien
gctcgaggagccctatctgtgtgtc

SEQ ID NO: 3380248 - DNA, 25 bp, Homo sapien
gcttttaagcaaacggatgggagga

SEQ ID NO: 3380249 - DNA, 25 bp, Homo sapien
gggtaggaccgtccacagagctcga

SEQ ID NO: 3380250 - DNA, 25 bp, Homo sapien
tcgtactgaagccaggagcctaggg

SEQ ID NO: 3380251 - DNA, 25 bp, Homo sapien
ctaccaggcaggttacacaggcaca

SEQ ID NO: 3380252 - DNA, 25 bp, Homo sapien
caggcaggttacacaggcacagcca

SEQ ID NO: 3380253 - DNA, 25 bp, Homo sapien
gacacaccaacttaatacataacgc

SEQ ID NO: 3380254 - DNA, 25 bp, Homo sapien
tgacacaccaacttaatacataacg

SEQ ID NO: 3380255 - DNA, 25 bp, Homo sapien
cacaccaacttaatacataacgcat

SEQ ID NO: 3380256 - DNA, 25 bp, Homo sapien
gtgacacaccaacttaatacataac

SEQ ID NO: 3380257 - DNA, 25 bp, Homo sapien
cagcttgttatgaatggcagtggcc

SEQ ID NO: 3380258 - DNA, 25 bp, Homo sapien
tatgaatggcagtggccgagacgat

SEQ ID NO: 3380259 - DNA, 25 bp, Homo sapien
cagtggccgagacgatctgggctga

SEQ ID NO: 3380260 - DNA, 25 bp, Homo sapien
aaggtcgggcgtggaatcccaggca

SEQ ID NO: 3380261 - DNA, 25 bp, Homo sapien
tggctgccctgtttgaatcattccc

SEQ ID NO: 3380262 - DNA, 25 bp, Homo sapien
gccctgtttgaatcattcccggcca

SEQ ID NO: 3380263 - DNA, 25 bp, Homo sapien
ctgtttgaatcattcccggccagaa

SEQ ID NO: 3380264 - DNA, 25 bp, Homo sapien
tcttgtgaggatcctggctgccctg

SEQ ID NO: 3380265 - DNA, 25 bp, Homo sapien
caggtggtagcacaccccaggcaga

SEQ ID NO: 3380266 - DNA, 25 bp, Homo sapien
tcccagtgggaggtccttcaccgct

SEQ ID NO: 3380267 - DNA, 25 bp, Homo sapien
ggaggtccttcaccgctgtggtccc

SEQ ID NO: 3380268 - DNA, 25 bp, Homo sapien
cagtgggaggtccttcaccgctgtg

SEQ ID NO: 3380269 - DNA, 25 bp, Homo sapien
gctgtgaccgctggctggatggggt

SEQ ID NO: 3380270 - DNA, 25 bp, Homo sapien
ggcctgctgcacaaaaggcttgacg

SEQ ID NO: 3380271 - DNA, 25 bp, Homo sapien
gggtaggcctgctgcacaaaaggct

SEQ ID NO: 3380272 - DNA, 25 bp, Homo sapien
taggcctgctgcacaaaaggcttga

SEQ ID NO: 3380273 - DNA, 25 bp, Homo sapien
cgaagcttggttgtgccaatggagc

SEQ ID NO: 3380274 - DNA, 25 bp, Homo sapien
tcgctgctgctcgagaaaagctgaa

SEQ ID NO: 3380275 - DNA, 25 bp, Homo sapien
ccaatggagcgaccttgccaggcag

SEQ ID NO: 3380276 - DNA, 25 bp, Homo sapien
gaaaattccaccaggcgaagcttgg

SEQ ID NO: 3380277 - DNA, 25 bp, Homo sapien
tgccccacgggaggccttccctcaa

SEQ ID NO: 3380278 - DNA, 25 bp, Homo sapien
gggttctccactctggtgatgactg

SEQ ID NO: 3380279 - DNA, 25 bp, Homo sapien
actctggtgatgactggtcaagccc

SEQ ID NO: 3380280 - DNA, 25 bp, Homo sapien
caccagctcccaaagttcatgattt

SEQ ID NO: 3380281 - DNA, 25 bp, Homo sapien
aagcacaaattagatcacatcctct

SEQ ID NO: 3380282 - DNA, 25 bp, Homo sapien
tgaagcacaaattagatcacatcct

SEQ ID NO: 3380283 - DNA, 25 bp, Homo sapien
gaagcacaaattagatcacatcctc

SEQ ID NO: 3380284 - DNA, 25 bp, Homo sapien
ctgaagcacaaattagatcacatcc

SEQ ID NO: 3380285 - DNA, 25 bp, Homo sapien
ctggtttggtcctcatcagccacca

SEQ ID NO: 3380286 - DNA, 25 bp, Homo sapien
tcccctctgccatttcctcagccat

SEQ ID NO: 3380287 - DNA, 25 bp, Homo sapien
acagtatagtttcctccagcccctg

SEQ ID NO: 3380288 - DNA, 25 bp, Homo sapien
ccaccagctggccaacagtatagtt

SEQ ID NO: 3380289 - DNA, 25 bp, Homo sapien
tcagcagccactataaaactaggaa

SEQ ID NO: 3380290 - DNA, 25 bp, Homo sapien
accccaagatggagcaactgcctca

SEQ ID NO: 3380291 - DNA, 25 bp, Homo sapien
gaaccagatttgttcaaacagccat

SEQ ID NO: 3380292 - DNA, 25 bp, Homo sapien
caggaaccagatttgttcaaacagc

SEQ ID NO: 3380293 - DNA, 25 bp, Homo sapien
ttccccacagaagtgcagctgaaag

SEQ ID NO: 3380294 - DNA, 25 bp, Homo sapien
agctgaaaggcccaccgactgagtg

SEQ ID NO: 3380295 - DNA, 25 bp, Homo sapien
caccgactgagtgagcaaccaggaa

SEQ ID NO: 3380296 - DNA, 25 bp, Homo sapien
tcttccccacagaagtgcagctgaa

SEQ ID NO: 3380297 - DNA, 25 bp, Homo sapien
tccgggatctcacaccgagatgcat

SEQ ID NO: 3380298 - DNA, 25 bp, Homo sapien
cacttggccctgatatgccacttca

SEQ ID NO: 3380299 - DNA, 25 bp, Homo sapien
aagtgaatgcctccttccgggatct

SEQ ID NO: 3380300 - DNA, 25 bp, Homo sapien
catcattggaaacaaggagcaagtg

SEQ ID NO: 3380301 - DNA, 25 bp, Homo sapien
tctaaggcatgcaaagtctgttccc

SEQ ID NO: 3380302 - DNA, 25 bp, Homo sapien
tgttcccaaaagtggagtggggaca

SEQ ID NO: 3380303 - DNA, 25 bp, Homo sapien
tcggtgctagggtagtggcagtgtg

SEQ ID NO: 3380304 - DNA, 25 bp, Homo sapien
tttccctcaggcacacagtaccctc

SEQ ID NO: 3380305 - DNA, 25 bp, Homo sapien
aaggcaccgcttctgtccattctag

SEQ ID NO: 3380306 - DNA, 25 bp, Homo sapien
ccagaaggcaccgcttctgtccatt

SEQ ID NO: 3380307 - DNA, 25 bp, Homo sapien
agaaggcaccgcttctgtccattct

SEQ ID NO: 3380308 - DNA, 25 bp, Homo sapien
gaaggcaccgcttctgtccattcta

SEQ ID NO: 3380309 - DNA, 25 bp, Homo sapien
tctttgatcaacctggaactcatcc

SEQ ID NO: 3380310 - DNA, 25 bp, Homo sapien
tttgatcaacctggaactcatccat

SEQ ID NO: 3380311 - DNA, 25 bp, Homo sapien
aactctttgatcaacctggaactca

SEQ ID NO: 3380312 - DNA, 25 bp, Homo sapien
ctctttgatcaacctggaactcatc

SEQ ID NO: 3380313 - DNA, 25 bp, Homo sapien
ccagaattttacgaggaagaaggca

SEQ ID NO: 3380314 - DNA, 25 bp, Homo sapien
tgggtcactgtaagaatggttggca

SEQ ID NO: 3380315 - DNA, 25 bp, Homo sapien
cataaatctgacgaatgtccactga

SEQ ID NO: 3380316 - DNA, 25 bp, Homo sapien
cactgattcaagcaatgggtcactg

SEQ ID NO: 3380317 - DNA, 25 bp, Homo sapien
gcccaggttggacgtagcagatatt

SEQ ID NO: 3380318 - DNA, 25 bp, Homo sapien
ggtaacacatagtattcttccatag

SEQ ID NO: 3380319 - DNA, 25 bp, Homo sapien
aaacccctcacgtggtctagcctga

SEQ ID NO: 3380320 - DNA, 25 bp, Homo sapien
tcgcctccaagtgtcaactggcaga

SEQ ID NO: 3380321 - DNA, 25 bp, Homo sapien
gccagtagaatcttccaccctaaaa

SEQ ID NO: 3380322 - DNA, 25 bp, Homo sapien
ccaggcagggcacgcagtgcggcat

SEQ ID NO: 3380323 - DNA, 25 bp, Homo sapien
ttcatcctctccgagcaatgatcaa

SEQ ID NO: 3380324 - DNA, 25 bp, Homo sapien
atcctctccgagcaatgatcaaaga

SEQ ID NO: 3380325 - DNA, 25 bp, Homo sapien
cacatggtaaggctcggccaggcag

SEQ ID NO: 3380326 - DNA, 25 bp, Homo sapien
tgaagtccttggaggcgggtgctag

SEQ ID NO: 3380327 - DNA, 25 bp, Homo sapien
cttggaggcgggtgctaggccaggg

SEQ ID NO: 3380328 - DNA, 25 bp, Homo sapien
cagagtggatcatccctgcaaaacc

SEQ ID NO: 3380329 - DNA, 25 bp, Homo sapien
aaacctccgtcctctggagacctgg

SEQ ID NO: 3380330 - DNA, 25 bp, Homo sapien
aagtgtcctttcagagatattcagc

SEQ ID NO: 3380331 - DNA, 25 bp, Homo sapien
aaaaagagtctccatgtgctatgaa

SEQ ID NO: 3380332 - DNA, 25 bp, Homo sapien
gctgcacactattctatggcacaga

SEQ ID NO: 3380333 - DNA, 25 bp, Homo sapien
tatgatgcttcccaatgatgctgca

SEQ ID NO: 3380334 - DNA, 25 bp, Homo sapien
ttcaaaggtttaacatttggctcca

SEQ ID NO: 3380335 - DNA, 25 bp, Homo sapien
tgacaggcactaaccactaagacct

SEQ ID NO: 3380336 - DNA, 25 bp, Homo sapien
gaaaatgtccaactccttaggcaaa

SEQ ID NO: 3380337 - DNA, 25 bp, Homo sapien
tggaatcactggtgcgaggctcact

SEQ ID NO: 3380338 - DNA, 25 bp, Homo sapien
gaggcaccgtattgctccagatttg

SEQ ID NO: 3380339 - DNA, 25 bp, Homo sapien
tcccaaaggagcaaactttggtgga

SEQ ID NO: 3380340 - DNA, 25 bp, Homo sapien
tgcttcccaaaggagcaaactttgg

SEQ ID NO: 3380341 - DNA, 25 bp, Homo sapien
tgactggttacaccataaaaagccc

SEQ ID NO: 3380342 - DNA, 25 bp, Homo sapien
ttttcagaactctcgtactgactgg

SEQ ID NO: 3380343 - DNA, 25 bp, Homo sapien
tatcagtcaagagcaacctttccct

SEQ ID NO: 3380344 - DNA, 25 bp, Homo sapien
tcagtcaagagcaacctttccctgc

SEQ ID NO: 3380345 - DNA, 25 bp, Homo sapien
ttgcatagagctttgggtgtatcgt

SEQ ID NO: 3380346 - DNA, 25 bp, Homo sapien
tccctgaatttgcatagagctttgg

SEQ ID NO: 3380347 - DNA, 25 bp, Homo sapien
cattctcaaaccttgcatactccgt

SEQ ID NO: 3380348 - DNA, 25 bp, Homo sapien
gagcggtttattcggtatacaaatc

SEQ ID NO: 3380349 - DNA, 25 bp, Homo sapien
tatattcacacattggggagcggtt

SEQ ID NO: 3380350 - DNA, 25 bp, Homo sapien
tatttctctggtaagtgtttgagct

SEQ ID NO: 3380351 - DNA, 25 bp, Homo sapien
gcccacagaggaaagagacaaaacc

SEQ ID NO: 3380352 - DNA, 25 bp, Homo sapien
gcatctgcccacagaggaaagagac

SEQ ID NO: 3380353 - DNA, 25 bp, Homo sapien
cagcatctgcccacagaggaaagag

SEQ ID NO: 3380354 - DNA, 25 bp, Homo sapien
catctgcccacagaggaaagagaca

SEQ ID NO: 3380355 - DNA, 25 bp, Homo sapien
ttccagttctgcgaaccttagaaac

SEQ ID NO: 3380356 - DNA, 25 bp, Homo sapien
ttctgcgaaccttagaaaccccagc

SEQ ID NO: 3380357 - DNA, 25 bp, Homo sapien
ttattacccaactgaattccagttc

SEQ ID NO: 3380358 - DNA, 25 bp, Homo sapien
ttctacagaatcaagcccaagtttt

SEQ ID NO: 3380359 - DNA, 25 bp, Homo sapien
tgtgctccgtgttcactatttgaaa

SEQ ID NO: 3380360 - DNA, 25 bp, Homo sapien
cttgtgtatccctgtttgttaccac

SEQ ID NO: 3380361 - DNA, 25 bp, Homo sapien
tgcagagtagagtttcttgtgtatc

SEQ ID NO: 3380362 - DNA, 25 bp, Homo sapien
agtcctttacaagcctgtaaatatg

SEQ ID NO: 3380363 - DNA, 25 bp, Homo sapien
tagggaccacaagatgctgactgat

SEQ ID NO: 3380364 - DNA, 25 bp, Homo sapien
tcagatagcaatggtcggacaggac

SEQ ID NO: 3380365 - DNA, 25 bp, Homo sapien
cacaagatggccgtgaagcaagcct

SEQ ID NO: 3380366 - DNA, 25 bp, Homo sapien
taaaggctgtaaatgtcccatggca

SEQ ID NO: 3380367 - DNA, 25 bp, Homo sapien
ctttgagggctggaacattctttga

SEQ ID NO: 3380368 - DNA, 25 bp, Homo sapien
gcacattcatacacaatactcggag

SEQ ID NO: 3380369 - DNA, 25 bp, Homo sapien
ttctacaaggtttggataaaagcca

SEQ ID NO: 3380370 - DNA, 25 bp, Homo sapien
aaatgccaaattgtgaatggtgctc

SEQ ID NO: 3380371 - DNA, 25 bp, Homo sapien
tgcatgacttcagtgaaactaccct

SEQ ID NO: 3380372 - DNA, 25 bp, Homo sapien
taaagacgccaggtagagacacaca

SEQ ID NO: 3380373 - DNA, 25 bp, Homo sapien
tataagcaacggctttgagagagaa

SEQ ID NO: 3380374 - DNA, 25 bp, Homo sapien
cagagaggatattcttaaagacgcc

SEQ ID NO: 3380375 - DNA, 25 bp, Homo sapien
catcatggaaggcagacaagagtcc

SEQ ID NO: 3380376 - DNA, 25 bp, Homo sapien
cacacgtggcgaaaaccgatttaca

SEQ ID NO: 3380377 - DNA, 25 bp, Homo sapien
cagttacccgaaggcaggttccaca

SEQ ID NO: 3380378 - DNA, 25 bp, Homo sapien
caagaatactgtactgccaagaggt

SEQ ID NO: 3380379 - DNA, 25 bp, Homo sapien
tcaaatacatggagctttcctaaag

SEQ ID NO: 3380380 - DNA, 25 bp, Homo sapien
ccttatggcaattgtattaagtgca

SEQ ID NO: 3380381 - DNA, 25 bp, Homo sapien
ctgctctagctgcattccacatatt

SEQ ID NO: 3380382 - DNA, 25 bp, Homo sapien
ggtctgcctatatgctctctaaata

SEQ ID NO: 3380383 - DNA, 25 bp, Homo sapien
agtggacatgagcacggaggatcca

SEQ ID NO: 3380384 - DNA, 25 bp, Homo sapien
gaatgtggattccaccccacgccat

SEQ ID NO: 3380385 - DNA, 25 bp, Homo sapien
atggtgatgccctcgaagggctgcc

SEQ ID NO: 3380386 - DNA, 25 bp, Homo sapien
cagggcactcccttgatggtgatgc

SEQ ID NO: 3380387 - DNA, 25 bp, Homo sapien
caccaaggactctcaggtttggctc

SEQ ID NO: 3380388 - DNA, 25 bp, Homo sapien
aaaagagtactcatggcataggaat

SEQ ID NO: 3380389 - DNA, 25 bp, Homo sapien
caaggactctcaggtttggctcttc

SEQ ID NO: 3380390 - DNA, 25 bp, Homo sapien
ggacaggtccaagcttaaaagagta

SEQ ID NO: 3380391 - DNA, 25 bp, Homo sapien
tttctgtgccaaccagcaagggccg

SEQ ID NO: 3380392 - DNA, 25 bp, Homo sapien
tgcaggtgttccgtttctgtgccaa

SEQ ID NO: 3380393 - DNA, 25 bp, Homo sapien
tctgagctggaacgtgagatccagt

SEQ ID NO: 3380394 - DNA, 25 bp, Homo sapien
gatccagtgcaagattgcaggagag

SEQ ID NO: 3380395 - DNA, 25 bp, Homo sapien
gtggtcgcggttgcggctgcgctct

SEQ ID NO: 3380396 - DNA, 25 bp, Homo sapien
cctcgcagccttgccgcgccccgtg

SEQ ID NO: 3380397 - DNA, 25 bp, Homo sapien
gctggaaagcgactgcggctgtggt

SEQ ID NO: 3380398 - DNA, 25 bp, Homo sapien
gtccgcccctcgctcgcattgcagg

SEQ ID NO: 3380399 - DNA, 25 bp, Homo sapien
gggatgggagaggagcccgtgcccc

SEQ ID NO: 3380400 - DNA, 25 bp, Homo sapien
gcccagtagctctgggatgggagag

SEQ ID NO: 3380401 - DNA, 25 bp, Homo sapien
ctggggcggcgaggacagcaagggc

SEQ ID NO: 3380402 - DNA, 25 bp, Homo sapien
gacagcaagggcagcccagtagctc

SEQ ID NO: 3380403 - DNA, 25 bp, Homo sapien
ggcgcaaccagggcgcaggtggcag

SEQ ID NO: 3380404 - DNA, 25 bp, Homo sapien
tctccacgatgcaatagcactgcgg

SEQ ID NO: 3380405 - DNA, 25 bp, Homo sapien
tagcacgaagcgcacattctcttgc

SEQ ID NO: 3380406 - DNA, 25 bp, Homo sapien
ctcgcacaacgtcggagcaagtggt

SEQ ID NO: 3380407 - DNA, 25 bp, Homo sapien
tcttcctggcagatccacaccgata

SEQ ID NO: 3380408 - DNA, 25 bp, Homo sapien
aggggcgctctcggctcagcactac

SEQ ID NO: 3380409 - DNA, 25 bp, Homo sapien
caggggcgctctcggctcagcacta

SEQ ID NO: 3380410 - DNA, 25 bp, Homo sapien
acaggggcgctctcggctcagcact

SEQ ID NO: 3380411 - DNA, 25 bp, Homo sapien
ggacaggggcgctctcggctcagca

SEQ ID NO: 3380412 - DNA, 25 bp, Homo sapien
aacaggacgacggtgtctgctgctg

SEQ ID NO: 3380413 - DNA, 25 bp, Homo sapien
tggccagtttgcgaaaggccttgcg

SEQ ID NO: 3380414 - DNA, 25 bp, Homo sapien
tggtcctgggaaagcaccagatgca

SEQ ID NO: 3380415 - DNA, 25 bp, Homo sapien
acgacgaagtggacgaacaggacga

SEQ ID NO: 3380416 - DNA, 25 bp, Homo sapien
cttggcctcgtagtgatcgatctcg

SEQ ID NO: 3380417 - DNA, 25 bp, Homo sapien
tcgtagtgatcgatctcgcggtcca

SEQ ID NO: 3380418 - DNA, 25 bp, Homo sapien
gcctcgtagtgatcgatctcgcggt

SEQ ID NO: 3380419 - DNA, 25 bp, Homo sapien
tagtgatcgatctcgcggtccagct

SEQ ID NO: 3380420 - DNA, 25 bp, Homo sapien
taagtgtcctgcacgtagttgaccc

SEQ ID NO: 3380421 - DNA, 25 bp, Homo sapien
tcctgcacgtagttgaccccgtgac

SEQ ID NO: 3380422 - DNA, 25 bp, Homo sapien
caagtaagtgtcctgcacgtagttg

SEQ ID NO: 3380423 - DNA, 25 bp, Homo sapien
agtgtcctgcacgtagttgaccccg

SEQ ID NO: 3380424 - DNA, 25 bp, Homo sapien
tctggacccgtcgagctcgatgcct

SEQ ID NO: 3380425 - DNA, 25 bp, Homo sapien
tctcccggtctggacccgtcgagct

SEQ ID NO: 3380426 - DNA, 25 bp, Homo sapien
cggtctggacccgtcgagctcgatg

SEQ ID NO: 3380427 - DNA, 25 bp, Homo sapien
tctggctcctctcccggtctggacc

SEQ ID NO: 3380428 - DNA, 25 bp, Homo sapien
gcctcctccgcctccgccgccacct

SEQ ID NO: 3380429 - DNA, 25 bp, Homo sapien
cgcctcctccgcctccgccgccacc

SEQ ID NO: 3380430 - DNA, 25 bp, Homo sapien
ctgaagccgcagcaagtcgtcgcag

SEQ ID NO: 3380431 - DNA, 25 bp, Homo sapien
aagccgcagcaagtcgtcgcagcgc

SEQ ID NO: 3380432 - DNA, 25 bp, Homo sapien
cgcagcaagtcgtcgcagcgccggg

SEQ ID NO: 3380433 - DNA, 25 bp, Homo sapien
gcagcaagtcgtcgcagcgccgggc

SEQ ID NO: 3380434 - DNA, 25 bp, Homo sapien
tgaatctcggctgaaaggcgctcca

SEQ ID NO: 3380435 - DNA, 25 bp, Homo sapien
cctctggttgagttcctcctgaatc

SEQ ID NO: 3380436 - DNA, 25 bp, Homo sapien
gccgtcgcatccacctctggttgag

SEQ ID NO: 3380437 - DNA, 25 bp, Homo sapien
aactcctcctgctgaacccgttgct

SEQ ID NO: 3380438 - DNA, 25 bp, Homo sapien
taaaggctggtactgagctgcgtcc

SEQ ID NO: 3380439 - DNA, 25 bp, Homo sapien
tgtgcaaagtttgcagaaggccctg

SEQ ID NO: 3380440 - DNA, 25 bp, Homo sapien
aagtccgacttgacggcctctaggt

SEQ ID NO: 3380441 - DNA, 25 bp, Homo sapien
gcctctaggtccgtgttgagccgca

SEQ ID NO: 3380442 - DNA, 25 bp, Homo sapien
tatccgagtcttcgtcgttgccagg

SEQ ID NO: 3380443 - DNA, 25 bp, Homo sapien
acatgtcggcgcaggcttgaggccc

SEQ ID NO: 3380444 - DNA, 25 bp, Homo sapien
atagagctcagtcccgtatccgagt

SEQ ID NO: 3380445 - DNA, 25 bp, Homo sapien
aaggagtccgagtcttggctatgca

SEQ ID NO: 3380446 - DNA, 25 bp, Homo sapien
aatacagggttagacttcgatacag

SEQ ID NO: 3380447 - DNA, 25 bp, Homo sapien
catacagaagagtagcgaaatctcc

SEQ ID NO: 3380448 - DNA, 25 bp, Homo sapien
tgaaaatgggctcggaccacgtcaa

SEQ ID NO: 3380449 - DNA, 25 bp, Homo sapien
caactcacctgcctttgaagggaca

SEQ ID NO: 3380450 - DNA, 25 bp, Homo sapien
ggtatatccaccagatgggtagatc

SEQ ID NO: 3380451 - DNA, 25 bp, Homo sapien
gggagtctgtcaaacctgagtataa

SEQ ID NO: 3380452 - DNA, 25 bp, Homo sapien
tcaggttcatcgtaaggactatcgt

SEQ ID NO: 3380453 - DNA, 25 bp, Homo sapien
ggctgactggtaagggacctacatt

SEQ ID NO: 3380454 - DNA, 25 bp, Homo sapien
accatgcccatccctaaaaattgtt

SEQ ID NO: 3380455 - DNA, 25 bp, Homo sapien
aatggctcaaataggcattctttac

SEQ ID NO: 3380456 - DNA, 25 bp, Homo sapien
ctcaaaaacccaattctaaatggtg

SEQ ID NO: 3380457 - DNA, 25 bp, Homo sapien
ggtgaaatggctcaaataggcattc

SEQ ID NO: 3380458 - DNA, 25 bp, Homo sapien
tacagacactcaataatggcaaaca

SEQ ID NO: 3380459 - DNA, 25 bp, Homo sapien
tgataggtaaggctgaatacttcct

SEQ ID NO: 3380460 - DNA, 25 bp, Homo sapien
cataccaagaggcaagcatgactgg

SEQ ID NO: 3380461 - DNA, 25 bp, Homo sapien
tccacacgttctctagtctgacaat

SEQ ID NO: 3380462 - DNA, 25 bp, Homo sapien
cacagtatggatttggctgattaca

SEQ ID NO: 3380463 - DNA, 25 bp, Homo sapien
tcaacaagcttcaacaaatagcaac

SEQ ID NO: 3380464 - DNA, 25 bp, Homo sapien
tctcagccatcatattatttcacca

SEQ ID NO: 3380465 - DNA, 25 bp, Homo sapien
ttatttcaccatagtactttactat

SEQ ID NO: 3380466 - DNA, 25 bp, Homo sapien
tcaggtaaatctcagccatcatatt

SEQ ID NO: 3380467 - DNA, 25 bp, Homo sapien
acgacctgttccaggcaaaccctat

SEQ ID NO: 3380468 - DNA, 25 bp, Homo sapien
aaaccctatgcttcaaactctccat

SEQ ID NO: 3380469 - DNA, 25 bp, Homo sapien
cctgttccaggcaaaccctatgctt

SEQ ID NO: 3380470 - DNA, 25 bp, Homo sapien
tccaggcaaaccctatgcttcaaac

SEQ ID NO: 3380471 - DNA, 25 bp, Homo sapien
ccagtgttaggctcaggaaataaac

SEQ ID NO: 3380472 - DNA, 25 bp, Homo sapien
ttagtatccaacactggagctccag

SEQ ID NO: 3380473 - DNA, 25 bp, Homo sapien
gctgcgggtgtctctgattagtatc

SEQ ID NO: 3380474 - DNA, 25 bp, Homo sapien
tcattacataacacctgctcagcct

SEQ ID NO: 3380475 - DNA, 25 bp, Homo sapien
tcaatttgtaaaaatgcttctgttt

SEQ ID NO: 3380476 - DNA, 25 bp, Homo sapien
tttcaatttgtaaaaatgcttctgt

SEQ ID NO: 3380477 - DNA, 25 bp, Homo sapien
caatttgtaaaaatgcttctgtttt

SEQ ID NO: 3380478 - DNA, 25 bp, Homo sapien
ttttcaatttgtaaaaatgcttctg

SEQ ID NO: 3380479 - DNA, 25 bp, Homo sapien
tcaaataacccatcaggagacctcc

SEQ ID NO: 3380480 - DNA, 25 bp, Homo sapien
gctgctaactttggttcgtgtatca

SEQ ID NO: 3380481 - DNA, 25 bp, Homo sapien
tcaggagacctcctaatgtgtatgt

SEQ ID NO: 3380482 - DNA, 25 bp, Homo sapien
ccggtctcttgttttgctgctaact

SEQ ID NO: 3380483 - DNA, 25 bp, Homo sapien
ggctccccttgcttgttgacagagg

SEQ ID NO: 3380484 - DNA, 25 bp, Homo sapien
tgagttcatcaaaacacagttcccc

SEQ ID NO: 3380485 - DNA, 25 bp, Homo sapien
tctagagctggaacaaatccttttc

SEQ ID NO: 3380486 - DNA, 25 bp, Homo sapien
cagcaggagtcaggttgagttcatc

SEQ ID NO: 3380487 - DNA, 25 bp, Homo sapien
aatttcttggacagattgaccggac

SEQ ID NO: 3380488 - DNA, 25 bp, Homo sapien
tagaacacaccaggagcagatcagg

SEQ ID NO: 3380489 - DNA, 25 bp, Homo sapien
gcaagtattctacgctggctcccag

SEQ ID NO: 3380490 - DNA, 25 bp, Homo sapien
tcagaaagtgcttctaagggaaccc

SEQ ID NO: 3380491 - DNA, 25 bp, Homo sapien
ttctgtgggttatatcatttttgct

SEQ ID NO: 3380492 - DNA, 25 bp, Homo sapien
catgcttctttggagttctgctggc

SEQ ID NO: 3380493 - DNA, 25 bp, Homo sapien
tgtctctttgtgctccctattttct

SEQ ID NO: 3380494 - DNA, 25 bp, Homo sapien
ccacttcatgcttctttggagttct

SEQ ID NO: 3380495 - DNA, 25 bp, Homo sapien
gcatagagtagctgggcttcctcct

SEQ ID NO: 3380496 - DNA, 25 bp, Homo sapien
agggcatagagtagctgggcttcct

SEQ ID NO: 3380497 - DNA, 25 bp, Homo sapien
ggcatagagtagctgggcttcctcc

SEQ ID NO: 3380498 - DNA, 25 bp, Homo sapien
gggcatagagtagctgggcttcctc

SEQ ID NO: 3380499 - DNA, 25 bp, Homo sapien
tactcgaatccccagtgcacttaat

SEQ ID NO: 3380500 - DNA, 25 bp, Homo sapien
cccagtgcacttaatctcccatgga

SEQ ID NO: 3380501 - DNA, 25 bp, Homo sapien
gtgcacttaatctcccatggacttc

SEQ ID NO: 3380502 - DNA, 25 bp, Homo sapien
tggggttcagcctctactcgaatcc

SEQ ID NO: 3380503 - DNA, 25 bp, Homo sapien
ggaccccatctggagtaccactctt

SEQ ID NO: 3380504 - DNA, 25 bp, Homo sapien
tgcttccttcctaaaatcccagatc

SEQ ID NO: 3380505 - DNA, 25 bp, Homo sapien
tgcgctatgcatatcttccccagag

SEQ ID NO: 3380506 - DNA, 25 bp, Homo sapien
tgtggctcagtgcaattggacccca

SEQ ID NO: 3380507 - DNA, 25 bp, Homo sapien
gactctggtcattggctttggcttc

SEQ ID NO: 3380508 - DNA, 25 bp, Homo sapien
agactctggtcattggctttggctt

SEQ ID NO: 3380509 - DNA, 25 bp, Homo sapien
actctggtcattggctttggcttcc

SEQ ID NO: 3380510 - DNA, 25 bp, Homo sapien
catcctacacagaacttgaagcctc

SEQ ID NO: 3380511 - DNA, 25 bp, Homo sapien
tgggtttttgacaacaggtggaaga

SEQ ID NO: 3380512 - DNA, 25 bp, Homo sapien
ctacacagaacttgaagcctctggg

SEQ ID NO: 3380513 - DNA, 25 bp, Homo sapien
ctgggtttttgacaacaggtggaag

SEQ ID NO: 3380514 - DNA, 25 bp, Homo sapien
tgaagacgcatgatacaggaatggg

SEQ ID NO: 3380515 - DNA, 25 bp, Homo sapien
tgaggctatcaaccagtgaagacgc

SEQ ID NO: 3380516 - DNA, 25 bp, Homo sapien
ctggcacaaagatgacacgagagtc

SEQ ID NO: 3380517 - DNA, 25 bp, Homo sapien
gagtctcatgatagcctctggttga

SEQ ID NO: 3380518 - DNA, 25 bp, Homo sapien
gatttgctgaccttagcatacctga

SEQ ID NO: 3380519 - DNA, 25 bp, Homo sapien
agtcccgagaaccacgtgcttcaga

SEQ ID NO: 3380520 - DNA, 25 bp, Homo sapien
gcatacctgattgtccaaagtgtgt

SEQ ID NO: 3380521 - DNA, 25 bp, Homo sapien
gtgtgccagcccctagttcctgaat

SEQ ID NO: 3380522 - DNA, 25 bp, Homo sapien
tagcctgggacaacctttcctagaa

SEQ ID NO: 3380523 - DNA, 25 bp, Homo sapien
gaagagtagcctgggacaacctttc

SEQ ID NO: 3380524 - DNA, 25 bp, Homo sapien
cattgctgaagagtagcctgggaca

SEQ ID NO: 3380525 - DNA, 25 bp, Homo sapien
tgctgaagagtagcctgggacaacc

SEQ ID NO: 3380526 - DNA, 25 bp, Homo sapien
tcagtctggccccaacagaaagaag

SEQ ID NO: 3380527 - DNA, 25 bp, Homo sapien
catcagtctggccccaacagaaaga

SEQ ID NO: 3380528 - DNA, 25 bp, Homo sapien
agtctggccccaacagaaagaaggt

SEQ ID NO: 3380529 - DNA, 25 bp, Homo sapien
cagtctggccccaacagaaagaagg

SEQ ID NO: 3380530 - DNA, 25 bp, Homo sapien
cttagaggggtgtggccagacatac

SEQ ID NO: 3380531 - DNA, 25 bp, Homo sapien
gctgcccgtgtggtagtatccctta

SEQ ID NO: 3380532 - DNA, 25 bp, Homo sapien
ggtactcaatatggccacctggaaa

SEQ ID NO: 3380533 - DNA, 25 bp, Homo sapien
gacatactggttgatatggaaatgc

SEQ ID NO: 3380534 - DNA, 25 bp, Homo sapien
cagcctcttttgttatgacacgact

SEQ ID NO: 3380535 - DNA, 25 bp, Homo sapien
caacagtggtaatctgattggccta

SEQ ID NO: 3380536 - DNA, 25 bp, Homo sapien
tgacctgctgatgactggcttggat

SEQ ID NO: 3380537 - DNA, 25 bp, Homo sapien
cacatttcccggttcccaacagtgg

SEQ ID NO: 3380538 - DNA, 25 bp, Homo sapien
tcaagaataggtccaaaagctactt

SEQ ID NO: 3380539 - DNA, 25 bp, Homo sapien
ctcctggagattcaagaataggtcc

SEQ ID NO: 3380540 - DNA, 25 bp, Homo sapien
gtattccagacaccccggttactca

SEQ ID NO: 3380541 - DNA, 25 bp, Homo sapien
ctccacaagccctgtattccagaca

SEQ ID NO: 3380542 - DNA, 25 bp, Homo sapien
acactctggcttgctattggtccgg

SEQ ID NO: 3380543 - DNA, 25 bp, Homo sapien
ctgctgggcagttgatccaggttcc

SEQ ID NO: 3380544 - DNA, 25 bp, Homo sapien
gtgcctgttgcctggtgacacccag

SEQ ID NO: 3380545 - DNA, 25 bp, Homo sapien
catttgttgacaatagacacttccc

SEQ ID NO: 3380546 - DNA, 25 bp, Homo sapien
ccccacagaggaaagctcatgcagt

SEQ ID NO: 3380547 - DNA, 25 bp, Homo sapien
agctttcaattcaacccacaaaatg

SEQ ID NO: 3380548 - DNA, 25 bp, Homo sapien
tgttattccctaagacccccacaga

SEQ ID NO: 3380549 - DNA, 25 bp, Homo sapien
ggaaagctcatgcagtagaacaggt

SEQ ID NO: 3380550 - DNA, 25 bp, Homo sapien
ttccggctgaccacatgaaataggg

SEQ ID NO: 3380551 - DNA, 25 bp, Homo sapien
gttccggctgaccacatgaaatagg

SEQ ID NO: 3380552 - DNA, 25 bp, Homo sapien
ctctctgctgagttggacggtagcc

SEQ ID NO: 3380553 - DNA, 25 bp, Homo sapien
gagttggacggtagccactctccat

SEQ ID NO: 3380554 - DNA, 25 bp, Homo sapien
ggtgggagaaatgtggctaatccac

SEQ ID NO: 3380555 - DNA, 25 bp, Homo sapien
agtgcagataagcaggcttggctgc

SEQ ID NO: 3380556 - DNA, 25 bp, Homo sapien
ccttggcaggattgcagcccactct

SEQ ID NO: 3380557 - DNA, 25 bp, Homo sapien
tatgaggtggaagtgcagataagca

SEQ ID NO: 3380558 - DNA, 25 bp, Homo sapien
ggcaccttggcaacgccctggtttg

SEQ ID NO: 3380559 - DNA, 25 bp, Homo sapien
ttgttagagagccaaagccctccag

SEQ ID NO: 3380560 - DNA, 25 bp, Homo sapien
ggtttgaacacgattttaatagcaa

SEQ ID NO: 3380561 - DNA, 25 bp, Homo sapien
agcttcccaagacgtcggcaccttg

SEQ ID NO: 3380562 - DNA, 25 bp, Homo sapien
taagccggtactgcatttcccactg

SEQ ID NO: 3380563 - DNA, 25 bp, Homo sapien
acctcttcagcctaagccggtactg

SEQ ID NO: 3380564 - DNA, 25 bp, Homo sapien
cttagagtagcccttgcaccggtgg

SEQ ID NO: 3380565 - DNA, 25 bp, Homo sapien
gtagcccttgcaccggtggccactg

SEQ ID NO: 3380566 - DNA, 25 bp, Homo sapien
gatctgatatggtcatgggatcaca

SEQ ID NO: 3380567 - DNA, 25 bp, Homo sapien
ctgcttgatttcgaagatggatctg

SEQ ID NO: 3380568 - DNA, 25 bp, Homo sapien
gatggatctgatatggtcatgggat

SEQ ID NO: 3380569 - DNA, 25 bp, Homo sapien
tttcgaagatggatctgatatggtc

SEQ ID NO: 3380570 - DNA, 25 bp, Homo sapien
taagccaccagggaaactggtgagt

SEQ ID NO: 3380571 - DNA, 25 bp, Homo sapien
gccaccagggaaactggtgagtgcc

SEQ ID NO: 3380572 - DNA, 25 bp, Homo sapien
caccagggaaactggtgagtgccag

SEQ ID NO: 3380573 - DNA, 25 bp, Homo sapien
acataagccaccagggaaactggtg

SEQ ID NO: 3380574 - DNA, 25 bp, Homo sapien
tttacatcccttgcaaagatgttcc

SEQ ID NO: 3380575 - DNA, 25 bp, Homo sapien
cttttacatcccttgcaaagatgtt

SEQ ID NO: 3380576 - DNA, 25 bp, Homo sapien
tacatcccttgcaaagatgttccaa

SEQ ID NO: 3380577 - DNA, 25 bp, Homo sapien
atcccttgcaaagatgttccaatga

SEQ ID NO: 3380578 - DNA, 25 bp, Homo sapien
ctgcagccagtagacctgtgcacac

SEQ ID NO: 3380579 - DNA, 25 bp, Homo sapien
gcagccagtagacctgtgcacacac

SEQ ID NO: 3380580 - DNA, 25 bp, Homo sapien
agccagtagacctgtgcacacaccc

SEQ ID NO: 3380581 - DNA, 25 bp, Homo sapien
ccagtagacctgtgcacacaccctc

SEQ ID NO: 3380582 - DNA, 25 bp, Homo sapien
gctgttttcaatctgtctagctttg

SEQ ID NO: 3380583 - DNA, 25 bp, Homo sapien
gtcctaacgctgttttcaatctgtc

SEQ ID NO: 3380584 - DNA, 25 bp, Homo sapien
tatgtggtcagcagtcctaacgctg

SEQ ID NO: 3380585 - DNA, 25 bp, Homo sapien
tcagcagtcctaacgctgttttcaa

SEQ ID NO: 3380586 - DNA, 25 bp, Homo sapien
gccctgctggcggtacttttcttag

SEQ ID NO: 3380587 - DNA, 25 bp, Homo sapien
tttttggtcctgtagacaccgtgtg

SEQ ID NO: 3380588 - DNA, 25 bp, Homo sapien
gtgtgcatgtgtgggtattttctgt

SEQ ID NO: 3380589 - DNA, 25 bp, Homo sapien
ggttaatcaagccatgccttgtgga

SEQ ID NO: 3380590 - DNA, 25 bp, Homo sapien
tattacttgttacttcactgcattt

SEQ ID NO: 3380591 - DNA, 25 bp, Homo sapien
cttcccaaagcagtgtaagcggctt

SEQ ID NO: 3380592 - DNA, 25 bp, Homo sapien
caaagcagtgtaagcggcttcttct

SEQ ID NO: 3380593 - DNA, 25 bp, Homo sapien
tcccaaagcagtgtaagcggcttct

SEQ ID NO: 3380594 - DNA, 25 bp, Homo sapien
gctgatctctacttcttgtacttgg

SEQ ID NO: 3380595 - DNA, 25 bp, Homo sapien
agtccgagctgatctctacttcttg

SEQ ID NO: 3380596 - DNA, 25 bp, Homo sapien
ccgagctgatctctacttcttgtac

SEQ ID NO: 3380597 - DNA, 25 bp, Homo sapien
ttggagtccgagctgatctctactt

SEQ ID NO: 3380598 - DNA, 25 bp, Homo sapien
tcagagcacttggatccaactgtcc

SEQ ID NO: 3380599 - DNA, 25 bp, Homo sapien
tcactgggtgaatggtaacattttc

SEQ ID NO: 3380600 - DNA, 25 bp, Homo sapien
aaaatctccaggcaacatcgctctc

SEQ ID NO: 3380601 - DNA, 25 bp, Homo sapien
tcccgttgccgttctctggctttca

SEQ ID NO: 3380602 - DNA, 25 bp, Homo sapien
ggtgaggtcagtgttatctccagga

SEQ ID NO: 3380603 - DNA, 25 bp, Homo sapien
tagccttcgcataaggtcctcagtg

SEQ ID NO: 3380604 - DNA, 25 bp, Homo sapien
cagatcattacaacccagtgggaga

SEQ ID NO: 3380605 - DNA, 25 bp, Homo sapien
gtgtgtgatgcaaccctctccttag

SEQ ID NO: 3380606 - DNA, 25 bp, Homo sapien
tatagaaagtgaacgccaaaccatt

SEQ ID NO: 3380607 - DNA, 25 bp, Homo sapien
gaaagtgaacgccaaaccattctgg

SEQ ID NO: 3380608 - DNA, 25 bp, Homo sapien
ctgctatagaaagtgaacgccaaac

SEQ ID NO: 3380609 - DNA, 25 bp, Homo sapien
gaacgccaaaccattctggctacaa

SEQ ID NO: 3380610 - DNA, 25 bp, Homo sapien
gcttcaggctccactcatgatcttg

SEQ ID NO: 3380611 - DNA, 25 bp, Homo sapien
ggtgaggtttcccacgctgggtcaa

SEQ ID NO: 3380612 - DNA, 25 bp, Homo sapien
acagcaatctgtcaatccgtccatg

SEQ ID NO: 3380613 - DNA, 25 bp, Homo sapien
cgtccatgtcctgcccgggtgaggt

SEQ ID NO: 3380614 - DNA, 25 bp, Homo sapien
taatgcagagtgcaatattggcacc

SEQ ID NO: 3380615 - DNA, 25 bp, Homo sapien
gagtgcaatattggcaccttggaag

SEQ ID NO: 3380616 - DNA, 25 bp, Homo sapien
ccttggaaggttggccatgattcat

SEQ ID NO: 3380617 - DNA, 25 bp, Homo sapien
aatattggcaccttggaaggttggc

SEQ ID NO: 3380618 - DNA, 25 bp, Homo sapien
ttcttgtcttctcataaactctgtg

SEQ ID NO: 3380619 - DNA, 25 bp, Homo sapien
caaagcactgtcacacttgtaattt

SEQ ID NO: 3380620 - DNA, 25 bp, Homo sapien
tcttctcataaactctgtgaggcag

SEQ ID NO: 3380621 - DNA, 25 bp, Homo sapien
agcactgtcacacttgtaatttctt

SEQ ID NO: 3380622 - DNA, 25 bp, Homo sapien
gaactcccggctcttccagatgtta

SEQ ID NO: 3380623 - DNA, 25 bp, Homo sapien
catctcaggcactttgtagagggcc

SEQ ID NO: 3380624 - DNA, 25 bp, Homo sapien
cgacatgcgactcggttgctgagag

SEQ ID NO: 3380625 - DNA, 25 bp, Homo sapien
ctttttcgttatccatcatgtcagc

SEQ ID NO: 3380626 - DNA, 25 bp, Homo sapien
ccagtagccaggttttgaccactta

SEQ ID NO: 3380627 - DNA, 25 bp, Homo sapien
caaagagaatactcgagcgcggagc

SEQ ID NO: 3380628 - DNA, 25 bp, Homo sapien
tcatgacctccaagtgtcccactgg

SEQ ID NO: 3380629 - DNA, 25 bp, Homo sapien
gctgtcattcccgtagttccaaaga

SEQ ID NO: 3380630 - DNA, 25 bp, Homo sapien
ttcttctcccctccgggcattccga

SEQ ID NO: 3380631 - DNA, 25 bp, Homo sapien
cctccgggcattccgacgaaaagca

SEQ ID NO: 3380632 - DNA, 25 bp, Homo sapien
cattccgacgaaaagcagcagttcc

SEQ ID NO: 3380633 - DNA, 25 bp, Homo sapien
aagcagcagttcctgactccctctc

SEQ ID NO: 3380634 - DNA, 25 bp, Homo sapien
ggtcgcccgggatgtccctcttctc

SEQ ID NO: 3380635 - DNA, 25 bp, Homo sapien
tcatttggcgcacaggagcgcacgc

SEQ ID NO: 3380636 - DNA, 25 bp, Homo sapien
aggagaggaccaatccgcgcgcgct

SEQ ID NO: 3380637 - DNA, 25 bp, Homo sapien
tctgggtcccctgccggctggcgtt

SEQ ID NO: 3380638 - DNA, 25 bp, Homo sapien
tcggcagcccgctggccagttgtgt

SEQ ID NO: 3380639 - DNA, 25 bp, Homo sapien
ccgccagccaatccgaacgcccgaa

SEQ ID NO: 3380640 - DNA, 25 bp, Homo sapien
agccaatccgaacgcccgaagggag

SEQ ID NO: 3380641 - DNA, 25 bp, Homo sapien
cttcccgccagccaatccgaacgcc

SEQ ID NO: 3380642 - DNA, 25 bp, Homo sapien
tattttacggaagtattatattttc

SEQ ID NO: 3380643 - DNA, 25 bp, Homo sapien
gaaaatataatacttccgtaaaata

SEQ ID NO: 3380644 - DNA, 25 bp, Homo sapien
cggcggcggtgagtccggcgcgggt

SEQ ID NO: 3380645 - DNA, 25 bp, Homo sapien
taaatgtcgcaccactaacctactt

SEQ ID NO: 3380646 - DNA, 25 bp, Homo sapien
tccgtccctgacctactttctgcct

SEQ ID NO: 3380647 - DNA, 25 bp, Homo sapien
cgcccgcactcggatcccgcggcgg

SEQ ID NO: 3380648 - DNA, 25 bp, Homo sapien
tcacgggccctttaaggccggcagc

SEQ ID NO: 3380649 - DNA, 25 bp, Homo sapien
gcgggcggacttggactccccaagc

SEQ ID NO: 3380650 - DNA, 25 bp, Homo sapien
tctaggagtcctcttcggccgagtc

SEQ ID NO: 3380651 - DNA, 25 bp, Homo sapien
gcggtgggtactccagcgaacactt

SEQ ID NO: 3380652 - DNA, 25 bp, Homo sapien
ttgagggccgcccaggacctggacg

SEQ ID NO: 3380653 - DNA, 25 bp, Homo sapien
gcagacccacggggcatccttgagg

SEQ ID NO: 3380654 - DNA, 25 bp, Homo sapien
cacaggccccacgaaagttcgcagg

SEQ ID NO: 3380655 - DNA, 25 bp, Homo sapien
aggccccacgaaagttcgcaggctg

SEQ ID NO: 3380656 - DNA, 25 bp, Homo sapien
ctgggatgtcaacgcccggcaatag

SEQ ID NO: 3380657 - DNA, 25 bp, Homo sapien
acatctgtcaaacccggagctggag

SEQ ID NO: 3380658 - DNA, 25 bp, Homo sapien
agctctgggactccaaggccggccc

SEQ ID NO: 3380659 - DNA, 25 bp, Homo sapien
cggcaatagccgagcgggaaccttt

SEQ ID NO: 3380660 - DNA, 25 bp, Homo sapien
atgcgccccacaaggtcgacgttca

SEQ ID NO: 3380661 - DNA, 25 bp, Homo sapien
acaaggtcgacgttcacctctacct

SEQ ID NO: 3380662 - DNA, 25 bp, Homo sapien
tctcgcgacccctcggggaggctaa

SEQ ID NO: 3380663 - DNA, 25 bp, Homo sapien
gggaggctaacatgcgccccacaag

SEQ ID NO: 3380664 - DNA, 25 bp, Homo sapien
ggcgccggtgtccagcactcccctt

SEQ ID NO: 3380665 - DNA, 25 bp, Homo sapien
cgagaacttgacagcaggcgccggt

SEQ ID NO: 3380666 - DNA, 25 bp, Homo sapien
cggccggcgagaacttgacagcagg

SEQ ID NO: 3380667 - DNA, 25 bp, Homo sapien
aacttgacagcaggcgccggtgtcc

SEQ ID NO: 3380668 - DNA, 25 bp, Homo sapien
gtcaggaggtgcggggtgcgcggcg

SEQ ID NO: 3380669 - DNA, 25 bp, Homo sapien
ggggtcaggaggtgcggggtgcgcg

SEQ ID NO: 3380670 - DNA, 25 bp, Homo sapien
gggtcaggaggtgcggggtgcgcgg

SEQ ID NO: 3380671 - DNA, 25 bp, Homo sapien
gaggggtcaggaggtgcggggtgcg

SEQ ID NO: 3380672 - DNA, 25 bp, Homo sapien
gaaaagcttgttcacaaatacggaa

SEQ ID NO: 3380673 - DNA, 25 bp, Homo sapien
tatacgggtagtgtcaagaaaagct

SEQ ID NO: 3380674 - DNA, 25 bp, Homo sapien
taattcctcgctgaggagtagcggt

SEQ ID NO: 3380675 - DNA, 25 bp, Homo sapien
taaaacgacgatgctggaaatacgg

SEQ ID NO: 3380676 - DNA, 25 bp, Homo sapien
tgtcatagactaggaggcatcctcc

SEQ ID NO: 3380677 - DNA, 25 bp, Homo sapien
gaactcgatggccaactttttcaag

SEQ ID NO: 3380678 - DNA, 25 bp, Homo sapien
tcccagtccacaagaggagatgtca

SEQ ID NO: 3380679 - DNA, 25 bp, Homo sapien
caattgaagcttgtgttcctgacca

SEQ ID NO: 3380680 - DNA, 25 bp, Homo sapien
ggagagagctctaagtgacaaccac

SEQ ID NO: 3380681 - DNA, 25 bp, Homo sapien
gacaatttatgcttaggtcacagaa

SEQ ID NO: 3380682 - DNA, 25 bp, Homo sapien
gccaccgttgatggccaattaaata

SEQ ID NO: 3380683 - DNA, 25 bp, Homo sapien
gaaaagcaaatcagcctccagcaga

SEQ ID NO: 3380684 - DNA, 25 bp, Homo sapien
gacaaacttctccttaaagctctgt

SEQ ID NO: 3380685 - DNA, 25 bp, Homo sapien
ttcacggctctcaccaaaccctcct

SEQ ID NO: 3380686 - DNA, 25 bp, Homo sapien
tgggcctcactgacaaacttctcct

SEQ ID NO: 3380687 - DNA, 25 bp, Homo sapien
tcactgacaaacttctccttaaagc

SEQ ID NO: 3380688 - DNA, 25 bp, Homo sapien
gggactccaagtgccctctccatgt

SEQ ID NO: 3380689 - DNA, 25 bp, Homo sapien
cctagtcatgaatgggaattgccca

SEQ ID NO: 3380690 - DNA, 25 bp, Homo sapien
aggagggactccaagtgccctctcc

SEQ ID NO: 3380691 - DNA, 25 bp, Homo sapien
ccatgtctgaaagcctagtcatgaa

SEQ ID NO: 3380692 - DNA, 25 bp, Homo sapien
ttcccttaaactgatacctagatgt

SEQ ID NO: 3380693 - DNA, 25 bp, Homo sapien
ggattgtaaactgaggctgctggca

SEQ ID NO: 3380694 - DNA, 25 bp, Homo sapien
tgggaaacagtttccgctcccactc

SEQ ID NO: 3380695 - DNA, 25 bp, Homo sapien
tgacaggtcatgactgccaaggaag

SEQ ID NO: 3380696 - DNA, 25 bp, Homo sapien
attccacattggaaaagttaagctt

SEQ ID NO: 3380697 - DNA, 25 bp, Homo sapien
gtccaaacgtatacactctagccag

SEQ ID NO: 3380698 - DNA, 25 bp, Homo sapien
cttgggtccaaacgtatacactcta

SEQ ID NO: 3380699 - DNA, 25 bp, Homo sapien
aacgtatacactctagccagcacca

SEQ ID NO: 3380700 - DNA, 25 bp, Homo sapien
gcgtagattcctatgacatcggaac

SEQ ID NO: 3380701 - DNA, 25 bp, Homo sapien
acaggaagccctctagcgtagattc

SEQ ID NO: 3380702 - DNA, 25 bp, Homo sapien
tctagcgtagattcctatgacatcg

SEQ ID NO: 3380703 - DNA, 25 bp, Homo sapien
agccctctagcgtagattcctatga

SEQ ID NO: 3380704 - DNA, 25 bp, Homo sapien
agtacgtcttcctcatccgtaatca

SEQ ID NO: 3380705 - DNA, 25 bp, Homo sapien
ttgtctgtctgtagccaaatcctag

SEQ ID NO: 3380706 - DNA, 25 bp, Homo sapien
taatcactccccgtcgcttgttcct

SEQ ID NO: 3380707 - DNA, 25 bp, Homo sapien
tgtagtaggtggttcacatcctagc

SEQ ID NO: 3380708 - DNA, 25 bp, Homo sapien
agctttggatcccagctgctggatc

SEQ ID NO: 3380709 - DNA, 25 bp, Homo sapien
tcaataacccaagggcttcagcttt

SEQ ID NO: 3380710 - DNA, 25 bp, Homo sapien
caagggcttcagctttggatcccag

SEQ ID NO: 3380711 - DNA, 25 bp, Homo sapien
gctgctggatctgcccacagccctg

SEQ ID NO: 3380712 - DNA, 25 bp, Homo sapien
ggaaagcaactcacaaagagaaaga

SEQ ID NO: 3380713 - DNA, 25 bp, Homo sapien
aaagagaaagatggttcaatcccag

SEQ ID NO: 3380714 - DNA, 25 bp, Homo sapien
gaaagatggttcaatcccagcatct

SEQ ID NO: 3380715 - DNA, 25 bp, Homo sapien
atggttcaatcccagcatctcagcc

SEQ ID NO: 3380716 - DNA, 25 bp, Homo sapien
aaatagtgaccggaatgcgtgctat

SEQ ID NO: 3380717 - DNA, 25 bp, Homo sapien
ccaggtctctgagtcgatgcccgag

SEQ ID NO: 3380718 - DNA, 25 bp, Homo sapien
atctctggaaaatagtgaccggaat

SEQ ID NO: 3380719 - DNA, 25 bp, Homo sapien
cgatgcccgagggtccctcactttg

SEQ ID NO: 3380720 - DNA, 25 bp, Homo sapien
gtaactctcatagccctatttttgg

SEQ ID NO: 3380721 - DNA, 25 bp, Homo sapien
tttcagggaggtgaggtaactctca

SEQ ID NO: 3380722 - DNA, 25 bp, Homo sapien
ggtgaggtaactctcatagccctat

SEQ ID NO: 3380723 - DNA, 25 bp, Homo sapien
ggaggtgaggtaactctcatagccc

SEQ ID NO: 3380724 - DNA, 25 bp, Homo sapien
aattctggaaaacatctgcatcttg

SEQ ID NO: 3380725 - DNA, 25 bp, Homo sapien
tgcctgaagttgaagaaaattctgg

SEQ ID NO: 3380726 - DNA, 25 bp, Homo sapien
gaaaattctggaaaacatctgcatc

SEQ ID NO: 3380727 - DNA, 25 bp, Homo sapien
ttctggaaaacatctgcatcttgtt

SEQ ID NO: 3380728 - DNA, 25 bp, Homo sapien
tcaaagagggcacagggtgcaatcc

SEQ ID NO: 3380729 - DNA, 25 bp, Homo sapien
ctgcattcaaagagggcacagggtg

SEQ ID NO: 3380730 - DNA, 25 bp, Homo sapien
tgcattcaaagagggcacagggtgc

SEQ ID NO: 3380731 - DNA, 25 bp, Homo sapien
cattcaaagagggcacagggtgcaa

SEQ ID NO: 3380732 - DNA, 25 bp, Homo sapien
ggctggcgaggccaaagctctcttc

SEQ ID NO: 3380733 - DNA, 25 bp, Homo sapien
ctggaggaccacatgggatctgaag

SEQ ID NO: 3380734 - DNA, 25 bp, Homo sapien
cacatgggatctgaagccacaaaga

SEQ ID NO: 3380735 - DNA, 25 bp, Homo sapien
cactcaacatctgggggcaaggctg

SEQ ID NO: 3380736 - DNA, 25 bp, Homo sapien
cccaaattgaagtggcccaggatga

SEQ ID NO: 3380737 - DNA, 25 bp, Homo sapien
aaagtggcccgactccacctgaacg

SEQ ID NO: 3380738 - DNA, 25 bp, Homo sapien
gccacccaaattgaagtggcccagg

SEQ ID NO: 3380739 - DNA, 25 bp, Homo sapien
atggctgtggaaagtggcccgactc

SEQ ID NO: 3380740 - DNA, 25 bp, Homo sapien
ccactacatggtgcctgccctgatg

SEQ ID NO: 3380741 - DNA, 25 bp, Homo sapien
tggccccactctccactacatggtg

SEQ ID NO: 3380742 - DNA, 25 bp, Homo sapien
cctggccccactctccactacatgg

SEQ ID NO: 3380743 - DNA, 25 bp, Homo sapien
cactctccactacatggtgcctgcc

SEQ ID NO: 3380744 - DNA, 25 bp, Homo sapien
aagacccccagttcagaccaagtga

SEQ ID NO: 3380745 - DNA, 25 bp, Homo sapien
ggaagatgatcacatccaagacccc

SEQ ID NO: 3380746 - DNA, 25 bp, Homo sapien
tcagaccaagtgactctctcctttc

SEQ ID NO: 3380747 - DNA, 25 bp, Homo sapien
ctacaggaagatgatcacatccaag

SEQ ID NO: 3380748 - DNA, 25 bp, Homo sapien
ccccttgctgcctggccgtccttca

SEQ ID NO: 3380749 - DNA, 25 bp, Homo sapien
cttgctgcctggccgtccttcagct

SEQ ID NO: 3380750 - DNA, 25 bp, Homo sapien
caccccttgctgcctggccgtcctt

SEQ ID NO: 3380751 - DNA, 25 bp, Homo sapien
ccttcagctccttgttaaagctaag

SEQ ID NO: 3380752 - DNA, 25 bp, Homo sapien
ggtcacctcaaagcgattttcatgt

SEQ ID NO: 3380753 - DNA, 25 bp, Homo sapien
gaagtcacagttcttacaccccaga

SEQ ID NO: 3380754 - DNA, 25 bp, Homo sapien
tcttttcaggcggtcagcttcttcc

SEQ ID NO: 3380755 - DNA, 25 bp, Homo sapien
agttaggggcctctggacttggtca

SEQ ID NO: 3380756 - DNA, 25 bp, Homo sapien
gttgggttgaccagtgacctcctca

SEQ ID NO: 3380757 - DNA, 25 bp, Homo sapien
tcctcactgctagatccaatggcca

SEQ ID NO: 3380758 - DNA, 25 bp, Homo sapien
tacagatatttatggccgaccacct

SEQ ID NO: 3380759 - DNA, 25 bp, Homo sapien
cctcaactctaagggagggtcccat

SEQ ID NO: 3380760 - DNA, 25 bp, Homo sapien
actggagctgtcactacccctctct

SEQ ID NO: 3380761 - DNA, 25 bp, Homo sapien
ctgagctccgtggagtaggactgga

SEQ ID NO: 3380762 - DNA, 25 bp, Homo sapien
gactccaagcccagttgaagaggtt

SEQ ID NO: 3380763 - DNA, 25 bp, Homo sapien
ggagctgtcactacccctctctgga

SEQ ID NO: 3380764 - DNA, 25 bp, Homo sapien
aatatggtcccctctatcacggcca

SEQ ID NO: 3380765 - DNA, 25 bp, Homo sapien
ctgtcagcatcctttgcaaggaaag

SEQ ID NO: 3380766 - DNA, 25 bp, Homo sapien
cggccaggcagtcggcctgttttcc

SEQ ID NO: 3380767 - DNA, 25 bp, Homo sapien
ctatcacggccaggcagtcggcctg

SEQ ID NO: 3380768 - DNA, 25 bp, Homo sapien
tagcagaagattgcagctactcata

SEQ ID NO: 3380769 - DNA, 25 bp, Homo sapien
ggtcatcctttctgagcatacagct

SEQ ID NO: 3380770 - DNA, 25 bp, Homo sapien
ttgtactcctgttatgacttttgag

SEQ ID NO: 3380771 - DNA, 25 bp, Homo sapien
ggtccctagcagaagattgcagcta

SEQ ID NO: 3380772 - DNA, 25 bp, Homo sapien
aggtgtgtttatttcgatgagctct

SEQ ID NO: 3380773 - DNA, 25 bp, Homo sapien
tcgatgagctctcaaaagtggtgga

SEQ ID NO: 3380774 - DNA, 25 bp, Homo sapien
gtgtttatttcgatgagctctcaaa

SEQ ID NO: 3380775 - DNA, 25 bp, Homo sapien
tatttcgatgagctctcaaaagtgg

SEQ ID NO: 3380776 - DNA, 25 bp, Homo sapien
ccactggtaccaagagagctggaaa

SEQ ID NO: 3380777 - DNA, 25 bp, Homo sapien
agctgcctttccgtttgcggttgca

SEQ ID NO: 3380778 - DNA, 25 bp, Homo sapien
cgtttgcggttgcaatccacaccac

SEQ ID NO: 3380779 - DNA, 25 bp, Homo sapien
tcactgatggttgaagaaatgtcca

SEQ ID NO: 3380780 - DNA, 25 bp, Homo sapien
tctcctagtgggcatctgacctcca

SEQ ID NO: 3380781 - DNA, 25 bp, Homo sapien
agcatctcctagtgggcatctgacc

SEQ ID NO: 3380782 - DNA, 25 bp, Homo sapien
agtgggcatctgacctccagccatt

SEQ ID NO: 3380783 - DNA, 25 bp, Homo sapien
gcatctgacctccagccattgtgct

SEQ ID NO: 3380784 - DNA, 25 bp, Homo sapien
tccatgagggtcatctttgtctgtg

SEQ ID NO: 3380785 - DNA, 25 bp, Homo sapien
catgagggtcatctttgtctgtgtc

SEQ ID NO: 3380786 - DNA, 25 bp, Homo sapien
cttccatgagggtcatctttgtctg

SEQ ID NO: 3380787 - DNA, 25 bp, Homo sapien
gagggtcatctttgtctgtgtccat

SEQ ID NO: 3380788 - DNA, 25 bp, Homo sapien
gaaaatggctataaggatgctgaag

SEQ ID NO: 3380789 - DNA, 25 bp, Homo sapien
gttcaaattactaggttcatggtac

SEQ ID NO: 3380790 - DNA, 25 bp, Homo sapien
cagaatgtgtaacagtgcaaagaaa

SEQ ID NO: 3380791 - DNA, 25 bp, Homo sapien
agttcaaattactaggttcatggta

SEQ ID NO: 3380792 - DNA, 25 bp, Homo sapien
tgaatggcaaagttacacattgctg

SEQ ID NO: 3380793 - DNA, 25 bp, Homo sapien
tccttggtgttctgtatattctaac

SEQ ID NO: 3380794 - DNA, 25 bp, Homo sapien
ttccttggtgttctgtatattctaa

SEQ ID NO: 3380795 - DNA, 25 bp, Homo sapien
tgtgcacctgccattggtgatggtc

SEQ ID NO: 3380796 - DNA, 25 bp, Homo sapien
acactcctcccgctgaggcagggtg

SEQ ID NO: 3380797 - DNA, 25 bp, Homo sapien
gcctcctctgaggaatgtcacactc

SEQ ID NO: 3380798 - DNA, 25 bp, Homo sapien
tcccgctgaggcagggtgacactga

SEQ ID NO: 3380799 - DNA, 25 bp, Homo sapien
cttttcaatctgactgtgagcttcc

SEQ ID NO: 3380800 - DNA, 25 bp, Homo sapien
tatctaatttcctggacattgcgtt

SEQ ID NO: 3380801 - DNA, 25 bp, Homo sapien
tgttggtaccaaagaagccaattca

SEQ ID NO: 3380802 - DNA, 25 bp, Homo sapien
aactgttcattttatcccgacgccg

SEQ ID NO: 3380803 - DNA, 25 bp, Homo sapien
cattgcgttgcatgttggtaccaaa

SEQ ID NO: 3380804 - DNA, 25 bp, Homo sapien
tttgcttctgtgtatggattggtgg

SEQ ID NO: 3380805 - DNA, 25 bp, Homo sapien
tcatcgtctgatagaaaagttggtt

SEQ ID NO: 3380806 - DNA, 25 bp, Homo sapien
ggtgtttcaattcatcgtctgatag

SEQ ID NO: 3380807 - DNA, 25 bp, Homo sapien
gcttctgtgtatggattggtggcac

SEQ ID NO: 3380808 - DNA, 25 bp, Homo sapien
aaaacaatcccataattgaacatac

SEQ ID NO: 3380809 - DNA, 25 bp, Homo sapien
tctcatactgtaggaaacataattt

SEQ ID NO: 3380810 - DNA, 25 bp, Homo sapien
ggataatcaatttctcatactgtag

SEQ ID NO: 3380811 - DNA, 25 bp, Homo sapien
acgacaaacaaaaatccatctgctg

SEQ ID NO: 3380812 - DNA, 25 bp, Homo sapien
tacgacaaacaaaaatccatctgct

SEQ ID NO: 3380813 - DNA, 25 bp, Homo sapien
ctacgacaaacaaaaatccatctgc

SEQ ID NO: 3380814 - DNA, 25 bp, Homo sapien
cgacaaacaaaaatccatctgctgc

SEQ ID NO: 3380815 - DNA, 25 bp, Homo sapien
gacaaagagtatcttccctcggtca

SEQ ID NO: 3380816 - DNA, 25 bp, Homo sapien
tgagacaaagagtatcttccctcgg

SEQ ID NO: 3380817 - DNA, 25 bp, Homo sapien
caaagagtatcttccctcggtcaca

SEQ ID NO: 3380818 - DNA, 25 bp, Homo sapien
actctgagacaaagagtatcttccc

SEQ ID NO: 3380819 - DNA, 25 bp, Homo sapien
aacaaactctgaccaatcagatcat

SEQ ID NO: 3380820 - DNA, 25 bp, Homo sapien
gatgcaggtagtcaaacaaactctg

SEQ ID NO: 3380821 - DNA, 25 bp, Homo sapien
ggcaatatctttaggatgcaggtag

SEQ ID NO: 3380822 - DNA, 25 bp, Homo sapien
tatctttaggatgcaggtagtcaaa

SEQ ID NO: 3380823 - DNA, 25 bp, Homo sapien
gaggaaatgcgaggcctctctggta

SEQ ID NO: 3380824 - DNA, 25 bp, Homo sapien
tgctgaggaaatgcgaggcctctct

SEQ ID NO: 3380825 - DNA, 25 bp, Homo sapien
gctgctgaggaaatgcgaggcctct

SEQ ID NO: 3380826 - DNA, 25 bp, Homo sapien
aatgcgaggcctctctggtactcac

SEQ ID NO: 3380827 - DNA, 25 bp, Homo sapien
tacagaagaaagaacgtcgtgctcc

SEQ ID NO: 3380828 - DNA, 25 bp, Homo sapien
gaaagaacgtcgtgctccagaacat

SEQ ID NO: 3380829 - DNA, 25 bp, Homo sapien
tgctccagaacataatcgagatggc

SEQ ID NO: 3380830 - DNA, 25 bp, Homo sapien
agaacataatcgagatggcccaggg

SEQ ID NO: 3380831 - DNA, 25 bp, Homo sapien
gtcttcaacctttactgaaggcctg

SEQ ID NO: 3380832 - DNA, 25 bp, Homo sapien
ttcaacctttactgaaggcctgtta

SEQ ID NO: 3380833 - DNA, 25 bp, Homo sapien
acctttactgaaggcctgttacact

SEQ ID NO: 3380834 - DNA, 25 bp, Homo sapien
tactgaaggcctgttacacttcatc

SEQ ID NO: 3380835 - DNA, 25 bp, Homo sapien
gtgctgtggattgtgcagaagcttt

SEQ ID NO: 3380836 - DNA, 25 bp, Homo sapien
tgtgctgtggattgtgcagaagctt

SEQ ID NO: 3380837 - DNA, 25 bp, Homo sapien
gtccaattgcgacgaggcagctgag

SEQ ID NO: 3380838 - DNA, 25 bp, Homo sapien
gaggttacacccctcattgtctggt

SEQ ID NO: 3380839 - DNA, 25 bp, Homo sapien
cattgtctggttcgttgtcttcatc

SEQ ID NO: 3380840 - DNA, 25 bp, Homo sapien
ctacatgagaatgcagtcgtccaat

SEQ ID NO: 3380841 - DNA, 25 bp, Homo sapien
catctatcgcgtgccgagaaacata

SEQ ID NO: 3380842 - DNA, 25 bp, Homo sapien
cgtgccgagaaacatattccataga

SEQ ID NO: 3380843 - DNA, 25 bp, Homo sapien
aacaaactttccatctatcgcgtgc

SEQ ID NO: 3380844 - DNA, 25 bp, Homo sapien
tgatttccccgttcactggttgtgg

SEQ ID NO: 3380845 - DNA, 25 bp, Homo sapien
cacgatgtgcctagaagttcttgtg

SEQ ID NO: 3380846 - DNA, 25 bp, Homo sapien
tagaagttcttgtggtaaatatgcc

SEQ ID NO: 3380847 - DNA, 25 bp, Homo sapien
gaagttcttgtggtaaatatgccaa

SEQ ID NO: 3380848 - DNA, 25 bp, Homo sapien
tcataacacgatgtgcctagaagtt

SEQ ID NO: 3380849 - DNA, 25 bp, Homo sapien
gatgtcctatgtcatcttggtgaaa

SEQ ID NO: 3380850 - DNA, 25 bp, Homo sapien
gcctatgacattctgcaagatgtcc

SEQ ID NO: 3380851 - DNA, 25 bp, Homo sapien
gacattctgcaagatgtcctatgtc

SEQ ID NO: 3380852 - DNA, 25 bp, Homo sapien
cttgcctatgacattctgcaagatg

SEQ ID NO: 3380853 - DNA, 25 bp, Homo sapien
tgaaactgaaccatcgactccgtag

SEQ ID NO: 3380854 - DNA, 25 bp, Homo sapien
gactccgtagtgtgataaaagaacc

SEQ ID NO: 3380855 - DNA, 25 bp, Homo sapien
acaatatattctacttccttggtcc

SEQ ID NO: 3380856 - DNA, 25 bp, Homo sapien
tccttggtccaagggttcatgaaac

SEQ ID NO: 3380857 - DNA, 25 bp, Homo sapien
ccagcaataaggaaacgtgagtcag

SEQ ID NO: 3380858 - DNA, 25 bp, Homo sapien
caacttggccaaggtgtccggtgtc

SEQ ID NO: 3380859 - DNA, 25 bp, Homo sapien
tgctcagaactgtgcaccattcaac

SEQ ID NO: 3380860 - DNA, 25 bp, Homo sapien
ataaggaaacgtgagtcaggcctgc

SEQ ID NO: 3380861 - DNA, 25 bp, Homo sapien
ggggggatgctgtgagctgtgggaa

SEQ ID NO: 3380862 - DNA, 25 bp, Homo sapien
tgctgtccatgctgtggggggatgc

SEQ ID NO: 3380863 - DNA, 25 bp, Homo sapien
cagagggcagcatgctgtccatgct

SEQ ID NO: 3380864 - DNA, 25 bp, Homo sapien
tgagctgtgggaaggttgggtcccc

SEQ ID NO: 3380865 - DNA, 25 bp, Homo sapien
cccagggccccagcagcacatagtt

SEQ ID NO: 3380866 - DNA, 25 bp, Homo sapien
acgggcaagccccagggccccagca

SEQ ID NO: 3380867 - DNA, 25 bp, Homo sapien
ccacgggcaagccccagggccccag

SEQ ID NO: 3380868 - DNA, 25 bp, Homo sapien
cagggccccagcagcacatagttac

SEQ ID NO: 3380869 - DNA, 25 bp, Homo sapien
attcggcctatttttcctgccccag

SEQ ID NO: 3380870 - DNA, 25 bp, Homo sapien
gatttcctcagcaatcattcggcct

SEQ ID NO: 3380871 - DNA, 25 bp, Homo sapien
caatcattcggcctatttttcctgc

SEQ ID NO: 3380872 - DNA, 25 bp, Homo sapien
tcagcaatcattcggcctatttttc

SEQ ID NO: 3380873 - DNA, 25 bp, Homo sapien
ggtttgaacctgattacactgcaca

SEQ ID NO: 3380874 - DNA, 25 bp, Homo sapien
taaaggtacatctatccgcactgag

SEQ ID NO: 3380875 - DNA, 25 bp, Homo sapien
tctagtactaatcctgggcagctct

SEQ ID NO: 3380876 - DNA, 25 bp, Homo sapien
ctgagagaatccagcggcagcagtg

SEQ ID NO: 3380877 - DNA, 25 bp, Homo sapien
tacacaaagcctgcccagttaggta

SEQ ID NO: 3380878 - DNA, 25 bp, Homo sapien
gaccctgaatttgccactcacatgc

SEQ ID NO: 3380879 - DNA, 25 bp, Homo sapien
gcccactcaagaatagccctggctt

SEQ ID NO: 3380880 - DNA, 25 bp, Homo sapien
tgtgtttcttaatcgcctatcatag

SEQ ID NO: 3380881 - DNA, 25 bp, Homo sapien
tagtgacaggaaaagcagccttcga

SEQ ID NO: 3380882 - DNA, 25 bp, Homo sapien
gaatactcttaggacatggacggca

SEQ ID NO: 3380883 - DNA, 25 bp, Homo sapien
tattctcagcatgcacaaacggctg

SEQ ID NO: 3380884 - DNA, 25 bp, Homo sapien
gaatgtagcttttgggtgacccaga

SEQ ID NO: 3380885 - DNA, 25 bp, Homo sapien
gaaaagagaattacactgccttttc

SEQ ID NO: 3380886 - DNA, 25 bp, Homo sapien
ttcttttttcagtggagtgtatgtg

SEQ ID NO: 3380887 - DNA, 25 bp, Homo sapien
gtcagaaaagagaattacactgcct

SEQ ID NO: 3380888 - DNA, 25 bp, Homo sapien
ctgtcagaaaagagaattacactgc

SEQ ID NO: 3380889 - DNA, 25 bp, Homo sapien
gccacagctagaaggcgatgaccct

SEQ ID NO: 3380890 - DNA, 25 bp, Homo sapien
gcgtactcgtgatgttcaatgggct

SEQ ID NO: 3380891 - DNA, 25 bp, Homo sapien
ctcgtgatgttcaatgggctggagc

SEQ ID NO: 3380892 - DNA, 25 bp, Homo sapien
gggaggcgtactcgtgatgttcaat

SEQ ID NO: 3380893 - DNA, 25 bp, Homo sapien
cacagctcttggtaacctgaacaaa

SEQ ID NO: 3380894 - DNA, 25 bp, Homo sapien
catgagggctggtgattgatccact

SEQ ID NO: 3380895 - DNA, 25 bp, Homo sapien
tttacgattaagatgggcctaggct

SEQ ID NO: 3380896 - DNA, 25 bp, Homo sapien
taaactgtcctaagctctactggca

SEQ ID NO: 3380897 - DNA, 25 bp, Homo sapien
tgcacctagccatgatggacaatct

SEQ ID NO: 3380898 - DNA, 25 bp, Homo sapien
gaagatctcaaggtcaaagtagcag

SEQ ID NO: 3380899 - DNA, 25 bp, Homo sapien
ccttaaagtgacaggttcacttcat

SEQ ID NO: 3380900 - DNA, 25 bp, Homo sapien
tttggtatgcagcacaagttctgtg

SEQ ID NO: 3380901 - DNA, 25 bp, Homo sapien
ctatctggatatacgtgaggaaaca

SEQ ID NO: 3380902 - DNA, 25 bp, Homo sapien
tactactcagtaagagaactctgtc

SEQ ID NO: 3380903 - DNA, 25 bp, Homo sapien
ggtgccaacttcagtaacctgtggt

SEQ ID NO: 3380904 - DNA, 25 bp, Homo sapien
ccagcaggtggcattataacttact

SEQ ID NO: 3380905 - DNA, 25 bp, Homo sapien
cactggaaggaatgtctggagtccc

SEQ ID NO: 3380906 - DNA, 25 bp, Homo sapien
caagaatagaagaactatcagaata

SEQ ID NO: 3380907 - DNA, 25 bp, Homo sapien
gaatatggataacctgggttctcct

SEQ ID NO: 3380908 - DNA, 25 bp, Homo sapien
gagcctggcctgatagtaggccact

SEQ ID NO: 3380909 - DNA, 25 bp, Homo sapien
tactgggactacttgatccttggtc

SEQ ID NO: 3380910 - DNA, 25 bp, Homo sapien
tcaatcatgtctatacctatgtggg

SEQ ID NO: 3380911 - DNA, 25 bp, Homo sapien
gcctcatcattactgggactacttg

SEQ ID NO: 3380912 - DNA, 25 bp, Homo sapien
gatccttggtcgttgtcaatcatgt

SEQ ID NO: 3380913 - DNA, 25 bp, Homo sapien
gcaagtcactaaagtcaacagggcc

SEQ ID NO: 3380914 - DNA, 25 bp, Homo sapien
gccatggcaagtcactaaagtcaac

SEQ ID NO: 3380915 - DNA, 25 bp, Homo sapien
tggcaagtcactaaagtcaacaggg

SEQ ID NO: 3380916 - DNA, 25 bp, Homo sapien
agtcaacagggccacccagtccagc

SEQ ID NO: 3380917 - DNA, 25 bp, Homo sapien
gatactatagctgttgccaaagcaa

SEQ ID NO: 3380918 - DNA, 25 bp, Homo sapien
gctaccaatgatgcttctgtgcaca

SEQ ID NO: 3380919 - DNA, 25 bp, Homo sapien
aacactggagcaggcttagttccac

SEQ ID NO: 3380920 - DNA, 25 bp, Homo sapien
gacttgtatcaatggctctgagatg

SEQ ID NO: 3380921 - DNA, 25 bp, Homo sapien
tttctaattatttgaaatgtgaaca

SEQ ID NO: 3380922 - DNA, 25 bp, Homo sapien
ttttctaattatttgaaatgtgaac

SEQ ID NO: 3380923 - DNA, 25 bp, Homo sapien
ttctaattatttgaaatgtgaacag

SEQ ID NO: 3380924 - DNA, 25 bp, Homo sapien
acaaatgctactggcgtagatcatc

SEQ ID NO: 3380925 - DNA, 25 bp, Homo sapien
tcagaagtggtggaaattggcagct

SEQ ID NO: 3380926 - DNA, 25 bp, Homo sapien
tccagagccatttcaccctttagag

SEQ ID NO: 3380927 - DNA, 25 bp, Homo sapien
cacagctaggtcttttcagaagtgg

SEQ ID NO: 3380928 - DNA, 25 bp, Homo sapien
accagttcagttatctccagagcca

SEQ ID NO: 3380929 - DNA, 25 bp, Homo sapien
tatgtatgtcgtttgtggcagtgga

SEQ ID NO: 3380930 - DNA, 25 bp, Homo sapien
ggatggctattaagtatgcttgcta

SEQ ID NO: 3380931 - DNA, 25 bp, Homo sapien
gcagtggaaggatggctattaagta

SEQ ID NO: 3380932 - DNA, 25 bp, Homo sapien
tgcttgctatggtaatgagacagtg

SEQ ID NO: 3380933 - DNA, 25 bp, Homo sapien
tggtgtttttcgtaggcaaatagga

SEQ ID NO: 3380934 - DNA, 25 bp, Homo sapien
tgtgctttttgcaagtagtggtgtt

SEQ ID NO: 3380935 - DNA, 25 bp, Homo sapien
tttctgtgctttttgcaagtagtgg

SEQ ID NO: 3380936 - DNA, 25 bp, Homo sapien
tagtggtgtttttcgtaggcaaata

SEQ ID NO: 3380937 - DNA, 25 bp, Homo sapien
aaacttgcacggaaaaggttctgat

SEQ ID NO: 3380938 - DNA, 25 bp, Homo sapien
cttcttcagatgcaggtgccctgac

SEQ ID NO: 3380939 - DNA, 25 bp, Homo sapien
gatgcaggtgccctgacacccttat

SEQ ID NO: 3380940 - DNA, 25 bp, Homo sapien
cacggaaaaggttctgatgtctttc

SEQ ID NO: 3380941 - DNA, 25 bp, Homo sapien
ccggggatgaaggcgataccctcat

SEQ ID NO: 3380942 - DNA, 25 bp, Homo sapien
ctccggggatgaaggcgataccctc

SEQ ID NO: 3380943 - DNA, 25 bp, Homo sapien
tccggggatgaaggcgataccctca

SEQ ID NO: 3380944 - DNA, 25 bp, Homo sapien
cacagccacctccggagggatctgg

SEQ ID NO: 3380945 - DNA, 25 bp, Homo sapien
ccacagccacctccggagggatctg

SEQ ID NO: 3380946 - DNA, 25 bp, Homo sapien
ctccacagccacctccggagggatc

SEQ ID NO: 3380947 - DNA, 25 bp, Homo sapien
tccacagccacctccggagggatct

SEQ ID NO: 3380948 - DNA, 25 bp, Homo sapien
gttctcgcgagaacgctgctggcct

SEQ ID NO: 3380949 - DNA, 25 bp, Homo sapien
cattgtgagctctcgcggtaagagg

SEQ ID NO: 3380950 - DNA, 25 bp, Homo sapien
ccctgggcggagagcaccgttctcg

SEQ ID NO: 3380951 - DNA, 25 bp, Homo sapien
ggcctcgcctcttcgcattgtgagc

SEQ ID NO: 3380952 - DNA, 25 bp, Homo sapien
ccgcgccctcaactgccttctcctt

SEQ ID NO: 3380953 - DNA, 25 bp, Homo sapien
gccgccgcgccctcaactgccttct

SEQ ID NO: 3380954 - DNA, 25 bp, Homo sapien
gtggccgccgcgccctcaactgcct

SEQ ID NO: 3380955 - DNA, 25 bp, Homo sapien
actgccttctccttcggtgccccgc

SEQ ID NO: 3380956 - DNA, 25 bp, Homo sapien
gtttgaaggtaacagccctcagcca

SEQ ID NO: 3380957 - DNA, 25 bp, Homo sapien
gcggttgacccgagctgatgtctgt

SEQ ID NO: 3380958 - DNA, 25 bp, Homo sapien
gtgaggagaggtcgcgcggcgcctt

SEQ ID NO: 3380959 - DNA, 25 bp, Homo sapien
gattcaaaggtttgaaggtaacagc

SEQ ID NO: 3380960 - DNA, 25 bp, Homo sapien
tctgtgaccgagacgctgtccactt

SEQ ID NO: 3380961 - DNA, 25 bp, Homo sapien
aactctgtgaccgagacgctgtcca

SEQ ID NO: 3380962 - DNA, 25 bp, Homo sapien
ctccctgaagagtccctgcactatt

SEQ ID NO: 3380963 - DNA, 25 bp, Homo sapien
ctgaagagtccctgcactatttctc

SEQ ID NO: 3380964 - DNA, 25 bp, Homo sapien
cctaggcggccaaactgaaggagtt

SEQ ID NO: 3380965 - DNA, 25 bp, Homo sapien
ctgaaggagtttcagctggcacagg

SEQ ID NO: 3380966 - DNA, 25 bp, Homo sapien
gactctcggtgtttcctaggcggcc

SEQ ID NO: 3380967 - DNA, 25 bp, Homo sapien
cggtgtttcctaggcggccaaactg

SEQ ID NO: 3380968 - DNA, 25 bp, Homo sapien
ggggtgtaagcttcgaaggcggaga

SEQ ID NO: 3380969 - DNA, 25 bp, Homo sapien
taagcttcgaaggcggagactgtgt

SEQ ID NO: 3380970 - DNA, 25 bp, Homo sapien
ggtgtaagcttcgaaggcggagact

SEQ ID NO: 3380971 - DNA, 25 bp, Homo sapien
tgtaagcttcgaaggcggagactgt

SEQ ID NO: 3380972 - DNA, 25 bp, Homo sapien
gcgtatcacacgtaggagcctggga

SEQ ID NO: 3380973 - DNA, 25 bp, Homo sapien
gagcctgggaatgttctcatccgaa

SEQ ID NO: 3380974 - DNA, 25 bp, Homo sapien
gattcagcgcaattgtcactcccag

SEQ ID NO: 3380975 - DNA, 25 bp, Homo sapien
caggtgaaggctttctcaacaaggc

SEQ ID NO: 3380976 - DNA, 25 bp, Homo sapien
taataacttagtgaattacgacaat

SEQ ID NO: 3380977 - DNA, 25 bp, Homo sapien
cttagtgaattacgacaataacccg

SEQ ID NO: 3380978 - DNA, 25 bp, Homo sapien
ggctataataacttagtgaattacg

SEQ ID NO: 3380979 - DNA, 25 bp, Homo sapien
aatgttggctataataacttagtga

SEQ ID NO: 3380980 - DNA, 25 bp, Homo sapien
aacttggactacagaatgacttctt

SEQ ID NO: 3380981 - DNA, 25 bp, Homo sapien
caaaggaaggtgagtggaaactaca

SEQ ID NO: 3380982 - DNA, 25 bp, Homo sapien
tctgagcagagcttataggagaaaa

SEQ ID NO: 3380983 - DNA, 25 bp, Homo sapien
tattttgatgtaagagtatggctcc

SEQ ID NO: 3380984 - DNA, 25 bp, Homo sapien
gtgaagcacgaggaccctaggacag

SEQ ID NO: 3380985 - DNA, 25 bp, Homo sapien
ggacatatctccataagaggctcca

SEQ ID NO: 3380986 - DNA, 25 bp, Homo sapien
gaggaggttattacttgtggccaca

SEQ ID NO: 3380987 - DNA, 25 bp, Homo sapien
gaggctccacaggtcattagaaaat

SEQ ID NO: 3380988 - DNA, 25 bp, Homo sapien
aagagataagggacactttcagatt

SEQ ID NO: 3380989 - DNA, 25 bp, Homo sapien
gataagggacactttcagatttaga

SEQ ID NO: 3380990 - DNA, 25 bp, Homo sapien
gagataagggacactttcagattta

SEQ ID NO: 3380991 - DNA, 25 bp, Homo sapien
ataagggacactttcagatttagat

SEQ ID NO: 3380992 - DNA, 25 bp, Homo sapien
tgttgaaatattgatctgatgagat

SEQ ID NO: 3380993 - DNA, 25 bp, Homo sapien
ctaaactgttgatgtctacagatga

SEQ ID NO: 3380994 - DNA, 25 bp, Homo sapien
attgtactttcatgggccattcttt

SEQ ID NO: 3380995 - DNA, 25 bp, Homo sapien
tttcatgggccattctttatgagaa

SEQ ID NO: 3380996 - DNA, 25 bp, Homo sapien
cattgcatctcaaatacgtcagtgt

SEQ ID NO: 3380997 - DNA, 25 bp, Homo sapien
tgattacaatggctgctatctcttt

SEQ ID NO: 3380998 - DNA, 25 bp, Homo sapien
cagtgttacctgtacatcttgtacc

SEQ ID NO: 3380999 - DNA, 25 bp, Homo sapien
ttacaatggctgctatctctttgcc

SEQ ID NO: 3381000 - DNA, 25 bp, Homo sapien
tgggatcatgccacctggatcttct

SEQ ID NO: 3381001 - DNA, 25 bp, Homo sapien
ttcgtgaactctcctccacggcttc

SEQ ID NO: 3381002 - DNA, 25 bp, Homo sapien
ggatcatgccacctggatcttctac

SEQ ID NO: 3381003 - DNA, 25 bp, Homo sapien
gaactctcctccacggcttctctgg

SEQ ID NO: 3381004 - DNA, 25 bp, Homo sapien
tgactcatgtaacctctgcacttca

SEQ ID NO: 3381005 - DNA, 25 bp, Homo sapien
tttcctttgactcatgtaacctctg

SEQ ID NO: 3381006 - DNA, 25 bp, Homo sapien
tgaggtctcatgagctattgtcctg

SEQ ID NO: 3381007 - DNA, 25 bp, Homo sapien
gcaatgatctcaacagactgaatgc

SEQ ID NO: 3381008 - DNA, 25 bp, Homo sapien
gttcagccttgagcatatctttagc

SEQ ID NO: 3381009 - DNA, 25 bp, Homo sapien
ctgccttctgtgtaatgaggtctca

SEQ ID NO: 3381010 - DNA, 25 bp, Homo sapien
ttgagacagggcagcaccctcagtg

SEQ ID NO: 3381011 - DNA, 25 bp, Homo sapien
agctgagtggccacaactgagccat

SEQ ID NO: 3381012 - DNA, 25 bp, Homo sapien
gatttaaggcaaaggtccttggagc

SEQ ID NO: 3381013 - DNA, 25 bp, Homo sapien
ttggagctgagtggccacaactgag

SEQ ID NO: 3381014 - DNA, 25 bp, Homo sapien
gcatttgagatctcataggccttaa

SEQ ID NO: 3381015 - DNA, 25 bp, Homo sapien
gacatttggaacatgcctcctgcaa

SEQ ID NO: 3381016 - DNA, 25 bp, Homo sapien
gatcatgcatgtttgtgccccaata

SEQ ID NO: 3381017 - DNA, 25 bp, Homo sapien
tataaaagctgaagggcatttgaga

SEQ ID NO: 3381018 - DNA, 25 bp, Homo sapien
cttcctctcctcctctgtcccattc

SEQ ID NO: 3381019 - DNA, 25 bp, Homo sapien
ctctcctcctctgtcccattctcac

SEQ ID NO: 3381020 - DNA, 25 bp, Homo sapien
tcctctcctcctctgtcccattctc

SEQ ID NO: 3381021 - DNA, 25 bp, Homo sapien
tcaaacatttaatctcctcttcctc

SEQ ID NO: 3381022 - DNA, 25 bp, Homo sapien
gacatactgtatttgaggtgaagtg

SEQ ID NO: 3381023 - DNA, 25 bp, Homo sapien
tatttgaggtgaagtgatgtccaga

SEQ ID NO: 3381024 - DNA, 25 bp, Homo sapien
tcaagagagtccatactggacatac

SEQ ID NO: 3381025 - DNA, 25 bp, Homo sapien
gaagtgatgtccagatagatttgtc

SEQ ID NO: 3381026 - DNA, 25 bp, Homo sapien
tgtgcactcctggtgatggtacagt

SEQ ID NO: 3381027 - DNA, 25 bp, Homo sapien
actgtgcactcctggtgatggtaca

SEQ ID NO: 3381028 - DNA, 25 bp, Homo sapien
ctgtgcactcctggtgatggtacag

SEQ ID NO: 3381029 - DNA, 25 bp, Homo sapien
gagaccaaaacagaccacgcacaga

SEQ ID NO: 3381030 - DNA, 25 bp, Homo sapien
gacaagatagggagtattcagggtg

SEQ ID NO: 3381031 - DNA, 25 bp, Homo sapien
tcagacaagatagggagtattcagg

SEQ ID NO: 3381032 - DNA, 25 bp, Homo sapien
gatcagacaagatagggagtattca

SEQ ID NO: 3381033 - DNA, 25 bp, Homo sapien
agacaagatagggagtattcagggt

SEQ ID NO: 3381034 - DNA, 25 bp, Homo sapien
tcgcgacgtgactggctggagcggc

SEQ ID NO: 3381035 - DNA, 25 bp, Homo sapien
ctggagcggcgcctcttttcgacat

SEQ ID NO: 3381036 - DNA, 25 bp, Homo sapien
cacccttatccgcaggaccagtcat

SEQ ID NO: 3381037 - DNA, 25 bp, Homo sapien
ttttgattggctctcgcgcacaccc

SEQ ID NO: 3381038 - DNA, 25 bp, Homo sapien
agagcggacgggcagtggcacgccc

SEQ ID NO: 3381039 - DNA, 25 bp, Homo sapien
gcccgcgaccggctgctgaagagcg

SEQ ID NO: 3381040 - DNA, 25 bp, Homo sapien
tgaagagcggacgggcagtggcacg

SEQ ID NO: 3381041 - DNA, 25 bp, Homo sapien
gagcggacgggcagtggcacgccca

SEQ ID NO: 3381042 - DNA, 25 bp, Homo sapien
ccagcaatagctgcgccgccgccgc

SEQ ID NO: 3381043 - DNA, 25 bp, Homo sapien
gccgccgccgccgtcgcgctctctt

SEQ ID NO: 3381044 - DNA, 25 bp, Homo sapien
ccgccgccgccgccgtcgcgctctc

SEQ ID NO: 3381045 - DNA, 25 bp, Homo sapien
cgccgccgccgtcgcgctctcttca

SEQ ID NO: 3381046 - DNA, 25 bp, Homo sapien
tagacgcagaggctcaggcctcgct

SEQ ID NO: 3381047 - DNA, 25 bp, Homo sapien
caggcctcgctctcccactggccgt

SEQ ID NO: 3381048 - DNA, 25 bp, Homo sapien
ctagacgcagaggctcaggcctcgc

SEQ ID NO: 3381049 - DNA, 25 bp, Homo sapien
agaggctcaggcctcgctctcccac

SEQ ID NO: 3381050 - DNA, 25 bp, Homo sapien
cttcgccacctctagcggcctccca

SEQ ID NO: 3381051 - DNA, 25 bp, Homo sapien
ttcgccacctctagcggcctcccac

SEQ ID NO: 3381052 - DNA, 25 bp, Homo sapien
ggctccgcggctgcaaaccaggccc

SEQ ID NO: 3381053 - DNA, 25 bp, Homo sapien
tccgcggctgcaaaccaggccccac

SEQ ID NO: 3381054 - DNA, 25 bp, Homo sapien
taatgccttctagtccaatagcctc

SEQ ID NO: 3381055 - DNA, 25 bp, Homo sapien
taaatctaccgcgtttgctgcttgt

SEQ ID NO: 3381056 - DNA, 25 bp, Homo sapien
gacaccgcagaatcagacaactgtt

SEQ ID NO: 3381057 - DNA, 25 bp, Homo sapien
ccttccggtttcagtaggtgcctct

SEQ ID NO: 3381058 - DNA, 25 bp, Homo sapien
gactgccatctagtcaaaagcaaac

SEQ ID NO: 3381059 - DNA, 25 bp, Homo sapien
gctgctgaggcaaaacgagatgaac

SEQ ID NO: 3381060 - DNA, 25 bp, Homo sapien
cttttgagtatttggccctccacta

SEQ ID NO: 3381061 - DNA, 25 bp, Homo sapien
gtatgccattacttcggagggagtg

SEQ ID NO: 3381062 - DNA, 25 bp, Homo sapien
caagcaaacatgttacacagcaaat

SEQ ID NO: 3381063 - DNA, 25 bp, Homo sapien
ctggaaatatggtagtgggccacct

SEQ ID NO: 3381064 - DNA, 25 bp, Homo sapien
aatgctttgctgatctggttaacaa

SEQ ID NO: 3381065 - DNA, 25 bp, Homo sapien
tactaagggcaaatgtgatcacagt

SEQ ID NO: 3381066 - DNA, 25 bp, Homo sapien
tgaacacccagcacttactacagtg

SEQ ID NO: 3381067 - DNA, 25 bp, Homo sapien
tttcttgtcaatattgaacacccag

SEQ ID NO: 3381068 - DNA, 25 bp, Homo sapien
aaatagatgaggtctgacttgaatt

SEQ ID NO: 3381069 - DNA, 25 bp, Homo sapien
caatattgaacacccagcacttact

SEQ ID NO: 3381070 - DNA, 25 bp, Homo sapien
taaacagtgtattcctcagtatcta

SEQ ID NO: 3381071 - DNA, 25 bp, Homo sapien
ctcagtatctacagaaatctctcca

SEQ ID NO: 3381072 - DNA, 25 bp, Homo sapien
cagtgtattcctcagtatctacaga

SEQ ID NO: 3381073 - DNA, 25 bp, Homo sapien
tattcctcagtatctacagaaatct

SEQ ID NO: 3381074 - DNA, 25 bp, Homo sapien
tactttgttgctaaccaccacctct

SEQ ID NO: 3381075 - DNA, 25 bp, Homo sapien
cctatgaatctgaccataactgtga

SEQ ID NO: 3381076 - DNA, 25 bp, Homo sapien
tctcaatcgttctgagtctctcagc

SEQ ID NO: 3381077 - DNA, 25 bp, Homo sapien
taaagcatccatgatcttccagcca

SEQ ID NO: 3381078 - DNA, 25 bp, Homo sapien
cagcaaccggctttgttcaagttct

SEQ ID NO: 3381079 - DNA, 25 bp, Homo sapien
acagtatgccaattacatgttgtag

SEQ ID NO: 3381080 - DNA, 25 bp, Homo sapien
tacagcaaccggctttgttcaagtt

SEQ ID NO: 3381081 - DNA, 25 bp, Homo sapien
taacatctacagtatgccaattaca

SEQ ID NO: 3381082 - DNA, 25 bp, Homo sapien
tattaactccaacaggtcacaaggg

SEQ ID NO: 3381083 - DNA, 25 bp, Homo sapien
tgaacttcgaacagtctgtgcacag

SEQ ID NO: 3381084 - DNA, 25 bp, Homo sapien
gaactatgagcacttgtatctcagg

SEQ ID NO: 3381085 - DNA, 25 bp, Homo sapien
tagggccattcctcaaactaagtga

SEQ ID NO: 3381086 - DNA, 25 bp, Homo sapien
tgtacgggcaagtcttagccccagc

SEQ ID NO: 3381087 - DNA, 25 bp, Homo sapien
ccatcactaggatttgaggcctgca

SEQ ID NO: 3381088 - DNA, 25 bp, Homo sapien
ctatgatgtcgctaatgtacgggca

SEQ ID NO: 3381089 - DNA, 25 bp, Homo sapien
tattgagctaaagaatgactcagcc

SEQ ID NO: 3381090 - DNA, 25 bp, Homo sapien
ctgtgagattcacctcattcacaat

SEQ ID NO: 3381091 - DNA, 25 bp, Homo sapien
cctgtgagattcacctcattcacaa

SEQ ID NO: 3381092 - DNA, 25 bp, Homo sapien
tcctgtgagattcacctcattcaca

SEQ ID NO: 3381093 - DNA, 25 bp, Homo sapien
tgtgagattcacctcattcacaatg

SEQ ID NO: 3381094 - DNA, 25 bp, Homo sapien
gaattcaccttaggacaagacctca

SEQ ID NO: 3381095 - DNA, 25 bp, Homo sapien
cctgtgaggaggacgttcttgcctt

SEQ ID NO: 3381096 - DNA, 25 bp, Homo sapien
aagacctcagcaacttttccagaag

SEQ ID NO: 3381097 - DNA, 25 bp, Homo sapien
ttctgcctcaccaaaacatatactg

SEQ ID NO: 3381098 - DNA, 25 bp, Homo sapien
ccagtttaggttgggtgagttcgct

SEQ ID NO: 3381099 - DNA, 25 bp, Homo sapien
attaaaccttactgtagctgcacag

SEQ ID NO: 3381100 - DNA, 25 bp, Homo sapien
tcttcttcactgagagccagtttag

SEQ ID NO: 3381101 - DNA, 25 bp, Homo sapien
gctgcacagtggaatataatattgg

SEQ ID NO: 3381102 - DNA, 25 bp, Homo sapien
tagtaattaaatcagggtgactggc

SEQ ID NO: 3381103 - DNA, 25 bp, Homo sapien
gacacactgtcaaaaagaatgctct

SEQ ID NO: 3381104 - DNA, 25 bp, Homo sapien
tatgtccaacataccttgcccctag

SEQ ID NO: 3381105 - DNA, 25 bp, Homo sapien
catagcggtgttttgatgcgtacaa

SEQ ID NO: 3381106 - DNA, 25 bp, Homo sapien
aactttcctcgttaagtcaatgaag

SEQ ID NO: 3381107 - DNA, 25 bp, Homo sapien
taccattagccaatatctacgtatg

SEQ ID NO: 3381108 - DNA, 25 bp, Homo sapien
gaaaacatgctaagcttcataaagc

SEQ ID NO: 3381109 - DNA, 25 bp, Homo sapien
tttaccctaatcaatgtttcctgtc

SEQ ID NO: 3381110 - DNA, 25 bp, Homo sapien
tacgaagttgttatatgcctgcctg

SEQ ID NO: 3381111 - DNA, 25 bp, Homo sapien
gagtattatagagtgtctgacccaa

SEQ ID NO: 3381112 - DNA, 25 bp, Homo sapien
tcaatgtaatgacaagggctaggtc

SEQ ID NO: 3381113 - DNA, 25 bp, Homo sapien
taatgtcctatcaccacttggaagt

SEQ ID NO: 3381114 - DNA, 25 bp, Homo sapien
cccaacagtaaaagcttcatgccat

SEQ ID NO: 3381115 - DNA, 25 bp, Homo sapien
gcctctagaccatatgcactttgca

SEQ ID NO: 3381116 - DNA, 25 bp, Homo sapien
gagtaactgttagtgaaaccctgtc

SEQ ID NO: 3381117 - DNA, 25 bp, Homo sapien
tattgggcttaatgttgtagtaaca

SEQ ID NO: 3381118 - DNA, 25 bp, Homo sapien
tactgcccctgagaaaatactgtct

SEQ ID NO: 3381119 - DNA, 25 bp, Homo sapien
ggaacaatgacgcaatcttagggta

SEQ ID NO: 3381120 - DNA, 25 bp, Homo sapien
caaaacaaggtgcaacagtgactaa

SEQ ID NO: 3381121 - DNA, 25 bp, Homo sapien
aaaagctcaacgacctgaagtgcca

SEQ ID NO: 3381122 - DNA, 25 bp, Homo sapien
gacataaactgaagcactcaggcct

SEQ ID NO: 3381123 - DNA, 25 bp, Homo sapien
tctaacatagtcaccaaacaggcag

SEQ ID NO: 3381124 - DNA, 25 bp, Homo sapien
taatgaaacctacctactaagactg

SEQ ID NO: 3381125 - DNA, 25 bp, Homo sapien
tagagagcccaaatattcactatgg

SEQ ID NO: 3381126 - DNA, 25 bp, Homo sapien
gttgtgcaaggagaataagctgtcg

SEQ ID NO: 3381127 - DNA, 25 bp, Homo sapien
caatatgcttgcgattacagtaggc

SEQ ID NO: 3381128 - DNA, 25 bp, Homo sapien
taagctgtcgcgttgcaatcacatt

SEQ ID NO: 3381129 - DNA, 25 bp, Homo sapien
ggtggtggatagactacttcatcaa

SEQ ID NO: 3381130 - DNA, 25 bp, Homo sapien
tctgtctcctatcaattttggcgtg

SEQ ID NO: 3381131 - DNA, 25 bp, Homo sapien
ccaacaatcgatggccttacaattg

SEQ ID NO: 3381132 - DNA, 25 bp, Homo sapien
ggccttacaattgccacatttagtt

SEQ ID NO: 3381133 - DNA, 25 bp, Homo sapien
gcgtgatatcatttactaggccatc

SEQ ID NO: 3381134 - DNA, 25 bp, Homo sapien
gctttgccatggtaattcaccttta

SEQ ID NO: 3381135 - DNA, 25 bp, Homo sapien
ctgccagctctttttatacagagtt

SEQ ID NO: 3381136 - DNA, 25 bp, Homo sapien
attcacctttagtaaataatacctg

SEQ ID NO: 3381137 - DNA, 25 bp, Homo sapien
agaactgccagctctttttatacag

SEQ ID NO: 3381138 - DNA, 25 bp, Homo sapien
cttactaccattacacagacctagg

SEQ ID NO: 3381139 - DNA, 25 bp, Homo sapien
tcacaaataccctaacaccctgtac

SEQ ID NO: 3381140 - DNA, 25 bp, Homo sapien
tgatctacagaggaaggggtctacc

SEQ ID NO: 3381141 - DNA, 25 bp, Homo sapien
cagacctaggttttgcctaaatcaa

SEQ ID NO: 3381142 - DNA, 25 bp, Homo sapien
tattatttgaactctacaaccccaa

SEQ ID NO: 3381143 - DNA, 25 bp, Homo sapien
gatttattatttgaactctacaacc

SEQ ID NO: 3381144 - DNA, 25 bp, Homo sapien
gaaacattatgaagctagagattta

SEQ ID NO: 3381145 - DNA, 25 bp, Homo sapien
agggagagaagcttagaaacattat

SEQ ID NO: 3381146 - DNA, 25 bp, Homo sapien
taaagagaccacttggtccattaaa

SEQ ID NO: 3381147 - DNA, 25 bp, Homo sapien
gtccattaaagttatcaatccatcc

SEQ ID NO: 3381148 - DNA, 25 bp, Homo sapien
aaagagaccacttggtccattaaag

SEQ ID NO: 3381149 - DNA, 25 bp, Homo sapien
agcagaaaaatgtatagaatattaa

SEQ ID NO: 3381150 - DNA, 25 bp, Homo sapien
atatttaaagatatacaaaaagcag

SEQ ID NO: 3381151 - DNA, 25 bp, Homo sapien
taagatatataagccatagtgtata

SEQ ID NO: 3381152 - DNA, 25 bp, Homo sapien
cttaagatatataagccatagtgta

SEQ ID NO: 3381153 - DNA, 25 bp, Homo sapien
gaataccaggctgccgcaagactca

SEQ ID NO: 3381154 - DNA, 25 bp, Homo sapien
cgcaagactcatgttgacaactaca

SEQ ID NO: 3381155 - DNA, 25 bp, Homo sapien
gcacgtattgttcgaagaattcctt

SEQ ID NO: 3381156 - DNA, 25 bp, Homo sapien
tctgcaagggcattgttggaggcac

SEQ ID NO: 3381157 - DNA, 25 bp, Homo sapien
tacagcctaaatattggtatggcaa

SEQ ID NO: 3381158 - DNA, 25 bp, Homo sapien
tcttggagttggcagtgatacagcc

SEQ ID NO: 3381159 - DNA, 25 bp, Homo sapien
tctatcctgtaagtaatacatgagc

SEQ ID NO: 3381160 - DNA, 25 bp, Homo sapien
tactactgatgggagcacttgctat

SEQ ID NO: 3381161 - DNA, 25 bp, Homo sapien
tcctccttatattagcaggaatgtc

SEQ ID NO: 3381162 - DNA, 25 bp, Homo sapien
ggaaaacaacaaatgacctcagctc

SEQ ID NO: 3381163 - DNA, 25 bp, Homo sapien
ttaaagctgctctggtgtaccatgt

SEQ ID NO: 3381164 - DNA, 25 bp, Homo sapien
tggactaagtttccttttgccagaa

SEQ ID NO: 3381165 - DNA, 25 bp, Homo sapien
gaaaggattagtgctgcctgttgta

SEQ ID NO: 3381166 - DNA, 25 bp, Homo sapien
tggaaaggattagtgctgcctgttg

SEQ ID NO: 3381167 - DNA, 25 bp, Homo sapien
cagtggaaaggattagtgctgcctg

SEQ ID NO: 3381168 - DNA, 25 bp, Homo sapien
cccagtggaaaggattagtgctgcc

SEQ ID NO: 3381169 - DNA, 25 bp, Homo sapien
tggttctttaagatttattctaaca

SEQ ID NO: 3381170 - DNA, 25 bp, Homo sapien
tattctaacattcaaaaacacaggt

SEQ ID NO: 3381171 - DNA, 25 bp, Homo sapien
acattcaaaaacacaggtaaaatca

SEQ ID NO: 3381172 - DNA, 25 bp, Homo sapien
gatttattctaacattcaaaaacac

SEQ ID NO: 3381173 - DNA, 25 bp, Homo sapien
cagcaatccagtaatgatataaaag

SEQ ID NO: 3381174 - DNA, 25 bp, Homo sapien
tctgaaggcctgttcgagaggattc

SEQ ID NO: 3381175 - DNA, 25 bp, Homo sapien
attggaggttagatttacattgggc

SEQ ID NO: 3381176 - DNA, 25 bp, Homo sapien
ggccttatggcttacagcaatccag

SEQ ID NO: 3381177 - DNA, 25 bp, Homo sapien
taatgcagatactctatggctgaca

SEQ ID NO: 3381178 - DNA, 25 bp, Homo sapien
tggctgacacccttccgataatgat

SEQ ID NO: 3381179 - DNA, 25 bp, Homo sapien
tgcgataggctgttggaattaaact

SEQ ID NO: 3381180 - DNA, 25 bp, Homo sapien
ctgtcaacatgagtgcaatcgagca

SEQ ID NO: 3381181 - DNA, 25 bp, Homo sapien
gaatccacagacaatacctacgagg

SEQ ID NO: 3381182 - DNA, 25 bp, Homo sapien
taaagaaagcatgcactgccaccat

SEQ ID NO: 3381183 - DNA, 25 bp, Homo sapien
catatagggttagaaacatcatgga

SEQ ID NO: 3381184 - DNA, 25 bp, Homo sapien
tgaagaatgcttccaatggcaagta

SEQ ID NO: 3381185 - DNA, 25 bp, Homo sapien
tgctgtcccataggaacctcacagg

SEQ ID NO: 3381186 - DNA, 25 bp, Homo sapien
tgggtatggctttcgtctaataggc

SEQ ID NO: 3381187 - DNA, 25 bp, Homo sapien
ctttagaaagacctaggcagtgcct

SEQ ID NO: 3381188 - DNA, 25 bp, Homo sapien
gaagagactgctatatcaagggtca

SEQ ID NO: 3381189 - DNA, 25 bp, Homo sapien
gaattaggcatcatagtaaggcccc

SEQ ID NO: 3381190 - DNA, 25 bp, Homo sapien
tcaaactagtccatatggagaggcc

SEQ ID NO: 3381191 - DNA, 25 bp, Homo sapien
taagctcccggaggtcaaggatctg

SEQ ID NO: 3381192 - DNA, 25 bp, Homo sapien
tgccatactgcgaggaagctcaaac

SEQ ID NO: 3381193 - DNA, 25 bp, Homo sapien
tgtctccagctgagaagtacacaga

SEQ ID NO: 3381194 - DNA, 25 bp, Homo sapien
catccctggcctctaggtgctggta

SEQ ID NO: 3381195 - DNA, 25 bp, Homo sapien
gatcattctttcgtgtggagggcta

SEQ ID NO: 3381196 - DNA, 25 bp, Homo sapien
ggagggctatcttgcatgctataag

SEQ ID NO: 3381197 - DNA, 25 bp, Homo sapien
tctaaggcaatttctggacagggat

SEQ ID NO: 3381198 - DNA, 25 bp, Homo sapien
tgtaccaaatcagcagggaataaga

SEQ ID NO: 3381199 - DNA, 25 bp, Homo sapien
taataccacctaaacagagttctgc

SEQ ID NO: 3381200 - DNA, 25 bp, Homo sapien
tgtaaaactttgcaccatcactcct

SEQ ID NO: 3381201 - DNA, 25 bp, Homo sapien
ttcaagaaacaccatagctttgtga

SEQ ID NO: 3381202 - DNA, 25 bp, Homo sapien
caccatagctttgtgaagacgagtt

SEQ ID NO: 3381203 - DNA, 25 bp, Homo sapien
tagctttgtgaagacgagttattgt

SEQ ID NO: 3381204 - DNA, 25 bp, Homo sapien
gaaacaccatagctttgtgaagacg

SEQ ID NO: 3381205 - DNA, 25 bp, Homo sapien
tttatcttcagggtttagttgattc

SEQ ID NO: 3381206 - DNA, 25 bp, Homo sapien
ttcagggtttagttgattcattaac

SEQ ID NO: 3381207 - DNA, 25 bp, Homo sapien
atcttcagggtttagttgattcatt

SEQ ID NO: 3381208 - DNA, 25 bp, Homo sapien
tcagggtttagttgattcattaaca

SEQ ID NO: 3381209 - DNA, 25 bp, Homo sapien
cagaaagcccaatgcaatctaggta

SEQ ID NO: 3381210 - DNA, 25 bp, Homo sapien
tcatagtgatactgccaagcggcaa

SEQ ID NO: 3381211 - DNA, 25 bp, Homo sapien
gacgagccaggaataacatatcacc

SEQ ID NO: 3381212 - DNA, 25 bp, Homo sapien
tataaaggaagagccaactaccgac

SEQ ID NO: 3381213 - DNA, 25 bp, Homo sapien
acatttcttcattcaatacgtactt

SEQ ID NO: 3381214 - DNA, 25 bp, Homo sapien
tttcttcattcaatacgtacttctt

SEQ ID NO: 3381215 - DNA, 25 bp, Homo sapien
tacgtacttcttagttcccaagcag

SEQ ID NO: 3381216 - DNA, 25 bp, Homo sapien
tcttcattcaatacgtacttcttag

SEQ ID NO: 3381217 - DNA, 25 bp, Homo sapien
ttatgataggcattaagtatactgt

SEQ ID NO: 3381218 - DNA, 25 bp, Homo sapien
gcaaatcaagagatatgttagacag

SEQ ID NO: 3381219 - DNA, 25 bp, Homo sapien
taatttgaaacttatgataggcatt

SEQ ID NO: 3381220 - DNA, 25 bp, Homo sapien
taatcaaagctcaaatccatattaa

SEQ ID NO: 3381221 - DNA, 25 bp, Homo sapien
tgtaacacagactaaccacaaagta

SEQ ID NO: 3381222 - DNA, 25 bp, Homo sapien
taaaaatgcgccagatgaggatcac

SEQ ID NO: 3381223 - DNA, 25 bp, Homo sapien
gatgctcggaagtatgacaaaaact

SEQ ID NO: 3381224 - DNA, 25 bp, Homo sapien
tatctcatagtgctggatgctcgga

SEQ ID NO: 3381225 - DNA, 25 bp, Homo sapien
tgtacatttagatcaccatatgtat

SEQ ID NO: 3381226 - DNA, 25 bp, Homo sapien
acatttagatcaccatatgtataga

SEQ ID NO: 3381227 - DNA, 25 bp, Homo sapien
tttagatcaccatatgtatagatgt

SEQ ID NO: 3381228 - DNA, 25 bp, Homo sapien
attttgtacatttagatcaccatat

SEQ ID NO: 3381229 - DNA, 25 bp, Homo sapien
tactggtcagtgttcctatttcccc

SEQ ID NO: 3381230 - DNA, 25 bp, Homo sapien
tggtggctactgtagatttgagctg

SEQ ID NO: 3381231 - DNA, 25 bp, Homo sapien
cagtgtgttcactaagttttatgag

SEQ ID NO: 3381232 - DNA, 25 bp, Homo sapien
tctagggctcaaaatattaagtcat

SEQ ID NO: 3381233 - DNA, 25 bp, Homo sapien
tgctgatatggattctcaaacccat

SEQ ID NO: 3381234 - DNA, 25 bp, Homo sapien
taccaactttgctagtattactgtc

SEQ ID NO: 3381235 - DNA, 25 bp, Homo sapien
gatatgcatcagacgtttaatcaga

SEQ ID NO: 3381236 - DNA, 25 bp, Homo sapien
ccatttagatcgaatagggtcatta

SEQ ID NO: 3381237 - DNA, 25 bp, Homo sapien
cactggaaagatagcacaagccttt

SEQ ID NO: 3381238 - DNA, 25 bp, Homo sapien
gaacacaagtatggtgaatccttcc

SEQ ID NO: 3381239 - DNA, 25 bp, Homo sapien
tacacacgagtatattttttaatgc

SEQ ID NO: 3381240 - DNA, 25 bp, Homo sapien
aaattagtatgtgtttacacacgag

SEQ ID NO: 3381241 - DNA, 25 bp, Homo sapien
tatgcacttcataggcctgcccaag

SEQ ID NO: 3381242 - DNA, 25 bp, Homo sapien
taaggtatggtcctagaccagagac

SEQ ID NO: 3381243 - DNA, 25 bp, Homo sapien
gattatacacctgcatgaaagtagg

SEQ ID NO: 3381244 - DNA, 25 bp, Homo sapien
taagtcaaagaacgtactgccaagc

SEQ ID NO: 3381245 - DNA, 25 bp, Homo sapien
gaaatatagggattcatttattact

SEQ ID NO: 3381246 - DNA, 25 bp, Homo sapien
aaatatagggattcatttattactt

SEQ ID NO: 3381247 - DNA, 25 bp, Homo sapien
cattcaatgtggaggagagcagctg

SEQ ID NO: 3381248 - DNA, 25 bp, Homo sapien
caccctggaggtatcttggttactc

SEQ ID NO: 3381249 - DNA, 25 bp, Homo sapien
cctaaaatgctgtgtaaggaactca

SEQ ID NO: 3381250 - DNA, 25 bp, Homo sapien
gctggaacccaatgacaccctggag

SEQ ID NO: 3381251 - DNA, 25 bp, Homo sapien
tgttgatctcctttgacccagtcat

SEQ ID NO: 3381252 - DNA, 25 bp, Homo sapien
gttgatctcctttgacccagtcatt

SEQ ID NO: 3381253 - DNA, 25 bp, Homo sapien
tgtagacacaagtgtaggcaagacc

SEQ ID NO: 3381254 - DNA, 25 bp, Homo sapien
ctgtgtagacacaagtgtaggcaag

SEQ ID NO: 3381255 - DNA, 25 bp, Homo sapien
ggtcatgggccaaagttaaaatcca

SEQ ID NO: 3381256 - DNA, 25 bp, Homo sapien
cacaagtgtaggcaagaccagggaa

SEQ ID NO: 3381257 - DNA, 25 bp, Homo sapien
ttcagagtgaggcactttttctcca

SEQ ID NO: 3381258 - DNA, 25 bp, Homo sapien
attcagagtgaggcactttttctcc

SEQ ID NO: 3381259 - DNA, 25 bp, Homo sapien
ccagggagcagctagagtcgatatt

SEQ ID NO: 3381260 - DNA, 25 bp, Homo sapien
gcagctagagtcgatatttctatat

SEQ ID NO: 3381261 - DNA, 25 bp, Homo sapien
gggagcagctagagtcgatatttct

SEQ ID NO: 3381262 - DNA, 25 bp, Homo sapien
atttccaaccagttgccatggatat

SEQ ID NO: 3381263 - DNA, 25 bp, Homo sapien
tgcagaagcaagtgatatggacagg

SEQ ID NO: 3381264 - DNA, 25 bp, Homo sapien
cttctgcacccactttatgcagaag

SEQ ID NO: 3381265 - DNA, 25 bp, Homo sapien
ctgttcaccgcggtcaaatccgtct

SEQ ID NO: 3381266 - DNA, 25 bp, Homo sapien
aatccgtctcattatcttctgcacc

SEQ ID NO: 3381267 - DNA, 25 bp, Homo sapien
gttcctcatacttcctctcacttga

SEQ ID NO: 3381268 - DNA, 25 bp, Homo sapien
atctggttcctcatacttcctctca

SEQ ID NO: 3381269 - DNA, 25 bp, Homo sapien
ctctcacttgaattggggtttatca

SEQ ID NO: 3381270 - DNA, 25 bp, Homo sapien
cctctcacttgaattggggtttatc

SEQ ID NO: 3381271 - DNA, 25 bp, Homo sapien
tcatgcaggtcatgggatacaaaga

SEQ ID NO: 3381272 - DNA, 25 bp, Homo sapien
gtcatgggatacaaagagaagcagg

SEQ ID NO: 3381273 - DNA, 25 bp, Homo sapien
taggaaagaaagtcatctctgtcac

SEQ ID NO: 3381274 - DNA, 25 bp, Homo sapien
caggtcatgggatacaaagagaagc

SEQ ID NO: 3381275 - DNA, 25 bp, Homo sapien
ctttaaacgctctcctcctttggtg

SEQ ID NO: 3381276 - DNA, 25 bp, Homo sapien
tttaaacgctctcctcctttggtgc

SEQ ID NO: 3381277 - DNA, 25 bp, Homo sapien
taggcactttaatctctcaggtctg

SEQ ID NO: 3381278 - DNA, 25 bp, Homo sapien
catattatactcatcgcacctcggg

SEQ ID NO: 3381279 - DNA, 25 bp, Homo sapien
aggtctgcactcacattgagccgca

SEQ ID NO: 3381280 - DNA, 25 bp, Homo sapien
tctgttcggcaccactgcgttgatt

SEQ ID NO: 3381281 - DNA, 25 bp, Homo sapien
caaggccacagttcatgacatcagt

SEQ ID NO: 3381282 - DNA, 25 bp, Homo sapien
cagccaaggagactgcaatttgact

SEQ ID NO: 3381283 - DNA, 25 bp, Homo sapien
agtgccacgggtccaagcagagagc

SEQ ID NO: 3381284 - DNA, 25 bp, Homo sapien
agcagagagcaggaaagagctcaca

SEQ ID NO: 3381285 - DNA, 25 bp, Homo sapien
ttttccatattaaaatggagatgga

SEQ ID NO: 3381286 - DNA, 25 bp, Homo sapien
ggagaattagattactcgtcctcat

SEQ ID NO: 3381287 - DNA, 25 bp, Homo sapien
tctgacatggcttttcaataatgaa

SEQ ID NO: 3381288 - DNA, 25 bp, Homo sapien
gaatccatttcatcgagattttcca

SEQ ID NO: 3381289 - DNA, 25 bp, Homo sapien
caacctgcgaatttggcagtctgta

SEQ ID NO: 3381290 - DNA, 25 bp, Homo sapien
tatttccccacaacctgcgaatttg

SEQ ID NO: 3381291 - DNA, 25 bp, Homo sapien
agtatttccccacaacctgcgaatt

SEQ ID NO: 3381292 - DNA, 25 bp, Homo sapien
tccccacaacctgcgaatttggcag

SEQ ID NO: 3381293 - DNA, 25 bp, Homo sapien
ctggatgacaagtttttcctccact

SEQ ID NO: 3381294 - DNA, 25 bp, Homo sapien
ctccacttatccaaatggagggcat

SEQ ID NO: 3381295 - DNA, 25 bp, Homo sapien
ttcctccacttatccaaatggaggg

SEQ ID NO: 3381296 - DNA, 25 bp, Homo sapien
atgacaagtttttcctccacttatc

SEQ ID NO: 3381297 - DNA, 25 bp, Homo sapien
tcagtcctgcttagacttcctgtct

SEQ ID NO: 3381298 - DNA, 25 bp, Homo sapien
cagtcctgcttagacttcctgtctt

SEQ ID NO: 3381299 - DNA, 25 bp, Homo sapien
tcctgcttagacttcctgtcttgaa

SEQ ID NO: 3381300 - DNA, 25 bp, Homo sapien
gccttgccctcagactcagtcttgc

SEQ ID NO: 3381301 - DNA, 25 bp, Homo sapien
cattcttcccttggataatttattt

SEQ ID NO: 3381302 - DNA, 25 bp, Homo sapien
tgacagctccctgacttccattctt

SEQ ID NO: 3381303 - DNA, 25 bp, Homo sapien
ttggccctggcatgattgtccctgc

SEQ ID NO: 3381304 - DNA, 25 bp, Homo sapien
caattagccttcgagctctgcaaat

SEQ ID NO: 3381305 - DNA, 25 bp, Homo sapien
tcccaattagccttcgagctctgca

SEQ ID NO: 3381306 - DNA, 25 bp, Homo sapien
ttagccttcgagctctgcaaattct

SEQ ID NO: 3381307 - DNA, 25 bp, Homo sapien
cccactcccaattagccttcgagct

SEQ ID NO: 3381308 - DNA, 25 bp, Homo sapien
aagcccaggtaacaacgtccctcat

SEQ ID NO: 3381309 - DNA, 25 bp, Homo sapien
gaagcccaggtaacaacgtccctca

SEQ ID NO: 3381310 - DNA, 25 bp, Homo sapien
ctgccgccggaagcccaggtaacaa

SEQ ID NO: 3381311 - DNA, 25 bp, Homo sapien
tggcagaactgccgccggaagccca

SEQ ID NO: 3381312 - DNA, 25 bp, Homo sapien
gatttcacgctttgctgaatctgat

SEQ ID NO: 3381313 - DNA, 25 bp, Homo sapien
tgttccaccaaatgagcccatgggt

SEQ ID NO: 3381314 - DNA, 25 bp, Homo sapien
tgcctgcctgcaccggctaagtgta

SEQ ID NO: 3381315 - DNA, 25 bp, Homo sapien
tgtccttgaacaccagagcgcatta

SEQ ID NO: 3381316 - DNA, 25 bp, Homo sapien
agcaggtaaccctggaggaatggac

SEQ ID NO: 3381317 - DNA, 25 bp, Homo sapien
gtttgagcaggtaaccctggaggaa

SEQ ID NO: 3381318 - DNA, 25 bp, Homo sapien
aaccctggaggaatggactcatttc

SEQ ID NO: 3381319 - DNA, 25 bp, Homo sapien
aggtaaccctggaggaatggactca

SEQ ID NO: 3381320 - DNA, 25 bp, Homo sapien
catcggccctcacctgctgtttctg

SEQ ID NO: 3381321 - DNA, 25 bp, Homo sapien
tcacatcggccctcacctgctgttt

SEQ ID NO: 3381322 - DNA, 25 bp, Homo sapien
ggttcacatcggccctcacctgctg

SEQ ID NO: 3381323 - DNA, 25 bp, Homo sapien
tgtttctgccctttcactgcaaagg

SEQ ID NO: 3381324 - DNA, 25 bp, Homo sapien
caaggggccagttctgagatgattc

SEQ ID NO: 3381325 - DNA, 25 bp, Homo sapien
aacaaggggccagttctgagatgat

SEQ ID NO: 3381326 - DNA, 25 bp, Homo sapien
gagatgattcttctgtagacttctc

SEQ ID NO: 3381327 - DNA, 25 bp, Homo sapien
ttaacaaggggccagttctgagatg

SEQ ID NO: 3381328 - DNA, 25 bp, Homo sapien
tcttatctgaggaataagtttcttt

SEQ ID NO: 3381329 - DNA, 25 bp, Homo sapien
aaagcagaattcttatctgaggaat

SEQ ID NO: 3381330 - DNA, 25 bp, Homo sapien
ttgtgtgtgtctatcaaccactggg

SEQ ID NO: 3381331 - DNA, 25 bp, Homo sapien
tttgtgtgtgtctatcaaccactgg

SEQ ID NO: 3381332 - DNA, 25 bp, Homo sapien
tttggcaaggagagccaccggggtc

SEQ ID NO: 3381333 - DNA, 25 bp, Homo sapien
caggccctgcaaggcggctaagggg

SEQ ID NO: 3381334 - DNA, 25 bp, Homo sapien
ctgcaaggcggctaagggggtgttc

SEQ ID NO: 3381335 - DNA, 25 bp, Homo sapien
tctgaaggcaccaggggtgagctcc

SEQ ID NO: 3381336 - DNA, 25 bp, Homo sapien
gctacccagagaacttaacgtgcct

SEQ ID NO: 3381337 - DNA, 25 bp, Homo sapien
gaacgtaggcatgcatgcacgcaca

SEQ ID NO: 3381338 - DNA, 25 bp, Homo sapien
taacgtgcctctcctacacatgaac

SEQ ID NO: 3381339 - DNA, 25 bp, Homo sapien
tctcctacacatgaacgtaggcatg

SEQ ID NO: 3381340 - DNA, 25 bp, Homo sapien
tcttgttgtattcttttggaccagg

SEQ ID NO: 3381341 - DNA, 25 bp, Homo sapien
ggtccttgaacctgagtcacaaaag

SEQ ID NO: 3381342 - DNA, 25 bp, Homo sapien
ctctcttgttgtattcttttggacc

SEQ ID NO: 3381343 - DNA, 25 bp, Homo sapien
atcctggtccttgaacctgagtcac

SEQ ID NO: 3381344 - DNA, 25 bp, Homo sapien
tttccctcgaaacaaactgacgctg

SEQ ID NO: 3381345 - DNA, 25 bp, Homo sapien
actttgggaagataatgataccatg

SEQ ID NO: 3381346 - DNA, 25 bp, Homo sapien
aacccatctttacatcgtgctcttt

SEQ ID NO: 3381347 - DNA, 25 bp, Homo sapien
tgttgggaacctataatttccttca

SEQ ID NO: 3381348 - DNA, 25 bp, Homo sapien
gattctggagttagaccaacagctt

SEQ ID NO: 3381349 - DNA, 25 bp, Homo sapien
tggattctggagttagaccaacagc

SEQ ID NO: 3381350 - DNA, 25 bp, Homo sapien
aatggattctggagttagaccaaca

SEQ ID NO: 3381351 - DNA, 25 bp, Homo sapien
gaatggattctggagttagaccaac

SEQ ID NO: 3381352 - DNA, 25 bp, Homo sapien
ggcaattaatattgaactttctgga

SEQ ID NO: 3381353 - DNA, 25 bp, Homo sapien
catttagctcagtgccatgggcctg

SEQ ID NO: 3381354 - DNA, 25 bp, Homo sapien
gggcctgaaggcaattaatattgaa

SEQ ID NO: 3381355 - DNA, 25 bp, Homo sapien
agtgccatgggcctgaaggcaatta

SEQ ID NO: 3381356 - DNA, 25 bp, Homo sapien
ctccgcttagcctgggctctagtct

SEQ ID NO: 3381357 - DNA, 25 bp, Homo sapien
ccctaagcacatggcaaacctttgt

SEQ ID NO: 3381358 - DNA, 25 bp, Homo sapien
gaaatcctggagcttattcttatcc

SEQ ID NO: 3381359 - DNA, 25 bp, Homo sapien
agtctcccctacagagtgttctgct

SEQ ID NO: 3381360 - DNA, 25 bp, Homo sapien
gctcctgtgtaggatcccttgtagg

SEQ ID NO: 3381361 - DNA, 25 bp, Homo sapien
cgtcaggctccgttaactcattaaa

SEQ ID NO: 3381362 - DNA, 25 bp, Homo sapien
ctgtgaagacttcgctggcagccac

SEQ ID NO: 3381363 - DNA, 25 bp, Homo sapien
ttatgcagattgtcagtccccttcc

SEQ ID NO: 3381364 - DNA, 25 bp, Homo sapien
gggtctgacgaagaaaccgtggcat

SEQ ID NO: 3381365 - DNA, 25 bp, Homo sapien
tgggctctgtcccatcgcctaggag

SEQ ID NO: 3381366 - DNA, 25 bp, Homo sapien
tattttgcgacgttggattcccagg

SEQ ID NO: 3381367 - DNA, 25 bp, Homo sapien
tgtttcctccgaactggcgattagc

SEQ ID NO: 3381368 - DNA, 25 bp, Homo sapien
tccagggtctcgtcggagaaggcca

SEQ ID NO: 3381369 - DNA, 25 bp, Homo sapien
caggatacggctgcagtagccctct

SEQ ID NO: 3381370 - DNA, 25 bp, Homo sapien
ggctgaactcggtgtagccctcgcg

SEQ ID NO: 3381371 - DNA, 25 bp, Homo sapien
gctggttcccggcttgtagaagtcg

SEQ ID NO: 3381372 - DNA, 25 bp, Homo sapien
gaccgggtcccgctctcctaatgcc

SEQ ID NO: 3381373 - DNA, 25 bp, Homo sapien
accgggtcccgctctcctaatgcca

SEQ ID NO: 3381374 - DNA, 25 bp, Homo sapien
cacgagagaataatttggggttctt

SEQ ID NO: 3381375 - DNA, 25 bp, Homo sapien
tctggaaacccaagatactctatct

SEQ ID NO: 3381376 - DNA, 25 bp, Homo sapien
aagctctttgaggaccctgtcccca

SEQ ID NO: 3381377 - DNA, 25 bp, Homo sapien
tgcagctcggagcttaccccaagct

SEQ ID NO: 3381378 - DNA, 25 bp, Homo sapien
tccccactgggaacctgttctggaa

SEQ ID NO: 3381379 - DNA, 25 bp, Homo sapien
tgcctgtcccgcctaggaggctctc

SEQ ID NO: 3381380 - DNA, 25 bp, Homo sapien
gcgtcttcagatcggtgctggtcga

SEQ ID NO: 3381381 - DNA, 25 bp, Homo sapien
tcagatcggtgctggtcgaactgcc

SEQ ID NO: 3381382 - DNA, 25 bp, Homo sapien
gtcaggcgtcttcagatcggtgctg

SEQ ID NO: 3381383 - DNA, 25 bp, Homo sapien
ctgtcccccacccggagagcggctg

SEQ ID NO: 3381384 - DNA, 25 bp, Homo sapien
gctgctgcacggggaaacgatgtct

SEQ ID NO: 3381385 - DNA, 25 bp, Homo sapien
tcccccacccggagagcggctgctg

SEQ ID NO: 3381386 - DNA, 25 bp, Homo sapien
ctgctgcacggggaaacgatgtctg

SEQ ID NO: 3381387 - DNA, 25 bp, Homo sapien
gccagacaggctcgcttcccttcct

SEQ ID NO: 3381388 - DNA, 25 bp, Homo sapien
aggccagacaggctcgcttcccttc

SEQ ID NO: 3381389 - DNA, 25 bp, Homo sapien
ctggcgggagctaaggtgaggccag

SEQ ID NO: 3381390 - DNA, 25 bp, Homo sapien
gcgggagctaaggtgaggccagaca

SEQ ID NO: 3381391 - DNA, 25 bp, Homo sapien
atccctgcttagcaccagagctgac

SEQ ID NO: 3381392 - DNA, 25 bp, Homo sapien
ctgacttatgaaggggcgagggtga

SEQ ID NO: 3381393 - DNA, 25 bp, Homo sapien
tccctgcttagcaccagagctgact

SEQ ID NO: 3381394 - DNA, 25 bp, Homo sapien
caccagagctgacttatgaaggggc

SEQ ID NO: 3381395 - DNA, 25 bp, Homo sapien
tcttcgtggagtacccaggatcccg

SEQ ID NO: 3381396 - DNA, 25 bp, Homo sapien
ccaaggagccggctttgggtagctc

SEQ ID NO: 3381397 - DNA, 25 bp, Homo sapien
gactgttcctcgcaaagtgctcagc

SEQ ID NO: 3381398 - DNA, 25 bp, Homo sapien
cctggctttggtctccggcgtgacc

SEQ ID NO: 3381399 - DNA, 25 bp, Homo sapien
ggctggtcctgcgaattgtcctcct

SEQ ID NO: 3381400 - DNA, 25 bp, Homo sapien
agcacaattattgccgttggaggga

SEQ ID NO: 3381401 - DNA, 25 bp, Homo sapien
gccccttgaggatcctcaacttgtt

SEQ ID NO: 3381402 - DNA, 25 bp, Homo sapien
tgtcctcctgtataagggaagcccc

SEQ ID NO: 3381403 - DNA, 25 bp, Homo sapien
ggtggcttaattataatatcatcag

SEQ ID NO: 3381404 - DNA, 25 bp, Homo sapien
tttcttagagcctaaatatgtcctt

SEQ ID NO: 3381405 - DNA, 25 bp, Homo sapien
ggccaaaggctgacaaggttcttca

SEQ ID NO: 3381406 - DNA, 25 bp, Homo sapien
aatttcttagagcctaaatatgtcc

SEQ ID NO: 3381407 - DNA, 25 bp, Homo sapien
gcagcgtttcagcttccaccatgat

SEQ ID NO: 3381408 - DNA, 25 bp, Homo sapien
cccagtggtctgcactctggacaca

SEQ ID NO: 3381409 - DNA, 25 bp, Homo sapien
gcttccaccatgatgcaactgctct

SEQ ID NO: 3381410 - DNA, 25 bp, Homo sapien
tgcccttttgcctgctgttgctctg

SEQ ID NO: 3381411 - DNA, 25 bp, Homo sapien
ctctgagggcaattaatgtgaatcc

SEQ ID NO: 3381412 - DNA, 25 bp, Homo sapien
tctctctgagggcaattaatgtgaa

SEQ ID NO: 3381413 - DNA, 25 bp, Homo sapien
aatgtgaatcctctgaagtaggagg

SEQ ID NO: 3381414 - DNA, 25 bp, Homo sapien
ttaatgtgaatcctctgaagtagga

SEQ ID NO: 3381415 - DNA, 25 bp, Homo sapien
gcctagccagggctccaagtgctct

SEQ ID NO: 3381416 - DNA, 25 bp, Homo sapien
aggcaaaacagccaggcctagccag

SEQ ID NO: 3381417 - DNA, 25 bp, Homo sapien
cccatggccaaccttgctcagatag

SEQ ID NO: 3381418 - DNA, 25 bp, Homo sapien
gagccccgtgatctgctgagacaaa

SEQ ID NO: 3381419 - DNA, 25 bp, Homo sapien
gcgtggaattaagtctcaccaggcc

SEQ ID NO: 3381420 - DNA, 25 bp, Homo sapien
caccctttcagatacatgccaagag

SEQ ID NO: 3381421 - DNA, 25 bp, Homo sapien
catagaaggacattacggtgagcgt

SEQ ID NO: 3381422 - DNA, 25 bp, Homo sapien
gatacatgccaagaggttctttgcc

SEQ ID NO: 3381423 - DNA, 25 bp, Homo sapien
gggcccactgcagctgagcaaggct

SEQ ID NO: 3381424 - DNA, 25 bp, Homo sapien
ttcagcagacttaaaaggccctgcc

SEQ ID NO: 3381425 - DNA, 25 bp, Homo sapien
ggtagctatggttgcagcttcagca

SEQ ID NO: 3381426 - DNA, 25 bp, Homo sapien
tcccagtaggaaccaacagacatct

SEQ ID NO: 3381427 - DNA, 25 bp, Homo sapien
tggagctgcaatcacttttgacaca

SEQ ID NO: 3381428 - DNA, 25 bp, Homo sapien
ttcagtgttagacctctggaaggct

SEQ ID NO: 3381429 - DNA, 25 bp, Homo sapien
tgttagacctctggaaggctggcca

SEQ ID NO: 3381430 - DNA, 25 bp, Homo sapien
agctgcaatcacttttgacacaagg

SEQ ID NO: 3381431 - DNA, 25 bp, Homo sapien
tctgaagttgaaatgactcaatggc

SEQ ID NO: 3381432 - DNA, 25 bp, Homo sapien
tgaacaaaaccagggactggatcct

SEQ ID NO: 3381433 - DNA, 25 bp, Homo sapien
aatgccctgcaattctaaaatgtga

SEQ ID NO: 3381434 - DNA, 25 bp, Homo sapien
gttgaaatgactcaatggcaccaaa

SEQ ID NO: 3381435 - DNA, 25 bp, Homo sapien
taaagtcgaatgtatgggcaaaatg

SEQ ID NO: 3381436 - DNA, 25 bp, Homo sapien
ctcagcgtgcaggtggttgcagcaa

SEQ ID NO: 3381437 - DNA, 25 bp, Homo sapien
gcaactcaaagcgttctttggataa

SEQ ID NO: 3381438 - DNA, 25 bp, Homo sapien
tgtcttctcagcgtgcaggtggttg

SEQ ID NO: 3381439 - DNA, 25 bp, Homo sapien
gtttatccacaacctcagttgccag

SEQ ID NO: 3381440 - DNA, 25 bp, Homo sapien
aacattgaacagaaggagttatttc

SEQ ID NO: 3381441 - DNA, 25 bp, Homo sapien
ggagttatttctctcgatccagaga

SEQ ID NO: 3381442 - DNA, 25 bp, Homo sapien
gccagatggtaattaaacattgaac

SEQ ID NO: 3381443 - DNA, 25 bp, Homo sapien
cttgcagaatagtgagtccagtgag

SEQ ID NO: 3381444 - DNA, 25 bp, Homo sapien
tccttgggaaggttctgggtgacta

SEQ ID NO: 3381445 - DNA, 25 bp, Homo sapien
tgacgtgagggtaggtttccaaaca

SEQ ID NO: 3381446 - DNA, 25 bp, Homo sapien
tgctgatggtcgcagagaactttgg

SEQ ID NO: 3381447 - DNA, 25 bp, Homo sapien
tgttcccgctggtggtgctatccaa

SEQ ID NO: 3381448 - DNA, 25 bp, Homo sapien
cagggcaattgctcataaactgagt

SEQ ID NO: 3381449 - DNA, 25 bp, Homo sapien
ttcagaatcacgcagcctgttcccg

SEQ ID NO: 3381450 - DNA, 25 bp, Homo sapien
tcctccgtggagtgctttcagtgac

SEQ ID NO: 3381451 - DNA, 25 bp, Homo sapien
tggactgatcccctggagccatgct

SEQ ID NO: 3381452 - DNA, 25 bp, Homo sapien
ctggcatcccgagaacctctggcat

SEQ ID NO: 3381453 - DNA, 25 bp, Homo sapien
tgaatgaaactctgctgccattgga

SEQ ID NO: 3381454 - DNA, 25 bp, Homo sapien
catcccgagaacctctggcatctgg

SEQ ID NO: 3381455 - DNA, 25 bp, Homo sapien
taaccatgagattagataacattga

SEQ ID NO: 3381456 - DNA, 25 bp, Homo sapien
gatgctgatcagctcaagtactttt

SEQ ID NO: 3381457 - DNA, 25 bp, Homo sapien
agcatttgagagtaagtggttgaca

SEQ ID NO: 3381458 - DNA, 25 bp, Homo sapien
tgatatatctaatcctcgaacccta

SEQ ID NO: 3381459 - DNA, 25 bp, Homo sapien
ccttgccttctctggtctagggaca

SEQ ID NO: 3381460 - DNA, 25 bp, Homo sapien
tctggtctagggacaatcccacact

SEQ ID NO: 3381461 - DNA, 25 bp, Homo sapien
ttcgccccaatcacagtcctccttg

SEQ ID NO: 3381462 - DNA, 25 bp, Homo sapien
gcaggtcccctaatgttccttgcct

SEQ ID NO: 3381463 - DNA, 25 bp, Homo sapien
ctccactatgagctgtgctgactct

SEQ ID NO: 3381464 - DNA, 25 bp, Homo sapien
cctcctccactatgagctgtgctga

SEQ ID NO: 3381465 - DNA, 25 bp, Homo sapien
gtgtccctggacccattgcaggtcc

SEQ ID NO: 3381466 - DNA, 25 bp, Homo sapien
ctgagggccctttggacctgatcct

SEQ ID NO: 3381467 - DNA, 25 bp, Homo sapien
gaataatggaataaccaggcttttc

SEQ ID NO: 3381468 - DNA, 25 bp, Homo sapien
ttagaaccagtcaaggaccttcttg

SEQ ID NO: 3381469 - DNA, 25 bp, Homo sapien
gcatctgtattgatcaccaggcagg

SEQ ID NO: 3381470 - DNA, 25 bp, Homo sapien
ttgacaacacaattagcagaagcat

SEQ ID NO: 3381471 - DNA, 25 bp, Homo sapien
tggaccctctaacatttggcactga

SEQ ID NO: 3381472 - DNA, 25 bp, Homo sapien
ctggtggaccctctaacatttggca

SEQ ID NO: 3381473 - DNA, 25 bp, Homo sapien
cctctaacatttggcactgagcttt

SEQ ID NO: 3381474 - DNA, 25 bp, Homo sapien
attccctggtggaccctctaacatt

SEQ ID NO: 3381475 - DNA, 25 bp, Homo sapien
cagcacatattttcgctttaatttg

SEQ ID NO: 3381476 - DNA, 25 bp, Homo sapien
gctttaatttgggattgcacagaca

SEQ ID NO: 3381477 - DNA, 25 bp, Homo sapien
ttttcgctttaatttgggattgcac

SEQ ID NO: 3381478 - DNA, 25 bp, Homo sapien
cacatattttcgctttaatttggga

SEQ ID NO: 3381479 - DNA, 25 bp, Homo sapien
ataatgcgtttttgtacgatgctgg

SEQ ID NO: 3381480 - DNA, 25 bp, Homo sapien
taatgcgtttttgtacgatgctggc

SEQ ID NO: 3381481 - DNA, 25 bp, Homo sapien
aatgcgtttttgtacgatgctggcc

SEQ ID NO: 3381482 - DNA, 25 bp, Homo sapien
tcagtcaccccatcaaatgtggaat

SEQ ID NO: 3381483 - DNA, 25 bp, Homo sapien
cacagcagtctaagatgggtttgtc

SEQ ID NO: 3381484 - DNA, 25 bp, Homo sapien
gcagttccgcagcacagcagtctaa

SEQ ID NO: 3381485 - DNA, 25 bp, Homo sapien
gtcagtcaccccatcaaatgtggaa

SEQ ID NO: 3381486 - DNA, 25 bp, Homo sapien
tgtcttctcggaccaattcccataa

SEQ ID NO: 3381487 - DNA, 25 bp, Homo sapien
gtgtcttctcggaccaattcccata

SEQ ID NO: 3381488 - DNA, 25 bp, Homo sapien
cttttgccgctatttccagcaggtc

SEQ ID NO: 3381489 - DNA, 25 bp, Homo sapien
ggattgaggttaccaaatgcctcac

SEQ ID NO: 3381490 - DNA, 25 bp, Homo sapien
ccagcaggtctgtcatggaattcat

SEQ ID NO: 3381491 - DNA, 25 bp, Homo sapien
aagagcaggtcccttttgccgctat

SEQ ID NO: 3381492 - DNA, 25 bp, Homo sapien
aagtgaggacaagaatggaaccaag

SEQ ID NO: 3381493 - DNA, 25 bp, Homo sapien
taaggcacgaggactagattagaga

SEQ ID NO: 3381494 - DNA, 25 bp, Homo sapien
ggaacgaacacagcctctaagaaat

SEQ ID NO: 3381495 - DNA, 25 bp, Homo sapien
cctctgaggtaaaggaacgtgttct

SEQ ID NO: 3381496 - DNA, 25 bp, Homo sapien
tgctcagccggtcccattcccgtgg

SEQ ID NO: 3381497 - DNA, 25 bp, Homo sapien
ttgagtaagcagttttccccgacag

SEQ ID NO: 3381498 - DNA, 25 bp, Homo sapien
tcagccggtcccattcccgtggagc

SEQ ID NO: 3381499 - DNA, 25 bp, Homo sapien
agtaagcagttttccccgacagtgc

SEQ ID NO: 3381500 - DNA, 25 bp, Homo sapien
gtgcctcgaacagacattgcaggag

SEQ ID NO: 3381501 - DNA, 25 bp, Homo sapien
tgcctcgaacagacattgcaggagc

SEQ ID NO: 3381502 - DNA, 25 bp, Homo sapien
agtgcctcgaacagacattgcagga

SEQ ID NO: 3381503 - DNA, 25 bp, Homo sapien
ttgttaatggtctttgatattcccc

SEQ ID NO: 3381504 - DNA, 25 bp, Homo sapien
tagctttggcagaattttgtgtgca

SEQ ID NO: 3381505 - DNA, 25 bp, Homo sapien
gcaaattcctgggtgaccatacata

SEQ ID NO: 3381506 - DNA, 25 bp, Homo sapien
cagaaactccacttgtgattataaa

SEQ ID NO: 3381507 - DNA, 25 bp, Homo sapien
cccagctttgattcctctctaactg

SEQ ID NO: 3381508 - DNA, 25 bp, Homo sapien
tcctctctaactgcttgttgctcag

SEQ ID NO: 3381509 - DNA, 25 bp, Homo sapien
cttctcccagctttgattcctctct

SEQ ID NO: 3381510 - DNA, 25 bp, Homo sapien
tctcccagctttgattcctctctaa

SEQ ID NO: 3381511 - DNA, 25 bp, Homo sapien
gactgacagcctttcaggttctcgg

SEQ ID NO: 3381512 - DNA, 25 bp, Homo sapien
gaataagaccccacataagttgagc

SEQ ID NO: 3381513 - DNA, 25 bp, Homo sapien
ccaagaatccttgcaaattgggagg

SEQ ID NO: 3381514 - DNA, 25 bp, Homo sapien
tctggcacaaaaggtggtatgaggt

SEQ ID NO: 3381515 - DNA, 25 bp, Homo sapien
cgggtttgcccaattgcttgttcat

SEQ ID NO: 3381516 - DNA, 25 bp, Homo sapien
gtttgcccaattgcttgttcattat

SEQ ID NO: 3381517 - DNA, 25 bp, Homo sapien
gggtttgcccaattgcttgttcatt

SEQ ID NO: 3381518 - DNA, 25 bp, Homo sapien
gcgggtttgcccaattgcttgttca

SEQ ID NO: 3381519 - DNA, 25 bp, Homo sapien
gctgagggcagccacggcccacccc

SEQ ID NO: 3381520 - DNA, 25 bp, Homo sapien
gggcagccacggcccaccccaggca

SEQ ID NO: 3381521 - DNA, 25 bp, Homo sapien
caccccaggcagaggacatcaccat

SEQ ID NO: 3381522 - DNA, 25 bp, Homo sapien
ccaccccaggcagaggacatcacca

SEQ ID NO: 3381523 - DNA, 25 bp, Homo sapien
tccagggccacatcaagaacatagg

SEQ ID NO: 3381524 - DNA, 25 bp, Homo sapien
catcaagaacataggtgtaaagcca

SEQ ID NO: 3381525 - DNA, 25 bp, Homo sapien
gccacatcaagaacataggtgtaaa

SEQ ID NO: 3381526 - DNA, 25 bp, Homo sapien
cagggccacatcaagaacataggtg

SEQ ID NO: 3381527 - DNA, 25 bp, Homo sapien
gagatcagacaagattgggtgcatt

SEQ ID NO: 3381528 - DNA, 25 bp, Homo sapien
ctggcagactcccatccaagtgcta

SEQ ID NO: 3381529 - DNA, 25 bp, Homo sapien
aagtgctaaccaggcttgaccctgc

SEQ ID NO: 3381530 - DNA, 25 bp, Homo sapien
tcagacaagattgggtgcattcagg

SEQ ID NO: 3381531 - DNA, 25 bp, Homo sapien
tggagtgggatcctccgatgatcgc

SEQ ID NO: 3381532 - DNA, 25 bp, Homo sapien
cctccattttcacgggtgagcccaa

SEQ ID NO: 3381533 - DNA, 25 bp, Homo sapien
tattcccacagtacataattcttgg

SEQ ID NO: 3381534 - DNA, 25 bp, Homo sapien
caacttgtttgacgccttcgctggc

SEQ ID NO: 3381535 - DNA, 25 bp, Homo sapien
gagactagagacaaggcatcccaac

SEQ ID NO: 3381536 - DNA, 25 bp, Homo sapien
gcatcccaacaatatggccacagca

SEQ ID NO: 3381537 - DNA, 25 bp, Homo sapien
gagacaaggcatcccaacaatatgg

SEQ ID NO: 3381538 - DNA, 25 bp, Homo sapien
tttgactctcaggagactagagaca

SEQ ID NO: 3381539 - DNA, 25 bp, Homo sapien
tggctaaagctgcactgccatgtct

SEQ ID NO: 3381540 - DNA, 25 bp, Homo sapien
ttttgtgggtagtgatggctaaagc

SEQ ID NO: 3381541 - DNA, 25 bp, Homo sapien
tctcaggctggacaggcttttgtgg

SEQ ID NO: 3381542 - DNA, 25 bp, Homo sapien
actgagccacgtggctcttcttcca

SEQ ID NO: 3381543 - DNA, 25 bp, Homo sapien
ggaacactgcgggcctcagctgtgc

SEQ ID NO: 3381544 - DNA, 25 bp, Homo sapien
atttatagcaggagtcagagtgacc

SEQ ID NO: 3381545 - DNA, 25 bp, Homo sapien
gcctccaatttagggtctgtgggca

SEQ ID NO: 3381546 - DNA, 25 bp, Homo sapien
tctagtccaaactgattcctcaggg

SEQ ID NO: 3381547 - DNA, 25 bp, Homo sapien
aagtaaatgtttcagtacactggag

SEQ ID NO: 3381548 - DNA, 25 bp, Homo sapien
aaagtccagctctaaactgtctcag

SEQ ID NO: 3381549 - DNA, 25 bp, Homo sapien
ctgtctcagagacacaatctggtga

SEQ ID NO: 3381550 - DNA, 25 bp, Homo sapien
tacaccagagtgacgttttcagggc

SEQ ID NO: 3381551 - DNA, 25 bp, Homo sapien
agagaagcaggctcgtggccacctg

SEQ ID NO: 3381552 - DNA, 25 bp, Homo sapien
tagcctcggactcattgggaaaaca

SEQ ID NO: 3381553 - DNA, 25 bp, Homo sapien
cctggaagacaaggaaacatcctca

SEQ ID NO: 3381554 - DNA, 25 bp, Homo sapien
gatacttgactcttagcacacttgg

SEQ ID NO: 3381555 - DNA, 25 bp, Homo sapien
gtccccacatagagtagatcaaaga

SEQ ID NO: 3381556 - DNA, 25 bp, Homo sapien
gagaaccctccttattcgtctggtc

SEQ ID NO: 3381557 - DNA, 25 bp, Homo sapien
tttgcatatgtggaagggatctcag

SEQ ID NO: 3381558 - DNA, 25 bp, Homo sapien
cctaaagagggcttaacaggcctgt

SEQ ID NO: 3381559 - DNA, 25 bp, Homo sapien
gagaaatagtcctgagatgtccctt

SEQ ID NO: 3381560 - DNA, 25 bp, Homo sapien
tatctgtctgtagccccattgaggg

SEQ ID NO: 3381561 - DNA, 25 bp, Homo sapien
cggtggcaccccttttatggatgga

SEQ ID NO: 3381562 - DNA, 25 bp, Homo sapien
tatggatggatccagaagccaaccc

SEQ ID NO: 3381563 - DNA, 25 bp, Homo sapien
agcctcccaaagtgtttgtgacttc

SEQ ID NO: 3381564 - DNA, 25 bp, Homo sapien
ccaaagtgtttgtgacttctaaaca

SEQ ID NO: 3381565 - DNA, 25 bp, Homo sapien
tcccaaagtgtttgtgacttctaaa

SEQ ID NO: 3381566 - DNA, 25 bp, Homo sapien
cctcccaaagtgtttgtgacttcta

SEQ ID NO: 3381567 - DNA, 25 bp, Homo sapien
ggctgatggccacttgagggacagt

SEQ ID NO: 3381568 - DNA, 25 bp, Homo sapien
gggctgatggccacttgagggacag

SEQ ID NO: 3381569 - DNA, 25 bp, Homo sapien
ctgttgttttcttatcttgcctggc

SEQ ID NO: 3381570 - DNA, 25 bp, Homo sapien
ctggaggggcaaataggcctgttgt

SEQ ID NO: 3381571 - DNA, 25 bp, Homo sapien
caggaattcctgggtggagaatgac

SEQ ID NO: 3381572 - DNA, 25 bp, Homo sapien
tggctggctctcaggaattcctggg

SEQ ID NO: 3381573 - DNA, 25 bp, Homo sapien
caagattggggtggcgtggcagtgc

SEQ ID NO: 3381574 - DNA, 25 bp, Homo sapien
ggcagtgcgagtgaggcttgggtcc

SEQ ID NO: 3381575 - DNA, 25 bp, Homo sapien
tgaggttcggcatggggtaccttca

SEQ ID NO: 3381576 - DNA, 25 bp, Homo sapien
gttcggcatggggtaccttcaagat

SEQ ID NO: 3381577 - DNA, 25 bp, Homo sapien
ctgtgtgatgggcaaggtctcaccg

SEQ ID NO: 3381578 - DNA, 25 bp, Homo sapien
gtctcaccgtgtggccctgccatga

SEQ ID NO: 3381579 - DNA, 25 bp, Homo sapien
ccgtgtggccctgccatgagccctc

SEQ ID NO: 3381580 - DNA, 25 bp, Homo sapien
tgtgtgatgggcaaggtctcaccgt

SEQ ID NO: 3381581 - DNA, 25 bp, Homo sapien
ggcacttctgagagtatcacagccc

SEQ ID NO: 3381582 - DNA, 25 bp, Homo sapien
agtggccaccactgtcaaaaggctc

SEQ ID NO: 3381583 - DNA, 25 bp, Homo sapien
tcagcaggggtccttctgtaaactg

SEQ ID NO: 3381584 - DNA, 25 bp, Homo sapien
ccactgtcaaaaggctctgtgggaa

SEQ ID NO: 3381585 - DNA, 25 bp, Homo sapien
aagtgaacgtttcctcggtgactgc

SEQ ID NO: 3381586 - DNA, 25 bp, Homo sapien
tcttgctgatgttaggtgtccctct

SEQ ID NO: 3381587 - DNA, 25 bp, Homo sapien
tgccacttgtaaagggacgatgtct

SEQ ID NO: 3381588 - DNA, 25 bp, Homo sapien
tgtccctctgacacacaagtgaacg

SEQ ID NO: 3381589 - DNA, 25 bp, Homo sapien
ctaacgacaagacccagtaagtgcc

SEQ ID NO: 3381590 - DNA, 25 bp, Homo sapien
gacaagacccagtaagtgccagcag

SEQ ID NO: 3381591 - DNA, 25 bp, Homo sapien
aacgacaagacccagtaagtgccag

SEQ ID NO: 3381592 - DNA, 25 bp, Homo sapien
tgtgtggggttaatggagccaaaga

SEQ ID NO: 3381593 - DNA, 25 bp, Homo sapien
tacaatgccttttggaatggacatc

SEQ ID NO: 3381594 - DNA, 25 bp, Homo sapien
catctgtcacgtctgttctgggtga

SEQ ID NO: 3381595 - DNA, 25 bp, Homo sapien
tgccctggtattaaaagcagcccac

SEQ ID NO: 3381596 - DNA, 25 bp, Homo sapien
gtctttcaataaagcaggtgccact

SEQ ID NO: 3381597 - DNA, 25 bp, Homo sapien
tccctgttggaatgattcttcccat

SEQ ID NO: 3381598 - DNA, 25 bp, Homo sapien
ctccctgttggaatgattcttccca

SEQ ID NO: 3381599 - DNA, 25 bp, Homo sapien
tatcaaatgtatagtttaaagtgtt

SEQ ID NO: 3381600 - DNA, 25 bp, Homo sapien
tcaagttggttaagaatatcaaatg

SEQ ID NO: 3381601 - DNA, 25 bp, Homo sapien
tggttaagaatatcaaatgtatagt

SEQ ID NO: 3381602 - DNA, 25 bp, Homo sapien
gaacagacaggccaacatgttcatc

SEQ ID NO: 3381603 - DNA, 25 bp, Homo sapien
tcataaactgcttgacacagacagg

SEQ ID NO: 3381604 - DNA, 25 bp, Homo sapien
ataaactgcttgacacagacaggat

SEQ ID NO: 3381605 - DNA, 25 bp, Homo sapien
cataaactgcttgacacagacagga

SEQ ID NO: 3381606 - DNA, 25 bp, Homo sapien
ttacagcatggtgtgtatctttcca

SEQ ID NO: 3381607 - DNA, 25 bp, Homo sapien
aatatcatatcacgggaaactttcc

SEQ ID NO: 3381608 - DNA, 25 bp, Homo sapien
gaaactttccatcagtacgtactac

SEQ ID NO: 3381609 - DNA, 25 bp, Homo sapien
gatcttctacgatgcacatgtaagg

SEQ ID NO: 3381610 - DNA, 25 bp, Homo sapien
tttggctttgatgacggtgaggacc

SEQ ID NO: 3381611 - DNA, 25 bp, Homo sapien
tgatgacggtgaggacctcatcact

SEQ ID NO: 3381612 - DNA, 25 bp, Homo sapien
ggccattgggctttggctttgatga

SEQ ID NO: 3381613 - DNA, 25 bp, Homo sapien
aggctggccattgggctttggcttt

SEQ ID NO: 3381614 - DNA, 25 bp, Homo sapien
tggattcccactctgcgcaggtctc

SEQ ID NO: 3381615 - DNA, 25 bp, Homo sapien
agatacatagcgctggattcccact

SEQ ID NO: 3381616 - DNA, 25 bp, Homo sapien
gaggcaagtacatagcgttggattc

SEQ ID NO: 3381617 - DNA, 25 bp, Homo sapien
ttcggctgaggcaagtacatagcgt

SEQ ID NO: 3381618 - DNA, 25 bp, Homo sapien
gcgtcccagggaatcaggtcttgca

SEQ ID NO: 3381619 - DNA, 25 bp, Homo sapien
taaatggcgcgttctgtccacggaa

SEQ ID NO: 3381620 - DNA, 25 bp, Homo sapien
cgttccagtcgggactagggcccat

SEQ ID NO: 3381621 - DNA, 25 bp, Homo sapien
gatcttctgcagataagcctacgtt

SEQ ID NO: 3381622 - DNA, 25 bp, Homo sapien
tacttgagtgatggacccaccctct

SEQ ID NO: 3381623 - DNA, 25 bp, Homo sapien
tctgggtcatagaaaggactctgag

SEQ ID NO: 3381624 - DNA, 25 bp, Homo sapien
gactctgaggatggtccaggctggt

SEQ ID NO: 3381625 - DNA, 25 bp, Homo sapien
cttccgtgcgattctctcgatgaca

SEQ ID NO: 3381626 - DNA, 25 bp, Homo sapien
gagcagaagggtgtacaatctccct

SEQ ID NO: 3381627 - DNA, 25 bp, Homo sapien
ttgcatgttagaaacctggggaggc

SEQ ID NO: 3381628 - DNA, 25 bp, Homo sapien
ctggcactcctaccgggaaaggtcg

SEQ ID NO: 3381629 - DNA, 25 bp, Homo sapien
gccagtgactctatgattctagagc

SEQ ID NO: 3381630 - DNA, 25 bp, Homo sapien
tcatcgacattgtcaggtacaatat

SEQ ID NO: 3381631 - DNA, 25 bp, Homo sapien
caatatcatcgacattgtcaggtac

SEQ ID NO: 3381632 - DNA, 25 bp, Homo sapien
tacaatatcatcgacattgtcaggt

SEQ ID NO: 3381633 - DNA, 25 bp, Homo sapien
agctacaatatcatcgacattgtca

SEQ ID NO: 3381634 - DNA, 25 bp, Homo sapien
tggaaagagtgtttgacatgttttc

SEQ ID NO: 3381635 - DNA, 25 bp, Homo sapien
ggaaagagtgtttgacatgttttcc

SEQ ID NO: 3381636 - DNA, 25 bp, Homo sapien
ctggaaagagtgtttgacatgtttt

SEQ ID NO: 3381637 - DNA, 25 bp, Homo sapien
gcgctgtcgcatcctcttgcctttg

SEQ ID NO: 3381638 - DNA, 25 bp, Homo sapien
gtggaggagctgcaggcggaccatg

SEQ ID NO: 3381639 - DNA, 25 bp, Homo sapien
ccagttggagtagatgcaggtttca

SEQ ID NO: 3381640 - DNA, 25 bp, Homo sapien
cagcatgcgctgtcgcatcctcttg

SEQ ID NO: 3381641 - DNA, 25 bp, Homo sapien
atgctgcagggcgaccaggtgatcc

SEQ ID NO: 3381642 - DNA, 25 bp, Homo sapien
tctccgtttcctcagtgggcagcgt

SEQ ID NO: 3381643 - DNA, 25 bp, Homo sapien
gatccactcggacatggtgcaggtg

SEQ ID NO: 3381644 - DNA, 25 bp, Homo sapien
cgtcctccgggaactgcttcacata

SEQ ID NO: 3381645 - DNA, 25 bp, Homo sapien
ttcttcatgcccatgccgcaggtgg

SEQ ID NO: 3381646 - DNA, 25 bp, Homo sapien
ctcggctttgcacatggagccatct

SEQ ID NO: 3381647 - DNA, 25 bp, Homo sapien
tctgcctgtgatgtctcggctttgc

SEQ ID NO: 3381648 - DNA, 25 bp, Homo sapien
gggttcatcttgatcatgcggtgcc

SEQ ID NO: 3381649 - DNA, 25 bp, Homo sapien
ttccacaccgagtcccctgctttgg

SEQ ID NO: 3381650 - DNA, 25 bp, Homo sapien
gaccccacagtgttccacaccgagt

SEQ ID NO: 3381651 - DNA, 25 bp, Homo sapien
ctgaccccacagtgttccacaccga

SEQ ID NO: 3381652 - DNA, 25 bp, Homo sapien
acagtgttccacaccgagtcccctg

SEQ ID NO: 3381653 - DNA, 25 bp, Homo sapien
tccaagttctgccagagacttgagc

SEQ ID NO: 3381654 - DNA, 25 bp, Homo sapien
gcattcagggagcatgcacttctcc

SEQ ID NO: 3381655 - DNA, 25 bp, Homo sapien
tccgctgtcgggttcgcatgccctt

SEQ ID NO: 3381656 - DNA, 25 bp, Homo sapien
ttcccgcaggtcacgctgcagtcac

SEQ ID NO: 3381657 - DNA, 25 bp, Homo sapien
ctcaggaacatagaagtgatgggcc

SEQ ID NO: 3381658 - DNA, 25 bp, Homo sapien
agcactggctggttcggggctccct

SEQ ID NO: 3381659 - DNA, 25 bp, Homo sapien
ggaacatagaagtgatgggccttga

SEQ ID NO: 3381660 - DNA, 25 bp, Homo sapien
ctggactcaggaacatagaagtgat

SEQ ID NO: 3381661 - DNA, 25 bp, Homo sapien
gacttgttacattccgaccactggg

SEQ ID NO: 3381662 - DNA, 25 bp, Homo sapien
tcgaaggcattttcggatgcggcac

SEQ ID NO: 3381663 - DNA, 25 bp, Homo sapien
tcatccgggttcgaatcacgtggcc

SEQ ID NO: 3381664 - DNA, 25 bp, Homo sapien
actgggaccactcggtgagctcaca

SEQ ID NO: 3381665 - DNA, 25 bp, Homo sapien
tctttgcagctggtaaactgggagc

SEQ ID NO: 3381666 - DNA, 25 bp, Homo sapien
tgaattccacctccgcacagtttgg

SEQ ID NO: 3381667 - DNA, 25 bp, Homo sapien
gtgcattctgaccaggccgtccatg

SEQ ID NO: 3381668 - DNA, 25 bp, Homo sapien
tgaacattgcatgctctgatctcct

SEQ ID NO: 3381669 - DNA, 25 bp, Homo sapien
gcttaaagacatgaaagacccagtg

SEQ ID NO: 3381670 - DNA, 25 bp, Homo sapien
tccatgtggagtaggtcaaagtctc

SEQ ID NO: 3381671 - DNA, 25 bp, Homo sapien
tctggcatccacaagactactgggc

SEQ ID NO: 3381672 - DNA, 25 bp, Homo sapien
tctggaatctagagtgcagccctgg

SEQ ID NO: 3381673 - DNA, 25 bp, Homo sapien
gctgttggacctaaaatgtggatgt

SEQ ID NO: 3381674 - DNA, 25 bp, Homo sapien
tctggttgggaaatctctctctgaa

SEQ ID NO: 3381675 - DNA, 25 bp, Homo sapien
tctttactgtctcaagtggaagtcc

SEQ ID NO: 3381676 - DNA, 25 bp, Homo sapien
cagtgagtgacccaatgtctggttg

SEQ ID NO: 3381677 - DNA, 25 bp, Homo sapien
tctggagagctatagttgtgtgaga

SEQ ID NO: 3381678 - DNA, 25 bp, Homo sapien
ctggagagctatagttgtgtgagaa

SEQ ID NO: 3381679 - DNA, 25 bp, Homo sapien
gagaatgtgtaatgtatccttactt

SEQ ID NO: 3381680 - DNA, 25 bp, Homo sapien
gttgtgtgagaatgtgtaatgtatc

SEQ ID NO: 3381681 - DNA, 25 bp, Homo sapien
gaagtacaagaagcatgttgccagc

SEQ ID NO: 3381682 - DNA, 25 bp, Homo sapien
cccttgggaacaattctgtgagaac

SEQ ID NO: 3381683 - DNA, 25 bp, Homo sapien
catgagggatatgcctgcatgaccc

SEQ ID NO: 3381684 - DNA, 25 bp, Homo sapien
ttttggtgggaacaaactcaagcca

SEQ ID NO: 3381685 - DNA, 25 bp, Homo sapien
tacaacaggataccatcaagaccca

SEQ ID NO: 3381686 - DNA, 25 bp, Homo sapien
ctagtaggagagagtttgtgtcgaa

SEQ ID NO: 3381687 - DNA, 25 bp, Homo sapien
aattgtctaaattgtggaggtggag

SEQ ID NO: 3381688 - DNA, 25 bp, Homo sapien
gacccacgtgtaagaattgtctaaa

SEQ ID NO: 3381689 - DNA, 25 bp, Homo sapien
aagtgtgtacaacagtcccatgaag

SEQ ID NO: 3381690 - DNA, 25 bp, Homo sapien
gaagtttatagagcatacccttgta

SEQ ID NO: 3381691 - DNA, 25 bp, Homo sapien
ctaagtggtattgcacagttgtcac

SEQ ID NO: 3381692 - DNA, 25 bp, Homo sapien
gctggtctggtcttggttgtaccca

SEQ ID NO: 3381693 - DNA, 25 bp, Homo sapien
ggaattgatctttccagggtcagag

SEQ ID NO: 3381694 - DNA, 25 bp, Homo sapien
tctatgtggtcaaatatttggactc

SEQ ID NO: 3381695 - DNA, 25 bp, Homo sapien
gtgttactactcctactcttggaga

SEQ ID NO: 3381696 - DNA, 25 bp, Homo sapien
tcacagccacgctaagggtaaaaag

SEQ ID NO: 3381697 - DNA, 25 bp, Homo sapien
tccagaaggttcatcctcgttatct

SEQ ID NO: 3381698 - DNA, 25 bp, Homo sapien
ggaagttacacaattgcatgtacat

SEQ ID NO: 3381699 - DNA, 25 bp, Homo sapien
aaggaagttacacaattgcatgtac

SEQ ID NO: 3381700 - DNA, 25 bp, Homo sapien
tgtttccaccaatactcaatttgga

SEQ ID NO: 3381701 - DNA, 25 bp, Homo sapien
ttggcttgggctctgatgcttgggc

SEQ ID NO: 3381702 - DNA, 25 bp, Homo sapien
cctgacagcattggcttgggctctg

SEQ ID NO: 3381703 - DNA, 25 bp, Homo sapien
gcttgggctctgatgcttgggccat

SEQ ID NO: 3381704 - DNA, 25 bp, Homo sapien
ccctgacagcattggcttgggctct

SEQ ID NO: 3381705 - DNA, 25 bp, Homo sapien
ctaggtggtagttcccacagcttcc

SEQ ID NO: 3381706 - DNA, 25 bp, Homo sapien
agctgctgtcctggtgacttccaac

SEQ ID NO: 3381707 - DNA, 25 bp, Homo sapien
ggtgacttccaaccccagacttcat

SEQ ID NO: 3381708 - DNA, 25 bp, Homo sapien
cttcctccagaggatccttcaggct

SEQ ID NO: 3381709 - DNA, 25 bp, Homo sapien
gctggcccagctagggtttatcaaa

SEQ ID NO: 3381710 - DNA, 25 bp, Homo sapien
agccttgctattctctccggctgaa

SEQ ID NO: 3381711 - DNA, 25 bp, Homo sapien
tatcaaatcggaacagaattttggc

SEQ ID NO: 3381712 - DNA, 25 bp, Homo sapien
gaatcatgctgagtgagctggccca

SEQ ID NO: 3381713 - DNA, 25 bp, Homo sapien
tccctcctgctgagaacgagtgctg

SEQ ID NO: 3381714 - DNA, 25 bp, Homo sapien
gcccctggcatcaggcccgtggaga

SEQ ID NO: 3381715 - DNA, 25 bp, Homo sapien
ctgagaacgagtgctgcccctggca

SEQ ID NO: 3381716 - DNA, 25 bp, Homo sapien
ctcctgctgagaacgagtgctgccc

SEQ ID NO: 3381717 - DNA, 25 bp, Homo sapien
ttttgctgctgctgatgtcagtcag

SEQ ID NO: 3381718 - DNA, 25 bp, Homo sapien
cttttgctgctgctgatgtcagtca

SEQ ID NO: 3381719 - DNA, 25 bp, Homo sapien
tttgctgctgctgatgtcagtcagt

SEQ ID NO: 3381720 - DNA, 25 bp, Homo sapien
ttgctgctgctgatgtcagtcagtc

SEQ ID NO: 3381721 - DNA, 25 bp, Homo sapien
aaacttcacattgggcttgatatga

SEQ ID NO: 3381722 - DNA, 25 bp, Homo sapien
ctaaacttcacattgggcttgatat

SEQ ID NO: 3381723 - DNA, 25 bp, Homo sapien
taaacttcacattgggcttgatatg

SEQ ID NO: 3381724 - DNA, 25 bp, Homo sapien
aacttcacattgggcttgatatgac

SEQ ID NO: 3381725 - DNA, 25 bp, Homo sapien
attcccactatacaatctttttcat

SEQ ID NO: 3381726 - DNA, 25 bp, Homo sapien
ttttcatgtttcttcttctccaacc

SEQ ID NO: 3381727 - DNA, 25 bp, Homo sapien
tttttcatgtttcttcttctccaac

SEQ ID NO: 3381728 - DNA, 25 bp, Homo sapien
ccactatacaatctttttcatgttt

SEQ ID NO: 3381729 - DNA, 25 bp, Homo sapien
cataggtattgtgaccttgattctc

SEQ ID NO: 3381730 - DNA, 25 bp, Homo sapien
gtctccattcttgattgggctctca

SEQ ID NO: 3381731 - DNA, 25 bp, Homo sapien
tccattcttgattgggctctcatag

SEQ ID NO: 3381732 - DNA, 25 bp, Homo sapien
gctctcataggtattgtgaccttga

SEQ ID NO: 3381733 - DNA, 25 bp, Homo sapien
tagccacgatggctaccaggaggcc

SEQ ID NO: 3381734 - DNA, 25 bp, Homo sapien
ctgcttagccacgatggctaccagg

SEQ ID NO: 3381735 - DNA, 25 bp, Homo sapien
cttagccacgatggctaccaggagg

SEQ ID NO: 3381736 - DNA, 25 bp, Homo sapien
gcttagccacgatggctaccaggag

SEQ ID NO: 3381737 - DNA, 25 bp, Homo sapien
gcatgcctcgcagggtcggccagaa

SEQ ID NO: 3381738 - DNA, 25 bp, Homo sapien
gcctcgcagggtcggccagaaaatg

SEQ ID NO: 3381739 - DNA, 25 bp, Homo sapien
ttgaggcagtccagggtggcatggc

SEQ ID NO: 3381740 - DNA, 25 bp, Homo sapien
cagggtcggccagaaaatgctgctg

SEQ ID NO: 3381741 - DNA, 25 bp, Homo sapien
ttttttgtaggcttcagacacacga

SEQ ID NO: 3381742 - DNA, 25 bp, Homo sapien
caaacttttttgtaggcttcagaca

SEQ ID NO: 3381743 - DNA, 25 bp, Homo sapien
aacttttttgtaggcttcagacaca

SEQ ID NO: 3381744 - DNA, 25 bp, Homo sapien
cagccaacctcatgagccaggtgcc

SEQ ID NO: 3381745 - DNA, 25 bp, Homo sapien
cttcttccagtagtgggtcttggct

SEQ ID NO: 3381746 - DNA, 25 bp, Homo sapien
ctcggccagtttccgtagcctcgtg

SEQ ID NO: 3381747 - DNA, 25 bp, Homo sapien
cagtagtgggtcttggctttctcct

SEQ ID NO: 3381748 - DNA, 25 bp, Homo sapien
tcttctccacgtttttctcggccag

SEQ ID NO: 3381749 - DNA, 25 bp, Homo sapien
tccttagataaggtctgtgaaagac

SEQ ID NO: 3381750 - DNA, 25 bp, Homo sapien
tatttgtctaccagctagggttcag

SEQ ID NO: 3381751 - DNA, 25 bp, Homo sapien
gagtataaggagattgataccttgt

SEQ ID NO: 3381752 - DNA, 25 bp, Homo sapien
gaggtagtctgattttttagctaag

SEQ ID NO: 3381753 - DNA, 25 bp, Homo sapien
aatcatttgaacccgaagggtggag

SEQ ID NO: 3381754 - DNA, 25 bp, Homo sapien
ctgagattgtgccactgcactccag

SEQ ID NO: 3381755 - DNA, 25 bp, Homo sapien
gttgcagtgagctgagattgtgcca

SEQ ID NO: 3381756 - DNA, 25 bp, Homo sapien
tcttagagtagtaagagattaagcc

SEQ ID NO: 3381757 - DNA, 25 bp, Homo sapien
taagccaaatttgccttcactgtgt

SEQ ID NO: 3381758 - DNA, 25 bp, Homo sapien
taaatggacactttactgggaaaca

SEQ ID NO: 3381759 - DNA, 25 bp, Homo sapien
tactgctaggtttaccagttttaga

SEQ ID NO: 3381760 - DNA, 25 bp, Homo sapien
cagttcaacaccttgcctcttcagt

SEQ ID NO: 3381761 - DNA, 25 bp, Homo sapien
gttcaacaccttgcctcttcagtga

SEQ ID NO: 3381762 - DNA, 25 bp, Homo sapien
agttcaacaccttgcctcttcagtg

SEQ ID NO: 3381763 - DNA, 25 bp, Homo sapien
ttcaacaccttgcctcttcagtgac

SEQ ID NO: 3381764 - DNA, 25 bp, Homo sapien
taggtcattctcaagctttgcccat

SEQ ID NO: 3381765 - DNA, 25 bp, Homo sapien
taattattaaggagagcgacaacaa

SEQ ID NO: 3381766 - DNA, 25 bp, Homo sapien
catgaacgagtactacaggtaagtg

SEQ ID NO: 3381767 - DNA, 25 bp, Homo sapien
aaagagcatcctgctcatgaacgag

SEQ ID NO: 3381768 - DNA, 25 bp, Homo sapien
tacacgtatctgtttgagactttgc

SEQ ID NO: 3381769 - DNA, 25 bp, Homo sapien
gctattgtgaacgtagatgtacacg

SEQ ID NO: 3381770 - DNA, 25 bp, Homo sapien
tatgagaaagctgcgtatatgagca

SEQ ID NO: 3381771 - DNA, 25 bp, Homo sapien
gatagtagcaatgttaatgggcacg

SEQ ID NO: 3381772 - DNA, 25 bp, Homo sapien
tgtgagtgattctgtcaagaaaaaa

SEQ ID NO: 3381773 - DNA, 25 bp, Homo sapien
tgtaaatgggattagattacttctt

SEQ ID NO: 3381774 - DNA, 25 bp, Homo sapien
gggattagattacttcttcaatttc

SEQ ID NO: 3381775 - DNA, 25 bp, Homo sapien
aaatgggattagattacttcttcaa

SEQ ID NO: 3381776 - DNA, 25 bp, Homo sapien
tgggaacacgatatagattgacctg

SEQ ID NO: 3381777 - DNA, 25 bp, Homo sapien
tataaccagaaaccatgacggcggc

SEQ ID NO: 3381778 - DNA, 25 bp, Homo sapien
tgacggcggctgagaacgtatgcta

SEQ ID NO: 3381779 - DNA, 25 bp, Homo sapien
tcaaacactggaccgggatgcgatg

SEQ ID NO: 3381780 - DNA, 25 bp, Homo sapien
tgttgtgtaaaaaccatacggtcca

SEQ ID NO: 3381781 - DNA, 25 bp, Homo sapien
aaggtctcttaacttgagcatgcag

SEQ ID NO: 3381782 - DNA, 25 bp, Homo sapien
caaggaccgcgataaagcgctttag

SEQ ID NO: 3381783 - DNA, 25 bp, Homo sapien
tgtgggccttcattcggctatacag

SEQ ID NO: 3381784 - DNA, 25 bp, Homo sapien
ctaggccgcttgcgtctgggcctgg

SEQ ID NO: 3381785 - DNA, 25 bp, Homo sapien
ggccgcttgcgtctgggcctggcag

SEQ ID NO: 3381786 - DNA, 25 bp, Homo sapien
ctgggcctggcagaagggaccgggt

SEQ ID NO: 3381787 - DNA, 25 bp, Homo sapien
tgggcctggcagaagggaccgggtg

SEQ ID NO: 3381788 - DNA, 25 bp, Homo sapien
gctgtggcttcggtcgttaccccac

SEQ ID NO: 3381789 - DNA, 25 bp, Homo sapien
cccttccacgtcagccaaggactct

SEQ ID NO: 3381790 - DNA, 25 bp, Homo sapien
tccacgtcagccaaggactctggag

SEQ ID NO: 3381791 - DNA, 25 bp, Homo sapien
gtggctgtggcttcggtcgttaccc

SEQ ID NO: 3381792 - DNA, 25 bp, Homo sapien
aaacctttgttgttcgagccaactg

SEQ ID NO: 3381793 - DNA, 25 bp, Homo sapien
caaaagttgcagagtggtggaatgc

SEQ ID NO: 3381794 - DNA, 25 bp, Homo sapien
caacctgctgatgaacctgcagaaa

SEQ ID NO: 3381795 - DNA, 25 bp, Homo sapien
gaatacaggcaccacatactgatga

SEQ ID NO: 3381796 - DNA, 25 bp, Homo sapien
tcgcagtaatataggaacaaggttt

SEQ ID NO: 3381797 - DNA, 25 bp, Homo sapien
caggaaccactaaggcctacttgaa

SEQ ID NO: 3381798 - DNA, 25 bp, Homo sapien
gctgcatgattgtgagagtaatcca

SEQ ID NO: 3381799 - DNA, 25 bp, Homo sapien
tgggtatagtgggatccaggaacca

SEQ ID NO: 3381800 - DNA, 25 bp, Homo sapien
gctaactattttgactgcagagcca

SEQ ID NO: 3381801 - DNA, 25 bp, Homo sapien
tatttgtaggatatgggccctcaca

SEQ ID NO: 3381802 - DNA, 25 bp, Homo sapien
gataccaacacaacgatatggccgg

SEQ ID NO: 3381803 - DNA, 25 bp, Homo sapien
tattaggccaaagaaatagtgtcct

SEQ ID NO: 3381804 - DNA, 25 bp, Homo sapien
tcggtcagctagatgagttcgcccc

SEQ ID NO: 3381805 - DNA, 25 bp, Homo sapien
ccgggctccggcagtgattcagcat

SEQ ID NO: 3381806 - DNA, 25 bp, Homo sapien
tatcggtagccagtgcggcctttcc

SEQ ID NO: 3381807 - DNA, 25 bp, Homo sapien
gagacttgacttggaggcctacctg

SEQ ID NO: 3381808 - DNA, 25 bp, Homo sapien
gactcggacgactttagatgcagcc

SEQ ID NO: 3381809 - DNA, 25 bp, Homo sapien
tactcgaggaagaatacagctgaca

SEQ ID NO: 3381810 - DNA, 25 bp, Homo sapien
gctgacacacagaaacggatcgtta

SEQ ID NO: 3381811 - DNA, 25 bp, Homo sapien
agagctagtatcacccagagtcacg

SEQ ID NO: 3381812 - DNA, 25 bp, Homo sapien
tataaatagccggtggatgtcagac

SEQ ID NO: 3381813 - DNA, 25 bp, Homo sapien
tattattgtagcgacgaggtcccac

SEQ ID NO: 3381814 - DNA, 25 bp, Homo sapien
tagaaagacattagcgccctcatgg

SEQ ID NO: 3381815 - DNA, 25 bp, Homo sapien
tcagtggcctaatctgtcaggtacc

SEQ ID NO: 3381816 - DNA, 25 bp, Homo sapien
ctctactctgggacctctgctccat

SEQ ID NO: 3381817 - DNA, 25 bp, Homo sapien
cagaagcagctgatgctcatctcca

SEQ ID NO: 3381818 - DNA, 25 bp, Homo sapien
catctcctcctctactctgggacct

SEQ ID NO: 3381819 - DNA, 25 bp, Homo sapien
aagcagctgatgctcatctccatct

SEQ ID NO: 3381820 - DNA, 25 bp, Homo sapien
ggcccaagaaggacatagtaaccag

SEQ ID NO: 3381821 - DNA, 25 bp, Homo sapien
catcgctcacagtgatccacttgtg

SEQ ID NO: 3381822 - DNA, 25 bp, Homo sapien
tgcttcttatccctgcaaccctggg

SEQ ID NO: 3381823 - DNA, 25 bp, Homo sapien
gaggtcctggtgattgactggtaca

SEQ ID NO: 3381824 - DNA, 25 bp, Homo sapien
taatcagactggatgcatagccatc

SEQ ID NO: 3381825 - DNA, 25 bp, Homo sapien
gaggccagtatgtgggcagatactt

SEQ ID NO: 3381826 - DNA, 25 bp, Homo sapien
ctcatgaatacagccaggcccggtg

SEQ ID NO: 3381827 - DNA, 25 bp, Homo sapien
tagccatctttgcttgtaactggaa

SEQ ID NO: 3381828 - DNA, 25 bp, Homo sapien
ctaggaaatatattaagtatgcata

SEQ ID NO: 3381829 - DNA, 25 bp, Homo sapien
ttgcacctaaatttcaaaaatgtga

SEQ ID NO: 3381830 - DNA, 25 bp, Homo sapien
tgagaaagtacaacttagaaactag

SEQ ID NO: 3381831 - DNA, 25 bp, Homo sapien
cattgattataaaattgcacctaaa

SEQ ID NO: 3381832 - DNA, 25 bp, Homo sapien
atgctgctaaggatgaagaaaagac

SEQ ID NO: 3381833 - DNA, 25 bp, Homo sapien
aatgctgctaaggatgaagaaaaga

SEQ ID NO: 3381834 - DNA, 25 bp, Homo sapien
gaaaagacaaatcactcatacattg

SEQ ID NO: 3381835 - DNA, 25 bp, Homo sapien
aagctgagcaaaggagcttttcttt

SEQ ID NO: 3381836 - DNA, 25 bp, Homo sapien
agctgagcaaaggagcttttctttc

SEQ ID NO: 3381837 - DNA, 25 bp, Homo sapien
gaagctgagcaaaggagcttttctt

SEQ ID NO: 3381838 - DNA, 25 bp, Homo sapien
agggaaggcagcattatgcagtgga

SEQ ID NO: 3381839 - DNA, 25 bp, Homo sapien
tgtgacactgtaattggctctgctg

SEQ ID NO: 3381840 - DNA, 25 bp, Homo sapien
ttatggactggcattagccacgtgc

SEQ ID NO: 3381841 - DNA, 25 bp, Homo sapien
attagccacgtgcttatttgctgtg

SEQ ID NO: 3381842 - DNA, 25 bp, Homo sapien
gggctgtgacactgtaattggctct

SEQ ID NO: 3381843 - DNA, 25 bp, Homo sapien
atggcttgaatctggaaagcagagg

SEQ ID NO: 3381844 - DNA, 25 bp, Homo sapien
gagaatggcttgaatctggaaagca

SEQ ID NO: 3381845 - DNA, 25 bp, Homo sapien
gaatggcttgaatctggaaagcaga

SEQ ID NO: 3381846 - DNA, 25 bp, Homo sapien
ggagaatggcttgaatctggaaagc

SEQ ID NO: 3381847 - DNA, 25 bp, Homo sapien
cctacacattccttctgaagcacgt

SEQ ID NO: 3381848 - DNA, 25 bp, Homo sapien
gggtcaatttcagtgatcctacaca

SEQ ID NO: 3381849 - DNA, 25 bp, Homo sapien
aagcacgtatgctctttctatacgg

SEQ ID NO: 3381850 - DNA, 25 bp, Homo sapien
ctttctatacggtgtgtaagctctg

SEQ ID NO: 3381851 - DNA, 25 bp, Homo sapien
gcggaaggtcctggtgtgtccggaa

SEQ ID NO: 3381852 - DNA, 25 bp, Homo sapien
tgagacggggtcgatgaggctgacc

SEQ ID NO: 3381853 - DNA, 25 bp, Homo sapien
acaagaatatctgccctggccgggc

SEQ ID NO: 3381854 - DNA, 25 bp, Homo sapien
attctacaagaatatctgccctggc

SEQ ID NO: 3381855 - DNA, 25 bp, Homo sapien
ctgagcccacacctaatccatgaga

SEQ ID NO: 3381856 - DNA, 25 bp, Homo sapien
ccatcctgtattggggtcacttgat

SEQ ID NO: 3381857 - DNA, 25 bp, Homo sapien
gaactcacgtgaaatctgaaatggc

SEQ ID NO: 3381858 - DNA, 25 bp, Homo sapien
tggttacttatgtctccccgcacag

SEQ ID NO: 3381859 - DNA, 25 bp, Homo sapien
ctggctgatgttccaagctgatgat

SEQ ID NO: 3381860 - DNA, 25 bp, Homo sapien
tctcacagttgctttcatgggtaca

SEQ ID NO: 3381861 - DNA, 25 bp, Homo sapien
ctttcatgggtacattggaagcccc

SEQ ID NO: 3381862 - DNA, 25 bp, Homo sapien
caagctgatgattcttctcacagtt

SEQ ID NO: 3381863 - DNA, 25 bp, Homo sapien
ctgactggcaccaatgtaattttgc

SEQ ID NO: 3381864 - DNA, 25 bp, Homo sapien
actggcaccaatgtaattttgcgtt

SEQ ID NO: 3381865 - DNA, 25 bp, Homo sapien
tgactggcaccaatgtaattttgcg

SEQ ID NO: 3381866 - DNA, 25 bp, Homo sapien
gactggcaccaatgtaattttgcgt

SEQ ID NO: 3381867 - DNA, 25 bp, Homo sapien
tgggcccaggtgatcatcctgaaaa

SEQ ID NO: 3381868 - DNA, 25 bp, Homo sapien
taaggtttggtcctgtaggcctgca

SEQ ID NO: 3381869 - DNA, 25 bp, Homo sapien
ccctgagggtcttgacaaatatttc

SEQ ID NO: 3381870 - DNA, 25 bp, Homo sapien
taaagctgcacgcttatagccatct

SEQ ID NO: 3381871 - DNA, 25 bp, Homo sapien
tccaaactcagcacaaataaagaca

SEQ ID NO: 3381872 - DNA, 25 bp, Homo sapien
aactccaaactcagcacaaataaag

SEQ ID NO: 3381873 - DNA, 25 bp, Homo sapien
actcagcacaaataaagacaattgc

SEQ ID NO: 3381874 - DNA, 25 bp, Homo sapien
caaactcagcacaaataaagacaat

SEQ ID NO: 3381875 - DNA, 25 bp, Homo sapien
gccaagagttaaactggctgtacag

SEQ ID NO: 3381876 - DNA, 25 bp, Homo sapien
ctactgggctatgggccagggcatg

SEQ ID NO: 3381877 - DNA, 25 bp, Homo sapien
taacccttgcaagtgaagtcacctg

SEQ ID NO: 3381878 - DNA, 25 bp, Homo sapien
ttgcaacatcccaacactgctgtgg

SEQ ID NO: 3381879 - DNA, 25 bp, Homo sapien
ctgaacagaccaataacaggagctg

SEQ ID NO: 3381880 - DNA, 25 bp, Homo sapien
gagctgaaattgtggcaataatcaa

SEQ ID NO: 3381881 - DNA, 25 bp, Homo sapien
acagaccaataacaggagctgaaat

SEQ ID NO: 3381882 - DNA, 25 bp, Homo sapien
gaacagaccaataacaggagctgaa

SEQ ID NO: 3381883 - DNA, 25 bp, Homo sapien
gaaagagaaggacgaggtcatcttc

SEQ ID NO: 3381884 - DNA, 25 bp, Homo sapien
agaaggacgaggtcatcttcggacg

SEQ ID NO: 3381885 - DNA, 25 bp, Homo sapien
aagagaaggacgaggtcatcttcgg

SEQ ID NO: 3381886 - DNA, 25 bp, Homo sapien
gactgaaagagaaggacgaggtcat

SEQ ID NO: 3381887 - DNA, 25 bp, Homo sapien
ggcacctctcgggactggagactca

SEQ ID NO: 3381888 - DNA, 25 bp, Homo sapien
tcgggactggagactcagtgtcgcc

SEQ ID NO: 3381889 - DNA, 25 bp, Homo sapien
ttctctccaggaccagtttagctgc

SEQ ID NO: 3381890 - DNA, 25 bp, Homo sapien
ggaccagtttagctgccgcctcctt

SEQ ID NO: 3381891 - DNA, 25 bp, Homo sapien
aggagcggcggagtccgggacatgc

SEQ ID NO: 3381892 - DNA, 25 bp, Homo sapien
ggagcggcggagtccgggacatgct

SEQ ID NO: 3381893 - DNA, 25 bp, Homo sapien
agcggcggagtccgggacatgctgg

SEQ ID NO: 3381894 - DNA, 25 bp, Homo sapien
gagcggcggagtccgggacatgctg

SEQ ID NO: 3381895 - DNA, 25 bp, Homo sapien
agcacaccccgctcgtaccgtagcg

SEQ ID NO: 3381896 - DNA, 25 bp, Homo sapien
cctggttcgcaacccgtcagggctg

SEQ ID NO: 3381897 - DNA, 25 bp, Homo sapien
gctcgtaccgtagcggccgctcgcg

SEQ ID NO: 3381898 - DNA, 25 bp, Homo sapien
gggtggccacgggactcagcacacc

SEQ ID NO: 3381899 - DNA, 25 bp, Homo sapien
agccggccccatccggcggctgcag

SEQ ID NO: 3381900 - DNA, 25 bp, Homo sapien
ggaccgcatggctttggcgtctcgc

SEQ ID NO: 3381901 - DNA, 25 bp, Homo sapien
tgccgcaaggggctcacgcagctct

SEQ ID NO: 3381902 - DNA, 25 bp, Homo sapien
ttcacgtagccgttcctcagactct

SEQ ID NO: 3381903 - DNA, 25 bp, Homo sapien
cttggtccgggtgaggaagcaggtg

SEQ ID NO: 3381904 - DNA, 25 bp, Homo sapien
gcgggtgcgcgagcgtcagcagcag

SEQ ID NO: 3381905 - DNA, 25 bp, Homo sapien
gcaccagaacgcagtgccggagccg

SEQ ID NO: 3381906 - DNA, 25 bp, Homo sapien
tgtgcgaacacacgctcagcagcgt

SEQ ID NO: 3381907 - DNA, 25 bp, Homo sapien
ttgaaagaagtgatccaaccccagg

SEQ ID NO: 3381908 - DNA, 25 bp, Homo sapien
gtttctcctaacgacacgcagctgg

SEQ ID NO: 3381909 - DNA, 25 bp, Homo sapien
gcactttttcttcggcggcactgga

SEQ ID NO: 3381910 - DNA, 25 bp, Homo sapien
tctggaaatacaaggcaacgacggt

SEQ ID NO: 3381911 - DNA, 25 bp, Homo sapien
tcggaaactgcagcggtaaacccga

SEQ ID NO: 3381912 - DNA, 25 bp, Homo sapien
gctttgaaataagcgaattcaactc

SEQ ID NO: 3381913 - DNA, 25 bp, Homo sapien
ttcaactcggaaactgcagcggtaa

SEQ ID NO: 3381914 - DNA, 25 bp, Homo sapien
ccagacctcgccttccagctaacat

SEQ ID NO: 3381915 - DNA, 25 bp, Homo sapien
gctaggtaaatcaatgccagaagga

SEQ ID NO: 3381916 - DNA, 25 bp, Homo sapien
ggagatacactcttctgccccaagt

SEQ ID NO: 3381917 - DNA, 25 bp, Homo sapien
aggtggccaaagaacgtgctgtagc

SEQ ID NO: 3381918 - DNA, 25 bp, Homo sapien
tttaagcgaagcaggcaatagtcag

SEQ ID NO: 3381919 - DNA, 25 bp, Homo sapien
catagtgccttattaccttgcctga

SEQ ID NO: 3381920 - DNA, 25 bp, Homo sapien
ggtttctgagtctacatatgcagca

SEQ ID NO: 3381921 - DNA, 25 bp, Homo sapien
tatataatccgaagctttggtgggt

SEQ ID NO: 3381922 - DNA, 25 bp, Homo sapien
gtggatttttgactaggcactgctg

SEQ ID NO: 3381923 - DNA, 25 bp, Homo sapien
aataataagaaaagggataagacat

SEQ ID NO: 3381924 - DNA, 25 bp, Homo sapien
ataataagaaaagggataagacatt

SEQ ID NO: 3381925 - DNA, 25 bp, Homo sapien
tgaccgtgcagattaagacaagacc

SEQ ID NO: 3381926 - DNA, 25 bp, Homo sapien
tgaaagacccagcagcctgaatgtg

SEQ ID NO: 3381927 - DNA, 25 bp, Homo sapien
gacaatgtcctagcttgaccgtgca

SEQ ID NO: 3381928 - DNA, 25 bp, Homo sapien
gagcaacataaaggaaggagcccgt

SEQ ID NO: 3381929 - DNA, 25 bp, Homo sapien
caattctgtacctttttccatacca

SEQ ID NO: 3381930 - DNA, 25 bp, Homo sapien
tctgtacctttttccataccatcta

SEQ ID NO: 3381931 - DNA, 25 bp, Homo sapien
aattctgtacctttttccataccat

SEQ ID NO: 3381932 - DNA, 25 bp, Homo sapien
gacaattctgtacctttttccatac

SEQ ID NO: 3381933 - DNA, 25 bp, Homo sapien
aaagatgttgccagtactatgtgga

SEQ ID NO: 3381934 - DNA, 25 bp, Homo sapien
taagatccccatatgatcacctggt

SEQ ID NO: 3381935 - DNA, 25 bp, Homo sapien
caagagtgcccttcttagaccgaca

SEQ ID NO: 3381936 - DNA, 25 bp, Homo sapien
gaatggaatcccttgacctatcata

SEQ ID NO: 3381937 - DNA, 25 bp, Homo sapien
tcttgggagatactgcttgcaacgg

SEQ ID NO: 3381938 - DNA, 25 bp, Homo sapien
gatatcctgatatctacaataggag

SEQ ID NO: 3381939 - DNA, 25 bp, Homo sapien
tctcttccaactgaccttttgctct

SEQ ID NO: 3381940 - DNA, 25 bp, Homo sapien
ataggagaataagctcactcttggg

SEQ ID NO: 3381941 - DNA, 25 bp, Homo sapien
agtagccacctaaacacagcaaagg

SEQ ID NO: 3381942 - DNA, 25 bp, Homo sapien
tgtacaaactgttccacataacgga

SEQ ID NO: 3381943 - DNA, 25 bp, Homo sapien
gctaaactatcatccaagagtgaga

SEQ ID NO: 3381944 - DNA, 25 bp, Homo sapien
tagtaagaaggaatgtctcacacac

SEQ ID NO: 3381945 - DNA, 25 bp, Homo sapien
tataaacctttgctatttcataact

SEQ ID NO: 3381946 - DNA, 25 bp, Homo sapien
catgaatttcaaagctatataaacc

SEQ ID NO: 3381947 - DNA, 25 bp, Homo sapien
ccacgcccagctaaaaacatgaatt

SEQ ID NO: 3381948 - DNA, 25 bp, Homo sapien
cttaggtccactaagagaaaagcaa

SEQ ID NO: 3381949 - DNA, 25 bp, Homo sapien
taagtggcatgagatctgaggttct

SEQ ID NO: 3381950 - DNA, 25 bp, Homo sapien
cagaagttacctgatcacagtatgg

SEQ ID NO: 3381951 - DNA, 25 bp, Homo sapien
cacagtatggttagtacaatggcta

SEQ ID NO: 3381952 - DNA, 25 bp, Homo sapien
tttaaatttgtgtagcagcagggtc

SEQ ID NO: 3381953 - DNA, 25 bp, Homo sapien
tctctgcatattagtataactgtcc

SEQ ID NO: 3381954 - DNA, 25 bp, Homo sapien
caatgaatgtataaaccttgcctgg

SEQ ID NO: 3381955 - DNA, 25 bp, Homo sapien
gagacataaccgcatgcaatgaatg

SEQ ID NO: 3381956 - DNA, 25 bp, Homo sapien
ggtgggctattctagattgaaagag

SEQ ID NO: 3381957 - DNA, 25 bp, Homo sapien
tggctcttaactgtgcatcctttac

SEQ ID NO: 3381958 - DNA, 25 bp, Homo sapien
ccttctacacgttcaggctattctc

SEQ ID NO: 3381959 - DNA, 25 bp, Homo sapien
tgtgttctctacgaaaatgtgcccc

SEQ ID NO: 3381960 - DNA, 25 bp, Homo sapien
actcattttgtttatcaaggctgtg

SEQ ID NO: 3381961 - DNA, 25 bp, Homo sapien
cgaaaggatcctcgtattcttttca

SEQ ID NO: 3381962 - DNA, 25 bp, Homo sapien
ggatcctcgtattcttttcagcctc

SEQ ID NO: 3381963 - DNA, 25 bp, Homo sapien
catcgaaaggatcctcgtattcttt

SEQ ID NO: 3381964 - DNA, 25 bp, Homo sapien
aaggatcctcgtattcttttcagcc

SEQ ID NO: 3381965 - DNA, 25 bp, Homo sapien
taacagactgccacttcaaagatgc

SEQ ID NO: 3381966 - DNA, 25 bp, Homo sapien
ttaacagactgccacttcaaagatg

SEQ ID NO: 3381967 - DNA, 25 bp, Homo sapien
gccacttcaaagatgcattcaccat

SEQ ID NO: 3381968 - DNA, 25 bp, Homo sapien
gactgccacttcaaagatgcattca

SEQ ID NO: 3381969 - DNA, 25 bp, Homo sapien
gcaaagcaaccctcttaaagcttaa

SEQ ID NO: 3381970 - DNA, 25 bp, Homo sapien
gaatctattctcaacagagcaaagc

SEQ ID NO: 3381971 - DNA, 25 bp, Homo sapien
agtgggaatcccatcattaccttgg

SEQ ID NO: 3381972 - DNA, 25 bp, Homo sapien
tggctgtctaatagataccttgaac

SEQ ID NO: 3381973 - DNA, 25 bp, Homo sapien
taaatatttgtactctaatgccaag

SEQ ID NO: 3381974 - DNA, 25 bp, Homo sapien
tttaaatatttgtactctaatgcca

SEQ ID NO: 3381975 - DNA, 25 bp, Homo sapien
tttgtactctaatgccaagagccat

SEQ ID NO: 3381976 - DNA, 25 bp, Homo sapien
tatttgtactctaatgccaagagcc

SEQ ID NO: 3381977 - DNA, 25 bp, Homo sapien
taatgaggcttataccattgtttta

SEQ ID NO: 3381978 - DNA, 25 bp, Homo sapien
ataatgaggcttataccattgtttt

SEQ ID NO: 3381979 - DNA, 25 bp, Homo sapien
gaaaccttccatttggatggtaaca

SEQ ID NO: 3381980 - DNA, 25 bp, Homo sapien
tgtattggggaagtgtactgcacaa

SEQ ID NO: 3381981 - DNA, 25 bp, Homo sapien
accttccatttggatggtaacagaa

SEQ ID NO: 3381982 - DNA, 25 bp, Homo sapien
gaagtgtactgcacaaaatggacac

SEQ ID NO: 3381983 - DNA, 25 bp, Homo sapien
ggctaggcatttgtgaggacatccc

SEQ ID NO: 3381984 - DNA, 25 bp, Homo sapien
gaaagaataagcctacctgtgtcac

SEQ ID NO: 3381985 - DNA, 25 bp, Homo sapien
aaaggagtctccaggtgacaggaac

SEQ ID NO: 3381986 - DNA, 25 bp, Homo sapien
acaaagatcactttctgggctaggc

SEQ ID NO: 3381987 - DNA, 25 bp, Homo sapien
gaacattctccttcagctcacagaa

SEQ ID NO: 3381988 - DNA, 25 bp, Homo sapien
aaagtcttctatacactgtttattt

SEQ ID NO: 3381989 - DNA, 25 bp, Homo sapien
ccaacaggtcatttaaagtcttcta

SEQ ID NO: 3381990 - DNA, 25 bp, Homo sapien
ccggccgtatgaggcgtcagtcagc

SEQ ID NO: 3381991 - DNA, 25 bp, Homo sapien
gaagaaatatgtcaccgatgtaaac

SEQ ID NO: 3381992 - DNA, 25 bp, Homo sapien
tcacagacagggtagcatcaggcaa

SEQ ID NO: 3381993 - DNA, 25 bp, Homo sapien
gacaaggttttgtagcaaacatacc

SEQ ID NO: 3381994 - DNA, 25 bp, Homo sapien
gatgttcaactcgattacccataga

SEQ ID NO: 3381995 - DNA, 25 bp, Homo sapien
ggaacctgagaaagcacccattaag

SEQ ID NO: 3381996 - DNA, 25 bp, Homo sapien
tattgcgagcctcatttagcactga

SEQ ID NO: 3381997 - DNA, 25 bp, Homo sapien
taatctttggcctacaggaacctga

SEQ ID NO: 3381998 - DNA, 25 bp, Homo sapien
gaagatctgacaccatattgcgagc

SEQ ID NO: 3381999 - DNA, 25 bp, Homo sapien
tcaacttcagaggacaatcttagga

SEQ ID NO: 3382000 - DNA, 25 bp, Homo sapien
gcaatctcagagataagtatctgtc

SEQ ID NO: 3382001 - DNA, 25 bp, Homo sapien
gtggatatgaaagatttaccctgaa

SEQ ID NO: 3382002 - DNA, 25 bp, Homo sapien
ggatgatcagccctatattctaaat

SEQ ID NO: 3382003 - DNA, 25 bp, Homo sapien
ctatatatgtaatattagtgatggc

SEQ ID NO: 3382004 - DNA, 25 bp, Homo sapien
tatatgtaatattagtgatggcaca

SEQ ID NO: 3382005 - DNA, 25 bp, Homo sapien
aaatgtcactctttaatatgctata

SEQ ID NO: 3382006 - DNA, 25 bp, Homo sapien
taatattagtgatggcacatgaaag

SEQ ID NO: 3382007 - DNA, 25 bp, Homo sapien
gactgttcaacaggtagcaatcctg

SEQ ID NO: 3382008 - DNA, 25 bp, Homo sapien
tacgatcccaccttgaagactgttc

SEQ ID NO: 3382009 - DNA, 25 bp, Homo sapien
tcttggtgaggtcttttgccattat

SEQ ID NO: 3382010 - DNA, 25 bp, Homo sapien
cctgaagttcctgagcttctcctca

SEQ ID NO: 3382011 - DNA, 25 bp, Homo sapien
tcatctccctgtcaatgctcagtca

SEQ ID NO: 3382012 - DNA, 25 bp, Homo sapien
gcaaataataccacccaatgaactc

SEQ ID NO: 3382013 - DNA, 25 bp, Homo sapien
ttgggacctcagtcactaacaggca

SEQ ID NO: 3382014 - DNA, 25 bp, Homo sapien
ggcagacatagccttgatttccctg

SEQ ID NO: 3382015 - DNA, 25 bp, Homo sapien
agctcttctgagacctacatggtga

SEQ ID NO: 3382016 - DNA, 25 bp, Homo sapien
cctttgcttcgggatagtcagtaga

SEQ ID NO: 3382017 - DNA, 25 bp, Homo sapien
gtgatacagaagatgacctttgctt

SEQ ID NO: 3382018 - DNA, 25 bp, Homo sapien
taaaaggcccatttagatagcatcc

SEQ ID NO: 3382019 - DNA, 25 bp, Homo sapien
catccaattagcttagggccttatg

SEQ ID NO: 3382020 - DNA, 25 bp, Homo sapien
taaggagctacaatattttcaggca

SEQ ID NO: 3382021 - DNA, 25 bp, Homo sapien
acagatgtgtgcgatggtgtcaact

SEQ ID NO: 3382022 - DNA, 25 bp, Homo sapien
taatttccataacatgggtgggcct

SEQ ID NO: 3382023 - DNA, 25 bp, Homo sapien
tggaagaattcacaggactcagact

SEQ ID NO: 3382024 - DNA, 25 bp, Homo sapien
tagacactggtccatggttggaaga

SEQ ID NO: 3382025 - DNA, 25 bp, Homo sapien
ggtgatcgattagttagagagccag

SEQ ID NO: 3382026 - DNA, 25 bp, Homo sapien
gatctctgcaagataacgcttggct

SEQ ID NO: 3382027 - DNA, 25 bp, Homo sapien
cagaatttctaagttgctgataaaa

SEQ ID NO: 3382028 - DNA, 25 bp, Homo sapien
ttgctgataaaaatctggagtatta

SEQ ID NO: 3382029 - DNA, 25 bp, Homo sapien
ctgttacacagattgctatcagaat

SEQ ID NO: 3382030 - DNA, 25 bp, Homo sapien
taaaaatctggagtattaggtgcat

SEQ ID NO: 3382031 - DNA, 25 bp, Homo sapien
tgttgaaacatatttcagcatttga

SEQ ID NO: 3382032 - DNA, 25 bp, Homo sapien
tttccactgcagcaatctgtaccat

SEQ ID NO: 3382033 - DNA, 25 bp, Homo sapien
agcaatctgtaccatctgattcaga

SEQ ID NO: 3382034 - DNA, 25 bp, Homo sapien
catatttcagcatttgatgtccaca

SEQ ID NO: 3382035 - DNA, 25 bp, Homo sapien
tagggaagctggacgtctgatatca

SEQ ID NO: 3382036 - DNA, 25 bp, Homo sapien
ggccaagttccagtattgcagacta

SEQ ID NO: 3382037 - DNA, 25 bp, Homo sapien
gctataattggatactacagactga

SEQ ID NO: 3382038 - DNA, 25 bp, Homo sapien
tgcagactaccgatttcacattgta

SEQ ID NO: 3382039 - DNA, 25 bp, Homo sapien
aatttgatataaacaatttccaaca

SEQ ID NO: 3382040 - DNA, 25 bp, Homo sapien
atttgatataaacaatttccaacat

SEQ ID NO: 3382041 - DNA, 25 bp, Homo sapien
caatttgatataaacaatttccaac

SEQ ID NO: 3382042 - DNA, 25 bp, Homo sapien
cctcttcttgttgagtttccataag

SEQ ID NO: 3382043 - DNA, 25 bp, Homo sapien
tgattctttcgagaaaatgttttct

SEQ ID NO: 3382044 - DNA, 25 bp, Homo sapien
taagtttgaatgattctttcgagaa

SEQ ID NO: 3382045 - DNA, 25 bp, Homo sapien
tgttagccacttatcaccttcctga

SEQ ID NO: 3382046 - DNA, 25 bp, Homo sapien
taaaatcaggtccagtgatacttcc

SEQ ID NO: 3382047 - DNA, 25 bp, Homo sapien
tttctctcccatcttttctacaagt

SEQ ID NO: 3382048 - DNA, 25 bp, Homo sapien
ttaatgagtcatactcttctactaa

SEQ ID NO: 3382049 - DNA, 25 bp, Homo sapien
ggtccagtgatacttcctgttcaat

SEQ ID NO: 3382050 - DNA, 25 bp, Homo sapien
taaaccagtgtcttgaaataaggta

SEQ ID NO: 3382051 - DNA, 25 bp, Homo sapien
aaggaatgtctcgatagccattttc

SEQ ID NO: 3382052 - DNA, 25 bp, Homo sapien
tccaataaaccagtgtcttgaaata

SEQ ID NO: 3382053 - DNA, 25 bp, Homo sapien
ttctaatgcacgaaaatagttcata

SEQ ID NO: 3382054 - DNA, 25 bp, Homo sapien
catctgtggcatgtatacgattgtg

SEQ ID NO: 3382055 - DNA, 25 bp, Homo sapien
aaccattgtggatctgctgtaagcc

SEQ ID NO: 3382056 - DNA, 25 bp, Homo sapien
gataccaaactgcatgtagcacatc

SEQ ID NO: 3382057 - DNA, 25 bp, Homo sapien
ggaactggccgtgttgtcagatacc

SEQ ID NO: 3382058 - DNA, 25 bp, Homo sapien
aattcgcccatggttaattctacca

SEQ ID NO: 3382059 - DNA, 25 bp, Homo sapien
caattcgcccatggttaattctacc

SEQ ID NO: 3382060 - DNA, 25 bp, Homo sapien
aagcaattcgcccatggttaattct

SEQ ID NO: 3382061 - DNA, 25 bp, Homo sapien
gcaattcgcccatggttaattctac

SEQ ID NO: 3382062 - DNA, 25 bp, Homo sapien
ggcagctgccacgtatagagccatc

SEQ ID NO: 3382063 - DNA, 25 bp, Homo sapien
tgatcataatcatgcatggcagctg

SEQ ID NO: 3382064 - DNA, 25 bp, Homo sapien
gaaatgcatttgtcctccctgggtg

SEQ ID NO: 3382065 - DNA, 25 bp, Homo sapien
taactctcatcaggattagagcagc

SEQ ID NO: 3382066 - DNA, 25 bp, Homo sapien
tgcttagagctgtttgtactattct

SEQ ID NO: 3382067 - DNA, 25 bp, Homo sapien
gcttagagctgtttgtactattctc

SEQ ID NO: 3382068 - DNA, 25 bp, Homo sapien
ttgcttagagctgtttgtactattc

SEQ ID NO: 3382069 - DNA, 25 bp, Homo sapien
atttgcttagagctgtttgtactat

SEQ ID NO: 3382070 - DNA, 25 bp, Homo sapien
tactgtccagggtaagtaagagacc

SEQ ID NO: 3382071 - DNA, 25 bp, Homo sapien
tgctgcctcccaagagatgtaaagt

SEQ ID NO: 3382072 - DNA, 25 bp, Homo sapien
taagagacctgcctgtctgagatgg

SEQ ID NO: 3382073 - DNA, 25 bp, Homo sapien
cattagggatctagagcaggtttca

SEQ ID NO: 3382074 - DNA, 25 bp, Homo sapien
tgacgcagcatgatgattttccaga

SEQ ID NO: 3382075 - DNA, 25 bp, Homo sapien
gatatagattccaagctgacgcagc

SEQ ID NO: 3382076 - DNA, 25 bp, Homo sapien
tcaatgactaaaaaacgaaagcgct

SEQ ID NO: 3382077 - DNA, 25 bp, Homo sapien
cgaaagcgcttgaattccacatgat

SEQ ID NO: 3382078 - DNA, 25 bp, Homo sapien
cagtaacactgacaataaagatttt

SEQ ID NO: 3382079 - DNA, 25 bp, Homo sapien
tattgttacttcctaagtagtaata

SEQ ID NO: 3382080 - DNA, 25 bp, Homo sapien
ttatcagtaacactgacaataaaga

SEQ ID NO: 3382081 - DNA, 25 bp, Homo sapien
tcagtaacactgacaataaagattt

SEQ ID NO: 3382082 - DNA, 25 bp, Homo sapien
tgcaagtctcgaacttttgctgggc

SEQ ID NO: 3382083 - DNA, 25 bp, Homo sapien
tatatctgccagtttgatgcacacc

SEQ ID NO: 3382084 - DNA, 25 bp, Homo sapien
ccattctatgccattactatttaca

SEQ ID NO: 3382085 - DNA, 25 bp, Homo sapien
cctggcataccaagaggcgatcatt

SEQ ID NO: 3382086 - DNA, 25 bp, Homo sapien
ttattttgtgggagtctgagtctcc

SEQ ID NO: 3382087 - DNA, 25 bp, Homo sapien
tgagtctccttgtaggtctctaaaa

SEQ ID NO: 3382088 - DNA, 25 bp, Homo sapien
cttggtctttttctgtctgtgttgg

SEQ ID NO: 3382089 - DNA, 25 bp, Homo sapien
tagctgttcttgatgcattgatctc

SEQ ID NO: 3382090 - DNA, 25 bp, Homo sapien
taatgagccaacataactctgagga

SEQ ID NO: 3382091 - DNA, 25 bp, Homo sapien
gaaactgtccccgtgattaactgtc

SEQ ID NO: 3382092 - DNA, 25 bp, Homo sapien
tgagatcagactactacctgtgtgg

SEQ ID NO: 3382093 - DNA, 25 bp, Homo sapien
ggcttttctaagtccatggcagtta

SEQ ID NO: 3382094 - DNA, 25 bp, Homo sapien
ccactatgtgggtgataaaagattc

SEQ ID NO: 3382095 - DNA, 25 bp, Homo sapien
catgaatggactgatgggcagacca

SEQ ID NO: 3382096 - DNA, 25 bp, Homo sapien
catcataggagttacacaggggacc

SEQ ID NO: 3382097 - DNA, 25 bp, Homo sapien
tgctagttgaggagaagaacgatcc

SEQ ID NO: 3382098 - DNA, 25 bp, Homo sapien
ctgtatctaattcttcaccgtcttc

SEQ ID NO: 3382099 - DNA, 25 bp, Homo sapien
atcttctgtatctaattcttcaccg

SEQ ID NO: 3382100 - DNA, 25 bp, Homo sapien
ttctgtatctaattcttcaccgtct

SEQ ID NO: 3382101 - DNA, 25 bp, Homo sapien
tcttctgtatctaattcttcaccgt

SEQ ID NO: 3382102 - DNA, 25 bp, Homo sapien
tctagtggaaagagctaggaaaaca

SEQ ID NO: 3382103 - DNA, 25 bp, Homo sapien
tgttagatggtattgttacggataa

SEQ ID NO: 3382104 - DNA, 25 bp, Homo sapien
gcctattctaggtatctaagcactg

SEQ ID NO: 3382105 - DNA, 25 bp, Homo sapien
taaaaataatccctgcgttatggtg

SEQ ID NO: 3382106 - DNA, 25 bp, Homo sapien
cattagctgacaaaatattcgccgt

SEQ ID NO: 3382107 - DNA, 25 bp, Homo sapien
tggttttcagtgaggtggtgcatta

SEQ ID NO: 3382108 - DNA, 25 bp, Homo sapien
tgcttgaggtaaggaggaattctcc

SEQ ID NO: 3382109 - DNA, 25 bp, Homo sapien
gaatctcatctgcttgaggtaagga

SEQ ID NO: 3382110 - DNA, 25 bp, Homo sapien
ctattcctcttcatctgcctcttca

SEQ ID NO: 3382111 - DNA, 25 bp, Homo sapien
ttcctcttcatctgcctcttcaatt

SEQ ID NO: 3382112 - DNA, 25 bp, Homo sapien
cctcttcatctgcctcttcaattac

SEQ ID NO: 3382113 - DNA, 25 bp, Homo sapien
tattcctcttcatctgcctcttcaa

SEQ ID NO: 3382114 - DNA, 25 bp, Homo sapien
gaaatccctcagaaaggcaacactg

SEQ ID NO: 3382115 - DNA, 25 bp, Homo sapien
ggatttaagtaagggctctgcaaca

SEQ ID NO: 3382116 - DNA, 25 bp, Homo sapien
tctgcaacatgggtcaacacggatg

SEQ ID NO: 3382117 - DNA, 25 bp, Homo sapien
gagtcagccggtgaacactaggcaa

SEQ ID NO: 3382118 - DNA, 25 bp, Homo sapien
taagtaagaaactgcatgccaatac

SEQ ID NO: 3382119 - DNA, 25 bp, Homo sapien
gggtacatatccacacactagcaag

SEQ ID NO: 3382120 - DNA, 25 bp, Homo sapien
aaattaatggtttcactgtgtgcaa

SEQ ID NO: 3382121 - DNA, 25 bp, Homo sapien
cacatagtgtgtgacaatggtaaca

SEQ ID NO: 3382122 - DNA, 25 bp, Homo sapien
tatttctagtaccagcggctttaaa

SEQ ID NO: 3382123 - DNA, 25 bp, Homo sapien
gatttcatctaatggtacagtgtgc

SEQ ID NO: 3382124 - DNA, 25 bp, Homo sapien
taagtttcagctcgggagagatact

SEQ ID NO: 3382125 - DNA, 25 bp, Homo sapien
cacttgtatgtattctgcaggagag

SEQ ID NO: 3382126 - DNA, 25 bp, Homo sapien
tgggttcgaactccatgggtccact

SEQ ID NO: 3382127 - DNA, 25 bp, Homo sapien
cgtaacccttgtatagagagggcca

SEQ ID NO: 3382128 - DNA, 25 bp, Homo sapien
tctgcaggttccatagggttgactg

SEQ ID NO: 3382129 - DNA, 25 bp, Homo sapien
aatttagttggctctgcattggcag

SEQ ID NO: 3382130 - DNA, 25 bp, Homo sapien
tagtgatatggcgagatgtccagga

SEQ ID NO: 3382131 - DNA, 25 bp, Homo sapien
tagcaagcaaaaagggctcattgtc

SEQ ID NO: 3382132 - DNA, 25 bp, Homo sapien
aatacatttggttgtctcaagcccc

SEQ ID NO: 3382133 - DNA, 25 bp, Homo sapien
cattgtccaatgtaccagaagccaa

SEQ ID NO: 3382134 - DNA, 25 bp, Homo sapien
tcatgcatagacgaagccacaggtg

SEQ ID NO: 3382135 - DNA, 25 bp, Homo sapien
ggagatgggagcccattcttcacgg

SEQ ID NO: 3382136 - DNA, 25 bp, Homo sapien
agatgggagcccattcttcacggga

SEQ ID NO: 3382137 - DNA, 25 bp, Homo sapien
ggtggagatgggagcccattcttca

SEQ ID NO: 3382138 - DNA, 25 bp, Homo sapien
cctattggcttgttataggttatcc

SEQ ID NO: 3382139 - DNA, 25 bp, Homo sapien
gagcactggctactgttagtacaag

SEQ ID NO: 3382140 - DNA, 25 bp, Homo sapien
tcacaatagagctacccagagcact

SEQ ID NO: 3382141 - DNA, 25 bp, Homo sapien
tgttataggttatcagagcactggc

SEQ ID NO: 3382142 - DNA, 25 bp, Homo sapien
aatagggccaaactgttactagctg

SEQ ID NO: 3382143 - DNA, 25 bp, Homo sapien
tcttgactacaaatgaaatagggcc

SEQ ID NO: 3382144 - DNA, 25 bp, Homo sapien
gctggtaccactgtttgagggaacc

SEQ ID NO: 3382145 - DNA, 25 bp, Homo sapien
gaaccatggttctttacagagagag

SEQ ID NO: 3382146 - DNA, 25 bp, Homo sapien
gcaggatccgcctagcccagtgagt

SEQ ID NO: 3382147 - DNA, 25 bp, Homo sapien
gaggccgtcctgacacctcgtcaat

SEQ ID NO: 3382148 - DNA, 25 bp, Homo sapien
gctaaagactgcagtgttgatcatc

SEQ ID NO: 3382149 - DNA, 25 bp, Homo sapien
tagaaaacggactcctggctcattg

SEQ ID NO: 3382150 - DNA, 25 bp, Homo sapien
cagagtgtaggtccgaaggcacagt

SEQ ID NO: 3382151 - DNA, 25 bp, Homo sapien
caagtggacgctttgcagaaatccg

SEQ ID NO: 3382152 - DNA, 25 bp, Homo sapien
gacgcagtcttggttggcattcaca

SEQ ID NO: 3382153 - DNA, 25 bp, Homo sapien
tgtgcacccggacagctggtatgac

SEQ ID NO: 3382154 - DNA, 25 bp, Homo sapien
ggagttcgaaatgcgcgccccggga

SEQ ID NO: 3382155 - DNA, 25 bp, Homo sapien
atggagttcgaaatgcgcgccccgg

SEQ ID NO: 3382156 - DNA, 25 bp, Homo sapien
agttcgaaatgcgcgccccgggagc

SEQ ID NO: 3382157 - DNA, 25 bp, Homo sapien
ctatggagttcgaaatgcgcgcccc

SEQ ID NO: 3382158 - DNA, 25 bp, Homo sapien
ctgcaggcccgaaggttaccaggtg

SEQ ID NO: 3382159 - DNA, 25 bp, Homo sapien
gtactcagataagaacaagcactcg

SEQ ID NO: 3382160 - DNA, 25 bp, Homo sapien
agcactcgaatccaatgctaaccaa

SEQ ID NO: 3382161 - DNA, 25 bp, Homo sapien
taccaggtgtctgtactcagataag

SEQ ID NO: 3382162 - DNA, 25 bp, Homo sapien
gcccctctagagaccgttttgcaca

SEQ ID NO: 3382163 - DNA, 25 bp, Homo sapien
agggcgagggcagcccctctagaga

SEQ ID NO: 3382164 - DNA, 25 bp, Homo sapien
ggccagttcacttgctgccggctac

SEQ ID NO: 3382165 - DNA, 25 bp, Homo sapien
ttgcacagctgccttgtgccgcggg

SEQ ID NO: 3382166 - DNA, 25 bp, Homo sapien
aatgcagagaacgtgcggggctaac

SEQ ID NO: 3382167 - DNA, 25 bp, Homo sapien
tctagagactgacagccgttgaaac

SEQ ID NO: 3382168 - DNA, 25 bp, Homo sapien
cggggctaacggcaagagcagacaa

SEQ ID NO: 3382169 - DNA, 25 bp, Homo sapien
catccccacagtgggcggactcgga

SEQ ID NO: 3382170 - DNA, 25 bp, Homo sapien
ggacccagctcaggttgccaccgaa

SEQ ID NO: 3382171 - DNA, 25 bp, Homo sapien
caaacagggagctcgcctccgaggg

SEQ ID NO: 3382172 - DNA, 25 bp, Homo sapien
ccgtgacggccccaaacagggagct

SEQ ID NO: 3382173 - DNA, 25 bp, Homo sapien
gctcaggttgccaccgaagtgggcc

SEQ ID NO: 3382174 - DNA, 25 bp, Homo sapien
ctagagtgtctcctagggttcctcg

SEQ ID NO: 3382175 - DNA, 25 bp, Homo sapien
acagctctgcgtttgttcagggggc

SEQ ID NO: 3382176 - DNA, 25 bp, Homo sapien
ctcctagggttcctcgtgtcttttg

SEQ ID NO: 3382177 - DNA, 25 bp, Homo sapien
gttgcccctcctgtagtctgccttg

SEQ ID NO: 3382178 - DNA, 25 bp, Homo sapien
gttttcggtatgttcacacctggat

SEQ ID NO: 3382179 - DNA, 25 bp, Homo sapien
taagttttcggtatgttcacacctg

SEQ ID NO: 3382180 - DNA, 25 bp, Homo sapien
cagctacagctaagttttcggtatg

SEQ ID NO: 3382181 - DNA, 25 bp, Homo sapien
aggccagctacagctaagttttcgg

SEQ ID NO: 3382182 - DNA, 25 bp, Homo sapien
tgcacatagtcctgcaccagtgcag

SEQ ID NO: 3382183 - DNA, 25 bp, Homo sapien
gaggcgcacttcctcctcactgagt

SEQ ID NO: 3382184 - DNA, 25 bp, Homo sapien
cactgagtgtggccgggtctgggct

SEQ ID NO: 3382185 - DNA, 25 bp, Homo sapien
gtctgggctgctctccacgggagac

SEQ ID NO: 3382186 - DNA, 25 bp, Homo sapien
ggaggccctgttctgggcgcttggg

SEQ ID NO: 3382187 - DNA, 25 bp, Homo sapien
gaggccctgttctgggcgcttgggg

SEQ ID NO: 3382188 - DNA, 25 bp, Homo sapien
tcttgggatccgccttcttggtatg

SEQ ID NO: 3382189 - DNA, 25 bp, Homo sapien
ctcttgggatccgccttcttggtat

SEQ ID NO: 3382190 - DNA, 25 bp, Homo sapien
cagtgagcgattccacatcttcgca

SEQ ID NO: 3382191 - DNA, 25 bp, Homo sapien
tcctaacagctttcaaaaacggagc

SEQ ID NO: 3382192 - DNA, 25 bp, Homo sapien
caagagcaattctcacagtgagcga

SEQ ID NO: 3382193 - DNA, 25 bp, Homo sapien
taatgagagctattgttgcaagagc

SEQ ID NO: 3382194 - DNA, 25 bp, Homo sapien
gcctccatccaaagaagatagaaga

SEQ ID NO: 3382195 - DNA, 25 bp, Homo sapien
gatagaagaaaaggacataaattaa

SEQ ID NO: 3382196 - DNA, 25 bp, Homo sapien
ctcagcctccatccaaagaagatag

SEQ ID NO: 3382197 - DNA, 25 bp, Homo sapien
cagcctccatccaaagaagatagaa

SEQ ID NO: 3382198 - DNA, 25 bp, Homo sapien
gaaatctggaaactctccggcaaga

SEQ ID NO: 3382199 - DNA, 25 bp, Homo sapien
ggagaaatctggaaactctccggca

SEQ ID NO: 3382200 - DNA, 25 bp, Homo sapien
aatctggaaactctccggcaagaac

SEQ ID NO: 3382201 - DNA, 25 bp, Homo sapien
tctggaaactctccggcaagaactg

SEQ ID NO: 3382202 - DNA, 25 bp, Homo sapien
cctagagtatgcaattatgggccac

SEQ ID NO: 3382203 - DNA, 25 bp, Homo sapien
tatagtgcactaagcagggtctccc

SEQ ID NO: 3382204 - DNA, 25 bp, Homo sapien
agggtctcccacagctatattgagg

SEQ ID NO: 3382205 - DNA, 25 bp, Homo sapien
tttggaacacataggtttagggcac

SEQ ID NO: 3382206 - DNA, 25 bp, Homo sapien
aaatgtacccactgcaatggtttga

SEQ ID NO: 3382207 - DNA, 25 bp, Homo sapien
gcttgagagcaccagatcatccctt

SEQ ID NO: 3382208 - DNA, 25 bp, Homo sapien
tagcgcctgtatagcattccttgta

SEQ ID NO: 3382209 - DNA, 25 bp, Homo sapien
tccccagtgtaagcattaaaagatg

SEQ ID NO: 3382210 - DNA, 25 bp, Homo sapien
accatagttccttagacagccccag

SEQ ID NO: 3382211 - DNA, 25 bp, Homo sapien
acactctatctcaccatagttcctt

SEQ ID NO: 3382212 - DNA, 25 bp, Homo sapien
tctatctcaccatagttccttagac

SEQ ID NO: 3382213 - DNA, 25 bp, Homo sapien
tctcaccatagttccttagacagcc

SEQ ID NO: 3382214 - DNA, 25 bp, Homo sapien
ccactcctcaatggggaggcacagc

SEQ ID NO: 3382215 - DNA, 25 bp, Homo sapien
tgtaaactagccactcctcaatggg

SEQ ID NO: 3382216 - DNA, 25 bp, Homo sapien
agccactcctcaatggggaggcaca

SEQ ID NO: 3382217 - DNA, 25 bp, Homo sapien
tttgtaaactagccactcctcaatg

SEQ ID NO: 3382218 - DNA, 25 bp, Homo sapien
gagaagcttgcttctcatcactgta

SEQ ID NO: 3382219 - DNA, 25 bp, Homo sapien
gaagcttgcttctcatcactgtagc

SEQ ID NO: 3382220 - DNA, 25 bp, Homo sapien
gagggctgtagccagtgaccactca

SEQ ID NO: 3382221 - DNA, 25 bp, Homo sapien
gaaagcttctgactgtagagatggg

SEQ ID NO: 3382222 - DNA, 25 bp, Homo sapien
gaagttttgctcatggccatgaatg

SEQ ID NO: 3382223 - DNA, 25 bp, Homo sapien
aatgtgagtgggtgataggggctgc

SEQ ID NO: 3382224 - DNA, 25 bp, Homo sapien
ctctattatcatcacaagttatgga

SEQ ID NO: 3382225 - DNA, 25 bp, Homo sapien
tattatcatcacaagttatggaagt

SEQ ID NO: 3382226 - DNA, 25 bp, Homo sapien
cacttagtggccttggttgggccca

SEQ ID NO: 3382227 - DNA, 25 bp, Homo sapien
cttagtggccttggttgggcccaca

SEQ ID NO: 3382228 - DNA, 25 bp, Homo sapien
tgtcagctactatcatcatgacctt

SEQ ID NO: 3382229 - DNA, 25 bp, Homo sapien
atttttgggcatgtcagctactatc

SEQ ID NO: 3382230 - DNA, 25 bp, Homo sapien
tttgggcatgtcagctactatcatc

SEQ ID NO: 3382231 - DNA, 25 bp, Homo sapien
ggcatgtcagctactatcatcatga

SEQ ID NO: 3382232 - DNA, 25 bp, Homo sapien
ggcaactccatagaatcctacagaa

SEQ ID NO: 3382233 - DNA, 25 bp, Homo sapien
aatgttacacacaccagatctggga

SEQ ID NO: 3382234 - DNA, 25 bp, Homo sapien
gattgctgagcttgcctgtaggaca

SEQ ID NO: 3382235 - DNA, 25 bp, Homo sapien
tgtatgaactccaaggtcacattag

SEQ ID NO: 3382236 - DNA, 25 bp, Homo sapien
tcaccaatgactgggtttctggaga

SEQ ID NO: 3382237 - DNA, 25 bp, Homo sapien
atgaggaaggccagctttgctagag

SEQ ID NO: 3382238 - DNA, 25 bp, Homo sapien
gatggtaaaatatgcagctgccagg

SEQ ID NO: 3382239 - DNA, 25 bp, Homo sapien
agctgcctccttgatcaccaatgac

SEQ ID NO: 3382240 - DNA, 25 bp, Homo sapien
gtgaacaaagcaaaccaggagggtc

SEQ ID NO: 3382241 - DNA, 25 bp, Homo sapien
cttcttcccatgcagtgaacaaagc

SEQ ID NO: 3382242 - DNA, 25 bp, Homo sapien
ttaattctgaccagcttttcttctt

SEQ ID NO: 3382243 - DNA, 25 bp, Homo sapien
ggagggtcctctccaggtttgatac

SEQ ID NO: 3382244 - DNA, 25 bp, Homo sapien
gacattggtggctctgctaaacctc

SEQ ID NO: 3382245 - DNA, 25 bp, Homo sapien
tggtagcaaatctaggccccgtcag

SEQ ID NO: 3382246 - DNA, 25 bp, Homo sapien
cgtcagccaccctattgacattggt

SEQ ID NO: 3382247 - DNA, 25 bp, Homo sapien
gacacatggtaatgctgtgccttga

SEQ ID NO: 3382248 - DNA, 25 bp, Homo sapien
gggtgtgggaccataattcactcca

SEQ ID NO: 3382249 - DNA, 25 bp, Homo sapien
tgacacccctgggaatatctatggg

SEQ ID NO: 3382250 - DNA, 25 bp, Homo sapien
gaaagattggctgttactgctccac

SEQ ID NO: 3382251 - DNA, 25 bp, Homo sapien
tagccagtcatccagagtcaccttg

SEQ ID NO: 3382252 - DNA, 25 bp, Homo sapien
tatgtccagcgacttggagagagac

SEQ ID NO: 3382253 - DNA, 25 bp, Homo sapien
ggagagagaccatcgccctcatgtt

SEQ ID NO: 3382254 - DNA, 25 bp, Homo sapien
gatgtctcaaacttcagatgggagg

SEQ ID NO: 3382255 - DNA, 25 bp, Homo sapien
aaataccagaaaatgagggccgctt

SEQ ID NO: 3382256 - DNA, 25 bp, Homo sapien
aggtttgagcctttaaatgtgtggc

SEQ ID NO: 3382257 - DNA, 25 bp, Homo sapien
cttccccagatccacatccctgtgt

SEQ ID NO: 3382258 - DNA, 25 bp, Homo sapien
catccctgtgtaccttgagcctgag

SEQ ID NO: 3382259 - DNA, 25 bp, Homo sapien
tgaggtaggtttgagcctttaaatg

SEQ ID NO: 3382260 - DNA, 25 bp, Homo sapien
cacttatccctcatatttaggtggg

SEQ ID NO: 3382261 - DNA, 25 bp, Homo sapien
gggtaccagtacatcttttgttgac

SEQ ID NO: 3382262 - DNA, 25 bp, Homo sapien
tgcaaagaatgacatatccttcctc

SEQ ID NO: 3382263 - DNA, 25 bp, Homo sapien
tgttgacaaggagacaaggaccagg

SEQ ID NO: 3382264 - DNA, 25 bp, Homo sapien
gagaacttagtgctcccagttcagc

SEQ ID NO: 3382265 - DNA, 25 bp, Homo sapien
acaaagaccaggagttcattgcaga

SEQ ID NO: 3382266 - DNA, 25 bp, Homo sapien
gatgggcatccagacaaagaccagg

SEQ ID NO: 3382267 - DNA, 25 bp, Homo sapien
gctgacaacttgcagaaagatgggc

SEQ ID NO: 3382268 - DNA, 25 bp, Homo sapien
ccatcagaactatgggttgggctgt

SEQ ID NO: 3382269 - DNA, 25 bp, Homo sapien
gaaggttagcctcttttttcatgcc

SEQ ID NO: 3382270 - DNA, 25 bp, Homo sapien
ctgaaggttagcctcttttttcatg

SEQ ID NO: 3382271 - DNA, 25 bp, Homo sapien
tatgggttgggctgtatgtgaactc

SEQ ID NO: 3382272 - DNA, 25 bp, Homo sapien
tgcaccaaatctgacaccagttggc

SEQ ID NO: 3382273 - DNA, 25 bp, Homo sapien
gaaattcaccccagagatgtctgca

SEQ ID NO: 3382274 - DNA, 25 bp, Homo sapien
ccagttggctcagtatctccccttt

SEQ ID NO: 3382275 - DNA, 25 bp, Homo sapien
tactggaaattcaccccagagatgt

SEQ ID NO: 3382276 - DNA, 25 bp, Homo sapien
cctgcaggaacctggaatctctatc

SEQ ID NO: 3382277 - DNA, 25 bp, Homo sapien
gcaggaacctggaatctctatcttc

SEQ ID NO: 3382278 - DNA, 25 bp, Homo sapien
gacctgcaggaacctggaatctcta

SEQ ID NO: 3382279 - DNA, 25 bp, Homo sapien
tgcaggaacctggaatctctatctt

SEQ ID NO: 3382280 - DNA, 25 bp, Homo sapien
tggcatcagtgttgtacgctatggt

SEQ ID NO: 3382281 - DNA, 25 bp, Homo sapien
gcatcagtgttgtacgctatggtca

SEQ ID NO: 3382282 - DNA, 25 bp, Homo sapien
gtggtggcatcagtgttgtacgcta

SEQ ID NO: 3382283 - DNA, 25 bp, Homo sapien
atcagtgttgtacgctatggtcacc

SEQ ID NO: 3382284 - DNA, 25 bp, Homo sapien
gagatttaattcactcacaacccag

SEQ ID NO: 3382285 - DNA, 25 bp, Homo sapien
tttaattcactcacaacccagcatg

SEQ ID NO: 3382286 - DNA, 25 bp, Homo sapien
aatgagcaccaagtgaacagagaag

SEQ ID NO: 3382287 - DNA, 25 bp, Homo sapien
atgagcaccaagtgaacagagaagc

SEQ ID NO: 3382288 - DNA, 25 bp, Homo sapien
tgacagactagcaggatgagtcctg

SEQ ID NO: 3382289 - DNA, 25 bp, Homo sapien
atgcacagcaatgctcttctcaatt

SEQ ID NO: 3382290 - DNA, 25 bp, Homo sapien
ctgatgacagactagcaggatgagt

SEQ ID NO: 3382291 - DNA, 25 bp, Homo sapien
gatgacagactagcaggatgagtcc

SEQ ID NO: 3382292 - DNA, 25 bp, Homo sapien
tgggattgtcaattagtcgcctcat

SEQ ID NO: 3382293 - DNA, 25 bp, Homo sapien
taattgggattgtcaattagtcgcc

SEQ ID NO: 3382294 - DNA, 25 bp, Homo sapien
tcataattgggattgtcaattagtc

SEQ ID NO: 3382295 - DNA, 25 bp, Homo sapien
gacctttgatgttctcatgtgtcat

SEQ ID NO: 3382296 - DNA, 25 bp, Homo sapien
ctccagcccatcttattcttaaggc

SEQ ID NO: 3382297 - DNA, 25 bp, Homo sapien
ttaatgacagttatcttcagcatcc

SEQ ID NO: 3382298 - DNA, 25 bp, Homo sapien
gcccttggcagtcttaatgacagtt

SEQ ID NO: 3382299 - DNA, 25 bp, Homo sapien
cagcccatcttattcttaaggcctt

SEQ ID NO: 3382300 - DNA, 25 bp, Homo sapien
tctgaggtctggcagaactggtagc

SEQ ID NO: 3382301 - DNA, 25 bp, Homo sapien
gggaagcaccactcttcgcagggcc

SEQ ID NO: 3382302 - DNA, 25 bp, Homo sapien
gcagaactggtagcccagtagttct

SEQ ID NO: 3382303 - DNA, 25 bp, Homo sapien
tctggcagaactggtagcccagtag

SEQ ID NO: 3382304 - DNA, 25 bp, Homo sapien
cagcgaccctaaataagtccgccgg

SEQ ID NO: 3382305 - DNA, 25 bp, Homo sapien
ccggttcgctctctgacgcttggca

SEQ ID NO: 3382306 - DNA, 25 bp, Homo sapien
cctggagagcattcgggaaaacttg

SEQ ID NO: 3382307 - DNA, 25 bp, Homo sapien
gaacccctgcaggtgatgctcactg

SEQ ID NO: 3382308 - DNA, 25 bp, Homo sapien
cacttcgctgaagcgcctgagagct

SEQ ID NO: 3382309 - DNA, 25 bp, Homo sapien
cggagatggtctatgcccgggtctc

SEQ ID NO: 3382310 - DNA, 25 bp, Homo sapien
gggtctctatctctctcgttccaca

SEQ ID NO: 3382311 - DNA, 25 bp, Homo sapien
cactgctgcgccgaagttggcttac

SEQ ID NO: 3382312 - DNA, 25 bp, Homo sapien
tccgattgcgtcatagctcgcactg

SEQ ID NO: 3382313 - DNA, 25 bp, Homo sapien
gattgcgtcatagctcgcactgccg

SEQ ID NO: 3382314 - DNA, 25 bp, Homo sapien
tgcgtcatagctcgcactgccggca

SEQ ID NO: 3382315 - DNA, 25 bp, Homo sapien
cgagctccgattgcgtcatagctcg

SEQ ID NO: 3382316 - DNA, 25 bp, Homo sapien
actagagtttcagggcagcgcgagc

SEQ ID NO: 3382317 - DNA, 25 bp, Homo sapien
ctggcgactagagtttcagggcagc

SEQ ID NO: 3382318 - DNA, 25 bp, Homo sapien
cgcgagcggccggtcgacccgggat

SEQ ID NO: 3382319 - DNA, 25 bp, Homo sapien
cggtcgacccgggatgaacaccaca

SEQ ID NO: 3382320 - DNA, 25 bp, Homo sapien
ccgcctggtacaggaccaagatact

SEQ ID NO: 3382321 - DNA, 25 bp, Homo sapien
aatggcgccgcctggaggctgcccg

SEQ ID NO: 3382322 - DNA, 25 bp, Homo sapien
ctggtacaggaccaagatactgaga

SEQ ID NO: 3382323 - DNA, 25 bp, Homo sapien
tgaatggcgccgcctggaggctgcc

SEQ ID NO: 3382324 - DNA, 25 bp, Homo sapien
gaggcgcgcgtcctctttactgagt

SEQ ID NO: 3382325 - DNA, 25 bp, Homo sapien
aggcgcgcgtcctctttactgagtg

SEQ ID NO: 3382326 - DNA, 25 bp, Homo sapien
gcgcgcgtcctctttactgagtgtg

SEQ ID NO: 3382327 - DNA, 25 bp, Homo sapien
ggcgcgcgtcctctttactgagtgt

SEQ ID NO: 3382328 - DNA, 25 bp, Homo sapien
cctgcctcttgggatccaccttcct

SEQ ID NO: 3382329 - DNA, 25 bp, Homo sapien
cttggaacttgagaaagggagcctg

SEQ ID NO: 3382330 - DNA, 25 bp, Homo sapien
ggcttcttgcaggtatgaaagaatg

SEQ ID NO: 3382331 - DNA, 25 bp, Homo sapien
tattgggtctattcctgacttcacc

SEQ ID NO: 3382332 - DNA, 25 bp, Homo sapien
catccaatgctaggagatctcccag

SEQ ID NO: 3382333 - DNA, 25 bp, Homo sapien
caccttgcaaatgtgaaatgaaggc

SEQ ID NO: 3382334 - DNA, 25 bp, Homo sapien
ttcacacactgttcttgctgcttga

SEQ ID NO: 3382335 - DNA, 25 bp, Homo sapien
cagctccttcacacactgttcttgc

SEQ ID NO: 3382336 - DNA, 25 bp, Homo sapien
gttcttgctgcttgagctgggtcat

SEQ ID NO: 3382337 - DNA, 25 bp, Homo sapien
cacacactgttcttgctgcttgagc

SEQ ID NO: 3382338 - DNA, 25 bp, Homo sapien
gggaggagccttcatgaagagaact

SEQ ID NO: 3382339 - DNA, 25 bp, Homo sapien
agccttcatgaagagaactgcaaca

SEQ ID NO: 3382340 - DNA, 25 bp, Homo sapien
aggagccttcatgaagagaactgca

SEQ ID NO: 3382341 - DNA, 25 bp, Homo sapien
gagccttcatgaagagaactgcaac

SEQ ID NO: 3382342 - DNA, 25 bp, Homo sapien
tttgcaagatagagaaagaagagaa

SEQ ID NO: 3382343 - DNA, 25 bp, Homo sapien
gcaagatagagaaagaagagaagac

SEQ ID NO: 3382344 - DNA, 25 bp, Homo sapien
ctgatttgcaagatagagaaagaag

SEQ ID NO: 3382345 - DNA, 25 bp, Homo sapien
gatttgcaagatagagaaagaagag

SEQ ID NO: 3382346 - DNA, 25 bp, Homo sapien
ccgatgagtcacacaggtggcagtg

SEQ ID NO: 3382347 - DNA, 25 bp, Homo sapien
ctcagcaagcctgccagccgatgag

SEQ ID NO: 3382348 - DNA, 25 bp, Homo sapien
caaaggctttggaacccacattggt

SEQ ID NO: 3382349 - DNA, 25 bp, Homo sapien
ctttggaacccacattggtgggcac

SEQ ID NO: 3382350 - DNA, 25 bp, Homo sapien
cttcttcctggagtcattcatctgc

SEQ ID NO: 3382351 - DNA, 25 bp, Homo sapien
tcctttcaagtgacaaaggtgccct

SEQ ID NO: 3382352 - DNA, 25 bp, Homo sapien
tcggagaccacaacaggcagtgatt

SEQ ID NO: 3382353 - DNA, 25 bp, Homo sapien
tgcatgatcaacaggatggctccga

SEQ ID NO: 3382354 - DNA, 25 bp, Homo sapien
ccagataagtcaatgagagatgcca

SEQ ID NO: 3382355 - DNA, 25 bp, Homo sapien
tgaccttgggaccttagttaggcaa

SEQ ID NO: 3382356 - DNA, 25 bp, Homo sapien
tgttggtagacccacattacctggt

SEQ ID NO: 3382357 - DNA, 25 bp, Homo sapien
tactagagctctcatatgtggctgg

SEQ ID NO: 3382358 - DNA, 25 bp, Homo sapien
caaatggcactgaaacaattgggta

SEQ ID NO: 3382359 - DNA, 25 bp, Homo sapien
aatgaaaccagtgaggacaatgtgt

SEQ ID NO: 3382360 - DNA, 25 bp, Homo sapien
caagccggtacttggtgactccgat

SEQ ID NO: 3382361 - DNA, 25 bp, Homo sapien
ggacaatgtgtacaagccggtactt

SEQ ID NO: 3382362 - DNA, 25 bp, Homo sapien
gactccgatctgagtcacaaagtta

SEQ ID NO: 3382363 - DNA, 25 bp, Homo sapien
gtgactcacattggaccttccctgg

SEQ ID NO: 3382364 - DNA, 25 bp, Homo sapien
ctctgtcttgtctggaacagcttct

SEQ ID NO: 3382365 - DNA, 25 bp, Homo sapien
cagcaggacaacctcagcaaagtca

SEQ ID NO: 3382366 - DNA, 25 bp, Homo sapien
tgcctaactgaggaagtgactcaca

SEQ ID NO: 3382367 - DNA, 25 bp, Homo sapien
tggctgcagcgactccaagtctcct

SEQ ID NO: 3382368 - DNA, 25 bp, Homo sapien
tctccattgccagggggccgtctca

SEQ ID NO: 3382369 - DNA, 25 bp, Homo sapien
tgccagggggccgtctcatggctcc

SEQ ID NO: 3382370 - DNA, 25 bp, Homo sapien
tacagaggcccctgtgaacagcttc

SEQ ID NO: 3382371 - DNA, 25 bp, Homo sapien
tcctggactccccatagaccccagc

SEQ ID NO: 3382372 - DNA, 25 bp, Homo sapien
ggactcctggactccccatagaccc

SEQ ID NO: 3382373 - DNA, 25 bp, Homo sapien
cctcctggactcctggactccccat

SEQ ID NO: 3382374 - DNA, 25 bp, Homo sapien
cctggactcctggactccccataga

SEQ ID NO: 3382375 - DNA, 25 bp, Homo sapien
agggtgatcgcccgggagccgcgaa

SEQ ID NO: 3382376 - DNA, 25 bp, Homo sapien
gaagggaatgtgccgcgatcgtttc

SEQ ID NO: 3382377 - DNA, 25 bp, Homo sapien
caggcggggtcgcccacaaggtgcc

SEQ ID NO: 3382378 - DNA, 25 bp, Homo sapien
aaggtgccccgcatgccaacatctg

SEQ ID NO: 3382379 - DNA, 25 bp, Homo sapien
ttggtcccgcgtcagccacggctgc

SEQ ID NO: 3382380 - DNA, 25 bp, Homo sapien
ctgtctccgcgggactacgaggcta

SEQ ID NO: 3382381 - DNA, 25 bp, Homo sapien
ggactacgaggctatttcggtgccc

SEQ ID NO: 3382382 - DNA, 25 bp, Homo sapien
tgccaagccttggtcccgcgtcagc

SEQ ID NO: 3382383 - DNA, 25 bp, Homo sapien
cgagacaggctggtagtgcgagcgg

SEQ ID NO: 3382384 - DNA, 25 bp, Homo sapien
tgcgagacaggctggtagtgcgagc

SEQ ID NO: 3382385 - DNA, 25 bp, Homo sapien
ttagcgtgcgagacaggctggtagt

SEQ ID NO: 3382386 - DNA, 25 bp, Homo sapien
gcgtgcgagacaggctggtagtgcg

SEQ ID NO: 3382387 - DNA, 25 bp, Homo sapien
gtcgttgtccacaggtatacatgtt

SEQ ID NO: 3382388 - DNA, 25 bp, Homo sapien
cactccagtgttgtgtgagggctct

SEQ ID NO: 3382389 - DNA, 25 bp, Homo sapien
tgtgtgcaagactggtgcacatgga

SEQ ID NO: 3382390 - DNA, 25 bp, Homo sapien
gaatggttgcatggctatcctgaga

SEQ ID NO: 3382391 - DNA, 25 bp, Homo sapien
catatgcattgaacaaagtgggtgc

SEQ ID NO: 3382392 - DNA, 25 bp, Homo sapien
gaacaaagtgggtgcatgttgcata

SEQ ID NO: 3382393 - DNA, 25 bp, Homo sapien
tgcgcatatgcattgaacaaagtgg

SEQ ID NO: 3382394 - DNA, 25 bp, Homo sapien
attgaacaaagtgggtgcatgttgc

SEQ ID NO: 3382395 - DNA, 25 bp, Homo sapien
cgaacagtgcttctaagtcccagag

SEQ ID NO: 3382396 - DNA, 25 bp, Homo sapien
aaagggcgaacagtgcttctaagtc

SEQ ID NO: 3382397 - DNA, 25 bp, Homo sapien
ttcacttctaaaagggcgaacagtg

SEQ ID NO: 3382398 - DNA, 25 bp, Homo sapien
ttctaaaagggcgaacagtgcttct

SEQ ID NO: 3382399 - DNA, 25 bp, Homo sapien
agggctcagatccaagagacacaga

SEQ ID NO: 3382400 - DNA, 25 bp, Homo sapien
gggagggctcagatccaagagacac

SEQ ID NO: 3382401 - DNA, 25 bp, Homo sapien
acaagggccatccctgatcagagat

SEQ ID NO: 3382402 - DNA, 25 bp, Homo sapien
tccatactgggggagggctcagatc

SEQ ID NO: 3382403 - DNA, 25 bp, Homo sapien
gaggtgcacctctgcagataagagg

SEQ ID NO: 3382404 - DNA, 25 bp, Homo sapien
tcagatgaggtgcacctctgcagat

SEQ ID NO: 3382405 - DNA, 25 bp, Homo sapien
gtgcacctctgcagataagaggtga

SEQ ID NO: 3382406 - DNA, 25 bp, Homo sapien
gatgaggtgcacctctgcagataag

SEQ ID NO: 3382407 - DNA, 25 bp, Homo sapien
taaagcccaggggacaaccagagtc

SEQ ID NO: 3382408 - DNA, 25 bp, Homo sapien
gggacaaccagagtctaaatagtgt

SEQ ID NO: 3382409 - DNA, 25 bp, Homo sapien
cagagtctaaatagtgtgaaaattc

SEQ ID NO: 3382410 - DNA, 25 bp, Homo sapien
tggttgagcttaaagcccaggggac

SEQ ID NO: 3382411 - DNA, 25 bp, Homo sapien
gctggaaaggccaatgatgctgatc

SEQ ID NO: 3382412 - DNA, 25 bp, Homo sapien
ggctggaaaggccaatgatgctgat

SEQ ID NO: 3382413 - DNA, 25 bp, Homo sapien
ccaattttccagtagtatgtgctca

SEQ ID NO: 3382414 - DNA, 25 bp, Homo sapien
tttcattactattgtatctgctgtg

SEQ ID NO: 3382415 - DNA, 25 bp, Homo sapien
ggacaaacccgcatcaaacaaatct

SEQ ID NO: 3382416 - DNA, 25 bp, Homo sapien
ggtcacaaattgcacccccataaga

SEQ ID NO: 3382417 - DNA, 25 bp, Homo sapien
tccagtatcctcacacaagtaaggc

SEQ ID NO: 3382418 - DNA, 25 bp, Homo sapien
ctcttcttctgttgaaccagtttac

SEQ ID NO: 3382419 - DNA, 25 bp, Homo sapien
agagggcaggatggcacaacgagat

SEQ ID NO: 3382420 - DNA, 25 bp, Homo sapien
aatagagggcaggatggcacaacga

SEQ ID NO: 3382421 - DNA, 25 bp, Homo sapien
gagggcaggatggcacaacgagatc

SEQ ID NO: 3382422 - DNA, 25 bp, Homo sapien
gaaaatagagggcaggatggcacaa

SEQ ID NO: 3382423 - DNA, 25 bp, Homo sapien
aagcctgcttgcagcggtcgtgacc

SEQ ID NO: 3382424 - DNA, 25 bp, Homo sapien
caaagcctgcttgcagcggtcgtga

SEQ ID NO: 3382425 - DNA, 25 bp, Homo sapien
gcaaagcctgcttgcagcggtcgtg

SEQ ID NO: 3382426 - DNA, 25 bp, Homo sapien
aaagcctgcttgcagcggtcgtgac

SEQ ID NO: 3382427 - DNA, 25 bp, Homo sapien
ggtggcgacctccaggcagtgccat

SEQ ID NO: 3382428 - DNA, 25 bp, Homo sapien
ccggcagggtgacggagtccaggtg

SEQ ID NO: 3382429 - DNA, 25 bp, Homo sapien
gacggagtccaggtggcgacctcca

SEQ ID NO: 3382430 - DNA, 25 bp, Homo sapien
tggcgacctccaggcagtgccatca

SEQ ID NO: 3382431 - DNA, 25 bp, Homo sapien
gacatccaagggtagaatgacacct

SEQ ID NO: 3382432 - DNA, 25 bp, Homo sapien
ctcattgcccaactcaggacaacaa

SEQ ID NO: 3382433 - DNA, 25 bp, Homo sapien
agacatccaagggtagaatgacacc

SEQ ID NO: 3382434 - DNA, 25 bp, Homo sapien
aactcaggacaacaagtacttccca

SEQ ID NO: 3382435 - DNA, 25 bp, Homo sapien
tgctatccaggaagctcgtctctga

SEQ ID NO: 3382436 - DNA, 25 bp, Homo sapien
ccagaggagcaaatgaagaccagcc

SEQ ID NO: 3382437 - DNA, 25 bp, Homo sapien
caagaagatcagcatcccagatgga

SEQ ID NO: 3382438 - DNA, 25 bp, Homo sapien
catgcccagaaccaacaagaagatc

SEQ ID NO: 3382439 - DNA, 25 bp, Homo sapien
agaagttgcctgtctcaagtcctac

SEQ ID NO: 3382440 - DNA, 25 bp, Homo sapien
agttgcctgtctcaagtcctacagc

SEQ ID NO: 3382441 - DNA, 25 bp, Homo sapien
cctggagacctagtctcctggtgtt

SEQ ID NO: 3382442 - DNA, 25 bp, Homo sapien
gacctagtctcctggtgttctccat

SEQ ID NO: 3382443 - DNA, 25 bp, Homo sapien
ccctctgcaccaaggctcttgtgaa

SEQ ID NO: 3382444 - DNA, 25 bp, Homo sapien
tgcttctgatctgcctctgaatccc

SEQ ID NO: 3382445 - DNA, 25 bp, Homo sapien
tgtgaagccccagtcaaatgtgact

SEQ ID NO: 3382446 - DNA, 25 bp, Homo sapien
tgtgactactctaatcttgatcaaa

SEQ ID NO: 3382447 - DNA, 25 bp, Homo sapien
gaagacattcggaggctctggccta

SEQ ID NO: 3382448 - DNA, 25 bp, Homo sapien
ttcggaggctctggcctattagcag

SEQ ID NO: 3382449 - DNA, 25 bp, Homo sapien
catgccgcttatgtccagggcaggg

SEQ ID NO: 3382450 - DNA, 25 bp, Homo sapien
cccaggcccatcaagcaggtgcatg

SEQ ID NO: 3382451 - DNA, 25 bp, Homo sapien
tgctaatgacccaaccccgtttgag

SEQ ID NO: 3382452 - DNA, 25 bp, Homo sapien
tgcactcgcactcggtcatgagctt

SEQ ID NO: 3382453 - DNA, 25 bp, Homo sapien
gatcctgcgcagctctgtgctaatg

SEQ ID NO: 3382454 - DNA, 25 bp, Homo sapien
gcactgtactcgctgaccatggagc

SEQ ID NO: 3382455 - DNA, 25 bp, Homo sapien
tcaactcagtaagcattaactgagg

SEQ ID NO: 3382456 - DNA, 25 bp, Homo sapien
gatacaggtggtgaaagagctcacg

SEQ ID NO: 3382457 - DNA, 25 bp, Homo sapien
cagtaagcattaactgaggaccaac

SEQ ID NO: 3382458 - DNA, 25 bp, Homo sapien
cacggtaggctgctttgggagtata

SEQ ID NO: 3382459 - DNA, 25 bp, Homo sapien
actgccgagagctccgagcatttct

SEQ ID NO: 3382460 - DNA, 25 bp, Homo sapien
gagcatttctccattagcagcttct

SEQ ID NO: 3382461 - DNA, 25 bp, Homo sapien
gtgactgccgagagctccgagcatt

SEQ ID NO: 3382462 - DNA, 25 bp, Homo sapien
ccgagcatttctccattagcagctt

SEQ ID NO: 3382463 - DNA, 25 bp, Homo sapien
gacttcaggacatgctcattctcaa

SEQ ID NO: 3382464 - DNA, 25 bp, Homo sapien
acttcaggacatgctcattctcaac

SEQ ID NO: 3382465 - DNA, 25 bp, Homo sapien
caagacatggagagtggcccttgag

SEQ ID NO: 3382466 - DNA, 25 bp, Homo sapien
gggggtgataatacccaggacctgc

SEQ ID NO: 3382467 - DNA, 25 bp, Homo sapien
ctgtcaagacatggagagtggccct

SEQ ID NO: 3382468 - DNA, 25 bp, Homo sapien
ttccctttgtccctgtcaagacatg

SEQ ID NO: 3382469 - DNA, 25 bp, Homo sapien
tggctcatcagctccaagtgctgcc

SEQ ID NO: 3382470 - DNA, 25 bp, Homo sapien
agcactggctcatcagctccaagtg

SEQ ID NO: 3382471 - DNA, 25 bp, Homo sapien
actggctcatcagctccaagtgctg

SEQ ID NO: 3382472 - DNA, 25 bp, Homo sapien
tcagcactggctcatcagctccaag

SEQ ID NO: 3382473 - DNA, 25 bp, Homo sapien
ctggactagtggagattgaagcctc

SEQ ID NO: 3382474 - DNA, 25 bp, Homo sapien
ttttgccaaataggagagtgggtct

SEQ ID NO: 3382475 - DNA, 25 bp, Homo sapien
gattgaagcctcaaggcaaggctgt

SEQ ID NO: 3382476 - DNA, 25 bp, Homo sapien
tttgccaaataggagagtgggtctc

SEQ ID NO: 3382477 - DNA, 25 bp, Homo sapien
actctgtggtgtagatattgtctga

SEQ ID NO: 3382478 - DNA, 25 bp, Homo sapien
ggtgtagatattgtctgaggcatca

SEQ ID NO: 3382479 - DNA, 25 bp, Homo sapien
ggactctgtggtgtagatattgtct

SEQ ID NO: 3382480 - DNA, 25 bp, Homo sapien
ctgtggtgtagatattgtctgaggc

SEQ ID NO: 3382481 - DNA, 25 bp, Homo sapien
cctcttccacgcagcagatggaggc

SEQ ID NO: 3382482 - DNA, 25 bp, Homo sapien
tcctgccggcaaaccttgaagagtg

SEQ ID NO: 3382483 - DNA, 25 bp, Homo sapien
tccagctggtggacaccctcttcca

SEQ ID NO: 3382484 - DNA, 25 bp, Homo sapien
gtacaagcaccggaaactgtcctgc

SEQ ID NO: 3382485 - DNA, 25 bp, Homo sapien
gcaccacccagccagctgtccttac

SEQ ID NO: 3382486 - DNA, 25 bp, Homo sapien
tcaggcaccacccagccagctgtcc

SEQ ID NO: 3382487 - DNA, 25 bp, Homo sapien
aggcaccacccagccagctgtcctt

SEQ ID NO: 3382488 - DNA, 25 bp, Homo sapien
ctggcttgaggacctcaggcaccac

SEQ ID NO: 3382489 - DNA, 25 bp, Homo sapien
tctggatcctcttccgtctttagga

SEQ ID NO: 3382490 - DNA, 25 bp, Homo sapien
agacacccagtgctgccctgctctt

SEQ ID NO: 3382491 - DNA, 25 bp, Homo sapien
ttgcccagtcaatgctcccaggatc

SEQ ID NO: 3382492 - DNA, 25 bp, Homo sapien
ggatcctcttccgtctttaggaggc

SEQ ID NO: 3382493 - DNA, 25 bp, Homo sapien
tcccattttccctgccaaccagaca

SEQ ID NO: 3382494 - DNA, 25 bp, Homo sapien
tacaatcggcttttggagggctggt

SEQ ID NO: 3382495 - DNA, 25 bp, Homo sapien
ggagggctggtgatcccaagctcct

SEQ ID NO: 3382496 - DNA, 25 bp, Homo sapien
taaagccatacaatcggcttttgga

SEQ ID NO: 3382497 - DNA, 25 bp, Homo sapien
ggtaagtcttattcctcttcagtgc

SEQ ID NO: 3382498 - DNA, 25 bp, Homo sapien
agggtaagtcttattcctcttcagt

SEQ ID NO: 3382499 - DNA, 25 bp, Homo sapien
gggtaagtcttattcctcttcagtg

SEQ ID NO: 3382500 - DNA, 25 bp, Homo sapien
cagggtaagtcttattcctcttcag

SEQ ID NO: 3382501 - DNA, 25 bp, Homo sapien
cagatgtcctgaagcttaggatgca

SEQ ID NO: 3382502 - DNA, 25 bp, Homo sapien
tgcagcccagatgaaccagacctcc

SEQ ID NO: 3382503 - DNA, 25 bp, Homo sapien
tgtcctgaagcttaggatgcaggga

SEQ ID NO: 3382504 - DNA, 25 bp, Homo sapien
tccagaacccagcataggggtaggg

SEQ ID NO: 3382505 - DNA, 25 bp, Homo sapien
ggcctcctgcttatagcctctgatg

SEQ ID NO: 3382506 - DNA, 25 bp, Homo sapien
ctcctgcttatagcctctgatggcc

SEQ ID NO: 3382507 - DNA, 25 bp, Homo sapien
gggcctcctgcttatagcctctgat

SEQ ID NO: 3382508 - DNA, 25 bp, Homo sapien
gcctcctgcttatagcctctgatgg

SEQ ID NO: 3382509 - DNA, 25 bp, Homo sapien
aaccaggtcctttgggggcaatgtg

SEQ ID NO: 3382510 - DNA, 25 bp, Homo sapien
tgcaaaatccccaataaccaggtcc

SEQ ID NO: 3382511 - DNA, 25 bp, Homo sapien
ctgccatggtcattgcaaaatcccc

SEQ ID NO: 3382512 - DNA, 25 bp, Homo sapien
aatgtgaagttttccccagaccagc

SEQ ID NO: 3382513 - DNA, 25 bp, Homo sapien
tgcaaagccttagcccattcccatg

SEQ ID NO: 3382514 - DNA, 25 bp, Homo sapien
agcccattcccatgggagttgaagg

SEQ ID NO: 3382515 - DNA, 25 bp, Homo sapien
ccattcccatgggagttgaaggcta

SEQ ID NO: 3382516 - DNA, 25 bp, Homo sapien
cccatgggagttgaaggctagtgtt

SEQ ID NO: 3382517 - DNA, 25 bp, Homo sapien
agacaggagccttggtatgtcgaaa

SEQ ID NO: 3382518 - DNA, 25 bp, Homo sapien
agaaggctcaatcatgggccctgcc

SEQ ID NO: 3382519 - DNA, 25 bp, Homo sapien
ttggtatgtcgaaagtgaacaagcc

SEQ ID NO: 3382520 - DNA, 25 bp, Homo sapien
cctctgagaaggctcaatcatgggc

SEQ ID NO: 3382521 - DNA, 25 bp, Homo sapien
gcgggaaaggcgcagtccccgagcc

SEQ ID NO: 3382522 - DNA, 25 bp, Homo sapien
ctggcgggaaaggcgcagtccccga

SEQ ID NO: 3382523 - DNA, 25 bp, Homo sapien
cgggaaaggcgcagtccccgagcct

SEQ ID NO: 3382524 - DNA, 25 bp, Homo sapien
ggaaaggcgcagtccccgagccttc

SEQ ID NO: 3382525 - DNA, 25 bp, Homo sapien
gcctctgcggatggagcctgctcct

SEQ ID NO: 3382526 - DNA, 25 bp, Homo sapien
gatggagcggccactggtgttctta

SEQ ID NO: 3382527 - DNA, 25 bp, Homo sapien
cccaggcagcctgatggagcggcca

SEQ ID NO: 3382528 - DNA, 25 bp, Homo sapien
cactgctgcacttaggcacctggac

SEQ ID NO: 3382529 - DNA, 25 bp, Homo sapien
aaaatgggagtgatttctgttttga

SEQ ID NO: 3382530 - DNA, 25 bp, Homo sapien
gcagcccagaaccaggacttttaaa

SEQ ID NO: 3382531 - DNA, 25 bp, Homo sapien
cttttaaaatgggagtgatttctgt

SEQ ID NO: 3382532 - DNA, 25 bp, Homo sapien
gagtgatttctgttttgattcctaa

SEQ ID NO: 3382533 - DNA, 25 bp, Homo sapien
gtttaaccacttgtttagacatcca

SEQ ID NO: 3382534 - DNA, 25 bp, Homo sapien
catttatgcattctcccgtcgatgg

SEQ ID NO: 3382535 - DNA, 25 bp, Homo sapien
cttttgctataatggacagtgctgc

SEQ ID NO: 3382536 - DNA, 25 bp, Homo sapien
gtcttctggtgaacatctgccagtt

SEQ ID NO: 3382537 - DNA, 25 bp, Homo sapien
cagagatcccaatctaggagtggaa

SEQ ID NO: 3382538 - DNA, 25 bp, Homo sapien
gctccagtgggcctccagaggtctg

SEQ ID NO: 3382539 - DNA, 25 bp, Homo sapien
gaggcttctgtccctgcgtcttcct

SEQ ID NO: 3382540 - DNA, 25 bp, Homo sapien
ctgaggcttctgtccctgcgtcttc

SEQ ID NO: 3382541 - DNA, 25 bp, Homo sapien
ccagtgggcctccagaggtctgcat

SEQ ID NO: 3382542 - DNA, 25 bp, Homo sapien
ggagagagggagctcccctgtgcat

SEQ ID NO: 3382543 - DNA, 25 bp, Homo sapien
gatggagagagggagctcccctgtg

SEQ ID NO: 3382544 - DNA, 25 bp, Homo sapien
gcagatggagagagggagctcccct

SEQ ID NO: 3382545 - DNA, 25 bp, Homo sapien
ctgcagatggagagagggagctccc

SEQ ID NO: 3382546 - DNA, 25 bp, Homo sapien
tgacgagggctgtcacgatctcctc

SEQ ID NO: 3382547 - DNA, 25 bp, Homo sapien
tcggtcaggatgtcggccaagcaca

SEQ ID NO: 3382548 - DNA, 25 bp, Homo sapien
atgtcggccaagcacagaacgccat

SEQ ID NO: 3382549 - DNA, 25 bp, Homo sapien
gcctctgagtggctgttgtcggtca

SEQ ID NO: 3382550 - DNA, 25 bp, Homo sapien
aaagaacgtgatgttggcaagggcc

SEQ ID NO: 3382551 - DNA, 25 bp, Homo sapien
cgcaggccattgtgtcaaagaacgt

SEQ ID NO: 3382552 - DNA, 25 bp, Homo sapien
ctggtcccgagtgtaaggcgtgtcc

SEQ ID NO: 3382553 - DNA, 25 bp, Homo sapien
tgcaggagcatctcgcaggccattg

SEQ ID NO: 3382554 - DNA, 25 bp, Homo sapien
ctgcagcatgtaaagctcataatgg

SEQ ID NO: 3382555 - DNA, 25 bp, Homo sapien
agctcataatgggatgggcaaagag

SEQ ID NO: 3382556 - DNA, 25 bp, Homo sapien
catgtaaagctcataatgggatggg

SEQ ID NO: 3382557 - DNA, 25 bp, Homo sapien
taaagctcataatgggatgggcaaa

SEQ ID NO: 3382558 - DNA, 25 bp, Homo sapien
ccaaagcagcttcagttaagagata

SEQ ID NO: 3382559 - DNA, 25 bp, Homo sapien
gcagcttcagttaagagataagcct

SEQ ID NO: 3382560 - DNA, 25 bp, Homo sapien
aagcagcttcagttaagagataagc

SEQ ID NO: 3382561 - DNA, 25 bp, Homo sapien
gcttcagttaagagataagcctgga

SEQ ID NO: 3382562 - DNA, 25 bp, Homo sapien
tgacatgcagattcatggaggaagg

SEQ ID NO: 3382563 - DNA, 25 bp, Homo sapien
aggaaatctttgtctgcggcaacgg

SEQ ID NO: 3382564 - DNA, 25 bp, Homo sapien
cagtaattattagccgtgtcacagg

SEQ ID NO: 3382565 - DNA, 25 bp, Homo sapien
acaggggctgagacatcccaccatc

SEQ ID NO: 3382566 - DNA, 25 bp, Homo sapien
acttcttccatccaagcttctttcc

SEQ ID NO: 3382567 - DNA, 25 bp, Homo sapien
tgacttcttccatccaagcttcttt

SEQ ID NO: 3382568 - DNA, 25 bp, Homo sapien
ttcttccatccaagcttctttcctg

SEQ ID NO: 3382569 - DNA, 25 bp, Homo sapien
tctggattgacttcttccatccaag

SEQ ID NO: 3382570 - DNA, 25 bp, Homo sapien
tggggcccggttgtctttctgctct

SEQ ID NO: 3382571 - DNA, 25 bp, Homo sapien
aagactagcataaccctgggtgaag

SEQ ID NO: 3382572 - DNA, 25 bp, Homo sapien
tcagcctatggctataggacggccc

SEQ ID NO: 3382573 - DNA, 25 bp, Homo sapien
ctggaaagactagcataaccctggg

SEQ ID NO: 3382574 - DNA, 25 bp, Homo sapien
gtcagaggcacactgttctaggaca

SEQ ID NO: 3382575 - DNA, 25 bp, Homo sapien
tgtcagaggcacactgttctaggac

SEQ ID NO: 3382576 - DNA, 25 bp, Homo sapien
gatgtcagaggcacactgttctagg

SEQ ID NO: 3382577 - DNA, 25 bp, Homo sapien
atgtcagaggcacactgttctagga

SEQ ID NO: 3382578 - DNA, 25 bp, Homo sapien
aggcattcacacaagcacaaagaca

SEQ ID NO: 3382579 - DNA, 25 bp, Homo sapien
aaagacacagtcccctacatccaga

SEQ ID NO: 3382580 - DNA, 25 bp, Homo sapien
cattcacacaagcacaaagacacag

SEQ ID NO: 3382581 - DNA, 25 bp, Homo sapien
gacacagtcccctacatccagataa

SEQ ID NO: 3382582 - DNA, 25 bp, Homo sapien
ccacatctgggtctcggctgagacg

SEQ ID NO: 3382583 - DNA, 25 bp, Homo sapien
acggcctcccgtgccacatctgggt

SEQ ID NO: 3382584 - DNA, 25 bp, Homo sapien
tctgggtctcggctgagacgagcca

SEQ ID NO: 3382585 - DNA, 25 bp, Homo sapien
tctcggctgagacgagccagggtca

SEQ ID NO: 3382586 - DNA, 25 bp, Homo sapien
caagcacggcgtcactgctgttcct

SEQ ID NO: 3382587 - DNA, 25 bp, Homo sapien
cacaagcacggcgtcactgctgttc

SEQ ID NO: 3382588 - DNA, 25 bp, Homo sapien
aggccacaagcacggcgtcactgct

SEQ ID NO: 3382589 - DNA, 25 bp, Homo sapien
caggcaggccacaagcacggcgtca

SEQ ID NO: 3382590 - DNA, 25 bp, Homo sapien
ttttttacctgcagctgtatcccca

SEQ ID NO: 3382591 - DNA, 25 bp, Homo sapien
cttttttacctgcagctgtatcccc

SEQ ID NO: 3382592 - DNA, 25 bp, Homo sapien
tttttacctgcagctgtatccccat

SEQ ID NO: 3382593 - DNA, 25 bp, Homo sapien
tcttttttacctgcagctgtatccc

SEQ ID NO: 3382594 - DNA, 25 bp, Homo sapien
gctgagaaatcaggccaacaaagtg

SEQ ID NO: 3382595 - DNA, 25 bp, Homo sapien
gggtctgtgaccctagcaacaggaa

SEQ ID NO: 3382596 - DNA, 25 bp, Homo sapien
gacagagcgaaatagaacatagacc

SEQ ID NO: 3382597 - DNA, 25 bp, Homo sapien
gggtaaacttcacagcactttctga

SEQ ID NO: 3382598 - DNA, 25 bp, Homo sapien
accccagccaatctacgcagagcag

SEQ ID NO: 3382599 - DNA, 25 bp, Homo sapien
gaccaactgctgaaagtcagagtcc

SEQ ID NO: 3382600 - DNA, 25 bp, Homo sapien
agtccaccagccgaggctggaccaa

SEQ ID NO: 3382601 - DNA, 25 bp, Homo sapien
agccgaggctggaccaactgctgaa

SEQ ID NO: 3382602 - DNA, 25 bp, Homo sapien
aacatctgcaactgaaaagctacag

SEQ ID NO: 3382603 - DNA, 25 bp, Homo sapien
tgttcactggtgcatagtcagaggg

SEQ ID NO: 3382604 - DNA, 25 bp, Homo sapien
aagaagattctcaaggaccaaagac

SEQ ID NO: 3382605 - DNA, 25 bp, Homo sapien
taggcagttgaaatcctctggttcc

SEQ ID NO: 3382606 - DNA, 25 bp, Homo sapien
caagcagtgaaattggtaaaccagc

SEQ ID NO: 3382607 - DNA, 25 bp, Homo sapien
aaaggatccccagatttttgtgata

SEQ ID NO: 3382608 - DNA, 25 bp, Homo sapien
tagctcatggctaccaacgcaaggt

SEQ ID NO: 3382609 - DNA, 25 bp, Homo sapien
tgaggattctattcaccaggaggtg

SEQ ID NO: 3382610 - DNA, 25 bp, Homo sapien
ctctccaggggtagacattgtcttg

SEQ ID NO: 3382611 - DNA, 25 bp, Homo sapien
tcttgaagttcatgtgtatctttcc

SEQ ID NO: 3382612 - DNA, 25 bp, Homo sapien
tgaagttcatgtgtatctttcccat

SEQ ID NO: 3382613 - DNA, 25 bp, Homo sapien
ggtagacattgtcttgaagttcatg

SEQ ID NO: 3382614 - DNA, 25 bp, Homo sapien
gccattgaagaaatttccatgtaag

SEQ ID NO: 3382615 - DNA, 25 bp, Homo sapien
cactgccattgaagaaatttccatg

SEQ ID NO: 3382616 - DNA, 25 bp, Homo sapien
ctgccattgaagaaatttccatgta

SEQ ID NO: 3382617 - DNA, 25 bp, Homo sapien
ccattgaagaaatttccatgtaagt

SEQ ID NO: 3382618 - DNA, 25 bp, Homo sapien
ctgaggatcactcacaagcctgtta

SEQ ID NO: 3382619 - DNA, 25 bp, Homo sapien
gaggatcactcacaagcctgttacc

SEQ ID NO: 3382620 - DNA, 25 bp, Homo sapien
gatcactcacaagcctgttaccagg

SEQ ID NO: 3382621 - DNA, 25 bp, Homo sapien
actcacaagcctgttaccaggatga

SEQ ID NO: 3382622 - DNA, 25 bp, Homo sapien
tcaccgtaatgctgattggcaggca

SEQ ID NO: 3382623 - DNA, 25 bp, Homo sapien
gccacggaggcgaggcatctgcaat

SEQ ID NO: 3382624 - DNA, 25 bp, Homo sapien
caatctgtttcgcatgacatcccgc

SEQ ID NO: 3382625 - DNA, 25 bp, Homo sapien
ctgctggtaaatccccgctgctgga

SEQ ID NO: 3382626 - DNA, 25 bp, Homo sapien
cagacaactgtcatgtcacagttct

SEQ ID NO: 3382627 - DNA, 25 bp, Homo sapien
tcagacaactgtcatgtcacagttc

SEQ ID NO: 3382628 - DNA, 25 bp, Homo sapien
gtttcttgcctgtgggtccttgatt

SEQ ID NO: 3382629 - DNA, 25 bp, Homo sapien
gcctgtgggtccttgattatgctgt

SEQ ID NO: 3382630 - DNA, 25 bp, Homo sapien
tgtactcttcatatagtttcttgcc

SEQ ID NO: 3382631 - DNA, 25 bp, Homo sapien
tcctccgtgtactcttcatatagtt

SEQ ID NO: 3382632 - DNA, 25 bp, Homo sapien
gcccaaggccacttaacctgagtac

SEQ ID NO: 3382633 - DNA, 25 bp, Homo sapien
ccaaggccacttaacctgagtacac

SEQ ID NO: 3382634 - DNA, 25 bp, Homo sapien
agccaggcccaaggccacttaacct

SEQ ID NO: 3382635 - DNA, 25 bp, Homo sapien
gccaggcccaaggccacttaacctg

SEQ ID NO: 3382636 - DNA, 25 bp, Homo sapien
tctctattgcatccacgggccccag

SEQ ID NO: 3382637 - DNA, 25 bp, Homo sapien
acatctctctattgcatccacgggc

SEQ ID NO: 3382638 - DNA, 25 bp, Homo sapien
tctctctattgcatccacgggcccc

SEQ ID NO: 3382639 - DNA, 25 bp, Homo sapien
ctctattgcatccacgggccccagg

SEQ ID NO: 3382640 - DNA, 25 bp, Homo sapien
gcactgatggctgacgtcgtttagt

SEQ ID NO: 3382641 - DNA, 25 bp, Homo sapien
cgaggccactgtaaaggatagcact

SEQ ID NO: 3382642 - DNA, 25 bp, Homo sapien
gctgacgtcgtttagtgctgcttcc

SEQ ID NO: 3382643 - DNA, 25 bp, Homo sapien
taaaggatagcactgatggctgacg

SEQ ID NO: 3382644 - DNA, 25 bp, Homo sapien
caggaaaatggggagactctggcag

SEQ ID NO: 3382645 - DNA, 25 bp, Homo sapien
ctaccaggaaaatggggagactctg

SEQ ID NO: 3382646 - DNA, 25 bp, Homo sapien
gaaaatggggagactctggcagaat

SEQ ID NO: 3382647 - DNA, 25 bp, Homo sapien
ccaggaaaatggggagactctggca

SEQ ID NO: 3382648 - DNA, 25 bp, Homo sapien
catctctgtgtttcatcaaggcaga

SEQ ID NO: 3382649 - DNA, 25 bp, Homo sapien
aggcagacagcagaatccagaaagc

SEQ ID NO: 3382650 - DNA, 25 bp, Homo sapien
gaggaccaatggcatagagattgct

SEQ ID NO: 3382651 - DNA, 25 bp, Homo sapien
caggagatagacatatggactggtc

SEQ ID NO: 3382652 - DNA, 25 bp, Homo sapien
ccctcgctgtgcttcagataatgtc

SEQ ID NO: 3382653 - DNA, 25 bp, Homo sapien
tctgcaacccccttcagaaaactta

SEQ ID NO: 3382654 - DNA, 25 bp, Homo sapien
gtccaggttcacagatcgtcagaga

SEQ ID NO: 3382655 - DNA, 25 bp, Homo sapien
agtccaatgaatcccctcgctgtgc

SEQ ID NO: 3382656 - DNA, 25 bp, Homo sapien
tactatctctgtccagaatgcaccc

SEQ ID NO: 3382657 - DNA, 25 bp, Homo sapien
acccaggtacaagtaaggaagcaat

SEQ ID NO: 3382658 - DNA, 25 bp, Homo sapien
aggaagcaatcgagatatgccagcc

SEQ ID NO: 3382659 - DNA, 25 bp, Homo sapien
gatatgccagccaaaagagctgtca

SEQ ID NO: 3382660 - DNA, 25 bp, Homo sapien
gtcgatcgacaccagcgtcctgata

SEQ ID NO: 3382661 - DNA, 25 bp, Homo sapien
tcagtgcaattaacatcgtcgatcg

SEQ ID NO: 3382662 - DNA, 25 bp, Homo sapien
cccaaataacgagccatcagtgcaa

SEQ ID NO: 3382663 - DNA, 25 bp, Homo sapien
aattaatacagacgcgctgcctccc

SEQ ID NO: 3382664 - DNA, 25 bp, Homo sapien
ttctttgccaagtaggacaaaggcc

SEQ ID NO: 3382665 - DNA, 25 bp, Homo sapien
actcatgtcctcctaggtccctgat

SEQ ID NO: 3382666 - DNA, 25 bp, Homo sapien
cccgtcttctagaatcagtgaccac

SEQ ID NO: 3382667 - DNA, 25 bp, Homo sapien
tcagtgaccactcatgtcctcctag

SEQ ID NO: 3382668 - DNA, 25 bp, Homo sapien
caacaggaagaggattacccagcat

SEQ ID NO: 3382669 - DNA, 25 bp, Homo sapien
ccagcatgacatccattgctgttag

SEQ ID NO: 3382670 - DNA, 25 bp, Homo sapien
cactggtaattgctcaggtcctttc

SEQ ID NO: 3382671 - DNA, 25 bp, Homo sapien
cacagaaattgctgatattgaagag

SEQ ID NO: 3382672 - DNA, 25 bp, Homo sapien
gagcctgaaccagatgaaacatgca

SEQ ID NO: 3382673 - DNA, 25 bp, Homo sapien
gaatttgcggctgtgatgttccaag

SEQ ID NO: 3382674 - DNA, 25 bp, Homo sapien
tgaaacatgcaaggaaaatgctttc

SEQ ID NO: 3382675 - DNA, 25 bp, Homo sapien
ttctccaaaccagggaatttgcggc

SEQ ID NO: 3382676 - DNA, 25 bp, Homo sapien
ctgctctctctacattccttggttc

SEQ ID NO: 3382677 - DNA, 25 bp, Homo sapien
tgctctctctacattccttggttct

SEQ ID NO: 3382678 - DNA, 25 bp, Homo sapien
ccaagaagatgcaagtagtaagatt

SEQ ID NO: 3382679 - DNA, 25 bp, Homo sapien
ttcaatatttgagcaacagccacag

SEQ ID NO: 3382680 - DNA, 25 bp, Homo sapien
attttcaatatttgagcaacagcca

SEQ ID NO: 3382681 - DNA, 25 bp, Homo sapien
cagccacagaaggatatttagccaa

SEQ ID NO: 3382682 - DNA, 25 bp, Homo sapien
tacagatgacctcactattgtgttc

SEQ ID NO: 3382683 - DNA, 25 bp, Homo sapien
tagcaggtggcttaggattaacatc

SEQ ID NO: 3382684 - DNA, 25 bp, Homo sapien
atccattaacgtcttcttgccccaa

SEQ ID NO: 3382685 - DNA, 25 bp, Homo sapien
agaggcaaaacaaactagcaggtgg

SEQ ID NO: 3382686 - DNA, 25 bp, Homo sapien
tcagatgctttgtgagcctcacacc

SEQ ID NO: 3382687 - DNA, 25 bp, Homo sapien
tgaaatctgcacatgacccctgtgt

SEQ ID NO: 3382688 - DNA, 25 bp, Homo sapien
tgtgtctgccactcatccgaaggat

SEQ ID NO: 3382689 - DNA, 25 bp, Homo sapien
tcaaaggagagtagtgaatgttgcc

SEQ ID NO: 3382690 - DNA, 25 bp, Homo sapien
gtttgtacagggatatggcagccca

SEQ ID NO: 3382691 - DNA, 25 bp, Homo sapien
ggaagatgctgaaagaccaccagtc

SEQ ID NO: 3382692 - DNA, 25 bp, Homo sapien
actcccagcaagaggaagtggcttt

SEQ ID NO: 3382693 - DNA, 25 bp, Homo sapien
tgtgtaactgtccacctgatgtgca

SEQ ID NO: 3382694 - DNA, 25 bp, Homo sapien
ccctctctatagaaataaagactca

SEQ ID NO: 3382695 - DNA, 25 bp, Homo sapien
gatcagggctataaggttctgccac

SEQ ID NO: 3382696 - DNA, 25 bp, Homo sapien
acttgcagaatgttgtagggattgg

SEQ ID NO: 3382697 - DNA, 25 bp, Homo sapien
gctgcccagataccatccctctcta

SEQ ID NO: 3382698 - DNA, 25 bp, Homo sapien
gggttgattaactctgggattgtca

SEQ ID NO: 3382699 - DNA, 25 bp, Homo sapien
taactctgggattgtcaggcccgcc

SEQ ID NO: 3382700 - DNA, 25 bp, Homo sapien
ctgggattgtcaggcccgccctaga

SEQ ID NO: 3382701 - DNA, 25 bp, Homo sapien
gattaactctgggattgtcaggccc

SEQ ID NO: 3382702 - DNA, 25 bp, Homo sapien
gagagcagccacgacaacaggctct

SEQ ID NO: 3382703 - DNA, 25 bp, Homo sapien
tgggagagcagccacgacaacaggc

SEQ ID NO: 3382704 - DNA, 25 bp, Homo sapien
cacgacaacaggctctcagtggagc

SEQ ID NO: 3382705 - DNA, 25 bp, Homo sapien
gcagccacgacaacaggctctcagt

SEQ ID NO: 3382706 - DNA, 25 bp, Homo sapien
gtttcctgagaccagtgcaaactca

SEQ ID NO: 3382707 - DNA, 25 bp, Homo sapien
agagttggcaggtatcaaggtttcc

SEQ ID NO: 3382708 - DNA, 25 bp, Homo sapien
tcttcccattgtctatccatctctg

SEQ ID NO: 3382709 - DNA, 25 bp, Homo sapien
ccattgtctatccatctctggtata

SEQ ID NO: 3382710 - DNA, 25 bp, Homo sapien
tgtatggaggcaggccgcaggaaca

SEQ ID NO: 3382711 - DNA, 25 bp, Homo sapien
ctcctaggtttgtgcttcagctcaa

SEQ ID NO: 3382712 - DNA, 25 bp, Homo sapien
aagatggctcctgatgaagtgtatg

SEQ ID NO: 3382713 - DNA, 25 bp, Homo sapien
cctaggtttgtgcttcagctcaatt

SEQ ID NO: 3382714 - DNA, 25 bp, Homo sapien
gctgcaacctcatgacccacggctt

SEQ ID NO: 3382715 - DNA, 25 bp, Homo sapien
gagtccggtaactgatatctgctct

SEQ ID NO: 3382716 - DNA, 25 bp, Homo sapien
tctgagagtccggtaactgatatct

SEQ ID NO: 3382717 - DNA, 25 bp, Homo sapien
acctcatgacccacggctttcctct

SEQ ID NO: 3382718 - DNA, 25 bp, Homo sapien
ccttcctcccatgttcctggataga

SEQ ID NO: 3382719 - DNA, 25 bp, Homo sapien
cccatgttcctggatagaaatgaga

SEQ ID NO: 3382720 - DNA, 25 bp, Homo sapien
tttgaccatgcaaacccagcaccct

SEQ ID NO: 3382721 - DNA, 25 bp, Homo sapien
catgcaaacccagcacccttcctcc

SEQ ID NO: 3382722 - DNA, 25 bp, Homo sapien
catagtcacactgggattctccatc

SEQ ID NO: 3382723 - DNA, 25 bp, Homo sapien
gactgagcatcacaggaaatggaga

SEQ ID NO: 3382724 - DNA, 25 bp, Homo sapien
aaatggagagattgtttcccagttg

SEQ ID NO: 3382725 - DNA, 25 bp, Homo sapien
cctgaggactgagcatcacaggaaa

SEQ ID NO: 3382726 - DNA, 25 bp, Homo sapien
catgcttttaacctccctgccacac

SEQ ID NO: 3382727 - DNA, 25 bp, Homo sapien
gccacactctatcccacaatctcaa

SEQ ID NO: 3382728 - DNA, 25 bp, Homo sapien
tccctgccacactctatcccacaat

SEQ ID NO: 3382729 - DNA, 25 bp, Homo sapien
cccatgcttttaacctccctgccac

SEQ ID NO: 3382730 - DNA, 25 bp, Homo sapien
gtaagtcgtctacaaattctagcct

SEQ ID NO: 3382731 - DNA, 25 bp, Homo sapien
ggatcttatgaaattcccagcatca

SEQ ID NO: 3382732 - DNA, 25 bp, Homo sapien
tctagcctgagggtagactttttta

SEQ ID NO: 3382733 - DNA, 25 bp, Homo sapien
gtttgaagatgcctgagtggatctt

SEQ ID NO: 3382734 - DNA, 25 bp, Homo sapien
cagcaggaacaagaactggggcaat

SEQ ID NO: 3382735 - DNA, 25 bp, Homo sapien
gcaatgatgagctgggatcccaaag

SEQ ID NO: 3382736 - DNA, 25 bp, Homo sapien
acagcaggaacaagaactggggcaa

SEQ ID NO: 3382737 - DNA, 25 bp, Homo sapien
ctggggcaatgatgagctgggatcc

SEQ ID NO: 3382738 - DNA, 25 bp, Homo sapien
agaaccaacccggagaggatgggat

SEQ ID NO: 3382739 - DNA, 25 bp, Homo sapien
gaagacaatatcagaaccaacccgg

SEQ ID NO: 3382740 - DNA, 25 bp, Homo sapien
gaatctagtttacaaggttccttga

SEQ ID NO: 3382741 - DNA, 25 bp, Homo sapien
tgaaaactcttgaaccttgttgaga

SEQ ID NO: 3382742 - DNA, 25 bp, Homo sapien
ggaggagaggacaaatgcttacagt

SEQ ID NO: 3382743 - DNA, 25 bp, Homo sapien
gctcagacgcaaggccagcaaattc

SEQ ID NO: 3382744 - DNA, 25 bp, Homo sapien
ggtgtcatcagaatcccagactgag

SEQ ID NO: 3382745 - DNA, 25 bp, Homo sapien
tgctgggcaactggtgtcatcagaa

SEQ ID NO: 3382746 - DNA, 25 bp, Homo sapien
aacaggtctggtgttttgacattca

SEQ ID NO: 3382747 - DNA, 25 bp, Homo sapien
gaaaaagccctttgcaacaggtctg

SEQ ID NO: 3382748 - DNA, 25 bp, Homo sapien
ttgcaacaggtctggtgttttgaca

SEQ ID NO: 3382749 - DNA, 25 bp, Homo sapien
ctgaggactcttaagtgaggggaag

SEQ ID NO: 3382750 - DNA, 25 bp, Homo sapien
attgtagagccctgtgagggctgca

SEQ ID NO: 3382751 - DNA, 25 bp, Homo sapien
tgggtccattgtagagccctgtgag

SEQ ID NO: 3382752 - DNA, 25 bp, Homo sapien
cgtgggtccattgtagagccctgtg

SEQ ID NO: 3382753 - DNA, 25 bp, Homo sapien
gtccattgtagagccctgtgagggc

SEQ ID NO: 3382754 - DNA, 25 bp, Homo sapien
atattagatcaatttgcagctggcg

SEQ ID NO: 3382755 - DNA, 25 bp, Homo sapien
acaatgacttgaggcaaaccccagg

SEQ ID NO: 3382756 - DNA, 25 bp, Homo sapien
ttcttgactacaatgacttgaggca

SEQ ID NO: 3382757 - DNA, 25 bp, Homo sapien
ccccagggaagtcaatattagatca

SEQ ID NO: 3382758 - DNA, 25 bp, Homo sapien
agagtgaatgttccactcagttctc

SEQ ID NO: 3382759 - DNA, 25 bp, Homo sapien
ggaaaaagacgcagagtgaatgttc

SEQ ID NO: 3382760 - DNA, 25 bp, Homo sapien
tgaaagctgacttcatcaatcacaa

SEQ ID NO: 3382761 - DNA, 25 bp, Homo sapien
tcatcaatcacaactggcaaaccca

SEQ ID NO: 3382762 - DNA, 25 bp, Homo sapien
tctcgtctatggctgtggcggtctg

SEQ ID NO: 3382763 - DNA, 25 bp, Homo sapien
gctgtggcggtctgtgattctgaga

SEQ ID NO: 3382764 - DNA, 25 bp, Homo sapien
tccagagaggagctctcgtctatgg

SEQ ID NO: 3382765 - DNA, 25 bp, Homo sapien
aggagctctcgtctatggctgtggc

SEQ ID NO: 3382766 - DNA, 25 bp, Homo sapien
aaccatcaaggaaccaacagatgca

SEQ ID NO: 3382767 - DNA, 25 bp, Homo sapien
cacccttaggcacatatgggaagaa

SEQ ID NO: 3382768 - DNA, 25 bp, Homo sapien
tgagtgttagcacccttaggcacat

SEQ ID NO: 3382769 - DNA, 25 bp, Homo sapien
gagtggatgagtgttagcaccctta

SEQ ID NO: 3382770 - DNA, 25 bp, Homo sapien
ctgatcactgagtgctgggcagaaa

SEQ ID NO: 3382771 - DNA, 25 bp, Homo sapien
tgggcagaaagatacagggatagaa

SEQ ID NO: 3382772 - DNA, 25 bp, Homo sapien
tgccaaacaacaatacggctggaag

SEQ ID NO: 3382773 - DNA, 25 bp, Homo sapien
caacaatacggctggaaggagtggt

SEQ ID NO: 3382774 - DNA, 25 bp, Homo sapien
ggagagttggactcgtaatccagcc

SEQ ID NO: 3382775 - DNA, 25 bp, Homo sapien
gccatcatcttgagatcccctttaa

SEQ ID NO: 3382776 - DNA, 25 bp, Homo sapien
ctgatcatacgaataggaaaatgga

SEQ ID NO: 3382777 - DNA, 25 bp, Homo sapien
tgttagctcccttactgatcatacg

SEQ ID NO: 3382778 - DNA, 25 bp, Homo sapien
tcaacagctcatttgataatgttct

SEQ ID NO: 3382779 - DNA, 25 bp, Homo sapien
aacagctcatttgataatgttctct

SEQ ID NO: 3382780 - DNA, 25 bp, Homo sapien
caacagctcatttgataatgttctc

SEQ ID NO: 3382781 - DNA, 25 bp, Homo sapien
acagctcatttgataatgttctctc

SEQ ID NO: 3382782 - DNA, 25 bp, Homo sapien
gacagctgtcggtcaggattcatgg

SEQ ID NO: 3382783 - DNA, 25 bp, Homo sapien
aaaccaaattcctgaacaagctcag

SEQ ID NO: 3382784 - DNA, 25 bp, Homo sapien
gctcagaggcccgattggacctgtc

SEQ ID NO: 3382785 - DNA, 25 bp, Homo sapien
caggattcatggcaggcatgtgcct

SEQ ID NO: 3382786 - DNA, 25 bp, Homo sapien
gaactttctgaccacctctattgtg

SEQ ID NO: 3382787 - DNA, 25 bp, Homo sapien
tatcgagggtgccaattatgtggtg

SEQ ID NO: 3382788 - DNA, 25 bp, Homo sapien
tatgtggtgatgtacaaacccgctg

SEQ ID NO: 3382789 - DNA, 25 bp, Homo sapien
gaagagagagtaatagcaggtatcg

SEQ ID NO: 3382790 - DNA, 25 bp, Homo sapien
ccagaggctccagggccaaagaaat

SEQ ID NO: 3382791 - DNA, 25 bp, Homo sapien
aggctccagggccaaagaaatgggg

SEQ ID NO: 3382792 - DNA, 25 bp, Homo sapien
taaccagaggctccagggccaaaga

SEQ ID NO: 3382793 - DNA, 25 bp, Homo sapien
ggtaaccagaggctccagggccaaa

SEQ ID NO: 3382794 - DNA, 25 bp, Homo sapien
ggaatgggtgtcaggttgaggagca

SEQ ID NO: 3382795 - DNA, 25 bp, Homo sapien
gcagagggtcatgtgcatagggaat

SEQ ID NO: 3382796 - DNA, 25 bp, Homo sapien
gaatgggtgtcaggttgaggagcat

SEQ ID NO: 3382797 - DNA, 25 bp, Homo sapien
tcatgtgcatagggaatgggtgtca

SEQ ID NO: 3382798 - DNA, 25 bp, Homo sapien
cattaggcagattgagtgaagggct

SEQ ID NO: 3382799 - DNA, 25 bp, Homo sapien
gatatgcatggaaggtcagattccc

SEQ ID NO: 3382800 - DNA, 25 bp, Homo sapien
tcaggacaaccctatggtaggtccc

SEQ ID NO: 3382801 - DNA, 25 bp, Homo sapien
cagattcccctgaaggtccattagg

SEQ ID NO: 3382802 - DNA, 25 bp, Homo sapien
ctctgggcctgttcactcgggatcc

SEQ ID NO: 3382803 - DNA, 25 bp, Homo sapien
tcgggatccatagcgcgtcacaaat

SEQ ID NO: 3382804 - DNA, 25 bp, Homo sapien
tgttcactcgggatccatagcgcgt

SEQ ID NO: 3382805 - DNA, 25 bp, Homo sapien
catagcgcgtcacaaatggatttct

SEQ ID NO: 3382806 - DNA, 25 bp, Homo sapien
tcaccaatatcaaaaggttctctgc

SEQ ID NO: 3382807 - DNA, 25 bp, Homo sapien
aactgtaactcttgtgcaatgtggc

SEQ ID NO: 3382808 - DNA, 25 bp, Homo sapien
gccagaaggagctcaagaagactta

SEQ ID NO: 3382809 - DNA, 25 bp, Homo sapien
tgatgctgtgactccctcttgggtg

SEQ ID NO: 3382810 - DNA, 25 bp, Homo sapien
tctgccctggactcagaattcttca

SEQ ID NO: 3382811 - DNA, 25 bp, Homo sapien
tgccctggactcagaattcttcagt

SEQ ID NO: 3382812 - DNA, 25 bp, Homo sapien
ctgccctggactcagaattcttcag

SEQ ID NO: 3382813 - DNA, 25 bp, Homo sapien
cctctgccctggactcagaattctt

SEQ ID NO: 3382814 - DNA, 25 bp, Homo sapien
gactagagtctgacattcagagcct

SEQ ID NO: 3382815 - DNA, 25 bp, Homo sapien
gaaaagaaagactcaggggcaaatg

SEQ ID NO: 3382816 - DNA, 25 bp, Homo sapien
gcaaggagatgtctaagactagagt

SEQ ID NO: 3382817 - DNA, 25 bp, Homo sapien
gactcaggggcaaatgcaaggagat

SEQ ID NO: 3382818 - DNA, 25 bp, Homo sapien
tcacaaagttaattatgagatgacc

SEQ ID NO: 3382819 - DNA, 25 bp, Homo sapien
cctgattgcaagcaggagggaccag

SEQ ID NO: 3382820 - DNA, 25 bp, Homo sapien
ctgaagaatacccttctcattccaa

SEQ ID NO: 3382821 - DNA, 25 bp, Homo sapien
caaaacaactgaagaatacccttct

SEQ ID NO: 3382822 - DNA, 25 bp, Homo sapien
ctcctgcgactgtccatctttcaag

SEQ ID NO: 3382823 - DNA, 25 bp, Homo sapien
cagccttgccactcatccctcctgc

SEQ ID NO: 3382824 - DNA, 25 bp, Homo sapien
gtgagaagacctgcaggagccctct

SEQ ID NO: 3382825 - DNA, 25 bp, Homo sapien
cagtgatgccaactcattactctct

SEQ ID NO: 3382826 - DNA, 25 bp, Homo sapien
gaagggtggcttcatgttgatgcaa

SEQ ID NO: 3382827 - DNA, 25 bp, Homo sapien
tcctgtgaggtctccttgtcagccc

SEQ ID NO: 3382828 - DNA, 25 bp, Homo sapien
gtgtcaaagtctccaagccctttac

SEQ ID NO: 3382829 - DNA, 25 bp, Homo sapien
tactgagtcccttattattccaaag

SEQ ID NO: 3382830 - DNA, 25 bp, Homo sapien
tgtgtggtctagagcaagtgttaat

SEQ ID NO: 3382831 - DNA, 25 bp, Homo sapien
tatctgtgtggtctagagcaagtgt

SEQ ID NO: 3382832 - DNA, 25 bp, Homo sapien
gtggtctagagcaagtgttaatttc

SEQ ID NO: 3382833 - DNA, 25 bp, Homo sapien
tctgtgtggtctagagcaagtgtta

SEQ ID NO: 3382834 - DNA, 25 bp, Homo sapien
aactggctgtaggtcagctctggca

SEQ ID NO: 3382835 - DNA, 25 bp, Homo sapien
tcatgtcagggtaggcgtagggaac

SEQ ID NO: 3382836 - DNA, 25 bp, Homo sapien
taggcgtagggaactggctgtaggt

SEQ ID NO: 3382837 - DNA, 25 bp, Homo sapien
agcgggggagcagcctgactctggc

SEQ ID NO: 3382838 - DNA, 25 bp, Homo sapien
aatacactgattggcccggcaggaa

SEQ ID NO: 3382839 - DNA, 25 bp, Homo sapien
tcagtttcttgtcgtggggaattcc

SEQ ID NO: 3382840 - DNA, 25 bp, Homo sapien
tacaggataaaacacctcagtttct

SEQ ID NO: 3382841 - DNA, 25 bp, Homo sapien
ggaattccccgttcctccctgcatg

SEQ ID NO: 3382842 - DNA, 25 bp, Homo sapien
tgagcgtggcacatgttgacatagg

SEQ ID NO: 3382843 - DNA, 25 bp, Homo sapien
ttgacataggaatgcatccagccat

SEQ ID NO: 3382844 - DNA, 25 bp, Homo sapien
tttataagaaatgagcgtggcacat

SEQ ID NO: 3382845 - DNA, 25 bp, Homo sapien
cacatgttgacataggaatgcatcc

SEQ ID NO: 3382846 - DNA, 25 bp, Homo sapien
agaaaagccctagcccattttagca

SEQ ID NO: 3382847 - DNA, 25 bp, Homo sapien
ccgttggcagtgtgagtggatatca

SEQ ID NO: 3382848 - DNA, 25 bp, Homo sapien
aattagagtgtgagaaccgttggca

SEQ ID NO: 3382849 - DNA, 25 bp, Homo sapien
gaagctgccccgatggttgcctgtt

SEQ ID NO: 3382850 - DNA, 25 bp, Homo sapien
gacgcgatattagagcctgggcttt

SEQ ID NO: 3382851 - DNA, 25 bp, Homo sapien
tggattatgcttgcctgccctcagg

SEQ ID NO: 3382852 - DNA, 25 bp, Homo sapien
gttaccctagggatgacaactacca

SEQ ID NO: 3382853 - DNA, 25 bp, Homo sapien
gacctggccaaactgactgcttttc

SEQ ID NO: 3382854 - DNA, 25 bp, Homo sapien
taacaagtgtgattgggcagctctc

SEQ ID NO: 3382855 - DNA, 25 bp, Homo sapien
tgagaatttgcccagggtccacagc

SEQ ID NO: 3382856 - DNA, 25 bp, Homo sapien
ttgtgagaatttgcccagggtccac

SEQ ID NO: 3382857 - DNA, 25 bp, Homo sapien
tgtgagaatttgcccagggtccaca

SEQ ID NO: 3382858 - DNA, 25 bp, Homo sapien
agaatttgcccagggtccacagcat

SEQ ID NO: 3382859 - DNA, 25 bp, Homo sapien
cagaattctgggtccatcttggttt

SEQ ID NO: 3382860 - DNA, 25 bp, Homo sapien
cgcttgctgcccctttggctccaga

SEQ ID NO: 3382861 - DNA, 25 bp, Homo sapien
ggctccagaattctgggtccatctt

SEQ ID NO: 3382862 - DNA, 25 bp, Homo sapien
cctttggctccagaattctgggtcc

SEQ ID NO: 3382863 - DNA, 25 bp, Homo sapien
caaaaccaatctgctcccgtgacat

SEQ ID NO: 3382864 - DNA, 25 bp, Homo sapien
gagcatgaaagttcatctcctaaaa

SEQ ID NO: 3382865 - DNA, 25 bp, Homo sapien
acatgcaaaaccaatctgctcccgt

SEQ ID NO: 3382866 - DNA, 25 bp, Homo sapien
atggagcatgaaagttcatctccta

SEQ ID NO: 3382867 - DNA, 25 bp, Homo sapien
tgtttaccatggagaaatgttgatt

SEQ ID NO: 3382868 - DNA, 25 bp, Homo sapien
gcagcagatgaacagcgggatcttg

SEQ ID NO: 3382869 - DNA, 25 bp, Homo sapien
gagatgaatgctgggcatgatttac

SEQ ID NO: 3382870 - DNA, 25 bp, Homo sapien
gatttacttactccagaaagtgttg

SEQ ID NO: 3382871 - DNA, 25 bp, Homo sapien
ttccatcatgcacagacaaacacca

SEQ ID NO: 3382872 - DNA, 25 bp, Homo sapien
cagatgccatgggtgtgtgagcaca

SEQ ID NO: 3382873 - DNA, 25 bp, Homo sapien
ttgcagtcacatagagctccgaccc

SEQ ID NO: 3382874 - DNA, 25 bp, Homo sapien
aaacaccaatcaacacactctcggt

SEQ ID NO: 3382875 - DNA, 25 bp, Homo sapien
cacctgctcaggcaattctatgata

SEQ ID NO: 3382876 - DNA, 25 bp, Homo sapien
cctgctcaggcaattctatgataaa

SEQ ID NO: 3382877 - DNA, 25 bp, Homo sapien
ccacctgctcaggcaattctatgat

SEQ ID NO: 3382878 - DNA, 25 bp, Homo sapien
acctgctcaggcaattctatgataa

SEQ ID NO: 3382879 - DNA, 25 bp, Homo sapien
gcagagcacaaaggaaggcattatc

SEQ ID NO: 3382880 - DNA, 25 bp, Homo sapien
cctctcctgccaggcagagcacaaa

SEQ ID NO: 3382881 - DNA, 25 bp, Homo sapien
caatccctggagtcctcaggcagca

SEQ ID NO: 3382882 - DNA, 25 bp, Homo sapien
agcagcatccccacaagggcctctc

SEQ ID NO: 3382883 - DNA, 25 bp, Homo sapien
cccagagttctaatggcagcagcat

SEQ ID NO: 3382884 - DNA, 25 bp, Homo sapien
cactgagttctaggaggtgcccaga

SEQ ID NO: 3382885 - DNA, 25 bp, Homo sapien
taacaatgggcccatgacaggccag

SEQ ID NO: 3382886 - DNA, 25 bp, Homo sapien
taacataatgctactgagggcgcca

SEQ ID NO: 3382887 - DNA, 25 bp, Homo sapien
gagtctggcaacaaataatcgtctt

SEQ ID NO: 3382888 - DNA, 25 bp, Homo sapien
tgctgacttccagaccactgaggtc

SEQ ID NO: 3382889 - DNA, 25 bp, Homo sapien
ggtcacctgcataagcgagtctggc

SEQ ID NO: 3382890 - DNA, 25 bp, Homo sapien
caaataatcgtcttccagaaaatga

SEQ ID NO: 3382891 - DNA, 25 bp, Homo sapien
tgacacctgtgctaggagctccaga

SEQ ID NO: 3382892 - DNA, 25 bp, Homo sapien
tacaggacctcaagctgaccctggg

SEQ ID NO: 3382893 - DNA, 25 bp, Homo sapien
ttctgaggactacaaagggacccaa

SEQ ID NO: 3382894 - DNA, 25 bp, Homo sapien
cagaagtgtgagtcatgcattccca

SEQ ID NO: 3382895 - DNA, 25 bp, Homo sapien
aagtcttttccaggactatgagggt

SEQ ID NO: 3382896 - DNA, 25 bp, Homo sapien
tacagacctccttcagtgttccaca

SEQ ID NO: 3382897 - DNA, 25 bp, Homo sapien
actatgagggtcagaggaactcaca

SEQ ID NO: 3382898 - DNA, 25 bp, Homo sapien
ggagaagtacagacctccttcagtg

SEQ ID NO: 3382899 - DNA, 25 bp, Homo sapien
tttgtttcatgatctgcattagcct

SEQ ID NO: 3382900 - DNA, 25 bp, Homo sapien
catgatctgcattagcctttcgaca

SEQ ID NO: 3382901 - DNA, 25 bp, Homo sapien
caggcagacatgtgggcaatccaaa

SEQ ID NO: 3382902 - DNA, 25 bp, Homo sapien
gcattagcctttcgacattaaggga

SEQ ID NO: 3382903 - DNA, 25 bp, Homo sapien
gcaccccagagttgaaatgtccact

SEQ ID NO: 3382904 - DNA, 25 bp, Homo sapien
ctagatattccattagtgctggtaa

SEQ ID NO: 3382905 - DNA, 25 bp, Homo sapien
gccatctaagttggcagggcctagg

SEQ ID NO: 3382906 - DNA, 25 bp, Homo sapien
cctttattgttagtgcttggctgga

SEQ ID NO: 3382907 - DNA, 25 bp, Homo sapien
gggcatatgtcagggcatctgaccc

SEQ ID NO: 3382908 - DNA, 25 bp, Homo sapien
tgtctgaagggctgggcatatgtca

SEQ ID NO: 3382909 - DNA, 25 bp, Homo sapien
gtctgaagggctgggcatatgtcag

SEQ ID NO: 3382910 - DNA, 25 bp, Homo sapien
ctgtctgaagggctgggcatatgtc

SEQ ID NO: 3382911 - DNA, 25 bp, Homo sapien
tggcatctgttgaaaatggtcagtg

SEQ ID NO: 3382912 - DNA, 25 bp, Homo sapien
ggccaccctcccagatccaagaatc

SEQ ID NO: 3382913 - DNA, 25 bp, Homo sapien
cctgaagatggggactagggccacc

SEQ ID NO: 3382914 - DNA, 25 bp, Homo sapien
gaagatggggactagggccaccctc

SEQ ID NO: 3382915 - DNA, 25 bp, Homo sapien
tgggatttgaagaagcccctcggaa

SEQ ID NO: 3382916 - DNA, 25 bp, Homo sapien
tttgggacattaaggtcacctggtg

SEQ ID NO: 3382917 - DNA, 25 bp, Homo sapien
ccctcggaagtgagcagatggcata

SEQ ID NO: 3382918 - DNA, 25 bp, Homo sapien
tggcatagatctggcggtagcctgc

SEQ ID NO: 3382919 - DNA, 25 bp, Homo sapien
gagtgcgtcctagcccactctggat

SEQ ID NO: 3382920 - DNA, 25 bp, Homo sapien
tctggatattagagcattctctcat

SEQ ID NO: 3382921 - DNA, 25 bp, Homo sapien
tccattggcctgagtgcgtcctagc

SEQ ID NO: 3382922 - DNA, 25 bp, Homo sapien
tccagcttgcctccattggcctgag

SEQ ID NO: 3382923 - DNA, 25 bp, Homo sapien
tcattatattcagcaaaaactgaat

SEQ ID NO: 3382924 - DNA, 25 bp, Homo sapien
ctcattatattcagcaaaaactgaa

SEQ ID NO: 3382925 - DNA, 25 bp, Homo sapien
ctcagcctggttgagctctgtccac

SEQ ID NO: 3382926 - DNA, 25 bp, Homo sapien
ctcgggaggctcagtgaatagcctg

SEQ ID NO: 3382927 - DNA, 25 bp, Homo sapien
ctggtgctcagcacccaagcctgca

SEQ ID NO: 3382928 - DNA, 25 bp, Homo sapien
gctcagtgaatagcctgggctccag

SEQ ID NO: 3382929 - DNA, 25 bp, Homo sapien
tatgtatggcagtccagttcagtac

SEQ ID NO: 3382930 - DNA, 25 bp, Homo sapien
ggaaagagcccatagaaagggctct

SEQ ID NO: 3382931 - DNA, 25 bp, Homo sapien
gaaagggctctatgtatggcagtcc

SEQ ID NO: 3382932 - DNA, 25 bp, Homo sapien
gagcccatagaaagggctctatgta

SEQ ID NO: 3382933 - DNA, 25 bp, Homo sapien
cagaaagccagtgtgattaccaaag

SEQ ID NO: 3382934 - DNA, 25 bp, Homo sapien
agaaagccagtgtgattaccaaagg

SEQ ID NO: 3382935 - DNA, 25 bp, Homo sapien
tcagaaagccagtgtgattaccaaa

SEQ ID NO: 3382936 - DNA, 25 bp, Homo sapien
cagcatattggtagtgtttacctgc

SEQ ID NO: 3382937 - DNA, 25 bp, Homo sapien
ggaggcagcatattggtagtgttta

SEQ ID NO: 3382938 - DNA, 25 bp, Homo sapien
ggagggaggcagcatattggtagtg

SEQ ID NO: 3382939 - DNA, 25 bp, Homo sapien
aggcagcatattggtagtgtttacc

SEQ ID NO: 3382940 - DNA, 25 bp, Homo sapien
gcctctctgatatcaagctgccctt

SEQ ID NO: 3382941 - DNA, 25 bp, Homo sapien
tgcctctctgatatcaagctgccct

SEQ ID NO: 3382942 - DNA, 25 bp, Homo sapien
cctctctgatatcaagctgcccttg

SEQ ID NO: 3382943 - DNA, 25 bp, Homo sapien
ctgcctctctgatatcaagctgccc

SEQ ID NO: 3382944 - DNA, 25 bp, Homo sapien
ctgtgagtgcaattgtggctttcct

SEQ ID NO: 3382945 - DNA, 25 bp, Homo sapien
tctgtgagtgcaattgtggctttcc

SEQ ID NO: 3382946 - DNA, 25 bp, Homo sapien
agccacctcggatgagagaggtttg

SEQ ID NO: 3382947 - DNA, 25 bp, Homo sapien
ctggcacttgcctggtatacagcag

SEQ ID NO: 3382948 - DNA, 25 bp, Homo sapien
aaagcctggcacttgcctggtatac

SEQ ID NO: 3382949 - DNA, 25 bp, Homo sapien
cagcaccctggccatggtgcggaag

SEQ ID NO: 3382950 - DNA, 25 bp, Homo sapien
cagggcctctgtagcgaaagtttct

SEQ ID NO: 3382951 - DNA, 25 bp, Homo sapien
gagttctctcagtatcccggctggg

SEQ ID NO: 3382952 - DNA, 25 bp, Homo sapien
ccctcaggaccgaaagcttggcata

SEQ ID NO: 3382953 - DNA, 25 bp, Homo sapien
tcatgcggctgtggaagtgcttaac

SEQ ID NO: 3382954 - DNA, 25 bp, Homo sapien
gctgtaagcctacgcagcagcctct

SEQ ID NO: 3382955 - DNA, 25 bp, Homo sapien
caccaggatagtttggccggcttta

SEQ ID NO: 3382956 - DNA, 25 bp, Homo sapien
caaaggcagcttcgatgatgctgta

SEQ ID NO: 3382957 - DNA, 25 bp, Homo sapien
gcggctgcttgaagccgaggctgcc

SEQ ID NO: 3382958 - DNA, 25 bp, Homo sapien
cattacgaaccgtccatgttgagaa

SEQ ID NO: 3382959 - DNA, 25 bp, Homo sapien
tgggattgcagaaagaccaggcccc

SEQ ID NO: 3382960 - DNA, 25 bp, Homo sapien
cattgccgtaatgggtgtccaagca

SEQ ID NO: 3382961 - DNA, 25 bp, Homo sapien
tgagaagcgtgagagacaaggcaaa

SEQ ID NO: 3382962 - DNA, 25 bp, Homo sapien
gttggaaacaccagcaagcaaagtg

SEQ ID NO: 3382963 - DNA, 25 bp, Homo sapien
gatcagtggagccaatggcccgctc

SEQ ID NO: 3382964 - DNA, 25 bp, Homo sapien
gaccacttacacaagcagcaacagg

SEQ ID NO: 3382965 - DNA, 25 bp, Homo sapien
cccgagtcgttgagagtaaaatact

SEQ ID NO: 3382966 - DNA, 25 bp, Homo sapien
atcagcaagctcatggtctactgga

SEQ ID NO: 3382967 - DNA, 25 bp, Homo sapien
ggtctactggaaaactcgtgacagc

SEQ ID NO: 3382968 - DNA, 25 bp, Homo sapien
acagaaacaaggatcaaggacaggc

SEQ ID NO: 3382969 - DNA, 25 bp, Homo sapien
aggcactgggatagaccccacagaa

SEQ ID NO: 3382970 - DNA, 25 bp, Homo sapien
cactgtcactggggtaactggaccc

SEQ ID NO: 3382971 - DNA, 25 bp, Homo sapien
ttgcactgtcactggggtaactgga

SEQ ID NO: 3382972 - DNA, 25 bp, Homo sapien
gcactgtcactggggtaactggacc

SEQ ID NO: 3382973 - DNA, 25 bp, Homo sapien
tgcactgtcactggggtaactggac

SEQ ID NO: 3382974 - DNA, 25 bp, Homo sapien
tgtccccgaccaagagttttcacag

SEQ ID NO: 3382975 - DNA, 25 bp, Homo sapien
cgaccaagagttttcacaggttcat

SEQ ID NO: 3382976 - DNA, 25 bp, Homo sapien
ttttcacaggttcataggtggccat

SEQ ID NO: 3382977 - DNA, 25 bp, Homo sapien
caggccctgtccccgaccaagagtt

SEQ ID NO: 3382978 - DNA, 25 bp, Homo sapien
gagtttcgcctttgttgtggcctag

SEQ ID NO: 3382979 - DNA, 25 bp, Homo sapien
gagttattggtcagagaagaaggca

SEQ ID NO: 3382980 - DNA, 25 bp, Homo sapien
tattctatctccacataaacccaca

SEQ ID NO: 3382981 - DNA, 25 bp, Homo sapien
gtggcctagggctgcatcattttcc

SEQ ID NO: 3382982 - DNA, 25 bp, Homo sapien
tccatggttgtttggtatcactcca

SEQ ID NO: 3382983 - DNA, 25 bp, Homo sapien
cactgccttctatggttgaacctgt

SEQ ID NO: 3382984 - DNA, 25 bp, Homo sapien
cactaaacagtcagcatcacacagc

SEQ ID NO: 3382985 - DNA, 25 bp, Homo sapien
gaccctgaaaccctgtccatggttg

SEQ ID NO: 3382986 - DNA, 25 bp, Homo sapien
tgatctggcaagcatcccaatatag

SEQ ID NO: 3382987 - DNA, 25 bp, Homo sapien
gttgatctggcaagcatcccaatat

SEQ ID NO: 3382988 - DNA, 25 bp, Homo sapien
tgttgatctggcaagcatcccaata

SEQ ID NO: 3382989 - DNA, 25 bp, Homo sapien
cctgttgatctggcaagcatcccaa

SEQ ID NO: 3382990 - DNA, 25 bp, Homo sapien
gtggaaacaaaacatcaagccccat

SEQ ID NO: 3382991 - DNA, 25 bp, Homo sapien
gaaaagtggaaacaaaacatcaagc

SEQ ID NO: 3382992 - DNA, 25 bp, Homo sapien
ttgaaaagtggaaacaaaacatcaa

SEQ ID NO: 3382993 - DNA, 25 bp, Homo sapien
ggagcgcctttgaaaagtggaaaca

SEQ ID NO: 3382994 - DNA, 25 bp, Homo sapien
gatatggtgtgtattcttttccata

SEQ ID NO: 3382995 - DNA, 25 bp, Homo sapien
ttttccataggttcccacgagcatg

SEQ ID NO: 3382996 - DNA, 25 bp, Homo sapien
cacgagcatgtcactaaccatttcc

SEQ ID NO: 3382997 - DNA, 25 bp, Homo sapien
gcggctgctccattgatatggtgtg

SEQ ID NO: 3382998 - DNA, 25 bp, Homo sapien
tgacagtcatggagtgtgacttcag

SEQ ID NO: 3382999 - DNA, 25 bp, Homo sapien
tccctgaaaaggtcctgctccagtt

SEQ ID NO: 3383000 - DNA, 25 bp, Homo sapien
gaaggagtggattgacagtcatgga

SEQ ID NO: 3383001 - DNA, 25 bp, Homo sapien
tcatggagtgtgacttcaggtggcc

SEQ ID NO: 3383002 - DNA, 25 bp, Homo sapien
tccaaactgtatgcgttttatttat

SEQ ID NO: 3383003 - DNA, 25 bp, Homo sapien
gatggtagctgtaggttcttagtaa

SEQ ID NO: 3383004 - DNA, 25 bp, Homo sapien
gagtggtgacagtatacatccttcc

SEQ ID NO: 3383005 - DNA, 25 bp, Homo sapien
ctgtgaataaggatagccttatttc

SEQ ID NO: 3383006 - DNA, 25 bp, Homo sapien
aaacgttggaaagatgtggccacaa

SEQ ID NO: 3383007 - DNA, 25 bp, Homo sapien
tgcccctcagggttttgctccaaac

SEQ ID NO: 3383008 - DNA, 25 bp, Homo sapien
aaccaagaaatgctggcaggaacca

SEQ ID NO: 3383009 - DNA, 25 bp, Homo sapien
cagcagctgcgggaaactaatacag

SEQ ID NO: 3383010 - DNA, 25 bp, Homo sapien
gcctatggaaatcttctcacattcc

SEQ ID NO: 3383011 - DNA, 25 bp, Homo sapien
gatgatgcctatggaaatcttctca

SEQ ID NO: 3383012 - DNA, 25 bp, Homo sapien
cattttgatgtcttgggacaccaaa

SEQ ID NO: 3383013 - DNA, 25 bp, Homo sapien
ccattttgatgtcttgggacaccaa

SEQ ID NO: 3383014 - DNA, 25 bp, Homo sapien
ggagggtcattgttgaagtccttgc

SEQ ID NO: 3383015 - DNA, 25 bp, Homo sapien
tcaatgaatgccaccgtccatccat

SEQ ID NO: 3383016 - DNA, 25 bp, Homo sapien
tccaatctccagatatggaaactgg

SEQ ID NO: 3383017 - DNA, 25 bp, Homo sapien
gaaactggagggtcattgttgaagt

SEQ ID NO: 3383018 - DNA, 25 bp, Homo sapien
ggcctcagacagcttcccggccttt

SEQ ID NO: 3383019 - DNA, 25 bp, Homo sapien
ccaggagccttagctgtggcagtct

SEQ ID NO: 3383020 - DNA, 25 bp, Homo sapien
gctgtggcagtcttgtcatgttgga

SEQ ID NO: 3383021 - DNA, 25 bp, Homo sapien
tttggagctgtgctctgatgtctgc

SEQ ID NO: 3383022 - DNA, 25 bp, Homo sapien
tagcggtgataggtgggccacagcc

SEQ ID NO: 3383023 - DNA, 25 bp, Homo sapien
ctgtactacttgggtagcggtgata

SEQ ID NO: 3383024 - DNA, 25 bp, Homo sapien
tactacttgggtagcggtgataggt

SEQ ID NO: 3383025 - DNA, 25 bp, Homo sapien
tgggccttagagcaaatgcctctgg

SEQ ID NO: 3383026 - DNA, 25 bp, Homo sapien
gtcctcatccctggtgcctcttttc

SEQ ID NO: 3383027 - DNA, 25 bp, Homo sapien
catggtcttttctcggtgtgtcctc

SEQ ID NO: 3383028 - DNA, 25 bp, Homo sapien
acatggtcttttctcggtgtgtcct

SEQ ID NO: 3383029 - DNA, 25 bp, Homo sapien
attttcgcataattctagagactag

SEQ ID NO: 3383030 - DNA, 25 bp, Homo sapien
gcccctcacatctggcccaagatct

SEQ ID NO: 3383031 - DNA, 25 bp, Homo sapien
ctcacatctggcccaagatcttggt

SEQ ID NO: 3383032 - DNA, 25 bp, Homo sapien
cctcacatctggcccaagatcttgg

SEQ ID NO: 3383033 - DNA, 25 bp, Homo sapien
ctgcccctcacatctggcccaagat

SEQ ID NO: 3383034 - DNA, 25 bp, Homo sapien
catcaggctctaaagtgggggctgc

SEQ ID NO: 3383035 - DNA, 25 bp, Homo sapien
gcaaatgcaatgagacagcacatca

SEQ ID NO: 3383036 - DNA, 25 bp, Homo sapien
aatggggagtcagtgtactgttcaa

SEQ ID NO: 3383037 - DNA, 25 bp, Homo sapien
tccatgcaatgaacagttgaggatg

SEQ ID NO: 3383038 - DNA, 25 bp, Homo sapien
tgcatctgcggggaaggtctgtcct

SEQ ID NO: 3383039 - DNA, 25 bp, Homo sapien
tttctcagactccagcggatacctt

SEQ ID NO: 3383040 - DNA, 25 bp, Homo sapien
cattgcatagtttgcccttgttctc

SEQ ID NO: 3383041 - DNA, 25 bp, Homo sapien
agctatggaagccacattgcatagt

SEQ ID NO: 3383042 - DNA, 25 bp, Homo sapien
gaactggacagtttttgggccatag

SEQ ID NO: 3383043 - DNA, 25 bp, Homo sapien
agaactggacagtttttgggccata

SEQ ID NO: 3383044 - DNA, 25 bp, Homo sapien
cccagctgacaaagcgagctgtact

SEQ ID NO: 3383045 - DNA, 25 bp, Homo sapien
cctcacaccagtcaatgagccagga

SEQ ID NO: 3383046 - DNA, 25 bp, Homo sapien
caccagtcaatgagccaggatggtg

SEQ ID NO: 3383047 - DNA, 25 bp, Homo sapien
gacaaagcgagctgtactttctaag

SEQ ID NO: 3383048 - DNA, 25 bp, Homo sapien
tcttctcttgtatctggtctgaatc

SEQ ID NO: 3383049 - DNA, 25 bp, Homo sapien
tcttgtatctggtctgaatccaaca

SEQ ID NO: 3383050 - DNA, 25 bp, Homo sapien
acaacacagcctttcctaccctggg

SEQ ID NO: 3383051 - DNA, 25 bp, Homo sapien
tatctggtctgaatccaacaacaca

SEQ ID NO: 3383052 - DNA, 25 bp, Homo sapien
aatatgagtccctctccagtaaaca

SEQ ID NO: 3383053 - DNA, 25 bp, Homo sapien
caagggaatatgagtccctctccag

SEQ ID NO: 3383054 - DNA, 25 bp, Homo sapien
gagaacaagggaatatgagtccctc

SEQ ID NO: 3383055 - DNA, 25 bp, Homo sapien
gggaatatgagtccctctccagtaa

SEQ ID NO: 3383056 - DNA, 25 bp, Homo sapien
tcacaaatgtttcatcagagccgat

SEQ ID NO: 3383057 - DNA, 25 bp, Homo sapien
gagccgataaagcagctgagtgttg

SEQ ID NO: 3383058 - DNA, 25 bp, Homo sapien
catcttgagaagtgttcgctgccta

SEQ ID NO: 3383059 - DNA, 25 bp, Homo sapien
tcgctgcctacttaaccgtctgtgg

SEQ ID NO: 3383060 - DNA, 25 bp, Homo sapien
cccaggtgaagctcgtttctggtca

SEQ ID NO: 3383061 - DNA, 25 bp, Homo sapien
caaggagaagatggtctttcagacc

SEQ ID NO: 3383062 - DNA, 25 bp, Homo sapien
ccccagagccttgaaagagaagtga

SEQ ID NO: 3383063 - DNA, 25 bp, Homo sapien
tcaggttcttcaaggagaagatggt

SEQ ID NO: 3383064 - DNA, 25 bp, Homo sapien
cagaattgagaaccgcagtgcatat

SEQ ID NO: 3383065 - DNA, 25 bp, Homo sapien
ttcaaacccaatgaggcctctttcc

SEQ ID NO: 3383066 - DNA, 25 bp, Homo sapien
tgcaaaatgctagttgtgtatgggt

SEQ ID NO: 3383067 - DNA, 25 bp, Homo sapien
tcaaggtgctcccagttttatgcat

SEQ ID NO: 3383068 - DNA, 25 bp, Homo sapien
agggttcagcatgtagtatgtcgtt

SEQ ID NO: 3383069 - DNA, 25 bp, Homo sapien
cagcatgtagtatgtcgttgcacac

SEQ ID NO: 3383070 - DNA, 25 bp, Homo sapien
ttcagcatgtagtatgtcgttgcac

SEQ ID NO: 3383071 - DNA, 25 bp, Homo sapien
ggttcagcatgtagtatgtcgttgc

SEQ ID NO: 3383072 - DNA, 25 bp, Homo sapien
agcattgaacttcaaaaccaagaat

SEQ ID NO: 3383073 - DNA, 25 bp, Homo sapien
gaatgtgatccctttgtcgtctggt

SEQ ID NO: 3383074 - DNA, 25 bp, Homo sapien
ttcaaaaccaagaatgtgatccctt

SEQ ID NO: 3383075 - DNA, 25 bp, Homo sapien
ttctggactgagagcattgaacttc

SEQ ID NO: 3383076 - DNA, 25 bp, Homo sapien
gcttgatcacatattcttctaaata

SEQ ID NO: 3383077 - DNA, 25 bp, Homo sapien
ggttctgcttgatcacatattcttc

SEQ ID NO: 3383078 - DNA, 25 bp, Homo sapien
ttttatgggtatgggtagtgagact

SEQ ID NO: 3383079 - DNA, 25 bp, Homo sapien
aaactggttctgcttgatcacatat

SEQ ID NO: 3383080 - DNA, 25 bp, Homo sapien
tctcctgaccgcttttccatctctg

SEQ ID NO: 3383081 - DNA, 25 bp, Homo sapien
taatggaccctttcctctgtatcca

SEQ ID NO: 3383082 - DNA, 25 bp, Homo sapien
gtatccacagctctcctgaccgctt

SEQ ID NO: 3383083 - DNA, 25 bp, Homo sapien
agaagtccagatgggagcacagtaa

SEQ ID NO: 3383084 - DNA, 25 bp, Homo sapien
gactgctgttcatagcctggggtcc

SEQ ID NO: 3383085 - DNA, 25 bp, Homo sapien
gagggaaatcaaccactgtctcagt

SEQ ID NO: 3383086 - DNA, 25 bp, Homo sapien
tctacgtaggtaaccctggagaggc

SEQ ID NO: 3383087 - DNA, 25 bp, Homo sapien
ggctgagtgattagaagacctatga

SEQ ID NO: 3383088 - DNA, 25 bp, Homo sapien
tgtactcaggcctgttattcagagg

SEQ ID NO: 3383089 - DNA, 25 bp, Homo sapien
tcctgggagactatttgaccaaagc

SEQ ID NO: 3383090 - DNA, 25 bp, Homo sapien
tcagaggaagcatcagaaagagcgg

SEQ ID NO: 3383091 - DNA, 25 bp, Homo sapien
aaggagattcctggacagcactgtc

SEQ ID NO: 3383092 - DNA, 25 bp, Homo sapien
cacacaggtagcaggtgtgacttct

SEQ ID NO: 3383093 - DNA, 25 bp, Homo sapien
tgagcgagcatgtctactgtttgag

SEQ ID NO: 3383094 - DNA, 25 bp, Homo sapien
tgtgacttctgagcgagcatgtcta

SEQ ID NO: 3383095 - DNA, 25 bp, Homo sapien
caggatcaggtagcatcacacaggt

SEQ ID NO: 3383096 - DNA, 25 bp, Homo sapien
accatagcgatggaatgatttcttg

SEQ ID NO: 3383097 - DNA, 25 bp, Homo sapien
ctatgtgtgtataccatagcgatgg

SEQ ID NO: 3383098 - DNA, 25 bp, Homo sapien
tgtgtataccatagcgatggaatga

SEQ ID NO: 3383099 - DNA, 25 bp, Homo sapien
tataccatagcgatggaatgatttc

SEQ ID NO: 3383100 - DNA, 25 bp, Homo sapien
aacagcatgttcacgcccctggagt

SEQ ID NO: 3383101 - DNA, 25 bp, Homo sapien
aaagatgtttccagagagtgggttg

SEQ ID NO: 3383102 - DNA, 25 bp, Homo sapien
gttgtcacattttccacgataacat

SEQ ID NO: 3383103 - DNA, 25 bp, Homo sapien
tggaggagtaattacaacagcatgt

SEQ ID NO: 3383104 - DNA, 25 bp, Homo sapien
tagtttatagcgtggctgcttcagg

SEQ ID NO: 3383105 - DNA, 25 bp, Homo sapien
tctgactggatactgtgggaggacc

SEQ ID NO: 3383106 - DNA, 25 bp, Homo sapien
tgcttgaagatctaggattacggcc

SEQ ID NO: 3383107 - DNA, 25 bp, Homo sapien
gattacggccttagagccacttctg

SEQ ID NO: 3383108 - DNA, 25 bp, Homo sapien
ggagtaaggttaaatggaaccatca

SEQ ID NO: 3383109 - DNA, 25 bp, Homo sapien
ctggagtaaggttaaatggaaccat

SEQ ID NO: 3383110 - DNA, 25 bp, Homo sapien
agagcagcaattgaatagtaataga

SEQ ID NO: 3383111 - DNA, 25 bp, Homo sapien
tcacagggatgcattcattaagagc

SEQ ID NO: 3383112 - DNA, 25 bp, Homo sapien
ggttccttggtcattgactgctaag

SEQ ID NO: 3383113 - DNA, 25 bp, Homo sapien
tcattgactgctaaggcttcttctg

SEQ ID NO: 3383114 - DNA, 25 bp, Homo sapien
tggccgcagtgcttgtgctgtcagc

SEQ ID NO: 3383115 - DNA, 25 bp, Homo sapien
ttctgagaccattctctcggtggcc

SEQ ID NO: 3383116 - DNA, 25 bp, Homo sapien
tctgggcctggaaagttggtccctg

SEQ ID NO: 3383117 - DNA, 25 bp, Homo sapien
cacacactgcatagccaggaaacag

SEQ ID NO: 3383118 - DNA, 25 bp, Homo sapien
gaataacctactccaactgcactgc

SEQ ID NO: 3383119 - DNA, 25 bp, Homo sapien
tgcactgcagattggccgaaagggc

SEQ ID NO: 3383120 - DNA, 25 bp, Homo sapien
gttatctcccctggtgacaggctgg

SEQ ID NO: 3383121 - DNA, 25 bp, Homo sapien
tccatttgttatctcccctggtgac

SEQ ID NO: 3383122 - DNA, 25 bp, Homo sapien
gggctccatttgttatctcccctgg

SEQ ID NO: 3383123 - DNA, 25 bp, Homo sapien
catttgttatctcccctggtgacag

SEQ ID NO: 3383124 - DNA, 25 bp, Homo sapien
gcttgggaaatgagttaagggattc

SEQ ID NO: 3383125 - DNA, 25 bp, Homo sapien
tgaggtcatttgaacatctgtacca

SEQ ID NO: 3383126 - DNA, 25 bp, Homo sapien
tgaacatctgtaccatatctgccaa

SEQ ID NO: 3383127 - DNA, 25 bp, Homo sapien
ttgttgttgacatcctggtccctaa

SEQ ID NO: 3383128 - DNA, 25 bp, Homo sapien
ggagctcagagtcaactatggatac

SEQ ID NO: 3383129 - DNA, 25 bp, Homo sapien
cagagtcaactatggataccgggat

SEQ ID NO: 3383130 - DNA, 25 bp, Homo sapien
caactatggataccgggatctggaa

SEQ ID NO: 3383131 - DNA, 25 bp, Homo sapien
ctcgggagctcagagtcaactatgg

SEQ ID NO: 3383132 - DNA, 25 bp, Homo sapien
tttagacgtgctacttcacattgca

SEQ ID NO: 3383133 - DNA, 25 bp, Homo sapien
catctgtggattcaagaacatcaaa

SEQ ID NO: 3383134 - DNA, 25 bp, Homo sapien
tcacattgcattagtatgtacaatg

SEQ ID NO: 3383135 - DNA, 25 bp, Homo sapien
catcaaaaaagttggacaggctatt

SEQ ID NO: 3383136 - DNA, 25 bp, Homo sapien
ttagtgagtgaaggggttggtcaga

SEQ ID NO: 3383137 - DNA, 25 bp, Homo sapien
ctggttagtgagtgaaggggttggt

SEQ ID NO: 3383138 - DNA, 25 bp, Homo sapien
ggttagtgagtgaaggggttggtca

SEQ ID NO: 3383139 - DNA, 25 bp, Homo sapien
tagtgagtgaaggggttggtcagac

SEQ ID NO: 3383140 - DNA, 25 bp, Homo sapien
gctggtggcctgctagtttctgtcc

SEQ ID NO: 3383141 - DNA, 25 bp, Homo sapien
agctggtggcctgctagtttctgtc

SEQ ID NO: 3383142 - DNA, 25 bp, Homo sapien
taaaatcccttcgtagacatgtgct

SEQ ID NO: 3383143 - DNA, 25 bp, Homo sapien
tcttgcacacgcacatttcaggatt

SEQ ID NO: 3383144 - DNA, 25 bp, Homo sapien
ccttcttagctacagtgaaactgca

SEQ ID NO: 3383145 - DNA, 25 bp, Homo sapien
tgaactgtggttaaggcaatctcct

SEQ ID NO: 3383146 - DNA, 25 bp, Homo sapien
agggctcggccattcaaccttttgg

SEQ ID NO: 3383147 - DNA, 25 bp, Homo sapien
gatctgaaagtccaatttgccagga

SEQ ID NO: 3383148 - DNA, 25 bp, Homo sapien
gttgcttagcaacccagaggcatga

SEQ ID NO: 3383149 - DNA, 25 bp, Homo sapien
gccaggataatatatccggtgtgga

SEQ ID NO: 3383150 - DNA, 25 bp, Homo sapien
tttggagggaaaattatcactagat

SEQ ID NO: 3383151 - DNA, 25 bp, Homo sapien
tctttggagggaaaattatcactag

SEQ ID NO: 3383152 - DNA, 25 bp, Homo sapien
ggagggaaaattatcactagatatc

SEQ ID NO: 3383153 - DNA, 25 bp, Homo sapien
tttatctttggagggaaaattatca

SEQ ID NO: 3383154 - DNA, 25 bp, Homo sapien
ttcatgagatatgtggtcatcctgg

SEQ ID NO: 3383155 - DNA, 25 bp, Homo sapien
ctaattagacttatcgaaaaacaat

SEQ ID NO: 3383156 - DNA, 25 bp, Homo sapien
tcgaaaaacaattgcacatcttttg

SEQ ID NO: 3383157 - DNA, 25 bp, Homo sapien
taattcatgagatatgtggtcatcc

SEQ ID NO: 3383158 - DNA, 25 bp, Homo sapien
cgaacttccttgcttctgacctgac

SEQ ID NO: 3383159 - DNA, 25 bp, Homo sapien
ttccttgcttctgacctgactctgc

SEQ ID NO: 3383160 - DNA, 25 bp, Homo sapien
ttgcttctgacctgactctgccttc

SEQ ID NO: 3383161 - DNA, 25 bp, Homo sapien
acttccttgcttctgacctgactct

SEQ ID NO: 3383162 - DNA, 25 bp, Homo sapien
caatcagggtagatggaaccattct

SEQ ID NO: 3383163 - DNA, 25 bp, Homo sapien
aacagtggtgatgagggtgtcctca

SEQ ID NO: 3383164 - DNA, 25 bp, Homo sapien
tgatatagtgaaatggctccaagtc

SEQ ID NO: 3383165 - DNA, 25 bp, Homo sapien
tgatgacaaggatggcagcacaacc

SEQ ID NO: 3383166 - DNA, 25 bp, Homo sapien
tatgccaccattcagggcacagtca

SEQ ID NO: 3383167 - DNA, 25 bp, Homo sapien
ggatccaatgcacagcatcttgcac

SEQ ID NO: 3383168 - DNA, 25 bp, Homo sapien
ggtgtgtttggctgtatgccaccat

SEQ ID NO: 3383169 - DNA, 25 bp, Homo sapien
ccccgattatctaaggatccaatgc

SEQ ID NO: 3383170 - DNA, 25 bp, Homo sapien
tggccatactctctctgagcgcagc

SEQ ID NO: 3383171 - DNA, 25 bp, Homo sapien
acaggtgcagccaaagagctcctcc

SEQ ID NO: 3383172 - DNA, 25 bp, Homo sapien
cctgaagctggccatactctctctg

SEQ ID NO: 3383173 - DNA, 25 bp, Homo sapien
acaagcacaggtgcagccaaagagc

SEQ ID NO: 3383174 - DNA, 25 bp, Homo sapien
agccgctcttccgacctctgcctct

SEQ ID NO: 3383175 - DNA, 25 bp, Homo sapien
ctttcctgctctaattcctcgccca

SEQ ID NO: 3383176 - DNA, 25 bp, Homo sapien
attcctcgcccacactttgccctgc

SEQ ID NO: 3383177 - DNA, 25 bp, Homo sapien
ctcccgggatctggttctttgagcc

SEQ ID NO: 3383178 - DNA, 25 bp, Homo sapien
ggcagagggctgtccaaaatgacca

SEQ ID NO: 3383179 - DNA, 25 bp, Homo sapien
agaaggcagagggctgtccaaaatg

SEQ ID NO: 3383180 - DNA, 25 bp, Homo sapien
aaggcagagggctgtccaaaatgac

SEQ ID NO: 3383181 - DNA, 25 bp, Homo sapien
gcagagggctgtccaaaatgaccac

SEQ ID NO: 3383182 - DNA, 25 bp, Homo sapien
tgtgcaggggaggggttgttgaatt

SEQ ID NO: 3383183 - DNA, 25 bp, Homo sapien
tgcaggggaggggttgttgaattcc

SEQ ID NO: 3383184 - DNA, 25 bp, Homo sapien
gaagcctgtgtgcaggggaggggtt

SEQ ID NO: 3383185 - DNA, 25 bp, Homo sapien
cctgtgtgcaggggaggggttgttg

SEQ ID NO: 3383186 - DNA, 25 bp, Homo sapien
ctctgaaactttctctgggcactca

SEQ ID NO: 3383187 - DNA, 25 bp, Homo sapien
tcaggtcccctgaggaggttttcca

SEQ ID NO: 3383188 - DNA, 25 bp, Homo sapien
tcttggggccctgtcactctgcagg

SEQ ID NO: 3383189 - DNA, 25 bp, Homo sapien
gaggtgggtgtttgcctctgaaact

SEQ ID NO: 3383190 - DNA, 25 bp, Homo sapien
tggctctgctagaccagccataagc

SEQ ID NO: 3383191 - DNA, 25 bp, Homo sapien
ctggctctgctagaccagccataag

SEQ ID NO: 3383192 - DNA, 25 bp, Homo sapien
tggacacaggagcttcctttactct

SEQ ID NO: 3383193 - DNA, 25 bp, Homo sapien
cattgctgctcgacacctctgtctg

SEQ ID NO: 3383194 - DNA, 25 bp, Homo sapien
tgcatgctctatcgctgtccctgct

SEQ ID NO: 3383195 - DNA, 25 bp, Homo sapien
tctgtgagctataggcctgggcttc

SEQ ID NO: 3383196 - DNA, 25 bp, Homo sapien
tcatcaggtctcatctgattaattt

SEQ ID NO: 3383197 - DNA, 25 bp, Homo sapien
catctgattaatttccgagtcacaa

SEQ ID NO: 3383198 - DNA, 25 bp, Homo sapien
ggtctcatctgattaatttccgagt

SEQ ID NO: 3383199 - DNA, 25 bp, Homo sapien
ttaatttccgagtcacaattcattg

SEQ ID NO: 3383200 - DNA, 25 bp, Homo sapien
gggtgactgatctgttggccatcgc

SEQ ID NO: 3383201 - DNA, 25 bp, Homo sapien
catcgctcctcattacagctgatac

SEQ ID NO: 3383202 - DNA, 25 bp, Homo sapien
tgttggccatcgctcctcattacag

SEQ ID NO: 3383203 - DNA, 25 bp, Homo sapien
gactgatctgttggccatcgctcct

SEQ ID NO: 3383204 - DNA, 25 bp, Homo sapien
ggctgtgacagcatcttagatggat

SEQ ID NO: 3383205 - DNA, 25 bp, Homo sapien
cagatgtgcactgcccctgtccatg

SEQ ID NO: 3383206 - DNA, 25 bp, Homo sapien
tgtgacagcatcttagatggatggt

SEQ ID NO: 3383207 - DNA, 25 bp, Homo sapien
atggctgtgacagcatcttagatgg

SEQ ID NO: 3383208 - DNA, 25 bp, Homo sapien
ggctgctgagttccccgaaaattga

SEQ ID NO: 3383209 - DNA, 25 bp, Homo sapien
caaaggtggatggtttggctgctga

SEQ ID NO: 3383210 - DNA, 25 bp, Homo sapien
gattccgcatgttgccgacatcagc

SEQ ID NO: 3383211 - DNA, 25 bp, Homo sapien
agcccgaacgtttgctcagccgtga

SEQ ID NO: 3383212 - DNA, 25 bp, Homo sapien
agcaaacgatggaaatcagaacctc

SEQ ID NO: 3383213 - DNA, 25 bp, Homo sapien
ccaaggtttcctacagcaaacgatg

SEQ ID NO: 3383214 - DNA, 25 bp, Homo sapien
ctgcacaaatattcaccatcctctg

SEQ ID NO: 3383215 - DNA, 25 bp, Homo sapien
aaggtttcctacagcaaacgatgga

SEQ ID NO: 3383216 - DNA, 25 bp, Homo sapien
gatgaatatcgactccaataggcca

SEQ ID NO: 3383217 - DNA, 25 bp, Homo sapien
caaggcaagcaataggcatgcgtgt

SEQ ID NO: 3383218 - DNA, 25 bp, Homo sapien
cagtcattggtagcccagtgtagac

SEQ ID NO: 3383219 - DNA, 25 bp, Homo sapien
taatagcggcttttgcggaaggaga

SEQ ID NO: 3383220 - DNA, 25 bp, Homo sapien
gcttccctcttgagtccaatggcag

SEQ ID NO: 3383221 - DNA, 25 bp, Homo sapien
taattccaaccccactgtgaatgat

SEQ ID NO: 3383222 - DNA, 25 bp, Homo sapien
cctctgctcacatccttggtcttct

SEQ ID NO: 3383223 - DNA, 25 bp, Homo sapien
actgtgaatgatcccatgcttccag

SEQ ID NO: 3383224 - DNA, 25 bp, Homo sapien
ttggcccatggctggtaactatttg

SEQ ID NO: 3383225 - DNA, 25 bp, Homo sapien
ccatggctggtaactatttgggcaa

SEQ ID NO: 3383226 - DNA, 25 bp, Homo sapien
cataaaaactagtgtctattgctgc

SEQ ID NO: 3383227 - DNA, 25 bp, Homo sapien
gctggtaactatttgggcaattaga

SEQ ID NO: 3383228 - DNA, 25 bp, Homo sapien
ttctatgtataatgcaggtacctac

SEQ ID NO: 3383229 - DNA, 25 bp, Homo sapien
attctatgtataatgcaggtaccta

SEQ ID NO: 3383230 - DNA, 25 bp, Homo sapien
tgggtgtggcccttgaattgctaag

SEQ ID NO: 3383231 - DNA, 25 bp, Homo sapien
cactgacatgctggactgacatgct

SEQ ID NO: 3383232 - DNA, 25 bp, Homo sapien
gctggctgctgtttcaaagtgtaaa

SEQ ID NO: 3383233 - DNA, 25 bp, Homo sapien
ggttcctatagcaacactgggtgtg

SEQ ID NO: 3383234 - DNA, 25 bp, Homo sapien
cattggatcaaacagtaatgctgta

SEQ ID NO: 3383235 - DNA, 25 bp, Homo sapien
gggcttgcctcacagttgccggatt

SEQ ID NO: 3383236 - DNA, 25 bp, Homo sapien
gaaactgttgtacgaaaactacatg

SEQ ID NO: 3383237 - DNA, 25 bp, Homo sapien
tgtttcgactcgtgtgggcttgcct

SEQ ID NO: 3383238 - DNA, 25 bp, Homo sapien
ccagctggcacatctagggagttca

SEQ ID NO: 3383239 - DNA, 25 bp, Homo sapien
actgagttgccttgtcccagctggc

SEQ ID NO: 3383240 - DNA, 25 bp, Homo sapien
attcagcagcaaggttcaacagtgg

SEQ ID NO: 3383241 - DNA, 25 bp, Homo sapien
tcacaagtggtagggtctgcatcag

SEQ ID NO: 3383242 - DNA, 25 bp, Homo sapien
catttaatcattaagcccttgtggc

SEQ ID NO: 3383243 - DNA, 25 bp, Homo sapien
tgcaaagcactcacatgtataatct

SEQ ID NO: 3383244 - DNA, 25 bp, Homo sapien
ccttgtggcatgagcattgtctatt

SEQ ID NO: 3383245 - DNA, 25 bp, Homo sapien
cactgtcatcgtagtttagctttga

SEQ ID NO: 3383246 - DNA, 25 bp, Homo sapien
gacatagaaaccaataattgtaata

SEQ ID NO: 3383247 - DNA, 25 bp, Homo sapien
acagacatagaaaccaataattgta

SEQ ID NO: 3383248 - DNA, 25 bp, Homo sapien
cagacatagaaaccaataattgtaa

SEQ ID NO: 3383249 - DNA, 25 bp, Homo sapien
agacatagaaaccaataattgtaat

SEQ ID NO: 3383250 - DNA, 25 bp, Homo sapien
tctccaatgataagtcctctaaagc

SEQ ID NO: 3383251 - DNA, 25 bp, Homo sapien
tatgaaacagttgcacagcctaggg

SEQ ID NO: 3383252 - DNA, 25 bp, Homo sapien
gccgcataagaattaaccatatatg

SEQ ID NO: 3383253 - DNA, 25 bp, Homo sapien
ccatatatgaaacagttgcacagcc

SEQ ID NO: 3383254 - DNA, 25 bp, Homo sapien
ggaacattacaaatataagccgtac

SEQ ID NO: 3383255 - DNA, 25 bp, Homo sapien
gagctgaagctttgtgacaagagat

SEQ ID NO: 3383256 - DNA, 25 bp, Homo sapien
tcagagaactgaatctcttcagcat

SEQ ID NO: 3383257 - DNA, 25 bp, Homo sapien
tataagccgtaccacttggagcaaa

SEQ ID NO: 3383258 - DNA, 25 bp, Homo sapien
tcttgtttccagtgacgatgactcc

SEQ ID NO: 3383259 - DNA, 25 bp, Homo sapien
tttgtatgccgataatgtggaaacg

SEQ ID NO: 3383260 - DNA, 25 bp, Homo sapien
accaggtctgtgacaagaatgctcc

SEQ ID NO: 3383261 - DNA, 25 bp, Homo sapien
acgatgactccacagtcgcaccagg

SEQ ID NO: 3383262 - DNA, 25 bp, Homo sapien
aaattagggcttggtggcacacacc

SEQ ID NO: 3383263 - DNA, 25 bp, Homo sapien
taagagatagataccaccctggcca

SEQ ID NO: 3383264 - DNA, 25 bp, Homo sapien
attcaaaaattagctagatgtgatg

SEQ ID NO: 3383265 - DNA, 25 bp, Homo sapien
aacaagactccatttcaaacaaaca

SEQ ID NO: 3383266 - DNA, 25 bp, Homo sapien
catattgtgcttagtgagtggtatg

SEQ ID NO: 3383267 - DNA, 25 bp, Homo sapien
tgttggaccccagtgggtttcagtc

SEQ ID NO: 3383268 - DNA, 25 bp, Homo sapien
ggtttcagtcttatgtgttcagttg

SEQ ID NO: 3383269 - DNA, 25 bp, Homo sapien
caaagagataggttgagtctgttgg

SEQ ID NO: 3383270 - DNA, 25 bp, Homo sapien
gatggtcattactgccaattatact

SEQ ID NO: 3383271 - DNA, 25 bp, Homo sapien
caactggaagttgtaagcatggttt

SEQ ID NO: 3383272 - DNA, 25 bp, Homo sapien
cagggagaccagagttcgatggtca

SEQ ID NO: 3383273 - DNA, 25 bp, Homo sapien
attcacttctgtgggcatttcggca

SEQ ID NO: 3383274 - DNA, 25 bp, Homo sapien
gtttgagatcacatatctgtctcac

SEQ ID NO: 3383275 - DNA, 25 bp, Homo sapien
tttgagatcacatatctgtctcact

SEQ ID NO: 3383276 - DNA, 25 bp, Homo sapien
agtttgagatcacatatctgtctca

SEQ ID NO: 3383277 - DNA, 25 bp, Homo sapien
aaagtgtctgagccttgtgtacagc

SEQ ID NO: 3383278 - DNA, 25 bp, Homo sapien
gtgtctgagccttgtgtacagccat

SEQ ID NO: 3383279 - DNA, 25 bp, Homo sapien
atgcctatttctactagagtataaa

SEQ ID NO: 3383280 - DNA, 25 bp, Homo sapien
tgcctatttctactagagtataaat

SEQ ID NO: 3383281 - DNA, 25 bp, Homo sapien
aatcagatttttcatatgctattag

SEQ ID NO: 3383282 - DNA, 25 bp, Homo sapien
cagatttttcatatgctattagcag

SEQ ID NO: 3383283 - DNA, 25 bp, Homo sapien
tatgctattagcagttgtagcaaaa

SEQ ID NO: 3383284 - DNA, 25 bp, Homo sapien
cgataacttggttacatctcattat

SEQ ID NO: 3383285 - DNA, 25 bp, Homo sapien
tttgaagaggacagcaagtccgtcc

SEQ ID NO: 3383286 - DNA, 25 bp, Homo sapien
tttcagttttgccagggctagcttc

SEQ ID NO: 3383287 - DNA, 25 bp, Homo sapien
gacagcaagtccgtcccattcgggt

SEQ ID NO: 3383288 - DNA, 25 bp, Homo sapien
gttttgccagggctagcttccaaag

SEQ ID NO: 3383289 - DNA, 25 bp, Homo sapien
tgcctagcccattttattagagata

SEQ ID NO: 3383290 - DNA, 25 bp, Homo sapien
ggatgtggagaaatgcacaaaattt

SEQ ID NO: 3383291 - DNA, 25 bp, Homo sapien
aattgctaggattgcaattgtgagc

SEQ ID NO: 3383292 - DNA, 25 bp, Homo sapien
ggtctcaagagatgctgccacctta

SEQ ID NO: 3383293 - DNA, 25 bp, Homo sapien
tggctgttaaatcttcataactctg

SEQ ID NO: 3383294 - DNA, 25 bp, Homo sapien
attcctgaagatattttagggagtc

SEQ ID NO: 3383295 - DNA, 25 bp, Homo sapien
tagctagtactcatgaaatgacaag

SEQ ID NO: 3383296 - DNA, 25 bp, Homo sapien
gaggccagccggatcaacatggtaa

SEQ ID NO: 3383297 - DNA, 25 bp, Homo sapien
ccgaggtcagctgatcatgagatca

SEQ ID NO: 3383298 - DNA, 25 bp, Homo sapien
gccctgctgtatgggaaaggcatgc

SEQ ID NO: 3383299 - DNA, 25 bp, Homo sapien
tatccaaaacagttggtgcattcct

SEQ ID NO: 3383300 - DNA, 25 bp, Homo sapien
tgtttatatcattgccctgctgtat

SEQ ID NO: 3383301 - DNA, 25 bp, Homo sapien
ccttaatgatcaagtgcttgagaag

SEQ ID NO: 3383302 - DNA, 25 bp, Homo sapien
gccttgcattccagatgcttcagct

SEQ ID NO: 3383303 - DNA, 25 bp, Homo sapien
agagttgtccaaggccatggaagcc

SEQ ID NO: 3383304 - DNA, 25 bp, Homo sapien
tagctttgggatatgatgccttgca

SEQ ID NO: 3383305 - DNA, 25 bp, Homo sapien
taggatctgagggtgcacagtagtc

SEQ ID NO: 3383306 - DNA, 25 bp, Homo sapien
gatgatctgcccataagcaggatgt

SEQ ID NO: 3383307 - DNA, 25 bp, Homo sapien
tcacagaccatgtggtaaagaaaca

SEQ ID NO: 3383308 - DNA, 25 bp, Homo sapien
gaaatgtggcctggatgataaggtc

SEQ ID NO: 3383309 - DNA, 25 bp, Homo sapien
taagcctctgggactaacaaatgca

SEQ ID NO: 3383310 - DNA, 25 bp, Homo sapien
caaggtgtcacagctaatttctgac

SEQ ID NO: 3383311 - DNA, 25 bp, Homo sapien
caaactggctgaacatcactcaatc

SEQ ID NO: 3383312 - DNA, 25 bp, Homo sapien
tgagttctgctgttccttattcccc

SEQ ID NO: 3383313 - DNA, 25 bp, Homo sapien
tccaactttgattcagacaacctgc

SEQ ID NO: 3383314 - DNA, 25 bp, Homo sapien
gaatagtcacctcacttgtaaaagc

SEQ ID NO: 3383315 - DNA, 25 bp, Homo sapien
gctttaagtgcttgtgaccgtggta

SEQ ID NO: 3383316 - DNA, 25 bp, Homo sapien
cactgagaggattgcattagactga

SEQ ID NO: 3383317 - DNA, 25 bp, Homo sapien
cttgtaaaagcactattagagtggg

SEQ ID NO: 3383318 - DNA, 25 bp, Homo sapien
tgtttaaccaatgtgataagttgac

SEQ ID NO: 3383319 - DNA, 25 bp, Homo sapien
tgtagtcaatacactggtaccatgt

SEQ ID NO: 3383320 - DNA, 25 bp, Homo sapien
tagaattgggcgcatttgattgcat

SEQ ID NO: 3383321 - DNA, 25 bp, Homo sapien
ggtaccatgtgagtgtaatttcctc

SEQ ID NO: 3383322 - DNA, 25 bp, Homo sapien
tattacaatggaaggtgacaatttg

SEQ ID NO: 3383323 - DNA, 25 bp, Homo sapien
cactagttgtgcattattacaatgg

SEQ ID NO: 3383324 - DNA, 25 bp, Homo sapien
tacaatggaaggtgacaatttgatt

SEQ ID NO: 3383325 - DNA, 25 bp, Homo sapien
tttgctgatcactagttgtgcatta

SEQ ID NO: 3383326 - DNA, 25 bp, Homo sapien
caaataggctctattggatgatggc

SEQ ID NO: 3383327 - DNA, 25 bp, Homo sapien
ttcctgccaaattccgatctctgtt

SEQ ID NO: 3383328 - DNA, 25 bp, Homo sapien
taacttactgtcaactgtgaggcaa

SEQ ID NO: 3383329 - DNA, 25 bp, Homo sapien
gcttgactagcttgtaaagtttgct

SEQ ID NO: 3383330 - DNA, 25 bp, Homo sapien
taactccaacttccatctgtgaggg

SEQ ID NO: 3383331 - DNA, 25 bp, Homo sapien
ggaacaatggacttgtgtttctccc

SEQ ID NO: 3383332 - DNA, 25 bp, Homo sapien
aaaaaggaggattagagcagttgcc

SEQ ID NO: 3383333 - DNA, 25 bp, Homo sapien
tttagttgttaggagagaccattgg

SEQ ID NO: 3383334 - DNA, 25 bp, Homo sapien
tgagcttatgagttaaaaggtagca

SEQ ID NO: 3383335 - DNA, 25 bp, Homo sapien
cttttgagcttatgagttaaaaggt

SEQ ID NO: 3383336 - DNA, 25 bp, Homo sapien
tttgagcttatgagttaaaaggtag

SEQ ID NO: 3383337 - DNA, 25 bp, Homo sapien
gcttatgagttaaaaggtagcatac

SEQ ID NO: 3383338 - DNA, 25 bp, Homo sapien
gcctcaggaggaggaatatttgctg

SEQ ID NO: 3383339 - DNA, 25 bp, Homo sapien
tattttgcaaatttcgattagctca

SEQ ID NO: 3383340 - DNA, 25 bp, Homo sapien
tatttgctggaggtacgtcattatt

SEQ ID NO: 3383341 - DNA, 25 bp, Homo sapien
cctcaggaggaggaatatttgctgg

SEQ ID NO: 3383342 - DNA, 25 bp, Homo sapien
aatggaggttgtcgccataaggctc

SEQ ID NO: 3383343 - DNA, 25 bp, Homo sapien
gactgcaagaggaaagttagggata

SEQ ID NO: 3383344 - DNA, 25 bp, Homo sapien
cataaggctctgtcatagcaatgaa

SEQ ID NO: 3383345 - DNA, 25 bp, Homo sapien
ttttggcaggcctatggtttaatcc

SEQ ID NO: 3383346 - DNA, 25 bp, Homo sapien
taaatgcctgccctgccaaggatct

SEQ ID NO: 3383347 - DNA, 25 bp, Homo sapien
ccttattaccccaatcacagtcgtg

SEQ ID NO: 3383348 - DNA, 25 bp, Homo sapien
tgaattagtggcattctggccctgt

SEQ ID NO: 3383349 - DNA, 25 bp, Homo sapien
tcacagtcgtgaatttttgctgaat

SEQ ID NO: 3383350 - DNA, 25 bp, Homo sapien
tgattcctgcattgtatgcaatttc

SEQ ID NO: 3383351 - DNA, 25 bp, Homo sapien
atgattcctgcattgtatgcaattt

SEQ ID NO: 3383352 - DNA, 25 bp, Homo sapien
agccatatggcttgtgggacacaca

SEQ ID NO: 3383353 - DNA, 25 bp, Homo sapien
cactttgtaagctagaaaacaccat

SEQ ID NO: 3383354 - DNA, 25 bp, Homo sapien
actttcagataatttgtccccagag

SEQ ID NO: 3383355 - DNA, 25 bp, Homo sapien
gaaggtgacatcaccacttgtgcct

SEQ ID NO: 3383356 - DNA, 25 bp, Homo sapien
cagctgcccgttgttttgacttagc

SEQ ID NO: 3383357 - DNA, 25 bp, Homo sapien
ccacagctgcccgttgttttgactt

SEQ ID NO: 3383358 - DNA, 25 bp, Homo sapien
ctatcccacagctgcccgttgtttt

SEQ ID NO: 3383359 - DNA, 25 bp, Homo sapien
gctatcccacagctgcccgttgttt

SEQ ID NO: 3383360 - DNA, 25 bp, Homo sapien
cataaccagatgcaaattagagctg

SEQ ID NO: 3383361 - DNA, 25 bp, Homo sapien
ggtgtatttacctccagagtccatg

SEQ ID NO: 3383362 - DNA, 25 bp, Homo sapien
tcttaaccacatcttgcataaccag

SEQ ID NO: 3383363 - DNA, 25 bp, Homo sapien
gctgtcagactgtttcttagaaaat

SEQ ID NO: 3383364 - DNA, 25 bp, Homo sapien
tttggacagtatagccatttcagta

SEQ ID NO: 3383365 - DNA, 25 bp, Homo sapien
tagctgttttcctgttctattgttt

SEQ ID NO: 3383366 - DNA, 25 bp, Homo sapien
gttagctgttttcctgttctattgt

SEQ ID NO: 3383367 - DNA, 25 bp, Homo sapien
gagaaggcatccttgcagagacctt

SEQ ID NO: 3383368 - DNA, 25 bp, Homo sapien
ctggtcccttggcttcactcattgc

SEQ ID NO: 3383369 - DNA, 25 bp, Homo sapien
ggtcccttggcttcactcattgcca

SEQ ID NO: 3383370 - DNA, 25 bp, Homo sapien
ttctggtcccttggcttcactcatt

SEQ ID NO: 3383371 - DNA, 25 bp, Homo sapien
tttctggtcccttggcttcactcat

SEQ ID NO: 3383372 - DNA, 25 bp, Homo sapien
gtaagactgaagtgaatacaaccac

SEQ ID NO: 3383373 - DNA, 25 bp, Homo sapien
tacaaccacttatatgcaccttctt

SEQ ID NO: 3383374 - DNA, 25 bp, Homo sapien
cgccatactgatttggtggatgtaa

SEQ ID NO: 3383375 - DNA, 25 bp, Homo sapien
tatcactgtcttgtacagtagtcat

SEQ ID NO: 3383376 - DNA, 25 bp, Homo sapien
tctgtttctgccctgtctttggctg

SEQ ID NO: 3383377 - DNA, 25 bp, Homo sapien
tagctctgtttctgccctgtctttg

SEQ ID NO: 3383378 - DNA, 25 bp, Homo sapien
gtttctgccctgtctttggctgaca

SEQ ID NO: 3383379 - DNA, 25 bp, Homo sapien
ctgccctgtctttggctgacagctg

SEQ ID NO: 3383380 - DNA, 25 bp, Homo sapien
caacttatatggctgaaggacagca

SEQ ID NO: 3383381 - DNA, 25 bp, Homo sapien
tggactgcttcagcaggtgcagctg

SEQ ID NO: 3383382 - DNA, 25 bp, Homo sapien
caatacccagaatgatggactgctt

SEQ ID NO: 3383383 - DNA, 25 bp, Homo sapien
gttgattaggatgcacaatacccag

SEQ ID NO: 3383384 - DNA, 25 bp, Homo sapien
tctagcatagaaacaaggaaatctt

SEQ ID NO: 3383385 - DNA, 25 bp, Homo sapien
gaatacatcgataaaccattgtcat

SEQ ID NO: 3383386 - DNA, 25 bp, Homo sapien
aaactaatttggatatatgggaact

SEQ ID NO: 3383387 - DNA, 25 bp, Homo sapien
gaatttgcccagtcaatagaataca

SEQ ID NO: 3383388 - DNA, 25 bp, Homo sapien
taatgaatgggctacaccaaaagtg

SEQ ID NO: 3383389 - DNA, 25 bp, Homo sapien
tcaaatcaactacctaggccggaag

SEQ ID NO: 3383390 - DNA, 25 bp, Homo sapien
gaaatatttgtctagtcaggcctaa

SEQ ID NO: 3383391 - DNA, 25 bp, Homo sapien
agaaagttatacctcatggccatgg

SEQ ID NO: 3383392 - DNA, 25 bp, Homo sapien
aatgtctctgtggatgtaaacctac

SEQ ID NO: 3383393 - DNA, 25 bp, Homo sapien
cttaccagagtacagtatagtgtca

SEQ ID NO: 3383394 - DNA, 25 bp, Homo sapien
tcaaggcacgcctatactaaggcat

SEQ ID NO: 3383395 - DNA, 25 bp, Homo sapien
gagcctccacccatcaaaaagatta

SEQ ID NO: 3383396 - DNA, 25 bp, Homo sapien
agtaggcgttagagttgctggaaac

SEQ ID NO: 3383397 - DNA, 25 bp, Homo sapien
agggtataataccaacaattaatga

SEQ ID NO: 3383398 - DNA, 25 bp, Homo sapien
acaattaatgacagagctagccaga

SEQ ID NO: 3383399 - DNA, 25 bp, Homo sapien
tcctgtacttcttgcactgtggaag

SEQ ID NO: 3383400 - DNA, 25 bp, Homo sapien
ttcgtgctcagcaacggtgccagga

SEQ ID NO: 3383401 - DNA, 25 bp, Homo sapien
gatgagtcgggcaatgtggttccca

SEQ ID NO: 3383402 - DNA, 25 bp, Homo sapien
tgacatgaagctggactacctggat

SEQ ID NO: 3383403 - DNA, 25 bp, Homo sapien
gagcctgccagaagacgcttagtga

SEQ ID NO: 3383404 - DNA, 25 bp, Homo sapien
agtttttggatccatgggtttatag

SEQ ID NO: 3383405 - DNA, 25 bp, Homo sapien
ctctcttttagagctcatatgtatg

SEQ ID NO: 3383406 - DNA, 25 bp, Homo sapien
tgttagactatatggcctattcatt

SEQ ID NO: 3383407 - DNA, 25 bp, Homo sapien
tctctcactgcttcaacttcaatca

SEQ ID NO: 3383408 - DNA, 25 bp, Homo sapien
tcagagaccatttacatgatgctag

SEQ ID NO: 3383409 - DNA, 25 bp, Homo sapien
gcaatcagagtttatagagctatcc

SEQ ID NO: 3383410 - DNA, 25 bp, Homo sapien
agtcctactatgaccactattcagg

SEQ ID NO: 3383411 - DNA, 25 bp, Homo sapien
ctagttaagttagagatacactcaa

SEQ ID NO: 3383412 - DNA, 25 bp, Homo sapien
ccttttccacttaggccctggtcag

SEQ ID NO: 3383413 - DNA, 25 bp, Homo sapien
ttctcaaagggatgtatgatacacc

SEQ ID NO: 3383414 - DNA, 25 bp, Homo sapien
tgatacacctgactaaattcttggt

SEQ ID NO: 3383415 - DNA, 25 bp, Homo sapien
cctggtcagcaggacttgaatggta

SEQ ID NO: 3383416 - DNA, 25 bp, Homo sapien
gctcataagggttaggtttcacaac

SEQ ID NO: 3383417 - DNA, 25 bp, Homo sapien
caatccttggactagagcattggtc

SEQ ID NO: 3383418 - DNA, 25 bp, Homo sapien
taatcatagttgaaaaatgagggcc

SEQ ID NO: 3383419 - DNA, 25 bp, Homo sapien
tgtactgctgaacaggtgagtttgc

SEQ ID NO: 3383420 - DNA, 25 bp, Homo sapien
gatgctgacagtatgtgaacactgc

SEQ ID NO: 3383421 - DNA, 25 bp, Homo sapien
cacacctatcttgttggcaccaaag

SEQ ID NO: 3383422 - DNA, 25 bp, Homo sapien
gacacctgtgtctcacttgctacaa

SEQ ID NO: 3383423 - DNA, 25 bp, Homo sapien
ggcaccaaagagcaatgaatgaggc

SEQ ID NO: 3383424 - DNA, 25 bp, Homo sapien
cagaaacctattggcatatcacact

SEQ ID NO: 3383425 - DNA, 25 bp, Homo sapien
gcagaaacctattggcatatcacac

SEQ ID NO: 3383426 - DNA, 25 bp, Homo sapien
agaaacctattggcatatcacacta

SEQ ID NO: 3383427 - DNA, 25 bp, Homo sapien
catcatcttggataggcaatagttt

SEQ ID NO: 3383428 - DNA, 25 bp, Homo sapien
tttcatcatcttggataggcaatag

SEQ ID NO: 3383429 - DNA, 25 bp, Homo sapien
cctacatatgagagataaaactata

SEQ ID NO: 3383430 - DNA, 25 bp, Homo sapien
attaaagacctacatatgagagata

SEQ ID NO: 3383431 - DNA, 25 bp, Homo sapien
cttgtacatgctcagttatgcattt

SEQ ID NO: 3383432 - DNA, 25 bp, Homo sapien
acatgctcagttatgcattttagca

SEQ ID NO: 3383433 - DNA, 25 bp, Homo sapien
tacatgctcagttatgcattttagc

SEQ ID NO: 3383434 - DNA, 25 bp, Homo sapien
tgtacatgctcagttatgcatttta

SEQ ID NO: 3383435 - DNA, 25 bp, Homo sapien
tgtgttcaccatctaaacggataga

SEQ ID NO: 3383436 - DNA, 25 bp, Homo sapien
tgctatttgagtgggcagctgtaaa

SEQ ID NO: 3383437 - DNA, 25 bp, Homo sapien
aaaaggacagtagctgtagcagtgg

SEQ ID NO: 3383438 - DNA, 25 bp, Homo sapien
gggcatctatgtgttcaccatctaa

SEQ ID NO: 3383439 - DNA, 25 bp, Homo sapien
tttgaaggcagtagactgtaggagt

SEQ ID NO: 3383440 - DNA, 25 bp, Homo sapien
ctcatgacaataggtaaactcttac

SEQ ID NO: 3383441 - DNA, 25 bp, Homo sapien
tgaacccaggtttgcctcatgacaa

SEQ ID NO: 3383442 - DNA, 25 bp, Homo sapien
cagtagactgtaggagttgaaccca

SEQ ID NO: 3383443 - DNA, 25 bp, Homo sapien
tggccaggaattataggctcgacca

SEQ ID NO: 3383444 - DNA, 25 bp, Homo sapien
tgcagactagatttctaggccacag

SEQ ID NO: 3383445 - DNA, 25 bp, Homo sapien
tgcttagcttcagcccagcatggcc

SEQ ID NO: 3383446 - DNA, 25 bp, Homo sapien
cagtgtctcaggaggtgcttagctt

SEQ ID NO: 3383447 - DNA, 25 bp, Homo sapien
gcagatttaacccatcttttattct

SEQ ID NO: 3383448 - DNA, 25 bp, Homo sapien
tcagcaaagttccatagttaagtgt

SEQ ID NO: 3383449 - DNA, 25 bp, Homo sapien
ggaaaggacagtaaggcagcactta

SEQ ID NO: 3383450 - DNA, 25 bp, Homo sapien
tgtatttatcatgttcaggagaggg

SEQ ID NO: 3383451 - DNA, 25 bp, Homo sapien
aagatggtgggcactcccctatttc

SEQ ID NO: 3383452 - DNA, 25 bp, Homo sapien
gatggtgggcactcccctatttcca

SEQ ID NO: 3383453 - DNA, 25 bp, Homo sapien
atggtgggcactcccctatttccat

SEQ ID NO: 3383454 - DNA, 25 bp, Homo sapien
taaagaaggatgttgggaagatggt

SEQ ID NO: 3383455 - DNA, 25 bp, Homo sapien
gcttatatgactgcgacataatcac

SEQ ID NO: 3383456 - DNA, 25 bp, Homo sapien
tatatgactgcgacataatcacttt

SEQ ID NO: 3383457 - DNA, 25 bp, Homo sapien
tgcagcttatatgactgcgacataa

SEQ ID NO: 3383458 - DNA, 25 bp, Homo sapien
tgagttttgcagcttatatgactgc

SEQ ID NO: 3383459 - DNA, 25 bp, Homo sapien
tggacagtcggctgcccaaatgcca

SEQ ID NO: 3383460 - DNA, 25 bp, Homo sapien
tataattagcctgcgcactcagcac

SEQ ID NO: 3383461 - DNA, 25 bp, Homo sapien
tggtccgctcagctctgttctgggt

SEQ ID NO: 3383462 - DNA, 25 bp, Homo sapien
tcctcataaggtaaggtgtcactgg

SEQ ID NO: 3383463 - DNA, 25 bp, Homo sapien
tgtcaatgggcgctcggatgacgtc

SEQ ID NO: 3383464 - DNA, 25 bp, Homo sapien
gccgcgcttgaagtttagggctaga

SEQ ID NO: 3383465 - DNA, 25 bp, Homo sapien
ggacctcccgctgtactgtcaatgg

SEQ ID NO: 3383466 - DNA, 25 bp, Homo sapien
tccttgcggcaaactgggctgggct

SEQ ID NO: 3383467 - DNA, 25 bp, Homo sapien
gattagctcggtgccgggctgcttc

SEQ ID NO: 3383468 - DNA, 25 bp, Homo sapien
tctcccttaaagggccgggcagaga

SEQ ID NO: 3383469 - DNA, 25 bp, Homo sapien
gctgagggcagattagctcggtgcc

SEQ ID NO: 3383470 - DNA, 25 bp, Homo sapien
gggttgtgctccgatgccgggagga

SEQ ID NO: 3383471 - DNA, 25 bp, Homo sapien
gagcgggggcgaggggtagttcagc

SEQ ID NO: 3383472 - DNA, 25 bp, Homo sapien
gtagttcagccccgccgggcgcgga

SEQ ID NO: 3383473 - DNA, 25 bp, Homo sapien
cggacttcgccagggagtcacccgg

SEQ ID NO: 3383474 - DNA, 25 bp, Homo sapien
agtcacccggccgagcgcacggtcg

SEQ ID NO: 3383475 - DNA, 25 bp, Homo sapien
ggctgactgatctgtggtcctcttt

SEQ ID NO: 3383476 - DNA, 25 bp, Homo sapien
ccatccgaaatccaaggctgactga

SEQ ID NO: 3383477 - DNA, 25 bp, Homo sapien
gggacaccgctcgagttgcctccag

SEQ ID NO: 3383478 - DNA, 25 bp, Homo sapien
gctccgccgcaactttttcgggaca

SEQ ID NO: 3383479 - DNA, 25 bp, Homo sapien
gagtcgaggatctccgccgctctct

SEQ ID NO: 3383480 - DNA, 25 bp, Homo sapien
cttaggctgtttgtggggttgacac

SEQ ID NO: 3383481 - DNA, 25 bp, Homo sapien
cgggagtcgaggatctccgccgctc

SEQ ID NO: 3383482 - DNA, 25 bp, Homo sapien
agggcgggcgggagtcgaggatctc

SEQ ID NO: 3383483 - DNA, 25 bp, Homo sapien
cgggaggacccgctgagcttctggg

SEQ ID NO: 3383484 - DNA, 25 bp, Homo sapien
gctgtgtgactgagacgccacagtg

SEQ ID NO: 3383485 - DNA, 25 bp, Homo sapien
tgttgggttgattcgctgtgtgact

SEQ ID NO: 3383486 - DNA, 25 bp, Homo sapien
cgccacagtgttcggagcgcttcag

SEQ ID NO: 3383487 - DNA, 25 bp, Homo sapien
ccgggcactccagggttagtttctg

SEQ ID NO: 3383488 - DNA, 25 bp, Homo sapien
ccggcgtcttccgctcctgcccttc

SEQ ID NO: 3383489 - DNA, 25 bp, Homo sapien
cgtcccccggcgtcttccgctcctg

SEQ ID NO: 3383490 - DNA, 25 bp, Homo sapien
ttccgctcctgcccttccgggcact

SEQ ID NO: 3383491 - DNA, 25 bp, Homo sapien
ggcggcaaacttctgccgctctgcg

SEQ ID NO: 3383492 - DNA, 25 bp, Homo sapien
gattgacagcactaaccatcgcctt

SEQ ID NO: 3383493 - DNA, 25 bp, Homo sapien
tgttccagggtgaagcccctagtca

SEQ ID NO: 3383494 - DNA, 25 bp, Homo sapien
gacatggccgctcacactgattgcc

SEQ ID NO: 3383495 - DNA, 25 bp, Homo sapien
gcacgacgggaaatgctttgaatac

SEQ ID NO: 3383496 - DNA, 25 bp, Homo sapien
gatgttgcacgacgggaaatgcttt

SEQ ID NO: 3383497 - DNA, 25 bp, Homo sapien
tttctgatgttgcacgacgggaaat

SEQ ID NO: 3383498 - DNA, 25 bp, Homo sapien
gttgcacgacgggaaatgctttgaa

SEQ ID NO: 3383499 - DNA, 25 bp, Homo sapien
cccccatttgctgagatcctactaa

SEQ ID NO: 3383500 - DNA, 25 bp, Homo sapien
cttcccccatttgctgagatcctac

SEQ ID NO: 3383501 - DNA, 25 bp, Homo sapien
ctgagatcctactaagtggtgtgtt

SEQ ID NO: 3383502 - DNA, 25 bp, Homo sapien
ttgctgagatcctactaagtggtgt

SEQ ID NO: 3383503 - DNA, 25 bp, Homo sapien
catttaggacaggtccttcaatgat

SEQ ID NO: 3383504 - DNA, 25 bp, Homo sapien
tttaggacaggtccttcaatgatga

SEQ ID NO: 3383505 - DNA, 25 bp, Homo sapien
ttaggacaggtccttcaatgatgac

SEQ ID NO: 3383506 - DNA, 25 bp, Homo sapien
ggcatttaggacaggtccttcaatg

SEQ ID NO: 3383507 - DNA, 25 bp, Homo sapien
cttttcggaaggttcatcgcggccg

SEQ ID NO: 3383508 - DNA, 25 bp, Homo sapien
aaattggaggaacccagtcgcgctc

SEQ ID NO: 3383509 - DNA, 25 bp, Homo sapien
tgtgatttaaagagacggacgcgct

SEQ ID NO: 3383510 - DNA, 25 bp, Homo sapien
gacgcgctagtatttggaaagccaa

SEQ ID NO: 3383511 - DNA, 25 bp, Homo sapien
gaaggtgtacgcagactggcactcc

SEQ ID NO: 3383512 - DNA, 25 bp, Homo sapien
taatagatttattgccttagagact

SEQ ID NO: 3383513 - DNA, 25 bp, Homo sapien
gggactctgatgtgacgtgtagatt

SEQ ID NO: 3383514 - DNA, 25 bp, Homo sapien
cactgcagccctgggtaactcgcag

SEQ ID NO: 3383515 - DNA, 25 bp, Homo sapien
cccactgcaactaagaaatgagatg

SEQ ID NO: 3383516 - DNA, 25 bp, Homo sapien
aatgagatgatttgaggactattac

SEQ ID NO: 3383517 - DNA, 25 bp, Homo sapien
tcatagtggattagaatagcattac

SEQ ID NO: 3383518 - DNA, 25 bp, Homo sapien
cagtactgttctcggtaacattcag

SEQ ID NO: 3383519 - DNA, 25 bp, Homo sapien
gtcaacagaatatctctcacagtga

SEQ ID NO: 3383520 - DNA, 25 bp, Homo sapien
caataatcaagccattaatgtcaac

SEQ ID NO: 3383521 - DNA, 25 bp, Homo sapien
ctctcacagtgatatactaagaagg

SEQ ID NO: 3383522 - DNA, 25 bp, Homo sapien
taatcaagccattaatgtcaacaga

SEQ ID NO: 3383523 - DNA, 25 bp, Homo sapien
ggcagtcttctatagtcacagtcat

SEQ ID NO: 3383524 - DNA, 25 bp, Homo sapien
taagatggattgtctactgcacaga

SEQ ID NO: 3383525 - DNA, 25 bp, Homo sapien
gagtatattgtacacagtcctggta

SEQ ID NO: 3383526 - DNA, 25 bp, Homo sapien
taacacctggcttactgagactaac

SEQ ID NO: 3383527 - DNA, 25 bp, Homo sapien
tcttttaatctcgctgttattggtt

SEQ ID NO: 3383528 - DNA, 25 bp, Homo sapien
actcttttaatctcgctgttattgg

SEQ ID NO: 3383529 - DNA, 25 bp, Homo sapien
ttaatctcgctgttattggtttgtt

SEQ ID NO: 3383530 - DNA, 25 bp, Homo sapien
ttactcttttaatctcgctgttatt

SEQ ID NO: 3383531 - DNA, 25 bp, Homo sapien
agtatactttgagtactgagcagga

SEQ ID NO: 3383532 - DNA, 25 bp, Homo sapien
ggtggaatgctaggaagattgattt

SEQ ID NO: 3383533 - DNA, 25 bp, Homo sapien
gctccactgagcctaatcttcactt

SEQ ID NO: 3383534 - DNA, 25 bp, Homo sapien
ctttttccttaagccatgttgtctg

SEQ ID NO: 3383535 - DNA, 25 bp, Homo sapien
ggtaatgcttattttgtgcccagtg

SEQ ID NO: 3383536 - DNA, 25 bp, Homo sapien
tgtttaagcctagattgctgagccc

SEQ ID NO: 3383537 - DNA, 25 bp, Homo sapien
agctgatggcctagtctggctctaa

SEQ ID NO: 3383538 - DNA, 25 bp, Homo sapien
tacagcctttctgaatgaagaccac

SEQ ID NO: 3383539 - DNA, 25 bp, Homo sapien
gggccgcaacggtgacgactgtggc

SEQ ID NO: 3383540 - DNA, 25 bp, Homo sapien
ctgcgttctgtagtggcgctgcttg

SEQ ID NO: 3383541 - DNA, 25 bp, Homo sapien
ggcccttggcggattgtaagctgct

SEQ ID NO: 3383542 - DNA, 25 bp, Homo sapien
gctctgcgttctgtagtggcgctgc

SEQ ID NO: 3383543 - DNA, 25 bp, Homo sapien
tgcttgggcccttggcggattgtaa

SEQ ID NO: 3383544 - DNA, 25 bp, Homo sapien
ttttgcggctgggaagagcggcgag

SEQ ID NO: 3383545 - DNA, 25 bp, Homo sapien
ttacaatccgccaagggcccaagca

SEQ ID NO: 3383546 - DNA, 25 bp, Homo sapien
ccgctcttcccagccgcaaaaccag

SEQ ID NO: 3383547 - DNA, 25 bp, Homo sapien
agcagcttacaatccgccaagggcc

SEQ ID NO: 3383548 - DNA, 25 bp, Homo sapien
gccacagtcgtcaccgttgcggccc

SEQ ID NO: 3383549 - DNA, 25 bp, Homo sapien
agcagcgccactacagaacgcagag

SEQ ID NO: 3383550 - DNA, 25 bp, Homo sapien
caagcagcgccactacagaacgcag

SEQ ID NO: 3383551 - DNA, 25 bp, Homo sapien
atgagtgctgccagagagtctcacc

SEQ ID NO: 3383552 - DNA, 25 bp, Homo sapien
ggtgagactctctggcagcactcat

SEQ ID NO: 3383553 - DNA, 25 bp, Homo sapien
tgagtgctgccagagagtctcaccc

SEQ ID NO: 3383554 - DNA, 25 bp, Homo sapien
gtgaagcgttcagcctccccagacg

SEQ ID NO: 3383555 - DNA, 25 bp, Homo sapien
gtgctgccagagagtctcacccgca

SEQ ID NO: 3383556 - DNA, 25 bp, Homo sapien
tgccagagagtctcacccgcatggg

SEQ ID NO: 3383557 - DNA, 25 bp, Homo sapien
gggtgaagcgttcagcctccccaga

SEQ ID NO: 3383558 - DNA, 25 bp, Homo sapien
acccgcatggggtgaagcgttcagc

SEQ ID NO: 3383559 - DNA, 25 bp, Homo sapien
tgcgggtgagactctctggcagcac

SEQ ID NO: 3383560 - DNA, 25 bp, Homo sapien
gggtgagactctctggcagcactca

SEQ ID NO: 3383561 - DNA, 25 bp, Homo sapien
gctgaacgcttcaccccatgcgggt

SEQ ID NO: 3383562 - DNA, 25 bp, Homo sapien
aacgcttcaccccatgcgggtgaga

SEQ ID NO: 3383563 - DNA, 25 bp, Homo sapien
accccatgcgggtgagactctctgg

SEQ ID NO: 3383564 - DNA, 25 bp, Homo sapien
ggaggctgaacgcttcaccccatgc

SEQ ID NO: 3383565 - DNA, 25 bp, Homo sapien
tagctgcactagtaagggtaaaccg

SEQ ID NO: 3383566 - DNA, 25 bp, Homo sapien
taaaccgagaacagtattgagccga

SEQ ID NO: 3383567 - DNA, 25 bp, Homo sapien
tagtcaagggatttcgtacgtgcgt

SEQ ID NO: 3383568 - DNA, 25 bp, Homo sapien
tatagagacggcaagactctccctg

SEQ ID NO: 3383569 - DNA, 25 bp, Homo sapien
tctcgggcctttgtactcagtatag

SEQ ID NO: 3383570 - DNA, 25 bp, Homo sapien
taagacgttgagacctagaagccca

SEQ ID NO: 3383571 - DNA, 25 bp, Homo sapien
tcggtttacccttactagtgcagct

SEQ ID NO: 3383572 - DNA, 25 bp, Homo sapien
ggaaaaatctgtacaaacgtgcacg

SEQ ID NO: 3383573 - DNA, 25 bp, Homo sapien
tctatactgagtacaaaggcccgag

SEQ ID NO: 3383574 - DNA, 25 bp, Homo sapien
catcaaaatgggcttctaggtctca

SEQ ID NO: 3383575 - DNA, 25 bp, Homo sapien
ccaaaacagggagagtcttgccgtc

SEQ ID NO: 3383576 - DNA, 25 bp, Homo sapien
catgacactgggctaggagctagga

SEQ ID NO: 3383577 - DNA, 25 bp, Homo sapien
acacttttgagtaacctggctgcca

SEQ ID NO: 3383578 - DNA, 25 bp, Homo sapien
gataatgttaagacctacccctctg

SEQ ID NO: 3383579 - DNA, 25 bp, Homo sapien
caatggataagtgtcttggcaacgt

SEQ ID NO: 3383580 - DNA, 25 bp, Homo sapien
gctaggatatcagacacctgtttgg

SEQ ID NO: 3383581 - DNA, 25 bp, Homo sapien
aactactagacccaagcgatctgcc

SEQ ID NO: 3383582 - DNA, 25 bp, Homo sapien
gagagcgcggagaggtcatctttaa

SEQ ID NO: 3383583 - DNA, 25 bp, Homo sapien
tggcagccaggttactcaaaagtgt

SEQ ID NO: 3383584 - DNA, 25 bp, Homo sapien
gatccttaatattccggtcctcgcc

SEQ ID NO: 3383585 - DNA, 25 bp, Homo sapien
tccagtagcagaaataacagagagc

SEQ ID NO: 3383586 - DNA, 25 bp, Homo sapien
caaacaggtgtctgatatcctagca

SEQ ID NO: 3383587 - DNA, 25 bp, Homo sapien
gaagagcgttgaaatgcactatcga

SEQ ID NO: 3383588 - DNA, 25 bp, Homo sapien
cagggagcactgatcgatcgtgcca

SEQ ID NO: 3383589 - DNA, 25 bp, Homo sapien
aaaaactagcaggccgggcgcggtg

SEQ ID NO: 3383590 - DNA, 25 bp, Homo sapien
caccgcgcccggcctgctagttttt

SEQ ID NO: 3383591 - DNA, 25 bp, Homo sapien
gctcaaagcttccattgagtctaca

SEQ ID NO: 3383592 - DNA, 25 bp, Homo sapien
ctcaaagcttccattgagtctacat

SEQ ID NO: 3383593 - DNA, 25 bp, Homo sapien
agctcaaagcttccattgagtctac

SEQ ID NO: 3383594 - DNA, 25 bp, Homo sapien
atgtagactcaatggaagctttgag

SEQ ID NO: 3383595 - DNA, 25 bp, Homo sapien
gtagactcaatggaagctttgagct

SEQ ID NO: 3383596 - DNA, 25 bp, Homo sapien
tgtagactcaatggaagctttgagc

SEQ ID NO: 3383597 - DNA, 25 bp, Homo sapien
tggtcagaggatcaaaggaagtcac

SEQ ID NO: 3383598 - DNA, 25 bp, Homo sapien
aatgtcagatcctggcttacagagc

SEQ ID NO: 3383599 - DNA, 25 bp, Homo sapien
tgattagtctagaatacgactgcct

SEQ ID NO: 3383600 - DNA, 25 bp, Homo sapien
gatgatcctggctcttactgtgaaa

SEQ ID NO: 3383601 - DNA, 25 bp, Homo sapien
gagagcatataagcccttccactaa

SEQ ID NO: 3383602 - DNA, 25 bp, Homo sapien
aaatcagccttccatatacttggga

SEQ ID NO: 3383603 - DNA, 25 bp, Homo sapien
gctctgtaagccaggatctgacatt

SEQ ID NO: 3383604 - DNA, 25 bp, Homo sapien
tatttcacagtaagagccaggatca

SEQ ID NO: 3383605 - DNA, 25 bp, Homo sapien
caaagaccttaaagcagcactccag

SEQ ID NO: 3383606 - DNA, 25 bp, Homo sapien
catcccaagtatatggaaggctgat

SEQ ID NO: 3383607 - DNA, 25 bp, Homo sapien
caagaaatgtactctcactgggaga

SEQ ID NO: 3383608 - DNA, 25 bp, Homo sapien
catactgtccatgatcaaatgagac

SEQ ID NO: 3383609 - DNA, 25 bp, Homo sapien
ccatcggtgttcagtgaaagctaaa

SEQ ID NO: 3383610 - DNA, 25 bp, Homo sapien
gaattcccatcggtgttcagtgaaa

SEQ ID NO: 3383611 - DNA, 25 bp, Homo sapien
aaattgtgaattcccatcggtgttc

SEQ ID NO: 3383612 - DNA, 25 bp, Homo sapien
ttcccatcggtgttcagtgaaagct

SEQ ID NO: 3383613 - DNA, 25 bp, Homo sapien
gaaaaattgtgaattcccatcggtg

SEQ ID NO: 3383614 - DNA, 25 bp, Homo sapien
ggtgttcagtgaaagctaaaagtag

SEQ ID NO: 3383615 - DNA, 25 bp, Homo sapien
ttagctttcactgaacaccgatggg

SEQ ID NO: 3383616 - DNA, 25 bp, Homo sapien
caccgatgggaattcacaatttttc

SEQ ID NO: 3383617 - DNA, 25 bp, Homo sapien
tacttttagctttcactgaacaccg

SEQ ID NO: 3383618 - DNA, 25 bp, Homo sapien
gaacaccgatgggaattcacaattt

SEQ ID NO: 3383619 - DNA, 25 bp, Homo sapien
cactgaacaccgatgggaattcaca

SEQ ID NO: 3383620 - DNA, 25 bp, Homo sapien
gctttcactgaacaccgatgggaat

SEQ ID NO: 3383621 - DNA, 25 bp, Homo sapien
ctaggtgacgctgatagaggcaaac

SEQ ID NO: 3383622 - DNA, 25 bp, Homo sapien
taacttcaactaacaactgtggctg

SEQ ID NO: 3383623 - DNA, 25 bp, Homo sapien
aggaccctaccctgcgaggcagtgg

SEQ ID NO: 3383624 - DNA, 25 bp, Homo sapien
gctgtagccctgcagtctgttttaa

SEQ ID NO: 3383625 - DNA, 25 bp, Homo sapien
gagtactaggtgctctaggacccta

SEQ ID NO: 3383626 - DNA, 25 bp, Homo sapien
gctctggctgtaggagaactaaagg

SEQ ID NO: 3383627 - DNA, 25 bp, Homo sapien
gatggcagccacagttgttagttga

SEQ ID NO: 3383628 - DNA, 25 bp, Homo sapien
tcgcagggtagggtcctagagcacc

SEQ ID NO: 3383629 - DNA, 25 bp, Homo sapien
aaaagtttgcctctatcagcgtcac

SEQ ID NO: 3383630 - DNA, 25 bp, Homo sapien
taaaacagactgcagggctacagcc

SEQ ID NO: 3383631 - DNA, 25 bp, Homo sapien
tagtactctgaacttagatggcagc

SEQ ID NO: 3383632 - DNA, 25 bp, Homo sapien
tcctttagttctcctacagccagag

SEQ ID NO: 3383633 - DNA, 25 bp, Homo sapien
ggatctagcaattgggaggcagcag

SEQ ID NO: 3383634 - DNA, 25 bp, Homo sapien
tgggaggcagcagacttgggtaatg

SEQ ID NO: 3383635 - DNA, 25 bp, Homo sapien
gggaggcagcagacttgggtaatga

SEQ ID NO: 3383636 - DNA, 25 bp, Homo sapien
aggcagcagacttgggtaatgaaga

SEQ ID NO: 3383637 - DNA, 25 bp, Homo sapien
ggcagcagacttgggtaatgaagag

SEQ ID NO: 3383638 - DNA, 25 bp, Homo sapien
gcagcagacttgggtaatgaagaga

SEQ ID NO: 3383639 - DNA, 25 bp, Homo sapien
ctgctgcctcccaattgctagatcc

SEQ ID NO: 3383640 - DNA, 25 bp, Homo sapien
ctcttcattacccaagtctgctgcc

SEQ ID NO: 3383641 - DNA, 25 bp, Homo sapien
tctcttcattacccaagtctgctgc

SEQ ID NO: 3383642 - DNA, 25 bp, Homo sapien
tcttcattacccaagtctgctgcct

SEQ ID NO: 3383643 - DNA, 25 bp, Homo sapien
tgagccacttctaggattctctgtc

SEQ ID NO: 3383644 - DNA, 25 bp, Homo sapien
gggaaatacatgtggcctaaccaag

SEQ ID NO: 3383645 - DNA, 25 bp, Homo sapien
tccagcccttgaagtagtaaccaga

SEQ ID NO: 3383646 - DNA, 25 bp, Homo sapien
gatttgccatatgttggcccagtgg

SEQ ID NO: 3383647 - DNA, 25 bp, Homo sapien
aatttggttcaaggaggctgtatag

SEQ ID NO: 3383648 - DNA, 25 bp, Homo sapien
gcatcagatggtgtgcatttttacc

SEQ ID NO: 3383649 - DNA, 25 bp, Homo sapien
aaaccactgggccaacatatggcaa

SEQ ID NO: 3383650 - DNA, 25 bp, Homo sapien
ggtaaaaatgcacaccatctgatgc

SEQ ID NO: 3383651 - DNA, 25 bp, Homo sapien
gacagagaatcctagaagtggctca

SEQ ID NO: 3383652 - DNA, 25 bp, Homo sapien
aaattttatgtgcttggttaggcca

SEQ ID NO: 3383653 - DNA, 25 bp, Homo sapien
tctggttactacttcaagggctgga

SEQ ID NO: 3383654 - DNA, 25 bp, Homo sapien
tacagtcttcaaactatacggacag

SEQ ID NO: 3383655 - DNA, 25 bp, Homo sapien
cactttcagagattatttctatagt

SEQ ID NO: 3383656 - DNA, 25 bp, Homo sapien
acactttcagagattatttctatag

SEQ ID NO: 3383657 - DNA, 25 bp, Homo sapien
gactacactttcagagattatttct

SEQ ID NO: 3383658 - DNA, 25 bp, Homo sapien
tacactttcagagattatttctata

SEQ ID NO: 3383659 - DNA, 25 bp, Homo sapien
agactacactttcagagattatttc

SEQ ID NO: 3383660 - DNA, 25 bp, Homo sapien
actacactttcagagattatttcta

SEQ ID NO: 3383661 - DNA, 25 bp, Homo sapien
tagaaataatctctgaaagtgtagt

SEQ ID NO: 3383662 - DNA, 25 bp, Homo sapien
ctatagaaataatctctgaaagtgt

SEQ ID NO: 3383663 - DNA, 25 bp, Homo sapien
tatagaaataatctctgaaagtgta

SEQ ID NO: 3383664 - DNA, 25 bp, Homo sapien
gaaataatctctgaaagtgtagtct

SEQ ID NO: 3383665 - DNA, 25 bp, Homo sapien
agaaataatctctgaaagtgtagtc

SEQ ID NO: 3383666 - DNA, 25 bp, Homo sapien
actatagaaataatctctgaaagtg

SEQ ID NO: 3383667 - DNA, 25 bp, Homo sapien
tgtcagtttggttaacgttaataga

SEQ ID NO: 3383668 - DNA, 25 bp, Homo sapien
ctgtcagtttggttaacgttaatag

SEQ ID NO: 3383669 - DNA, 25 bp, Homo sapien
taacgttaatagaaggtacagttga

SEQ ID NO: 3383670 - DNA, 25 bp, Homo sapien
tcaactgtaccttctattaacgtta

SEQ ID NO: 3383671 - DNA, 25 bp, Homo sapien
ctattaacgttaaccaaactgacag

SEQ ID NO: 3383672 - DNA, 25 bp, Homo sapien
tctattaacgttaaccaaactgaca

SEQ ID NO: 3383673 - DNA, 25 bp, Homo sapien
ctgtcagtttggttaacgttaatag

SEQ ID NO: 3383674 - DNA, 25 bp, Homo sapien
taacgttaatagaaggtacagttga

SEQ ID NO: 3383675 - DNA, 25 bp, Homo sapien
gaaatgcctgtcagtttggttaacg

SEQ ID NO: 3383676 - DNA, 25 bp, Homo sapien
acagttgacccttgagcaatgtggg

SEQ ID NO: 3383677 - DNA, 25 bp, Homo sapien
tgttcaagatactttgaaatgcctg

SEQ ID NO: 3383678 - DNA, 25 bp, Homo sapien
tgctggttctgcaggcagtcagaag

SEQ ID NO: 3383679 - DNA, 25 bp, Homo sapien
tcaactgtaccttctattaacgtta

SEQ ID NO: 3383680 - DNA, 25 bp, Homo sapien
aaacttctgactgcctgcagaacca

SEQ ID NO: 3383681 - DNA, 25 bp, Homo sapien
ctattaacgttaaccaaactgacag

SEQ ID NO: 3383682 - DNA, 25 bp, Homo sapien
ccccacattgctcaagggtcaactg

SEQ ID NO: 3383683 - DNA, 25 bp, Homo sapien
taacgttaaccaaactgacaggcat

SEQ ID NO: 3383684 - DNA, 25 bp, Homo sapien
gacaggcatttcaaagtatcttgaa

SEQ ID NO: 3383685 - DNA, 25 bp, Homo sapien
gcaactcatttaactggcctttagg

SEQ ID NO: 3383686 - DNA, 25 bp, Homo sapien
tagtgattacgtttgcctgtctccc

SEQ ID NO: 3383687 - DNA, 25 bp, Homo sapien
tgaggccaagattgtagctttgatc

SEQ ID NO: 3383688 - DNA, 25 bp, Homo sapien
gaggtattccattttgtggccacaa

SEQ ID NO: 3383689 - DNA, 25 bp, Homo sapien
tagagtcagggcttcaccgtttgaa

SEQ ID NO: 3383690 - DNA, 25 bp, Homo sapien
aagtatatttgtaatcctagccggc

SEQ ID NO: 3383691 - DNA, 25 bp, Homo sapien
gatcaaagctacaatcttggcctca

SEQ ID NO: 3383692 - DNA, 25 bp, Homo sapien
aaatattcatgatagccggctagga

SEQ ID NO: 3383693 - DNA, 25 bp, Homo sapien
ttcaaacggtgaagccctgactcta

SEQ ID NO: 3383694 - DNA, 25 bp, Homo sapien
tgtggccacaaaatggaatacctct

SEQ ID NO: 3383695 - DNA, 25 bp, Homo sapien
gggagacaggcaaacgtaatcacta

SEQ ID NO: 3383696 - DNA, 25 bp, Homo sapien
cctaaaggccagttaaatgagttgc

SEQ ID NO: 3383697 - DNA, 25 bp, Homo sapien
ggagatcacaaatcaacatctcact

SEQ ID NO: 3383698 - DNA, 25 bp, Homo sapien
gatcacaaatcaacatctcacttcc

SEQ ID NO: 3383699 - DNA, 25 bp, Homo sapien
aaatcaacatctcacttccgaaccg

SEQ ID NO: 3383700 - DNA, 25 bp, Homo sapien
taggagatcacaaatcaacatctca

SEQ ID NO: 3383701 - DNA, 25 bp, Homo sapien
cacaaatcaacatctcacttccgaa

SEQ ID NO: 3383702 - DNA, 25 bp, Homo sapien
ttataggagatcacaaatcaacatc

SEQ ID NO: 3383703 - DNA, 25 bp, Homo sapien
tgagatgttgatttgtgatctccta

SEQ ID NO: 3383704 - DNA, 25 bp, Homo sapien
cggttcggaagtgagatgttgattt

SEQ ID NO: 3383705 - DNA, 25 bp, Homo sapien
ggaagtgagatgttgatttgtgatc

SEQ ID NO: 3383706 - DNA, 25 bp, Homo sapien
tcggaagtgagatgttgatttgtga

SEQ ID NO: 3383707 - DNA, 25 bp, Homo sapien
agtgagatgttgatttgtgatctcc

SEQ ID NO: 3383708 - DNA, 25 bp, Homo sapien
gatgttgatttgtgatctcctataa

SEQ ID NO: 3383709 - DNA, 25 bp, Homo sapien
ttaaaatggaagtgctaaattcaga

SEQ ID NO: 3383710 - DNA, 25 bp, Homo sapien
aatggaagtgctaaattcagaatat

SEQ ID NO: 3383711 - DNA, 25 bp, Homo sapien
ttcaggatattctactttggcatgt

SEQ ID NO: 3383712 - DNA, 25 bp, Homo sapien
aaatattataattagagctgggtgc

SEQ ID NO: 3383713 - DNA, 25 bp, Homo sapien
caggatattctactttggcatgtaa

SEQ ID NO: 3383714 - DNA, 25 bp, Homo sapien
gatattctactttggcatgtaattg

SEQ ID NO: 3383715 - DNA, 25 bp, Homo sapien
gcacccagctctaattataatattt

SEQ ID NO: 3383716 - DNA, 25 bp, Homo sapien
caattacatgccaaagtagaatatc

SEQ ID NO: 3383717 - DNA, 25 bp, Homo sapien
tattctgaatttagcacttccattt

SEQ ID NO: 3383718 - DNA, 25 bp, Homo sapien
tctgaatttagcacttccattttaa

SEQ ID NO: 3383719 - DNA, 25 bp, Homo sapien
acatgccaaagtagaatatcctgaa

SEQ ID NO: 3383720 - DNA, 25 bp, Homo sapien
ttacatgccaaagtagaatatcctg

SEQ ID NO: 3383721 - DNA, 25 bp, Homo sapien
gagcctgcagttcaaaaggtggcac

SEQ ID NO: 3383722 - DNA, 25 bp, Homo sapien
gttgcagggcctaaagaaataagct

SEQ ID NO: 3383723 - DNA, 25 bp, Homo sapien
caatggcttgtatggccacctgagc

SEQ ID NO: 3383724 - DNA, 25 bp, Homo sapien
taagaaggcctttactactggtgaa

SEQ ID NO: 3383725 - DNA, 25 bp, Homo sapien
ggacatctgttgtgaactcttagga

SEQ ID NO: 3383726 - DNA, 25 bp, Homo sapien
gagtcactgtggtacccaatccagg

SEQ ID NO: 3383727 - DNA, 25 bp, Homo sapien
cctggattgggtaccacagtgactc

SEQ ID NO: 3383728 - DNA, 25 bp, Homo sapien
catgtgccaccttttgaactgcagg

SEQ ID NO: 3383729 - DNA, 25 bp, Homo sapien
ccaatgatctgataggatgcggagc

SEQ ID NO: 3383730 - DNA, 25 bp, Homo sapien
catacaagccattgggagcagctgt

SEQ ID NO: 3383731 - DNA, 25 bp, Homo sapien
gatcatgtgccagctgggagaaaaa

SEQ ID NO: 3383732 - DNA, 25 bp, Homo sapien
tcctaagagttcacaacagatgtcc

SEQ ID NO: 3383733 - DNA, 25 bp, Homo sapien
agatatcggcgacattgtggacttg

SEQ ID NO: 3383734 - DNA, 25 bp, Homo sapien
atatcggcgacattgtggacttggc

SEQ ID NO: 3383735 - DNA, 25 bp, Homo sapien
gaagatatcggcgacattgtggact

SEQ ID NO: 3383736 - DNA, 25 bp, Homo sapien
tatcaggaagatatcggcgacattg

SEQ ID NO: 3383737 - DNA, 25 bp, Homo sapien
tcaggaagatatcggcgacattgtg

SEQ ID NO: 3383738 - DNA, 25 bp, Homo sapien
tatggacagtaaattatcaggaaga

SEQ ID NO: 3383739 - DNA, 25 bp, Homo sapien
caagtccacaatgtcgccgatatct

SEQ ID NO: 3383740 - DNA, 25 bp, Homo sapien
ttcctgataatttactgtccatact

SEQ ID NO: 3383741 - DNA, 25 bp, Homo sapien
gccaagtccacaatgtcgccgatat

SEQ ID NO: 3383742 - DNA, 25 bp, Homo sapien
caatgtcgccgatatcttcctgata

SEQ ID NO: 3383743 - DNA, 25 bp, Homo sapien
tcttcctgataatttactgtccata

SEQ ID NO: 3383744 - DNA, 25 bp, Homo sapien
cacaatgtcgccgatatcttcctga

SEQ ID NO: 3383745 - DNA, 25 bp, Homo sapien
caagcgatctttccgccttccaaag

SEQ ID NO: 3383746 - DNA, 25 bp, Homo sapien
taataggcgtgaacaacaacatgct

SEQ ID NO: 3383747 - DNA, 25 bp, Homo sapien
cacatttttaataggcgtgaacaac

SEQ ID NO: 3383748 - DNA, 25 bp, Homo sapien
ccatgtccggccagggcacattttt

SEQ ID NO: 3383749 - DNA, 25 bp, Homo sapien
gcgtgaacaacaacatgctcacaag

SEQ ID NO: 3383750 - DNA, 25 bp, Homo sapien
cagggcacatttttaataggcgtga

SEQ ID NO: 3383751 - DNA, 25 bp, Homo sapien
tcacgcctattaaaaatgtgccctg

SEQ ID NO: 3383752 - DNA, 25 bp, Homo sapien
tgttcacgcctattaaaaatgtgcc

SEQ ID NO: 3383753 - DNA, 25 bp, Homo sapien
ctttggaaggcggaaagatcgcttg

SEQ ID NO: 3383754 - DNA, 25 bp, Homo sapien
gcatgttgttgttcacgcctattaa

SEQ ID NO: 3383755 - DNA, 25 bp, Homo sapien
aaaaatgtgccctggccggacatgg

SEQ ID NO: 3383756 - DNA, 25 bp, Homo sapien
ttgtgagcatgttgttgttcacgcc

SEQ ID NO: 3383757 - DNA, 25 bp, Homo sapien
tagagtgtttctaagaccgacagaa

SEQ ID NO: 3383758 - DNA, 25 bp, Homo sapien
tctaatggctacaaagtagagtgtt

SEQ ID NO: 3383759 - DNA, 25 bp, Homo sapien
tctcagattttgtatgggctaatgt

SEQ ID NO: 3383760 - DNA, 25 bp, Homo sapien
aaattctactcaagtcttaaagctg

SEQ ID NO: 3383761 - DNA, 25 bp, Homo sapien
cgacagaacttacggtctttctcag

SEQ ID NO: 3383762 - DNA, 25 bp, Homo sapien
taaagctgttgttctaatggctaca

SEQ ID NO: 3383763 - DNA, 25 bp, Homo sapien
tgagaaagaccgtaagttctgtcgg

SEQ ID NO: 3383764 - DNA, 25 bp, Homo sapien
aacattagcccatacaaaatctgag

SEQ ID NO: 3383765 - DNA, 25 bp, Homo sapien
aacactctactttgtagccattaga

SEQ ID NO: 3383766 - DNA, 25 bp, Homo sapien
tgtagccattagaacaacagcttta

SEQ ID NO: 3383767 - DNA, 25 bp, Homo sapien
tctgtcggtcttagaaacactctac

SEQ ID NO: 3383768 - DNA, 25 bp, Homo sapien
cagctttaagacttgagtagaattt

SEQ ID NO: 3383769 - DNA, 25 bp, Homo sapien
acgatgatgattcacctgatcctga

SEQ ID NO: 3383770 - DNA, 25 bp, Homo sapien
tgacgatgatgattcacctgatcct

SEQ ID NO: 3383771 - DNA, 25 bp, Homo sapien
gacgatgatgattcacctgatcctg

SEQ ID NO: 3383772 - DNA, 25 bp, Homo sapien
tcaggatcaggtgaatcatcatcgt

SEQ ID NO: 3383773 - DNA, 25 bp, Homo sapien
aggatcaggtgaatcatcatcgtca

SEQ ID NO: 3383774 - DNA, 25 bp, Homo sapien
caggatcaggtgaatcatcatcgtc

SEQ ID NO: 3383775 - DNA, 25 bp, Homo sapien
ctgaaagcgattcagagtcagagaa

SEQ ID NO: 3383776 - DNA, 25 bp, Homo sapien
tctgaaagcgattcagagtcagaga

SEQ ID NO: 3383777 - DNA, 25 bp, Homo sapien
tctctgactctgaatcgctttcaga

SEQ ID NO: 3383778 - DNA, 25 bp, Homo sapien
ttctctgactctgaatcgctttcag

SEQ ID NO: 3383779 - DNA, 25 bp, Homo sapien
gatgtttgttaaatccagtggttca

SEQ ID NO: 3383780 - DNA, 25 bp, Homo sapien
caccctgatgaagtggaggatccca

SEQ ID NO: 3383781 - DNA, 25 bp, Homo sapien
tctgaaagcgattcagagtcagaga

SEQ ID NO: 3383782 - DNA, 25 bp, Homo sapien
cgattcagagtcagagaaagaagaa

SEQ ID NO: 3383783 - DNA, 25 bp, Homo sapien
gaatctgctgaagaactccaagctg

SEQ ID NO: 3383784 - DNA, 25 bp, Homo sapien
gaaagcgattcagagtcagagaaag

SEQ ID NO: 3383785 - DNA, 25 bp, Homo sapien
gaaccactggatttaacaaacatca

SEQ ID NO: 3383786 - DNA, 25 bp, Homo sapien
tcagcagcttggagttcttcagcag

SEQ ID NO: 3383787 - DNA, 25 bp, Homo sapien
cacttcatcagggtgctcagcagct

SEQ ID NO: 3383788 - DNA, 25 bp, Homo sapien
tctctgactctgaatcgctttcaga

SEQ ID NO: 3383789 - DNA, 25 bp, Homo sapien
tttgggatcctccacttcatcaggg

SEQ ID NO: 3383790 - DNA, 25 bp, Homo sapien
tcttctttctctgactctgaatcgc

SEQ ID NO: 3383791 - DNA, 25 bp, Homo sapien
tcccaaacgcttagtctttgtatta

SEQ ID NO: 3383792 - DNA, 25 bp, Homo sapien
tgggcatgactataaccatttttgt

SEQ ID NO: 3383793 - DNA, 25 bp, Homo sapien
tgggttacacttttatgggcatgac

SEQ ID NO: 3383794 - DNA, 25 bp, Homo sapien
tttgctttcaaatgccatgggttac

SEQ ID NO: 3383795 - DNA, 25 bp, Homo sapien
caaatgccatgggttacacttttat

SEQ ID NO: 3383796 - DNA, 25 bp, Homo sapien
ttttgtaaagagtaagagttgtata

SEQ ID NO: 3383797 - DNA, 25 bp, Homo sapien
taatacaaagactaagcgtttggga

SEQ ID NO: 3383798 - DNA, 25 bp, Homo sapien
tatacaactcttactctttacaaaa

SEQ ID NO: 3383799 - DNA, 25 bp, Homo sapien
taacccatggcatttgaaagcaaac

SEQ ID NO: 3383800 - DNA, 25 bp, Homo sapien
cataaaagtgtaacccatggcattt

SEQ ID NO: 3383801 - DNA, 25 bp, Homo sapien
acaaaaatggttatagtcatgccca

SEQ ID NO: 3383802 - DNA, 25 bp, Homo sapien
tagtcatgcccataaaagtgtaacc

SEQ ID NO: 3383803 - DNA, 25 bp, Homo sapien
tgatcccaagtagtctttttataat

SEQ ID NO: 3383804 - DNA, 25 bp, Homo sapien
tcaaccctctaattcaccttatggg

SEQ ID NO: 3383805 - DNA, 25 bp, Homo sapien
ggaatattatgatcccaagtagtct

SEQ ID NO: 3383806 - DNA, 25 bp, Homo sapien
tacttttcacacttgttaagatgga

SEQ ID NO: 3383807 - DNA, 25 bp, Homo sapien
tattatgatcccaagtagtcttttt

SEQ ID NO: 3383808 - DNA, 25 bp, Homo sapien
tcttttggaccaaagcaacatgaga

SEQ ID NO: 3383809 - DNA, 25 bp, Homo sapien
ccatcttaacaagtgtgaaaagtac

SEQ ID NO: 3383810 - DNA, 25 bp, Homo sapien
tctcatgttgctttggtccaaaaga

SEQ ID NO: 3383811 - DNA, 25 bp, Homo sapien
agactacttgggatcataatattcc

SEQ ID NO: 3383812 - DNA, 25 bp, Homo sapien
ttataaaaagactacttgggatcat

SEQ ID NO: 3383813 - DNA, 25 bp, Homo sapien
ccccataaggtgaattagagggttg

SEQ ID NO: 3383814 - DNA, 25 bp, Homo sapien
ccataaggtgaattagagggttgat

SEQ ID NO: 3383815 - DNA, 25 bp, Homo sapien
gttcaaaggctttagtcacacctgt

SEQ ID NO: 3383816 - DNA, 25 bp, Homo sapien
catctgactgctattaggtggttga

SEQ ID NO: 3383817 - DNA, 25 bp, Homo sapien
tgagctgagctattatacatctaca

SEQ ID NO: 3383818 - DNA, 25 bp, Homo sapien
tatgagctagtaaatggatctttgg

SEQ ID NO: 3383819 - DNA, 25 bp, Homo sapien
tgttggtgtgagattagaatcatct

SEQ ID NO: 3383820 - DNA, 25 bp, Homo sapien
cattatctacaaatgaggaacaggc

SEQ ID NO: 3383821 - DNA, 25 bp, Homo sapien
tcaaccacctaatagcagtcagatg

SEQ ID NO: 3383822 - DNA, 25 bp, Homo sapien
agatgattctaatctcacaccaaca

SEQ ID NO: 3383823 - DNA, 25 bp, Homo sapien
tcaataaaatagcactgggataaaa

SEQ ID NO: 3383824 - DNA, 25 bp, Homo sapien
ccaaagatccatttactagctcata

SEQ ID NO: 3383825 - DNA, 25 bp, Homo sapien
tataatagctcagctcacaaacagg

SEQ ID NO: 3383826 - DNA, 25 bp, Homo sapien
cacaaacaggtgtgactaaagcctt

SEQ ID NO: 3383827 - DNA, 25 bp, Homo sapien
caatagacggttaggtcatggatac

SEQ ID NO: 3383828 - DNA, 25 bp, Homo sapien
tagtatggataccaagacagcatga

SEQ ID NO: 3383829 - DNA, 25 bp, Homo sapien
taagtagtcactgaagctaaccagg

SEQ ID NO: 3383830 - DNA, 25 bp, Homo sapien
gtaatggaaccaaagccctgtgtgt

SEQ ID NO: 3383831 - DNA, 25 bp, Homo sapien
gcttggatacatctagggctgggaa

SEQ ID NO: 3383832 - DNA, 25 bp, Homo sapien
ggtggaaacagactacgccctaaca

SEQ ID NO: 3383833 - DNA, 25 bp, Homo sapien
gaattgatagatcaggaagcctaga

SEQ ID NO: 3383834 - DNA, 25 bp, Homo sapien
gccctaacacagagcaggtataaag

SEQ ID NO: 3383835 - DNA, 25 bp, Homo sapien
caaagggagtcattcaggcctcaac

SEQ ID NO: 3383836 - DNA, 25 bp, Homo sapien
caatgctaagtactgctaacaggtc

SEQ ID NO: 3383837 - DNA, 25 bp, Homo sapien
tattgcctttcctctagtgggagaa

SEQ ID NO: 3383838 - DNA, 25 bp, Homo sapien
tactaagcacgtacatcctactggt

SEQ ID NO: 3383839 - DNA, 25 bp, Homo sapien
gaggaacatacaggaggtattgctt

SEQ ID NO: 3383840 - DNA, 25 bp, Homo sapien
catacaggaggtattgcttgggttt

SEQ ID NO: 3383841 - DNA, 25 bp, Homo sapien
atacaggaggtattgcttgggtttt

SEQ ID NO: 3383842 - DNA, 25 bp, Homo sapien
cagacagtcacctgccgtaggtaga

SEQ ID NO: 3383843 - DNA, 25 bp, Homo sapien
ttcagacagtcacctgccgtaggta

SEQ ID NO: 3383844 - DNA, 25 bp, Homo sapien
cagtcacctgccgtaggtagagtga

SEQ ID NO: 3383845 - DNA, 25 bp, Homo sapien
cctgccgtaggtagagtgatggtct

SEQ ID NO: 3383846 - DNA, 25 bp, Homo sapien
ttggctgtcactttcaggacgttct

SEQ ID NO: 3383847 - DNA, 25 bp, Homo sapien
ccatgtatgctctgaaatccatttt

SEQ ID NO: 3383848 - DNA, 25 bp, Homo sapien
tcaggacgttctgctgttacctgtg

SEQ ID NO: 3383849 - DNA, 25 bp, Homo sapien
gttccatgtatgctctgaaatccat

SEQ ID NO: 3383850 - DNA, 25 bp, Homo sapien
cagggcttggacatcccagcaaagt

SEQ ID NO: 3383851 - DNA, 25 bp, Homo sapien
ccggaggagcacaatagggtcagaa

SEQ ID NO: 3383852 - DNA, 25 bp, Homo sapien
gaatcatccctaggaggagctggaa

SEQ ID NO: 3383853 - DNA, 25 bp, Homo sapien
ccagaattcgggttcagaggcagaa

SEQ ID NO: 3383854 - DNA, 25 bp, Homo sapien
taccgactgcgggtgttcaccacag

SEQ ID NO: 3383855 - DNA, 25 bp, Homo sapien
ccatcatgtgtgtgcagacgtgcct

SEQ ID NO: 3383856 - DNA, 25 bp, Homo sapien
cggaggaaggagcagcttaccgact

SEQ ID NO: 3383857 - DNA, 25 bp, Homo sapien
tatgcacccactagtttagctcaga

SEQ ID NO: 3383858 - DNA, 25 bp, Homo sapien
cttcctcttcgactggtgtgcagct

SEQ ID NO: 3383859 - DNA, 25 bp, Homo sapien
cttggtgaccacttgttgcagcatc

SEQ ID NO: 3383860 - DNA, 25 bp, Homo sapien
attgtcttggtgaccacttgttgca

SEQ ID NO: 3383861 - DNA, 25 bp, Homo sapien
ttggtgaccacttgttgcagcatca

SEQ ID NO: 3383862 - DNA, 25 bp, Homo sapien
gtcttggtgaccacttgttgcagca

SEQ ID NO: 3383863 - DNA, 25 bp, Homo sapien
ggggtagagtggggtgaggaactgc

SEQ ID NO: 3383864 - DNA, 25 bp, Homo sapien
ggtagagtggggtgaggaactgcag

SEQ ID NO: 3383865 - DNA, 25 bp, Homo sapien
gtagagtggggtgaggaactgcagc

SEQ ID NO: 3383866 - DNA, 25 bp, Homo sapien
ctggggtagagtggggtgaggaact

SEQ ID NO: 3383867 - DNA, 25 bp, Homo sapien
caatactccgatttggggaacaggc

SEQ ID NO: 3383868 - DNA, 25 bp, Homo sapien
tggtccagggtcatacaacagaaaa

SEQ ID NO: 3383869 - DNA, 25 bp, Homo sapien
cagaaaaggacttgtgccaggttcg

SEQ ID NO: 3383870 - DNA, 25 bp, Homo sapien
caaaggcactggttagaagagactg

SEQ ID NO: 3383871 - DNA, 25 bp, Homo sapien
tagtccttgacacagaacttccagg

SEQ ID NO: 3383872 - DNA, 25 bp, Homo sapien
gagccactgacgaatgcctctgcag

SEQ ID NO: 3383873 - DNA, 25 bp, Homo sapien
gacagcaggctgtgtacaccgatcc

SEQ ID NO: 3383874 - DNA, 25 bp, Homo sapien
cgttcccgagcagtgacgctagcat

SEQ ID NO: 3383875 - DNA, 25 bp, Homo sapien
gctgcagtgacaatcttaggtagat

SEQ ID NO: 3383876 - DNA, 25 bp, Homo sapien
tcttaggtagattttagtcacataa

SEQ ID NO: 3383877 - DNA, 25 bp, Homo sapien
gacaatcttaggtagattttagtca

SEQ ID NO: 3383878 - DNA, 25 bp, Homo sapien
ggctgcagtgacaatcttaggtaga

SEQ ID NO: 3383879 - DNA, 25 bp, Homo sapien
tcatggaggtacctgcttgtctcag

SEQ ID NO: 3383880 - DNA, 25 bp, Homo sapien
tggatgtcatggaggtacctgcttg

SEQ ID NO: 3383881 - DNA, 25 bp, Homo sapien
tacctgcttgtctcaggtggtgtgt

SEQ ID NO: 3383882 - DNA, 25 bp, Homo sapien
tttttcctctagatcccatctcctg

SEQ ID NO: 3383883 - DNA, 25 bp, Homo sapien
agatgccgtcccaggttagccaggc

SEQ ID NO: 3383884 - DNA, 25 bp, Homo sapien
tgtgctgcctttgcgtggtgttccc

SEQ ID NO: 3383885 - DNA, 25 bp, Homo sapien
tggagagtccgtcagaacctttagc

SEQ ID NO: 3383886 - DNA, 25 bp, Homo sapien
gagatagaccatcaccattttagag

SEQ ID NO: 3383887 - DNA, 25 bp, Homo sapien
ttccattcacacgaattctcatcca

SEQ ID NO: 3383888 - DNA, 25 bp, Homo sapien
gccataaccagcagaccacagcatt

SEQ ID NO: 3383889 - DNA, 25 bp, Homo sapien
ctgtcgtgtctgtactccttccatt

SEQ ID NO: 3383890 - DNA, 25 bp, Homo sapien
gtcgtgtctgtactccttccattca

SEQ ID NO: 3383891 - DNA, 25 bp, Homo sapien
aaatgaggtcatagaattccacggg

SEQ ID NO: 3383892 - DNA, 25 bp, Homo sapien
tgaggtcatagaattccacgggctt

SEQ ID NO: 3383893 - DNA, 25 bp, Homo sapien
aatgaggtcatagaattccacgggc

SEQ ID NO: 3383894 - DNA, 25 bp, Homo sapien
aggtcatagaattccacgggcttgc

SEQ ID NO: 3383895 - DNA, 25 bp, Homo sapien
tataactgatgaataagctcctcgc

SEQ ID NO: 3383896 - DNA, 25 bp, Homo sapien
tgtgagtcttcgaagcttgccaact

SEQ ID NO: 3383897 - DNA, 25 bp, Homo sapien
tgctggtgcccgatgtggtttctct

SEQ ID NO: 3383898 - DNA, 25 bp, Homo sapien
aaagccagtgtatctcccaagacat

SEQ ID NO: 3383899 - DNA, 25 bp, Homo sapien
ctgcccccagttttggatatctgca

SEQ ID NO: 3383900 - DNA, 25 bp, Homo sapien
caggagaagtctcgtgcactgggat

SEQ ID NO: 3383901 - DNA, 25 bp, Homo sapien
atggcgggctctctgttagggttat

SEQ ID NO: 3383902 - DNA, 25 bp, Homo sapien
tgtgtggttctttatctactcccct

SEQ ID NO: 3383903 - DNA, 25 bp, Homo sapien
aaggcgcagtataaatgtgtgattc

SEQ ID NO: 3383904 - DNA, 25 bp, Homo sapien
ctggaaaggcgcagtataaatgtgt

SEQ ID NO: 3383905 - DNA, 25 bp, Homo sapien
tgtgattcagagtcagtgatgtgca

SEQ ID NO: 3383906 - DNA, 25 bp, Homo sapien
cagtataaatgtgtgattcagagtc

SEQ ID NO: 3383907 - DNA, 25 bp, Homo sapien
atccctccctgctgacacagtttga

SEQ ID NO: 3383908 - DNA, 25 bp, Homo sapien
tccctccctgctgacacagtttgac

SEQ ID NO: 3383909 - DNA, 25 bp, Homo sapien
gacaagatgatgacgtctctcgccc

SEQ ID NO: 3383910 - DNA, 25 bp, Homo sapien
tagtgtcagtactacctctccaggt

SEQ ID NO: 3383911 - DNA, 25 bp, Homo sapien
gttgtacattctaatccactggctg

SEQ ID NO: 3383912 - DNA, 25 bp, Homo sapien
gactttggcaactgtcagggcgtta

SEQ ID NO: 3383913 - DNA, 25 bp, Homo sapien
ccgctgcagctagttagagtcataa

SEQ ID NO: 3383914 - DNA, 25 bp, Homo sapien
ggaactaccagcctttcacgtggca

SEQ ID NO: 3383915 - DNA, 25 bp, Homo sapien
tcattttccttgtcccctgagaggc

SEQ ID NO: 3383916 - DNA, 25 bp, Homo sapien
tgcgggtggcccatttaaagccttg

SEQ ID NO: 3383917 - DNA, 25 bp, Homo sapien
gaaacaggttaaggtcacagagtag

SEQ ID NO: 3383918 - DNA, 25 bp, Homo sapien
caaaataacacaggctgggtagcat

SEQ ID NO: 3383919 - DNA, 25 bp, Homo sapien
gaagcatttgatgtccctgtgttag

SEQ ID NO: 3383920 - DNA, 25 bp, Homo sapien
tctgtggaggtgattaccgtaaacc

SEQ ID NO: 3383921 - DNA, 25 bp, Homo sapien
cacatagtacaagatgtggttgtca

SEQ ID NO: 3383922 - DNA, 25 bp, Homo sapien
tgttcctcagtaacctcaaacacca

SEQ ID NO: 3383923 - DNA, 25 bp, Homo sapien
tagtacaagatgtggttgtcactga

SEQ ID NO: 3383924 - DNA, 25 bp, Homo sapien
tctgtgtgaacatagaaagactgag

SEQ ID NO: 3383925 - DNA, 25 bp, Homo sapien
ttggtggccattgccgtatctcttt

SEQ ID NO: 3383926 - DNA, 25 bp, Homo sapien
ccattgccgtatctctttagggtca

SEQ ID NO: 3383927 - DNA, 25 bp, Homo sapien
ccgtatctctttagggtcattgtct

SEQ ID NO: 3383928 - DNA, 25 bp, Homo sapien
ttatggtgaggtttccgaagggctg

SEQ ID NO: 3383929 - DNA, 25 bp, Homo sapien
tgaagctcccttgagagaacccctg

SEQ ID NO: 3383930 - DNA, 25 bp, Homo sapien
cttagagaagttgaagctcccttga

SEQ ID NO: 3383931 - DNA, 25 bp, Homo sapien
gagaagttgaagctcccttgagaga

SEQ ID NO: 3383932 - DNA, 25 bp, Homo sapien
tgagagaacccctgtagttttccca

SEQ ID NO: 3383933 - DNA, 25 bp, Homo sapien
gttccaagagtagcctcccaggttg

SEQ ID NO: 3383934 - DNA, 25 bp, Homo sapien
ctgtttttgtggttgcagctgcccc

SEQ ID NO: 3383935 - DNA, 25 bp, Homo sapien
ttctccgatgccctctggggtgttt

SEQ ID NO: 3383936 - DNA, 25 bp, Homo sapien
tgcagctgccccttagcttctgtct

SEQ ID NO: 3383937 - DNA, 25 bp, Homo sapien
cgtggggaaagagctctgagtgaat

SEQ ID NO: 3383938 - DNA, 25 bp, Homo sapien
gcgtggggaaagagctctgagtgaa

SEQ ID NO: 3383939 - DNA, 25 bp, Homo sapien
gtgaattgaggatggcttttcagtt

SEQ ID NO: 3383940 - DNA, 25 bp, Homo sapien
ggtggagcgagtcacacaggaaaga

SEQ ID NO: 3383941 - DNA, 25 bp, Homo sapien
cagcagggtggagcgagtcacacag

SEQ ID NO: 3383942 - DNA, 25 bp, Homo sapien
agtcacacaggaaagagtctgggaa

SEQ ID NO: 3383943 - DNA, 25 bp, Homo sapien
cacacaggaaagagtctgggaattg

SEQ ID NO: 3383944 - DNA, 25 bp, Homo sapien
catcgagttgctgctgataacacca

SEQ ID NO: 3383945 - DNA, 25 bp, Homo sapien
tctggctactgctgtcgagactggg

SEQ ID NO: 3383946 - DNA, 25 bp, Homo sapien
tgaatcctagagtgcccatgctgtg

SEQ ID NO: 3383947 - DNA, 25 bp, Homo sapien
gcaattagcattcagagtggcactc

SEQ ID NO: 3383948 - DNA, 25 bp, Homo sapien
aagtgattcccggaaagagtaggtg

SEQ ID NO: 3383949 - DNA, 25 bp, Homo sapien
aatggcccagccaagatggcctggg

SEQ ID NO: 3383950 - DNA, 25 bp, Homo sapien
atggcctggggcagctactacccaa

SEQ ID NO: 3383951 - DNA, 25 bp, Homo sapien
ctggggcagctactacccaaagtga

SEQ ID NO: 3383952 - DNA, 25 bp, Homo sapien
gaagatggccttgattaggaacaag

SEQ ID NO: 3383953 - DNA, 25 bp, Homo sapien
tctgctcaagccagccgtctaacgt

SEQ ID NO: 3383954 - DNA, 25 bp, Homo sapien
gaaaagtctgctcaagccagccgtc

SEQ ID NO: 3383955 - DNA, 25 bp, Homo sapien
tactctgtgagttgaggatttgaag

SEQ ID NO: 3383956 - DNA, 25 bp, Homo sapien
tccagaccaggtgtaggagacctga

SEQ ID NO: 3383957 - DNA, 25 bp, Homo sapien
tctcagcaggtagagtctgaaacat

SEQ ID NO: 3383958 - DNA, 25 bp, Homo sapien
agtgccctcgggtgtattttcaggc

SEQ ID NO: 3383959 - DNA, 25 bp, Homo sapien
ggtgcctgaaaacctccttgcgtgc

SEQ ID NO: 3383960 - DNA, 25 bp, Homo sapien
cagagagcgccgcttcccaaaatcg

SEQ ID NO: 3383961 - DNA, 25 bp, Homo sapien
gcgccgcttcccaaaatcggctgtg

SEQ ID NO: 3383962 - DNA, 25 bp, Homo sapien
gcttcccaaaatcggctgtggttgg

SEQ ID NO: 3383963 - DNA, 25 bp, Homo sapien
ctcagcagcagagagcgccgcttcc

SEQ ID NO: 3383964 - DNA, 25 bp, Homo sapien
ggagccgcggagctgtcctccctgg

SEQ ID NO: 3383965 - DNA, 25 bp, Homo sapien
agcccagcgccgctgaccggtggcc

SEQ ID NO: 3383966 - DNA, 25 bp, Homo sapien
tcgcgaagcagtcgcatggagccgc

SEQ ID NO: 3383967 - DNA, 25 bp, Homo sapien
agggcgcgcgatgcgccgcgggcga

SEQ ID NO: 3383968 - DNA, 25 bp, Homo sapien
tgtcagaatccgttcccgcaattta

SEQ ID NO: 3383969 - DNA, 25 bp, Homo sapien
tcttcccagccgatgggcacttgcg

SEQ ID NO: 3383970 - DNA, 25 bp, Homo sapien
cacttgcggcaacggatgacaggtc

SEQ ID NO: 3383971 - DNA, 25 bp, Homo sapien
ccgcaatttaccagggattgttaga

SEQ ID NO: 3383972 - DNA, 25 bp, Homo sapien
ttgtccccaaggtcattgcatgctt

SEQ ID NO: 3383973 - DNA, 25 bp, Homo sapien
gagtacatgaaacgaggctagagat

SEQ ID NO: 3383974 - DNA, 25 bp, Homo sapien
tccatcgtaagcatgtaccacagtt

SEQ ID NO: 3383975 - DNA, 25 bp, Homo sapien
catccttgcggataaatctttgtgc

SEQ ID NO: 3383976 - DNA, 25 bp, Homo sapien
gccgtatcaaagcttgcagagggaa

SEQ ID NO: 3383977 - DNA, 25 bp, Homo sapien
taagcatagcccaggaggtaaatgt

SEQ ID NO: 3383978 - DNA, 25 bp, Homo sapien
gacgatgtactttctgtccttgggt

SEQ ID NO: 3383979 - DNA, 25 bp, Homo sapien
tttcctgcatggtatcctagcgacg

SEQ ID NO: 3383980 - DNA, 25 bp, Homo sapien
ggttatgtcaggcagtttattcact

SEQ ID NO: 3383981 - DNA, 25 bp, Homo sapien
tggttatgtcaggcagtttattcac

SEQ ID NO: 3383982 - DNA, 25 bp, Homo sapien
tatgtcaggcagtttattcactttt

SEQ ID NO: 3383983 - DNA, 25 bp, Homo sapien
tgtcaggcagtttattcacttttaa

SEQ ID NO: 3383984 - DNA, 25 bp, Homo sapien
ttctctataaatggtggcattcctg

SEQ ID NO: 3383985 - DNA, 25 bp, Homo sapien
gagttcagagcagtgaacttgaaaa

SEQ ID NO: 3383986 - DNA, 25 bp, Homo sapien
aaaggccccaatgtctacttcacag

SEQ ID NO: 3383987 - DNA, 25 bp, Homo sapien
cccaatgtctacttcacagtaggat

SEQ ID NO: 3383988 - DNA, 25 bp, Homo sapien
ctgagttgaagtaggtgctagtcat

SEQ ID NO: 3383989 - DNA, 25 bp, Homo sapien
agagcagagtcagctcgtcagcaac

SEQ ID NO: 3383990 - DNA, 25 bp, Homo sapien
agcagagtcagctcgtcagcaacag

SEQ ID NO: 3383991 - DNA, 25 bp, Homo sapien
aagagcagagtcagctcgtcagcaa

SEQ ID NO: 3383992 - DNA, 25 bp, Homo sapien
gagcagagtcagctcgtcagcaaca

SEQ ID NO: 3383993 - DNA, 25 bp, Homo sapien
tgggatactagtgtgtgagacacag

SEQ ID NO: 3383994 - DNA, 25 bp, Homo sapien
ccccgatggtgtttgggatactagt

SEQ ID NO: 3383995 - DNA, 25 bp, Homo sapien
tgtttgggatactagtgtgtgagac

SEQ ID NO: 3383996 - DNA, 25 bp, Homo sapien
actctcttccccgatggtgtttggg

SEQ ID NO: 3383997 - DNA, 25 bp, Homo sapien
aggaagaactgggatccctgaaact

SEQ ID NO: 3383998 - DNA, 25 bp, Homo sapien
gaagaactgggatccctgaaacttc

SEQ ID NO: 3383999 - DNA, 25 bp, Homo sapien
tgaaacttcctgattgggatctctt

SEQ ID NO: 3384000 - DNA, 25 bp, Homo sapien
cttcctgattgggatctctttccat

SEQ ID NO: 3384001 - DNA, 25 bp, Homo sapien
gaaggattcctgagtgtcgtgaaaa

SEQ ID NO: 3384002 - DNA, 25 bp, Homo sapien
cctgagtgtcgtgaaaatgcagtgc

SEQ ID NO: 3384003 - DNA, 25 bp, Homo sapien
gattcctgagtgtcgtgaaaatgca

SEQ ID NO: 3384004 - DNA, 25 bp, Homo sapien
gagtgtcgtgaaaatgcagtgcaga

SEQ ID NO: 3384005 - DNA, 25 bp, Homo sapien
ggctccttcagttgggcttggcccg

SEQ ID NO: 3384006 - DNA, 25 bp, Homo sapien
ctgggctccttcagttgggcttggc

SEQ ID NO: 3384007 - DNA, 25 bp, Homo sapien
gctccttcagttgggcttggcccgg

SEQ ID NO: 3384008 - DNA, 25 bp, Homo sapien
cttggcccggggaggcaggccctgc

SEQ ID NO: 3384009 - DNA, 25 bp, Homo sapien
gaggaaacttcgctgaatgacccga

SEQ ID NO: 3384010 - DNA, 25 bp, Homo sapien
gaaaaaagctgataatgaggaggaa

SEQ ID NO: 3384011 - DNA, 25 bp, Homo sapien
gctgaatgacccgatttttctaaaa

SEQ ID NO: 3384012 - DNA, 25 bp, Homo sapien
tttagacagagaccccctcttgggc

SEQ ID NO: 3384013 - DNA, 25 bp, Homo sapien
ctcaaggcgcttgggcggcctttcc

SEQ ID NO: 3384014 - DNA, 25 bp, Homo sapien
ggctgagtcgccaagattctgtcct

SEQ ID NO: 3384015 - DNA, 25 bp, Homo sapien
ccgatgagctgagcatagcctggcg

SEQ ID NO: 3384016 - DNA, 25 bp, Homo sapien
gcatagcctggcgttaggaccacct

SEQ ID NO: 3384017 - DNA, 25 bp, Homo sapien
ctggaagctgaggaaggctcatagc

SEQ ID NO: 3384018 - DNA, 25 bp, Homo sapien
tgaggaccaaggttgaaacaactct

SEQ ID NO: 3384019 - DNA, 25 bp, Homo sapien
tagcccgtaattgtaaactctctgg

SEQ ID NO: 3384020 - DNA, 25 bp, Homo sapien
ttctgggccacttctccggttgcct

SEQ ID NO: 3384021 - DNA, 25 bp, Homo sapien
tgtgtctgaggaccaaggttgaaac

SEQ ID NO: 3384022 - DNA, 25 bp, Homo sapien
ggccctgccagaatcctgtctctca

SEQ ID NO: 3384023 - DNA, 25 bp, Homo sapien
cgggccctgccagaatcctgtctct

SEQ ID NO: 3384024 - DNA, 25 bp, Homo sapien
gggccctgccagaatcctgtctctc

SEQ ID NO: 3384025 - DNA, 25 bp, Homo sapien
gccctgccagaatcctgtctctcac

SEQ ID NO: 3384026 - DNA, 25 bp, Homo sapien
tgacgacagctccagtgttgcagcc

SEQ ID NO: 3384027 - DNA, 25 bp, Homo sapien
ggatggatgacacacctccctggtg

SEQ ID NO: 3384028 - DNA, 25 bp, Homo sapien
ggctgtacaaatagctctcctggct

SEQ ID NO: 3384029 - DNA, 25 bp, Homo sapien
catgaagtagggcaagacaagtttc

SEQ ID NO: 3384030 - DNA, 25 bp, Homo sapien
tcttgctgtgagatagcccagtgaa

SEQ ID NO: 3384031 - DNA, 25 bp, Homo sapien
tccaggtggacgacagcaataaaac

SEQ ID NO: 3384032 - DNA, 25 bp, Homo sapien
cagtagaaacggtggcctgaattca

SEQ ID NO: 3384033 - DNA, 25 bp, Homo sapien
ataaaaccttcatggccagagcagg

SEQ ID NO: 3384034 - DNA, 25 bp, Homo sapien
acctggcttctttccgcgccgatag

SEQ ID NO: 3384035 - DNA, 25 bp, Homo sapien
tagcgctcacgcaagcatggttaac

SEQ ID NO: 3384036 - DNA, 25 bp, Homo sapien
aaacctggcttctttccgcgccgat

SEQ ID NO: 3384037 - DNA, 25 bp, Homo sapien
gcgccgatagcgctcacgcaagcat

SEQ ID NO: 3384038 - DNA, 25 bp, Homo sapien
agaggcacctgtcttcttgtagcca

SEQ ID NO: 3384039 - DNA, 25 bp, Homo sapien
caggagcaatggagagtaaacctct

SEQ ID NO: 3384040 - DNA, 25 bp, Homo sapien
tgctggcatgcttcggcccttcaag

SEQ ID NO: 3384041 - DNA, 25 bp, Homo sapien
gaactctggagaaaccctggcatca

SEQ ID NO: 3384042 - DNA, 25 bp, Homo sapien
gagcgtacctgtgtatactgtccag

SEQ ID NO: 3384043 - DNA, 25 bp, Homo sapien
tgtccagttagctcagattctcagt

SEQ ID NO: 3384044 - DNA, 25 bp, Homo sapien
tctgcagggactctgatatacacag

SEQ ID NO: 3384045 - DNA, 25 bp, Homo sapien
ctctataatggctatggtgggccaa

SEQ ID NO: 3384046 - DNA, 25 bp, Homo sapien
tgtgcagccacctggttatcggctc

SEQ ID NO: 3384047 - DNA, 25 bp, Homo sapien
ttatcggctctgaccactaaaggac

SEQ ID NO: 3384048 - DNA, 25 bp, Homo sapien
ctggtttacctctttactgggcagt

SEQ ID NO: 3384049 - DNA, 25 bp, Homo sapien
tactgggcagttagaagtctgcaca

SEQ ID NO: 3384050 - DNA, 25 bp, Homo sapien
tcgggccacatgatccgctcaggtg

SEQ ID NO: 3384051 - DNA, 25 bp, Homo sapien
caagtttgacccgacttttctggcg

SEQ ID NO: 3384052 - DNA, 25 bp, Homo sapien
gagggcgccagctacttcatcgagt

SEQ ID NO: 3384053 - DNA, 25 bp, Homo sapien
tcttcttcatcaagtgcggcgcgag

SEQ ID NO: 3384054 - DNA, 25 bp, Homo sapien
taaagcatccacttctccacaatac

SEQ ID NO: 3384055 - DNA, 25 bp, Homo sapien
ttaaagcatccacttctccacaata

SEQ ID NO: 3384056 - DNA, 25 bp, Homo sapien
ccacaatactgagaacgccctaggg

SEQ ID NO: 3384057 - DNA, 25 bp, Homo sapien
caatactgagaacgccctagggtgg

SEQ ID NO: 3384058 - DNA, 25 bp, Homo sapien
gaatatcatcagtaatcatcaggga

SEQ ID NO: 3384059 - DNA, 25 bp, Homo sapien
gcatgtgttgcctgatagggtgcaa

SEQ ID NO: 3384060 - DNA, 25 bp, Homo sapien
ggagccatcacaattaagggatcaa

SEQ ID NO: 3384061 - DNA, 25 bp, Homo sapien
tagggtgcaatgagaagaatacagc

SEQ ID NO: 3384062 - DNA, 25 bp, Homo sapien
tacatcacggttacagttgtaatat

SEQ ID NO: 3384063 - DNA, 25 bp, Homo sapien
tcctgccagatggataagagctctc

SEQ ID NO: 3384064 - DNA, 25 bp, Homo sapien
cctgccagatggataagagctctct

SEQ ID NO: 3384065 - DNA, 25 bp, Homo sapien
agagaagtttatacatcacggttac

SEQ ID NO: 3384066 - DNA, 25 bp, Homo sapien
aagcacaccaacacccagcactgtg

SEQ ID NO: 3384067 - DNA, 25 bp, Homo sapien
acaccaacacccagcactgtgtctg

SEQ ID NO: 3384068 - DNA, 25 bp, Homo sapien
ttgaaaaatcagaaacaagcacacc

SEQ ID NO: 3384069 - DNA, 25 bp, Homo sapien
aaaatcagaaacaagcacaccaaca

SEQ ID NO: 3384070 - DNA, 25 bp, Homo sapien
agttctaggacgaggaatattgaga

SEQ ID NO: 3384071 - DNA, 25 bp, Homo sapien
gaccatggtggaggtgaaaccgatg

SEQ ID NO: 3384072 - DNA, 25 bp, Homo sapien
acaggaacagcccagcgaggaccgg

SEQ ID NO: 3384073 - DNA, 25 bp, Homo sapien
atcttggggaccatggtggaggtga

SEQ ID NO: 3384074 - DNA, 25 bp, Homo sapien
gggaccatggtggaggtgaaaccga

SEQ ID NO: 3384075 - DNA, 25 bp, Homo sapien
acaacaagacaacagaactagaaag

SEQ ID NO: 3384076 - DNA, 25 bp, Homo sapien
gacaacaagacaacagaactagaaa

SEQ ID NO: 3384077 - DNA, 25 bp, Homo sapien
caacaagacaacagaactagaaagc

SEQ ID NO: 3384078 - DNA, 25 bp, Homo sapien
ttctgccgtgcaggcgccgcaggac

SEQ ID NO: 3384079 - DNA, 25 bp, Homo sapien
gcagagagggctttatagttcccac

SEQ ID NO: 3384080 - DNA, 25 bp, Homo sapien
ttagactgttctgccgtgcaggcgc

SEQ ID NO: 3384081 - DNA, 25 bp, Homo sapien
ggcagagagggctttatagttccca

SEQ ID NO: 3384082 - DNA, 25 bp, Homo sapien
tatcctgcagtcattgggcaaaatg

SEQ ID NO: 3384083 - DNA, 25 bp, Homo sapien
gaatgtgtatcctgcagtcattggg

SEQ ID NO: 3384084 - DNA, 25 bp, Homo sapien
tgtatcctgcagtcattgggcaaaa

SEQ ID NO: 3384085 - DNA, 25 bp, Homo sapien
tgtgtatcctgcagtcattgggcaa

SEQ ID NO: 3384086 - DNA, 25 bp, Homo sapien
taaatggtgatacctacagggaaga

SEQ ID NO: 3384087 - DNA, 25 bp, Homo sapien
tgtaccaatcaggttgctgtgagaa

SEQ ID NO: 3384088 - DNA, 25 bp, Homo sapien
gacaatcgccaattcagtttcccag

SEQ ID NO: 3384089 - DNA, 25 bp, Homo sapien
gttgataatatatcactgggacggg

SEQ ID NO: 3384090 - DNA, 25 bp, Homo sapien
ttattctacagtaaccagtaagaat

SEQ ID NO: 3384091 - DNA, 25 bp, Homo sapien
ctacagtaaccagtaagaataagat

SEQ ID NO: 3384092 - DNA, 25 bp, Homo sapien
cagtaaccagtaagaataagattcg

SEQ ID NO: 3384093 - DNA, 25 bp, Homo sapien
tattctacagtaaccagtaagaata

SEQ ID NO: 3384094 - DNA, 25 bp, Homo sapien
cattcctgagtagggcagactcttc

SEQ ID NO: 3384095 - DNA, 25 bp, Homo sapien
gaaaattgttaacccatgtgcccat

SEQ ID NO: 3384096 - DNA, 25 bp, Homo sapien
tacctgaataagactcaccaatgtg

SEQ ID NO: 3384097 - DNA, 25 bp, Homo sapien
gaggcccatgacaagaattctaggg

SEQ ID NO: 3384098 - DNA, 25 bp, Homo sapien
caaatgggcaggtatgcttaaggca

SEQ ID NO: 3384099 - DNA, 25 bp, Homo sapien
tctccctctcaagccaagtctagtg

SEQ ID NO: 3384100 - DNA, 25 bp, Homo sapien
cattttcgtatacattggttggcca

SEQ ID NO: 3384101 - DNA, 25 bp, Homo sapien
taaggcaaatgaaggtaaaacctgc

SEQ ID NO: 3384102 - DNA, 25 bp, Homo sapien
gcagaactttttactattcgttcca

SEQ ID NO: 3384103 - DNA, 25 bp, Homo sapien
gatagacagttgcagaactttttac

SEQ ID NO: 3384104 - DNA, 25 bp, Homo sapien
actaagggaactctcattatttagg

SEQ ID NO: 3384105 - DNA, 25 bp, Homo sapien
tatttaggcagatagacagttgcag

SEQ ID NO: 3384106 - DNA, 25 bp, Homo sapien
ttttgttaatcagtggctcttggcc

SEQ ID NO: 3384107 - DNA, 25 bp, Homo sapien
ggtttatggttcctcaagcctctcg

SEQ ID NO: 3384108 - DNA, 25 bp, Homo sapien
caaacttggtatgggtgtcctctct

SEQ ID NO: 3384109 - DNA, 25 bp, Homo sapien
gagatgtattcccaaagtctgtagg

SEQ ID NO: 3384110 - DNA, 25 bp, Homo sapien
ggtgtgacacccatgtaagtctccc

SEQ ID NO: 3384111 - DNA, 25 bp, Homo sapien
cctaaagataggaagaagtttgcct

SEQ ID NO: 3384112 - DNA, 25 bp, Homo sapien
gattggtcactcctagttcaacaca

SEQ ID NO: 3384113 - DNA, 25 bp, Homo sapien
tctgggtaatcaagtcacataggtg

SEQ ID NO: 3384114 - DNA, 25 bp, Homo sapien
ggatcttactctgtgctcaggcaag

SEQ ID NO: 3384115 - DNA, 25 bp, Homo sapien
tgagggcccactgtcatatatatgg

SEQ ID NO: 3384116 - DNA, 25 bp, Homo sapien
ggtttaagcataccccactcctcga

SEQ ID NO: 3384117 - DNA, 25 bp, Homo sapien
aaattgagtggctagaattgcaggc

SEQ ID NO: 3384118 - DNA, 25 bp, Homo sapien
gtagatgggtacagatgggttccat

SEQ ID NO: 3384119 - DNA, 25 bp, Homo sapien
ttcagatgggatctctttcagttct

SEQ ID NO: 3384120 - DNA, 25 bp, Homo sapien
ttcagctttcagtgtgctacctgtg

SEQ ID NO: 3384121 - DNA, 25 bp, Homo sapien
gtatttagtgaagacctgtaggaga

SEQ ID NO: 3384122 - DNA, 25 bp, Homo sapien
atgtctgcaccctaagccatggctc

SEQ ID NO: 3384123 - DNA, 25 bp, Homo sapien
ggccatgtctgcaccctaagccatg

SEQ ID NO: 3384124 - DNA, 25 bp, Homo sapien
gtctgcaccctaagccatggctcct

SEQ ID NO: 3384125 - DNA, 25 bp, Homo sapien
gcaccctaagccatggctcctgaag

SEQ ID NO: 3384126 - DNA, 25 bp, Homo sapien
cacccccttgagagagtcatatctt

SEQ ID NO: 3384127 - DNA, 25 bp, Homo sapien
cccttgagagagtcatatctttgtg

SEQ ID NO: 3384128 - DNA, 25 bp, Homo sapien
gggtccacccccttgagagagtcat

SEQ ID NO: 3384129 - DNA, 25 bp, Homo sapien
tccacccccttgagagagtcatatc

SEQ ID NO: 3384130 - DNA, 25 bp, Homo sapien
gagcctgagcacctttgcgaacctg

SEQ ID NO: 3384131 - DNA, 25 bp, Homo sapien
agcctgagcacctttgcgaacctga

SEQ ID NO: 3384132 - DNA, 25 bp, Homo sapien
tccttgtcgtttggccggcacaacc

SEQ ID NO: 3384133 - DNA, 25 bp, Homo sapien
tccttgtccttgtcgtttggccggc

SEQ ID NO: 3384134 - DNA, 25 bp, Homo sapien
cacaaaaaagatctagaggctattc

SEQ ID NO: 3384135 - DNA, 25 bp, Homo sapien
ggtacatctcaatttggaacagcca

SEQ ID NO: 3384136 - DNA, 25 bp, Homo sapien
taactagtaactgccatattggaca

SEQ ID NO: 3384137 - DNA, 25 bp, Homo sapien
acatttcaggcacttaatagctcca

SEQ ID NO: 3384138 - DNA, 25 bp, Homo sapien
aaaaatggctcggactgtggcggct

SEQ ID NO: 3384139 - DNA, 25 bp, Homo sapien
gatattcggggtcctgctctgcaag

SEQ ID NO: 3384140 - DNA, 25 bp, Homo sapien
cttgaggtgaggagcggtcggtgcg

SEQ ID NO: 3384141 - DNA, 25 bp, Homo sapien
agtgccttgggtgcccgcgtctgac

SEQ ID NO: 3384142 - DNA, 25 bp, Homo sapien
aagtgacgtgctgcgcttggctggc

SEQ ID NO: 3384143 - DNA, 25 bp, Homo sapien
gaaggcggtgcttccctgtccggaa

SEQ ID NO: 3384144 - DNA, 25 bp, Homo sapien
cttggctggctgtggagtcggccga

SEQ ID NO: 3384145 - DNA, 25 bp, Homo sapien
ccaattcgcaacaagtccgggcggg

SEQ ID NO: 3384146 - DNA, 25 bp, Homo sapien
tgtgcacggagaggcgtccagagcc

SEQ ID NO: 3384147 - DNA, 25 bp, Homo sapien
tggggtgtccggagagctcccctcc

SEQ ID NO: 3384148 - DNA, 25 bp, Homo sapien
gggtgtgcacggagaggcgtccaga

SEQ ID NO: 3384149 - DNA, 25 bp, Homo sapien
ccagctggggtgtccggagagctcc

SEQ ID NO: 3384150 - DNA, 25 bp, Homo sapien
tttcagtcttccaatcacaaagtaa

SEQ ID NO: 3384151 - DNA, 25 bp, Homo sapien
acctcagcctagatggaggagggtg

SEQ ID NO: 3384152 - DNA, 25 bp, Homo sapien
atcacaaagtaatctcggcgccgcc

SEQ ID NO: 3384153 - DNA, 25 bp, Homo sapien
caatagggtacttcagtgcccgggc

SEQ ID NO: 3384154 - DNA, 25 bp, Homo sapien
ctttcttggtcactcacgttgcgga

SEQ ID NO: 3384155 - DNA, 25 bp, Homo sapien
cgttgcggaacgtcagtggccatgt

SEQ ID NO: 3384156 - DNA, 25 bp, Homo sapien
cagaatggccaacagcgtatcctga

SEQ ID NO: 3384157 - DNA, 25 bp, Homo sapien
cctcagatgggattggcagctgaca

SEQ ID NO: 3384158 - DNA, 25 bp, Homo sapien
atcatcgctcactgccggttcgaac

SEQ ID NO: 3384159 - DNA, 25 bp, Homo sapien
atcgctcactgccggttcgaactcc

SEQ ID NO: 3384160 - DNA, 25 bp, Homo sapien
tcgctcactgccggttcgaactcct

SEQ ID NO: 3384161 - DNA, 25 bp, Homo sapien
tcatcgctcactgccggttcgaact

SEQ ID NO: 3384162 - DNA, 25 bp, Homo sapien
cagcaccttgggttgtctcagacat

SEQ ID NO: 3384163 - DNA, 25 bp, Homo sapien
cagcccaccatgtttgaagctgtgg

SEQ ID NO: 3384164 - DNA, 25 bp, Homo sapien
ccttgggttgtctcagacatgctct

SEQ ID NO: 3384165 - DNA, 25 bp, Homo sapien
tcttcttctccgacctccatattgt

SEQ ID NO: 3384166 - DNA, 25 bp, Homo sapien
tactgagtgcggcttctgttcaggg

SEQ ID NO: 3384167 - DNA, 25 bp, Homo sapien
ggatacctggcacatgaaacacact

SEQ ID NO: 3384168 - DNA, 25 bp, Homo sapien
tgatccaggcctgacggaacttttt

SEQ ID NO: 3384169 - DNA, 25 bp, Homo sapien
ggaaactcactctaccctttgcttg

SEQ ID NO: 3384170 - DNA, 25 bp, Homo sapien
tgatcttcacgtctttgacaaagcg

SEQ ID NO: 3384171 - DNA, 25 bp, Homo sapien
tctcatccttgagagaagccgccag

SEQ ID NO: 3384172 - DNA, 25 bp, Homo sapien
cgtctttgacaaagcggcccagctt

SEQ ID NO: 3384173 - DNA, 25 bp, Homo sapien
aggcccagtccacggccgctaccct

SEQ ID NO: 3384174 - DNA, 25 bp, Homo sapien
cccacggatggcggtggccaccact

SEQ ID NO: 3384175 - DNA, 25 bp, Homo sapien
gccccacggatggcggtggccacca

SEQ ID NO: 3384176 - DNA, 25 bp, Homo sapien
acggatggcggtggccaccactttg

SEQ ID NO: 3384177 - DNA, 25 bp, Homo sapien
cacggatggcggtggccaccacttt

SEQ ID NO: 3384178 - DNA, 25 bp, Homo sapien
gcagctccttgggcacaggtgcgga

SEQ ID NO: 3384179 - DNA, 25 bp, Homo sapien
tccttgggcacaggtgcggagacga

SEQ ID NO: 3384180 - DNA, 25 bp, Homo sapien
agctccttgggcacaggtgcggaga

SEQ ID NO: 3384181 - DNA, 25 bp, Homo sapien
ctccttgggcacaggtgcggagacg

SEQ ID NO: 3384182 - DNA, 25 bp, Homo sapien
tcacgcttaattcactttatttttc

SEQ ID NO: 3384183 - DNA, 25 bp, Homo sapien
tgtataaaaaccctatgttgtagcc

SEQ ID NO: 3384184 - DNA, 25 bp, Homo sapien
tataaaaaccctatgttgtagccac

SEQ ID NO: 3384185 - DNA, 25 bp, Homo sapien
tcttgtataaaaaccctatgttgta

SEQ ID NO: 3384186 - DNA, 25 bp, Homo sapien
cctgcaatgagaagctgttggagtt

SEQ ID NO: 3384187 - DNA, 25 bp, Homo sapien
cctaaatgacaactaagtagcaggc

SEQ ID NO: 3384188 - DNA, 25 bp, Homo sapien
cattaaaggagcctaaggacagagc

SEQ ID NO: 3384189 - DNA, 25 bp, Homo sapien
aacggtctgatatgtttgactccaa

SEQ ID NO: 3384190 - DNA, 25 bp, Homo sapien
cacatgatgtcatagggggatgata

SEQ ID NO: 3384191 - DNA, 25 bp, Homo sapien
ggatgatacaaagagatgtgcaaag

SEQ ID NO: 3384192 - DNA, 25 bp, Homo sapien
cctttttggtgatgctgtaaaaatt

SEQ ID NO: 3384193 - DNA, 25 bp, Homo sapien
catgatgtcatagggggatgataca

SEQ ID NO: 3384194 - DNA, 25 bp, Homo sapien
tgtgattattgtgcactatagcctc

SEQ ID NO: 3384195 - DNA, 25 bp, Homo sapien
gaggcctcggctaatcaaaaaatta

SEQ ID NO: 3384196 - DNA, 25 bp, Homo sapien
gagcagtctcttcagataattccta

SEQ ID NO: 3384197 - DNA, 25 bp, Homo sapien
tgataaaagttggtccgggcgcagc

SEQ ID NO: 3384198 - DNA, 25 bp, Homo sapien
gcattcctgtgttttgagaggccaa

SEQ ID NO: 3384199 - DNA, 25 bp, Homo sapien
ctgcattcctgtgttttgagaggcc

SEQ ID NO: 3384200 - DNA, 25 bp, Homo sapien
cattcctgtgttttgagaggccaag

SEQ ID NO: 3384201 - DNA, 25 bp, Homo sapien
acctgcattcctgtgttttgagagg

SEQ ID NO: 3384202 - DNA, 25 bp, Homo sapien
gcatataagtcacttcgggaactta

SEQ ID NO: 3384203 - DNA, 25 bp, Homo sapien
gtgcatataagtcacttcgggaact

SEQ ID NO: 3384204 - DNA, 25 bp, Homo sapien
tcctgtaatgcatggcttctcaatc

SEQ ID NO: 3384205 - DNA, 25 bp, Homo sapien
cttcatcaaatcctgtaatgcatgg

SEQ ID NO: 3384206 - DNA, 25 bp, Homo sapien
tcttgctcagcttggtgtaagtaat

SEQ ID NO: 3384207 - DNA, 25 bp, Homo sapien
cttggaaatcctgtctgattactgc

SEQ ID NO: 3384208 - DNA, 25 bp, Homo sapien
tcctgtctgattactgctacctctg

SEQ ID NO: 3384209 - DNA, 25 bp, Homo sapien
gaaatcctgtctgattactgctacc

SEQ ID NO: 3384210 - DNA, 25 bp, Homo sapien
tgaaccatgatcattgtgccacaga

SEQ ID NO: 3384211 - DNA, 25 bp, Homo sapien
ccatgatcattgtgccacagagtga

SEQ ID NO: 3384212 - DNA, 25 bp, Homo sapien
aaaatttgccaggtgctgtgtcgca

SEQ ID NO: 3384213 - DNA, 25 bp, Homo sapien
caggtgctgtgtcgcacatctgtag

SEQ ID NO: 3384214 - DNA, 25 bp, Homo sapien
tgtttacgaagtttcatcctgccga

SEQ ID NO: 3384215 - DNA, 25 bp, Homo sapien
ttccagaagcttttggagccacagg

SEQ ID NO: 3384216 - DNA, 25 bp, Homo sapien
cacatgggtagcttgagccttccag

SEQ ID NO: 3384217 - DNA, 25 bp, Homo sapien
tgaggctcaaagatgcacatgggta

SEQ ID NO: 3384218 - DNA, 25 bp, Homo sapien
ccgattggcgggagcagggacaagg

SEQ ID NO: 3384219 - DNA, 25 bp, Homo sapien
actctgcggccgctgattggtccgg

SEQ ID NO: 3384220 - DNA, 25 bp, Homo sapien
cgattgctgacgacgccgattggcg

SEQ ID NO: 3384221 - DNA, 25 bp, Homo sapien
tccggttcgcgattgctgacgacgc

SEQ ID NO: 3384222 - DNA, 25 bp, Homo sapien
ccccggcccaccgctccgctctgcc

SEQ ID NO: 3384223 - DNA, 25 bp, Homo sapien
agcccccggcccaccgctccgctct

SEQ ID NO: 3384224 - DNA, 25 bp, Homo sapien
ccggcccaccgctccgctctgcccc

SEQ ID NO: 3384225 - DNA, 25 bp, Homo sapien
cggcccaccgctccgctctgcccct

SEQ ID NO: 3384226 - DNA, 25 bp, Homo sapien
gcgagcgaggctgcgcctggtgctt

SEQ ID NO: 3384227 - DNA, 25 bp, Homo sapien
gtctcggcgagcgaggctgcgcctg

SEQ ID NO: 3384228 - DNA, 25 bp, Homo sapien
ctggccgggtctcggcgagcgaggc

SEQ ID NO: 3384229 - DNA, 25 bp, Homo sapien
ctgcgcctggtgcttgcgtccagcg

SEQ ID NO: 3384230 - DNA, 25 bp, Homo sapien
cagctgcgagtggagcagagggaac

SEQ ID NO: 3384231 - DNA, 25 bp, Homo sapien
ctcctcgaccccgaagaaagctcgg

SEQ ID NO: 3384232 - DNA, 25 bp, Homo sapien
tcgaccccgaagaaagctcgggtgc

SEQ ID NO: 3384233 - DNA, 25 bp, Homo sapien
ccgaagaaagctcgggtgcccagct

SEQ ID NO: 3384234 - DNA, 25 bp, Homo sapien
tccccgggcctagctttgctgagcg

SEQ ID NO: 3384235 - DNA, 25 bp, Homo sapien
aggttgctggcttaaccagaccgga

SEQ ID NO: 3384236 - DNA, 25 bp, Homo sapien
ttgctggcttaaccagaccggagaa

SEQ ID NO: 3384237 - DNA, 25 bp, Homo sapien
gcaggatccccgggcctagctttgc

SEQ ID NO: 3384238 - DNA, 25 bp, Homo sapien
gtcacaaatctaatgatgaaacagg

SEQ ID NO: 3384239 - DNA, 25 bp, Homo sapien
taatgatgaaacagggtagggtgaa

SEQ ID NO: 3384240 - DNA, 25 bp, Homo sapien
catggcaccagtttcaaaggccaca

SEQ ID NO: 3384241 - DNA, 25 bp, Homo sapien
caaatctaatgatgaaacagggtag

SEQ ID NO: 3384242 - DNA, 25 bp, Homo sapien
tgcacaataccaaaatagtgaagag

SEQ ID NO: 3384243 - DNA, 25 bp, Homo sapien
ggtaagatgacttgcacaataccaa

SEQ ID NO: 3384244 - DNA, 25 bp, Homo sapien
gatgggtcttggctcctagctcaat

SEQ ID NO: 3384245 - DNA, 25 bp, Homo sapien
tcactaaaaactgactcgtaacacg

SEQ ID NO: 3384246 - DNA, 25 bp, Homo sapien
ctcttctttcataagagagatacgg

SEQ ID NO: 3384247 - DNA, 25 bp, Homo sapien
cttccactatcaggtcagtaagaat

SEQ ID NO: 3384248 - DNA, 25 bp, Homo sapien
cttctttcataagagagatacggac

SEQ ID NO: 3384249 - DNA, 25 bp, Homo sapien
ttttcttccactatcaggtcagtaa

SEQ ID NO: 3384250 - DNA, 25 bp, Homo sapien
ccggccaagactgatatttttaagg

SEQ ID NO: 3384251 - DNA, 25 bp, Homo sapien
gccaagactgatatttttaaggaga

SEQ ID NO: 3384252 - DNA, 25 bp, Homo sapien
cccggccaagactgatatttttaag

SEQ ID NO: 3384253 - DNA, 25 bp, Homo sapien
cggccaagactgatatttttaagga

SEQ ID NO: 3384254 - DNA, 25 bp, Homo sapien
ttctgatacatgccaacatttgaaa

SEQ ID NO: 3384255 - DNA, 25 bp, Homo sapien
gtagggggcctcacaatctgtttta

SEQ ID NO: 3384256 - DNA, 25 bp, Homo sapien
cttttcaggagtggttctcaaaagt

SEQ ID NO: 3384257 - DNA, 25 bp, Homo sapien
ggtgtagggggcctcacaatctgtt

SEQ ID NO: 3384258 - DNA, 25 bp, Homo sapien
cacatacataggtgtgcattttggg

SEQ ID NO: 3384259 - DNA, 25 bp, Homo sapien
catacccattatcagtcactcactg

SEQ ID NO: 3384260 - DNA, 25 bp, Homo sapien
taactcataaggcataaaatgtttt

SEQ ID NO: 3384261 - DNA, 25 bp, Homo sapien
tttgggttttttgagatataactca

SEQ ID NO: 3384262 - DNA, 25 bp, Homo sapien
tgtatactaaaacctgagatccact

SEQ ID NO: 3384263 - DNA, 25 bp, Homo sapien
cattttcaccacaaccctaggtggt

SEQ ID NO: 3384264 - DNA, 25 bp, Homo sapien
aattcccttacagagcattgtcttg

SEQ ID NO: 3384265 - DNA, 25 bp, Homo sapien
tcaggctgtacccaagacctctggg

SEQ ID NO: 3384266 - DNA, 25 bp, Homo sapien
gcttcaagagcagtaagtaaacatg

SEQ ID NO: 3384267 - DNA, 25 bp, Homo sapien
tcttgtctatgtcaataggcacagc

SEQ ID NO: 3384268 - DNA, 25 bp, Homo sapien
ttgtcttgtctatgtcaataggcac

SEQ ID NO: 3384269 - DNA, 25 bp, Homo sapien
aaacatgtaatcaagagaaagcaat

SEQ ID NO: 3384270 - DNA, 25 bp, Homo sapien
tcttcgcactttccacagggtgaat

SEQ ID NO: 3384271 - DNA, 25 bp, Homo sapien
ctatcttcgcactttccacagggtg

SEQ ID NO: 3384272 - DNA, 25 bp, Homo sapien
cgcactttccacagggtgaatattt

SEQ ID NO: 3384273 - DNA, 25 bp, Homo sapien
tggtggttctatcttcgcactttcc

SEQ ID NO: 3384274 - DNA, 25 bp, Homo sapien
cattccacctcatttagttacaatt

SEQ ID NO: 3384275 - DNA, 25 bp, Homo sapien
tcattccacctcatttagttacaat

SEQ ID NO: 3384276 - DNA, 25 bp, Homo sapien
tagttatagtttcacctcattccac

SEQ ID NO: 3384277 - DNA, 25 bp, Homo sapien
tttcatttagttatagtttcacctc

SEQ ID NO: 3384278 - DNA, 25 bp, Homo sapien
attaagaaaccaacagtaatgcttc

SEQ ID NO: 3384279 - DNA, 25 bp, Homo sapien
aaccaacagtaatgcttctgcaggt

SEQ ID NO: 3384280 - DNA, 25 bp, Homo sapien
caacagtaatgcttctgcaggtttt

SEQ ID NO: 3384281 - DNA, 25 bp, Homo sapien
gaaaccaacagtaatgcttctgcag

SEQ ID NO: 3384282 - DNA, 25 bp, Homo sapien
tgcttgagatattcatcataataaa

SEQ ID NO: 3384283 - DNA, 25 bp, Homo sapien
ttgcttgagatattcatcataataa

SEQ ID NO: 3384284 - DNA, 25 bp, Homo sapien
cttgcttgagatattcatcataata

SEQ ID NO: 3384285 - DNA, 25 bp, Homo sapien
tatttcctctatgtctgctttctgg

SEQ ID NO: 3384286 - DNA, 25 bp, Homo sapien
gtctgctttctggagcttttctctg

SEQ ID NO: 3384287 - DNA, 25 bp, Homo sapien
gcttttctctgaagtgtttatctgt

SEQ ID NO: 3384288 - DNA, 25 bp, Homo sapien
ctgaagtgtttatctgtttccagca

SEQ ID NO: 3384289 - DNA, 25 bp, Homo sapien
gttcatcaagttttgtcctcacatg

SEQ ID NO: 3384290 - DNA, 25 bp, Homo sapien
cattcttaaccttcctacttcttgc

SEQ ID NO: 3384291 - DNA, 25 bp, Homo sapien
cttgaagggaatccaacttagcttt

SEQ ID NO: 3384292 - DNA, 25 bp, Homo sapien
tcacatggtgacttactaaatccag

SEQ ID NO: 3384293 - DNA, 25 bp, Homo sapien
tcaggattcaggtggtttaggtgat

SEQ ID NO: 3384294 - DNA, 25 bp, Homo sapien
gattcaggtggtttaggtgatcaaa

SEQ ID NO: 3384295 - DNA, 25 bp, Homo sapien
ggtgatcaaattgttttagaagagc

SEQ ID NO: 3384296 - DNA, 25 bp, Homo sapien
tgattagcatatctaaatctgtgga

SEQ ID NO: 3384297 - DNA, 25 bp, Homo sapien
tttaaattcttcatgacgagtcttg

SEQ ID NO: 3384298 - DNA, 25 bp, Homo sapien
ttaactttagggtgattttcatgct

SEQ ID NO: 3384299 - DNA, 25 bp, Homo sapien
catagtgttccagatcacttgttgc

SEQ ID NO: 3384300 - DNA, 25 bp, Homo sapien
tgacgagtcttgtcatagtgttcca

SEQ ID NO: 3384301 - DNA, 25 bp, Homo sapien
taggatccaatccatcagtctcttc

SEQ ID NO: 3384302 - DNA, 25 bp, Homo sapien
aatgtcttggggtcaaagtcattag

SEQ ID NO: 3384303 - DNA, 25 bp, Homo sapien
tgtcttggggtcaaagtcattagga

SEQ ID NO: 3384304 - DNA, 25 bp, Homo sapien
tgaaaaatgtcttggggtcaaagtc

SEQ ID NO: 3384305 - DNA, 25 bp, Homo sapien
gttcatccaggaatccatcactatt

SEQ ID NO: 3384306 - DNA, 25 bp, Homo sapien
ctctttagtaaatagggcttctaat

SEQ ID NO: 3384307 - DNA, 25 bp, Homo sapien
tccaggaatccatcactattgacat

SEQ ID NO: 3384308 - DNA, 25 bp, Homo sapien
tagtaaatagggcttctaattcttg

SEQ ID NO: 3384309 - DNA, 25 bp, Homo sapien
catttttagggtcatatactttctc

SEQ ID NO: 3384310 - DNA, 25 bp, Homo sapien
tttttagggtcatatactttctcca

SEQ ID NO: 3384311 - DNA, 25 bp, Homo sapien
tacatgttccctcattctaagcctt

SEQ ID NO: 3384312 - DNA, 25 bp, Homo sapien
cactcattacatgttccctcattct

SEQ ID NO: 3384313 - DNA, 25 bp, Homo sapien
tgtggctttcaaaaactcctccaga

SEQ ID NO: 3384314 - DNA, 25 bp, Homo sapien
gtggctttcaaaaactcctccagag

SEQ ID NO: 3384315 - DNA, 25 bp, Homo sapien
tctgtggctttcaaaaactcctcca

SEQ ID NO: 3384316 - DNA, 25 bp, Homo sapien
ttctgtggctttcaaaaactcctcc

SEQ ID NO: 3384317 - DNA, 25 bp, Homo sapien
tagtctgtcctcttgattgtttcag

SEQ ID NO: 3384318 - DNA, 25 bp, Homo sapien
gggatcgtcaacatgtgccttctaa

SEQ ID NO: 3384319 - DNA, 25 bp, Homo sapien
ggtattcaagggacattgtacaaca

SEQ ID NO: 3384320 - DNA, 25 bp, Homo sapien
gatacactgagcatctcttctgtgg

SEQ ID NO: 3384321 - DNA, 25 bp, Homo sapien
caccacccaagaaaacatgacctaa

SEQ ID NO: 3384322 - DNA, 25 bp, Homo sapien
cacgctgaagaatgcatcggagtct

SEQ ID NO: 3384323 - DNA, 25 bp, Homo sapien
gagatatatgacctttcagatacag

SEQ ID NO: 3384324 - DNA, 25 bp, Homo sapien
gaaaacagcctcaaaacggcaaata

SEQ ID NO: 3384325 - DNA, 25 bp, Homo sapien
ttccctggcttctagacaccatctc

SEQ ID NO: 3384326 - DNA, 25 bp, Homo sapien
cagaaccccatgtggaccagagatg

SEQ ID NO: 3384327 - DNA, 25 bp, Homo sapien
tgacccagcacagttccgtggtgat

SEQ ID NO: 3384328 - DNA, 25 bp, Homo sapien
ttagccacagtaaaactgaacatca

SEQ ID NO: 3384329 - DNA, 25 bp, Homo sapien
tgagcctccagttgatcatgctgac

SEQ ID NO: 3384330 - DNA, 25 bp, Homo sapien
tgaagaactgttgctgatctaatgt

SEQ ID NO: 3384331 - DNA, 25 bp, Homo sapien
tgtttctgaagctcatctgccttct

SEQ ID NO: 3384332 - DNA, 25 bp, Homo sapien
catgctgacgttgtagctcttcttt

SEQ ID NO: 3384333 - DNA, 25 bp, Homo sapien
ctttttaatgccataatcttttgac

SEQ ID NO: 3384334 - DNA, 25 bp, Homo sapien
ttaatgccataatcttttgacaaaa

SEQ ID NO: 3384335 - DNA, 25 bp, Homo sapien
ttttaatgccataatcttttgacaa

SEQ ID NO: 3384336 - DNA, 25 bp, Homo sapien
tctttttaatgccataatcttttga

SEQ ID NO: 3384337 - DNA, 25 bp, Homo sapien
ctccagctggccctgatggaggaat

SEQ ID NO: 3384338 - DNA, 25 bp, Homo sapien
cagctggccctgatggaggaattcc

SEQ ID NO: 3384339 - DNA, 25 bp, Homo sapien
cctgatggaggaattccttgttgta

SEQ ID NO: 3384340 - DNA, 25 bp, Homo sapien
ttttttgttccatctgctgtatgac

SEQ ID NO: 3384341 - DNA, 25 bp, Homo sapien
gctgctacataaaacttttggaggc

SEQ ID NO: 3384342 - DNA, 25 bp, Homo sapien
taacataacatcttaatgatttgaa

SEQ ID NO: 3384343 - DNA, 25 bp, Homo sapien
tatgcttagctaatcatagatcaca

SEQ ID NO: 3384344 - DNA, 25 bp, Homo sapien
taatctaaattgctctaataccaca

SEQ ID NO: 3384345 - DNA, 25 bp, Homo sapien
aatagatgttgagttaacagctttc

SEQ ID NO: 3384346 - DNA, 25 bp, Homo sapien
gatgaaatagatgttgagttaacag

SEQ ID NO: 3384347 - DNA, 25 bp, Homo sapien
gttgagttaacagctttcttccaag

SEQ ID NO: 3384348 - DNA, 25 bp, Homo sapien
gatgttgagttaacagctttcttcc

SEQ ID NO: 3384349 - DNA, 25 bp, Homo sapien
aaaagagccgtgtgaatgtgagagc

SEQ ID NO: 3384350 - DNA, 25 bp, Homo sapien
gataagcacccataaaagaatacct

SEQ ID NO: 3384351 - DNA, 25 bp, Homo sapien
agtgagagcaatctaatttaaaagc

SEQ ID NO: 3384352 - DNA, 25 bp, Homo sapien
gaatacctatgtttacgagtaagtg

SEQ ID NO: 3384353 - DNA, 25 bp, Homo sapien
aatgtttagccaggcgttcgtggca

SEQ ID NO: 3384354 - DNA, 25 bp, Homo sapien
tcagggaagctaactcaagcagaga

SEQ ID NO: 3384355 - DNA, 25 bp, Homo sapien
aatttaggtagccaacaaggctggc

SEQ ID NO: 3384356 - DNA, 25 bp, Homo sapien
caaattgctatggatcagtggccac

SEQ ID NO: 3384357 - DNA, 25 bp, Homo sapien
cagcctccaagaagggtatactttc

SEQ ID NO: 3384358 - DNA, 25 bp, Homo sapien
cctggcctgcaatagactgtagctg

SEQ ID NO: 3384359 - DNA, 25 bp, Homo sapien
agttttaggaatccacttggccaag

SEQ ID NO: 3384360 - DNA, 25 bp, Homo sapien
gaagtaaactgctaaggctgcccag

SEQ ID NO: 3384361 - DNA, 25 bp, Homo sapien
ttggttaatactgtccatgtaaatg

SEQ ID NO: 3384362 - DNA, 25 bp, Homo sapien
tggttaatactgtccatgtaaatga

SEQ ID NO: 3384363 - DNA, 25 bp, Homo sapien
cttggttaatactgtccatgtaaat

SEQ ID NO: 3384364 - DNA, 25 bp, Homo sapien
tggagagcacacagaggccagcaag

SEQ ID NO: 3384365 - DNA, 25 bp, Homo sapien
taaatgatgaggttctttgttaaaa

SEQ ID NO: 3384366 - DNA, 25 bp, Homo sapien
cagaggccagcaagtaaatgatgag

SEQ ID NO: 3384367 - DNA, 25 bp, Homo sapien
gccagcaagtaaatgatgaggttct

SEQ ID NO: 3384368 - DNA, 25 bp, Homo sapien
caaaggatctcaaggaggtaccatt

SEQ ID NO: 3384369 - DNA, 25 bp, Homo sapien
tcaaaggatctcaaggaggtaccat

SEQ ID NO: 3384370 - DNA, 25 bp, Homo sapien
aaaggatctcaaggaggtaccattc

SEQ ID NO: 3384371 - DNA, 25 bp, Homo sapien
caagtctgcagtgacgcaagggaaa

SEQ ID NO: 3384372 - DNA, 25 bp, Homo sapien
taaagcacagcaagtcgaaggccct

SEQ ID NO: 3384373 - DNA, 25 bp, Homo sapien
tcagcaaagccctacaagagatatg

SEQ ID NO: 3384374 - DNA, 25 bp, Homo sapien
gcaggcagcttcctaatccagcagg

SEQ ID NO: 3384375 - DNA, 25 bp, Homo sapien
tcatcatctaactctgactgttttt

SEQ ID NO: 3384376 - DNA, 25 bp, Homo sapien
tgcatgacaaacgatgaagctcatc

SEQ ID NO: 3384377 - DNA, 25 bp, Homo sapien
catgacaaacgatgaagctcatcat

SEQ ID NO: 3384378 - DNA, 25 bp, Homo sapien
catcatctaactctgactgtttttc

SEQ ID NO: 3384379 - DNA, 25 bp, Homo sapien
taagttgaggcaccagtggttaagg

SEQ ID NO: 3384380 - DNA, 25 bp, Homo sapien
ttaaaagtattaagttgaggcacca

SEQ ID NO: 3384381 - DNA, 25 bp, Homo sapien
aaagtattaagttgaggcaccagtg

SEQ ID NO: 3384382 - DNA, 25 bp, Homo sapien
gtattaagttgaggcaccagtggtt

SEQ ID NO: 3384383 - DNA, 25 bp, Homo sapien
ggcggaggttacagtgagccgagat

SEQ ID NO: 3384384 - DNA, 25 bp, Homo sapien
gcaggagaattgcttgaccctggga

SEQ ID NO: 3384385 - DNA, 25 bp, Homo sapien
gtggcatatgcctatagtccccgct

SEQ ID NO: 3384386 - DNA, 25 bp, Homo sapien
cccgctacttgggagactgaggcag

SEQ ID NO: 3384387 - DNA, 25 bp, Homo sapien
tcaggtcatccaggcaaaagtagtg

SEQ ID NO: 3384388 - DNA, 25 bp, Homo sapien
aggaagtcaccagagccatagcaga

SEQ ID NO: 3384389 - DNA, 25 bp, Homo sapien
aatagagtcccataaagctggtggc

SEQ ID NO: 3384390 - DNA, 25 bp, Homo sapien
gataccagactaacagcttcaggaa

SEQ ID NO: 3384391 - DNA, 25 bp, Homo sapien
taaacctatacaaacaacgactaga

SEQ ID NO: 3384392 - DNA, 25 bp, Homo sapien
tacaaacaacgactagaacaatatt

SEQ ID NO: 3384393 - DNA, 25 bp, Homo sapien
tcttcaagctagtagaactttttcc

SEQ ID NO: 3384394 - DNA, 25 bp, Homo sapien
tgcactggaagaatttttacaacat

SEQ ID NO: 3384395 - DNA, 25 bp, Homo sapien
tatccagggacagtatggcagagac

SEQ ID NO: 3384396 - DNA, 25 bp, Homo sapien
tgggcacagggatcaataaaagact

SEQ ID NO: 3384397 - DNA, 25 bp, Homo sapien
aaccatgcactaggacaaagggaca

SEQ ID NO: 3384398 - DNA, 25 bp, Homo sapien
tgatgactcgtgaaacctctaccag

SEQ ID NO: 3384399 - DNA, 25 bp, Homo sapien
catccttgtctggtattagtgacat

SEQ ID NO: 3384400 - DNA, 25 bp, Homo sapien
acatccttgtctggtattagtgaca

SEQ ID NO: 3384401 - DNA, 25 bp, Homo sapien
gtcggtgattgcgagagcaggtgca

SEQ ID NO: 3384402 - DNA, 25 bp, Homo sapien
caggtgcacgcgtccagagcgacat

SEQ ID NO: 3384403 - DNA, 25 bp, Homo sapien
agtcggtgattgcgagagcaggtgc

SEQ ID NO: 3384404 - DNA, 25 bp, Homo sapien
agagcaggtgcacgcgtccagagcg

SEQ ID NO: 3384405 - DNA, 25 bp, Homo sapien
gcgaagtcgcctggatttcccaggt

SEQ ID NO: 3384406 - DNA, 25 bp, Homo sapien
agacacagccgggatttccagccgg

SEQ ID NO: 3384407 - DNA, 25 bp, Homo sapien
gatcccttcggcaactgcgaagtcg

SEQ ID NO: 3384408 - DNA, 25 bp, Homo sapien
gtaaagagttgacggagacacagcc

SEQ ID NO: 3384409 - DNA, 25 bp, Homo sapien
tcccctggcgggatgctagggagcc

SEQ ID NO: 3384410 - DNA, 25 bp, Homo sapien
taaacctgttgcatcggggactccg

SEQ ID NO: 3384411 - DNA, 25 bp, Homo sapien
cagggcaggccttcaatgtaaacct

SEQ ID NO: 3384412 - DNA, 25 bp, Homo sapien
ttctcacaaaggagggacgcttgaa

SEQ ID NO: 3384413 - DNA, 25 bp, Homo sapien
gccaaataccgaggcaccaaacgcg

SEQ ID NO: 3384414 - DNA, 25 bp, Homo sapien
acatccaaggaagcaccgtttccgc

SEQ ID NO: 3384415 - DNA, 25 bp, Homo sapien
tgatgcgagagaggcgccaaatacc

SEQ ID NO: 3384416 - DNA, 25 bp, Homo sapien
ccgtttccgctctcacaggtgtcga

SEQ ID NO: 3384417 - DNA, 25 bp, Homo sapien
agcatccgcggggaccgagaccgga

SEQ ID NO: 3384418 - DNA, 25 bp, Homo sapien
cgccgcacagccaaacggcgttcct

SEQ ID NO: 3384419 - DNA, 25 bp, Homo sapien
tgccgtcactgggcgccgccgcaca

SEQ ID NO: 3384420 - DNA, 25 bp, Homo sapien
cgcgggacgggcatgggaccgggtg

SEQ ID NO: 3384421 - DNA, 25 bp, Homo sapien
gatttgttaggcgaaagcttccgaa

SEQ ID NO: 3384422 - DNA, 25 bp, Homo sapien
gtccagcaccaacgcctggttctgg

SEQ ID NO: 3384423 - DNA, 25 bp, Homo sapien
agtctcttccggtgccaaagtccag

SEQ ID NO: 3384424 - DNA, 25 bp, Homo sapien
cctcgtggctggacgagccggaact

SEQ ID NO: 3384425 - DNA, 25 bp, Homo sapien
agcagccaggcaaacagatgctcca

SEQ ID NO: 3384426 - DNA, 25 bp, Homo sapien
tagcagccaggcaaacagatgctcc

SEQ ID NO: 3384427 - DNA, 25 bp, Homo sapien
gcagccaggcaaacagatgctccat

SEQ ID NO: 3384428 - DNA, 25 bp, Homo sapien
cagccaggcaaacagatgctccatc

SEQ ID NO: 3384429 - DNA, 25 bp, Homo sapien
gatacccatagacgtgatgttgagg

SEQ ID NO: 3384430 - DNA, 25 bp, Homo sapien
ctggattccaggcagccgcagtgag

SEQ ID NO: 3384431 - DNA, 25 bp, Homo sapien
gagacacaatggctccaggtcggaa

SEQ ID NO: 3384432 - DNA, 25 bp, Homo sapien
caacttcaagctggactgttccctg

SEQ ID NO: 3384433 - DNA, 25 bp, Homo sapien
cagaaagactgtgccgagcagcagt

SEQ ID NO: 3384434 - DNA, 25 bp, Homo sapien
gcagtcagggtaaagttgctcctca

SEQ ID NO: 3384435 - DNA, 25 bp, Homo sapien
tattaatagcctctgggtagaaccc

SEQ ID NO: 3384436 - DNA, 25 bp, Homo sapien
tatgcaaggacgcatgccgtaccac

SEQ ID NO: 3384437 - DNA, 25 bp, Homo sapien
gaagaaatgtccagaaagaccctta

SEQ ID NO: 3384438 - DNA, 25 bp, Homo sapien
gagaagaaatgtccagaaagaccct

SEQ ID NO: 3384439 - DNA, 25 bp, Homo sapien
gaagagaagaaatgtccagaaagac

SEQ ID NO: 3384440 - DNA, 25 bp, Homo sapien
agagaagaaatgtccagaaagaccc

SEQ ID NO: 3384441 - DNA, 25 bp, Homo sapien
gaaataggccaccaatgaatggaaa

SEQ ID NO: 3384442 - DNA, 25 bp, Homo sapien
aaaccagtccaacaccaatgaatga

SEQ ID NO: 3384443 - DNA, 25 bp, Homo sapien
taataaaaccagtccaacaccaatg

SEQ ID NO: 3384444 - DNA, 25 bp, Homo sapien
caatgaatgaaataggccaccaatg

SEQ ID NO: 3384445 - DNA, 25 bp, Homo sapien
tatccagttttctcatggcctagat

SEQ ID NO: 3384446 - DNA, 25 bp, Homo sapien
gcctagatccaacaggaataagtcc

SEQ ID NO: 3384447 - DNA, 25 bp, Homo sapien
gggccatttttcttaattgactgat

SEQ ID NO: 3384448 - DNA, 25 bp, Homo sapien
taagtcccgtgaatctaaatggcca

SEQ ID NO: 3384449 - DNA, 25 bp, Homo sapien
taatattaacacttccctcaggagg

SEQ ID NO: 3384450 - DNA, 25 bp, Homo sapien
taaggtgctatctaatcccatggcc

SEQ ID NO: 3384451 - DNA, 25 bp, Homo sapien
taacttggtggcctctgggactagc

SEQ ID NO: 3384452 - DNA, 25 bp, Homo sapien
tcccgggtagtaacagcagtctgag

SEQ ID NO: 3384453 - DNA, 25 bp, Homo sapien
gatagcacactcactagaaaagacg

SEQ ID NO: 3384454 - DNA, 25 bp, Homo sapien
aatgatagacctctttgttcagcgc

SEQ ID NO: 3384455 - DNA, 25 bp, Homo sapien
tgaagggccagttctaagttgtagc

SEQ ID NO: 3384456 - DNA, 25 bp, Homo sapien
ggtcaggaaccactgccacgatagt

SEQ ID NO: 3384457 - DNA, 25 bp, Homo sapien
cagctgtggacatgtctaaggcaag

SEQ ID NO: 3384458 - DNA, 25 bp, Homo sapien
tatcctcccagtgtgcatgcaggcc

SEQ ID NO: 3384459 - DNA, 25 bp, Homo sapien
aaggagcatggaccccaaaggtgag

SEQ ID NO: 3384460 - DNA, 25 bp, Homo sapien
ccaaaagagtgtcgccatttcacag

SEQ ID NO: 3384461 - DNA, 25 bp, Homo sapien
gatgcagatccctgagatctgtagc

SEQ ID NO: 3384462 - DNA, 25 bp, Homo sapien
cctgaggagttgtagcacttagctt

SEQ ID NO: 3384463 - DNA, 25 bp, Homo sapien
gctctctctcgaagggggtctcaga

SEQ ID NO: 3384464 - DNA, 25 bp, Homo sapien
catggcaccagctggaacactgatg

SEQ ID NO: 3384465 - DNA, 25 bp, Homo sapien
taagcagtgcatgggttacttccct

SEQ ID NO: 3384466 - DNA, 25 bp, Homo sapien
ggcctcagaccaccatgcaggctga

SEQ ID NO: 3384467 - DNA, 25 bp, Homo sapien
caattttcccataggctaactgcta

SEQ ID NO: 3384468 - DNA, 25 bp, Homo sapien
tactaatgaccaatactaggccagg

SEQ ID NO: 3384469 - DNA, 25 bp, Homo sapien
gcattctctgagaaaccttgtcatc

SEQ ID NO: 3384470 - DNA, 25 bp, Homo sapien
ttccatagttccatccaaggagggc

SEQ ID NO: 3384471 - DNA, 25 bp, Homo sapien
aatcattccatagttccatccaagg

SEQ ID NO: 3384472 - DNA, 25 bp, Homo sapien
aaaaatcattccatagttccatcca

SEQ ID NO: 3384473 - DNA, 25 bp, Homo sapien
cattccatagttccatccaaggagg

SEQ ID NO: 3384474 - DNA, 25 bp, Homo sapien
tcctttttgttaaatgctgactgtg

SEQ ID NO: 3384475 - DNA, 25 bp, Homo sapien
caaatgcaatacagttctgactgag

SEQ ID NO: 3384476 - DNA, 25 bp, Homo sapien
aatgcaatacagttctgactgagat

SEQ ID NO: 3384477 - DNA, 25 bp, Homo sapien
ttttgttaaatgctgactgtgtcct

SEQ ID NO: 3384478 - DNA, 25 bp, Homo sapien
ctctgggcaggtccaactctggagt

SEQ ID NO: 3384479 - DNA, 25 bp, Homo sapien
cactctgggcaggtccaactctgga

SEQ ID NO: 3384480 - DNA, 25 bp, Homo sapien
tgggcaggtccaactctggagtgat

SEQ ID NO: 3384481 - DNA, 25 bp, Homo sapien
gtgatgtgaagagcaggctgcctgg

SEQ ID NO: 3384482 - DNA, 25 bp, Homo sapien
catgttgacctcaggtccgaagaac

SEQ ID NO: 3384483 - DNA, 25 bp, Homo sapien
caagtgtccagataactttagcaag

SEQ ID NO: 3384484 - DNA, 25 bp, Homo sapien
tgaattccgttcatcaaagtcatgt

SEQ ID NO: 3384485 - DNA, 25 bp, Homo sapien
caggtccgaagaacaacagattgat

SEQ ID NO: 3384486 - DNA, 25 bp, Homo sapien
cagatatcagacactctgtgttgta

SEQ ID NO: 3384487 - DNA, 25 bp, Homo sapien
ccagatatcagacactctgtgttgt

SEQ ID NO: 3384488 - DNA, 25 bp, Homo sapien
tctgctggagaggactcatgcagct

SEQ ID NO: 3384489 - DNA, 25 bp, Homo sapien
tggagaggactcatgcagcttctcc

SEQ ID NO: 3384490 - DNA, 25 bp, Homo sapien
gagccccactaatgtgcacctctgg

SEQ ID NO: 3384491 - DNA, 25 bp, Homo sapien
tgctggagaggactcatgcagcttc

SEQ ID NO: 3384492 - DNA, 25 bp, Homo sapien
ctttttctggcccacgtgcatgatg

SEQ ID NO: 3384493 - DNA, 25 bp, Homo sapien
tggcactttttctggcccacgtgca

SEQ ID NO: 3384494 - DNA, 25 bp, Homo sapien
tggcccacgtgcatgatgagccctc

SEQ ID NO: 3384495 - DNA, 25 bp, Homo sapien
tttctggcccacgtgcatgatgagc

SEQ ID NO: 3384496 - DNA, 25 bp, Homo sapien
ccttaagctgctggtgagtgtgaag

SEQ ID NO: 3384497 - DNA, 25 bp, Homo sapien
taaggacctgctggcagtaccatcc

SEQ ID NO: 3384498 - DNA, 25 bp, Homo sapien
ccacagaactgagggcttagcgcca

SEQ ID NO: 3384499 - DNA, 25 bp, Homo sapien
tggagcccaaaccagagtaaccttc

SEQ ID NO: 3384500 - DNA, 25 bp, Homo sapien
tctgtctctactcccagggacctgc

SEQ ID NO: 3384501 - DNA, 25 bp, Homo sapien
gggctctgtctctactcccagggac

SEQ ID NO: 3384502 - DNA, 25 bp, Homo sapien
tctctactcccagggacctgctgga

SEQ ID NO: 3384503 - DNA, 25 bp, Homo sapien
ctgggctctgtctctactcccaggg

SEQ ID NO: 3384504 - DNA, 25 bp, Homo sapien
aaaggtgtgggaaggttcaggatgg

SEQ ID NO: 3384505 - DNA, 25 bp, Homo sapien
aaggtgtgggaaggttcaggatggt

SEQ ID NO: 3384506 - DNA, 25 bp, Homo sapien
ggtgtgggaaggttcaggatggtgg

SEQ ID NO: 3384507 - DNA, 25 bp, Homo sapien
aaaaggtgtgggaaggttcaggatg

SEQ ID NO: 3384508 - DNA, 25 bp, Homo sapien
agaaggtggcttgggggtggatatc

SEQ ID NO: 3384509 - DNA, 25 bp, Homo sapien
cttgggggtggatatctttgggttg

SEQ ID NO: 3384510 - DNA, 25 bp, Homo sapien
ttgtccagaaggtggcttgggggtg

SEQ ID NO: 3384511 - DNA, 25 bp, Homo sapien
ggtggcttgggggtggatatctttg

SEQ ID NO: 3384512 - DNA, 25 bp, Homo sapien
gaaaaagcacctggctaagggctgg

SEQ ID NO: 3384513 - DNA, 25 bp, Homo sapien
ccagctctacttggtccctgaaaaa

SEQ ID NO: 3384514 - DNA, 25 bp, Homo sapien
gcagttgatgagagagggtgttccc

SEQ ID NO: 3384515 - DNA, 25 bp, Homo sapien
tccaagaagtgcctgtggtcaggcc

SEQ ID NO: 3384516 - DNA, 25 bp, Homo sapien
gggtgccatccttgagttcgataag

SEQ ID NO: 3384517 - DNA, 25 bp, Homo sapien
tgctcagccggaaggacagcgtctt

SEQ ID NO: 3384518 - DNA, 25 bp, Homo sapien
gcatcgagtgcacaccatcctgagt

SEQ ID NO: 3384519 - DNA, 25 bp, Homo sapien
tgagttcgataagccagagaagctg

SEQ ID NO: 3384520 - DNA, 25 bp, Homo sapien
ttcgcagaccgcactgtggtcacca

SEQ ID NO: 3384521 - DNA, 25 bp, Homo sapien
aggtggtgatgacagccttcgcaga

SEQ ID NO: 3384522 - DNA, 25 bp, Homo sapien
tccaaaaggtggtgatgacagcctt

SEQ ID NO: 3384523 - DNA, 25 bp, Homo sapien
gacagccttcgcagaccgcactgtg

SEQ ID NO: 3384524 - DNA, 25 bp, Homo sapien
tggacgaggccacggcttccattga

SEQ ID NO: 3384525 - DNA, 25 bp, Homo sapien
tggcccgggccttcgtgaggaagac

SEQ ID NO: 3384526 - DNA, 25 bp, Homo sapien
atcttcatcatggacgaggccacgg

SEQ ID NO: 3384527 - DNA, 25 bp, Homo sapien
gccacggcttccattgacatggcca

SEQ ID NO: 3384528 - DNA, 25 bp, Homo sapien
aggaagtgctcagatagcacactgt

SEQ ID NO: 3384529 - DNA, 25 bp, Homo sapien
gaaatcgcccagctgaagctggtgg

SEQ ID NO: 3384530 - DNA, 25 bp, Homo sapien
ctggaaatcgcccagctgaagctgg

SEQ ID NO: 3384531 - DNA, 25 bp, Homo sapien
gaagtgctcagatagcacactgtgg

SEQ ID NO: 3384532 - DNA, 25 bp, Homo sapien
caccaactcccagagggagctcagc

SEQ ID NO: 3384533 - DNA, 25 bp, Homo sapien
gctcagcacctggaaagccagaaag

SEQ ID NO: 3384534 - DNA, 25 bp, Homo sapien
agagggagctcagcacctggaaagc

SEQ ID NO: 3384535 - DNA, 25 bp, Homo sapien
cacctggaaagccagaaagctgcat

SEQ ID NO: 3384536 - DNA, 25 bp, Homo sapien
atggcgatgctgacaactgctgtgt

SEQ ID NO: 3384537 - DNA, 25 bp, Homo sapien
tggcgatgctgacaactgctgtgtc

SEQ ID NO: 3384538 - DNA, 25 bp, Homo sapien
tccccagtgcagatggcgatgctga

SEQ ID NO: 3384539 - DNA, 25 bp, Homo sapien
cctggtccccagtgcagatggcgat

SEQ ID NO: 3384540 - DNA, 25 bp, Homo sapien
gtgggatggcttgtctgccccaggc

SEQ ID NO: 3384541 - DNA, 25 bp, Homo sapien
ggtgggatggcttgtctgccccagg

SEQ ID NO: 3384542 - DNA, 25 bp, Homo sapien
gggtgggatggcttgtctgccccag

SEQ ID NO: 3384543 - DNA, 25 bp, Homo sapien
agggtgggatggcttgtctgcccca

SEQ ID NO: 3384544 - DNA, 25 bp, Homo sapien
ctgaagcttcaccccaagagatgag

SEQ ID NO: 3384545 - DNA, 25 bp, Homo sapien
tgaagcttcaccccaagagatgagg

SEQ ID NO: 3384546 - DNA, 25 bp, Homo sapien
gggagactctagcatgggttcaaag

SEQ ID NO: 3384547 - DNA, 25 bp, Homo sapien
gctctaaggagtatctgaccaggca

SEQ ID NO: 3384548 - DNA, 25 bp, Homo sapien
cctgtcatgcctctatggagggctg

SEQ ID NO: 3384549 - DNA, 25 bp, Homo sapien
gagaaccagtcagtaacaaatgtcc

SEQ ID NO: 3384550 - DNA, 25 bp, Homo sapien
ctgaggctttggctgggaaatgccc

SEQ ID NO: 3384551 - DNA, 25 bp, Homo sapien
ctgaaggtagaaggctgaggctttg

SEQ ID NO: 3384552 - DNA, 25 bp, Homo sapien
tgaggctttggctgggaaatgccct

SEQ ID NO: 3384553 - DNA, 25 bp, Homo sapien
aggctgaggctttggctgggaaatg

SEQ ID NO: 3384554 - DNA, 25 bp, Homo sapien
gctcttggaggctcccacttccagg

SEQ ID NO: 3384555 - DNA, 25 bp, Homo sapien
cctcagccagtgaaacagcttcccc

SEQ ID NO: 3384556 - DNA, 25 bp, Homo sapien
tccaggctctagagcctcatgggga

SEQ ID NO: 3384557 - DNA, 25 bp, Homo sapien
gctctagagcctcatggggactctg

SEQ ID NO: 3384558 - DNA, 25 bp, Homo sapien
tctgtccacagactttcgtgggcca

SEQ ID NO: 3384559 - DNA, 25 bp, Homo sapien
tgtggtccgatctaccgtcaaagct

SEQ ID NO: 3384560 - DNA, 25 bp, Homo sapien
tcgtgggccacgtcagcttcttcaa

SEQ ID NO: 3384561 - DNA, 25 bp, Homo sapien
tatcttggtcacaccgctgttcctg

SEQ ID NO: 3384562 - DNA, 25 bp, Homo sapien
gaaggtgtctccaactaaaagatcc

SEQ ID NO: 3384563 - DNA, 25 bp, Homo sapien
ttccagtgctgagcgtttccagtgt

SEQ ID NO: 3384564 - DNA, 25 bp, Homo sapien
cctgcttattcccagccaagactgg

SEQ ID NO: 3384565 - DNA, 25 bp, Homo sapien
aggacagggagtcttggccaggaca

SEQ ID NO: 3384566 - DNA, 25 bp, Homo sapien
tcatagtaagtggatcctttctcca

SEQ ID NO: 3384567 - DNA, 25 bp, Homo sapien
gcagttttcatgaacacggccatcc

SEQ ID NO: 3384568 - DNA, 25 bp, Homo sapien
attgcagctgtcctcatagtaagtg

SEQ ID NO: 3384569 - DNA, 25 bp, Homo sapien
ctgcccagatttggcctttctgcac

SEQ ID NO: 3384570 - DNA, 25 bp, Homo sapien
ctcctgacctcacagttggccacag

SEQ ID NO: 3384571 - DNA, 25 bp, Homo sapien
gagactaggaagtctctaagcttca

SEQ ID NO: 3384572 - DNA, 25 bp, Homo sapien
gcttcatagagagcctggcttgggg

SEQ ID NO: 3384573 - DNA, 25 bp, Homo sapien
gactaggaagtctctaagcttcata

SEQ ID NO: 3384574 - DNA, 25 bp, Homo sapien
catctgacccccgactgataacagt

SEQ ID NO: 3384575 - DNA, 25 bp, Homo sapien
ccccgactgataacagtgacagaac

SEQ ID NO: 3384576 - DNA, 25 bp, Homo sapien
ctgataacagtgacagaactaggcc

SEQ ID NO: 3384577 - DNA, 25 bp, Homo sapien
catcaccctcgaatcttcccatctg

SEQ ID NO: 3384578 - DNA, 25 bp, Homo sapien
tgtcactgcaatgacaattccagct

SEQ ID NO: 3384579 - DNA, 25 bp, Homo sapien
gggtagagggctgcaattgtctttc

SEQ ID NO: 3384580 - DNA, 25 bp, Homo sapien
agttccagcctaattcccaagacca

SEQ ID NO: 3384581 - DNA, 25 bp, Homo sapien
gcctgacgcagggagagggtagagg

SEQ ID NO: 3384582 - DNA, 25 bp, Homo sapien
gatgccctttgactctgaacttttg

SEQ ID NO: 3384583 - DNA, 25 bp, Homo sapien
cttttggcattctacgcatctcatt

SEQ ID NO: 3384584 - DNA, 25 bp, Homo sapien
ggctttgagcctctcgcctccgtat

SEQ ID NO: 3384585 - DNA, 25 bp, Homo sapien
tacgcatctcattgaagttgctttc

SEQ ID NO: 3384586 - DNA, 25 bp, Homo sapien
agtagccgcagcctgaccatctcca

SEQ ID NO: 3384587 - DNA, 25 bp, Homo sapien
aaatgtgctgaagagtagccgcagc

SEQ ID NO: 3384588 - DNA, 25 bp, Homo sapien
cgcagcctgaccatctccattgtag

SEQ ID NO: 3384589 - DNA, 25 bp, Homo sapien
gtaaatgtgctgaagagtagccgca

SEQ ID NO: 3384590 - DNA, 25 bp, Homo sapien
tccctggtgtctgatgcagatcctg

SEQ ID NO: 3384591 - DNA, 25 bp, Homo sapien
gcagatcctgggtttgccctgttcc

SEQ ID NO: 3384592 - DNA, 25 bp, Homo sapien
ggtccctggtgtctgatgcagatcc

SEQ ID NO: 3384593 - DNA, 25 bp, Homo sapien
gggcctcagacctccacgtttcctc

SEQ ID NO: 3384594 - DNA, 25 bp, Homo sapien
ataaagaggcccataggagcccaag

SEQ ID NO: 3384595 - DNA, 25 bp, Homo sapien
gtcagggtgcttaactccttccttc

SEQ ID NO: 3384596 - DNA, 25 bp, Homo sapien
gagcccaaggagctagccagtgtag

SEQ ID NO: 3384597 - DNA, 25 bp, Homo sapien
ggcaggtcagggtgcttaactcctt

SEQ ID NO: 3384598 - DNA, 25 bp, Homo sapien
tctgagtctggggatgaagccgctt

SEQ ID NO: 3384599 - DNA, 25 bp, Homo sapien
caagtcttaggatgcctctgagtct

SEQ ID NO: 3384600 - DNA, 25 bp, Homo sapien
tgggtggtatctggagctccccaca

SEQ ID NO: 3384601 - DNA, 25 bp, Homo sapien
gggtgggtggtatctggagctcccc

SEQ ID NO: 3384602 - DNA, 25 bp, Homo sapien
tggcccagccatggaccgaaaagtg

SEQ ID NO: 3384603 - DNA, 25 bp, Homo sapien
gtcgtgcaacgacgcagctggacct

SEQ ID NO: 3384604 - DNA, 25 bp, Homo sapien
gcacccgaaggaacgggtcgtgcaa

SEQ ID NO: 3384605 - DNA, 25 bp, Homo sapien
gagaattccggcataaggtcagagc

SEQ ID NO: 3384606 - DNA, 25 bp, Homo sapien
cgactccagcctcgcagcggccccg

SEQ ID NO: 3384607 - DNA, 25 bp, Homo sapien
cttcgactccagcctcgcagcggcc

SEQ ID NO: 3384608 - DNA, 25 bp, Homo sapien
actccagcctcgcagcggccccgcc

SEQ ID NO: 3384609 - DNA, 25 bp, Homo sapien
ggccccgccccacagaggcctggcc

SEQ ID NO: 3384610 - DNA, 25 bp, Homo sapien
acaaccctctcaccgaggcgctgca

SEQ ID NO: 3384611 - DNA, 25 bp, Homo sapien
gacctccctgagtccacaaccctct

SEQ ID NO: 3384612 - DNA, 25 bp, Homo sapien
acaaagcagccagcagagcgcagac

SEQ ID NO: 3384613 - DNA, 25 bp, Homo sapien
ttaacgtttctcattcctcgagccc

SEQ ID NO: 3384614 - DNA, 25 bp, Homo sapien
tgggttgcccggctggctctggctg

SEQ ID NO: 3384615 - DNA, 25 bp, Homo sapien
acgactgtagccttgtcccccatgg

SEQ ID NO: 3384616 - DNA, 25 bp, Homo sapien
ctggcctcccacgactgtagccttg

SEQ ID NO: 3384617 - DNA, 25 bp, Homo sapien
cccatggcaagggtcgcctcctggt

SEQ ID NO: 3384618 - DNA, 25 bp, Homo sapien
gccttgtcccccatggcaagggtcg

SEQ ID NO: 3384619 - DNA, 25 bp, Homo sapien
tggcatctctgcggcagaccatgag

SEQ ID NO: 3384620 - DNA, 25 bp, Homo sapien
gcatctctgcggcagaccatgaggc

SEQ ID NO: 3384621 - DNA, 25 bp, Homo sapien
aagtggcatctctgcggcagaccat

SEQ ID NO: 3384622 - DNA, 25 bp, Homo sapien
catctctgcggcagaccatgaggcc

SEQ ID NO: 3384623 - DNA, 25 bp, Homo sapien
gtggccacagccctctttgttcatc

SEQ ID NO: 3384624 - DNA, 25 bp, Homo sapien
tctttgttcatctcccagagggagg

SEQ ID NO: 3384625 - DNA, 25 bp, Homo sapien
aggcaggcttcctggtggccacagc

SEQ ID NO: 3384626 - DNA, 25 bp, Homo sapien
tcaggacgggttcccaggcaggctt

SEQ ID NO: 3384627 - DNA, 25 bp, Homo sapien
acacttggcccgatggagccgcctt

SEQ ID NO: 3384628 - DNA, 25 bp, Homo sapien
acttggcccgatggagccgcctttc

SEQ ID NO: 3384629 - DNA, 25 bp, Homo sapien
tggtgcacacttggcccgatggagc

SEQ ID NO: 3384630 - DNA, 25 bp, Homo sapien
aggatggtgcacacttggcccgatg

SEQ ID NO: 3384631 - DNA, 25 bp, Homo sapien
gaccatggacacaggacagggagtg

SEQ ID NO: 3384632 - DNA, 25 bp, Homo sapien
gggaccatggacacaggacagggag

SEQ ID NO: 3384633 - DNA, 25 bp, Homo sapien
agggggaccatggacacaggacagg

SEQ ID NO: 3384634 - DNA, 25 bp, Homo sapien
gtgagggggaccatggacacaggac

SEQ ID NO: 3384635 - DNA, 25 bp, Homo sapien
accatagacgaagggaagacaaagc

SEQ ID NO: 3384636 - DNA, 25 bp, Homo sapien
agaggcctgtagcaagaacaaccat

SEQ ID NO: 3384637 - DNA, 25 bp, Homo sapien
gagcagagggcagcgaggaaaggag

SEQ ID NO: 3384638 - DNA, 25 bp, Homo sapien
aaggagccatgatgtgagaggacag

SEQ ID NO: 3384639 - DNA, 25 bp, Homo sapien
gaagcgtctgcagtcacagaaggct

SEQ ID NO: 3384640 - DNA, 25 bp, Homo sapien
cactcgcctccattgaagcaggaga

SEQ ID NO: 3384641 - DNA, 25 bp, Homo sapien
aaggctgggtgcacacactcgcctc

SEQ ID NO: 3384642 - DNA, 25 bp, Homo sapien
cagcgcggtccagtggcattgaagc

SEQ ID NO: 3384643 - DNA, 25 bp, Homo sapien
gagaaaagagaacctctctgtgtag

SEQ ID NO: 3384644 - DNA, 25 bp, Homo sapien
ggagagaaaagagaacctctctgtg

SEQ ID NO: 3384645 - DNA, 25 bp, Homo sapien
gagagaaaagagaacctctctgtgt

SEQ ID NO: 3384646 - DNA, 25 bp, Homo sapien
agggagagaaaagagaacctctctg

SEQ ID NO: 3384647 - DNA, 25 bp, Homo sapien
tccggagaggtagtagtagagccca

SEQ ID NO: 3384648 - DNA, 25 bp, Homo sapien
gacccaccagggtgtagctgccctt

SEQ ID NO: 3384649 - DNA, 25 bp, Homo sapien
gcccatcaaatgtctccacgtggtg

SEQ ID NO: 3384650 - DNA, 25 bp, Homo sapien
gtccctctcagggccggcattgtac

SEQ ID NO: 3384651 - DNA, 25 bp, Homo sapien
cagatggatctcctgctcacccaca

SEQ ID NO: 3384652 - DNA, 25 bp, Homo sapien
ctcatgcctccatgggtgacctcct

SEQ ID NO: 3384653 - DNA, 25 bp, Homo sapien
gaagagccacactgcgggtcattgt

SEQ ID NO: 3384654 - DNA, 25 bp, Homo sapien
agggtgaagagccacactgcgggtc

SEQ ID NO: 3384655 - DNA, 25 bp, Homo sapien
agctggtcaccagatcatccttggg

SEQ ID NO: 3384656 - DNA, 25 bp, Homo sapien
gggtcagcattgttgttcccacaca

SEQ ID NO: 3384657 - DNA, 25 bp, Homo sapien
cagtgtgaaggctgactgatgccgc

SEQ ID NO: 3384658 - DNA, 25 bp, Homo sapien
ctgatgccgcacgatgacatagccg

SEQ ID NO: 3384659 - DNA, 25 bp, Homo sapien
ctgtaggcacggtgggcgaggcagg

SEQ ID NO: 3384660 - DNA, 25 bp, Homo sapien
actcaaccacgtcgtcagtcagctt

SEQ ID NO: 3384661 - DNA, 25 bp, Homo sapien
tgccagctgtgcacaaactcaacca

SEQ ID NO: 3384662 - DNA, 25 bp, Homo sapien
tgcacaaactcaaccacgtcgtcag

SEQ ID NO: 3384663 - DNA, 25 bp, Homo sapien
ccagtggctttcgaagagttggata

SEQ ID NO: 3384664 - DNA, 25 bp, Homo sapien
cacagccagtggctttcgaagagtt

SEQ ID NO: 3384665 - DNA, 25 bp, Homo sapien
gttggatagcaagtcaggctctagg

SEQ ID NO: 3384666 - DNA, 25 bp, Homo sapien
ctttcgaagagttggatagcaagtc

SEQ ID NO: 3384667 - DNA, 25 bp, Homo sapien
gggggccgcagtagagcctcacact

SEQ ID NO: 3384668 - DNA, 25 bp, Homo sapien
gcagagggctgacgtaggcgtggca

SEQ ID NO: 3384669 - DNA, 25 bp, Homo sapien
tggcagagatcactggtacaactgg

SEQ ID NO: 3384670 - DNA, 25 bp, Homo sapien
acgtaggcgtggcaggcgtcaaagg

SEQ ID NO: 3384671 - DNA, 25 bp, Homo sapien
gggtcctccagccttgcaagggccg

SEQ ID NO: 3384672 - DNA, 25 bp, Homo sapien
tgcattgccggagctgggtcctcca

SEQ ID NO: 3384673 - DNA, 25 bp, Homo sapien
ggcatactccgccagtgcccggcac

SEQ ID NO: 3384674 - DNA, 25 bp, Homo sapien
ggagctgggtcctccagccttgcaa

SEQ ID NO: 3384675 - DNA, 25 bp, Homo sapien
atggtctctcagctactggccccag

SEQ ID NO: 3384676 - DNA, 25 bp, Homo sapien
aaggagggatccatggtctctcagc

SEQ ID NO: 3384677 - DNA, 25 bp, Homo sapien
gatccatggtctctcagctactggc

SEQ ID NO: 3384678 - DNA, 25 bp, Homo sapien
gagggatccatggtctctcagctac

SEQ ID NO: 3384679 - DNA, 25 bp, Homo sapien
tcactgtccacacaggatgcccggg

SEQ ID NO: 3384680 - DNA, 25 bp, Homo sapien
aaggccttctccttgcagtgcacag

SEQ ID NO: 3384681 - DNA, 25 bp, Homo sapien
tagcagccgtccacacaggcgatct

SEQ ID NO: 3384682 - DNA, 25 bp, Homo sapien
gcaggcgatgcactcattgtaggta

SEQ ID NO: 3384683 - DNA, 25 bp, Homo sapien
ccaggtgggtacagagtcccgtgaa

SEQ ID NO: 3384684 - DNA, 25 bp, Homo sapien
tgggtacagagtcccgtgaaactca

SEQ ID NO: 3384685 - DNA, 25 bp, Homo sapien
acagagtcccgtgaaactcacaggg

SEQ ID NO: 3384686 - DNA, 25 bp, Homo sapien
gcagcccccatcctcgaagatgagc

SEQ ID NO: 3384687 - DNA, 25 bp, Homo sapien
cctgcttcccggcagcagacacaga

SEQ ID NO: 3384688 - DNA, 25 bp, Homo sapien
ctgcttcccggcagcagacacagac

SEQ ID NO: 3384689 - DNA, 25 bp, Homo sapien
ctcccacttgcctgaggtgcatgtg

SEQ ID NO: 3384690 - DNA, 25 bp, Homo sapien
gcactcccacttgcctgaggtgcat

SEQ ID NO: 3384691 - DNA, 25 bp, Homo sapien
ctgggcagacagctgtgctgcactc

SEQ ID NO: 3384692 - DNA, 25 bp, Homo sapien
cagacagctgtgctgcactcccact

SEQ ID NO: 3384693 - DNA, 25 bp, Homo sapien
tgaaggtgcccgaagagcggctctt

SEQ ID NO: 3384694 - DNA, 25 bp, Homo sapien
gggcattctgcaatgtcacggtgaa

SEQ ID NO: 3384695 - DNA, 25 bp, Homo sapien
gcggccatcaaaggttgtgaagtga

SEQ ID NO: 3384696 - DNA, 25 bp, Homo sapien
agtgaatgtcaccagtcactgagca

SEQ ID NO: 3384697 - DNA, 25 bp, Homo sapien
atggcgggatgatcttgtactggtc

SEQ ID NO: 3384698 - DNA, 25 bp, Homo sapien
cgagggtcctggtgcagaatcactg

SEQ ID NO: 3384699 - DNA, 25 bp, Homo sapien
gcctccgagggtcctggtgcagaat

SEQ ID NO: 3384700 - DNA, 25 bp, Homo sapien
catctgtgtatggcgggatgatctt

SEQ ID NO: 3384701 - DNA, 25 bp, Homo sapien
tggtccacttgcaggtacagtcgga

SEQ ID NO: 3384702 - DNA, 25 bp, Homo sapien
tcatcctgcgtgttgccattgaagg

SEQ ID NO: 3384703 - DNA, 25 bp, Homo sapien
ttcacggtcgtagagcacccgcacg

SEQ ID NO: 3384704 - DNA, 25 bp, Homo sapien
gaggacagcctacggatctcaaagg

SEQ ID NO: 3384705 - DNA, 25 bp, Homo sapien
ccctcttcttcgggttccgtggcag

SEQ ID NO: 3384706 - DNA, 25 bp, Homo sapien
cttcttcgggttccgtggcagggct

SEQ ID NO: 3384707 - DNA, 25 bp, Homo sapien
ctcttcttcgggttccgtggcaggg

SEQ ID NO: 3384708 - DNA, 25 bp, Homo sapien
tcttcgggttccgtggcagggctac

SEQ ID NO: 3384709 - DNA, 25 bp, Homo sapien
gagacatttaggcagtgcctctaga

SEQ ID NO: 3384710 - DNA, 25 bp, Homo sapien
gggagagacatttaggcagtgcctc

SEQ ID NO: 3384711 - DNA, 25 bp, Homo sapien
gagagacatttaggcagtgcctcta

SEQ ID NO: 3384712 - DNA, 25 bp, Homo sapien
ggagagacatttaggcagtgcctct

SEQ ID NO: 3384713 - DNA, 25 bp, Homo sapien
taagttcctaacctacgtctgtgcc

SEQ ID NO: 3384714 - DNA, 25 bp, Homo sapien
tgtgtggaactccaaggactggcca

SEQ ID NO: 3384715 - DNA, 25 bp, Homo sapien
ggctcacggcgtgcaaactcaagag

SEQ ID NO: 3384716 - DNA, 25 bp, Homo sapien
caagtaccaggtaggaaaggcacaa

SEQ ID NO: 3384717 - DNA, 25 bp, Homo sapien
tgctctcaggtacacccactggaga

SEQ ID NO: 3384718 - DNA, 25 bp, Homo sapien
ccaaaaagttgtggggtgctctcag

SEQ ID NO: 3384719 - DNA, 25 bp, Homo sapien
cggcttgcaggtgcacatcgcaggg

SEQ ID NO: 3384720 - DNA, 25 bp, Homo sapien
caggaattgccaaaaagttgtgggg

SEQ ID NO: 3384721 - DNA, 25 bp, Homo sapien
agggcgcaaacatctcccccgtgag

SEQ ID NO: 3384722 - DNA, 25 bp, Homo sapien
gcgcggaaatcaacggggagcccat

SEQ ID NO: 3384723 - DNA, 25 bp, Homo sapien
gcacaggtgggcgtagtgggccagt

SEQ ID NO: 3384724 - DNA, 25 bp, Homo sapien
cctgcggcactgctcaaagtagggc

SEQ ID NO: 3384725 - DNA, 25 bp, Homo sapien
acactcgtctctgctcaggtcatcg

SEQ ID NO: 3384726 - DNA, 25 bp, Homo sapien
tggcaggtacgtccacacggggcca

SEQ ID NO: 3384727 - DNA, 25 bp, Homo sapien
ccagataggtgtccggtgggcaggc

SEQ ID NO: 3384728 - DNA, 25 bp, Homo sapien
cacgcaggggctatactccttggag

SEQ ID NO: 3384729 - DNA, 25 bp, Homo sapien
tgtctccggggggatagtccactcc

SEQ ID NO: 3384730 - DNA, 25 bp, Homo sapien
ctccggggggatagtccactccctg

SEQ ID NO: 3384731 - DNA, 25 bp, Homo sapien
gtcactgtctccggggggatagtcc

SEQ ID NO: 3384732 - DNA, 25 bp, Homo sapien
cactgtctccggggggatagtccac

SEQ ID NO: 3384733 - DNA, 25 bp, Homo sapien
gggctctgctatcacagctcatgac

SEQ ID NO: 3384734 - DNA, 25 bp, Homo sapien
ctggggctctgctatcacagctcat

SEQ ID NO: 3384735 - DNA, 25 bp, Homo sapien
tctgctatcacagctcatgactcca

SEQ ID NO: 3384736 - DNA, 25 bp, Homo sapien
gctatcacagctcatgactccatct

SEQ ID NO: 3384737 - DNA, 25 bp, Homo sapien
aggccctggggcctcagtatgggct

SEQ ID NO: 3384738 - DNA, 25 bp, Homo sapien
cctggggcctcagtatgggctcctg

SEQ ID NO: 3384739 - DNA, 25 bp, Homo sapien
gcctcagtatgggctcctgggctac

SEQ ID NO: 3384740 - DNA, 25 bp, Homo sapien
cctcagtatgggctcctgggctaca

SEQ ID NO: 3384741 - DNA, 25 bp, Homo sapien
tgtgcaggtcgctgcagttcacgaa

SEQ ID NO: 3384742 - DNA, 25 bp, Homo sapien
agttgctgctcacacgtcctctccc

SEQ ID NO: 3384743 - DNA, 25 bp, Homo sapien
cacgggctgacacgctcaggttcag

SEQ ID NO: 3384744 - DNA, 25 bp, Homo sapien
gtcgctgcagttcacgaagacctgg

SEQ ID NO: 3384745 - DNA, 25 bp, Homo sapien
cttcttcagccccaagccttgtctc

SEQ ID NO: 3384746 - DNA, 25 bp, Homo sapien
tcagccccaagccttgtctccagcc

SEQ ID NO: 3384747 - DNA, 25 bp, Homo sapien
cttctctgttgcccaccatccatta

SEQ ID NO: 3384748 - DNA, 25 bp, Homo sapien
ccatccattactccctccttgctct

SEQ ID NO: 3384749 - DNA, 25 bp, Homo sapien
acatgcatccccgtgtctgagcaga

SEQ ID NO: 3384750 - DNA, 25 bp, Homo sapien
ggaaacatgcatccccgtgtctgag

SEQ ID NO: 3384751 - DNA, 25 bp, Homo sapien
caagtgcaggggcactcctctggca

SEQ ID NO: 3384752 - DNA, 25 bp, Homo sapien
ctctggcaggaaacatgcatccccg

SEQ ID NO: 3384753 - DNA, 25 bp, Homo sapien
gccggtccccataggcagtgcaggt

SEQ ID NO: 3384754 - DNA, 25 bp, Homo sapien
agtcaaacgggagcccatcaaacgt

SEQ ID NO: 3384755 - DNA, 25 bp, Homo sapien
tcaaacgtgcggtaatgccggtccc

SEQ ID NO: 3384756 - DNA, 25 bp, Homo sapien
tttgcatgcccccacgaagtcaaac

SEQ ID NO: 3384757 - DNA, 25 bp, Homo sapien
tgggcagaaacatccgggaactcac

SEQ ID NO: 3384758 - DNA, 25 bp, Homo sapien
caattctgcatcaaactggagtcca

SEQ ID NO: 3384759 - DNA, 25 bp, Homo sapien
ttagatccccgatcacccaattctg

SEQ ID NO: 3384760 - DNA, 25 bp, Homo sapien
agagcaccagagtgccctgacagct

SEQ ID NO: 3384761 - DNA, 25 bp, Homo sapien
aggatttccggagtcatcatcaaag

SEQ ID NO: 3384762 - DNA, 25 bp, Homo sapien
gagttcccaacgttgatggaaataa

SEQ ID NO: 3384763 - DNA, 25 bp, Homo sapien
tgagtgagttcccaacgttgatgga

SEQ ID NO: 3384764 - DNA, 25 bp, Homo sapien
tctacaatcacagagaagctgacat

SEQ ID NO: 3384765 - DNA, 25 bp, Homo sapien
ctgtaaattgtctacacaaccttca

SEQ ID NO: 3384766 - DNA, 25 bp, Homo sapien
tgtaaattgtctacacaaccttcac

SEQ ID NO: 3384767 - DNA, 25 bp, Homo sapien
taaattgtctacacaaccttcacag

SEQ ID NO: 3384768 - DNA, 25 bp, Homo sapien
aattgtctacacaaccttcacaggc

SEQ ID NO: 3384769 - DNA, 25 bp, Homo sapien
tctggtcccacaagagggtgatgtg

SEQ ID NO: 3384770 - DNA, 25 bp, Homo sapien
cccagcctggacgtgcactgtggtt

SEQ ID NO: 3384771 - DNA, 25 bp, Homo sapien
tgtgaaaaatcccactcgccatgtg

SEQ ID NO: 3384772 - DNA, 25 bp, Homo sapien
tcccacaagagggtgatgtgctcct

SEQ ID NO: 3384773 - DNA, 25 bp, Homo sapien
tttaagtcaaagttcccacagaggc

SEQ ID NO: 3384774 - DNA, 25 bp, Homo sapien
tccggggtcctcatctcattgatgg

SEQ ID NO: 3384775 - DNA, 25 bp, Homo sapien
tcaactgcagcccaactgctgccaa

SEQ ID NO: 3384776 - DNA, 25 bp, Homo sapien
tgctgccaaactcctgggggttagt

SEQ ID NO: 3384777 - DNA, 25 bp, Homo sapien
tcttggcaaatggttctcggagagg

SEQ ID NO: 3384778 - DNA, 25 bp, Homo sapien
gaggattcaggacacacatatcccg

SEQ ID NO: 3384779 - DNA, 25 bp, Homo sapien
catatcccgaggatcgagggtgtct

SEQ ID NO: 3384780 - DNA, 25 bp, Homo sapien
atggttctcggagaggattcaggac

SEQ ID NO: 3384781 - DNA, 25 bp, Homo sapien
ggggggttcgccagtcaacagccac

SEQ ID NO: 3384782 - DNA, 25 bp, Homo sapien
gtttgagtaaaaccaagtgacatca

SEQ ID NO: 3384783 - DNA, 25 bp, Homo sapien
aacactggtgggcataagcggagac

SEQ ID NO: 3384784 - DNA, 25 bp, Homo sapien
gtgtctgtcaggcagtttgagtaaa

SEQ ID NO: 3384785 - DNA, 25 bp, Homo sapien
tcaggtgattgtctgggacactcac

SEQ ID NO: 3384786 - DNA, 25 bp, Homo sapien
ccctcaggtgattgtctgggacact

SEQ ID NO: 3384787 - DNA, 25 bp, Homo sapien
ctgtcccctcaggtgattgtctggg

SEQ ID NO: 3384788 - DNA, 25 bp, Homo sapien
tctgtcccctcaggtgattgtctgg

SEQ ID NO: 3384789 - DNA, 25 bp, Homo sapien
tcctttggcgtcttgcctgcaggcc

SEQ ID NO: 3384790 - DNA, 25 bp, Homo sapien
cctgcaggcctcagggctctggaca

SEQ ID NO: 3384791 - DNA, 25 bp, Homo sapien
tcttcctttggcgtcttgcctgcag

SEQ ID NO: 3384792 - DNA, 25 bp, Homo sapien
cttcttcctttggcgtcttgcctgc

SEQ ID NO: 3384793 - DNA, 25 bp, Homo sapien
ctttgttaaagaagtcacagtcata

SEQ ID NO: 3384794 - DNA, 25 bp, Homo sapien
ttgttaaagaagtcacagtcatacg

SEQ ID NO: 3384795 - DNA, 25 bp, Homo sapien
tttgttaaagaagtcacagtcatac

SEQ ID NO: 3384796 - DNA, 25 bp, Homo sapien
cacccatagtcagaaagggcagttt

SEQ ID NO: 3384797 - DNA, 25 bp, Homo sapien
tgttctgtgggcctgatgagctaga

SEQ ID NO: 3384798 - DNA, 25 bp, Homo sapien
aggagctggcacataagtgagaatg

SEQ ID NO: 3384799 - DNA, 25 bp, Homo sapien
tggcaggccacatgttttgttccac

SEQ ID NO: 3384800 - DNA, 25 bp, Homo sapien
gattggaagtcaaaggcgaacagca

SEQ ID NO: 3384801 - DNA, 25 bp, Homo sapien
gcaggcaactgaggacaaaaagtct

SEQ ID NO: 3384802 - DNA, 25 bp, Homo sapien
caagccaaaatctgataatgcaggc

SEQ ID NO: 3384803 - DNA, 25 bp, Homo sapien
cacagtcaagccaaaatctgataat

SEQ ID NO: 3384804 - DNA, 25 bp, Homo sapien
gttacagctcttcggatgaggatct

SEQ ID NO: 3384805 - DNA, 25 bp, Homo sapien
cagctcttcggatgaggatctggat

SEQ ID NO: 3384806 - DNA, 25 bp, Homo sapien
cagttacagctcttcggatgaggat

SEQ ID NO: 3384807 - DNA, 25 bp, Homo sapien
tacagctcttcggatgaggatctgg

SEQ ID NO: 3384808 - DNA, 25 bp, Homo sapien
gggagggcaagctaccaaggaggaa

SEQ ID NO: 3384809 - DNA, 25 bp, Homo sapien
cttgatggtgtccttcatcccagat

SEQ ID NO: 3384810 - DNA, 25 bp, Homo sapien
gggtgggagggcaagctaccaagga

SEQ ID NO: 3384811 - DNA, 25 bp, Homo sapien
tgggagggcaagctaccaaggagga

SEQ ID NO: 3384812 - DNA, 25 bp, Homo sapien
acaatgtctgctggcgccacatcct

SEQ ID NO: 3384813 - DNA, 25 bp, Homo sapien
gctgccaagctggatagctgatagg

SEQ ID NO: 3384814 - DNA, 25 bp, Homo sapien
gagcaccaccggctgccaagctgga

SEQ ID NO: 3384815 - DNA, 25 bp, Homo sapien
actaggactatgtcatcgcccaccg

SEQ ID NO: 3384816 - DNA, 25 bp, Homo sapien
tgccctggcggttaggggagcagat

SEQ ID NO: 3384817 - DNA, 25 bp, Homo sapien
gctgccctggcggttaggggagcag

SEQ ID NO: 3384818 - DNA, 25 bp, Homo sapien
ttggctgccctggcggttaggggag

SEQ ID NO: 3384819 - DNA, 25 bp, Homo sapien
ccctggcggttaggggagcagatgg

SEQ ID NO: 3384820 - DNA, 25 bp, Homo sapien
acacctctgtgtgttcgtacagccg

SEQ ID NO: 3384821 - DNA, 25 bp, Homo sapien
acttagccagctccagagacccgtt

SEQ ID NO: 3384822 - DNA, 25 bp, Homo sapien
acccgttggctgtgacgtgaaggaa

SEQ ID NO: 3384823 - DNA, 25 bp, Homo sapien
cgcgcccgacacatagaggaaggag

SEQ ID NO: 3384824 - DNA, 25 bp, Homo sapien
tctctgttcccagagggcccctgaa

SEQ ID NO: 3384825 - DNA, 25 bp, Homo sapien
ggaggtgttattcccccgactcagc

SEQ ID NO: 3384826 - DNA, 25 bp, Homo sapien
agcttgcaagggaggtgttattccc

SEQ ID NO: 3384827 - DNA, 25 bp, Homo sapien
ctagccccagagagcttgcaaggga

SEQ ID NO: 3384828 - DNA, 25 bp, Homo sapien
ttgtctctagcagggctattgcaga

SEQ ID NO: 3384829 - DNA, 25 bp, Homo sapien
ctccatggaggcaagaggctctcct

SEQ ID NO: 3384830 - DNA, 25 bp, Homo sapien
ctctagcccaaagcgttcctgggca

SEQ ID NO: 3384831 - DNA, 25 bp, Homo sapien
tccttgccttgtctctagcagggct

SEQ ID NO: 3384832 - DNA, 25 bp, Homo sapien
tagaaagtgagatggggcagcaact

SEQ ID NO: 3384833 - DNA, 25 bp, Homo sapien
ctagaaagtgagatggggcagcaac

SEQ ID NO: 3384834 - DNA, 25 bp, Homo sapien
ccactcgcagatggggtaggcagcc

SEQ ID NO: 3384835 - DNA, 25 bp, Homo sapien
ctgcccgtgggtcccggcaggtttg

SEQ ID NO: 3384836 - DNA, 25 bp, Homo sapien
ggctggcacaggcatcgtagcgcca

SEQ ID NO: 3384837 - DNA, 25 bp, Homo sapien
gcatcgtagcgccactcgcagatgg

SEQ ID NO: 3384838 - DNA, 25 bp, Homo sapien
ctctgtgtgacttcatccaggacct

SEQ ID NO: 3384839 - DNA, 25 bp, Homo sapien
caagtagacacatctctgtgtgact

SEQ ID NO: 3384840 - DNA, 25 bp, Homo sapien
agtcctccaagtagacacatctctg

SEQ ID NO: 3384841 - DNA, 25 bp, Homo sapien
tgtgtgacttcatccaggacctggg

SEQ ID NO: 3384842 - DNA, 25 bp, Homo sapien
aggatgagaagtctgggccacttac

SEQ ID NO: 3384843 - DNA, 25 bp, Homo sapien
agggagggtctcattgccaagggcc

SEQ ID NO: 3384844 - DNA, 25 bp, Homo sapien
gggtctcattgccaagggcctctgt

SEQ ID NO: 3384845 - DNA, 25 bp, Homo sapien
attgccaagggcctctgtgggaacc

SEQ ID NO: 3384846 - DNA, 25 bp, Homo sapien
gagggtctcattgccaagggcctct

SEQ ID NO: 3384847 - DNA, 25 bp, Homo sapien
tcctgtgacagctgtggctcctcat

SEQ ID NO: 3384848 - DNA, 25 bp, Homo sapien
tgtgacagctgtggctcctcatcac

SEQ ID NO: 3384849 - DNA, 25 bp, Homo sapien
ggggctttcctgtgacagctgtggc

SEQ ID NO: 3384850 - DNA, 25 bp, Homo sapien
gggctttcctgtgacagctgtggct

SEQ ID NO: 3384851 - DNA, 25 bp, Homo sapien
gggtgagggctggcctgtgggtggg

SEQ ID NO: 3384852 - DNA, 25 bp, Homo sapien
ctgtggtgagtggggcagctggggt

SEQ ID NO: 3384853 - DNA, 25 bp, Homo sapien
cagctggggtgagggctggcctgtg

SEQ ID NO: 3384854 - DNA, 25 bp, Homo sapien
ctggggtgagggctggcctgtgggt

SEQ ID NO: 3384855 - DNA, 25 bp, Homo sapien
tgtctgcagtgcaacagggagggat

SEQ ID NO: 3384856 - DNA, 25 bp, Homo sapien
ccggcggggagttgagatgcagtga

SEQ ID NO: 3384857 - DNA, 25 bp, Homo sapien
cagtgcaacagggagggatgaggac

SEQ ID NO: 3384858 - DNA, 25 bp, Homo sapien
gactctggtgtatgggggatggcca

SEQ ID NO: 3384859 - DNA, 25 bp, Homo sapien
gggcgaccgggaggagactgtgatg

SEQ ID NO: 3384860 - DNA, 25 bp, Homo sapien
ggcgaccgggaggagactgtgatgt

SEQ ID NO: 3384861 - DNA, 25 bp, Homo sapien
tgtcacagccttggtcatgagcggg

SEQ ID NO: 3384862 - DNA, 25 bp, Homo sapien
acagccttggtcatgagcgggaagc

SEQ ID NO: 3384863 - DNA, 25 bp, Homo sapien
gcacagccttgtgggatcccgagga

SEQ ID NO: 3384864 - DNA, 25 bp, Homo sapien
agccacaggtctggaggagggactt

SEQ ID NO: 3384865 - DNA, 25 bp, Homo sapien
tcctaacaggcaaggagccatggcc

SEQ ID NO: 3384866 - DNA, 25 bp, Homo sapien
ggtgtcgtcctaacaggcaaggagc

SEQ ID NO: 3384867 - DNA, 25 bp, Homo sapien
catggtggtatgctgggctgggcgg

SEQ ID NO: 3384868 - DNA, 25 bp, Homo sapien
gacaggaacctgttctgctgctgtt

SEQ ID NO: 3384869 - DNA, 25 bp, Homo sapien
gatagcactatctccaagctcctgg

SEQ ID NO: 3384870 - DNA, 25 bp, Homo sapien
gctgggacttgaagcactctgggcc

SEQ ID NO: 3384871 - DNA, 25 bp, Homo sapien
gctggtgtcgggaggcaggccagag

SEQ ID NO: 3384872 - DNA, 25 bp, Homo sapien
agaggagctgggagggacgagttga

SEQ ID NO: 3384873 - DNA, 25 bp, Homo sapien
tgcccaccttggccaggggcaggct

SEQ ID NO: 3384874 - DNA, 25 bp, Homo sapien
caggctggtgtcgggaggcaggcca

SEQ ID NO: 3384875 - DNA, 25 bp, Homo sapien
tactgggctaagtgtctgagcaggc

SEQ ID NO: 3384876 - DNA, 25 bp, Homo sapien
cgtgggacaacagataccatggagg

SEQ ID NO: 3384877 - DNA, 25 bp, Homo sapien
cacttgcttggataggatggccacc

SEQ ID NO: 3384878 - DNA, 25 bp, Homo sapien
cctgtggtgctctttcgtgggacaa

SEQ ID NO: 3384879 - DNA, 25 bp, Homo sapien
aacagaaccagcatgctgtcttggg

SEQ ID NO: 3384880 - DNA, 25 bp, Homo sapien
acaggtggtggatgtattggcctca

SEQ ID NO: 3384881 - DNA, 25 bp, Homo sapien
tcgggctcagccaccaagggcgtga

SEQ ID NO: 3384882 - DNA, 25 bp, Homo sapien
tgagacacggctcagggcataggat

SEQ ID NO: 3384883 - DNA, 25 bp, Homo sapien
gcgactaaaactccatctagcaggg

SEQ ID NO: 3384884 - DNA, 25 bp, Homo sapien
ggcggaaccctgctatggcatcagg

SEQ ID NO: 3384885 - DNA, 25 bp, Homo sapien
ggcaggtatgaggatagcgactaaa

SEQ ID NO: 3384886 - DNA, 25 bp, Homo sapien
gtcacatacgggtggccagaaccct

SEQ ID NO: 3384887 - DNA, 25 bp, Homo sapien
ggcaccagatccttcccacatgtag

SEQ ID NO: 3384888 - DNA, 25 bp, Homo sapien
accagatccttcccacatgtaggtc

SEQ ID NO: 3384889 - DNA, 25 bp, Homo sapien
gctgtgatggcaccagatccttccc

SEQ ID NO: 3384890 - DNA, 25 bp, Homo sapien
atggcaccagatccttcccacatgt

SEQ ID NO: 3384891 - DNA, 25 bp, Homo sapien
tccaggcagatgtggcggacgcagt

SEQ ID NO: 3384892 - DNA, 25 bp, Homo sapien
cggacgcagtcctgctcggcgattg

SEQ ID NO: 3384893 - DNA, 25 bp, Homo sapien
gacagtgctgggactgattcacgcg

SEQ ID NO: 3384894 - DNA, 25 bp, Homo sapien
tgattcacgcgaatcagctggccct

SEQ ID NO: 3384895 - DNA, 25 bp, Homo sapien
tcaggtcagggaagattgagcaccg

SEQ ID NO: 3384896 - DNA, 25 bp, Homo sapien
ggcacttttgcagtccagtacatgg

SEQ ID NO: 3384897 - DNA, 25 bp, Homo sapien
catcgaaggtcacgaagctcaggtc

SEQ ID NO: 3384898 - DNA, 25 bp, Homo sapien
gatgtagatggcctccttgaacaga

SEQ ID NO: 3384899 - DNA, 25 bp, Homo sapien
ctttcggttgaagcgatcaatagtg

SEQ ID NO: 3384900 - DNA, 25 bp, Homo sapien
cgatcaatagtgacctgatgggcca

SEQ ID NO: 3384901 - DNA, 25 bp, Homo sapien
ggccaagtgagtcatgttcaacatc

SEQ ID NO: 3384902 - DNA, 25 bp, Homo sapien
gttcaacatcaccagacagaacggg

SEQ ID NO: 3384903 - DNA, 25 bp, Homo sapien
gaggctggctgtttgatgcactcac

SEQ ID NO: 3384904 - DNA, 25 bp, Homo sapien
gaggcaagctgcatcttaatgccca

SEQ ID NO: 3384905 - DNA, 25 bp, Homo sapien
aataaacacaaatcctgagcccttc

SEQ ID NO: 3384906 - DNA, 25 bp, Homo sapien
tctgtgctggccattaagtatctgt

SEQ ID NO: 3384907 - DNA, 25 bp, Homo sapien
gatactatgcctgatttacctttga

SEQ ID NO: 3384908 - DNA, 25 bp, Homo sapien
tgaatccatacctgctcaccggtgg

SEQ ID NO: 3384909 - DNA, 25 bp, Homo sapien
ggttttgctggcctccacgatcatg

SEQ ID NO: 3384910 - DNA, 25 bp, Homo sapien
ggcctccacgatcatgagtcctgag

SEQ ID NO: 3384911 - DNA, 25 bp, Homo sapien
caattctgaatccatacctgctcac

SEQ ID NO: 3384912 - DNA, 25 bp, Homo sapien
ccaacagccacgatcatcactacca

SEQ ID NO: 3384913 - DNA, 25 bp, Homo sapien
aacagccacgatcatcactaccact

SEQ ID NO: 3384914 - DNA, 25 bp, Homo sapien
cagccacgatcatcactaccactcc

SEQ ID NO: 3384915 - DNA, 25 bp, Homo sapien
aatcccaacagccacgatcatcact

SEQ ID NO: 3384916 - DNA, 25 bp, Homo sapien
acaccatgcgaaggcagggcgagca

SEQ ID NO: 3384917 - DNA, 25 bp, Homo sapien
tgtctgggcggaagcgggtctggcc

SEQ ID NO: 3384918 - DNA, 25 bp, Homo sapien
actgaaggtgcggttggacaccatg

SEQ ID NO: 3384919 - DNA, 25 bp, Homo sapien
gcagtcagttgtggcgcagctgtct

SEQ ID NO: 3384920 - DNA, 25 bp, Homo sapien
cagctcacagaatgactccggaggc

SEQ ID NO: 3384921 - DNA, 25 bp, Homo sapien
ttggtgtcccggatccacagctcac

SEQ ID NO: 3384922 - DNA, 25 bp, Homo sapien
gctcacagaatgactccggaggcac

SEQ ID NO: 3384923 - DNA, 25 bp, Homo sapien
cttggtgtcccggatccacagctca

SEQ ID NO: 3384924 - DNA, 25 bp, Homo sapien
gccgccactcgatgcacacatgaaa

SEQ ID NO: 3384925 - DNA, 25 bp, Homo sapien
gcagtagtcagagcgccgccactcg

SEQ ID NO: 3384926 - DNA, 25 bp, Homo sapien
ggcagtagtcagagcgccgccactc

SEQ ID NO: 3384927 - DNA, 25 bp, Homo sapien
cactcgatgcacacatgaaatttgt

SEQ ID NO: 3384928 - DNA, 25 bp, Homo sapien
tcacaggctgtcacacatgcctggt

SEQ ID NO: 3384929 - DNA, 25 bp, Homo sapien
cttggcctccgggatgcagagtgca

SEQ ID NO: 3384930 - DNA, 25 bp, Homo sapien
gcctggtatgtggagtcgctggagc

SEQ ID NO: 3384931 - DNA, 25 bp, Homo sapien
agagtgcagagtggcgccggtgtaa

SEQ ID NO: 3384932 - DNA, 25 bp, Homo sapien
acctccccgaatcgcaggcagctct

SEQ ID NO: 3384933 - DNA, 25 bp, Homo sapien
cagatccaccgggacaatggtgtct

SEQ ID NO: 3384934 - DNA, 25 bp, Homo sapien
cagcccagatccaccgggacaatgg

SEQ ID NO: 3384935 - DNA, 25 bp, Homo sapien
atccaccgggacaatggtgtctggg

SEQ ID NO: 3384936 - DNA, 25 bp, Homo sapien
tgtgggggcgagaccctcacacaga

SEQ ID NO: 3384937 - DNA, 25 bp, Homo sapien
ctgggcggcatgtgggggcgagacc

SEQ ID NO: 3384938 - DNA, 25 bp, Homo sapien
gcatgtgggggcgagaccctcacac

SEQ ID NO: 3384939 - DNA, 25 bp, Homo sapien
tgggcggcatgtgggggcgagaccc

SEQ ID NO: 3384940 - DNA, 25 bp, Homo sapien
gcagcaggagtcctcctggaagtgg

SEQ ID NO: 3384941 - DNA, 25 bp, Homo sapien
ctggggcagcaggagtcctcctgga

SEQ ID NO: 3384942 - DNA, 25 bp, Homo sapien
tggaagtgggtgaggaggcggtggc

SEQ ID NO: 3384943 - DNA, 25 bp, Homo sapien
ctggaagtgggtgaggaggcggtgg

SEQ ID NO: 3384944 - DNA, 25 bp, Homo sapien
tctgcctcacagagatctgggtcac

SEQ ID NO: 3384945 - DNA, 25 bp, Homo sapien
tgcctcacagagatctgggtcacac

SEQ ID NO: 3384946 - DNA, 25 bp, Homo sapien
gcctcacagagatctgggtcacact

SEQ ID NO: 3384947 - DNA, 25 bp, Homo sapien
cggcccgtgatcaggatctggtcct

SEQ ID NO: 3384948 - DNA, 25 bp, Homo sapien
tgaggccggcggactgtgatcaggc

SEQ ID NO: 3384949 - DNA, 25 bp, Homo sapien
tttcctcgtgcttagtaatctaggg

SEQ ID NO: 3384950 - DNA, 25 bp, Homo sapien
gtttcctggacagtgagcttgtcct

SEQ ID NO: 3384951 - DNA, 25 bp, Homo sapien
agaacaagcaccagtttcctcgtgc

SEQ ID NO: 3384952 - DNA, 25 bp, Homo sapien
gtgatccgttctggaatcagaatct

SEQ ID NO: 3384953 - DNA, 25 bp, Homo sapien
agggcagcagagttccgtggtattc

SEQ ID NO: 3384954 - DNA, 25 bp, Homo sapien
ggatggagtctggacagtcaccaca

SEQ ID NO: 3384955 - DNA, 25 bp, Homo sapien
ctgtgcacagtgagcgcctcccctt

SEQ ID NO: 3384956 - DNA, 25 bp, Homo sapien
ccttcttgacattcggggatggagt

SEQ ID NO: 3384957 - DNA, 25 bp, Homo sapien
gggcagcagcggtcggggctccaca

SEQ ID NO: 3384958 - DNA, 25 bp, Homo sapien
tggggacagcggaagttctcacaca

SEQ ID NO: 3384959 - DNA, 25 bp, Homo sapien
cacaggatttgtaggggcagcagcg

SEQ ID NO: 3384960 - DNA, 25 bp, Homo sapien
tgcacttggggacagcggaagttct

SEQ ID NO: 3384961 - DNA, 25 bp, Homo sapien
ctctttggaatgggaaacttgcttt

SEQ ID NO: 3384962 - DNA, 25 bp, Homo sapien
cctctttggaatgggaaacttgctt

SEQ ID NO: 3384963 - DNA, 25 bp, Homo sapien
ctgctggcacaacccgtcttctgaa

SEQ ID NO: 3384964 - DNA, 25 bp, Homo sapien
caggccccacttcatcagggatgtc

SEQ ID NO: 3384965 - DNA, 25 bp, Homo sapien
ctcactgctggcacaacccgtcttc

SEQ ID NO: 3384966 - DNA, 25 bp, Homo sapien
gccccacttcatcagggatgtccag

SEQ ID NO: 3384967 - DNA, 25 bp, Homo sapien
accggggcaccgggattgtgtcaca

SEQ ID NO: 3384968 - DNA, 25 bp, Homo sapien
gggcaccgggattgtgtcacagtca

SEQ ID NO: 3384969 - DNA, 25 bp, Homo sapien
accgggattgtgtcacagtcacatt

SEQ ID NO: 3384970 - DNA, 25 bp, Homo sapien
gcaccgggattgtgtcacagtcaca

SEQ ID NO: 3384971 - DNA, 25 bp, Homo sapien
gggtggggcagaggcagtcagcacc

SEQ ID NO: 3384972 - DNA, 25 bp, Homo sapien
tgggtggggcagaggcagtcagcac

SEQ ID NO: 3384973 - DNA, 25 bp, Homo sapien
ctgggtggggcagaggcagtcagca

SEQ ID NO: 3384974 - DNA, 25 bp, Homo sapien
acactcgtacttggcgcagccacac

SEQ ID NO: 3384975 - DNA, 25 bp, Homo sapien
cacactcgtacttggcgcagccaca

SEQ ID NO: 3384976 - DNA, 25 bp, Homo sapien
actcgtacttggcgcagccacacac

SEQ ID NO: 3384977 - DNA, 25 bp, Homo sapien
cactcgtacttggcgcagccacaca

SEQ ID NO: 3384978 - DNA, 25 bp, Homo sapien
ggtcgagcacggtggtgcagcggga

SEQ ID NO: 3384979 - DNA, 25 bp, Homo sapien
tagaagttggtgagagggtcgagca

SEQ ID NO: 3384980 - DNA, 25 bp, Homo sapien
agctcgcggctcagacacaccgggg

SEQ ID NO: 3384981 - DNA, 25 bp, Homo sapien
cggaggtggtgttgatctggtagaa

SEQ ID NO: 3384982 - DNA, 25 bp, Homo sapien
agacaggacacgttcctgcaggagc

SEQ ID NO: 3384983 - DNA, 25 bp, Homo sapien
agcaggcagcgaggtcccgcgggtg

SEQ ID NO: 3384984 - DNA, 25 bp, Homo sapien
cccgcgggtgctcgtactcctggtt

SEQ ID NO: 3384985 - DNA, 25 bp, Homo sapien
gtgaagagacaggacacgttcctgc

SEQ ID NO: 3384986 - DNA, 25 bp, Homo sapien
gcaagccagagagggccctagtcct

SEQ ID NO: 3384987 - DNA, 25 bp, Homo sapien
ccctagtcctggtgtccccttctgg

SEQ ID NO: 3384988 - DNA, 25 bp, Homo sapien
agagagggccctagtcctggtgtcc

SEQ ID NO: 3384989 - DNA, 25 bp, Homo sapien
ctgcaagccagagagggccctagtc

SEQ ID NO: 3384990 - DNA, 25 bp, Homo sapien
ggagcctgtttgtacccagccctgg

SEQ ID NO: 3384991 - DNA, 25 bp, Homo sapien
tagggtctgggagcctgtttgtacc

SEQ ID NO: 3384992 - DNA, 25 bp, Homo sapien
tgcgcaaacccatagggtctgggag

SEQ ID NO: 3384993 - DNA, 25 bp, Homo sapien
ggacagcctgcgcaaacccataggg

SEQ ID NO: 3384994 - DNA, 25 bp, Homo sapien
ggcagcttatgggagagcggaccag

SEQ ID NO: 3384995 - DNA, 25 bp, Homo sapien
cagtctcattgagcggtgggcagct

SEQ ID NO: 3384996 - DNA, 25 bp, Homo sapien
gcgggcgcagtctgcgatccaggat

SEQ ID NO: 3384997 - DNA, 25 bp, Homo sapien
ttggcacactcagtctcattgagcg

SEQ ID NO: 3384998 - DNA, 25 bp, Homo sapien
catccttccaaggaaggtaccacgg

SEQ ID NO: 3384999 - DNA, 25 bp, Homo sapien
gcatccttccaaggaaggtaccacg

SEQ ID NO: 3385000 - DNA, 25 bp, Homo sapien
gcgacagtggacactaacccgtgga

SEQ ID NO: 3385001 - DNA, 25 bp, Homo sapien
acggggactgtcagggaccctggag

SEQ ID NO: 3385002 - DNA, 25 bp, Homo sapien
gaggcgggactaacggggactgtca

SEQ ID NO: 3385003 - DNA, 25 bp, Homo sapien
acagtggacactaacccgtggagga

SEQ ID NO: 3385004 - DNA, 25 bp, Homo sapien
ttgcggatggtcatgcggatggtca

SEQ ID NO: 3385005 - DNA, 25 bp, Homo sapien
tggtcaccttcttgcaggagcgccc

SEQ ID NO: 3385006 - DNA, 25 bp, Homo sapien
tggtcatgcggatggtcaccttctt

SEQ ID NO: 3385007 - DNA, 25 bp, Homo sapien
atggtcaccttcttgcaggagcgcc

SEQ ID NO: 3385008 - DNA, 25 bp, Homo sapien
gccccactgccttgtgggcaccacg

SEQ ID NO: 3385009 - DNA, 25 bp, Homo sapien
atcccattttttgctgccccactgc

SEQ ID NO: 3385010 - DNA, 25 bp, Homo sapien
ggcaggccagtgaggcagtctgtgg

SEQ ID NO: 3385011 - DNA, 25 bp, Homo sapien
ctggaacgggcaggccagtgaggca

SEQ ID NO: 3385012 - DNA, 25 bp, Homo sapien
tcccatcgcaggacactaggttcac

SEQ ID NO: 3385013 - DNA, 25 bp, Homo sapien
gcagcacttgcagaatcgggcatag

SEQ ID NO: 3385014 - DNA, 25 bp, Homo sapien
tgatgttgtagttgtagatgctggc

SEQ ID NO: 3385015 - DNA, 25 bp, Homo sapien
tggcggatgggcacctcccatcgca

SEQ ID NO: 3385016 - DNA, 25 bp, Homo sapien
caggcacagtcggtgggctcctgca

SEQ ID NO: 3385017 - DNA, 25 bp, Homo sapien
ggctcctgcactgtatagggcaccc

SEQ ID NO: 3385018 - DNA, 25 bp, Homo sapien
cctgcactgtatagggcacccaggt

SEQ ID NO: 3385019 - DNA, 25 bp, Homo sapien
gagctgcacagagcgccgctgcagg

SEQ ID NO: 3385020 - DNA, 25 bp, Homo sapien
ctggaaacagaaagtggggctggca

SEQ ID NO: 3385021 - DNA, 25 bp, Homo sapien
gaggtggtccagctagcccgggccc

SEQ ID NO: 3385022 - DNA, 25 bp, Homo sapien
gctggcagaggtggtccagctagcc

SEQ ID NO: 3385023 - DNA, 25 bp, Homo sapien
cagaggtggtccagctagcccgggc

SEQ ID NO: 3385024 - DNA, 25 bp, Homo sapien
taatacccccattcacattgggcca

SEQ ID NO: 3385025 - DNA, 25 bp, Homo sapien
cattccatgctcaacacgtgccaga

SEQ ID NO: 3385026 - DNA, 25 bp, Homo sapien
tcaacacgtgccagatttctaccac

SEQ ID NO: 3385027 - DNA, 25 bp, Homo sapien
catgctcaacacgtgccagatttct

SEQ ID NO: 3385028 - DNA, 25 bp, Homo sapien
ccatgtgcggaaaatggggagccca

SEQ ID NO: 3385029 - DNA, 25 bp, Homo sapien
ttccatctcaaaccagggacagagg

SEQ ID NO: 3385030 - DNA, 25 bp, Homo sapien
gtggcactttcccatgtgcggaaaa

SEQ ID NO: 3385031 - DNA, 25 bp, Homo sapien
ccatctcaaaccagggacagaggtg

SEQ ID NO: 3385032 - DNA, 25 bp, Homo sapien
gatcttggtgagacaacctgggccc

SEQ ID NO: 3385033 - DNA, 25 bp, Homo sapien
taaacagtcccatggagcacagaga

SEQ ID NO: 3385034 - DNA, 25 bp, Homo sapien
gacaaggatctcacaagtgctcagg

SEQ ID NO: 3385035 - DNA, 25 bp, Homo sapien
tagataagtagtgctgggccctcac

SEQ ID NO: 3385036 - DNA, 25 bp, Homo sapien
aaccagcagacacccaccaatggtt

SEQ ID NO: 3385037 - DNA, 25 bp, Homo sapien
ttccaaccagcagacacccaccaat

SEQ ID NO: 3385038 - DNA, 25 bp, Homo sapien
ccaaccagcagacacccaccaatgg

SEQ ID NO: 3385039 - DNA, 25 bp, Homo sapien
attccaaccagcagacacccaccaa

SEQ ID NO: 3385040 - DNA, 25 bp, Homo sapien
tatgcaacagctgatgaggagtggc

SEQ ID NO: 3385041 - DNA, 25 bp, Homo sapien
caacagctgatgaggagtggcctgt

SEQ ID NO: 3385042 - DNA, 25 bp, Homo sapien
ctctgtctatgcaacagctgatgag

SEQ ID NO: 3385043 - DNA, 25 bp, Homo sapien
atgaggagtggcctgttcaaaagct

SEQ ID NO: 3385044 - DNA, 25 bp, Homo sapien
tagatcccgaagatcagctccaagg

SEQ ID NO: 3385045 - DNA, 25 bp, Homo sapien
cagctccaaggatccgtaaatggtg

SEQ ID NO: 3385046 - DNA, 25 bp, Homo sapien
aatctaggccctttactagatcccg

SEQ ID NO: 3385047 - DNA, 25 bp, Homo sapien
aaatggtgatctggttcagtggaac

SEQ ID NO: 3385048 - DNA, 25 bp, Homo sapien
cagggcttgggcttagggcacctct

SEQ ID NO: 3385049 - DNA, 25 bp, Homo sapien
cactcagcagctgtcgtggaggcgt

SEQ ID NO: 3385050 - DNA, 25 bp, Homo sapien
gctgttccccatgggccgtgtgcag

SEQ ID NO: 3385051 - DNA, 25 bp, Homo sapien
ccgcctaatccgaggggtgctggca

SEQ ID NO: 3385052 - DNA, 25 bp, Homo sapien
aatctggggcaacgtgatcctgccc

SEQ ID NO: 3385053 - DNA, 25 bp, Homo sapien
tctggggcaacgtgatcctgccctg

SEQ ID NO: 3385054 - DNA, 25 bp, Homo sapien
tggaatctggggcaacgtgatcctg

SEQ ID NO: 3385055 - DNA, 25 bp, Homo sapien
gaatctggggcaacgtgatcctgcc

SEQ ID NO: 3385056 - DNA, 25 bp, Homo sapien
tgagcagtgagcaggcggtggggga

SEQ ID NO: 3385057 - DNA, 25 bp, Homo sapien
ctggcggccgaggagtgagcagtga

SEQ ID NO: 3385058 - DNA, 25 bp, Homo sapien
gaggagtgagcagtgagcaggcggt

SEQ ID NO: 3385059 - DNA, 25 bp, Homo sapien
gcggccgaggagtgagcagtgagca

SEQ ID NO: 3385060 - DNA, 25 bp, Homo sapien
atcctccttaatttactgcctgagg

SEQ ID NO: 3385061 - DNA, 25 bp, Homo sapien
ctctggagaggggattagatggtcc

SEQ ID NO: 3385062 - DNA, 25 bp, Homo sapien
tggagaggggattagatggtccaca

SEQ ID NO: 3385063 - DNA, 25 bp, Homo sapien
tccttaatttactgcctgaggaggg

SEQ ID NO: 3385064 - DNA, 25 bp, Homo sapien
agctctcagggtctgagctagccaa

SEQ ID NO: 3385065 - DNA, 25 bp, Homo sapien
caaggcagcttttagccgctggcgt

SEQ ID NO: 3385066 - DNA, 25 bp, Homo sapien
acactagcaaggtcatgtacttcca

SEQ ID NO: 3385067 - DNA, 25 bp, Homo sapien
cagatgaatatggaagaacagccac

SEQ ID NO: 3385068 - DNA, 25 bp, Homo sapien
cctgatgaatcccaggatcttcgca

SEQ ID NO: 3385069 - DNA, 25 bp, Homo sapien
cagacccctgatgaatcccaggatc

SEQ ID NO: 3385070 - DNA, 25 bp, Homo sapien
gacccctgatgaatcccaggatctt

SEQ ID NO: 3385071 - DNA, 25 bp, Homo sapien
caggatcttcgcaggtggtcccagg

SEQ ID NO: 3385072 - DNA, 25 bp, Homo sapien
gacatcagaatagccggagcaggtg

SEQ ID NO: 3385073 - DNA, 25 bp, Homo sapien
gcctttgttctcatgcagcaactgt

SEQ ID NO: 3385074 - DNA, 25 bp, Homo sapien
tgttctcatgcagcaactgtctcca

SEQ ID NO: 3385075 - DNA, 25 bp, Homo sapien
ctcatgcagcaactgtctccaggag

SEQ ID NO: 3385076 - DNA, 25 bp, Homo sapien
aggactgctcttggcagctatgttc

SEQ ID NO: 3385077 - DNA, 25 bp, Homo sapien
cagctatgttctccctggatggaga

SEQ ID NO: 3385078 - DNA, 25 bp, Homo sapien
gtgcccagatccctgccgcttatcc

SEQ ID NO: 3385079 - DNA, 25 bp, Homo sapien
atgggtcctggcatcccgaggcagg

SEQ ID NO: 3385080 - DNA, 25 bp, Homo sapien
gagcagggagaagtatgtccaacct

SEQ ID NO: 3385081 - DNA, 25 bp, Homo sapien
acctgcctggaatcacccttctggt

SEQ ID NO: 3385082 - DNA, 25 bp, Homo sapien
tgaactcggtgaccatttcagacct

SEQ ID NO: 3385083 - DNA, 25 bp, Homo sapien
ggaatcacccttctggttgcgtctc

SEQ ID NO: 3385084 - DNA, 25 bp, Homo sapien
agtgctggcagtctgaatgcccacc

SEQ ID NO: 3385085 - DNA, 25 bp, Homo sapien
ctcctgtccggcctgatttgtggtt

SEQ ID NO: 3385086 - DNA, 25 bp, Homo sapien
ggcagtctgaatgcccacccactgt

SEQ ID NO: 3385087 - DNA, 25 bp, Homo sapien
ctgatttgtggttaaggaaagcggc

SEQ ID NO: 3385088 - DNA, 25 bp, Homo sapien
agagtggccggaactttctgccgct

SEQ ID NO: 3385089 - DNA, 25 bp, Homo sapien
tggccggaactttctgccgctcggg

SEQ ID NO: 3385090 - DNA, 25 bp, Homo sapien
agagagtggccggaactttctgccg

SEQ ID NO: 3385091 - DNA, 25 bp, Homo sapien
ccggaactttctgccgctcgggagc

SEQ ID NO: 3385092 - DNA, 25 bp, Homo sapien
cggcacggtcctggcttcgcccaac

SEQ ID NO: 3385093 - DNA, 25 bp, Homo sapien
ctggcggtggcgcggcacggtcctg

SEQ ID NO: 3385094 - DNA, 25 bp, Homo sapien
gcggtggcgcggcacggtcctggct

SEQ ID NO: 3385095 - DNA, 25 bp, Homo sapien
gcgcggcacggtcctggcttcgccc

SEQ ID NO: 3385096 - DNA, 25 bp, Homo sapien
gggagtcgaaacacgggtcgtcata

SEQ ID NO: 3385097 - DNA, 25 bp, Homo sapien
ggtcgtcatagaagtcgtccgttgt

SEQ ID NO: 3385098 - DNA, 25 bp, Homo sapien
tggtcttgcgcttgcacgccttgca

SEQ ID NO: 3385099 - DNA, 25 bp, Homo sapien
gctcttcgggtttcaggagcgcgcc

SEQ ID NO: 3385100 - DNA, 25 bp, Homo sapien
gacgtgcagcgcttgagtgtctcaa

SEQ ID NO: 3385101 - DNA, 25 bp, Homo sapien
cttgggcaaccgctggtttggattg

SEQ ID NO: 3385102 - DNA, 25 bp, Homo sapien
gattgctcgacgtgcagcgcttgag

SEQ ID NO: 3385103 - DNA, 25 bp, Homo sapien
tggtttggattgctcgacgtgcagc

SEQ ID NO: 3385104 - DNA, 25 bp, Homo sapien
gggcccggcgcatagaaggcggctg

SEQ ID NO: 3385105 - DNA, 25 bp, Homo sapien
gcctgcaggccctcgatatagcgga

SEQ ID NO: 3385106 - DNA, 25 bp, Homo sapien
tcgatatagcggatggcgttgcgca

SEQ ID NO: 3385107 - DNA, 25 bp, Homo sapien
caggccctcgatatagcggatggcg

SEQ ID NO: 3385108 - DNA, 25 bp, Homo sapien
cgggctggacgcgtcggagtcgccg

SEQ ID NO: 3385109 - DNA, 25 bp, Homo sapien
cgcgggctggacgcgtcggagtcgc

SEQ ID NO: 3385110 - DNA, 25 bp, Homo sapien
ccgtcggagcagttggagcgcgggc

SEQ ID NO: 3385111 - DNA, 25 bp, Homo sapien
catgccgtcggagcagttggagcgc

SEQ ID NO: 3385112 - DNA, 25 bp, Homo sapien
ttccaaaacaggctaccccagtgac

SEQ ID NO: 3385113 - DNA, 25 bp, Homo sapien
gacaagggggtcctctctctcggga

SEQ ID NO: 3385114 - DNA, 25 bp, Homo sapien
aaacgcgtccctgatatcccgagcg

SEQ ID NO: 3385115 - DNA, 25 bp, Homo sapien
cgctgcagtgttctaatagcgcccc

SEQ ID NO: 3385116 - DNA, 25 bp, Homo sapien
ttcgtagcagttccgccgccgggcg

SEQ ID NO: 3385117 - DNA, 25 bp, Homo sapien
tagtaggcgccttcgtagcagttcc

SEQ ID NO: 3385118 - DNA, 25 bp, Homo sapien
cctcgttgtagtaggcgccttcgta

SEQ ID NO: 3385119 - DNA, 25 bp, Homo sapien
cgctgggcgcctcgttgtagtaggc

SEQ ID NO: 3385120 - DNA, 25 bp, Homo sapien
ggctctcggtggagatgcgctccac

SEQ ID NO: 3385121 - DNA, 25 bp, Homo sapien
gacaggcagtctaggctcgacaccg

SEQ ID NO: 3385122 - DNA, 25 bp, Homo sapien
gcgccgcagggctctcggtggagat

SEQ ID NO: 3385123 - DNA, 25 bp, Homo sapien
tgcgctccacgatgctggacaggca

SEQ ID NO: 3385124 - DNA, 25 bp, Homo sapien
tgcggggcggcgtccggtgactggg

SEQ ID NO: 3385125 - DNA, 25 bp, Homo sapien
gggcggcagcctcttgcctgcgcgg

SEQ ID NO: 3385126 - DNA, 25 bp, Homo sapien
agcctcttgcctgcgcggaggcgac

SEQ ID NO: 3385127 - DNA, 25 bp, Homo sapien
tgactgggtggggtcgccgctgctc

SEQ ID NO: 3385128 - DNA, 25 bp, Homo sapien
ctggtatatcgggttggggttcgca

SEQ ID NO: 3385129 - DNA, 25 bp, Homo sapien
tggtatatcgggttggggttcgcac

SEQ ID NO: 3385130 - DNA, 25 bp, Homo sapien
gtcgcttttaaagcgctgttgggag

SEQ ID NO: 3385131 - DNA, 25 bp, Homo sapien
gcgagggaccctaggggcaccatcc

SEQ ID NO: 3385132 - DNA, 25 bp, Homo sapien
ggcaccatccctcgggcgggtgggc

SEQ ID NO: 3385133 - DNA, 25 bp, Homo sapien
tctcctacctcaagagaggtcgctt

SEQ ID NO: 3385134 - DNA, 25 bp, Homo sapien
gaaaaaaccgcgctgtgtccttgcc

SEQ ID NO: 3385135 - DNA, 25 bp, Homo sapien
catcgcaatgggtctccgagaaggg

SEQ ID NO: 3385136 - DNA, 25 bp, Homo sapien
tctccgagaagggtgctgcgtggaa

SEQ ID NO: 3385137 - DNA, 25 bp, Homo sapien
gaggaacacggagcggccatcgcaa

SEQ ID NO: 3385138 - DNA, 25 bp, Homo sapien
gaccggagtgcactgggtctcacgc

SEQ ID NO: 3385139 - DNA, 25 bp, Homo sapien
tataaacgtacaaattccctgtagc

SEQ ID NO: 3385140 - DNA, 25 bp, Homo sapien
tcctgctctggcaaagcaactctta

SEQ ID NO: 3385141 - DNA, 25 bp, Homo sapien
tacggttacacctgctacatttggg

SEQ ID NO: 3385142 - DNA, 25 bp, Homo sapien
tattttgatcacctgagcgagcgcc

SEQ ID NO: 3385143 - DNA, 25 bp, Homo sapien
aattagcgcctttattttgatcacc

SEQ ID NO: 3385144 - DNA, 25 bp, Homo sapien
taaattagcgcctttattttgatca

SEQ ID NO: 3385145 - DNA, 25 bp, Homo sapien
attagcgcctttattttgatcacct

SEQ ID NO: 3385146 - DNA, 25 bp, Homo sapien
ctacaggcgtcgctgagggacagct

SEQ ID NO: 3385147 - DNA, 25 bp, Homo sapien
gctggcccagtttgcggattttcct

SEQ ID NO: 3385148 - DNA, 25 bp, Homo sapien
ttgcaatccgcctgccgcctacagg

SEQ ID NO: 3385149 - DNA, 25 bp, Homo sapien
tggagaaatttgcacccctccttcc

SEQ ID NO: 3385150 - DNA, 25 bp, Homo sapien
tcaacctgtgtacccttccataaga

SEQ ID NO: 3385151 - DNA, 25 bp, Homo sapien
ttccataagagccacggacgtgtgt

SEQ ID NO: 3385152 - DNA, 25 bp, Homo sapien
taatgtagtcaaggtcagaggaact

SEQ ID NO: 3385153 - DNA, 25 bp, Homo sapien
gccacggacgtgtgtagtaatgtag

SEQ ID NO: 3385154 - DNA, 25 bp, Homo sapien
tcagtaagcttcatgtaggaaaggc

SEQ ID NO: 3385155 - DNA, 25 bp, Homo sapien
gaaaggctagaatataagctggtgt

SEQ ID NO: 3385156 - DNA, 25 bp, Homo sapien
tagaatataagctggtgttgggagt

SEQ ID NO: 3385157 - DNA, 25 bp, Homo sapien
tgggcttcagtaagcttcatgtagg

SEQ ID NO: 3385158 - DNA, 25 bp, Homo sapien
gcactggctccggtgcctctgcgcc

SEQ ID NO: 3385159 - DNA, 25 bp, Homo sapien
ctcccgcggcggtgctgaagggaca

SEQ ID NO: 3385160 - DNA, 25 bp, Homo sapien
ttgctcgtgcggctaacgccgagcg

SEQ ID NO: 3385161 - DNA, 25 bp, Homo sapien
tgctctccgtgagcccgggctcgag

SEQ ID NO: 3385162 - DNA, 25 bp, Homo sapien
ggccgggaaattcgcgctcctctgt

SEQ ID NO: 3385163 - DNA, 25 bp, Homo sapien
ccatctccgcgggaaaatggagaaa

SEQ ID NO: 3385164 - DNA, 25 bp, Homo sapien
agacagggccgggaaattcgcgctc

SEQ ID NO: 3385165 - DNA, 25 bp, Homo sapien
tggagaaatcggcacaaagcttttg

SEQ ID NO: 3385166 - DNA, 25 bp, Homo sapien
cgctttgtcgggtgccggtccaggg

SEQ ID NO: 3385167 - DNA, 25 bp, Homo sapien
cagcgacacccatgggagcggccgc

SEQ ID NO: 3385168 - DNA, 25 bp, Homo sapien
aacgagcgagccaagcctctccggg

SEQ ID NO: 3385169 - DNA, 25 bp, Homo sapien
ggaacagaggcctgcggctctggcc

SEQ ID NO: 3385170 - DNA, 25 bp, Homo sapien
aagaagaactcgtcagcacgcgggt

SEQ ID NO: 3385171 - DNA, 25 bp, Homo sapien
tcgagcggtacgtctggtggcgcgt

SEQ ID NO: 3385172 - DNA, 25 bp, Homo sapien
tgcccgtgcggtagtagttcaggat

SEQ ID NO: 3385173 - DNA, 25 bp, Homo sapien
agttcaggatgtgcgcgaagacgcc

SEQ ID NO: 3385174 - DNA, 25 bp, Homo sapien
cggcgtcgcggtgctggcggtacgt

SEQ ID NO: 3385175 - DNA, 25 bp, Homo sapien
ctcggcgtcgcggtgctggcggtac

SEQ ID NO: 3385176 - DNA, 25 bp, Homo sapien
gcgtcgcggtgctggcggtacgtca

SEQ ID NO: 3385177 - DNA, 25 bp, Homo sapien
cgtcgcggtgctggcggtacgtcat

SEQ ID NO: 3385178 - DNA, 25 bp, Homo sapien
cgtccgcgtcgtcggcgctgttgtc

SEQ ID NO: 3385179 - DNA, 25 bp, Homo sapien
catccggggagtcactgagcgccag

SEQ ID NO: 3385180 - DNA, 25 bp, Homo sapien
tagcgggacgagtacgggtcctcga

SEQ ID NO: 3385181 - DNA, 25 bp, Homo sapien
gagcgccaggcgcttggtcatctcc

SEQ ID NO: 3385182 - DNA, 25 bp, Homo sapien
ggagatgccctcttgaccacttcct

SEQ ID NO: 3385183 - DNA, 25 bp, Homo sapien
accaacttccaagccaccgagatta

SEQ ID NO: 3385184 - DNA, 25 bp, Homo sapien
ttcctcaaaattgccggaggctgct

SEQ ID NO: 3385185 - DNA, 25 bp, Homo sapien
ccgagattagccatggagatgccct

SEQ ID NO: 3385186 - DNA, 25 bp, Homo sapien
cagcctccagttacataaccctcta

SEQ ID NO: 3385187 - DNA, 25 bp, Homo sapien
agttacataaccctctagctgtggt

SEQ ID NO: 3385188 - DNA, 25 bp, Homo sapien
agccacagcctccagttacataacc

SEQ ID NO: 3385189 - DNA, 25 bp, Homo sapien
cataaccctctagctgtggtggcct

SEQ ID NO: 3385190 - DNA, 25 bp, Homo sapien
aatgccctcagttaggccactccgg

SEQ ID NO: 3385191 - DNA, 25 bp, Homo sapien
tacacacaccttcacatacagtctg

SEQ ID NO: 3385192 - DNA, 25 bp, Homo sapien
cagcctcctgccttatgtgtacacg

SEQ ID NO: 3385193 - DNA, 25 bp, Homo sapien
ggatgcacaggacctctctctcaca

SEQ ID NO: 3385194 - DNA, 25 bp, Homo sapien
agagactaaagccaagagcctcaga

SEQ ID NO: 3385195 - DNA, 25 bp, Homo sapien
ccattggccctgatgggacgcaaca

SEQ ID NO: 3385196 - DNA, 25 bp, Homo sapien
aagccaagagcctcagacctgagct

SEQ ID NO: 3385197 - DNA, 25 bp, Homo sapien
gacgcaacaacgtccctgatgatga

SEQ ID NO: 3385198 - DNA, 25 bp, Homo sapien
gggctgtccaagcattacctcagtt

SEQ ID NO: 3385199 - DNA, 25 bp, Homo sapien
catatggtaccatgactccaagtgg

SEQ ID NO: 3385200 - DNA, 25 bp, Homo sapien
tgggaggtgaacatacccagcccct

SEQ ID NO: 3385201 - DNA, 25 bp, Homo sapien
catacaaggatcatgggaagcaggg

SEQ ID NO: 3385202 - DNA, 25 bp, Homo sapien
tctgacaggcccgtgagttgaaaag

SEQ ID NO: 3385203 - DNA, 25 bp, Homo sapien
taagcgatggagacagtcaggtcag

SEQ ID NO: 3385204 - DNA, 25 bp, Homo sapien
aagagcgctccagaaggcagggtat

SEQ ID NO: 3385205 - DNA, 25 bp, Homo sapien
ttctaagcaggctcgggcgatctga

SEQ ID NO: 3385206 - DNA, 25 bp, Homo sapien
cccttgtcctccaagaggttgtggt

SEQ ID NO: 3385207 - DNA, 25 bp, Homo sapien
ctgacccttgtcctccaagaggttg

SEQ ID NO: 3385208 - DNA, 25 bp, Homo sapien
ttgtcctccaagaggttgtggttga

SEQ ID NO: 3385209 - DNA, 25 bp, Homo sapien
gtcctccaagaggttgtggttgagt

SEQ ID NO: 3385210 - DNA, 25 bp, Homo sapien
tgcctactgccctgaagtccatgct

SEQ ID NO: 3385211 - DNA, 25 bp, Homo sapien
agtcccatcgtccaggatgtgttca

SEQ ID NO: 3385212 - DNA, 25 bp, Homo sapien
atgcttccaagtcccatcgtccagg

SEQ ID NO: 3385213 - DNA, 25 bp, Homo sapien
tgccctgaagtccatgcttccaagt

SEQ ID NO: 3385214 - DNA, 25 bp, Homo sapien
ttcaaaacctggatgcgggcactgg

SEQ ID NO: 3385215 - DNA, 25 bp, Homo sapien
cactggagtggcgaatctggaatct

SEQ ID NO: 3385216 - DNA, 25 bp, Homo sapien
tgatgtagtccaacagcctgagtcc

SEQ ID NO: 3385217 - DNA, 25 bp, Homo sapien
tcattcatggagagtgcgcacaagg

SEQ ID NO: 3385218 - DNA, 25 bp, Homo sapien
tctccttgacaatgggcacaatcag

SEQ ID NO: 3385219 - DNA, 25 bp, Homo sapien
cagctatgctctcattggcaatggg

SEQ ID NO: 3385220 - DNA, 25 bp, Homo sapien
tacactggcagcaggcacaatcact

SEQ ID NO: 3385221 - DNA, 25 bp, Homo sapien
gagcagagccgtatctacactggca

SEQ ID NO: 3385222 - DNA, 25 bp, Homo sapien
cttgtggaaacctggtcattagaag

SEQ ID NO: 3385223 - DNA, 25 bp, Homo sapien
gtgcagagcactcagcaggaccaga

SEQ ID NO: 3385224 - DNA, 25 bp, Homo sapien
cattagaagaccagagcactgatgg

SEQ ID NO: 3385225 - DNA, 25 bp, Homo sapien
gagaggggaaccacgttctccagga

SEQ ID NO: 3385226 - DNA, 25 bp, Homo sapien
tggtatttcttcctggatccgcaca

SEQ ID NO: 3385227 - DNA, 25 bp, Homo sapien
atggtatttcttcctggatccgcac

SEQ ID NO: 3385228 - DNA, 25 bp, Homo sapien
ttcttcctggatccgcacatgtctt

SEQ ID NO: 3385229 - DNA, 25 bp, Homo sapien
tatttcttcctggatccgcacatgt

SEQ ID NO: 3385230 - DNA, 25 bp, Homo sapien
catctgaatgcttcttaggcctcat

SEQ ID NO: 3385231 - DNA, 25 bp, Homo sapien
aacaatgtagaagcaacgggaagag

SEQ ID NO: 3385232 - DNA, 25 bp, Homo sapien
tagaagcaacgggaagaggctgcca

SEQ ID NO: 3385233 - DNA, 25 bp, Homo sapien
aaaacaatgtagaagcaacgggaag

SEQ ID NO: 3385234 - DNA, 25 bp, Homo sapien
aatgtagaagcaacgggaagaggct

SEQ ID NO: 3385235 - DNA, 25 bp, Homo sapien
accaagaattatgtggaccttccaa

SEQ ID NO: 3385236 - DNA, 25 bp, Homo sapien
tctgggaaccaagaattatgtggac

SEQ ID NO: 3385237 - DNA, 25 bp, Homo sapien
gaaccaagaattatgtggaccttcc

SEQ ID NO: 3385238 - DNA, 25 bp, Homo sapien
gggatctgggaaccaagaattatgt

SEQ ID NO: 3385239 - DNA, 25 bp, Homo sapien
ccctcgatgtaggtaaggaaggcct

SEQ ID NO: 3385240 - DNA, 25 bp, Homo sapien
aattgttcacgatgacgggcacggg

SEQ ID NO: 3385241 - DNA, 25 bp, Homo sapien
gcggtggccgcggaatatgcttctt

SEQ ID NO: 3385242 - DNA, 25 bp, Homo sapien
taaagtgcgtgtgctcactggcgct

SEQ ID NO: 3385243 - DNA, 25 bp, Homo sapien
tgggccagcggacatgtgtcactct

SEQ ID NO: 3385244 - DNA, 25 bp, Homo sapien
ttcctgggccagcggacatgtgtca

SEQ ID NO: 3385245 - DNA, 25 bp, Homo sapien
tactgtggtgtggagagtttacgac

SEQ ID NO: 3385246 - DNA, 25 bp, Homo sapien
tgtggagagtttacgacagatttac

SEQ ID NO: 3385247 - DNA, 25 bp, Homo sapien
cagatcgacatgcctctaagaggtt

SEQ ID NO: 3385248 - DNA, 25 bp, Homo sapien
tcagatcgacatgcctctaagaggt

SEQ ID NO: 3385249 - DNA, 25 bp, Homo sapien
gatcgacatgcctctaagaggtttc

SEQ ID NO: 3385250 - DNA, 25 bp, Homo sapien
agatcgacatgcctctaagaggttt

SEQ ID NO: 3385251 - DNA, 25 bp, Homo sapien
caacaccgggtcagtagcctgagtc

SEQ ID NO: 3385252 - DNA, 25 bp, Homo sapien
ggtcacccacggaactaaggaagca

SEQ ID NO: 3385253 - DNA, 25 bp, Homo sapien
gatcaaaggctgtctagcgtttcca

SEQ ID NO: 3385254 - DNA, 25 bp, Homo sapien
cgggccgcgttgtctcttcagaaca

SEQ ID NO: 3385255 - DNA, 25 bp, Homo sapien
tttatatcttcggaccagagcccca

SEQ ID NO: 3385256 - DNA, 25 bp, Homo sapien
taagtaagcttgtcacggagggcta

SEQ ID NO: 3385257 - DNA, 25 bp, Homo sapien
gctagagtcacttcaacaggttcct

SEQ ID NO: 3385258 - DNA, 25 bp, Homo sapien
tctagtcttttgctcggcagccgct

SEQ ID NO: 3385259 - DNA, 25 bp, Homo sapien
tggcactccttcttactcagtgctg

SEQ ID NO: 3385260 - DNA, 25 bp, Homo sapien
tcttctctgggtcatctgttccttt

SEQ ID NO: 3385261 - DNA, 25 bp, Homo sapien
tcttactcagtgctgtcattcttct

SEQ ID NO: 3385262 - DNA, 25 bp, Homo sapien
tgggtcatctgttcctttgaaatcc

SEQ ID NO: 3385263 - DNA, 25 bp, Homo sapien
ccatgggcaaagaaatgggccttga

SEQ ID NO: 3385264 - DNA, 25 bp, Homo sapien
gccaggtagtgccacagtgatgcca

SEQ ID NO: 3385265 - DNA, 25 bp, Homo sapien
gggcaacactcctgaaagatccagt

SEQ ID NO: 3385266 - DNA, 25 bp, Homo sapien
caagagtacagaggaatctgggcct

SEQ ID NO: 3385267 - DNA, 25 bp, Homo sapien
gcatgggttttacaggttttgtgtc

SEQ ID NO: 3385268 - DNA, 25 bp, Homo sapien
ctgggattagctggtgtgcatgtct

SEQ ID NO: 3385269 - DNA, 25 bp, Homo sapien
gctggtgtgcatgtctgaacaaaca

SEQ ID NO: 3385270 - DNA, 25 bp, Homo sapien
ggcaatcccacaggagtgcatgggt

SEQ ID NO: 3385271 - DNA, 25 bp, Homo sapien
agtcttccatccaagggtctccggg

SEQ ID NO: 3385272 - DNA, 25 bp, Homo sapien
gtgcgtttctcgacaaatcccaggg

SEQ ID NO: 3385273 - DNA, 25 bp, Homo sapien
tgtgagacacgagcagggaacaatc

SEQ ID NO: 3385274 - DNA, 25 bp, Homo sapien
tttgccaaagataacccagaggctg

SEQ ID NO: 3385275 - DNA, 25 bp, Homo sapien
gtggagcgaggagggcacaaggcag

SEQ ID NO: 3385276 - DNA, 25 bp, Homo sapien
cagcttgagcgtccctgaggacgga

SEQ ID NO: 3385277 - DNA, 25 bp, Homo sapien
gactcctgggtttgctcaaagtttg

SEQ ID NO: 3385278 - DNA, 25 bp, Homo sapien
aggcagccttcgggctgcccacagt

SEQ ID NO: 3385279 - DNA, 25 bp, Homo sapien
cccgagcgcgtaaagggcaggccct

SEQ ID NO: 3385280 - DNA, 25 bp, Homo sapien
gaagcagggtccgtatctctcgcgg

SEQ ID NO: 3385281 - DNA, 25 bp, Homo sapien
tccccggttgataagaggaagcagg

SEQ ID NO: 3385282 - DNA, 25 bp, Homo sapien
ggcagtcttcgttcgccagcgcggc

SEQ ID NO: 3385283 - DNA, 25 bp, Homo sapien
ccaatcagtctaacattcaagatga

SEQ ID NO: 3385284 - DNA, 25 bp, Homo sapien
tggggccacaccaatcagtctaaca

SEQ ID NO: 3385285 - DNA, 25 bp, Homo sapien
tggcaccacagtaaagagactgtct

SEQ ID NO: 3385286 - DNA, 25 bp, Homo sapien
gcaccacagtaaagagactgtcttg

SEQ ID NO: 3385287 - DNA, 25 bp, Homo sapien
tagcaatgacagggctttctttgca

SEQ ID NO: 3385288 - DNA, 25 bp, Homo sapien
gcaatgacagggctttctttgcaaa

SEQ ID NO: 3385289 - DNA, 25 bp, Homo sapien
caatgacagggctttctttgcaaag

SEQ ID NO: 3385290 - DNA, 25 bp, Homo sapien
cttagcaatgacagggctttctttg

SEQ ID NO: 3385291 - DNA, 25 bp, Homo sapien
tcgtccggcaaacctgcatggcgtg

SEQ ID NO: 3385292 - DNA, 25 bp, Homo sapien
ggtccacccagatgcttaatagcca

SEQ ID NO: 3385293 - DNA, 25 bp, Homo sapien
agtgtcctcggccaagccgcctggt

SEQ ID NO: 3385294 - DNA, 25 bp, Homo sapien
gcatggcgtgaatttactctgtccg

SEQ ID NO: 3385295 - DNA, 25 bp, Homo sapien
gaagtgtgtctctgcaaacctccga

SEQ ID NO: 3385296 - DNA, 25 bp, Homo sapien
caatatgaccgatgactgaccgact

SEQ ID NO: 3385297 - DNA, 25 bp, Homo sapien
catgcaagtcatgctaaggagcccc

SEQ ID NO: 3385298 - DNA, 25 bp, Homo sapien
gagacatccgctgggtcacaagcat

SEQ ID NO: 3385299 - DNA, 25 bp, Homo sapien
tcagacttgtcctggcaagggttct

SEQ ID NO: 3385300 - DNA, 25 bp, Homo sapien
tgctgggtagggcacccagatctga

SEQ ID NO: 3385301 - DNA, 25 bp, Homo sapien
cagatctgacagtcaaaccctacct

SEQ ID NO: 3385302 - DNA, 25 bp, Homo sapien
agtcaaaccctacctctggcttcat

SEQ ID NO: 3385303 - DNA, 25 bp, Homo sapien
tgccatcgaggacactgaatctcag

SEQ ID NO: 3385304 - DNA, 25 bp, Homo sapien
gccatcgaggacactgaatctcaga

SEQ ID NO: 3385305 - DNA, 25 bp, Homo sapien
atgccatcgaggacactgaatctca

SEQ ID NO: 3385306 - DNA, 25 bp, Homo sapien
ccatcgaggacactgaatctcagaa

SEQ ID NO: 3385307 - DNA, 25 bp, Homo sapien
tttggccctctaagagagaagaagc

SEQ ID NO: 3385308 - DNA, 25 bp, Homo sapien
catccatgggttcccttttggccct

SEQ ID NO: 3385309 - DNA, 25 bp, Homo sapien
tcattcacacaacagcattgagcgc

SEQ ID NO: 3385310 - DNA, 25 bp, Homo sapien
tgagcgctaacctatgccaagcact

SEQ ID NO: 3385311 - DNA, 25 bp, Homo sapien
gcgttcttcctgatagcgagctaca

SEQ ID NO: 3385312 - DNA, 25 bp, Homo sapien
cattgcagcgttcttcctgatagcg

SEQ ID NO: 3385313 - DNA, 25 bp, Homo sapien
tagcgagctacaattgccgtgccca

SEQ ID NO: 3385314 - DNA, 25 bp, Homo sapien
gcagtcttccagtcattgcagcgtt

SEQ ID NO: 3385315 - DNA, 25 bp, Homo sapien
ccagcctggggagcgtgtatctgcc

SEQ ID NO: 3385316 - DNA, 25 bp, Homo sapien
aggacttttggtttgtctcagccca

SEQ ID NO: 3385317 - DNA, 25 bp, Homo sapien
acttttggtttgtctcagcccagcc

SEQ ID NO: 3385318 - DNA, 25 bp, Homo sapien
ggagcgtgtatctgcccactctcct

SEQ ID NO: 3385319 - DNA, 25 bp, Homo sapien
agagtttttgcaggccgcgggttca

SEQ ID NO: 3385320 - DNA, 25 bp, Homo sapien
caggtctaaaccaccagcatacggg

SEQ ID NO: 3385321 - DNA, 25 bp, Homo sapien
tagtaccctaatcttcctgcatgtg

SEQ ID NO: 3385322 - DNA, 25 bp, Homo sapien
aggcttcaggaatggcaacagtgca

SEQ ID NO: 3385323 - DNA, 25 bp, Homo sapien
tagtatttgagtggttgttaaagct

SEQ ID NO: 3385324 - DNA, 25 bp, Homo sapien
ttgggggcttcttgatgaaatagta

SEQ ID NO: 3385325 - DNA, 25 bp, Homo sapien
gaaatagtatttgagtggttgttaa

SEQ ID NO: 3385326 - DNA, 25 bp, Homo sapien
gagatgcggcatcagaagagacctc

SEQ ID NO: 3385327 - DNA, 25 bp, Homo sapien
agatccctggttggcggcatcaaac

SEQ ID NO: 3385328 - DNA, 25 bp, Homo sapien
ttggaaaggccaatcccaggctgac

SEQ ID NO: 3385329 - DNA, 25 bp, Homo sapien
taatcagtggctcctaattccccaa

SEQ ID NO: 3385330 - DNA, 25 bp, Homo sapien
ttccccaacaaatgcaagtgctgtg

SEQ ID NO: 3385331 - DNA, 25 bp, Homo sapien
caggggcttggggccaccccagtga

SEQ ID NO: 3385332 - DNA, 25 bp, Homo sapien
ggggcttggggccaccccagtgata

SEQ ID NO: 3385333 - DNA, 25 bp, Homo sapien
gggcttggggccaccccagtgatac

SEQ ID NO: 3385334 - DNA, 25 bp, Homo sapien
tcaggggcttggggccaccccagtg

SEQ ID NO: 3385335 - DNA, 25 bp, Homo sapien
tcagtctcccgtgcagttttctgtc

SEQ ID NO: 3385336 - DNA, 25 bp, Homo sapien
tgaaaccccgaagtatttatataga

SEQ ID NO: 3385337 - DNA, 25 bp, Homo sapien
ccagaaacagatcccaggtaagaat

SEQ ID NO: 3385338 - DNA, 25 bp, Homo sapien
ctggactgtggtggcccgatggtag

SEQ ID NO: 3385339 - DNA, 25 bp, Homo sapien
gaatgtagatcataacctaaagact

SEQ ID NO: 3385340 - DNA, 25 bp, Homo sapien
tcagcatatgactcaaactgccagt

SEQ ID NO: 3385341 - DNA, 25 bp, Homo sapien
gaatcagcatatgactcaaactgcc

SEQ ID NO: 3385342 - DNA, 25 bp, Homo sapien
ggaatcagcatatgactcaaactgc

SEQ ID NO: 3385343 - DNA, 25 bp, Homo sapien
agcatatgactcaaactgccagttc

SEQ ID NO: 3385344 - DNA, 25 bp, Homo sapien
gactctttcgtgttgttatgttgtg

SEQ ID NO: 3385345 - DNA, 25 bp, Homo sapien
tcatgagaggccacatatggcaccc

SEQ ID NO: 3385346 - DNA, 25 bp, Homo sapien
tgtgcttcatgagaggccacatatg

SEQ ID NO: 3385347 - DNA, 25 bp, Homo sapien
ccacatatggcacccaggtcttctg

SEQ ID NO: 3385348 - DNA, 25 bp, Homo sapien
ctccaacttgaagacatttgtccct

SEQ ID NO: 3385349 - DNA, 25 bp, Homo sapien
aacttgaagacatttgtccctgttc

SEQ ID NO: 3385350 - DNA, 25 bp, Homo sapien
ccactccaacttgaagacatttgtc

SEQ ID NO: 3385351 - DNA, 25 bp, Homo sapien
tgttcagggtatccatcatagtcat

SEQ ID NO: 3385352 - DNA, 25 bp, Homo sapien
agagtatcctgaaaagggagaattc

SEQ ID NO: 3385353 - DNA, 25 bp, Homo sapien
gtatcctgaaaagggagaattcagc

SEQ ID NO: 3385354 - DNA, 25 bp, Homo sapien
gagtatcctgaaaagggagaattca

SEQ ID NO: 3385355 - DNA, 25 bp, Homo sapien
cagagtatcctgaaaagggagaatt

SEQ ID NO: 3385356 - DNA, 25 bp, Homo sapien
caaagggattgagatcactgcagag

SEQ ID NO: 3385357 - DNA, 25 bp, Homo sapien
gaagacgcaaggctttggcaaatac

SEQ ID NO: 3385358 - DNA, 25 bp, Homo sapien
tctgggaaccagtaccttgaagcac

SEQ ID NO: 3385359 - DNA, 25 bp, Homo sapien
tgccctatactgactgcctaggaaa

SEQ ID NO: 3385360 - DNA, 25 bp, Homo sapien
gactgcagttgtaatcattactgtg

SEQ ID NO: 3385361 - DNA, 25 bp, Homo sapien
catgactgcagttgtaatcattact

SEQ ID NO: 3385362 - DNA, 25 bp, Homo sapien
ctcacatgactgcagttgtaatcat

SEQ ID NO: 3385363 - DNA, 25 bp, Homo sapien
agttgtaatcattactgtggagcca

SEQ ID NO: 3385364 - DNA, 25 bp, Homo sapien
caggaggcttgctcacttctcgcac

SEQ ID NO: 3385365 - DNA, 25 bp, Homo sapien
agtgtggaggtgaggtgcagatctg

SEQ ID NO: 3385366 - DNA, 25 bp, Homo sapien
gctcacttctcgcacagccagtgtg

SEQ ID NO: 3385367 - DNA, 25 bp, Homo sapien
tgtggaggtgaggtgcagatctgac

SEQ ID NO: 3385368 - DNA, 25 bp, Homo sapien
gctgagtgcagacacgttctgccgt

SEQ ID NO: 3385369 - DNA, 25 bp, Homo sapien
tgagtgcagacacgttctgccgtct

SEQ ID NO: 3385370 - DNA, 25 bp, Homo sapien
tgcagacacgttctgccgtctgctc

SEQ ID NO: 3385371 - DNA, 25 bp, Homo sapien
agtgcagacacgttctgccgtctgc

SEQ ID NO: 3385372 - DNA, 25 bp, Homo sapien
taattttatatcaataccagagctg

SEQ ID NO: 3385373 - DNA, 25 bp, Homo sapien
cttcagcccatcaaatgctagaagt

SEQ ID NO: 3385374 - DNA, 25 bp, Homo sapien
tgagccaaatggagggggtgaagtg

SEQ ID NO: 3385375 - DNA, 25 bp, Homo sapien
ggtggtgtgtagcagatttagcagc

SEQ ID NO: 3385376 - DNA, 25 bp, Homo sapien
gtagcagatttagcagctgctgaag

SEQ ID NO: 3385377 - DNA, 25 bp, Homo sapien
tgaagtggggtggtgtgtagcagat

SEQ ID NO: 3385378 - DNA, 25 bp, Homo sapien
ccagattccaagaagctattgcaaa

SEQ ID NO: 3385379 - DNA, 25 bp, Homo sapien
caaaggttgagtcctcaataggaac

SEQ ID NO: 3385380 - DNA, 25 bp, Homo sapien
atacgtggatacatgggaaggctct

SEQ ID NO: 3385381 - DNA, 25 bp, Homo sapien
caataggaactccatacgtggatac

SEQ ID NO: 3385382 - DNA, 25 bp, Homo sapien
cacagctgacaaggatagagaaagt

SEQ ID NO: 3385383 - DNA, 25 bp, Homo sapien
ccacagctgacaaggatagagaaag

SEQ ID NO: 3385384 - DNA, 25 bp, Homo sapien
tgctctttgtaggccacagctgaca

SEQ ID NO: 3385385 - DNA, 25 bp, Homo sapien
ctggtgacagtctggcctgttttta

SEQ ID NO: 3385386 - DNA, 25 bp, Homo sapien
tgcagactggtgacagtctggcctg

SEQ ID NO: 3385387 - DNA, 25 bp, Homo sapien
cttcctgcagactggtgacagtctg

SEQ ID NO: 3385388 - DNA, 25 bp, Homo sapien
gactggtgacagtctggcctgtttt

SEQ ID NO: 3385389 - DNA, 25 bp, Homo sapien
tgtgtctggatgaattggctccagc

SEQ ID NO: 3385390 - DNA, 25 bp, Homo sapien
gtctggatgaattggctccagctgt

SEQ ID NO: 3385391 - DNA, 25 bp, Homo sapien
atgtgcagttgttttgtcttccctt

SEQ ID NO: 3385392 - DNA, 25 bp, Homo sapien
agcttattttggcttgaattggcaa

SEQ ID NO: 3385393 - DNA, 25 bp, Homo sapien
tcacttgctgagaagatccctgcct

SEQ ID NO: 3385394 - DNA, 25 bp, Homo sapien
ctgcctttcagaggcagggtcccca

SEQ ID NO: 3385395 - DNA, 25 bp, Homo sapien
ggtccccagatccagctctgctttc

SEQ ID NO: 3385396 - DNA, 25 bp, Homo sapien
ggcagggtccccagatccagctctg

SEQ ID NO: 3385397 - DNA, 25 bp, Homo sapien
tcgattcatatcattgagcatcttt

SEQ ID NO: 3385398 - DNA, 25 bp, Homo sapien
gaatatttcgattcatatcattgag

SEQ ID NO: 3385399 - DNA, 25 bp, Homo sapien
ttttctgaatatttcgattcatatc

SEQ ID NO: 3385400 - DNA, 25 bp, Homo sapien
tatttcgattcatatcattgagcat

SEQ ID NO: 3385401 - DNA, 25 bp, Homo sapien
tgtatccttctaatgctgtctcctt

SEQ ID NO: 3385402 - DNA, 25 bp, Homo sapien
tatccttctaatgctgtctccttgt

SEQ ID NO: 3385403 - DNA, 25 bp, Homo sapien
atccttctaatgctgtctccttgtc

SEQ ID NO: 3385404 - DNA, 25 bp, Homo sapien
gtatccttctaatgctgtctccttg

SEQ ID NO: 3385405 - DNA, 25 bp, Homo sapien
gatgtaagggaactggatgggtggt

SEQ ID NO: 3385406 - DNA, 25 bp, Homo sapien
ttgccagatgtaagggaactggatg

SEQ ID NO: 3385407 - DNA, 25 bp, Homo sapien
tgggcttgccagatgtaagggaact

SEQ ID NO: 3385408 - DNA, 25 bp, Homo sapien
cagatgtaagggaactggatgggtg

SEQ ID NO: 3385409 - DNA, 25 bp, Homo sapien
ctggcaccctgggtggcctttgggc

SEQ ID NO: 3385410 - DNA, 25 bp, Homo sapien
tgaaggcgcccgggctcattggcac

SEQ ID NO: 3385411 - DNA, 25 bp, Homo sapien
ttggcacccggcgagaaccaatcag

SEQ ID NO: 3385412 - DNA, 25 bp, Homo sapien
tttgggctgcggctggctacccctc

SEQ ID NO: 3385413 - DNA, 25 bp, Homo sapien
ggccatcatgtgtttccgcacgtac

SEQ ID NO: 3385414 - DNA, 25 bp, Homo sapien
catgtgtttccgcacgtacgcctcg

SEQ ID NO: 3385415 - DNA, 25 bp, Homo sapien
tgtttccgcacgtacgcctcgttgc

SEQ ID NO: 3385416 - DNA, 25 bp, Homo sapien
gcacgtacgcctcgttgccatagca

SEQ ID NO: 3385417 - DNA, 25 bp, Homo sapien
gactttgataactgtgacaacttta

SEQ ID NO: 3385418 - DNA, 25 bp, Homo sapien
gcccatgcatgtacggtgggtcatg

SEQ ID NO: 3385419 - DNA, 25 bp, Homo sapien
aaaaaatcagatcatgcccatgcat

SEQ ID NO: 3385420 - DNA, 25 bp, Homo sapien
taatgagactttgataactgtgaca

SEQ ID NO: 3385421 - DNA, 25 bp, Homo sapien
ctttcctggaccactgtagcagcct

SEQ ID NO: 3385422 - DNA, 25 bp, Homo sapien
tggcttccaccagccatagccgggt

SEQ ID NO: 3385423 - DNA, 25 bp, Homo sapien
atagccgggtgtctgcgccctcttt

SEQ ID NO: 3385424 - DNA, 25 bp, Homo sapien
ttagtgatcttctggtcctctgtcc

SEQ ID NO: 3385425 - DNA, 25 bp, Homo sapien
gactggtaggccttgcatctagttg

SEQ ID NO: 3385426 - DNA, 25 bp, Homo sapien
tggaaggttatatctgtttgcagac

SEQ ID NO: 3385427 - DNA, 25 bp, Homo sapien
aggccttgcatctagttggtattta

SEQ ID NO: 3385428 - DNA, 25 bp, Homo sapien
tgtttgcagactggtaggccttgca

SEQ ID NO: 3385429 - DNA, 25 bp, Homo sapien
agaggctgcagaaggcggcgcagag

SEQ ID NO: 3385430 - DNA, 25 bp, Homo sapien
gcgcagaggcggcaggtggccacag

SEQ ID NO: 3385431 - DNA, 25 bp, Homo sapien
cagaaggcggcgcagaggcggcagg

SEQ ID NO: 3385432 - DNA, 25 bp, Homo sapien
aaggcggcgcagaggcggcaggtgg

SEQ ID NO: 3385433 - DNA, 25 bp, Homo sapien
aacaaactgcactgccggctgcagt

SEQ ID NO: 3385434 - DNA, 25 bp, Homo sapien
tatctgattggcatgccaggagcat

SEQ ID NO: 3385435 - DNA, 25 bp, Homo sapien
ctaggaactgtgaatttgttgtaac

SEQ ID NO: 3385436 - DNA, 25 bp, Homo sapien
taggctgcttgacacagtacttttc

SEQ ID NO: 3385437 - DNA, 25 bp, Homo sapien
gtgttctttctcgtcacaaggaatc

SEQ ID NO: 3385438 - DNA, 25 bp, Homo sapien
gttctttctcgtcacaaggaatctg

SEQ ID NO: 3385439 - DNA, 25 bp, Homo sapien
tgttctttctcgtcacaaggaatct

SEQ ID NO: 3385440 - DNA, 25 bp, Homo sapien
ttctttctcgtcacaaggaatctgg

SEQ ID NO: 3385441 - DNA, 25 bp, Homo sapien
tgccttaccatatctcattggaact

SEQ ID NO: 3385442 - DNA, 25 bp, Homo sapien
ccttaccatatctcattggaacttg

SEQ ID NO: 3385443 - DNA, 25 bp, Homo sapien
gccttaccatatctcattggaactt

SEQ ID NO: 3385444 - DNA, 25 bp, Homo sapien
cttaccatatctcattggaacttgg

SEQ ID NO: 3385445 - DNA, 25 bp, Homo sapien
ctagcctttcccatgtagcctggca

SEQ ID NO: 3385446 - DNA, 25 bp, Homo sapien
tgcctagcctttcccatgtagcctg

SEQ ID NO: 3385447 - DNA, 25 bp, Homo sapien
tagcctttcccatgtagcctggcat

SEQ ID NO: 3385448 - DNA, 25 bp, Homo sapien
ctttgcctagcctttcccatgtagc

SEQ ID NO: 3385449 - DNA, 25 bp, Homo sapien
ttttccaagagctatgggtaacctc

SEQ ID NO: 3385450 - DNA, 25 bp, Homo sapien
ttccaagagctatgggtaacctcat

SEQ ID NO: 3385451 - DNA, 25 bp, Homo sapien
tttccaagagctatgggtaacctca

SEQ ID NO: 3385452 - DNA, 25 bp, Homo sapien
tgtcatgccccaggtcggcctggat

SEQ ID NO: 3385453 - DNA, 25 bp, Homo sapien
aggtcggcctggatcttcctgagaa

SEQ ID NO: 3385454 - DNA, 25 bp, Homo sapien
taaagtcctgtgacagactctttct

SEQ ID NO: 3385455 - DNA, 25 bp, Homo sapien
cacattcagtaaagtcctgtgacag

SEQ ID NO: 3385456 - DNA, 25 bp, Homo sapien
cctttcaatgtggtcttgtctgtga

SEQ ID NO: 3385457 - DNA, 25 bp, Homo sapien
gacagtgttcctttcaatgtggtct

SEQ ID NO: 3385458 - DNA, 25 bp, Homo sapien
tttgccatactgtctaggctcagac

SEQ ID NO: 3385459 - DNA, 25 bp, Homo sapien
tctgtgagattccaactgagactga

SEQ ID NO: 3385460 - DNA, 25 bp, Homo sapien
cttgggatgattcatagttccaaac

SEQ ID NO: 3385461 - DNA, 25 bp, Homo sapien
tagacctttggattccattaagtta

SEQ ID NO: 3385462 - DNA, 25 bp, Homo sapien
ttgtagacctttggattccattaag

SEQ ID NO: 3385463 - DNA, 25 bp, Homo sapien
tgtagacctttggattccattaagt

SEQ ID NO: 3385464 - DNA, 25 bp, Homo sapien
atcaccagtataggggcagatgcct

SEQ ID NO: 3385465 - DNA, 25 bp, Homo sapien
catccttgatccctacgctcatcac

SEQ ID NO: 3385466 - DNA, 25 bp, Homo sapien
gatccctacgctcatcaccagtata

SEQ ID NO: 3385467 - DNA, 25 bp, Homo sapien
ccctacgctcatcaccagtataggg

SEQ ID NO: 3385468 - DNA, 25 bp, Homo sapien
ttgatatttcattatcttggaagcc

SEQ ID NO: 3385469 - DNA, 25 bp, Homo sapien
cttgatatttcattatcttggaagc

SEQ ID NO: 3385470 - DNA, 25 bp, Homo sapien
gatatttcattatcttggaagccat

SEQ ID NO: 3385471 - DNA, 25 bp, Homo sapien
tgatatttcattatcttggaagcca

SEQ ID NO: 3385472 - DNA, 25 bp, Homo sapien
tcagattagagcttgcccagtggaa

SEQ ID NO: 3385473 - DNA, 25 bp, Homo sapien
tacaaggctcagattagagcttgcc

SEQ ID NO: 3385474 - DNA, 25 bp, Homo sapien
gagcttgcccagtggaatcttttct

SEQ ID NO: 3385475 - DNA, 25 bp, Homo sapien
caaaatgtaccactttacaaggctc

SEQ ID NO: 3385476 - DNA, 25 bp, Homo sapien
acagctccctcggaagactgccttt

SEQ ID NO: 3385477 - DNA, 25 bp, Homo sapien
ctttgtcctacagctccctcggaag

SEQ ID NO: 3385478 - DNA, 25 bp, Homo sapien
gaaataccacttgaatgcttgtgta

SEQ ID NO: 3385479 - DNA, 25 bp, Homo sapien
gtttccagggcgtctttgtcctaca

SEQ ID NO: 3385480 - DNA, 25 bp, Homo sapien
agtttggctggagcattgggtatct

SEQ ID NO: 3385481 - DNA, 25 bp, Homo sapien
tagttcagttgcttattcaaacccc

SEQ ID NO: 3385482 - DNA, 25 bp, Homo sapien
gcaggaatcttaatttctccagggt

SEQ ID NO: 3385483 - DNA, 25 bp, Homo sapien
ggcaggacagttatgaggtaatatc

SEQ ID NO: 3385484 - DNA, 25 bp, Homo sapien
ggtgttgcaggctgaccagcattgt

SEQ ID NO: 3385485 - DNA, 25 bp, Homo sapien
caggctgaccagcattgtgagctgg

SEQ ID NO: 3385486 - DNA, 25 bp, Homo sapien
cattgcaggctgacaggtgttgcag

SEQ ID NO: 3385487 - DNA, 25 bp, Homo sapien
cagcattgcaggctgacaggtgttg

SEQ ID NO: 3385488 - DNA, 25 bp, Homo sapien
aagataatcttaaactgtgtcaagt

SEQ ID NO: 3385489 - DNA, 25 bp, Homo sapien
gaggttcttggcagttgagctgcta

SEQ ID NO: 3385490 - DNA, 25 bp, Homo sapien
ctaagtgtgagcaccctgaaagata

SEQ ID NO: 3385491 - DNA, 25 bp, Homo sapien
tacaaaaggtcacattggtgacttg

SEQ ID NO: 3385492 - DNA, 25 bp, Homo sapien
ttcagtctgtagcagccctttaggc

SEQ ID NO: 3385493 - DNA, 25 bp, Homo sapien
tgatgccccagcgttttaagaccag

SEQ ID NO: 3385494 - DNA, 25 bp, Homo sapien
tccaactatagacgagagactcgag

SEQ ID NO: 3385495 - DNA, 25 bp, Homo sapien
tgtgattcctgcatagctactgcct

SEQ ID NO: 3385496 - DNA, 25 bp, Homo sapien
caaaactgagcggtgaaggatccca

SEQ ID NO: 3385497 - DNA, 25 bp, Homo sapien
ctcagaacggattggacagaagcct

SEQ ID NO: 3385498 - DNA, 25 bp, Homo sapien
taactttccttagacctgagatggg

SEQ ID NO: 3385499 - DNA, 25 bp, Homo sapien
ggatgcataccaagctctctcaggg

SEQ ID NO: 3385500 - DNA, 25 bp, Homo sapien
taaggtactatggtctattttggtc

SEQ ID NO: 3385501 - DNA, 25 bp, Homo sapien
catattctgtcatttggagttatac

SEQ ID NO: 3385502 - DNA, 25 bp, Homo sapien
gaattctctaaaggaacatatgata

SEQ ID NO: 3385503 - DNA, 25 bp, Homo sapien
tatacaagtagtaatgacacaccaa

SEQ ID NO: 3385504 - DNA, 25 bp, Homo sapien
ggtctataaaggaactcagaatcac

SEQ ID NO: 3385505 - DNA, 25 bp, Homo sapien
taggccaatgctgtacaacttcatg

SEQ ID NO: 3385506 - DNA, 25 bp, Homo sapien
tcacccagatacatgacttcagttc

SEQ ID NO: 3385507 - DNA, 25 bp, Homo sapien
tttggttgcaaggaaatctactgta

SEQ ID NO: 3385508 - DNA, 25 bp, Homo sapien
tccaagggaaacttagtagagatgc

SEQ ID NO: 3385509 - DNA, 25 bp, Homo sapien
atcacacgatactggttttattctg

SEQ ID NO: 3385510 - DNA, 25 bp, Homo sapien
tttcaatgacatcacacgatactgg

SEQ ID NO: 3385511 - DNA, 25 bp, Homo sapien
tctggactatctatcctactcatgg

SEQ ID NO: 3385512 - DNA, 25 bp, Homo sapien
tcagtcatgccctaaaagagcgatt

SEQ ID NO: 3385513 - DNA, 25 bp, Homo sapien
tagttgggaagactgcaagaagcca

SEQ ID NO: 3385514 - DNA, 25 bp, Homo sapien
gctggccaggcctttagtttacaaa

SEQ ID NO: 3385515 - DNA, 25 bp, Homo sapien
tgtccccactctggaggagcttgct

SEQ ID NO: 3385516 - DNA, 25 bp, Homo sapien
tgcccagctgctccgacgcccgctt

SEQ ID NO: 3385517 - DNA, 25 bp, Homo sapien
taggacctgatctagggaatttaca

SEQ ID NO: 3385518 - DNA, 25 bp, Homo sapien
ttcctgaggtgtgcatacgagtggc

SEQ ID NO: 3385519 - DNA, 25 bp, Homo sapien
taactgcacagatcaggaatgctca

SEQ ID NO: 3385520 - DNA, 25 bp, Homo sapien
tattgaagcaccataaagaaaggga

SEQ ID NO: 3385521 - DNA, 25 bp, Homo sapien
tccagatgtaatgaggtggctcctt

SEQ ID NO: 3385522 - DNA, 25 bp, Homo sapien
ccagatgtaatgaggtggctccttt

SEQ ID NO: 3385523 - DNA, 25 bp, Homo sapien
agatgtaatgaggtggctcctttca

SEQ ID NO: 3385524 - DNA, 25 bp, Homo sapien
atccagatgtaatgaggtggctcct

SEQ ID NO: 3385525 - DNA, 25 bp, Homo sapien
tttgtataatccgtatgcagcaact

SEQ ID NO: 3385526 - DNA, 25 bp, Homo sapien
tagtttttcgaatcactttggatcc

SEQ ID NO: 3385527 - DNA, 25 bp, Homo sapien
taatccgtatgcagcaactactgca

SEQ ID NO: 3385528 - DNA, 25 bp, Homo sapien
gatcaggtgacgtgatattttagta

SEQ ID NO: 3385529 - DNA, 25 bp, Homo sapien
cagacggggcggcggggcaaaggca

SEQ ID NO: 3385530 - DNA, 25 bp, Homo sapien
gggatggcggccgggcaaagacgct

SEQ ID NO: 3385531 - DNA, 25 bp, Homo sapien
acggggtcgcgaccgggcagaggcg

SEQ ID NO: 3385532 - DNA, 25 bp, Homo sapien
cggggcaaaggcactccccacatct

SEQ ID NO: 3385533 - DNA, 25 bp, Homo sapien
ttgtgctaaaggtagagagccttta

SEQ ID NO: 3385534 - DNA, 25 bp, Homo sapien
aaggtagagagcctttatgggattc

SEQ ID NO: 3385535 - DNA, 25 bp, Homo sapien
agagagcctttatgggattcagtga

SEQ ID NO: 3385536 - DNA, 25 bp, Homo sapien
tgctaaaggtagagagcctttatgg

SEQ ID NO: 3385537 - DNA, 25 bp, Homo sapien
gctcagaaaccccagtctgatgacc

SEQ ID NO: 3385538 - DNA, 25 bp, Homo sapien
gaacatataatgtggccgctaagga

SEQ ID NO: 3385539 - DNA, 25 bp, Homo sapien
aaccagccacgcgattgtaatgaaa

SEQ ID NO: 3385540 - DNA, 25 bp, Homo sapien
tattgatgaggcgtaacggcgaaca

SEQ ID NO: 3385541 - DNA, 25 bp, Homo sapien
gctcagcatgcttaggcctataaag

SEQ ID NO: 3385542 - DNA, 25 bp, Homo sapien
aatctgcttcccgacagctccaggg

SEQ ID NO: 3385543 - DNA, 25 bp, Homo sapien
gctccagggtttcctgaggaagcca

SEQ ID NO: 3385544 - DNA, 25 bp, Homo sapien
ggtttcctgaggaagccaccctcca

SEQ ID NO: 3385545 - DNA, 25 bp, Homo sapien
tcactgctccaatctgcttcccgac

SEQ ID NO: 3385546 - DNA, 25 bp, Homo sapien
aaagtcctgtctgacagggcagagg

SEQ ID NO: 3385547 - DNA, 25 bp, Homo sapien
gataaacatctattcgaagaccttg

SEQ ID NO: 3385548 - DNA, 25 bp, Homo sapien
cgaagaccttgagggaccactgaga

SEQ ID NO: 3385549 - DNA, 25 bp, Homo sapien
tctcaaagtcctgtctgacagggca

SEQ ID NO: 3385550 - DNA, 25 bp, Homo sapien
ctgcaaggtaggaaaggatcatcac

SEQ ID NO: 3385551 - DNA, 25 bp, Homo sapien
aaggatcatcacagcattgaagaag

SEQ ID NO: 3385552 - DNA, 25 bp, Homo sapien
gcaaggtaggaaaggatcatcacag

SEQ ID NO: 3385553 - DNA, 25 bp, Homo sapien
ggaaaggatcatcacagcattgaag

SEQ ID NO: 3385554 - DNA, 25 bp, Homo sapien
aagcacagtagtaaccttccaggaa

SEQ ID NO: 3385555 - DNA, 25 bp, Homo sapien
acagtagtaaccttccaggaaggca

SEQ ID NO: 3385556 - DNA, 25 bp, Homo sapien
agcacagtagtaaccttccaggaag

SEQ ID NO: 3385557 - DNA, 25 bp, Homo sapien
gcacagtagtaaccttccaggaagg

SEQ ID NO: 3385558 - DNA, 25 bp, Homo sapien
cagcccgctcagtggcatctgctgg

SEQ ID NO: 3385559 - DNA, 25 bp, Homo sapien
gctcagaaaccctagtctggtgccc

SEQ ID NO: 3385560 - DNA, 25 bp, Homo sapien
gcgtaatggcaaacgtataatctgg

SEQ ID NO: 3385561 - DNA, 25 bp, Homo sapien
tcatcacagaaacgaggattttgcg

SEQ ID NO: 3385562 - DNA, 25 bp, Homo sapien
ctgatattgatgaggcgtaatggca

SEQ ID NO: 3385563 - DNA, 25 bp, Homo sapien
cagttttgtaccgaagactgggacg

SEQ ID NO: 3385564 - DNA, 25 bp, Homo sapien
cggcagcggtaccagatgggccaca

SEQ ID NO: 3385565 - DNA, 25 bp, Homo sapien
ctcggtgctgatggcgctcagcata

SEQ ID NO: 3385566 - DNA, 25 bp, Homo sapien
agcggtaccagatgggccacagaac

SEQ ID NO: 3385567 - DNA, 25 bp, Homo sapien
gccacagaacagacaggcagcgctc

SEQ ID NO: 3385568 - DNA, 25 bp, Homo sapien
tccagcatactaaacagcagggaca

SEQ ID NO: 3385569 - DNA, 25 bp, Homo sapien
actccagcatactaaacagcaggga

SEQ ID NO: 3385570 - DNA, 25 bp, Homo sapien
tccactccagcatactaaacagcag

SEQ ID NO: 3385571 - DNA, 25 bp, Homo sapien
cactccagcatactaaacagcaggg

SEQ ID NO: 3385572 - DNA, 25 bp, Homo sapien
agccacgcgactgggatgaaatctg

SEQ ID NO: 3385573 - DNA, 25 bp, Homo sapien
aatcagccacgcgactgggatgaaa

SEQ ID NO: 3385574 - DNA, 25 bp, Homo sapien
aaaaatcagccacgcgactgggatg

SEQ ID NO: 3385575 - DNA, 25 bp, Homo sapien
tcagccacgcgactgggatgaaatc

SEQ ID NO: 3385576 - DNA, 25 bp, Homo sapien
aggacagggacatgcaaaccagata

SEQ ID NO: 3385577 - DNA, 25 bp, Homo sapien
ggacatgcaaaccagataaacatga

SEQ ID NO: 3385578 - DNA, 25 bp, Homo sapien
aattcaggtgcatcctgtaaattag

SEQ ID NO: 3385579 - DNA, 25 bp, Homo sapien
ggtgcatcctgtaaattagggcccc

SEQ ID NO: 3385580 - DNA, 25 bp, Homo sapien
ttcacctttatccacctcaggcttg

SEQ ID NO: 3385581 - DNA, 25 bp, Homo sapien
tcacctttatccacctcaggcttgt

SEQ ID NO: 3385582 - DNA, 25 bp, Homo sapien
cttcacctttatccacctcaggctt

SEQ ID NO: 3385583 - DNA, 25 bp, Homo sapien
ccttcacctttatccacctcaggct

SEQ ID NO: 3385584 - DNA, 25 bp, Homo sapien
aatgcctccagtcatagaagggaac

SEQ ID NO: 3385585 - DNA, 25 bp, Homo sapien
caggagagggctattcataaaacca

SEQ ID NO: 3385586 - DNA, 25 bp, Homo sapien
taagaattgagcttccaactgcagt

SEQ ID NO: 3385587 - DNA, 25 bp, Homo sapien
aaagccaacgtgtgaccatgtgtgg

SEQ ID NO: 3385588 - DNA, 25 bp, Homo sapien
cactgtcccttttaagaactttgca

SEQ ID NO: 3385589 - DNA, 25 bp, Homo sapien
ggatacctcgtagaatttgaccata

SEQ ID NO: 3385590 - DNA, 25 bp, Homo sapien
tcacgaatttcctagtttggatacc

SEQ ID NO: 3385591 - DNA, 25 bp, Homo sapien
tgcattcacaataagtcgtaaccgt

SEQ ID NO: 3385592 - DNA, 25 bp, Homo sapien
tcagcgcccgggcagtcacagccct

SEQ ID NO: 3385593 - DNA, 25 bp, Homo sapien
gtcagcgcccgggcagtcacagccc

SEQ ID NO: 3385594 - DNA, 25 bp, Homo sapien
agcgtggcccctactttgagccgct

SEQ ID NO: 3385595 - DNA, 25 bp, Homo sapien
cttacaggaggctgcgtacagtgct

SEQ ID NO: 3385596 - DNA, 25 bp, Homo sapien
tcagcaggtgttcggtcagcagagc

SEQ ID NO: 3385597 - DNA, 25 bp, Homo sapien
cgtccggctcctcgttgcagatgct

SEQ ID NO: 3385598 - DNA, 25 bp, Homo sapien
gggttgctttgtttgccccagcact

SEQ ID NO: 3385599 - DNA, 25 bp, Homo sapien
tcttggatcttagcagctgaagggt

SEQ ID NO: 3385600 - DNA, 25 bp, Homo sapien
tctttttagcgccaggaagaacagt

SEQ ID NO: 3385601 - DNA, 25 bp, Homo sapien
tgtttgtgccctatagctttgaaag

SEQ ID NO: 3385602 - DNA, 25 bp, Homo sapien
catgacagttgacaggtttcttggg

SEQ ID NO: 3385603 - DNA, 25 bp, Homo sapien
gcagtaccagataggccgcaggaca

SEQ ID NO: 3385604 - DNA, 25 bp, Homo sapien
caggcagcactcagtactgatggca

SEQ ID NO: 3385605 - DNA, 25 bp, Homo sapien
cagacaggcagcactcagtactgat

SEQ ID NO: 3385606 - DNA, 25 bp, Homo sapien
ccacgaggatccagaataataggaa

SEQ ID NO: 3385607 - DNA, 25 bp, Homo sapien
gatccagaataataggaaccactta

SEQ ID NO: 3385608 - DNA, 25 bp, Homo sapien
gatatcaaaatccacgaggatccag

SEQ ID NO: 3385609 - DNA, 25 bp, Homo sapien
cagaataataggaaccacttaatgc

SEQ ID NO: 3385610 - DNA, 25 bp, Homo sapien
gttaagagaggacaggacatctgaa

SEQ ID NO: 3385611 - DNA, 25 bp, Homo sapien
ttaagagaggacaggacatctgaaa

SEQ ID NO: 3385612 - DNA, 25 bp, Homo sapien
ctgttaagagaggacaggacatctg

SEQ ID NO: 3385613 - DNA, 25 bp, Homo sapien
tgttaagagaggacaggacatctga

SEQ ID NO: 3385614 - DNA, 25 bp, Homo sapien
aatctgcttcccgacatctccaggg

SEQ ID NO: 3385615 - DNA, 25 bp, Homo sapien
caattttgacgctgcctaaaggagc

SEQ ID NO: 3385616 - DNA, 25 bp, Homo sapien
gccttctggagaaccagcttcaggt

SEQ ID NO: 3385617 - DNA, 25 bp, Homo sapien
catccacctcaggtgtgtcctgcag

SEQ ID NO: 3385618 - DNA, 25 bp, Homo sapien
agccgggaaccgaagagactcaact

SEQ ID NO: 3385619 - DNA, 25 bp, Homo sapien
aagagccgggaaccgaagagactca

SEQ ID NO: 3385620 - DNA, 25 bp, Homo sapien
ggaaccgaagagactcaactgattc

SEQ ID NO: 3385621 - DNA, 25 bp, Homo sapien
ccgggaaccgaagagactcaactga

SEQ ID NO: 3385622 - DNA, 25 bp, Homo sapien
agcggtcccgaggtgaggaggccag

SEQ ID NO: 3385623 - DNA, 25 bp, Homo sapien
ctccacagtcagcggtcccgaggtg

SEQ ID NO: 3385624 - DNA, 25 bp, Homo sapien
gccagaaatcccagtctcccgggag

SEQ ID NO: 3385625 - DNA, 25 bp, Homo sapien
gaggccagaaatcccagtctcccgg

SEQ ID NO: 3385626 - DNA, 25 bp, Homo sapien
ctgtaacaccatccaagcctggagt

SEQ ID NO: 3385627 - DNA, 25 bp, Homo sapien
caccatccaagcctggagtttaaca

SEQ ID NO: 3385628 - DNA, 25 bp, Homo sapien
aacaccatccaagcctggagtttaa

SEQ ID NO: 3385629 - DNA, 25 bp, Homo sapien
catccaagcctggagtttaacagaa

SEQ ID NO: 3385630 - DNA, 25 bp, Homo sapien
atccatcatgttgcttaagttcttc

SEQ ID NO: 3385631 - DNA, 25 bp, Homo sapien
attgcgacgttgttgaaggctgcac

SEQ ID NO: 3385632 - DNA, 25 bp, Homo sapien
aatgtgattgcgacgttgttgaagg

SEQ ID NO: 3385633 - DNA, 25 bp, Homo sapien
caagtaatgcttcatttcactaaat

SEQ ID NO: 3385634 - DNA, 25 bp, Homo sapien
ggaaatgtgattgcgacgttgttga

SEQ ID NO: 3385635 - DNA, 25 bp, Homo sapien
tcaatcggggaaagattccccgata

SEQ ID NO: 3385636 - DNA, 25 bp, Homo sapien
catcaatcggggaaagattccccga

SEQ ID NO: 3385637 - DNA, 25 bp, Homo sapien
ctgcatcaatcggggaaagattccc

SEQ ID NO: 3385638 - DNA, 25 bp, Homo sapien
gcatcaatcggggaaagattccccg

SEQ ID NO: 3385639 - DNA, 25 bp, Homo sapien
gccacaggttgcaaactctggagca

SEQ ID NO: 3385640 - DNA, 25 bp, Homo sapien
cacaggttgcaaactctggagcact

SEQ ID NO: 3385641 - DNA, 25 bp, Homo sapien
aggttgcaaactctggagcactgac

SEQ ID NO: 3385642 - DNA, 25 bp, Homo sapien
caggttgcaaactctggagcactga

SEQ ID NO: 3385643 - DNA, 25 bp, Homo sapien
ctgaagtgaaaattgcttccgttgt

SEQ ID NO: 3385644 - DNA, 25 bp, Homo sapien
catggtgcttgtggtcttgaagcaa

SEQ ID NO: 3385645 - DNA, 25 bp, Homo sapien
tggtgcttgtggtcttgaagcaatg

SEQ ID NO: 3385646 - DNA, 25 bp, Homo sapien
tcatggtgcttgtggtcttgaagca

SEQ ID NO: 3385647 - DNA, 25 bp, Homo sapien
ggtgcttgtggtcttgaagcaatgt

SEQ ID NO: 3385648 - DNA, 25 bp, Homo sapien
ctcgataaaactctccaattccatg

SEQ ID NO: 3385649 - DNA, 25 bp, Homo sapien
gataaaactctccaattccatgaca

SEQ ID NO: 3385650 - DNA, 25 bp, Homo sapien
ccttgaaagcctgataaatgttggc

SEQ ID NO: 3385651 - DNA, 25 bp, Homo sapien
tgaaagcctgataaatgttggcaaa

SEQ ID NO: 3385652 - DNA, 25 bp, Homo sapien
aaagacattgctgagtccattctgg

SEQ ID NO: 3385653 - DNA, 25 bp, Homo sapien
gacattgctgagtccattctggaaa

SEQ ID NO: 3385654 - DNA, 25 bp, Homo sapien
attgctgagtccattctggaaaaga

SEQ ID NO: 3385655 - DNA, 25 bp, Homo sapien
aaaaaaaagacattgctgagtccat

SEQ ID NO: 3385656 - DNA, 25 bp, Homo sapien
ccaaatgagaattgtgagtcgtcgc

SEQ ID NO: 3385657 - DNA, 25 bp, Homo sapien
catataacctttgcattgattatgc

SEQ ID NO: 3385658 - DNA, 25 bp, Homo sapien
gaccaaatgagaattgtgagtcgtc

SEQ ID NO: 3385659 - DNA, 25 bp, Homo sapien
atgagaattgtgagtcgtcgcggta

SEQ ID NO: 3385660 - DNA, 25 bp, Homo sapien
tggcctggagttatgacaccaactt

SEQ ID NO: 3385661 - DNA, 25 bp, Homo sapien
ggtctattcagttgataagtggcac

SEQ ID NO: 3385662 - DNA, 25 bp, Homo sapien
gaagaggccaaactgcattcttctt

SEQ ID NO: 3385663 - DNA, 25 bp, Homo sapien
atttggccaattaaggaagaggcca

SEQ ID NO: 3385664 - DNA, 25 bp, Homo sapien
gaaaacagctttgcccataactcac

SEQ ID NO: 3385665 - DNA, 25 bp, Homo sapien
tattctattttgttgatgcttaagg

SEQ ID NO: 3385666 - DNA, 25 bp, Homo sapien
aggaaaacagctttgcccataactc

SEQ ID NO: 3385667 - DNA, 25 bp, Homo sapien
ttttgttgatgcttaaggaaaacag

SEQ ID NO: 3385668 - DNA, 25 bp, Homo sapien
tctgaatagaaataggataacgact

SEQ ID NO: 3385669 - DNA, 25 bp, Homo sapien
ccagtcacagccgtttatgtttcaa

SEQ ID NO: 3385670 - DNA, 25 bp, Homo sapien
tgaaaacttgttggaacacctatta

SEQ ID NO: 3385671 - DNA, 25 bp, Homo sapien
tcaatgcagaagatttcaagactgg

SEQ ID NO: 3385672 - DNA, 25 bp, Homo sapien
tcacactgaaggtaaaagcaatagc

SEQ ID NO: 3385673 - DNA, 25 bp, Homo sapien
gacaaagctgttggttacaagttca

SEQ ID NO: 3385674 - DNA, 25 bp, Homo sapien
ttgacttcaagttcagacaaagctg

SEQ ID NO: 3385675 - DNA, 25 bp, Homo sapien
aattattaccacactggttcacact

SEQ ID NO: 3385676 - DNA, 25 bp, Homo sapien
gtgtgcttaaccacttttaataatg

SEQ ID NO: 3385677 - DNA, 25 bp, Homo sapien
tttgggagccactaggcaacatgta

SEQ ID NO: 3385678 - DNA, 25 bp, Homo sapien
tactgagtattacattgtaactggg

SEQ ID NO: 3385679 - DNA, 25 bp, Homo sapien
agtattacattgtaactgggcttgg

SEQ ID NO: 3385680 - DNA, 25 bp, Homo sapien
tctgccttatggctgcatcccatga

SEQ ID NO: 3385681 - DNA, 25 bp, Homo sapien
ccctggtaggctgattattttaaag

SEQ ID NO: 3385682 - DNA, 25 bp, Homo sapien
taaggtatcatttccccactgtatg

SEQ ID NO: 3385683 - DNA, 25 bp, Homo sapien
gatgctggaagaggctattctctgc

SEQ ID NO: 3385684 - DNA, 25 bp, Homo sapien
tccttgtagaatcttggtacttgtc

SEQ ID NO: 3385685 - DNA, 25 bp, Homo sapien
tagtttagtcctgcttgtgtatata

SEQ ID NO: 3385686 - DNA, 25 bp, Homo sapien
tgactaggtcaatgtttggtagaat

SEQ ID NO: 3385687 - DNA, 25 bp, Homo sapien
gtttagtttagtcctgcttgtgtat

SEQ ID NO: 3385688 - DNA, 25 bp, Homo sapien
gaggtggtgggtgaagctgggggct

SEQ ID NO: 3385689 - DNA, 25 bp, Homo sapien
gcccaggtgctggctcggcatgacc

SEQ ID NO: 3385690 - DNA, 25 bp, Homo sapien
gtgctggctcggcatgaccgcgcag

SEQ ID NO: 3385691 - DNA, 25 bp, Homo sapien
aagctgggggctgcggcccagttcc

SEQ ID NO: 3385692 - DNA, 25 bp, Homo sapien
cggtgtgcagaacgctcggatcctg

SEQ ID NO: 3385693 - DNA, 25 bp, Homo sapien
atttcctcggtgtgcagaacgctcg

SEQ ID NO: 3385694 - DNA, 25 bp, Homo sapien
gctcgttcactttgcaggggtccat

SEQ ID NO: 3385695 - DNA, 25 bp, Homo sapien
actctctcaggaagcgcatttcctc

SEQ ID NO: 3385696 - DNA, 25 bp, Homo sapien
cctcagttgatggttcgtctgcctt

SEQ ID NO: 3385697 - DNA, 25 bp, Homo sapien
cactttcctcagttgatggttcgtc

SEQ ID NO: 3385698 - DNA, 25 bp, Homo sapien
ctttcctcagttgatggttcgtctg

SEQ ID NO: 3385699 - DNA, 25 bp, Homo sapien
ttcctcagttgatggttcgtctgcc

SEQ ID NO: 3385700 - DNA, 25 bp, Homo sapien
gacttcaatagcagccactttttta

SEQ ID NO: 3385701 - DNA, 25 bp, Homo sapien
atctcctccgttatctccacatttt

SEQ ID NO: 3385702 - DNA, 25 bp, Homo sapien
catttaggacttcaatagcagccac

SEQ ID NO: 3385703 - DNA, 25 bp, Homo sapien
atcatctcctccgttatctccacat

SEQ ID NO: 3385704 - DNA, 25 bp, Homo sapien
gttttcgctcatactttctccaatg

SEQ ID NO: 3385705 - DNA, 25 bp, Homo sapien
ctcgctcttcatgttttcgctcata

SEQ ID NO: 3385706 - DNA, 25 bp, Homo sapien
ccacctggaaaagggccatagtgag

SEQ ID NO: 3385707 - DNA, 25 bp, Homo sapien
aagccacctggaaaagggccatagt

SEQ ID NO: 3385708 - DNA, 25 bp, Homo sapien
aggcatgtcccctcccattccaggc

SEQ ID NO: 3385709 - DNA, 25 bp, Homo sapien
aggcattccggccattccaggcatg

SEQ ID NO: 3385710 - DNA, 25 bp, Homo sapien
tccaggcattcctccgggaaaatta

SEQ ID NO: 3385711 - DNA, 25 bp, Homo sapien
gcattccggccattccaggcatgtc

SEQ ID NO: 3385712 - DNA, 25 bp, Homo sapien
tatgcttgacctccaaatttggctg

SEQ ID NO: 3385713 - DNA, 25 bp, Homo sapien
tggaaggccaccataacttctggat

SEQ ID NO: 3385714 - DNA, 25 bp, Homo sapien
ttgacatatttgctgggttctgagc

SEQ ID NO: 3385715 - DNA, 25 bp, Homo sapien
cctttgggttgctctggtattttga

SEQ ID NO: 3385716 - DNA, 25 bp, Homo sapien
tcctagtaggaaaacattatctgaa

SEQ ID NO: 3385717 - DNA, 25 bp, Homo sapien
ggggtagggattatcttcaaagcac

SEQ ID NO: 3385718 - DNA, 25 bp, Homo sapien
tgtaattcctagtaggaaaacatta

SEQ ID NO: 3385719 - DNA, 25 bp, Homo sapien
ggtttgtattattgcgacatccata

SEQ ID NO: 3385720 - DNA, 25 bp, Homo sapien
tgccagggagcggtggctgctattt

SEQ ID NO: 3385721 - DNA, 25 bp, Homo sapien
gccagggagcggtggctgctattta

SEQ ID NO: 3385722 - DNA, 25 bp, Homo sapien
ttaaaaatcactccttggtgtgctc

SEQ ID NO: 3385723 - DNA, 25 bp, Homo sapien
aaaaatcactccttggtgtgctcct

SEQ ID NO: 3385724 - DNA, 25 bp, Homo sapien
aaaatcactccttggtgtgctcctc

SEQ ID NO: 3385725 - DNA, 25 bp, Homo sapien
taaaaatcactccttggtgtgctcc

SEQ ID NO: 3385726 - DNA, 25 bp, Homo sapien
agatcagaggagataagacaccttc

SEQ ID NO: 3385727 - DNA, 25 bp, Homo sapien
gaggagataagacaccttcagaatg

SEQ ID NO: 3385728 - DNA, 25 bp, Homo sapien
tcagaggagataagacaccttcaga

SEQ ID NO: 3385729 - DNA, 25 bp, Homo sapien
ctctctagatcagaggagataagac

SEQ ID NO: 3385730 - DNA, 25 bp, Homo sapien
tgggacttatattccgacgagagcc

SEQ ID NO: 3385731 - DNA, 25 bp, Homo sapien
ggaaggcaggagttaccaccagact

SEQ ID NO: 3385732 - DNA, 25 bp, Homo sapien
tctaggaaaccttgcagcaggacct

SEQ ID NO: 3385733 - DNA, 25 bp, Homo sapien
gcctgactgcataagaggatgccaa

SEQ ID NO: 3385734 - DNA, 25 bp, Homo sapien
aggaacgaaaagaagcttcggctgc

SEQ ID NO: 3385735 - DNA, 25 bp, Homo sapien
ggaacgaaaagaagcttcggctgct

SEQ ID NO: 3385736 - DNA, 25 bp, Homo sapien
catcaaaagcctcgccaaggaacga

SEQ ID NO: 3385737 - DNA, 25 bp, Homo sapien
ctgaaagactcgagacaggcaaccc

SEQ ID NO: 3385738 - DNA, 25 bp, Homo sapien
tgtttttgatacaccttgcagcggc

SEQ ID NO: 3385739 - DNA, 25 bp, Homo sapien
tcccttacggctcaggagatgtgtt

SEQ ID NO: 3385740 - DNA, 25 bp, Homo sapien
tgtgcgttgttactggatgccccgt

SEQ ID NO: 3385741 - DNA, 25 bp, Homo sapien
catgggtatttcaggtgatgccaag

SEQ ID NO: 3385742 - DNA, 25 bp, Homo sapien
gccaaggtgtgcctgagattcataa

SEQ ID NO: 3385743 - DNA, 25 bp, Homo sapien
ggtgtgcctgagattcataaccatc

SEQ ID NO: 3385744 - DNA, 25 bp, Homo sapien
ttgaaggcatgggtatttcaggtga

SEQ ID NO: 3385745 - DNA, 25 bp, Homo sapien
ccccttttggcagcatcatagttcc

SEQ ID NO: 3385746 - DNA, 25 bp, Homo sapien
gaagtatttgtctgagccgatgtaa

SEQ ID NO: 3385747 - DNA, 25 bp, Homo sapien
tctgagccgatgtaattggcttctc

SEQ ID NO: 3385748 - DNA, 25 bp, Homo sapien
cgatgtaattggcttctctcatgtc

SEQ ID NO: 3385749 - DNA, 25 bp, Homo sapien
catggccaaagaatctctggatatt

SEQ ID NO: 3385750 - DNA, 25 bp, Homo sapien
accatggccaaagaatctctggata

SEQ ID NO: 3385751 - DNA, 25 bp, Homo sapien
ggccaaagaatctctggatattctc

SEQ ID NO: 3385752 - DNA, 25 bp, Homo sapien
ccatggccaaagaatctctggatat

SEQ ID NO: 3385753 - DNA, 25 bp, Homo sapien
tgccctgagggcctcacagccagat

SEQ ID NO: 3385754 - DNA, 25 bp, Homo sapien
agtatttattagatacccattgtgt

SEQ ID NO: 3385755 - DNA, 25 bp, Homo sapien
tattagatacccattgtgtaccctc

SEQ ID NO: 3385756 - DNA, 25 bp, Homo sapien
tagatacccattgtgtaccctctcc

SEQ ID NO: 3385757 - DNA, 25 bp, Homo sapien
tgtatcagttgccaggactcttggg

SEQ ID NO: 3385758 - DNA, 25 bp, Homo sapien
ggacaggacacaactgacagggcag

SEQ ID NO: 3385759 - DNA, 25 bp, Homo sapien
taaaaattgggtcagtcagaagcag

SEQ ID NO: 3385760 - DNA, 25 bp, Homo sapien
tctgccccagagtgtggttcatggc

SEQ ID NO: 3385761 - DNA, 25 bp, Homo sapien
aaatttgtgattgccctggtcaagg

SEQ ID NO: 3385762 - DNA, 25 bp, Homo sapien
tgttggacctggtagttatcagacc

SEQ ID NO: 3385763 - DNA, 25 bp, Homo sapien
gacagtgggaagacgaaaattgaaa

SEQ ID NO: 3385764 - DNA, 25 bp, Homo sapien
tggtcaaggctcaaaaccttgtagt

SEQ ID NO: 3385765 - DNA, 25 bp, Homo sapien
tagctttgtgtgtaaaactactgag

SEQ ID NO: 3385766 - DNA, 25 bp, Homo sapien
caagttgccttcctaggactaatag

SEQ ID NO: 3385767 - DNA, 25 bp, Homo sapien
cacaagcccagaatgggaatgactt

SEQ ID NO: 3385768 - DNA, 25 bp, Homo sapien
ttgaaattgaagaagtaggctgggc

SEQ ID NO: 3385769 - DNA, 25 bp, Homo sapien
ggtggaagctacaactctagacagg

SEQ ID NO: 3385770 - DNA, 25 bp, Homo sapien
ttggatccggtcgagttccgctgcg

SEQ ID NO: 3385771 - DNA, 25 bp, Homo sapien
gtagccaccgcctctgttactaggg

SEQ ID NO: 3385772 - DNA, 25 bp, Homo sapien
caggccgtagagagcgtaatcgcga

SEQ ID NO: 3385773 - DNA, 25 bp, Homo sapien
ttcatcattacacgacaatcaaatg

SEQ ID NO: 3385774 - DNA, 25 bp, Homo sapien
caaaactaggagtgtgtggactggc

SEQ ID NO: 3385775 - DNA, 25 bp, Homo sapien
tttttcatcattacacgacaatcaa

SEQ ID NO: 3385776 - DNA, 25 bp, Homo sapien
tcattacacgacaatcaaatgacca

SEQ ID NO: 3385777 - DNA, 25 bp, Homo sapien
agtcggctgaatggcctggtcaaca

SEQ ID NO: 3385778 - DNA, 25 bp, Homo sapien
actgctacaagtcggctgaatggcc

SEQ ID NO: 3385779 - DNA, 25 bp, Homo sapien
tgttgcactgctacaagtcggctga

SEQ ID NO: 3385780 - DNA, 25 bp, Homo sapien
caatctgttgcactgctacaagtcg

SEQ ID NO: 3385781 - DNA, 25 bp, Homo sapien
atttcaggaggtttaacagaatcac

SEQ ID NO: 3385782 - DNA, 25 bp, Homo sapien
cgaacattgggcacaaatggtcaat

SEQ ID NO: 3385783 - DNA, 25 bp, Homo sapien
tgtctcacagctaatttgcctggta

SEQ ID NO: 3385784 - DNA, 25 bp, Homo sapien
gcacctcttaattgttcaaggacca

SEQ ID NO: 3385785 - DNA, 25 bp, Homo sapien
taagaaagagtctggtccctccacc

SEQ ID NO: 3385786 - DNA, 25 bp, Homo sapien
atatgtggggacttcccagaaccac

SEQ ID NO: 3385787 - DNA, 25 bp, Homo sapien
cgtcttggccatgattcattggtat

SEQ ID NO: 3385788 - DNA, 25 bp, Homo sapien
cattggtataatgcctaactagtta

SEQ ID NO: 3385789 - DNA, 25 bp, Homo sapien
tctgcatacatatggctgattgtaa

SEQ ID NO: 3385790 - DNA, 25 bp, Homo sapien
tggctgattgtaaatctatctttgc

SEQ ID NO: 3385791 - DNA, 25 bp, Homo sapien
acatatggctgattgtaaatctatc

SEQ ID NO: 3385792 - DNA, 25 bp, Homo sapien
gcatacatatggctgattgtaaatc

SEQ ID NO: 3385793 - DNA, 25 bp, Homo sapien
tatatgtaaacctgtacctgttctg

SEQ ID NO: 3385794 - DNA, 25 bp, Homo sapien
tacatcagaacttagtatagctgac

SEQ ID NO: 3385795 - DNA, 25 bp, Homo sapien
tgtgtggagatctatatgtcaggta

SEQ ID NO: 3385796 - DNA, 25 bp, Homo sapien
ccacagagggctggttaaatacatg

SEQ ID NO: 3385797 - DNA, 25 bp, Homo sapien
tacactgtggttatcacaatgtgcg

SEQ ID NO: 3385798 - DNA, 25 bp, Homo sapien
gggcatattacgtaggttttcactg

SEQ ID NO: 3385799 - DNA, 25 bp, Homo sapien
caattgcttctttcagatgtgggca

SEQ ID NO: 3385800 - DNA, 25 bp, Homo sapien
gagaaattggagatgggcatactgt

SEQ ID NO: 3385801 - DNA, 25 bp, Homo sapien
ggaagttagttgtgtcccctgcatg

SEQ ID NO: 3385802 - DNA, 25 bp, Homo sapien
tgcatgtaggaccagctgaagctga

SEQ ID NO: 3385803 - DNA, 25 bp, Homo sapien
aaatggaagttagttgtgtcccctg

SEQ ID NO: 3385804 - DNA, 25 bp, Homo sapien
tgtcccctgcatgtaggaccagctg

SEQ ID NO: 3385805 - DNA, 25 bp, Homo sapien
gtaattaagagcaaaataccccaca

SEQ ID NO: 3385806 - DNA, 25 bp, Homo sapien
tcaccatgtctgcagtgtactgtct

SEQ ID NO: 3385807 - DNA, 25 bp, Homo sapien
gggtttgatcttattcatctccgta

SEQ ID NO: 3385808 - DNA, 25 bp, Homo sapien
gaacaaatgaagtggtgataaatgg

SEQ ID NO: 3385809 - DNA, 25 bp, Homo sapien
actgatcacttgactcacaacaagg

SEQ ID NO: 3385810 - DNA, 25 bp, Homo sapien
ttcagaaatctagaaggctcacata

SEQ ID NO: 3385811 - DNA, 25 bp, Homo sapien
tcagaaatctagaaggctcacatac

SEQ ID NO: 3385812 - DNA, 25 bp, Homo sapien
tttcttcagaaatctagaaggctca

SEQ ID NO: 3385813 - DNA, 25 bp, Homo sapien
tcttcagaaatctagaaggctcaca

SEQ ID NO: 3385814 - DNA, 25 bp, Homo sapien
aattatatcttagaccgttacagcc

SEQ ID NO: 3385815 - DNA, 25 bp, Homo sapien
tgctggataggtcctaaatatggac

SEQ ID NO: 3385816 - DNA, 25 bp, Homo sapien
tacagccatcagtttggggccggac

SEQ ID NO: 3385817 - DNA, 25 bp, Homo sapien
aatatggactcaatgatatcagaag

SEQ ID NO: 3385818 - DNA, 25 bp, Homo sapien
tctctgtcatgttgtggggaacatt

SEQ ID NO: 3385819 - DNA, 25 bp, Homo sapien
cagccgatccctgtgaaaataatgg

SEQ ID NO: 3385820 - DNA, 25 bp, Homo sapien
tttggcacattctgcaaagagatcc

SEQ ID NO: 3385821 - DNA, 25 bp, Homo sapien
tgaccctgtattcagccgatccctg

SEQ ID NO: 3385822 - DNA, 25 bp, Homo sapien
aattaacacttataatgtctagagg

SEQ ID NO: 3385823 - DNA, 25 bp, Homo sapien
ggtggcaagttaaataccagtgtct

SEQ ID NO: 3385824 - DNA, 25 bp, Homo sapien
tctagagggtggcaagttaaatacc

SEQ ID NO: 3385825 - DNA, 25 bp, Homo sapien
tataatgtctagagggtggcaagtt

SEQ ID NO: 3385826 - DNA, 25 bp, Homo sapien
tctagtagtgggtttttcactccta

SEQ ID NO: 3385827 - DNA, 25 bp, Homo sapien
tttcactcctaatgaaaccattgtt

SEQ ID NO: 3385828 - DNA, 25 bp, Homo sapien
tagtgggtttttcactcctaatgaa

SEQ ID NO: 3385829 - DNA, 25 bp, Homo sapien
tttttcactcctaatgaaaccattg

SEQ ID NO: 3385830 - DNA, 25 bp, Homo sapien
ggcaattttaatggcaaacaacgct

SEQ ID NO: 3385831 - DNA, 25 bp, Homo sapien
aaaaggttttagcaactcacacagg

SEQ ID NO: 3385832 - DNA, 25 bp, Homo sapien
cacaagtggaataggtctactacgc

SEQ ID NO: 3385833 - DNA, 25 bp, Homo sapien
ttactagagaactgcggatgaggga

SEQ ID NO: 3385834 - DNA, 25 bp, Homo sapien
tgtgccgccaggcccggctaatttt

SEQ ID NO: 3385835 - DNA, 25 bp, Homo sapien
tgcctccccggttccagcgactctc

SEQ ID NO: 3385836 - DNA, 25 bp, Homo sapien
atgtgccgccaggcccggctaattt

SEQ ID NO: 3385837 - DNA, 25 bp, Homo sapien
tctgcctccccggttccagcgactc

SEQ ID NO: 3385838 - DNA, 25 bp, Homo sapien
ctgtgagaaataatagattaaaaat

SEQ ID NO: 3385839 - DNA, 25 bp, Homo sapien
tgtgagaaataatagattaaaaatt

SEQ ID NO: 3385840 - DNA, 25 bp, Homo sapien
accatggcactgtgatggttaaatc

SEQ ID NO: 3385841 - DNA, 25 bp, Homo sapien
catggcactgtgatggttaaatctc

SEQ ID NO: 3385842 - DNA, 25 bp, Homo sapien
cactgtgatggttaaatctcttgat

SEQ ID NO: 3385843 - DNA, 25 bp, Homo sapien
ggcactgtgatggttaaatctcttg

SEQ ID NO: 3385844 - DNA, 25 bp, Homo sapien
cactagtttgttcattttgtgcttc

SEQ ID NO: 3385845 - DNA, 25 bp, Homo sapien
gttgctgggctcactagtttgttca

SEQ ID NO: 3385846 - DNA, 25 bp, Homo sapien
gctcactagtttgttcattttgtgc

SEQ ID NO: 3385847 - DNA, 25 bp, Homo sapien
gctgggctcactagtttgttcattt

SEQ ID NO: 3385848 - DNA, 25 bp, Homo sapien
aagcagtctgcatctccggaatttc

SEQ ID NO: 3385849 - DNA, 25 bp, Homo sapien
tctgcatctccggaatttccatcca

SEQ ID NO: 3385850 - DNA, 25 bp, Homo sapien
cagtctgcatctccggaatttccat

SEQ ID NO: 3385851 - DNA, 25 bp, Homo sapien
ccttttgactgctggctgaaagcag

SEQ ID NO: 3385852 - DNA, 25 bp, Homo sapien
tcaatggaaagttggctggcaagcc

SEQ ID NO: 3385853 - DNA, 25 bp, Homo sapien
cacaggaaataagcgtatacagtac

SEQ ID NO: 3385854 - DNA, 25 bp, Homo sapien
ctaggtttaacatgagggccaattc

SEQ ID NO: 3385855 - DNA, 25 bp, Homo sapien
tacaaaatagcgtggcaaagttgca

SEQ ID NO: 3385856 - DNA, 25 bp, Homo sapien
tagaataaacagcagtcaaccactg

SEQ ID NO: 3385857 - DNA, 25 bp, Homo sapien
caggctaatctaagtgttcggaaca

SEQ ID NO: 3385858 - DNA, 25 bp, Homo sapien
ggtaatgctgcccaactacaggcta

SEQ ID NO: 3385859 - DNA, 25 bp, Homo sapien
gccaaggccttgttaggtcacctga

SEQ ID NO: 3385860 - DNA, 25 bp, Homo sapien
cagtgcttctaacaccatttgtaaa

SEQ ID NO: 3385861 - DNA, 25 bp, Homo sapien
acatttgtgcaaatcagccttgaaa

SEQ ID NO: 3385862 - DNA, 25 bp, Homo sapien
gaaattcatctggtcaactcttatt

SEQ ID NO: 3385863 - DNA, 25 bp, Homo sapien
ccctgtgctattaacaacctgctta

SEQ ID NO: 3385864 - DNA, 25 bp, Homo sapien
ctataattattaacacagtactttt

SEQ ID NO: 3385865 - DNA, 25 bp, Homo sapien
tgacttcttgaggtttagtgcaatc

SEQ ID NO: 3385866 - DNA, 25 bp, Homo sapien
ctgacttcttgaggtttagtgcaat

SEQ ID NO: 3385867 - DNA, 25 bp, Homo sapien
tgaaaagaattaataatgtcctgac

SEQ ID NO: 3385868 - DNA, 25 bp, Homo sapien
taataatgtcctgacttgttgcata

SEQ ID NO: 3385869 - DNA, 25 bp, Homo sapien
actggattggagttggaccatgata

SEQ ID NO: 3385870 - DNA, 25 bp, Homo sapien
ggattggagttggaccatgataata

SEQ ID NO: 3385871 - DNA, 25 bp, Homo sapien
gagttaacttgggtgtataagcttc

SEQ ID NO: 3385872 - DNA, 25 bp, Homo sapien
ctgagttaacttgggtgtataagct

SEQ ID NO: 3385873 - DNA, 25 bp, Homo sapien
tgagttaacttgggtgtataagctt

SEQ ID NO: 3385874 - DNA, 25 bp, Homo sapien
tgcctaatgtgaatctagtcatgag

SEQ ID NO: 3385875 - DNA, 25 bp, Homo sapien
tcatttgcctcctgatatgacacac

SEQ ID NO: 3385876 - DNA, 25 bp, Homo sapien
tatgacacactgagtaggatacaac

SEQ ID NO: 3385877 - DNA, 25 bp, Homo sapien
ctgtggagtttctggcaaaaatgcc

SEQ ID NO: 3385878 - DNA, 25 bp, Homo sapien
cctgcataagtgcccctccaggtga

SEQ ID NO: 3385879 - DNA, 25 bp, Homo sapien
gcataagtgcccctccaggtgacag

SEQ ID NO: 3385880 - DNA, 25 bp, Homo sapien
tgcataagtgcccctccaggtgaca

SEQ ID NO: 3385881 - DNA, 25 bp, Homo sapien
tccctgcataagtgcccctccaggt

SEQ ID NO: 3385882 - DNA, 25 bp, Homo sapien
gaaatcccaggattattccaaggaa

SEQ ID NO: 3385883 - DNA, 25 bp, Homo sapien
gagaaactagcaatgtaccactatt

SEQ ID NO: 3385884 - DNA, 25 bp, Homo sapien
taagacggttctgaaacctaagatc

SEQ ID NO: 3385885 - DNA, 25 bp, Homo sapien
ggcagaaagtagtagaagatggccc

SEQ ID NO: 3385886 - DNA, 25 bp, Homo sapien
caacagctacatataagtgtttcaa

SEQ ID NO: 3385887 - DNA, 25 bp, Homo sapien
cgtattaacaggaaagcaggaccag

SEQ ID NO: 3385888 - DNA, 25 bp, Homo sapien
ttcttctaggaatggcgtattaaca

SEQ ID NO: 3385889 - DNA, 25 bp, Homo sapien
cagaaatgtcgtagaagttctccaa

SEQ ID NO: 3385890 - DNA, 25 bp, Homo sapien
ctggctgtcttcagaactggttcta

SEQ ID NO: 3385891 - DNA, 25 bp, Homo sapien
ggctgtcttcagaactggttctaac

SEQ ID NO: 3385892 - DNA, 25 bp, Homo sapien
cacaattatctggctgtcttcagaa

SEQ ID NO: 3385893 - DNA, 25 bp, Homo sapien
caattatctggctgtcttcagaact

SEQ ID NO: 3385894 - DNA, 25 bp, Homo sapien
catgaaacgatgtatgcaaaagagt

SEQ ID NO: 3385895 - DNA, 25 bp, Homo sapien
gttatggaactcgtctggatctcag

SEQ ID NO: 3385896 - DNA, 25 bp, Homo sapien
caatagctactccataaagatgctg

SEQ ID NO: 3385897 - DNA, 25 bp, Homo sapien
tttgttatccctgaaaaacgtatca

SEQ ID NO: 3385898 - DNA, 25 bp, Homo sapien
ttttcttggaatggacagagcttcg

SEQ ID NO: 3385899 - DNA, 25 bp, Homo sapien
tcttggaatggacagagcttcgtaa

SEQ ID NO: 3385900 - DNA, 25 bp, Homo sapien
aatggacagagcttcgtaacttgga

SEQ ID NO: 3385901 - DNA, 25 bp, Homo sapien
gacagagcttcgtaacttggaatcg

SEQ ID NO: 3385902 - DNA, 25 bp, Homo sapien
ttcacaggtgcaattttagtttact

SEQ ID NO: 3385903 - DNA, 25 bp, Homo sapien
gaagtctctggaatatgtttccttg

SEQ ID NO: 3385904 - DNA, 25 bp, Homo sapien
catctggcttatactgacttttgag

SEQ ID NO: 3385905 - DNA, 25 bp, Homo sapien
tggagatcaggaagtcctaaattcc

SEQ ID NO: 3385906 - DNA, 25 bp, Homo sapien
catgtcttgggtcaggactatagat

SEQ ID NO: 3385907 - DNA, 25 bp, Homo sapien
agccccgtatatacatcttggcaga

SEQ ID NO: 3385908 - DNA, 25 bp, Homo sapien
cctaaatggtttcaatgcttcacac

SEQ ID NO: 3385909 - DNA, 25 bp, Homo sapien
tcttggcagaacactggaaaaatgc

SEQ ID NO: 3385910 - DNA, 25 bp, Homo sapien
gcaagacacttaacaactgggcaaa

SEQ ID NO: 3385911 - DNA, 25 bp, Homo sapien
tcagagtgtagtttcggagctcctc

SEQ ID NO: 3385912 - DNA, 25 bp, Homo sapien
acacagcaagacacttaacaactgg

SEQ ID NO: 3385913 - DNA, 25 bp, Homo sapien
taatccttccaacccaaatctggca

SEQ ID NO: 3385914 - DNA, 25 bp, Homo sapien
agacgccgtgactgccatgtgtgga

SEQ ID NO: 3385915 - DNA, 25 bp, Homo sapien
gttttcttcatcagacgccgtgact

SEQ ID NO: 3385916 - DNA, 25 bp, Homo sapien
tgtctggagcatctcttctatgtga

SEQ ID NO: 3385917 - DNA, 25 bp, Homo sapien
tcatcagacgccgtgactgccatgt

SEQ ID NO: 3385918 - DNA, 25 bp, Homo sapien
gaaagcagcttaatgtgaatcaaaa

SEQ ID NO: 3385919 - DNA, 25 bp, Homo sapien
aatgtgcaagtacaatagcatcagc

SEQ ID NO: 3385920 - DNA, 25 bp, Homo sapien
cctgagcaactgcagtaaacagtct

SEQ ID NO: 3385921 - DNA, 25 bp, Homo sapien
tcttaatttacctccccagcattta

SEQ ID NO: 3385922 - DNA, 25 bp, Homo sapien
ttaaaacttgaggatccaatggagg

SEQ ID NO: 3385923 - DNA, 25 bp, Homo sapien
taccctgtgccataaacttaggaaa

SEQ ID NO: 3385924 - DNA, 25 bp, Homo sapien
tggaggaggaatacttaaggtctac

SEQ ID NO: 3385925 - DNA, 25 bp, Homo sapien
gaatacttaaggtctaccctgtgcc

SEQ ID NO: 3385926 - DNA, 25 bp, Homo sapien
atgtacatttgcactcaaagaaaaa

SEQ ID NO: 3385927 - DNA, 25 bp, Homo sapien
tgtacatttgcactcaaagaaaaac

SEQ ID NO: 3385928 - DNA, 25 bp, Homo sapien
tttaatacaagacatctaaagtctt

SEQ ID NO: 3385929 - DNA, 25 bp, Homo sapien
ttcagtcactatgcaatgattatcg

SEQ ID NO: 3385930 - DNA, 25 bp, Homo sapien
tcgattcgccaaggacagtaacagt

SEQ ID NO: 3385931 - DNA, 25 bp, Homo sapien
caaaatatggcacgaagttcagaaa

SEQ ID NO: 3385932 - DNA, 25 bp, Homo sapien
tcttaaagggcatgttcaggtgcac

SEQ ID NO: 3385933 - DNA, 25 bp, Homo sapien
gatgcactgaccatcacctcaggaa

SEQ ID NO: 3385934 - DNA, 25 bp, Homo sapien
aatctcaggttgcaggttagaaaag

SEQ ID NO: 3385935 - DNA, 25 bp, Homo sapien
tttaagggcatagacaaatgtccag

SEQ ID NO: 3385936 - DNA, 25 bp, Homo sapien
ttgtacccagtcaatttgagacttt

SEQ ID NO: 3385937 - DNA, 25 bp, Homo sapien
agccattgtacccagtcaatttgag

SEQ ID NO: 3385938 - DNA, 25 bp, Homo sapien
tgagccattgtacccagtcaatttg

SEQ ID NO: 3385939 - DNA, 25 bp, Homo sapien
ccattgtacccagtcaatttgagac

SEQ ID NO: 3385940 - DNA, 25 bp, Homo sapien
tgaaatgcacccttttgaggactga

SEQ ID NO: 3385941 - DNA, 25 bp, Homo sapien
gaggactgaggaggtatcttctgag

SEQ ID NO: 3385942 - DNA, 25 bp, Homo sapien
tcaaccacagatgggtataggctgt

SEQ ID NO: 3385943 - DNA, 25 bp, Homo sapien
gctggctgtcacagtaggcccatta

SEQ ID NO: 3385944 - DNA, 25 bp, Homo sapien
atccagagcttgcacccgtggcagg

SEQ ID NO: 3385945 - DNA, 25 bp, Homo sapien
ggcccattacacatctcactatcat

SEQ ID NO: 3385946 - DNA, 25 bp, Homo sapien
acagaagggatgaaagcctcagaga

SEQ ID NO: 3385947 - DNA, 25 bp, Homo sapien
aatcctcatagccttggtcttcctt

SEQ ID NO: 3385948 - DNA, 25 bp, Homo sapien
agagaaatcctcatagccttggtct

SEQ ID NO: 3385949 - DNA, 25 bp, Homo sapien
cacagaagggatgaaagcctcagag

SEQ ID NO: 3385950 - DNA, 25 bp, Homo sapien
ctcttctttaatttgtaccaatact

SEQ ID NO: 3385951 - DNA, 25 bp, Homo sapien
tgctgattccattgcctagcccgcc

SEQ ID NO: 3385952 - DNA, 25 bp, Homo sapien
attccattgcctagcccgccctcct

SEQ ID NO: 3385953 - DNA, 25 bp, Homo sapien
gctgattccattgcctagcccgccc

SEQ ID NO: 3385954 - DNA, 25 bp, Homo sapien
tgattccattgcctagcccgccctc

SEQ ID NO: 3385955 - DNA, 25 bp, Homo sapien
cttaagtggaacagctatgctgacg

SEQ ID NO: 3385956 - DNA, 25 bp, Homo sapien
gaacccacgtgtgagtcgggctggg

SEQ ID NO: 3385957 - DNA, 25 bp, Homo sapien
cggacgtgcgggaacccacgtgtga

SEQ ID NO: 3385958 - DNA, 25 bp, Homo sapien
gaacagctatgctgacgtcagcggg

SEQ ID NO: 3385959 - DNA, 25 bp, Homo sapien
gtcgggggcgcgtggcaatgagatc

SEQ ID NO: 3385960 - DNA, 25 bp, Homo sapien
cgcgtggcaatgagatccggaatcg

SEQ ID NO: 3385961 - DNA, 25 bp, Homo sapien
gggaatgcacgtcgggcggtcgtcg

SEQ ID NO: 3385962 - DNA, 25 bp, Homo sapien
aatgagatccggaatcggcggcagc

SEQ ID NO: 3385963 - DNA, 25 bp, Homo sapien
atccctctggcgccgtgcgcgcagg

SEQ ID NO: 3385964 - DNA, 25 bp, Homo sapien
ccatccctctggcgccgtgcgcgca

SEQ ID NO: 3385965 - DNA, 25 bp, Homo sapien
catccctctggcgccgtgcgcgcag

SEQ ID NO: 3385966 - DNA, 25 bp, Homo sapien
ccctctggcgccgtgcgcgcagggc

SEQ ID NO: 3385967 - DNA, 25 bp, Homo sapien
agcaggaatcccttcgcgagcagcg

SEQ ID NO: 3385968 - DNA, 25 bp, Homo sapien
tcccttcgcgagcagcggaggccag

SEQ ID NO: 3385969 - DNA, 25 bp, Homo sapien
cccgggagcaggaatcccttcgcga

SEQ ID NO: 3385970 - DNA, 25 bp, Homo sapien
gaatcccttcgcgagcagcggaggc

SEQ ID NO: 3385971 - DNA, 25 bp, Homo sapien
cagaagccatggttcccgcttagag

SEQ ID NO: 3385972 - DNA, 25 bp, Homo sapien
tgggctgtgcttctggaaagcggct

SEQ ID NO: 3385973 - DNA, 25 bp, Homo sapien
aacacatgcgttgtgtgggccgccg

SEQ ID NO: 3385974 - DNA, 25 bp, Homo sapien
agagcgcggcgagctccgaacacat

SEQ ID NO: 3385975 - DNA, 25 bp, Homo sapien
cgcgcatgcgcgctttgtggctctc

SEQ ID NO: 3385976 - DNA, 25 bp, Homo sapien
ttaactgccacaaagctcaagccca

SEQ ID NO: 3385977 - DNA, 25 bp, Homo sapien
aaagctcaagcccaaggcacaggag

SEQ ID NO: 3385978 - DNA, 25 bp, Homo sapien
agcctgcggtgatccgcgcgcatgc

SEQ ID NO: 3385979 - DNA, 25 bp, Homo sapien
ctggcctttcctcagacaagatcac

SEQ ID NO: 3385980 - DNA, 25 bp, Homo sapien
agatcactctgagctactccggctc

SEQ ID NO: 3385981 - DNA, 25 bp, Homo sapien
catcgcggtttattaaccccaagtg

SEQ ID NO: 3385982 - DNA, 25 bp, Homo sapien
tgagggttcacccatcgcggtttat

SEQ ID NO: 3385983 - DNA, 25 bp, Homo sapien
aggaatatcgacgtttgggtgtaag

SEQ ID NO: 3385984 - DNA, 25 bp, Homo sapien
atcgacgtttgggtgtaagtatagc

SEQ ID NO: 3385985 - DNA, 25 bp, Homo sapien
gaatatcgacgtttgggtgtaagta

SEQ ID NO: 3385986 - DNA, 25 bp, Homo sapien
gacgtttgggtgtaagtatagcctc

SEQ ID NO: 3385987 - DNA, 25 bp, Homo sapien
tcagctgatcctttagagttgccat

SEQ ID NO: 3385988 - DNA, 25 bp, Homo sapien
aaatcagctgatcctttagagttgc

SEQ ID NO: 3385989 - DNA, 25 bp, Homo sapien
tataaatcagctgatcctttagagt

SEQ ID NO: 3385990 - DNA, 25 bp, Homo sapien
gattataaatcagctgatcctttag

SEQ ID NO: 3385991 - DNA, 25 bp, Homo sapien
ccaaccccaacaactgtaatcttat

SEQ ID NO: 3385992 - DNA, 25 bp, Homo sapien
atcttattctggggggtctgttctt

SEQ ID NO: 3385993 - DNA, 25 bp, Homo sapien
gatactgatggcacaggccatgcca

SEQ ID NO: 3385994 - DNA, 25 bp, Homo sapien
cttcattaagatactgatggcacag

SEQ ID NO: 3385995 - DNA, 25 bp, Homo sapien
acagaaagttatccgaatgagtgca

SEQ ID NO: 3385996 - DNA, 25 bp, Homo sapien
cagatacacttttggtgtattatca

SEQ ID NO: 3385997 - DNA, 25 bp, Homo sapien
ggcttccagtgtggtagactctcac

SEQ ID NO: 3385998 - DNA, 25 bp, Homo sapien
gaattttaggaactgggtctccagc

SEQ ID NO: 3385999 - DNA, 25 bp, Homo sapien
caggcacggtggctcacgcttgtaa

SEQ ID NO: 3386000 - DNA, 25 bp, Homo sapien
tcaagacagcctggccaggccaggc

SEQ ID NO: 3386001 - DNA, 25 bp, Homo sapien
gccaggcacggtggctcacgcttgt

SEQ ID NO: 3386002 - DNA, 25 bp, Homo sapien
aagacagcctggccaggccaggcac

SEQ ID NO: 3386003 - DNA, 25 bp, Homo sapien
gtcttcgatgacatcaacaagagca

SEQ ID NO: 3386004 - DNA, 25 bp, Homo sapien
ctttggtgttctaaggaaaaggctg

SEQ ID NO: 3386005 - DNA, 25 bp, Homo sapien
tctcccttcaatttgtcttcgatga

SEQ ID NO: 3386006 - DNA, 25 bp, Homo sapien
gttggagatccatcatctctccctt

SEQ ID NO: 3386007 - DNA, 25 bp, Homo sapien
caggctcttgcacccggcatttaaa

SEQ ID NO: 3386008 - DNA, 25 bp, Homo sapien
caagagtattagctgaacaggctca

SEQ ID NO: 3386009 - DNA, 25 bp, Homo sapien
catttaagtctaaagccgggcacag

SEQ ID NO: 3386010 - DNA, 25 bp, Homo sapien
tgtgaaagggtcaagccaagagtat

SEQ ID NO: 3386011 - DNA, 25 bp, Homo sapien
tacgctggaccaaattaagacggct

SEQ ID NO: 3386012 - DNA, 25 bp, Homo sapien
ctcttgctgacgtgccccagccgtg

SEQ ID NO: 3386013 - DNA, 25 bp, Homo sapien
gctgacgtgccccagccgtgataat

SEQ ID NO: 3386014 - DNA, 25 bp, Homo sapien
tgacgtgccccagccgtgataatga

SEQ ID NO: 3386015 - DNA, 25 bp, Homo sapien
taataggctactccagatatatggc

SEQ ID NO: 3386016 - DNA, 25 bp, Homo sapien
cacttaaccagatactaggtgatca

SEQ ID NO: 3386017 - DNA, 25 bp, Homo sapien
tgatcatggctaaccaataattttg

SEQ ID NO: 3386018 - DNA, 25 bp, Homo sapien
tctacactatgtatatcaagtccat

SEQ ID NO: 3386019 - DNA, 25 bp, Homo sapien
tcgggctgaatccagattgcaaccg

SEQ ID NO: 3386020 - DNA, 25 bp, Homo sapien
cccattaggtaacggaatcgggctg

SEQ ID NO: 3386021 - DNA, 25 bp, Homo sapien
cgggctgaatccagattgcaaccgc

SEQ ID NO: 3386022 - DNA, 25 bp, Homo sapien
taggtaacggaatcgggctgaatcc

SEQ ID NO: 3386023 - DNA, 25 bp, Homo sapien
caaaatgctagatttcgggaaacca

SEQ ID NO: 3386024 - DNA, 25 bp, Homo sapien
gatttgctcatcttttcagggccag

SEQ ID NO: 3386025 - DNA, 25 bp, Homo sapien
tgaagacatcctaagaactacagtc

SEQ ID NO: 3386026 - DNA, 25 bp, Homo sapien
gaatggatatttgattaggctctaa

SEQ ID NO: 3386027 - DNA, 25 bp, Homo sapien
agagacaccagcaacattcattcca

SEQ ID NO: 3386028 - DNA, 25 bp, Homo sapien
cagagagacaccagcaacattcatt

SEQ ID NO: 3386029 - DNA, 25 bp, Homo sapien
cttcagagagacaccagcaacattc

SEQ ID NO: 3386030 - DNA, 25 bp, Homo sapien
tcagagagacaccagcaacattcat

SEQ ID NO: 3386031 - DNA, 25 bp, Homo sapien
tatctttatcagtccctaaatctgg

SEQ ID NO: 3386032 - DNA, 25 bp, Homo sapien
ctgttccttatctttatcagtccct

SEQ ID NO: 3386033 - DNA, 25 bp, Homo sapien
ccttatctttatcagtccctaaatc

SEQ ID NO: 3386034 - DNA, 25 bp, Homo sapien
ctctttccactgttccttatcttta

SEQ ID NO: 3386035 - DNA, 25 bp, Homo sapien
ctgtatgataggaaaccataggtaa

SEQ ID NO: 3386036 - DNA, 25 bp, Homo sapien
tccaatagcccaggatgtgtagcct

SEQ ID NO: 3386037 - DNA, 25 bp, Homo sapien
tcatggtggaaactgggtgcacccg

SEQ ID NO: 3386038 - DNA, 25 bp, Homo sapien
atctgctacagagagtccaatagcc

SEQ ID NO: 3386039 - DNA, 25 bp, Homo sapien
agcctttgagtttgatcacctcata

SEQ ID NO: 3386040 - DNA, 25 bp, Homo sapien
tcaaaaaaggtaagctgtgggtaca

SEQ ID NO: 3386041 - DNA, 25 bp, Homo sapien
tacctcagcataattgaacaagact

SEQ ID NO: 3386042 - DNA, 25 bp, Homo sapien
gcattcaaatgcagcgtatcactac

SEQ ID NO: 3386043 - DNA, 25 bp, Homo sapien
caagtatctatgtgttgaacaggcc

SEQ ID NO: 3386044 - DNA, 25 bp, Homo sapien
ttacaggcatcagctgcccgcacat

SEQ ID NO: 3386045 - DNA, 25 bp, Homo sapien
caggcatcagctgcccgcacatggc

SEQ ID NO: 3386046 - DNA, 25 bp, Homo sapien
acaggcatcagctgcccgcacatgg

SEQ ID NO: 3386047 - DNA, 25 bp, Homo sapien
tacaggcatcagctgcccgcacatg

SEQ ID NO: 3386048 - DNA, 25 bp, Homo sapien
aaatgcaaggaacactaaggaagac

SEQ ID NO: 3386049 - DNA, 25 bp, Homo sapien
caaggtctgagattccattctgtcc

SEQ ID NO: 3386050 - DNA, 25 bp, Homo sapien
gacatcatcctttattccgtaaaga

SEQ ID NO: 3386051 - DNA, 25 bp, Homo sapien
cattctgtcccaaaatgcaaggaac

SEQ ID NO: 3386052 - DNA, 25 bp, Homo sapien
ttcttcaaacgggcctcttcctcag

SEQ ID NO: 3386053 - DNA, 25 bp, Homo sapien
ctcttcttcaaacgggcctcttcct

SEQ ID NO: 3386054 - DNA, 25 bp, Homo sapien
tcttcttcaaacgggcctcttcctc

SEQ ID NO: 3386055 - DNA, 25 bp, Homo sapien
cttcaaacgggcctcttcctcagaa

SEQ ID NO: 3386056 - DNA, 25 bp, Homo sapien
ttaaaattgcagctccttttggatc

SEQ ID NO: 3386057 - DNA, 25 bp, Homo sapien
cttttggatcccccaaagtgtatct

SEQ ID NO: 3386058 - DNA, 25 bp, Homo sapien
agctccttttggatcccccaaagtg

SEQ ID NO: 3386059 - DNA, 25 bp, Homo sapien
aaattgcagctccttttggatcccc

SEQ ID NO: 3386060 - DNA, 25 bp, Homo sapien
ggacaacatgcacaacctccaccta

SEQ ID NO: 3386061 - DNA, 25 bp, Homo sapien
acatgcacaacctccacctagaatc

SEQ ID NO: 3386062 - DNA, 25 bp, Homo sapien
aacatgcacaacctccacctagaat

SEQ ID NO: 3386063 - DNA, 25 bp, Homo sapien
acaacatgcacaacctccacctaga

SEQ ID NO: 3386064 - DNA, 25 bp, Homo sapien
ttaaaatattactgctttaatcaca

SEQ ID NO: 3386065 - DNA, 25 bp, Homo sapien
aaaatattactgctttaatcacaga

SEQ ID NO: 3386066 - DNA, 25 bp, Homo sapien
taaaatattactgctttaatcacag

SEQ ID NO: 3386067 - DNA, 25 bp, Homo sapien
ctacacaagattaataccatccagc

SEQ ID NO: 3386068 - DNA, 25 bp, Homo sapien
tacacaagattaataccatccagca

SEQ ID NO: 3386069 - DNA, 25 bp, Homo sapien
acacaagattaataccatccagcat

SEQ ID NO: 3386070 - DNA, 25 bp, Homo sapien
gactacacaagattaataccatcca

SEQ ID NO: 3386071 - DNA, 25 bp, Homo sapien
aaaaatctgtgttccctatagtgac

SEQ ID NO: 3386072 - DNA, 25 bp, Homo sapien
gggttgcccaagaatagcctaatat

SEQ ID NO: 3386073 - DNA, 25 bp, Homo sapien
ttgagtagacatccaccaaggttac

SEQ ID NO: 3386074 - DNA, 25 bp, Homo sapien
gaaaaaatcgttgcagggttgccca

SEQ ID NO: 3386075 - DNA, 25 bp, Homo sapien
gaaaaatacaccaacgacagttgag

SEQ ID NO: 3386076 - DNA, 25 bp, Homo sapien
gacggttgccctccgtgcgactcga

SEQ ID NO: 3386077 - DNA, 25 bp, Homo sapien
ttgaggcgctaagcccgtcgacggt

SEQ ID NO: 3386078 - DNA, 25 bp, Homo sapien
gttgccctccgtgcgactcgagaca

SEQ ID NO: 3386079 - DNA, 25 bp, Homo sapien
cttggcgcaatcagtacagatgacc

SEQ ID NO: 3386080 - DNA, 25 bp, Homo sapien
tggcgcaatcagtacagatgaccca

SEQ ID NO: 3386081 - DNA, 25 bp, Homo sapien
ctttgcttggcgcaatcagtacaga

SEQ ID NO: 3386082 - DNA, 25 bp, Homo sapien
aaatgctttgcttggcgcaatcagt

SEQ ID NO: 3386083 - DNA, 25 bp, Homo sapien
ctgatagggataatgcaatttcatt

SEQ ID NO: 3386084 - DNA, 25 bp, Homo sapien
tgatagggataatgcaatttcattg

SEQ ID NO: 3386085 - DNA, 25 bp, Homo sapien
gatagggataatgcaatttcattgg

SEQ ID NO: 3386086 - DNA, 25 bp, Homo sapien
atgcctacggcaccagttccaacaa

SEQ ID NO: 3386087 - DNA, 25 bp, Homo sapien
taagatactaatagcacaagccatg

SEQ ID NO: 3386088 - DNA, 25 bp, Homo sapien
tacggcaccagttccaacaatagta

SEQ ID NO: 3386089 - DNA, 25 bp, Homo sapien
tcaattagctgctccttgacagttg

SEQ ID NO: 3386090 - DNA, 25 bp, Homo sapien
gccacaggatgggcttctcactcac

SEQ ID NO: 3386091 - DNA, 25 bp, Homo sapien
tcacttgattttcagccacaggatg

SEQ ID NO: 3386092 - DNA, 25 bp, Homo sapien
cagccacaggatgggcttctcactc

SEQ ID NO: 3386093 - DNA, 25 bp, Homo sapien
acttgattttcagccacaggatggg

SEQ ID NO: 3386094 - DNA, 25 bp, Homo sapien
tccaatgcaacatcaacaagggcaa

SEQ ID NO: 3386095 - DNA, 25 bp, Homo sapien
caatgcaacatcaacaagggcaagt

SEQ ID NO: 3386096 - DNA, 25 bp, Homo sapien
agaagtaatctttgaagtactaaag

SEQ ID NO: 3386097 - DNA, 25 bp, Homo sapien
cagaagtaatctttgaagtactaaa

SEQ ID NO: 3386098 - DNA, 25 bp, Homo sapien
ctgagccgtactcaaaggccttgcc

SEQ ID NO: 3386099 - DNA, 25 bp, Homo sapien
atcagctgagccgtactcaaaggcc

SEQ ID NO: 3386100 - DNA, 25 bp, Homo sapien
ctaatcagctgagccgtactcaaag

SEQ ID NO: 3386101 - DNA, 25 bp, Homo sapien
agctgagccgtactcaaaggccttg

SEQ ID NO: 3386102 - DNA, 25 bp, Homo sapien
cctgctgtgacaataactattctgg

SEQ ID NO: 3386103 - DNA, 25 bp, Homo sapien
tagccacattacgttggaccagggc

SEQ ID NO: 3386104 - DNA, 25 bp, Homo sapien
ggaccagggcaaggcgagtttctcc

SEQ ID NO: 3386105 - DNA, 25 bp, Homo sapien
tcaggactataatggactatggcag

SEQ ID NO: 3386106 - DNA, 25 bp, Homo sapien
catgatgaatacaacagtaccttgc

SEQ ID NO: 3386107 - DNA, 25 bp, Homo sapien
tactccgctgacagcaatagacagg

SEQ ID NO: 3386108 - DNA, 25 bp, Homo sapien
gggtagatactctcatatcagacga

SEQ ID NO: 3386109 - DNA, 25 bp, Homo sapien
cttctaatcgaatgacagtaatgac

SEQ ID NO: 3386110 - DNA, 25 bp, Homo sapien
ttacaaccacttccaattacacgag

SEQ ID NO: 3386111 - DNA, 25 bp, Homo sapien
cacttccaattacacgagttacagg

SEQ ID NO: 3386112 - DNA, 25 bp, Homo sapien
attacacgagttacaggtaagccac

SEQ ID NO: 3386113 - DNA, 25 bp, Homo sapien
agcttgtggggtggacacccaactt

SEQ ID NO: 3386114 - DNA, 25 bp, Homo sapien
tttccagtgttccttatctgaatcc

SEQ ID NO: 3386115 - DNA, 25 bp, Homo sapien
tcctaatttagggtccagagtcttc

SEQ ID NO: 3386116 - DNA, 25 bp, Homo sapien
atctgaatccgttcctaatttaggg

SEQ ID NO: 3386117 - DNA, 25 bp, Homo sapien
gttccttatctgaatccgttcctaa

SEQ ID NO: 3386118 - DNA, 25 bp, Homo sapien
accccttcagcttgataatttcata

SEQ ID NO: 3386119 - DNA, 25 bp, Homo sapien
atcacagacagtccaatagcccaag

SEQ ID NO: 3386120 - DNA, 25 bp, Homo sapien
tagcccaagaggtataccccttcag

SEQ ID NO: 3386121 - DNA, 25 bp, Homo sapien
acagacagtccaatagcccaagagg

SEQ ID NO: 3386122 - DNA, 25 bp, Homo sapien
ctgagaaagagttcttcttttattc

SEQ ID NO: 3386123 - DNA, 25 bp, Homo sapien
cctcctcagaattcaagttaatttt

SEQ ID NO: 3386124 - DNA, 25 bp, Homo sapien
ccccaagacacaagggatactgaga

SEQ ID NO: 3386125 - DNA, 25 bp, Homo sapien
aacatctgagacaccattccgcccc

SEQ ID NO: 3386126 - DNA, 25 bp, Homo sapien
aacagtggaacattagaaggcttta

SEQ ID NO: 3386127 - DNA, 25 bp, Homo sapien
caaacagtggaacattagaaggctt

SEQ ID NO: 3386128 - DNA, 25 bp, Homo sapien
acagtggaacattagaaggctttaa

SEQ ID NO: 3386129 - DNA, 25 bp, Homo sapien
aaacagtggaacattagaaggcttt

SEQ ID NO: 3386130 - DNA, 25 bp, Homo sapien
gaatatgctggtactctaacggatg

SEQ ID NO: 3386131 - DNA, 25 bp, Homo sapien
gctcgttctaatcttgagagactag

SEQ ID NO: 3386132 - DNA, 25 bp, Homo sapien
catctgaaggcactctaacatatgt

SEQ ID NO: 3386133 - DNA, 25 bp, Homo sapien
taacttacacctgtacagattgggt

SEQ ID NO: 3386134 - DNA, 25 bp, Homo sapien
tgcagagttgaatacaatcttattt

SEQ ID NO: 3386135 - DNA, 25 bp, Homo sapien
cgtaaagttacatctgtatcttctt

SEQ ID NO: 3386136 - DNA, 25 bp, Homo sapien
ttgcagagttgaatacaatcttatt

SEQ ID NO: 3386137 - DNA, 25 bp, Homo sapien
tttacatcgtaaagttacatctgta

SEQ ID NO: 3386138 - DNA, 25 bp, Homo sapien
aatggaggaaaatggcgttaaagct

SEQ ID NO: 3386139 - DNA, 25 bp, Homo sapien
taaagctcatcgaggcacgaaggag

SEQ ID NO: 3386140 - DNA, 25 bp, Homo sapien
ctcgtgcaggcatcgcaggtgtgat

SEQ ID NO: 3386141 - DNA, 25 bp, Homo sapien
agatgaaccgccgactaacagacgc

SEQ ID NO: 3386142 - DNA, 25 bp, Homo sapien
cttgggcaaaaacaattcgctcccg

SEQ ID NO: 3386143 - DNA, 25 bp, Homo sapien
caaaaacaattcgctcccgcggcgc

SEQ ID NO: 3386144 - DNA, 25 bp, Homo sapien
ggcaaaaacaattcgctcccgcggc

SEQ ID NO: 3386145 - DNA, 25 bp, Homo sapien
tgggcaaaaacaattcgctcccgcg

SEQ ID NO: 3386146 - DNA, 25 bp, Homo sapien
gtcacatgccgcctggcggagacac

SEQ ID NO: 3386147 - DNA, 25 bp, Homo sapien
gcaggtcacatgccgcctggcggag

SEQ ID NO: 3386148 - DNA, 25 bp, Homo sapien
caggtcacatgccgcctggcggaga

SEQ ID NO: 3386149 - DNA, 25 bp, Homo sapien
gtgaagggccacccgcgcccgagca

SEQ ID NO: 3386150 - DNA, 25 bp, Homo sapien
gtccaggtgagaggtacttctggcc

SEQ ID NO: 3386151 - DNA, 25 bp, Homo sapien
actgcgcccggggtccgcaggtcca

SEQ ID NO: 3386152 - DNA, 25 bp, Homo sapien
tccaggtgagaggtacttctggcca

SEQ ID NO: 3386153 - DNA, 25 bp, Homo sapien
cggggtccgcaggtccaggtgagag

SEQ ID NO: 3386154 - DNA, 25 bp, Homo sapien
aattccaagacctgcggtgagagcg

SEQ ID NO: 3386155 - DNA, 25 bp, Homo sapien
aacatgaaactacagctgggacggc

SEQ ID NO: 3386156 - DNA, 25 bp, Homo sapien
tgagagcgcgtatagagaactcctg

SEQ ID NO: 3386157 - DNA, 25 bp, Homo sapien
ccaagacctggaattggaaatggct

SEQ ID NO: 3386158 - DNA, 25 bp, Homo sapien
gatagcacaagccacaccaaccgat

SEQ ID NO: 3386159 - DNA, 25 bp, Homo sapien
tcttattgtgatgaatggcctcctc

SEQ ID NO: 3386160 - DNA, 25 bp, Homo sapien
aataagttcactcttgatagttgcc

SEQ ID NO: 3386161 - DNA, 25 bp, Homo sapien
cctcttccgcgaaattcttaataag

SEQ ID NO: 3386162 - DNA, 25 bp, Homo sapien
aaacattgttagtccaatgggtgtg

SEQ ID NO: 3386163 - DNA, 25 bp, Homo sapien
aaaacattgttagtccaatgggtgt

SEQ ID NO: 3386164 - DNA, 25 bp, Homo sapien
aaaaacattgttagtccaatgggtg

SEQ ID NO: 3386165 - DNA, 25 bp, Homo sapien
aacattgttagtccaatgggtgtga

SEQ ID NO: 3386166 - DNA, 25 bp, Homo sapien
caaggacaagttcatcactcaaacc

SEQ ID NO: 3386167 - DNA, 25 bp, Homo sapien
ccttcagtttgccttcatcaacatc

SEQ ID NO: 3386168 - DNA, 25 bp, Homo sapien
tcaacatccacaaggacaagttcat

SEQ ID NO: 3386169 - DNA, 25 bp, Homo sapien
ccttcatcaacatccacaaggacaa

SEQ ID NO: 3386170 - DNA, 25 bp, Homo sapien
tttggcattttcataaaagggctgc

SEQ ID NO: 3386171 - DNA, 25 bp, Homo sapien
gcattttcataaaagggctgccatg

SEQ ID NO: 3386172 - DNA, 25 bp, Homo sapien
ctttgctggagacaatatttggcat

SEQ ID NO: 3386173 - DNA, 25 bp, Homo sapien
ttggcattttcataaaagggctgcc

SEQ ID NO: 3386174 - DNA, 25 bp, Homo sapien
tccttttttctggcgtgcacctgct

SEQ ID NO: 3386175 - DNA, 25 bp, Homo sapien
ttagtaacaataagcagtttgcagt

SEQ ID NO: 3386176 - DNA, 25 bp, Homo sapien
caataagcagtttgcagtgaggact

SEQ ID NO: 3386177 - DNA, 25 bp, Homo sapien
gaaaataaagctgtcctatgcagcc

SEQ ID NO: 3386178 - DNA, 25 bp, Homo sapien
tgggtggcaggatcaatcctacccc

SEQ ID NO: 3386179 - DNA, 25 bp, Homo sapien
ccaaaaactccttcactgaacagtg

SEQ ID NO: 3386180 - DNA, 25 bp, Homo sapien
attccaagctaattaatgcaggaac

SEQ ID NO: 3386181 - DNA, 25 bp, Homo sapien
taatgacgcggtactttgagggtag

SEQ ID NO: 3386182 - DNA, 25 bp, Homo sapien
tcagtgccctgaacggttagagaaa

SEQ ID NO: 3386183 - DNA, 25 bp, Homo sapien
ttaatgaaggagctccaccaggtgc

SEQ ID NO: 3386184 - DNA, 25 bp, Homo sapien
gagtcatatcagaatctctccacag

SEQ ID NO: 3386185 - DNA, 25 bp, Homo sapien
caagcctttgcccaataaagtaacg

SEQ ID NO: 3386186 - DNA, 25 bp, Homo sapien
aaaacgagcagagtccagattacaa

SEQ ID NO: 3386187 - DNA, 25 bp, Homo sapien
caataaagtaacgaaaacgagcaga

SEQ ID NO: 3386188 - DNA, 25 bp, Homo sapien
taacgaaaacgagcagagtccagat

SEQ ID NO: 3386189 - DNA, 25 bp, Homo sapien
agggacgccagcaatgttcacacca

SEQ ID NO: 3386190 - DNA, 25 bp, Homo sapien
tcagagggacgccagcaatgttcac

SEQ ID NO: 3386191 - DNA, 25 bp, Homo sapien
gggttcagatccttcagagggacgc

SEQ ID NO: 3386192 - DNA, 25 bp, Homo sapien
atccttcagagggacgccagcaatg

SEQ ID NO: 3386193 - DNA, 25 bp, Homo sapien
ctgtagatagaagaaaccataaaca

SEQ ID NO: 3386194 - DNA, 25 bp, Homo sapien
tgtagatagaagaaaccataaacat

SEQ ID NO: 3386195 - DNA, 25 bp, Homo sapien
tacagataggctaatgccccaagaa

SEQ ID NO: 3386196 - DNA, 25 bp, Homo sapien
cttacttagggtagaaactggatgc

SEQ ID NO: 3386197 - DNA, 25 bp, Homo sapien
gctacagataggctaatgccccaag

SEQ ID NO: 3386198 - DNA, 25 bp, Homo sapien
gggtagaaactggatgcactctcct

SEQ ID NO: 3386199 - DNA, 25 bp, Homo sapien
ctcccaggatacatgggacactaag

SEQ ID NO: 3386200 - DNA, 25 bp, Homo sapien
gcactcttttgcaagcaggcctcct

SEQ ID NO: 3386201 - DNA, 25 bp, Homo sapien
catgggacactaaggaatatgtctt

SEQ ID NO: 3386202 - DNA, 25 bp, Homo sapien
tttatgaggtctgtgataccattct

SEQ ID NO: 3386203 - DNA, 25 bp, Homo sapien
taaacacattcttgtggaccagatg

SEQ ID NO: 3386204 - DNA, 25 bp, Homo sapien
tactaaatcaaagctaaggccaggc

SEQ ID NO: 3386205 - DNA, 25 bp, Homo sapien
ggaccagatggcaattacgtataca

SEQ ID NO: 3386206 - DNA, 25 bp, Homo sapien
catacaaggcaagtactgagaagta

SEQ ID NO: 3386207 - DNA, 25 bp, Homo sapien
gaaagactgccggtctcagtgacct

SEQ ID NO: 3386208 - DNA, 25 bp, Homo sapien
cctctgtaaactttttgtgctgaat

SEQ ID NO: 3386209 - DNA, 25 bp, Homo sapien
gacttctctgataccagctggaggt

SEQ ID NO: 3386210 - DNA, 25 bp, Homo sapien
tccttttatcagtaggtgcccagaa

SEQ ID NO: 3386211 - DNA, 25 bp, Homo sapien
ttgtgtatcaccgagacgagcaaga

SEQ ID NO: 3386212 - DNA, 25 bp, Homo sapien
catgaagatttatcagagcctttag

SEQ ID NO: 3386213 - DNA, 25 bp, Homo sapien
tcccaaagtgttgtctgtagaccct

SEQ ID NO: 3386214 - DNA, 25 bp, Homo sapien
tagacccttagttatgctgggaaca

SEQ ID NO: 3386215 - DNA, 25 bp, Homo sapien
cttcctgttgtttgaggccgggttg

SEQ ID NO: 3386216 - DNA, 25 bp, Homo sapien
tggtgtagtggtgccgacttcctgt

SEQ ID NO: 3386217 - DNA, 25 bp, Homo sapien
tgtgcgattgtgtgggacggtctgg

SEQ ID NO: 3386218 - DNA, 25 bp, Homo sapien
cggaagtgacgtagtggaagcggaa

SEQ ID NO: 3386219 - DNA, 25 bp, Homo sapien
tttgaagggaatcaatactacggcc

SEQ ID NO: 3386220 - DNA, 25 bp, Homo sapien
tcaattaagatggaagtacctaccc

SEQ ID NO: 3386221 - DNA, 25 bp, Homo sapien
tgtgcttacaaaactgacggtgatg

SEQ ID NO: 3386222 - DNA, 25 bp, Homo sapien
gaagatctgaaggaagcctgccttc

SEQ ID NO: 3386223 - DNA, 25 bp, Homo sapien
aagccaatttcagtactacacagcc

SEQ ID NO: 3386224 - DNA, 25 bp, Homo sapien
tgtaactgcatagcaatataagcac

SEQ ID NO: 3386225 - DNA, 25 bp, Homo sapien
ataagcacataattcagactttgta

SEQ ID NO: 3386226 - DNA, 25 bp, Homo sapien
tttcagtactacacagcctttctct

SEQ ID NO: 3386227 - DNA, 25 bp, Homo sapien
aacacaacagttaagttctatacat

SEQ ID NO: 3386228 - DNA, 25 bp, Homo sapien
atgaacacaacagttaagttctata

SEQ ID NO: 3386229 - DNA, 25 bp, Homo sapien
cataaaaacataggttgttacaaag

SEQ ID NO: 3386230 - DNA, 25 bp, Homo sapien
atacaaaattgctgtcaatgaacac

SEQ ID NO: 3386231 - DNA, 25 bp, Homo sapien
gctttcgcctggagcaacgtgaatc

SEQ ID NO: 3386232 - DNA, 25 bp, Homo sapien
tttcgcctggagcaacgtgaatcat

SEQ ID NO: 3386233 - DNA, 25 bp, Homo sapien
ctttcgcctggagcaacgtgaatca

SEQ ID NO: 3386234 - DNA, 25 bp, Homo sapien
tactgctgtaagtacctgagtgtgc

SEQ ID NO: 3386235 - DNA, 25 bp, Homo sapien
taagtacctgagtgtgcagggccag

SEQ ID NO: 3386236 - DNA, 25 bp, Homo sapien
ctgcttttccccacgtgtcatcagg

SEQ ID NO: 3386237 - DNA, 25 bp, Homo sapien
tgctgtaagtacctgagtgtgcagg

SEQ ID NO: 3386238 - DNA, 25 bp, Homo sapien
cctttcctgccagttggcagcctca

SEQ ID NO: 3386239 - DNA, 25 bp, Homo sapien
ccagttggcagcctcatggctgtga

SEQ ID NO: 3386240 - DNA, 25 bp, Homo sapien
tgccagttggcagcctcatggctgt

SEQ ID NO: 3386241 - DNA, 25 bp, Homo sapien
ttcctgccagttggcagcctcatgg

SEQ ID NO: 3386242 - DNA, 25 bp, Homo sapien
ctcatgtcccgggtgaagtagtttt

SEQ ID NO: 3386243 - DNA, 25 bp, Homo sapien
tgtgaggctataacctgctggccca

SEQ ID NO: 3386244 - DNA, 25 bp, Homo sapien
ttctttgttggcttgatccctcatg

SEQ ID NO: 3386245 - DNA, 25 bp, Homo sapien
tgctggcccactttatcaatgccca

SEQ ID NO: 3386246 - DNA, 25 bp, Homo sapien
ctgcatggtctaatttgtgggatgg

SEQ ID NO: 3386247 - DNA, 25 bp, Homo sapien
tgtgctgcatggtctaatttgtggg

SEQ ID NO: 3386248 - DNA, 25 bp, Homo sapien
tttgtgggatgggaggttaagtaca

SEQ ID NO: 3386249 - DNA, 25 bp, Homo sapien
cccctgcatgccatcttgatgtgct

SEQ ID NO: 3386250 - DNA, 25 bp, Homo sapien
atggatggcaagacagggctgttcc

SEQ ID NO: 3386251 - DNA, 25 bp, Homo sapien
agtgtgcgtcctgtatgttggccca

SEQ ID NO: 3386252 - DNA, 25 bp, Homo sapien
gcgtgaaggttttccctccagatga

SEQ ID NO: 3386253 - DNA, 25 bp, Homo sapien
ttctctgaagcaagcagtgaaggag

SEQ ID NO: 3386254 - DNA, 25 bp, Homo sapien
ggtgcttgtggaactcactggtcaa

SEQ ID NO: 3386255 - DNA, 25 bp, Homo sapien
gacatgaccaactggacggtagagg

SEQ ID NO: 3386256 - DNA, 25 bp, Homo sapien
gacacaggtgtggaagaagtccgca

SEQ ID NO: 3386257 - DNA, 25 bp, Homo sapien
gatacagtaggtcaagtccagtcag

SEQ ID NO: 3386258 - DNA, 25 bp, Homo sapien
gtagaggtctcgcatgtctgttcga

SEQ ID NO: 3386259 - DNA, 25 bp, Homo sapien
accttcagttggtagaggtctcgca

SEQ ID NO: 3386260 - DNA, 25 bp, Homo sapien
atcttggcaaaggagtgcgctcacg

SEQ ID NO: 3386261 - DNA, 25 bp, Homo sapien
gaaagactattcaccaagatcttgg

SEQ ID NO: 3386262 - DNA, 25 bp, Homo sapien
gcccatgtaacacacaagtccaaca

SEQ ID NO: 3386263 - DNA, 25 bp, Homo sapien
aaacatccagccaagcacaatcatg

SEQ ID NO: 3386264 - DNA, 25 bp, Homo sapien
cacaatcatgatcaaacgtaaaaca

SEQ ID NO: 3386265 - DNA, 25 bp, Homo sapien
tcaactctggaaacgtgcccatgta

SEQ ID NO: 3386266 - DNA, 25 bp, Homo sapien
tgcagcagatcttcacctaaagccc

SEQ ID NO: 3386267 - DNA, 25 bp, Homo sapien
cctaaagcccgcctcctcagttgtg

SEQ ID NO: 3386268 - DNA, 25 bp, Homo sapien
aaagcccgcctcctcagttgtgttt

SEQ ID NO: 3386269 - DNA, 25 bp, Homo sapien
gcagcagatcttcacctaaagcccg

SEQ ID NO: 3386270 - DNA, 25 bp, Homo sapien
tattccctgagtcgtaggaatccag

SEQ ID NO: 3386271 - DNA, 25 bp, Homo sapien
catggcagctcctcactaaggagct

SEQ ID NO: 3386272 - DNA, 25 bp, Homo sapien
cagtgttctattccctgagtcgtag

SEQ ID NO: 3386273 - DNA, 25 bp, Homo sapien
gtgtacccacgaagaaacaagtgct

SEQ ID NO: 3386274 - DNA, 25 bp, Homo sapien
ctgcaatgagaagcatccataagac

SEQ ID NO: 3386275 - DNA, 25 bp, Homo sapien
tgagaagcatccataagacaacaat

SEQ ID NO: 3386276 - DNA, 25 bp, Homo sapien
caatgagaagcatccataagacaac

SEQ ID NO: 3386277 - DNA, 25 bp, Homo sapien
gaagcatccataagacaacaatcat

SEQ ID NO: 3386278 - DNA, 25 bp, Homo sapien
ggggatatttatatcccttccacat

SEQ ID NO: 3386279 - DNA, 25 bp, Homo sapien
ctgtctcacctaatgcctctgatcc

SEQ ID NO: 3386280 - DNA, 25 bp, Homo sapien
ctaatgcctctgatcccggatgcaa

SEQ ID NO: 3386281 - DNA, 25 bp, Homo sapien
aatgcctctgatcccggatgcaagg

SEQ ID NO: 3386282 - DNA, 25 bp, Homo sapien
tcacctaatgcctctgatcccggat

SEQ ID NO: 3386283 - DNA, 25 bp, Homo sapien
agctgcattacttcaccaggatcat

SEQ ID NO: 3386284 - DNA, 25 bp, Homo sapien
gctgcattacttcaccaggatcatc

SEQ ID NO: 3386285 - DNA, 25 bp, Homo sapien
aggatcatccttgcttacttccact

SEQ ID NO: 3386286 - DNA, 25 bp, Homo sapien
ggaactgtacagctggtcaggtgag

SEQ ID NO: 3386287 - DNA, 25 bp, Homo sapien
tgaccctagatgatccacctgtgtt

SEQ ID NO: 3386288 - DNA, 25 bp, Homo sapien
tgaggctaatagcttcagaaggtta

SEQ ID NO: 3386289 - DNA, 25 bp, Homo sapien
aaatgagtttcttaccccacatggt

SEQ ID NO: 3386290 - DNA, 25 bp, Homo sapien
cagcaagatcttggatatcccacag

SEQ ID NO: 3386291 - DNA, 25 bp, Homo sapien
gaaacctcggtatactcatcacact

SEQ ID NO: 3386292 - DNA, 25 bp, Homo sapien
tctctgacccatgttgggagaactg

SEQ ID NO: 3386293 - DNA, 25 bp, Homo sapien
tcacacttcagagatatggtttgcc

SEQ ID NO: 3386294 - DNA, 25 bp, Homo sapien
gaactgttaggtggtcagagcaatg

SEQ ID NO: 3386295 - DNA, 25 bp, Homo sapien
gagagactggttgttttattttcaa

SEQ ID NO: 3386296 - DNA, 25 bp, Homo sapien
gagaataaatatatgaagagagact

SEQ ID NO: 3386297 - DNA, 25 bp, Homo sapien
tgaagagagactggttgttttattt

SEQ ID NO: 3386298 - DNA, 25 bp, Homo sapien
atatatgaagagagactggttgttt

SEQ ID NO: 3386299 - DNA, 25 bp, Homo sapien
tgtccagttggaggccagggtacca

SEQ ID NO: 3386300 - DNA, 25 bp, Homo sapien
cacaggcggccttacatgtgtgccg

SEQ ID NO: 3386301 - DNA, 25 bp, Homo sapien
tgtgccgtgaaaaggttcaaagacc

SEQ ID NO: 3386302 - DNA, 25 bp, Homo sapien
caaaaaagtaagtctggccgggcat

SEQ ID NO: 3386303 - DNA, 25 bp, Homo sapien
cagatgatataatgcccacttgtgc

SEQ ID NO: 3386304 - DNA, 25 bp, Homo sapien
gaagaaatgcaacgtcgaagggcca

SEQ ID NO: 3386305 - DNA, 25 bp, Homo sapien
tcttctgctgatctgtgagtagggc

SEQ ID NO: 3386306 - DNA, 25 bp, Homo sapien
ttaagactgggtatgcaagaggact

SEQ ID NO: 3386307 - DNA, 25 bp, Homo sapien
gaaagtgtgggcacaaaacttagca

SEQ ID NO: 3386308 - DNA, 25 bp, Homo sapien
aaacttagcaaaggttctggagaca

SEQ ID NO: 3386309 - DNA, 25 bp, Homo sapien
aaaggcaccctctcagaaagaaagt

SEQ ID NO: 3386310 - DNA, 25 bp, Homo sapien
gaattccttgaacgaaagcatagga

SEQ ID NO: 3386311 - DNA, 25 bp, Homo sapien
tccagcctgtttcaagatacgtcgt

SEQ ID NO: 3386312 - DNA, 25 bp, Homo sapien
gccagctgctttgttggcagactaa

SEQ ID NO: 3386313 - DNA, 25 bp, Homo sapien
taatttagttgaaacttccagcctg

SEQ ID NO: 3386314 - DNA, 25 bp, Homo sapien
cctaagttgttcctaagttgtctca

SEQ ID NO: 3386315 - DNA, 25 bp, Homo sapien
gttaggttagcagtattacttctcc

SEQ ID NO: 3386316 - DNA, 25 bp, Homo sapien
caaatcccttaatgggatggagtgg

SEQ ID NO: 3386317 - DNA, 25 bp, Homo sapien
gtgtgtgcctctgcttatgagtttt

SEQ ID NO: 3386318 - DNA, 25 bp, Homo sapien
tgtaagctccttgtgattaatacct

SEQ ID NO: 3386319 - DNA, 25 bp, Homo sapien
agagggcgctacagacattgaagga

SEQ ID NO: 3386320 - DNA, 25 bp, Homo sapien
taagtagctgccacaatatccagtg

SEQ ID NO: 3386321 - DNA, 25 bp, Homo sapien
gtatgaccttatgtgcccattgcca

SEQ ID NO: 3386322 - DNA, 25 bp, Homo sapien
cagaagcccctctagagcacttgat

SEQ ID NO: 3386323 - DNA, 25 bp, Homo sapien
aatgtggtggctcaaatccacatgc

SEQ ID NO: 3386324 - DNA, 25 bp, Homo sapien
ccaacacccaccaatgctctcactc

SEQ ID NO: 3386325 - DNA, 25 bp, Homo sapien
acatgctccgatgggccttcctgct

SEQ ID NO: 3386326 - DNA, 25 bp, Homo sapien
tggtggctcaaatccacatgctccg

SEQ ID NO: 3386327 - DNA, 25 bp, Homo sapien
catagtagccaaaagcccgttccaa

SEQ ID NO: 3386328 - DNA, 25 bp, Homo sapien
gccacatagtgttcttccatttagc

SEQ ID NO: 3386329 - DNA, 25 bp, Homo sapien
ggacagttccactcttacacagcag

SEQ ID NO: 3386330 - DNA, 25 bp, Homo sapien
tccatttagctctcggggatggaac

SEQ ID NO: 3386331 - DNA, 25 bp, Homo sapien
gataatcatcttgagggcgacgacc

SEQ ID NO: 3386332 - DNA, 25 bp, Homo sapien
gcgacgaggtggaggactactccta

SEQ ID NO: 3386333 - DNA, 25 bp, Homo sapien
ctgcgacgaggtggaggactactcc

SEQ ID NO: 3386334 - DNA, 25 bp, Homo sapien
tgcgacgaggtggaggactactcct

SEQ ID NO: 3386335 - DNA, 25 bp, Homo sapien
cgacgaggtggaggactactcctac

SEQ ID NO: 3386336 - DNA, 25 bp, Homo sapien
ctagaaagggacctgctccagctgt

SEQ ID NO: 3386337 - DNA, 25 bp, Homo sapien
ctgctccagctgtgagagaagcttc

SEQ ID NO: 3386338 - DNA, 25 bp, Homo sapien
tccagctgtgagagaagcttctcct

SEQ ID NO: 3386339 - DNA, 25 bp, Homo sapien
agctgtgagagaagcttctccttct

SEQ ID NO: 3386340 - DNA, 25 bp, Homo sapien
cgagacagcgacctctctcttctcc

SEQ ID NO: 3386341 - DNA, 25 bp, Homo sapien
ctagagaaggatcgggacggcttgt

SEQ ID NO: 3386342 - DNA, 25 bp, Homo sapien
tgtgatttctctcccgagacagcga

SEQ ID NO: 3386343 - DNA, 25 bp, Homo sapien
gatttctctcccgagacagcgacct

SEQ ID NO: 3386344 - DNA, 25 bp, Homo sapien
ttattgtcagtctatgcgtaactaa

SEQ ID NO: 3386345 - DNA, 25 bp, Homo sapien
ttgtcagtctatgcgtaactaaagt

SEQ ID NO: 3386346 - DNA, 25 bp, Homo sapien
gtcagtctatgcgtaactaaagttc

SEQ ID NO: 3386347 - DNA, 25 bp, Homo sapien
cagtctatgcgtaactaaagttcaa

SEQ ID NO: 3386348 - DNA, 25 bp, Homo sapien
ttaatcccaaggattctcacaaaac

SEQ ID NO: 3386349 - DNA, 25 bp, Homo sapien
ttctataccaactaggcaacctctg

SEQ ID NO: 3386350 - DNA, 25 bp, Homo sapien
aaaaatcttgcacagtaactcaaag

SEQ ID NO: 3386351 - DNA, 25 bp, Homo sapien
taactcaaagttcggctctacaatg

SEQ ID NO: 3386352 - DNA, 25 bp, Homo sapien
ctgaagctctcgagggtgcaccgtt

SEQ ID NO: 3386353 - DNA, 25 bp, Homo sapien
aagctctcgagggtgcaccgttgag

SEQ ID NO: 3386354 - DNA, 25 bp, Homo sapien
tctcgagggtgcaccgttgagctgc

SEQ ID NO: 3386355 - DNA, 25 bp, Homo sapien
gagggtgcaccgttgagctgctttt

SEQ ID NO: 3386356 - DNA, 25 bp, Homo sapien
gagggacggacaatacctcccgagc

SEQ ID NO: 3386357 - DNA, 25 bp, Homo sapien
cggacaatacctcccgagcgcccgg

SEQ ID NO: 3386358 - DNA, 25 bp, Homo sapien
gacggacaatacctcccgagcgccc

SEQ ID NO: 3386359 - DNA, 25 bp, Homo sapien
gggacggacaatacctcccgagcgc

SEQ ID NO: 3386360 - DNA, 25 bp, Homo sapien
cgcccacggccaggtaagccggcga

SEQ ID NO: 3386361 - DNA, 25 bp, Homo sapien
ggacgcgcccacggccaggtaagcc

SEQ ID NO: 3386362 - DNA, 25 bp, Homo sapien
ccacggccaggtaagccggcgacga

SEQ ID NO: 3386363 - DNA, 25 bp, Homo sapien
acggccaggtaagccggcgacgatt

SEQ ID NO: 3386364 - DNA, 25 bp, Homo sapien
agccagcaggttgtggccaaaccca

SEQ ID NO: 3386365 - DNA, 25 bp, Homo sapien
cagccagcaggttgtggccaaaccc

SEQ ID NO: 3386366 - DNA, 25 bp, Homo sapien
gccagcaggttgtggccaaacccat

SEQ ID NO: 3386367 - DNA, 25 bp, Homo sapien
actgacacagagaaacccagcctgg

SEQ ID NO: 3386368 - DNA, 25 bp, Homo sapien
ccaacctgagaagactgacacagag

SEQ ID NO: 3386369 - DNA, 25 bp, Homo sapien
gacacagagaaacccagcctggcct

SEQ ID NO: 3386370 - DNA, 25 bp, Homo sapien
ttccacccccaacctgagaagactg

SEQ ID NO: 3386371 - DNA, 25 bp, Homo sapien
gcacaaaatacacgcaggtggcctt

SEQ ID NO: 3386372 - DNA, 25 bp, Homo sapien
catgcacgaagtatccttggtcctg

SEQ ID NO: 3386373 - DNA, 25 bp, Homo sapien
ggaaggcgtcacctacagcagagaa

SEQ ID NO: 3386374 - DNA, 25 bp, Homo sapien
gaacggcaccagtttgggtccttca

SEQ ID NO: 3386375 - DNA, 25 bp, Homo sapien
taaagaagagtgcaccactgccagc

SEQ ID NO: 3386376 - DNA, 25 bp, Homo sapien
tcgccagcccatgaagccgataagg

SEQ ID NO: 3386377 - DNA, 25 bp, Homo sapien
tagtaggtggacatgataagcgccc

SEQ ID NO: 3386378 - DNA, 25 bp, Homo sapien
acctgtccgaagagccagtggctgc

SEQ ID NO: 3386379 - DNA, 25 bp, Homo sapien
gaacttgcaaattcctcaggcagta

SEQ ID NO: 3386380 - DNA, 25 bp, Homo sapien
gaaccacgagttctgctagggagat

SEQ ID NO: 3386381 - DNA, 25 bp, Homo sapien
gtctacttctggctccagtctgata

SEQ ID NO: 3386382 - DNA, 25 bp, Homo sapien
cagtctgatattaggctggctcttt

SEQ ID NO: 3386383 - DNA, 25 bp, Homo sapien
gttttgaaagtcctgatagggtaga

SEQ ID NO: 3386384 - DNA, 25 bp, Homo sapien
ttttgaaagtcctgatagggtagag

SEQ ID NO: 3386385 - DNA, 25 bp, Homo sapien
gggtgtcaagaagctgagcaccatc

SEQ ID NO: 3386386 - DNA, 25 bp, Homo sapien
gggggtgtcaagaagctgagcacca

SEQ ID NO: 3386387 - DNA, 25 bp, Homo sapien
ggtgtcaagaagctgagcaccatca

SEQ ID NO: 3386388 - DNA, 25 bp, Homo sapien
gtgtcaagaagctgagcaccatcac

SEQ ID NO: 3386389 - DNA, 25 bp, Homo sapien
gacctgagctttgggcttgcccgag

SEQ ID NO: 3386390 - DNA, 25 bp, Homo sapien
gatctaagggtagcgtatgggacct

SEQ ID NO: 3386391 - DNA, 25 bp, Homo sapien
taaaaccccggagtgtcattggagc

SEQ ID NO: 3386392 - DNA, 25 bp, Homo sapien
agtcagactcttccacctggtaggg

SEQ ID NO: 3386393 - DNA, 25 bp, Homo sapien
gcatccatcaccgagagtctgcaga

SEQ ID NO: 3386394 - DNA, 25 bp, Homo sapien
tctttagtgtccagggttcagagct

SEQ ID NO: 3386395 - DNA, 25 bp, Homo sapien
tttggaatttccctggtcgccagca

SEQ ID NO: 3386396 - DNA, 25 bp, Homo sapien
gattgcatgatagggaatcccagac

SEQ ID NO: 3386397 - DNA, 25 bp, Homo sapien
taatctgactgccaacaggtggtgc

SEQ ID NO: 3386398 - DNA, 25 bp, Homo sapien
aactcttggtgagcctagacctgcc

SEQ ID NO: 3386399 - DNA, 25 bp, Homo sapien
gatctctctggcacggttctggaaa

SEQ ID NO: 3386400 - DNA, 25 bp, Homo sapien
gaactctaaatgcaaagctggcctg

SEQ ID NO: 3386401 - DNA, 25 bp, Homo sapien
gacatagagcgcaaacgcgttctgc

SEQ ID NO: 3386402 - DNA, 25 bp, Homo sapien
cggttaatatctgggacgctgcgga

SEQ ID NO: 3386403 - DNA, 25 bp, Homo sapien
ccaaagggtacccaagaggcaagat

SEQ ID NO: 3386404 - DNA, 25 bp, Homo sapien
gatgacataagggtcccaaagggta

SEQ ID NO: 3386405 - DNA, 25 bp, Homo sapien
tcccaggcaggaagtactacttcag

SEQ ID NO: 3386406 - DNA, 25 bp, Homo sapien
gaatgaaatcggtgacagtgagcca

SEQ ID NO: 3386407 - DNA, 25 bp, Homo sapien
cagccgagcgtgtcttcagcaacaa

SEQ ID NO: 3386408 - DNA, 25 bp, Homo sapien
atcatgaagcgggatgcaagcacag

SEQ ID NO: 3386409 - DNA, 25 bp, Homo sapien
ttcaggtgccccaaggtcgctgaca

SEQ ID NO: 3386410 - DNA, 25 bp, Homo sapien
cccaaggtcgctgacagatcttcca

SEQ ID NO: 3386411 - DNA, 25 bp, Homo sapien
gtgccccaaggtcgctgacagatct

SEQ ID NO: 3386412 - DNA, 25 bp, Homo sapien
cataatacttcaggtgccccaaggt

SEQ ID NO: 3386413 - DNA, 25 bp, Homo sapien
tatcttccatcggacttggcagatg

SEQ ID NO: 3386414 - DNA, 25 bp, Homo sapien
gttttccgactccaagacaccagct

SEQ ID NO: 3386415 - DNA, 25 bp, Homo sapien
gagacttgccccatcttatcttcca

SEQ ID NO: 3386416 - DNA, 25 bp, Homo sapien
caggtcacgaggctagtaaatggca

SEQ ID NO: 3386417 - DNA, 25 bp, Homo sapien
tattttgcaattgaggaaagaagtc

SEQ ID NO: 3386418 - DNA, 25 bp, Homo sapien
gtctctttacccactatttctacga

SEQ ID NO: 3386419 - DNA, 25 bp, Homo sapien
tgaacagtaactacatgccagtctc

SEQ ID NO: 3386420 - DNA, 25 bp, Homo sapien
aatagtcattgtcagctctattttg

SEQ ID NO: 3386421 - DNA, 25 bp, Homo sapien
gatctggcagaaagatggcgttccc

SEQ ID NO: 3386422 - DNA, 25 bp, Homo sapien
tgaagagtcacatggtggttcgcgc

SEQ ID NO: 3386423 - DNA, 25 bp, Homo sapien
tgagtttggagaagcacgctatgac

SEQ ID NO: 3386424 - DNA, 25 bp, Homo sapien
tatgacatccatgtgcgcgtggcag

SEQ ID NO: 3386425 - DNA, 25 bp, Homo sapien
taaatgcttcacagggttgcagggc

SEQ ID NO: 3386426 - DNA, 25 bp, Homo sapien
gcgtactagtagaaggagacagatg

SEQ ID NO: 3386427 - DNA, 25 bp, Homo sapien
cagggcagctagatgtctgtatggc

SEQ ID NO: 3386428 - DNA, 25 bp, Homo sapien
ttccagggtcttgcgtactagtaga

SEQ ID NO: 3386429 - DNA, 25 bp, Homo sapien
cattagcttggtctgaaaccaggaa

SEQ ID NO: 3386430 - DNA, 25 bp, Homo sapien
gaaaagacatctcaaccaccaatct

SEQ ID NO: 3386431 - DNA, 25 bp, Homo sapien
ttagcttcgcaaaggtgatttagtt

SEQ ID NO: 3386432 - DNA, 25 bp, Homo sapien
cgctgttataattgttgcaatggca

SEQ ID NO: 3386433 - DNA, 25 bp, Homo sapien
gagtttaatggacacaaggccagcc

SEQ ID NO: 3386434 - DNA, 25 bp, Homo sapien
tggagccatcagtcgtcagaaatgc

SEQ ID NO: 3386435 - DNA, 25 bp, Homo sapien
tcaaagtccagggagcctgcttctg

SEQ ID NO: 3386436 - DNA, 25 bp, Homo sapien
tatgggagacagagttattacccaa

SEQ ID NO: 3386437 - DNA, 25 bp, Homo sapien
cagacactttctgagagccttggct

SEQ ID NO: 3386438 - DNA, 25 bp, Homo sapien
gatcctataatcactcgggtcctga

SEQ ID NO: 3386439 - DNA, 25 bp, Homo sapien
tttttccccacagacagaagtagtc

SEQ ID NO: 3386440 - DNA, 25 bp, Homo sapien
gatggccacctcttacacaagctca

SEQ ID NO: 3386441 - DNA, 25 bp, Homo sapien
gtgagttcccttgagccggtcgccc

SEQ ID NO: 3386442 - DNA, 25 bp, Homo sapien
cccactgtgtgcagacccatgtcaa

SEQ ID NO: 3386443 - DNA, 25 bp, Homo sapien
cagcatctgcagtagattagtatca

SEQ ID NO: 3386444 - DNA, 25 bp, Homo sapien
gaagagcttcatgaaaaggccctgg

SEQ ID NO: 3386445 - DNA, 25 bp, Homo sapien
attgtagacatccttgcggccaccg

SEQ ID NO: 3386446 - DNA, 25 bp, Homo sapien
gaagtgtagacaccctcgtttcaga

SEQ ID NO: 3386447 - DNA, 25 bp, Homo sapien
ggacaatatgtccttgactcaccag

SEQ ID NO: 3386448 - DNA, 25 bp, Homo sapien
tatagggtagctcatagtgttccac

SEQ ID NO: 3386449 - DNA, 25 bp, Homo sapien
ttatatatggcaccagagggcgcac

SEQ ID NO: 3386450 - DNA, 25 bp, Homo sapien
ccggggacctgcagaatctgagatg

SEQ ID NO: 3386451 - DNA, 25 bp, Homo sapien
accagagggcgcacttgttgcttac

SEQ ID NO: 3386452 - DNA, 25 bp, Homo sapien
ggcgcacttgttgcttacatcatca

SEQ ID NO: 3386453 - DNA, 25 bp, Homo sapien
tcatgagggcaaacagatccaggat

SEQ ID NO: 3386454 - DNA, 25 bp, Homo sapien
cagggctgtcatgagggcaaacaga

SEQ ID NO: 3386455 - DNA, 25 bp, Homo sapien
tgagggcaaacagatccaggatcat

SEQ ID NO: 3386456 - DNA, 25 bp, Homo sapien
gggctgtcatgagggcaaacagatc

SEQ ID NO: 3386457 - DNA, 25 bp, Homo sapien
tccactgtaaggatcttttcctgca

SEQ ID NO: 3386458 - DNA, 25 bp, Homo sapien
ccactgtaaggatcttttcctgcat

SEQ ID NO: 3386459 - DNA, 25 bp, Homo sapien
ttccactgtaaggatcttttcctgc

SEQ ID NO: 3386460 - DNA, 25 bp, Homo sapien
ctgccatattaaaggttccctggta

SEQ ID NO: 3386461 - DNA, 25 bp, Homo sapien
ctgtgctgccatattaaaggttccc

SEQ ID NO: 3386462 - DNA, 25 bp, Homo sapien
gctgccatattaaaggttccctggt

SEQ ID NO: 3386463 - DNA, 25 bp, Homo sapien
tgccatattaaaggttccctggtaa

SEQ ID NO: 3386464 - DNA, 25 bp, Homo sapien
tcctacactcgagagaaaatttctg

SEQ ID NO: 3386465 - DNA, 25 bp, Homo sapien
catgatgaccacttttatcatgaag

SEQ ID NO: 3386466 - DNA, 25 bp, Homo sapien
tttctgaccaggaccgagtaatgct

SEQ ID NO: 3386467 - DNA, 25 bp, Homo sapien
ggaccgagtaatgcttggatccaca

SEQ ID NO: 3386468 - DNA, 25 bp, Homo sapien
ggttggttgccagttctcattccag

SEQ ID NO: 3386469 - DNA, 25 bp, Homo sapien
aacctgggttggttgccagttctca

SEQ ID NO: 3386470 - DNA, 25 bp, Homo sapien
cctgggttggttgccagttctcatt

SEQ ID NO: 3386471 - DNA, 25 bp, Homo sapien
gggttggttgccagttctcattcca

SEQ ID NO: 3386472 - DNA, 25 bp, Homo sapien
tcctggtcctcatagtgctgatcct

SEQ ID NO: 3386473 - DNA, 25 bp, Homo sapien
accaattagtgatacagaggagacc

SEQ ID NO: 3386474 - DNA, 25 bp, Homo sapien
catttctctagatttgtcaccacgg

SEQ ID NO: 3386475 - DNA, 25 bp, Homo sapien
gacccatcctcatcgttgtggcatg

SEQ ID NO: 3386476 - DNA, 25 bp, Homo sapien
gaaataacaaggcaatcctgcatct

SEQ ID NO: 3386477 - DNA, 25 bp, Homo sapien
ttcaatacctctggccgctcatttg

SEQ ID NO: 3386478 - DNA, 25 bp, Homo sapien
tgtactggatatgagacagaggcca

SEQ ID NO: 3386479 - DNA, 25 bp, Homo sapien
gagaggcttatatgtactggatatg

SEQ ID NO: 3386480 - DNA, 25 bp, Homo sapien
cagtcctggtcatgagggtgtcaca

SEQ ID NO: 3386481 - DNA, 25 bp, Homo sapien
tagagtaatcatcgggtccacagcc

SEQ ID NO: 3386482 - DNA, 25 bp, Homo sapien
catgttagcacagaacttgtgtggc

SEQ ID NO: 3386483 - DNA, 25 bp, Homo sapien
cacacttatcctagcgaaggtcaca

SEQ ID NO: 3386484 - DNA, 25 bp, Homo sapien
gaaaggccctccacctttagcacaa

SEQ ID NO: 3386485 - DNA, 25 bp, Homo sapien
ctcaaactgcgccactgtttttatc

SEQ ID NO: 3386486 - DNA, 25 bp, Homo sapien
tctcaggtagggtttgtgtctccaa

SEQ ID NO: 3386487 - DNA, 25 bp, Homo sapien
tccaatacctctggccactgatttg

SEQ ID NO: 3386488 - DNA, 25 bp, Homo sapien
cattcttccaggttttgtacaaatt

SEQ ID NO: 3386489 - DNA, 25 bp, Homo sapien
attgtagaattcttcattcttccag

SEQ ID NO: 3386490 - DNA, 25 bp, Homo sapien
ttgtacaaattgttctgggtgtaac

SEQ ID NO: 3386491 - DNA, 25 bp, Homo sapien
tgtacaaattgttctgggtgtaact

SEQ ID NO: 3386492 - DNA, 25 bp, Homo sapien
cttgagggttaggccaagacagagt

SEQ ID NO: 3386493 - DNA, 25 bp, Homo sapien
gacagagttggttaaatggcagagc

SEQ ID NO: 3386494 - DNA, 25 bp, Homo sapien
agacagagttggttaaatggcagag

SEQ ID NO: 3386495 - DNA, 25 bp, Homo sapien
tgagggttaggccaagacagagttg

SEQ ID NO: 3386496 - DNA, 25 bp, Homo sapien
caaatgctgtcgtaggtcttggcta

SEQ ID NO: 3386497 - DNA, 25 bp, Homo sapien
acttccaaatgctgtcgtaggtctt

SEQ ID NO: 3386498 - DNA, 25 bp, Homo sapien
tgctgtcgtaggtcttggctatagg

SEQ ID NO: 3386499 - DNA, 25 bp, Homo sapien
ctgtcgtaggtcttggctataggtg

SEQ ID NO: 3386500 - DNA, 25 bp, Homo sapien
gctgaagtatatgaaggtggaggca

SEQ ID NO: 3386501 - DNA, 25 bp, Homo sapien
caatatgggaagatcctcaagctgg

SEQ ID NO: 3386502 - DNA, 25 bp, Homo sapien
tatgaaggtggaggcagacttgttc

SEQ ID NO: 3386503 - DNA, 25 bp, Homo sapien
tctttgttggctcctttaggtagta

SEQ ID NO: 3386504 - DNA, 25 bp, Homo sapien
ttaggtagaaaaacactgccactgc

SEQ ID NO: 3386505 - DNA, 25 bp, Homo sapien
tcacagcccttcagggcgcagggag

SEQ ID NO: 3386506 - DNA, 25 bp, Homo sapien
gcccattgacgaggcacagacatgt

SEQ ID NO: 3386507 - DNA, 25 bp, Homo sapien
gagcctgagtgaaagacagcccatt

SEQ ID NO: 3386508 - DNA, 25 bp, Homo sapien
tagctatgaaagctcacgtcgcttg

SEQ ID NO: 3386509 - DNA, 25 bp, Homo sapien
acttcaggacggtgattccttgcag

SEQ ID NO: 3386510 - DNA, 25 bp, Homo sapien
gcttcctggatgctcattgtgggca

SEQ ID NO: 3386511 - DNA, 25 bp, Homo sapien
gagacttcgagagactttgcatttc

SEQ ID NO: 3386512 - DNA, 25 bp, Homo sapien
gggacttagtttagcaatggcttcc

SEQ ID NO: 3386513 - DNA, 25 bp, Homo sapien
tgggacttagtttagcaatggcttc

SEQ ID NO: 3386514 - DNA, 25 bp, Homo sapien
aaaggaaagctttttccttgtgcag

SEQ ID NO: 3386515 - DNA, 25 bp, Homo sapien
cttgtgcagaggtcacaatgtctaa

SEQ ID NO: 3386516 - DNA, 25 bp, Homo sapien
gatggtgagccggaatggaaaagga

SEQ ID NO: 3386517 - DNA, 25 bp, Homo sapien
agaggtcacaatgtctaagatggac

SEQ ID NO: 3386518 - DNA, 25 bp, Homo sapien
ccactggagagtccttattactcac

SEQ ID NO: 3386519 - DNA, 25 bp, Homo sapien
ctctccactataagcatcaccacca

SEQ ID NO: 3386520 - DNA, 25 bp, Homo sapien
gagctgcagcaaggtagaggctctc

SEQ ID NO: 3386521 - DNA, 25 bp, Homo sapien
gcagcaaggtagaggctctccacta

SEQ ID NO: 3386522 - DNA, 25 bp, Homo sapien
caaggtagaggctctccactataag

SEQ ID NO: 3386523 - DNA, 25 bp, Homo sapien
agctgaaggcgctgggatcattccc

SEQ ID NO: 3386524 - DNA, 25 bp, Homo sapien
gatcattcccaaggctactgagttg

SEQ ID NO: 3386525 - DNA, 25 bp, Homo sapien
caagcaagggcaataggcatgatgg

SEQ ID NO: 3386526 - DNA, 25 bp, Homo sapien
tctggacatgtggattgttgcaagc

SEQ ID NO: 3386527 - DNA, 25 bp, Homo sapien
ctactaggcaagtagcgactgccgc

SEQ ID NO: 3386528 - DNA, 25 bp, Homo sapien
agcccgccttgggtcgcctcttctc

SEQ ID NO: 3386529 - DNA, 25 bp, Homo sapien
cagcggctgaggctactaggcaagt

SEQ ID NO: 3386530 - DNA, 25 bp, Homo sapien
ctgaggctactaggcaagtagcgac

SEQ ID NO: 3386531 - DNA, 25 bp, Homo sapien
ctgcgagcccagccccggcccctcc

SEQ ID NO: 3386532 - DNA, 25 bp, Homo sapien
gcgagcccagccccggcccctccat

SEQ ID NO: 3386533 - DNA, 25 bp, Homo sapien
tgcgagcccagccccggcccctcca

SEQ ID NO: 3386534 - DNA, 25 bp, Homo sapien
agccgctctcccggcccccaggaca

SEQ ID NO: 3386535 - DNA, 25 bp, Homo sapien
cagctgcagccgctctcccggcccc

SEQ ID NO: 3386536 - DNA, 25 bp, Homo sapien
gcccccaggacagccaccgcccggc

SEQ ID NO: 3386537 - DNA, 25 bp, Homo sapien
ccccaggacagccaccgcccggccg

SEQ ID NO: 3386538 - DNA, 25 bp, Homo sapien
gaaatatgtagctagctcactgtcc

SEQ ID NO: 3386539 - DNA, 25 bp, Homo sapien
cccaggtcacgtgtaggtgtctcta

SEQ ID NO: 3386540 - DNA, 25 bp, Homo sapien
tcaagaggtaaaggtctatgtccct

SEQ ID NO: 3386541 - DNA, 25 bp, Homo sapien
cactatactgtgcagaggcccaggt

SEQ ID NO: 3386542 - DNA, 25 bp, Homo sapien
gagagttgacagtaggaccttcagc

SEQ ID NO: 3386543 - DNA, 25 bp, Homo sapien
gaaagcttccacaaacagagagttg

SEQ ID NO: 3386544 - DNA, 25 bp, Homo sapien
tattgatatgccaagcaggtcactc

SEQ ID NO: 3386545 - DNA, 25 bp, Homo sapien
ctaatttttaacgatggcagtctca

SEQ ID NO: 3386546 - DNA, 25 bp, Homo sapien
caatatatcatgtacagtcctgcag

SEQ ID NO: 3386547 - DNA, 25 bp, Homo sapien
tcttcaatactgtaccaccagagat

SEQ ID NO: 3386548 - DNA, 25 bp, Homo sapien
tcaacactcccctttggttagagac

SEQ ID NO: 3386549 - DNA, 25 bp, Homo sapien
ggttagagacacaggttgatttcag

SEQ ID NO: 3386550 - DNA, 25 bp, Homo sapien
aagaatcacttgggcccaggaggcg

SEQ ID NO: 3386551 - DNA, 25 bp, Homo sapien
ccagcctgggcgacagagcgaaatt

SEQ ID NO: 3386552 - DNA, 25 bp, Homo sapien
agaagaatcacttgggcccaggagg

SEQ ID NO: 3386553 - DNA, 25 bp, Homo sapien
agcctgggcgacagagcgaaattcc

SEQ ID NO: 3386554 - DNA, 25 bp, Homo sapien
ctgaagagtaagagtcatttgacaa

SEQ ID NO: 3386555 - DNA, 25 bp, Homo sapien
aagagtaagagtcatttgacaaagc

SEQ ID NO: 3386556 - DNA, 25 bp, Homo sapien
gaagagtaagagtcatttgacaaag

SEQ ID NO: 3386557 - DNA, 25 bp, Homo sapien
agagtaagagtcatttgacaaagca

SEQ ID NO: 3386558 - DNA, 25 bp, Homo sapien
tggagggtgggggccatggctgtga

SEQ ID NO: 3386559 - DNA, 25 bp, Homo sapien
gagggtgggggccatggctgtgatt

SEQ ID NO: 3386560 - DNA, 25 bp, Homo sapien
agggtgggggccatggctgtgattc

SEQ ID NO: 3386561 - DNA, 25 bp, Homo sapien
ctggagggtgggggccatggctgtg

SEQ ID NO: 3386562 - DNA, 25 bp, Homo sapien
gttttcatgtgcacagatgccatat

SEQ ID NO: 3386563 - DNA, 25 bp, Homo sapien
gttactagagtcctctataagagga

SEQ ID NO: 3386564 - DNA, 25 bp, Homo sapien
caatgtcacagttactagagtcctc

SEQ ID NO: 3386565 - DNA, 25 bp, Homo sapien
ttgcattggcaagttctttgttttc

SEQ ID NO: 3386566 - DNA, 25 bp, Homo sapien
tctggttgcctgacatcatatcctg

SEQ ID NO: 3386567 - DNA, 25 bp, Homo sapien
taccaactctttacatcgttcaaaa

SEQ ID NO: 3386568 - DNA, 25 bp, Homo sapien
gcccaatgaagaagcgacacatttt

SEQ ID NO: 3386569 - DNA, 25 bp, Homo sapien
ctgacatcatatcctgcttctacca

SEQ ID NO: 3386570 - DNA, 25 bp, Homo sapien
aatctccacccaactgatctacaac

SEQ ID NO: 3386571 - DNA, 25 bp, Homo sapien
atttaaatctccacccaactgatct

SEQ ID NO: 3386572 - DNA, 25 bp, Homo sapien
tttaaatctccacccaactgatcta

SEQ ID NO: 3386573 - DNA, 25 bp, Homo sapien
taaatctccacccaactgatctaca

SEQ ID NO: 3386574 - DNA, 25 bp, Homo sapien
tgttgaaacaatactgccaggtgga

SEQ ID NO: 3386575 - DNA, 25 bp, Homo sapien
caccatgctggagtaataatatgac

SEQ ID NO: 3386576 - DNA, 25 bp, Homo sapien
gctataataggcatgtgttgaaaca

SEQ ID NO: 3386577 - DNA, 25 bp, Homo sapien
tgctgaatccctctccatcaataag

SEQ ID NO: 3386578 - DNA, 25 bp, Homo sapien
tttgtgagctgataacatgagaggt

SEQ ID NO: 3386579 - DNA, 25 bp, Homo sapien
tgagaggtgtctgcccatttacatc

SEQ ID NO: 3386580 - DNA, 25 bp, Homo sapien
ccaattactttgtgagctgataaca

SEQ ID NO: 3386581 - DNA, 25 bp, Homo sapien
catgagaggtgtctgcccatttaca

SEQ ID NO: 3386582 - DNA, 25 bp, Homo sapien
tagtagctttcaaactttttgccaa

SEQ ID NO: 3386583 - DNA, 25 bp, Homo sapien
ttagtagctttcaaactttttgcca

SEQ ID NO: 3386584 - DNA, 25 bp, Homo sapien
taaaagaaatccagttggttctggc

SEQ ID NO: 3386585 - DNA, 25 bp, Homo sapien
tcaaccacattgagagaaggattaa

SEQ ID NO: 3386586 - DNA, 25 bp, Homo sapien
tatccaggctagaaccagcttccaa

SEQ ID NO: 3386587 - DNA, 25 bp, Homo sapien
tggatatccaggctagaaccagctt

SEQ ID NO: 3386588 - DNA, 25 bp, Homo sapien
gcttccaaaagcttatcaactgcat

SEQ ID NO: 3386589 - DNA, 25 bp, Homo sapien
tttgtagagccatatcaagaggtgt

SEQ ID NO: 3386590 - DNA, 25 bp, Homo sapien
gtagagccatatcaagaggtgtttc

SEQ ID NO: 3386591 - DNA, 25 bp, Homo sapien
ttgtagagccatatcaagaggtgtt

SEQ ID NO: 3386592 - DNA, 25 bp, Homo sapien
tgtagagccatatcaagaggtgttt

SEQ ID NO: 3386593 - DNA, 25 bp, Homo sapien
taaagccgtgagtgaataacatccc

SEQ ID NO: 3386594 - DNA, 25 bp, Homo sapien
gaccttgaaagtaagcagggcttcc

SEQ ID NO: 3386595 - DNA, 25 bp, Homo sapien
tatcagtacataggtggtaaagccg

SEQ ID NO: 3386596 - DNA, 25 bp, Homo sapien
ctggcagtcaaaagtaggtctagca

SEQ ID NO: 3386597 - DNA, 25 bp, Homo sapien
caaacagtattctatattggaaagc

SEQ ID NO: 3386598 - DNA, 25 bp, Homo sapien
tctctacaagaaatggtggtctttt

SEQ ID NO: 3386599 - DNA, 25 bp, Homo sapien
aactataagagctccaacctgggca

SEQ ID NO: 3386600 - DNA, 25 bp, Homo sapien
cttttagaaaactgttaatgagagc

SEQ ID NO: 3386601 - DNA, 25 bp, Homo sapien
tatgtatccaatagcccacatggta

SEQ ID NO: 3386602 - DNA, 25 bp, Homo sapien
catggtaatcacagaaagcatcagc

SEQ ID NO: 3386603 - DNA, 25 bp, Homo sapien
tttaaaagccaagaatctgaattga

SEQ ID NO: 3386604 - DNA, 25 bp, Homo sapien
aacagtgttactagaagacatcctt

SEQ ID NO: 3386605 - DNA, 25 bp, Homo sapien
caatgattaacagtaggtatgaagg

SEQ ID NO: 3386606 - DNA, 25 bp, Homo sapien
gaggttcacatgtaatttatccaaa

SEQ ID NO: 3386607 - DNA, 25 bp, Homo sapien
caccacagtcatcttatgcatgaat

SEQ ID NO: 3386608 - DNA, 25 bp, Homo sapien
tttagatgctcaacatgctgccaaa

SEQ ID NO: 3386609 - DNA, 25 bp, Homo sapien
gatgaaccaagtcataaatatccaa

SEQ ID NO: 3386610 - DNA, 25 bp, Homo sapien
gcagaaaggctgttggtaagtatac

SEQ ID NO: 3386611 - DNA, 25 bp, Homo sapien
aaaaataagatgaaccaagtcataa

SEQ ID NO: 3386612 - DNA, 25 bp, Homo sapien
tatccaaaaaacagaacttagcaga

SEQ ID NO: 3386613 - DNA, 25 bp, Homo sapien
caaatggccccaatgtatgctgtgc

SEQ ID NO: 3386614 - DNA, 25 bp, Homo sapien
gatgcactcatgactacttataaaa

SEQ ID NO: 3386615 - DNA, 25 bp, Homo sapien
tgtactttgagaactcctatggcca

SEQ ID NO: 3386616 - DNA, 25 bp, Homo sapien
taaggctagtgcttaaaaaactgcc

SEQ ID NO: 3386617 - DNA, 25 bp, Homo sapien
cagttaagtctctcaatatggagct

SEQ ID NO: 3386618 - DNA, 25 bp, Homo sapien
tagggtatccaagtcttaactgcga

SEQ ID NO: 3386619 - DNA, 25 bp, Homo sapien
tatctaaggcactcagatgtggact

SEQ ID NO: 3386620 - DNA, 25 bp, Homo sapien
tgcctgtgtggttcactgacctaaa

SEQ ID NO: 3386621 - DNA, 25 bp, Homo sapien
atgaaactgaaatagaaaggggctc

SEQ ID NO: 3386622 - DNA, 25 bp, Homo sapien
ctgaaaatgaaactgaaatagaaag

SEQ ID NO: 3386623 - DNA, 25 bp, Homo sapien
aatgaaactgaaatagaaaggggct

SEQ ID NO: 3386624 - DNA, 25 bp, Homo sapien
tgaaaatgaaactgaaatagaaagg

SEQ ID NO: 3386625 - DNA, 25 bp, Homo sapien
cttatagaaaaagtatagaaaggct

SEQ ID NO: 3386626 - DNA, 25 bp, Homo sapien
tagaaaaagtatagaaaggctacta

SEQ ID NO: 3386627 - DNA, 25 bp, Homo sapien
gaaaaagtatagaaaggctactatg

SEQ ID NO: 3386628 - DNA, 25 bp, Homo sapien
tatagaaaaagtatagaaaggctac

SEQ ID NO: 3386629 - DNA, 25 bp, Homo sapien
gaagccttagtgaagcctggatcag

SEQ ID NO: 3386630 - DNA, 25 bp, Homo sapien
ccttagtgaagcctggatcagttgc

SEQ ID NO: 3386631 - DNA, 25 bp, Homo sapien
tgaagcctggatcagttgcccaagt

SEQ ID NO: 3386632 - DNA, 25 bp, Homo sapien
tcttcagaagccttagtgaagcctg

SEQ ID NO: 3386633 - DNA, 25 bp, Homo sapien
aatatcagtaacgaagaaatctcac

SEQ ID NO: 3386634 - DNA, 25 bp, Homo sapien
aaatatcagtaacgaagaaatctca

SEQ ID NO: 3386635 - DNA, 25 bp, Homo sapien
taaaaatatcagtaacgaagaaatc

SEQ ID NO: 3386636 - DNA, 25 bp, Homo sapien
aaaatatcagtaacgaagaaatctc

SEQ ID NO: 3386637 - DNA, 25 bp, Homo sapien
aagacatgatgtacaaaatgttctg

SEQ ID NO: 3386638 - DNA, 25 bp, Homo sapien
ccagtttctgcaagggtgatgatat

SEQ ID NO: 3386639 - DNA, 25 bp, Homo sapien
aatgttctgaagtccagagagccag

SEQ ID NO: 3386640 - DNA, 25 bp, Homo sapien
gagccagtttctgcaagggtgatga

SEQ ID NO: 3386641 - DNA, 25 bp, Homo sapien
tcacagaggcattggcacaaatcct

SEQ ID NO: 3386642 - DNA, 25 bp, Homo sapien
gcaaaataagcactcaaccaaggga

SEQ ID NO: 3386643 - DNA, 25 bp, Homo sapien
gaaatgaggcagtaccacagagcaa

SEQ ID NO: 3386644 - DNA, 25 bp, Homo sapien
taattcacggagagatgtaaccaga

SEQ ID NO: 3386645 - DNA, 25 bp, Homo sapien
tccacaggcagtgttgatcatatcg

SEQ ID NO: 3386646 - DNA, 25 bp, Homo sapien
tgcatacatggcagtggagtgacct

SEQ ID NO: 3386647 - DNA, 25 bp, Homo sapien
ctatgcaccgtccagtccacaggca

SEQ ID NO: 3386648 - DNA, 25 bp, Homo sapien
tgatcatatcgagccacacagcagt

SEQ ID NO: 3386649 - DNA, 25 bp, Homo sapien
gaagaatatgtaatagtgatggttg

SEQ ID NO: 3386650 - DNA, 25 bp, Homo sapien
atgtaatagtgatggttgccaaaac

SEQ ID NO: 3386651 - DNA, 25 bp, Homo sapien
atatgtaatagtgatggttgccaaa

SEQ ID NO: 3386652 - DNA, 25 bp, Homo sapien
gaatatgtaatagtgatggttgcca

SEQ ID NO: 3386653 - DNA, 25 bp, Homo sapien
agatgaaagatccatatataatcca

SEQ ID NO: 3386654 - DNA, 25 bp, Homo sapien
atgaaagatccatatataatccagc

SEQ ID NO: 3386655 - DNA, 25 bp, Homo sapien
gatgaaagatccatatataatccag

SEQ ID NO: 3386656 - DNA, 25 bp, Homo sapien
tgaaagatccatatataatccagcc

SEQ ID NO: 3386657 - DNA, 25 bp, Homo sapien
tagtgatcaaagacacccaaggcgt

SEQ ID NO: 3386658 - DNA, 25 bp, Homo sapien
tctgacaaggtaactgaagccctcc

SEQ ID NO: 3386659 - DNA, 25 bp, Homo sapien
ctcagggccgcagaataagtgatct

SEQ ID NO: 3386660 - DNA, 25 bp, Homo sapien
tatggtttatagtcacccagccaga

SEQ ID NO: 3386661 - DNA, 25 bp, Homo sapien
tatagcaactatgggtctattacag

SEQ ID NO: 3386662 - DNA, 25 bp, Homo sapien
gtttatagcaactatgggtctatta

SEQ ID NO: 3386663 - DNA, 25 bp, Homo sapien
ttatagcaactatgggtctattaca

SEQ ID NO: 3386664 - DNA, 25 bp, Homo sapien
tagcaactatgggtctattacagga

SEQ ID NO: 3386665 - DNA, 25 bp, Homo sapien
taattgaggctatgataacactgta

SEQ ID NO: 3386666 - DNA, 25 bp, Homo sapien
cactgcagttctatatagggagaag

SEQ ID NO: 3386667 - DNA, 25 bp, Homo sapien
gcattcagcataagatatactagcc

SEQ ID NO: 3386668 - DNA, 25 bp, Homo sapien
gatgacaaaatggtggctcaatgtt

SEQ ID NO: 3386669 - DNA, 25 bp, Homo sapien
acaggccacaatctgattgaggtaa

SEQ ID NO: 3386670 - DNA, 25 bp, Homo sapien
tcttctttgaatgttgtggcacaat

SEQ ID NO: 3386671 - DNA, 25 bp, Homo sapien
ggaaagttgctagcatcaagatata

SEQ ID NO: 3386672 - DNA, 25 bp, Homo sapien
tgaggtaagtccataatccatcttc

SEQ ID NO: 3386673 - DNA, 25 bp, Homo sapien
taagggtaacaaacagcgctggaaa

SEQ ID NO: 3386674 - DNA, 25 bp, Homo sapien
gaaagctgaaggtgactactgccct

SEQ ID NO: 3386675 - DNA, 25 bp, Homo sapien
gacatggctagacccacagagtcag

SEQ ID NO: 3386676 - DNA, 25 bp, Homo sapien
taaagaggtcagattaggtaactcc

SEQ ID NO: 3386677 - DNA, 25 bp, Homo sapien
attctctcatgggaggtcaggccca

SEQ ID NO: 3386678 - DNA, 25 bp, Homo sapien
tggtgtcttcctgagggacaacgtc

SEQ ID NO: 3386679 - DNA, 25 bp, Homo sapien
gagggacaacgtctgtttcatatgc

SEQ ID NO: 3386680 - DNA, 25 bp, Homo sapien
tgattctctcatgggaggtcaggcc

SEQ ID NO: 3386681 - DNA, 25 bp, Homo sapien
tgcgttgctgtttagaagattgtgt

SEQ ID NO: 3386682 - DNA, 25 bp, Homo sapien
gtccatgaggatgactgcgttgctg

SEQ ID NO: 3386683 - DNA, 25 bp, Homo sapien
tgactgcgttgctgtttagaagatt

SEQ ID NO: 3386684 - DNA, 25 bp, Homo sapien
catgaggatgactgcgttgctgttt

SEQ ID NO: 3386685 - DNA, 25 bp, Homo sapien
tggattccccacttaatggactggc

SEQ ID NO: 3386686 - DNA, 25 bp, Homo sapien
gctcgctcagccacttaattgggtt

SEQ ID NO: 3386687 - DNA, 25 bp, Homo sapien
ccacttaatggactggccactgaca

SEQ ID NO: 3386688 - DNA, 25 bp, Homo sapien
tctggacctgaatctatatttggag

SEQ ID NO: 3386689 - DNA, 25 bp, Homo sapien
tgtactgtgatgtccaatctaccac

SEQ ID NO: 3386690 - DNA, 25 bp, Homo sapien
ctgggtgaaagaccatggtgtactg

SEQ ID NO: 3386691 - DNA, 25 bp, Homo sapien
gggcttcaccaagccaaagcagcca

SEQ ID NO: 3386692 - DNA, 25 bp, Homo sapien
tgccaggttctgcatgaatccaaga

SEQ ID NO: 3386693 - DNA, 25 bp, Homo sapien
actttcaaactacagggcatcgaca

SEQ ID NO: 3386694 - DNA, 25 bp, Homo sapien
tttgaaacagccaatatagtatctg

SEQ ID NO: 3386695 - DNA, 25 bp, Homo sapien
ccattttatccataatcagtgagta

SEQ ID NO: 3386696 - DNA, 25 bp, Homo sapien
tcctttggacttaggtgaattctaa

SEQ ID NO: 3386697 - DNA, 25 bp, Homo sapien
tgaactaatttgtgtcctatgtaca

SEQ ID NO: 3386698 - DNA, 25 bp, Homo sapien
cttaatttaagactctagaagtgtt

SEQ ID NO: 3386699 - DNA, 25 bp, Homo sapien
ctggtattaatcataatctcaactc

SEQ ID NO: 3386700 - DNA, 25 bp, Homo sapien
atcataatctcaactcattcctgga

SEQ ID NO: 3386701 - DNA, 25 bp, Homo sapien
gagtttctgtagcatgtctcacaag

SEQ ID NO: 3386702 - DNA, 25 bp, Homo sapien
cagccctgaaagtctgtagtttaaa

SEQ ID NO: 3386703 - DNA, 25 bp, Homo sapien
tcacaagactcttctctggtacaga

SEQ ID NO: 3386704 - DNA, 25 bp, Homo sapien
gggagccagtccgtcatttgagttt

SEQ ID NO: 3386705 - DNA, 25 bp, Homo sapien
catcctcgtaaattccagactgtcc

SEQ ID NO: 3386706 - DNA, 25 bp, Homo sapien
cgggatctgagtatccaaatctgga

SEQ ID NO: 3386707 - DNA, 25 bp, Homo sapien
aatctggagtccaacctcttccaag

SEQ ID NO: 3386708 - DNA, 25 bp, Homo sapien
catttcaatcttgacccacgatttg

SEQ ID NO: 3386709 - DNA, 25 bp, Homo sapien
ttcagaaagcttgagggacagaccc

SEQ ID NO: 3386710 - DNA, 25 bp, Homo sapien
catggcattagtcccaaggcgtggc

SEQ ID NO: 3386711 - DNA, 25 bp, Homo sapien
aggcgtggccgctgttgctatttca

SEQ ID NO: 3386712 - DNA, 25 bp, Homo sapien
gaggagtttgcacaccatgttggag

SEQ ID NO: 3386713 - DNA, 25 bp, Homo sapien
gcttgacatgcctaacacagcattc

SEQ ID NO: 3386714 - DNA, 25 bp, Homo sapien
tagctatgcctatactattatgcaa

SEQ ID NO: 3386715 - DNA, 25 bp, Homo sapien
acagcattcccttaaacattttgca

SEQ ID NO: 3386716 - DNA, 25 bp, Homo sapien
caacaatcctcaatcaagtctatgg

SEQ ID NO: 3386717 - DNA, 25 bp, Homo sapien
cttccaagtctggtaagactatgta

SEQ ID NO: 3386718 - DNA, 25 bp, Homo sapien
cagcccaatcttccaagtctggtaa

SEQ ID NO: 3386719 - DNA, 25 bp, Homo sapien
caaagcttccctcgccaatttcaag

SEQ ID NO: 3386720 - DNA, 25 bp, Homo sapien
aatttcaagatacgccagtttccca

SEQ ID NO: 3386721 - DNA, 25 bp, Homo sapien
gacctgggctcgtgcgcttagtccg

SEQ ID NO: 3386722 - DNA, 25 bp, Homo sapien
ggtgcttcctaaagtattcgctggg

SEQ ID NO: 3386723 - DNA, 25 bp, Homo sapien
gatctgcgaacaggtgggtgcttcc

SEQ ID NO: 3386724 - DNA, 25 bp, Homo sapien
gcgcttagtccggagccctgatctg

SEQ ID NO: 3386725 - DNA, 25 bp, Homo sapien
ggcatctagatgcagacttgtaccc

SEQ ID NO: 3386726 - DNA, 25 bp, Homo sapien
gggagaaatccaggcatctagatgc

SEQ ID NO: 3386727 - DNA, 25 bp, Homo sapien
actgactgccaggtacgcgggctcc

SEQ ID NO: 3386728 - DNA, 25 bp, Homo sapien
tcggcgctgcggaaagactgactgc

SEQ ID NO: 3386729 - DNA, 25 bp, Homo sapien
aagactgactgccaggtacgcgggc

SEQ ID NO: 3386730 - DNA, 25 bp, Homo sapien
ctcggcgctgcggaaagactgactg

SEQ ID NO: 3386731 - DNA, 25 bp, Homo sapien
ggagcttaggcaccagtagccaagc

SEQ ID NO: 3386732 - DNA, 25 bp, Homo sapien
aagcttctccctcctcgcgccagtt

SEQ ID NO: 3386733 - DNA, 25 bp, Homo sapien
cagagcccacggagcttaggcacca

SEQ ID NO: 3386734 - DNA, 25 bp, Homo sapien
gtagccaagcttctccctcctcgcg

SEQ ID NO: 3386735 - DNA, 25 bp, Homo sapien
tgcacctcagctggcgacgaaaggg

SEQ ID NO: 3386736 - DNA, 25 bp, Homo sapien
agcgccttcttgagcaagacctgca

SEQ ID NO: 3386737 - DNA, 25 bp, Homo sapien
tgctttcaggtcgaagcgccttctt

SEQ ID NO: 3386738 - DNA, 25 bp, Homo sapien
acagggacacgacggcgccaacatt

SEQ ID NO: 3386739 - DNA, 25 bp, Homo sapien
gcaccagacactttctactgcttga

SEQ ID NO: 3386740 - DNA, 25 bp, Homo sapien
tgaggaatggcgagaaatctcacac

SEQ ID NO: 3386741 - DNA, 25 bp, Homo sapien
taaaagctaacactttgcaccagac

SEQ ID NO: 3386742 - DNA, 25 bp, Homo sapien
aaagggagtggtaattacgagctca

SEQ ID NO: 3386743 - DNA, 25 bp, Homo sapien
gaggccacaatcttgaagaactcag

SEQ ID NO: 3386744 - DNA, 25 bp, Homo sapien
aggccacaatcttgaagaactcaga

SEQ ID NO: 3386745 - DNA, 25 bp, Homo sapien
ttcaacatgtctttctcaagccatt

SEQ ID NO: 3386746 - DNA, 25 bp, Homo sapien
cctcttcaacatgtctttctcaagc

SEQ ID NO: 3386747 - DNA, 25 bp, Homo sapien
ttcctcttcaacatgtctttctcaa

SEQ ID NO: 3386748 - DNA, 25 bp, Homo sapien
caacatgtctttctcaagccatttc

SEQ ID NO: 3386749 - DNA, 25 bp, Homo sapien
tatagggaggaaatgttggcactca

SEQ ID NO: 3386750 - DNA, 25 bp, Homo sapien
catcatcacattggtatatagggag

SEQ ID NO: 3386751 - DNA, 25 bp, Homo sapien
ttagtttacatgcaacaaagggacc

SEQ ID NO: 3386752 - DNA, 25 bp, Homo sapien
gcactatgctaatgaccacagtggg

SEQ ID NO: 3386753 - DNA, 25 bp, Homo sapien
gcagatcagatctgtgcatcactgc

SEQ ID NO: 3386754 - DNA, 25 bp, Homo sapien
taattgtttccccttgattggctcc

SEQ ID NO: 3386755 - DNA, 25 bp, Homo sapien
gtgtcctggagatgcatgtccgaat

SEQ ID NO: 3386756 - DNA, 25 bp, Homo sapien
tacaagtatattgccaacgcagatc

SEQ ID NO: 3386757 - DNA, 25 bp, Homo sapien
ggaggggactggcatgatgctgtga

SEQ ID NO: 3386758 - DNA, 25 bp, Homo sapien
gaacaagcagagactgtgggaagag

SEQ ID NO: 3386759 - DNA, 25 bp, Homo sapien
gcatgatgctgtgaggggcctttga

SEQ ID NO: 3386760 - DNA, 25 bp, Homo sapien
agaatccctaactaaagctacaggg

SEQ ID NO: 3386761 - DNA, 25 bp, Homo sapien
tcaagatgacttggtccctctgaac

SEQ ID NO: 3386762 - DNA, 25 bp, Homo sapien
tgaacatccgacatttgctcactgg

SEQ ID NO: 3386763 - DNA, 25 bp, Homo sapien
aagatgacttggtccctctgaacat

SEQ ID NO: 3386764 - DNA, 25 bp, Homo sapien
tccctctgaacatccgacatttgct

SEQ ID NO: 3386765 - DNA, 25 bp, Homo sapien
caggtggtctgctggctccggtact

SEQ ID NO: 3386766 - DNA, 25 bp, Homo sapien
ccaggtggtctgctggctccggtac

SEQ ID NO: 3386767 - DNA, 25 bp, Homo sapien
cccaggtggtctgctggctccggta

SEQ ID NO: 3386768 - DNA, 25 bp, Homo sapien
aggtggtctgctggctccggtactt

SEQ ID NO: 3386769 - DNA, 25 bp, Homo sapien
gaagcagccgtagcccacaaagcac

SEQ ID NO: 3386770 - DNA, 25 bp, Homo sapien
ttggaagcagccgtagcccacaaag

SEQ ID NO: 3386771 - DNA, 25 bp, Homo sapien
attcttggaagcagccgtagcccac

SEQ ID NO: 3386772 - DNA, 25 bp, Homo sapien
ttcttggaagcagccgtagcccaca

SEQ ID NO: 3386773 - DNA, 25 bp, Homo sapien
caacggtaatggtactgatgaagcc

SEQ ID NO: 3386774 - DNA, 25 bp, Homo sapien
cagaggttaaacaggagcctaaggt

SEQ ID NO: 3386775 - DNA, 25 bp, Homo sapien
gcaagtgtgggctgaattattctca

SEQ ID NO: 3386776 - DNA, 25 bp, Homo sapien
gagaccatgctgctaaacactgggc

SEQ ID NO: 3386777 - DNA, 25 bp, Homo sapien
gattcccactggtgatattctaaac

SEQ ID NO: 3386778 - DNA, 25 bp, Homo sapien
tccgcagccaatggcacagccaaat

SEQ ID NO: 3386779 - DNA, 25 bp, Homo sapien
agagtgcagctttttggtttgggaa

SEQ ID NO: 3386780 - DNA, 25 bp, Homo sapien
cattgtgtggagttcgctgcctggc

SEQ ID NO: 3386781 - DNA, 25 bp, Homo sapien
tagggatcaggcacagttatctaac

SEQ ID NO: 3386782 - DNA, 25 bp, Homo sapien
tggccatagggatcaggcacagtta

SEQ ID NO: 3386783 - DNA, 25 bp, Homo sapien
ttccttcctggccatagggatcagg

SEQ ID NO: 3386784 - DNA, 25 bp, Homo sapien
gatcaggcacagttatctaaccaaa

SEQ ID NO: 3386785 - DNA, 25 bp, Homo sapien
ctgaacactccaatatctctgaggt

SEQ ID NO: 3386786 - DNA, 25 bp, Homo sapien
ggcctgtacttttgttgtacagatc

SEQ ID NO: 3386787 - DNA, 25 bp, Homo sapien
ctgaggtaggcctgtacttttgttg

SEQ ID NO: 3386788 - DNA, 25 bp, Homo sapien
tggaactgaacactccaatatctct

SEQ ID NO: 3386789 - DNA, 25 bp, Homo sapien
ccatgcttgaaaagtggcccactcg

SEQ ID NO: 3386790 - DNA, 25 bp, Homo sapien
gaagcatgtggtctgttggtcatcc

SEQ ID NO: 3386791 - DNA, 25 bp, Homo sapien
ggcccatcagcccaaatgtgaattc

SEQ ID NO: 3386792 - DNA, 25 bp, Homo sapien
gagtggatgatcacttagccctgtc

SEQ ID NO: 3386793 - DNA, 25 bp, Homo sapien
aatagtttcaatccttggttggttg

SEQ ID NO: 3386794 - DNA, 25 bp, Homo sapien
ggttggttgaatccgagggtgcaga

SEQ ID NO: 3386795 - DNA, 25 bp, Homo sapien
tggttggttgaatccgagggtgcag

SEQ ID NO: 3386796 - DNA, 25 bp, Homo sapien
tcttttccttcaaatagtttcaatc

SEQ ID NO: 3386797 - DNA, 25 bp, Homo sapien
gctgggcagcctatgcttcagtaca

SEQ ID NO: 3386798 - DNA, 25 bp, Homo sapien
cagccggctggatcacctagaaatt

SEQ ID NO: 3386799 - DNA, 25 bp, Homo sapien
tagcaattctgcttacgctgggcag

SEQ ID NO: 3386800 - DNA, 25 bp, Homo sapien
ttcagtacatagagcccagccggct

SEQ ID NO: 3386801 - DNA, 25 bp, Homo sapien
gaagacatctgtcgctaactccagt

SEQ ID NO: 3386802 - DNA, 25 bp, Homo sapien
cggacactgtgagttaggttttaca

SEQ ID NO: 3386803 - DNA, 25 bp, Homo sapien
tcaagtcagagctaaggtcttgtct

SEQ ID NO: 3386804 - DNA, 25 bp, Homo sapien
tctcctgcttaagacatcaagtcag

SEQ ID NO: 3386805 - DNA, 25 bp, Homo sapien
agcttgccatggacaggctcactcc

SEQ ID NO: 3386806 - DNA, 25 bp, Homo sapien
gctggagcttgccatggacaggctc

SEQ ID NO: 3386807 - DNA, 25 bp, Homo sapien
agctggctggagcttgccatggaca

SEQ ID NO: 3386808 - DNA, 25 bp, Homo sapien
tggagcttgccatggacaggctcac

SEQ ID NO: 3386809 - DNA, 25 bp, Homo sapien
gtacagttgatattagaacatgtgg

SEQ ID NO: 3386810 - DNA, 25 bp, Homo sapien
tgctgacatgcagactaggaagcgg

SEQ ID NO: 3386811 - DNA, 25 bp, Homo sapien
aacatgtggctgatatctgtgggca

SEQ ID NO: 3386812 - DNA, 25 bp, Homo sapien
ggtgctgacatgcagactaggaagc

SEQ ID NO: 3386813 - DNA, 25 bp, Homo sapien
aagccttagtaaagcagacatcttc

SEQ ID NO: 3386814 - DNA, 25 bp, Homo sapien
cagggtcatcatctgtggaaaatgg

SEQ ID NO: 3386815 - DNA, 25 bp, Homo sapien
tccatcccagggtcatcatctgtgg

SEQ ID NO: 3386816 - DNA, 25 bp, Homo sapien
ttatgggtcatctagaagccttagt

SEQ ID NO: 3386817 - DNA, 25 bp, Homo sapien
aatacttgtcagaatttgttgtctt

SEQ ID NO: 3386818 - DNA, 25 bp, Homo sapien
tacttgtcagaatttgttgtcttct

SEQ ID NO: 3386819 - DNA, 25 bp, Homo sapien
atacttgtcagaatttgttgtcttc

SEQ ID NO: 3386820 - DNA, 25 bp, Homo sapien
acttgtcagaatttgttgtcttctg

SEQ ID NO: 3386821 - DNA, 25 bp, Homo sapien
tggaatctgggaggcttgtgctccc

SEQ ID NO: 3386822 - DNA, 25 bp, Homo sapien
tttggaatctgggaggcttgtgctc

SEQ ID NO: 3386823 - DNA, 25 bp, Homo sapien
gaatctgggaggcttgtgctcccca

SEQ ID NO: 3386824 - DNA, 25 bp, Homo sapien
aatctgggaggcttgtgctccccat

SEQ ID NO: 3386825 - DNA, 25 bp, Homo sapien
tccagccggtctcgcactgcactcc

SEQ ID NO: 3386826 - DNA, 25 bp, Homo sapien
tgcactccggcccgcgcttctcagc

SEQ ID NO: 3386827 - DNA, 25 bp, Homo sapien
gcccacaccggcttcgcggagccgc

SEQ ID NO: 3386828 - DNA, 25 bp, Homo sapien
cgcccacaccggcttcgcggagccg

SEQ ID NO: 3386829 - DNA, 25 bp, Homo sapien
ggaagagtttcccagcgcatctgtg

SEQ ID NO: 3386830 - DNA, 25 bp, Homo sapien
gcatctgtgaacaagggcccgccgg

SEQ ID NO: 3386831 - DNA, 25 bp, Homo sapien
gctcgcagagcagcctcggagcact

SEQ ID NO: 3386832 - DNA, 25 bp, Homo sapien
cagtgtcgctggaggccgggaaagt

SEQ ID NO: 3386833 - DNA, 25 bp, Homo sapien
agccacatagtgaggcctgaaccaa

SEQ ID NO: 3386834 - DNA, 25 bp, Homo sapien
tctgagcacatccatggacaaggaa

SEQ ID NO: 3386835 - DNA, 25 bp, Homo sapien
tgatcgttttccaagctcctctgag

SEQ ID NO: 3386836 - DNA, 25 bp, Homo sapien
aaccaagcagcagccgatgatcgtt

SEQ ID NO: 3386837 - DNA, 25 bp, Homo sapien
ttccttcatggtgtaagacccatac

SEQ ID NO: 3386838 - DNA, 25 bp, Homo sapien
tgggctgtcatcttccttcatggtg

SEQ ID NO: 3386839 - DNA, 25 bp, Homo sapien
catcttccttcatggtgtaagaccc

SEQ ID NO: 3386840 - DNA, 25 bp, Homo sapien
tgtcatcttccttcatggtgtaaga

SEQ ID NO: 3386841 - DNA, 25 bp, Homo sapien
gactgctgccggcatcatgagagct

SEQ ID NO: 3386842 - DNA, 25 bp, Homo sapien
caaagacaagtccatatcctgaggc

SEQ ID NO: 3386843 - DNA, 25 bp, Homo sapien
actgcaaacactgcgcggaaagccg

SEQ ID NO: 3386844 - DNA, 25 bp, Homo sapien
tctgagactcgcttcatgagagccc

SEQ ID NO: 3386845 - DNA, 25 bp, Homo sapien
tgatcttccagtccgtggataactg

SEQ ID NO: 3386846 - DNA, 25 bp, Homo sapien
ttccagtccgtggataactggcttt

SEQ ID NO: 3386847 - DNA, 25 bp, Homo sapien
ggctggactcagaaaccgattccat

SEQ ID NO: 3386848 - DNA, 25 bp, Homo sapien
ttttgatcttccagtccgtggataa

SEQ ID NO: 3386849 - DNA, 25 bp, Homo sapien
tgctcgatgatgaccacctatgctc

SEQ ID NO: 3386850 - DNA, 25 bp, Homo sapien
ttctcacagatagggccaaagagtg

SEQ ID NO: 3386851 - DNA, 25 bp, Homo sapien
ttcaaacaaaacctccgctgtcagg

SEQ ID NO: 3386852 - DNA, 25 bp, Homo sapien
gactcaggaggagagggatacccac

SEQ ID NO: 3386853 - DNA, 25 bp, Homo sapien
tgtcatggaagatccccggagatgg

SEQ ID NO: 3386854 - DNA, 25 bp, Homo sapien
gaagatccccggagatgggagctct

SEQ ID NO: 3386855 - DNA, 25 bp, Homo sapien
atgtcatggaagatccccggagatg

SEQ ID NO: 3386856 - DNA, 25 bp, Homo sapien
atccccggagatgggagctcttccc

SEQ ID NO: 3386857 - DNA, 25 bp, Homo sapien
tcactggcaacaattccaggctctc

SEQ ID NO: 3386858 - DNA, 25 bp, Homo sapien
cactggcaacaattccaggctctca

SEQ ID NO: 3386859 - DNA, 25 bp, Homo sapien
ggtcctatccatgacaggattcaca

SEQ ID NO: 3386860 - DNA, 25 bp, Homo sapien
gatacatggtcctatccatgacagg

SEQ ID NO: 3386861 - DNA, 25 bp, Homo sapien
gacaggattcacactagaagcagca

SEQ ID NO: 3386862 - DNA, 25 bp, Homo sapien
tggagagtgtacaggatacatggtc

SEQ ID NO: 3386863 - DNA, 25 bp, Homo sapien
cagagaagcccgcactgaacgcttc

SEQ ID NO: 3386864 - DNA, 25 bp, Homo sapien
gttttcatcttgtggtcttcagtca

SEQ ID NO: 3386865 - DNA, 25 bp, Homo sapien
gaacgcttccataccagatgccttg

SEQ ID NO: 3386866 - DNA, 25 bp, Homo sapien
gttgtatgaaggctgcgagtttcca

SEQ ID NO: 3386867 - DNA, 25 bp, Homo sapien
cctttgtcaggtgtatgcattgtaa

SEQ ID NO: 3386868 - DNA, 25 bp, Homo sapien
tgcacatccattagggtcccagctc

SEQ ID NO: 3386869 - DNA, 25 bp, Homo sapien
cagctcagggatagcaaggtccatg

SEQ ID NO: 3386870 - DNA, 25 bp, Homo sapien
ggagacaaactcatgcacatccatt

SEQ ID NO: 3386871 - DNA, 25 bp, Homo sapien
gaaatgggtggtgagactcagcatc

SEQ ID NO: 3386872 - DNA, 25 bp, Homo sapien
tgcgacctggcaacctcactcaata

SEQ ID NO: 3386873 - DNA, 25 bp, Homo sapien
atggctccagtcctctatttccagt

SEQ ID NO: 3386874 - DNA, 25 bp, Homo sapien
cacttggctagcaaaactgggaagg

SEQ ID NO: 3386875 - DNA, 25 bp, Homo sapien
gctctttctcagcatatagggtctg

SEQ ID NO: 3386876 - DNA, 25 bp, Homo sapien
tctcagcatatagggtctgcttaga

SEQ ID NO: 3386877 - DNA, 25 bp, Homo sapien
gggcctcctggtacatttggcttct

SEQ ID NO: 3386878 - DNA, 25 bp, Homo sapien
cctcctggtacatttggcttcttct

SEQ ID NO: 3386879 - DNA, 25 bp, Homo sapien
gagctggttaatccctgcgagttga

SEQ ID NO: 3386880 - DNA, 25 bp, Homo sapien
catcatcaaagtaaaaggagagtct

SEQ ID NO: 3386881 - DNA, 25 bp, Homo sapien
tcaggacttgaacgcagctggcaaa

SEQ ID NO: 3386882 - DNA, 25 bp, Homo sapien
tctatgtgcatggtactgtcctaag

SEQ ID NO: 3386883 - DNA, 25 bp, Homo sapien
tccaaatacgaactggaggccccac

SEQ ID NO: 3386884 - DNA, 25 bp, Homo sapien
ccacggaccactccatcaatgttca

SEQ ID NO: 3386885 - DNA, 25 bp, Homo sapien
tctgtgggagtttaaataagcatca

SEQ ID NO: 3386886 - DNA, 25 bp, Homo sapien
tcaaattccacagtatccactgcca

SEQ ID NO: 3386887 - DNA, 25 bp, Homo sapien
aatgggcttgccgacaatttgctgg

SEQ ID NO: 3386888 - DNA, 25 bp, Homo sapien
cacggtgataaatgggcttgccgac

SEQ ID NO: 3386889 - DNA, 25 bp, Homo sapien
caggtcagcacggtgataaatgggc

SEQ ID NO: 3386890 - DNA, 25 bp, Homo sapien
atttgctgggagtacgcatcttggg

SEQ ID NO: 3386891 - DNA, 25 bp, Homo sapien
tttgtctgtgaatccgttgggtcct

SEQ ID NO: 3386892 - DNA, 25 bp, Homo sapien
ttgtctgtgaatccgttgggtcctg

SEQ ID NO: 3386893 - DNA, 25 bp, Homo sapien
cccagtaccttgctgtttcggttat

SEQ ID NO: 3386894 - DNA, 25 bp, Homo sapien
tctatatatctgtttggtcccagta

SEQ ID NO: 3386895 - DNA, 25 bp, Homo sapien
agtctttgcccacgcctacatcctg

SEQ ID NO: 3386896 - DNA, 25 bp, Homo sapien
tgtttggtcccagtaccttgctgtt

SEQ ID NO: 3386897 - DNA, 25 bp, Homo sapien
gctatttacaaagccctgacccagg

SEQ ID NO: 3386898 - DNA, 25 bp, Homo sapien
gtatgtacccgacgcaaacttcagg

SEQ ID NO: 3386899 - DNA, 25 bp, Homo sapien
caatgccattaggaaagaactgcca

SEQ ID NO: 3386900 - DNA, 25 bp, Homo sapien
taacgtgggcgtagtagactgactc

SEQ ID NO: 3386901 - DNA, 25 bp, Homo sapien
caccgcctttcagttgagcagatgg

SEQ ID NO: 3386902 - DNA, 25 bp, Homo sapien
tggtccataccaccgcctttcagtt

SEQ ID NO: 3386903 - DNA, 25 bp, Homo sapien
tgatgtaaattgtgctggcatttgc

SEQ ID NO: 3386904 - DNA, 25 bp, Homo sapien
ctcacaaaatgcttggtccatacca

SEQ ID NO: 3386905 - DNA, 25 bp, Homo sapien
gctgtcactgttgtcccagaaggtc

SEQ ID NO: 3386906 - DNA, 25 bp, Homo sapien
gggtcaccggagtccacagttgttg

SEQ ID NO: 3386907 - DNA, 25 bp, Homo sapien
cataaccgaatgaagccacgaatct

SEQ ID NO: 3386908 - DNA, 25 bp, Homo sapien
cacgaatcttcaggtggagggcaga

SEQ ID NO: 3386909 - DNA, 25 bp, Homo sapien
gatgcctgtcatatagggaacttgc

SEQ ID NO: 3386910 - DNA, 25 bp, Homo sapien
atgcagtcgtctggctgggcttgca

SEQ ID NO: 3386911 - DNA, 25 bp, Homo sapien
tcctccgccagtgagactgccattt

SEQ ID NO: 3386912 - DNA, 25 bp, Homo sapien
aaggagtggcaactgggcttggaag

SEQ ID NO: 3386913 - DNA, 25 bp, Homo sapien
atgtgtccatgacctgtcccaactg

SEQ ID NO: 3386914 - DNA, 25 bp, Homo sapien
tgtccatgacctgtcccaactgaca

SEQ ID NO: 3386915 - DNA, 25 bp, Homo sapien
gtgtccatgacctgtcccaactgac

SEQ ID NO: 3386916 - DNA, 25 bp, Homo sapien
tgtgtccatgacctgtcccaactga

SEQ ID NO: 3386917 - DNA, 25 bp, Homo sapien
aaagacaggacgctgattctggcag

SEQ ID NO: 3386918 - DNA, 25 bp, Homo sapien
tccaaagacaggacgctgattctgg

SEQ ID NO: 3386919 - DNA, 25 bp, Homo sapien
ctgcccttagacaacctgctccaaa

SEQ ID NO: 3386920 - DNA, 25 bp, Homo sapien
tgctccaaagacaggacgctgattc

SEQ ID NO: 3386921 - DNA, 25 bp, Homo sapien
cccactggaagactcgctgttgatt

SEQ ID NO: 3386922 - DNA, 25 bp, Homo sapien
gactcgctgttgattctcacccatg

SEQ ID NO: 3386923 - DNA, 25 bp, Homo sapien
tggaagactcgctgttgattctcac

SEQ ID NO: 3386924 - DNA, 25 bp, Homo sapien
ctgttgattctcacccatgtggcct

SEQ ID NO: 3386925 - DNA, 25 bp, Homo sapien
tgctggttgaaaatcaaaaatgaac

SEQ ID NO: 3386926 - DNA, 25 bp, Homo sapien
tttgctggttgaaaatcaaaaatga

SEQ ID NO: 3386927 - DNA, 25 bp, Homo sapien
tgtttgctggttgaaaatcaaaaat

SEQ ID NO: 3386928 - DNA, 25 bp, Homo sapien
ctggttgaaaatcaaaaatgaacac

SEQ ID NO: 3386929 - DNA, 25 bp, Homo sapien
tagcaccgcctaaatcaaccaggaa

SEQ ID NO: 3386930 - DNA, 25 bp, Homo sapien
tcccggcaactaccgctcagtttag

SEQ ID NO: 3386931 - DNA, 25 bp, Homo sapien
tctgctgagtaaatgatggttttac

SEQ ID NO: 3386932 - DNA, 25 bp, Homo sapien
taaatgatggttttaccactgaaac

SEQ ID NO: 3386933 - DNA, 25 bp, Homo sapien
caatccatggccctcttgccacttc

SEQ ID NO: 3386934 - DNA, 25 bp, Homo sapien
tcttctgttccaagaaggtctgttc

SEQ ID NO: 3386935 - DNA, 25 bp, Homo sapien
cacttgtgcatctgttggggtcctg

SEQ ID NO: 3386936 - DNA, 25 bp, Homo sapien
cacagcacctgggtcagtcacttgt

SEQ ID NO: 3386937 - DNA, 25 bp, Homo sapien
tcccactcaccaggggaattaacca

SEQ ID NO: 3386938 - DNA, 25 bp, Homo sapien
attctaaagactcccactcaccagg

SEQ ID NO: 3386939 - DNA, 25 bp, Homo sapien
cactcaccaggggaattaaccattt

SEQ ID NO: 3386940 - DNA, 25 bp, Homo sapien
aaagactcccactcaccaggggaat

SEQ ID NO: 3386941 - DNA, 25 bp, Homo sapien
gggccacccaacgaatgccacaatt

SEQ ID NO: 3386942 - DNA, 25 bp, Homo sapien
tgaaactccaacagagaagccaggg

SEQ ID NO: 3386943 - DNA, 25 bp, Homo sapien
gctttatatccagttgggtgcagca

SEQ ID NO: 3386944 - DNA, 25 bp, Homo sapien
tgcggagcaaagctaaaaaggatat

SEQ ID NO: 3386945 - DNA, 25 bp, Homo sapien
ccatgagtaatttctaaaaggtctc

SEQ ID NO: 3386946 - DNA, 25 bp, Homo sapien
tctcaagacgcttttaggagacttg

SEQ ID NO: 3386947 - DNA, 25 bp, Homo sapien
tcagtgcctcgtatggcttccacca

SEQ ID NO: 3386948 - DNA, 25 bp, Homo sapien
gacttgagacccatcgactgttcac

SEQ ID NO: 3386949 - DNA, 25 bp, Homo sapien
gagagatgcaatggccattccagct

SEQ ID NO: 3386950 - DNA, 25 bp, Homo sapien
ccattccagcttgctggccagtaca

SEQ ID NO: 3386951 - DNA, 25 bp, Homo sapien
ctgagagatgcaatggccattccag

SEQ ID NO: 3386952 - DNA, 25 bp, Homo sapien
ttccagcttgctggccagtacaggc

SEQ ID NO: 3386953 - DNA, 25 bp, Homo sapien
atttcatcaaggaccaacctttcag

SEQ ID NO: 3386954 - DNA, 25 bp, Homo sapien
gaccaacctttcagagccaactgaa

SEQ ID NO: 3386955 - DNA, 25 bp, Homo sapien
ttcatcaaggaccaacctttcagag

SEQ ID NO: 3386956 - DNA, 25 bp, Homo sapien
tcaaggaccaacctttcagagccaa

SEQ ID NO: 3386957 - DNA, 25 bp, Homo sapien
tgagaactgcgaagagaagcccagg

SEQ ID NO: 3386958 - DNA, 25 bp, Homo sapien
gagagaaggtacctgccacacttaa

SEQ ID NO: 3386959 - DNA, 25 bp, Homo sapien
taggaactcgcccaacagtaaatgg

SEQ ID NO: 3386960 - DNA, 25 bp, Homo sapien
ggagtagaaacatatgcaaaggccc

SEQ ID NO: 3386961 - DNA, 25 bp, Homo sapien
tggaatgcagtaaaagctgagcaag

SEQ ID NO: 3386962 - DNA, 25 bp, Homo sapien
tcggtgcgggaatacaagcccaaat

SEQ ID NO: 3386963 - DNA, 25 bp, Homo sapien
aaagcatcttgcaatatcgggttga

SEQ ID NO: 3386964 - DNA, 25 bp, Homo sapien
aataaatatcccaaccatcggtgcg

SEQ ID NO: 3386965 - DNA, 25 bp, Homo sapien
cagccaaatcttcagtgcatttgca

SEQ ID NO: 3386966 - DNA, 25 bp, Homo sapien
gttttccaatctcatcgaacagtct

SEQ ID NO: 3386967 - DNA, 25 bp, Homo sapien
caatctcatcgaacagtctgtttgc

SEQ ID NO: 3386968 - DNA, 25 bp, Homo sapien
tatttctccaacttgcataatagct

SEQ ID NO: 3386969 - DNA, 25 bp, Homo sapien
tggtatttctccaacttgcataata

SEQ ID NO: 3386970 - DNA, 25 bp, Homo sapien
gatccacaaccactcctgtgtttct

SEQ ID NO: 3386971 - DNA, 25 bp, Homo sapien
atccacaaccactcctgtgtttctt

SEQ ID NO: 3386972 - DNA, 25 bp, Homo sapien
agatccacaaccactcctgtgtttc

SEQ ID NO: 3386973 - DNA, 25 bp, Homo sapien
tgggatctgactgtgtaaccagcag

SEQ ID NO: 3386974 - DNA, 25 bp, Homo sapien
tacttgcttttcaacacctgtgggt

SEQ ID NO: 3386975 - DNA, 25 bp, Homo sapien
tttgaatgcaaaaactgtggatgac

SEQ ID NO: 3386976 - DNA, 25 bp, Homo sapien
tctggttgagaataacacccctttg

SEQ ID NO: 3386977 - DNA, 25 bp, Homo sapien
tgagttggtctctctgagatgcgga

SEQ ID NO: 3386978 - DNA, 25 bp, Homo sapien
tctgagatgcggagaaagtgtactc

SEQ ID NO: 3386979 - DNA, 25 bp, Homo sapien
aatgtcagggataaaaacagttagt

SEQ ID NO: 3386980 - DNA, 25 bp, Homo sapien
tggtcatttccgcagcttccaggct

SEQ ID NO: 3386981 - DNA, 25 bp, Homo sapien
tggctgtttggtgtaccactggtgc

SEQ ID NO: 3386982 - DNA, 25 bp, Homo sapien
gctgtttggtgtaccactggtgcat

SEQ ID NO: 3386983 - DNA, 25 bp, Homo sapien
tctggctgtttggtgtaccactggt

SEQ ID NO: 3386984 - DNA, 25 bp, Homo sapien
tgcaaagggtcttaggggacaccag

SEQ ID NO: 3386985 - DNA, 25 bp, Homo sapien
gggccctcgcttggcaaagtgcatc

SEQ ID NO: 3386986 - DNA, 25 bp, Homo sapien
cctgaaatctgagctgtctttgata

SEQ ID NO: 3386987 - DNA, 25 bp, Homo sapien
tcctctatgagaggccttagcttag

SEQ ID NO: 3386988 - DNA, 25 bp, Homo sapien
gggagctcatgtcctctatgagagg

SEQ ID NO: 3386989 - DNA, 25 bp, Homo sapien
gggccaggggcactctggatacccc

SEQ ID NO: 3386990 - DNA, 25 bp, Homo sapien
cagtggcactccagtggtgaggagg

SEQ ID NO: 3386991 - DNA, 25 bp, Homo sapien
gctcaggagggcctcatgggttcca

SEQ ID NO: 3386992 - DNA, 25 bp, Homo sapien
ggagggcctcatgggttccagcagg

SEQ ID NO: 3386993 - DNA, 25 bp, Homo sapien
caatgtgcaaacgatggcattaagt

SEQ ID NO: 3386994 - DNA, 25 bp, Homo sapien
aacgatggcattaagtcaatgtggg

SEQ ID NO: 3386995 - DNA, 25 bp, Homo sapien
tcttgcaatgtgcaaacgatggcat

SEQ ID NO: 3386996 - DNA, 25 bp, Homo sapien
cttgatcaagctcttgcaatgtgca

SEQ ID NO: 3386997 - DNA, 25 bp, Homo sapien
tcaatgaaaacatcaaccatgccag

SEQ ID NO: 3386998 - DNA, 25 bp, Homo sapien
atcaaccatgccagacgtgcctgcc

SEQ ID NO: 3386999 - DNA, 25 bp, Homo sapien
ccctgggagctgaactcactagatc

SEQ ID NO: 3387000 - DNA, 25 bp, Homo sapien
gaactcactagatcaatgaaaacat

SEQ ID NO: 3387001 - DNA, 25 bp, Homo sapien
gcagtttcagtaaaggatgaaaaat

SEQ ID NO: 3387002 - DNA, 25 bp, Homo sapien
ctgcagtttcagtaaaggatgaaaa

SEQ ID NO: 3387003 - DNA, 25 bp, Homo sapien
cagtaaaggatgaaaaataagagac

SEQ ID NO: 3387004 - DNA, 25 bp, Homo sapien
gtaaaggatgaaaaataagagacat

SEQ ID NO: 3387005 - DNA, 25 bp, Homo sapien
gctgatttttccattcgaaatatcc

SEQ ID NO: 3387006 - DNA, 25 bp, Homo sapien
ccaccagtgtgctttgttgggccga

SEQ ID NO: 3387007 - DNA, 25 bp, Homo sapien
ttgttgggccgatggtttccactgg

SEQ ID NO: 3387008 - DNA, 25 bp, Homo sapien
tgctcaggggacttctgaccctcca

SEQ ID NO: 3387009 - DNA, 25 bp, Homo sapien
ctatggtcctgcctgcaagtgatct

SEQ ID NO: 3387010 - DNA, 25 bp, Homo sapien
cctgcctgcaagtgatcttcctcac

SEQ ID NO: 3387011 - DNA, 25 bp, Homo sapien
gtcctgcctgcaagtgatcttcctc

SEQ ID NO: 3387012 - DNA, 25 bp, Homo sapien
atggtcctgcctgcaagtgatcttc

SEQ ID NO: 3387013 - DNA, 25 bp, Homo sapien
gctgcttcaaacattgcacagggag

SEQ ID NO: 3387014 - DNA, 25 bp, Homo sapien
cctgctgctccaagttccatgccat

SEQ ID NO: 3387015 - DNA, 25 bp, Homo sapien
ctgctgctccaagttccatgccatt

SEQ ID NO: 3387016 - DNA, 25 bp, Homo sapien
tcaaacattgcacagggagccctgc

SEQ ID NO: 3387017 - DNA, 25 bp, Homo sapien
tggctgcatcttcccaggtgcaaag

SEQ ID NO: 3387018 - DNA, 25 bp, Homo sapien
atcttcccaggtgcaaaggctgtga

SEQ ID NO: 3387019 - DNA, 25 bp, Homo sapien
ggatggcctgaaatgcaaagctggc

SEQ ID NO: 3387020 - DNA, 25 bp, Homo sapien
ctgcatcttcccaggtgcaaaggct

SEQ ID NO: 3387021 - DNA, 25 bp, Homo sapien
acatgctgcagagcataggtgctgc

SEQ ID NO: 3387022 - DNA, 25 bp, Homo sapien
ttctcataacagtcatgtgaccttg

SEQ ID NO: 3387023 - DNA, 25 bp, Homo sapien
taaggaacccaggtctgagttctgg

SEQ ID NO: 3387024 - DNA, 25 bp, Homo sapien
aagaaactgtgagtaaggaacccag

SEQ ID NO: 3387025 - DNA, 25 bp, Homo sapien
gaggatgaattctgtaccccactcc

SEQ ID NO: 3387026 - DNA, 25 bp, Homo sapien
ggaagaggctgcacagtacaccctg

SEQ ID NO: 3387027 - DNA, 25 bp, Homo sapien
tgtgtctagcaggataaggtggcca

SEQ ID NO: 3387028 - DNA, 25 bp, Homo sapien
tgtgcactgtgtctagcaggataag

SEQ ID NO: 3387029 - DNA, 25 bp, Homo sapien
ttaggtctgggtagcagcttgaccc

SEQ ID NO: 3387030 - DNA, 25 bp, Homo sapien
accctcctgtgagcgcccaataata

SEQ ID NO: 3387031 - DNA, 25 bp, Homo sapien
tacagcagttgccagttaggtctgg

SEQ ID NO: 3387032 - DNA, 25 bp, Homo sapien
gagcgcccaataataaatgcccaca

SEQ ID NO: 3387033 - DNA, 25 bp, Homo sapien
cccagggccccagcatggggcctcc

SEQ ID NO: 3387034 - DNA, 25 bp, Homo sapien
cacacccagggccccagcatggggc

SEQ ID NO: 3387035 - DNA, 25 bp, Homo sapien
cagggccccagcatggggcctccat

SEQ ID NO: 3387036 - DNA, 25 bp, Homo sapien
cacccagggccccagcatggggcct

SEQ ID NO: 3387037 - DNA, 25 bp, Homo sapien
ttcccgcagcagctcagcctctgcc

SEQ ID NO: 3387038 - DNA, 25 bp, Homo sapien
tcccgcagcagctcagcctctgcca

SEQ ID NO: 3387039 - DNA, 25 bp, Homo sapien
cccgcagcagctcagcctctgccat

SEQ ID NO: 3387040 - DNA, 25 bp, Homo sapien
cttcccgcagcagctcagcctctgc

SEQ ID NO: 3387041 - DNA, 25 bp, Homo sapien
agcagccctggctacttcaacgaac

SEQ ID NO: 3387042 - DNA, 25 bp, Homo sapien
gaacaactgctttccatcgcctgga

SEQ ID NO: 3387043 - DNA, 25 bp, Homo sapien
cctccgctgggctctgcagattgct

SEQ ID NO: 3387044 - DNA, 25 bp, Homo sapien
catctttaaagctgtcatctgctgg

SEQ ID NO: 3387045 - DNA, 25 bp, Homo sapien
ttccatggccttgtgacaaatggag

SEQ ID NO: 3387046 - DNA, 25 bp, Homo sapien
gttccatggccttgtgacaaatgga

SEQ ID NO: 3387047 - DNA, 25 bp, Homo sapien
gagtggttccgcttaatgttgttcc

SEQ ID NO: 3387048 - DNA, 25 bp, Homo sapien
tcacagagtggttccgcttaatgtt

SEQ ID NO: 3387049 - DNA, 25 bp, Homo sapien
tgaccacatgagcactgatagggcc

SEQ ID NO: 3387050 - DNA, 25 bp, Homo sapien
gcatcccacctgaagctcaagttga

SEQ ID NO: 3387051 - DNA, 25 bp, Homo sapien
caagttgaagtgtgtctacgtgacc

SEQ ID NO: 3387052 - DNA, 25 bp, Homo sapien
tagccaaggcttttcgcgttcactg

SEQ ID NO: 3387053 - DNA, 25 bp, Homo sapien
ctgtcattctggctcgatgctgccc

SEQ ID NO: 3387054 - DNA, 25 bp, Homo sapien
cccacgtggccactgactgtccaag

SEQ ID NO: 3387055 - DNA, 25 bp, Homo sapien
tgtccaagccttccgtttggacaca

SEQ ID NO: 3387056 - DNA, 25 bp, Homo sapien
tgatattcaccagacgaagtgccct

SEQ ID NO: 3387057 - DNA, 25 bp, Homo sapien
aaagaggaggctccacatggactca

SEQ ID NO: 3387058 - DNA, 25 bp, Homo sapien
ctccccaacgttcatcccacaagag

SEQ ID NO: 3387059 - DNA, 25 bp, Homo sapien
tcagagttattaaagagattgtccc

SEQ ID NO: 3387060 - DNA, 25 bp, Homo sapien
ccaaagaggaggctccacatggact

SEQ ID NO: 3387061 - DNA, 25 bp, Homo sapien
cataaccggcagttctggaatatct

SEQ ID NO: 3387062 - DNA, 25 bp, Homo sapien
taaccggcagttctggaatatctga

SEQ ID NO: 3387063 - DNA, 25 bp, Homo sapien
acataaccggcagttctggaatatc

SEQ ID NO: 3387064 - DNA, 25 bp, Homo sapien
ctacataaccggcagttctggaata

SEQ ID NO: 3387065 - DNA, 25 bp, Homo sapien
gcctagagaagaatgtgccaggcca

SEQ ID NO: 3387066 - DNA, 25 bp, Homo sapien
gctgtggcttgtgccaaagcctaga

SEQ ID NO: 3387067 - DNA, 25 bp, Homo sapien
gcatccttgcctgagcctagagatc

SEQ ID NO: 3387068 - DNA, 25 bp, Homo sapien
gcctcctaagcttcacagagtgata

SEQ ID NO: 3387069 - DNA, 25 bp, Homo sapien
gtgcccagatctccatgggaggcat

SEQ ID NO: 3387070 - DNA, 25 bp, Homo sapien
tggacggtgccctctgtgcccagat

SEQ ID NO: 3387071 - DNA, 25 bp, Homo sapien
tgggaggcatcccagaggcctagga

SEQ ID NO: 3387072 - DNA, 25 bp, Homo sapien
ctggacggtgccctctgtgcccaga

SEQ ID NO: 3387073 - DNA, 25 bp, Homo sapien
agaggaaggaccaggtatggtgagt

SEQ ID NO: 3387074 - DNA, 25 bp, Homo sapien
ggttgagggccgtgattcaatgtct

SEQ ID NO: 3387075 - DNA, 25 bp, Homo sapien
gaggaaggaccaggtatggtgagtc

SEQ ID NO: 3387076 - DNA, 25 bp, Homo sapien
gtgattcaatgtctctggacaccca

SEQ ID NO: 3387077 - DNA, 25 bp, Homo sapien
ccttggttaccaagcatctgtgctc

SEQ ID NO: 3387078 - DNA, 25 bp, Homo sapien
ggagatggagctgtgatggctgatc

SEQ ID NO: 3387079 - DNA, 25 bp, Homo sapien
ttggctggagcctcacttcccacct

SEQ ID NO: 3387080 - DNA, 25 bp, Homo sapien
tgtgatggctgatcggcttctaggc

SEQ ID NO: 3387081 - DNA, 25 bp, Homo sapien
tttcctggagcttaaaggttctgca

SEQ ID NO: 3387082 - DNA, 25 bp, Homo sapien
gagcttaaaggttctgcagaggtgc

SEQ ID NO: 3387083 - DNA, 25 bp, Homo sapien
tccagccagaagagctcaatgtgac

SEQ ID NO: 3387084 - DNA, 25 bp, Homo sapien
agccagaagagctcaatgtgacctt

SEQ ID NO: 3387085 - DNA, 25 bp, Homo sapien
tggtttgcctttaccacactgtccc

SEQ ID NO: 3387086 - DNA, 25 bp, Homo sapien
gccctggtttgcctttaccacactg

SEQ ID NO: 3387087 - DNA, 25 bp, Homo sapien
tggctcagttgatgcttttggaaaa

SEQ ID NO: 3387088 - DNA, 25 bp, Homo sapien
gctgtaaaagacagcttttccagat

SEQ ID NO: 3387089 - DNA, 25 bp, Homo sapien
tggatgctggccatgcagatgttat

SEQ ID NO: 3387090 - DNA, 25 bp, Homo sapien
ggatgctggccatgcagatgttatt

SEQ ID NO: 3387091 - DNA, 25 bp, Homo sapien
gtggatgctggccatgcagatgtta

SEQ ID NO: 3387092 - DNA, 25 bp, Homo sapien
tctggggagccggtgaattgaaggt

SEQ ID NO: 3387093 - DNA, 25 bp, Homo sapien
ggtcacagcccaagatggtgcccat

SEQ ID NO: 3387094 - DNA, 25 bp, Homo sapien
aaggtcacagcccaagatggtgccc

SEQ ID NO: 3387095 - DNA, 25 bp, Homo sapien
gccggtgaattgaaggtcacagccc

SEQ ID NO: 3387096 - DNA, 25 bp, Homo sapien
tttcctcggctcacggatggctact

SEQ ID NO: 3387097 - DNA, 25 bp, Homo sapien
tcctcggctcacggatggctactcg

SEQ ID NO: 3387098 - DNA, 25 bp, Homo sapien
agtttcctcggctcacggatggcta

SEQ ID NO: 3387099 - DNA, 25 bp, Homo sapien
gtttcctcggctcacggatggctac

SEQ ID NO: 3387100 - DNA, 25 bp, Homo sapien
ggcacatagtgggtgtttataactg

SEQ ID NO: 3387101 - DNA, 25 bp, Homo sapien
ggatctgcttacaatacaaatttta

SEQ ID NO: 3387102 - DNA, 25 bp, Homo sapien
tgctgcagccagaaggatctgctta

SEQ ID NO: 3387103 - DNA, 25 bp, Homo sapien
atttctgtccccctctaatacagct

SEQ ID NO: 3387104 - DNA, 25 bp, Homo sapien
cagtgggctgccttccccagagctc

SEQ ID NO: 3387105 - DNA, 25 bp, Homo sapien
gtgggctgccttccccagagctcat

SEQ ID NO: 3387106 - DNA, 25 bp, Homo sapien
agtgggctgccttccccagagctca

SEQ ID NO: 3387107 - DNA, 25 bp, Homo sapien
caaatcctgctccatgagtctgttt

SEQ ID NO: 3387108 - DNA, 25 bp, Homo sapien
taccctttcattagagactccaaga

SEQ ID NO: 3387109 - DNA, 25 bp, Homo sapien
gttccctttacacacgacgcttctc

SEQ ID NO: 3387110 - DNA, 25 bp, Homo sapien
tctgagttcccatctcaaatcctgc

SEQ ID NO: 3387111 - DNA, 25 bp, Homo sapien
gactgtaactgtggcaaaggaccta

SEQ ID NO: 3387112 - DNA, 25 bp, Homo sapien
ccaatattctcactttgcaggcggg

SEQ ID NO: 3387113 - DNA, 25 bp, Homo sapien
ggctcaggttgaggaacttgtccaa

SEQ ID NO: 3387114 - DNA, 25 bp, Homo sapien
gagatgtcccctaagaagccctgga

SEQ ID NO: 3387115 - DNA, 25 bp, Homo sapien
tgtgaggcacttcctgaccggatgg

SEQ ID NO: 3387116 - DNA, 25 bp, Homo sapien
caggctgtgaggcacttcctgaccg

SEQ ID NO: 3387117 - DNA, 25 bp, Homo sapien
tggctcctctcccaccggacaagtc

SEQ ID NO: 3387118 - DNA, 25 bp, Homo sapien
tcctgaccggatggggagcatccag

SEQ ID NO: 3387119 - DNA, 25 bp, Homo sapien
atgtgttcatgaatgtcgacacctg

SEQ ID NO: 3387120 - DNA, 25 bp, Homo sapien
aatatgggtaagtgtatgggaatga

SEQ ID NO: 3387121 - DNA, 25 bp, Homo sapien
ttggcaactgtatttgtgaatatgg

SEQ ID NO: 3387122 - DNA, 25 bp, Homo sapien
gtgttcatgaatgtcgacacctgtg

SEQ ID NO: 3387123 - DNA, 25 bp, Homo sapien
atttctcaatctccaggcaaccact

SEQ ID NO: 3387124 - DNA, 25 bp, Homo sapien
gcctgagcaaacactcaaaatgctt

SEQ ID NO: 3387125 - DNA, 25 bp, Homo sapien
cctggcagcagtccgtgaacatggg

SEQ ID NO: 3387126 - DNA, 25 bp, Homo sapien
tagaccctgcagagataggaggcct

SEQ ID NO: 3387127 - DNA, 25 bp, Homo sapien
ggttcccctgatttctcagatgagg

SEQ ID NO: 3387128 - DNA, 25 bp, Homo sapien
ggccgaagccagacatgccccattt

SEQ ID NO: 3387129 - DNA, 25 bp, Homo sapien
agcaaaggccgaagccagacatgcc

SEQ ID NO: 3387130 - DNA, 25 bp, Homo sapien
ttatggagcaaaggccgaagccaga

SEQ ID NO: 3387131 - DNA, 25 bp, Homo sapien
aaaggccgaagccagacatgcccca

SEQ ID NO: 3387132 - DNA, 25 bp, Homo sapien
tctccagaggataagaagtcagcta

SEQ ID NO: 3387133 - DNA, 25 bp, Homo sapien
ggtttggagaatctccagaggataa

SEQ ID NO: 3387134 - DNA, 25 bp, Homo sapien
agattttagcatgtccaggtttgga

SEQ ID NO: 3387135 - DNA, 25 bp, Homo sapien
ctgttgtaagtcttagattttagca

SEQ ID NO: 3387136 - DNA, 25 bp, Homo sapien
agaactaccacctgatgcaagggtt

SEQ ID NO: 3387137 - DNA, 25 bp, Homo sapien
aagggtttgactgctgcaagctgcc

SEQ ID NO: 3387138 - DNA, 25 bp, Homo sapien
cctgatgcaagggtttgactgctgc

SEQ ID NO: 3387139 - DNA, 25 bp, Homo sapien
caagctgcccactttctcgcagcag

SEQ ID NO: 3387140 - DNA, 25 bp, Homo sapien
tttctgccctggcctgctggcccat

SEQ ID NO: 3387141 - DNA, 25 bp, Homo sapien
ctttgtgctctggtttttctgccct

SEQ ID NO: 3387142 - DNA, 25 bp, Homo sapien
gtttttctgccctggcctgctggcc

SEQ ID NO: 3387143 - DNA, 25 bp, Homo sapien
tttgtgctctggtttttctgccctg

SEQ ID NO: 3387144 - DNA, 25 bp, Homo sapien
tacagataatgccataaactggtcc

SEQ ID NO: 3387145 - DNA, 25 bp, Homo sapien
gataatgccataaactggtccatac

SEQ ID NO: 3387146 - DNA, 25 bp, Homo sapien
gggctacagataatgccataaactg

SEQ ID NO: 3387147 - DNA, 25 bp, Homo sapien
cagataatgccataaactggtccat

SEQ ID NO: 3387148 - DNA, 25 bp, Homo sapien
cacaggcaccaggattgcaagttct

SEQ ID NO: 3387149 - DNA, 25 bp, Homo sapien
aaagtgtcgtctcttactccacctc

SEQ ID NO: 3387150 - DNA, 25 bp, Homo sapien
ttctagcagctcaagccagagaccc

SEQ ID NO: 3387151 - DNA, 25 bp, Homo sapien
tactccacctctgcttgtggcagga

SEQ ID NO: 3387152 - DNA, 25 bp, Homo sapien
gggcagctcgccaagggaaatctat

SEQ ID NO: 3387153 - DNA, 25 bp, Homo sapien
agggcagctcgccaagggaaatcta

SEQ ID NO: 3387154 - DNA, 25 bp, Homo sapien
tgagggcagctcgccaagggaaatc

SEQ ID NO: 3387155 - DNA, 25 bp, Homo sapien
ctgagggcagctcgccaagggaaat

SEQ ID NO: 3387156 - DNA, 25 bp, Homo sapien
cactcctcagtgctctgcattttgt

SEQ ID NO: 3387157 - DNA, 25 bp, Homo sapien
gccactcctcagtgctctgcatttt

SEQ ID NO: 3387158 - DNA, 25 bp, Homo sapien
tcctcagtgctctgcattttgtcat

SEQ ID NO: 3387159 - DNA, 25 bp, Homo sapien
ctcctcagtgctctgcattttgtca

SEQ ID NO: 3387160 - DNA, 25 bp, Homo sapien
gctgttgagaattggccccagagcg

SEQ ID NO: 3387161 - DNA, 25 bp, Homo sapien
ccgtgacaagggatgggcctttgct

SEQ ID NO: 3387162 - DNA, 25 bp, Homo sapien
cagtaaggtacaggcccccgtgaca

SEQ ID NO: 3387163 - DNA, 25 bp, Homo sapien
ccccgtgacaagggatgggcctttg

SEQ ID NO: 3387164 - DNA, 25 bp, Homo sapien
tagatgatcttcgtttggagggtga

SEQ ID NO: 3387165 - DNA, 25 bp, Homo sapien
agggtgagggacattagcacagtct

SEQ ID NO: 3387166 - DNA, 25 bp, Homo sapien
ctgcctggtatcactaacccatgtg

SEQ ID NO: 3387167 - DNA, 25 bp, Homo sapien
ggagccgcagagcagtagatgatct

SEQ ID NO: 3387168 - DNA, 25 bp, Homo sapien
tgaagtcggcataaagcaagcctgt

SEQ ID NO: 3387169 - DNA, 25 bp, Homo sapien
gacttgccgtgctaccaaacctgat

SEQ ID NO: 3387170 - DNA, 25 bp, Homo sapien
cctgagtcacacgagaaaagaaacc

SEQ ID NO: 3387171 - DNA, 25 bp, Homo sapien
gaagagctcccagatcaaggccttg

SEQ ID NO: 3387172 - DNA, 25 bp, Homo sapien
agtacttagcggtgcctgccatggg

SEQ ID NO: 3387173 - DNA, 25 bp, Homo sapien
caaaggaggcttcaatcaagagcgt

SEQ ID NO: 3387174 - DNA, 25 bp, Homo sapien
tagtcacatgctacacggttgtcat

SEQ ID NO: 3387175 - DNA, 25 bp, Homo sapien
tggttccctacctgtatagctgtgg

SEQ ID NO: 3387176 - DNA, 25 bp, Homo sapien
tgagcttcattgcaagcaggatctc

SEQ ID NO: 3387177 - DNA, 25 bp, Homo sapien
ggctcaaaggctcactagtgctgag

SEQ ID NO: 3387178 - DNA, 25 bp, Homo sapien
cactagtgctgagcttcattgcaag

SEQ ID NO: 3387179 - DNA, 25 bp, Homo sapien
aagcaggatctcactggcggtggaa

SEQ ID NO: 3387180 - DNA, 25 bp, Homo sapien
agggcactgaaaggcacttggaatt

SEQ ID NO: 3387181 - DNA, 25 bp, Homo sapien
ttaaaagggcactgaaaggcacttg

SEQ ID NO: 3387182 - DNA, 25 bp, Homo sapien
ggcactgaaaggcacttggaattta

SEQ ID NO: 3387183 - DNA, 25 bp, Homo sapien
aaaagggcactgaaaggcacttgga

SEQ ID NO: 3387184 - DNA, 25 bp, Homo sapien
ccttagaagatgaattgagtcgcca

SEQ ID NO: 3387185 - DNA, 25 bp, Homo sapien
ccgtaaaaagagagggccagctgct

SEQ ID NO: 3387186 - DNA, 25 bp, Homo sapien
tgagtcgccagtgggaaaccacagc

SEQ ID NO: 3387187 - DNA, 25 bp, Homo sapien
gcatgacgtccacatcttccctggg

SEQ ID NO: 3387188 - DNA, 25 bp, Homo sapien
aaaattttggactaattcctctcag

SEQ ID NO: 3387189 - DNA, 25 bp, Homo sapien
agctctatgtgtggagacatataca

SEQ ID NO: 3387190 - DNA, 25 bp, Homo sapien
taaaattttggactaattcctctca

SEQ ID NO: 3387191 - DNA, 25 bp, Homo sapien
ttctccatatagctctatgtgtgga

SEQ ID NO: 3387192 - DNA, 25 bp, Homo sapien
gggaagatgtttgcggacttcgttc

SEQ ID NO: 3387193 - DNA, 25 bp, Homo sapien
caggtcacagattggggaagatgtt

SEQ ID NO: 3387194 - DNA, 25 bp, Homo sapien
ttctagttcagacaacacccgcaac

SEQ ID NO: 3387195 - DNA, 25 bp, Homo sapien
cagccagtgtgggtctttctcccag

SEQ ID NO: 3387196 - DNA, 25 bp, Homo sapien
actctaccggttgctcctgcagggc

SEQ ID NO: 3387197 - DNA, 25 bp, Homo sapien
tcgttactctaccggttgctcctgc

SEQ ID NO: 3387198 - DNA, 25 bp, Homo sapien
actgagctgcgatgctccccacctc

SEQ ID NO: 3387199 - DNA, 25 bp, Homo sapien
gttactctaccggttgctcctgcag

SEQ ID NO: 3387200 - DNA, 25 bp, Homo sapien
gagtgagcaccacctagggctttac

SEQ ID NO: 3387201 - DNA, 25 bp, Homo sapien
acagttggctctagctggtattttg

SEQ ID NO: 3387202 - DNA, 25 bp, Homo sapien
cagtccaaacagttggctctagctg

SEQ ID NO: 3387203 - DNA, 25 bp, Homo sapien
tggtattttggagtgagcaccacct

SEQ ID NO: 3387204 - DNA, 25 bp, Homo sapien
aagtttcaaagaaggatgtagctgc

SEQ ID NO: 3387205 - DNA, 25 bp, Homo sapien
tgaggattgtcctttctcgaaactg

SEQ ID NO: 3387206 - DNA, 25 bp, Homo sapien
tttctcacctgaggattgtcctttc

SEQ ID NO: 3387207 - DNA, 25 bp, Homo sapien
gctctcaagtttcaaagaaggatgt

SEQ ID NO: 3387208 - DNA, 25 bp, Homo sapien
gatagttccctggttctaagagcca

SEQ ID NO: 3387209 - DNA, 25 bp, Homo sapien
gaaacgtattatcaaagctctcagg

SEQ ID NO: 3387210 - DNA, 25 bp, Homo sapien
tcctcagatcaggaagtgccagctg

SEQ ID NO: 3387211 - DNA, 25 bp, Homo sapien
tgtgagtgaccagttccatcaaccc

SEQ ID NO: 3387212 - DNA, 25 bp, Homo sapien
taccgtgttggcatcctagtctcag

SEQ ID NO: 3387213 - DNA, 25 bp, Homo sapien
tctagttaggctgaaatgcacggcc

SEQ ID NO: 3387214 - DNA, 25 bp, Homo sapien
tggcccaaagtgacaaagatctcag

SEQ ID NO: 3387215 - DNA, 25 bp, Homo sapien
gaagagggcccttaccaagaatctg

SEQ ID NO: 3387216 - DNA, 25 bp, Homo sapien
caaattgctccggtcaccttaacgg

SEQ ID NO: 3387217 - DNA, 25 bp, Homo sapien
taagagcgcgccagccatttctctg

SEQ ID NO: 3387218 - DNA, 25 bp, Homo sapien
ggtttgagtcttccggagtcacgcc

SEQ ID NO: 3387219 - DNA, 25 bp, Homo sapien
aatacaatacgcagggaagcttccc

SEQ ID NO: 3387220 - DNA, 25 bp, Homo sapien
gtgtcacccgcgacgcagcagaggt

SEQ ID NO: 3387221 - DNA, 25 bp, Homo sapien
tgagagcaccttagcgcctgcgggt

SEQ ID NO: 3387222 - DNA, 25 bp, Homo sapien
tctgcacatgctccgtgagctagat

SEQ ID NO: 3387223 - DNA, 25 bp, Homo sapien
gtcccaagacgtctccaccgagagg

SEQ ID NO: 3387224 - DNA, 25 bp, Homo sapien
cagaggcttggacgcccatattaac

SEQ ID NO: 3387225 - DNA, 25 bp, Homo sapien
ctgggtggcctttcaagagctctgg

SEQ ID NO: 3387226 - DNA, 25 bp, Homo sapien
gcatctccgaagtgaggaggcccct

SEQ ID NO: 3387227 - DNA, 25 bp, Homo sapien
aactcgaagcaatcgggcgagcgcg

SEQ ID NO: 3387228 - DNA, 25 bp, Homo sapien
ttgggctttcccagcacgtccctgg

SEQ ID NO: 3387229 - DNA, 25 bp, Homo sapien
ctttcccagcacgtccctggcagcg

SEQ ID NO: 3387230 - DNA, 25 bp, Homo sapien
gggcttgggctttcccagcacgtcc

SEQ ID NO: 3387231 - DNA, 25 bp, Homo sapien
ttcccagcacgtccctggcagcggc

SEQ ID NO: 3387232 - DNA, 25 bp, Homo sapien
ttttggaggcgaccaggatggccgg

SEQ ID NO: 3387233 - DNA, 25 bp, Homo sapien
ttcccaacttcaggtagcagggctg

SEQ ID NO: 3387234 - DNA, 25 bp, Homo sapien
ggcagtcccgacttcattttggagg

SEQ ID NO: 3387235 - DNA, 25 bp, Homo sapien
atctggctaggataggtggtcttgc

SEQ ID NO: 3387236 - DNA, 25 bp, Homo sapien
taatggccaactgatcacaaggtcc

SEQ ID NO: 3387237 - DNA, 25 bp, Homo sapien
gaatttgggccgtaactcctccagc

SEQ ID NO: 3387238 - DNA, 25 bp, Homo sapien
gaatggttccaagagttccactggg

SEQ ID NO: 3387239 - DNA, 25 bp, Homo sapien
tatataaagagctccgcagactacc

SEQ ID NO: 3387240 - DNA, 25 bp, Homo sapien
ttaaagtgccacattgccatgagta

SEQ ID NO: 3387241 - DNA, 25 bp, Homo sapien
caaagtcttccaaagaccgctgaaa

SEQ ID NO: 3387242 - DNA, 25 bp, Homo sapien
cacattgccatgagtagctaatttt

SEQ ID NO: 3387243 - DNA, 25 bp, Homo sapien
aaagtcttccaaagaccgctgaaag

SEQ ID NO: 3387244 - DNA, 25 bp, Homo sapien
caatggagctatgggaacagatggc

SEQ ID NO: 3387245 - DNA, 25 bp, Homo sapien
tgagtcactcccaggtctgaaaaga

SEQ ID NO: 3387246 - DNA, 25 bp, Homo sapien
cgatcaaagcttgcacaccggaagg

SEQ ID NO: 3387247 - DNA, 25 bp, Homo sapien
gcagatatcccaagtaagccaggtt

SEQ ID NO: 3387248 - DNA, 25 bp, Homo sapien
attctttgagccaagtgcaaaagct

SEQ ID NO: 3387249 - DNA, 25 bp, Homo sapien
tttgagccaagtgcaaaagcttcct

SEQ ID NO: 3387250 - DNA, 25 bp, Homo sapien
ctttgagccaagtgcaaaagcttcc

SEQ ID NO: 3387251 - DNA, 25 bp, Homo sapien
tctttgagccaagtgcaaaagcttc

SEQ ID NO: 3387252 - DNA, 25 bp, Homo sapien
tctggactatgggaggtggtcagtg

SEQ ID NO: 3387253 - DNA, 25 bp, Homo sapien
gtatgtaaagtgtctggactatggg

SEQ ID NO: 3387254 - DNA, 25 bp, Homo sapien
ggtggtcagtgttggcctattgcca

SEQ ID NO: 3387255 - DNA, 25 bp, Homo sapien
tgggaggtggtcagtgttggcctat

SEQ ID NO: 3387256 - DNA, 25 bp, Homo sapien
tactggctccatgtggtcttggtca

SEQ ID NO: 3387257 - DNA, 25 bp, Homo sapien
tccagctagcaagggtctaagaggc

SEQ ID NO: 3387258 - DNA, 25 bp, Homo sapien
taagaggctgggtagaaagaacatg

SEQ ID NO: 3387259 - DNA, 25 bp, Homo sapien
tcaagttactgacctcctctgagcc

SEQ ID NO: 3387260 - DNA, 25 bp, Homo sapien
tgaaatgctataaccacccagggaa

SEQ ID NO: 3387261 - DNA, 25 bp, Homo sapien
cagaggtcgattagaagccaccaga

SEQ ID NO: 3387262 - DNA, 25 bp, Homo sapien
caaggccccgtgttactttagacag

SEQ ID NO: 3387263 - DNA, 25 bp, Homo sapien
gacatcgtgtccttctccattagag

SEQ ID NO: 3387264 - DNA, 25 bp, Homo sapien
gctttgcaacaagcccctctggaag

SEQ ID NO: 3387265 - DNA, 25 bp, Homo sapien
ggggctttgcaacaagcccctctgg

SEQ ID NO: 3387266 - DNA, 25 bp, Homo sapien
ggctttgcaacaagcccctctggaa

SEQ ID NO: 3387267 - DNA, 25 bp, Homo sapien
ctttgcaacaagcccctctggaagg

SEQ ID NO: 3387268 - DNA, 25 bp, Homo sapien
gataaagtgtctttatcttccactt

SEQ ID NO: 3387269 - DNA, 25 bp, Homo sapien
cacttcagcaaagctccagaacctg

SEQ ID NO: 3387270 - DNA, 25 bp, Homo sapien
gaacctgggactgccaaggaggatc

SEQ ID NO: 3387271 - DNA, 25 bp, Homo sapien
tgccaaggaggatctcataatccat

SEQ ID NO: 3387272 - DNA, 25 bp, Homo sapien
tgattcagtctgagggccatcagct

SEQ ID NO: 3387273 - DNA, 25 bp, Homo sapien
gcgtgacctctgaagtaacaattaa

SEQ ID NO: 3387274 - DNA, 25 bp, Homo sapien
cttaaaaattcgctactgaccctga

SEQ ID NO: 3387275 - DNA, 25 bp, Homo sapien
ccttgggcatctagccctctcttta

SEQ ID NO: 3387276 - DNA, 25 bp, Homo sapien
tccagcatgtcacagggtactttgt

SEQ ID NO: 3387277 - DNA, 25 bp, Homo sapien
caaagtgcgcagtacaaaggattcc

SEQ ID NO: 3387278 - DNA, 25 bp, Homo sapien
tctagtagatgcctccaaagtgcgc

SEQ ID NO: 3387279 - DNA, 25 bp, Homo sapien
ggagcctgctcggagtacgaataaa

SEQ ID NO: 3387280 - DNA, 25 bp, Homo sapien
atccccatgtctttgcccacaatgt

SEQ ID NO: 3387281 - DNA, 25 bp, Homo sapien
tgaataaaccccttcacacttcagg

SEQ ID NO: 3387282 - DNA, 25 bp, Homo sapien
aatgtcccctttacctggaatgcca

SEQ ID NO: 3387283 - DNA, 25 bp, Homo sapien
gaatgccacctacctacttcttttg

SEQ ID NO: 3387284 - DNA, 25 bp, Homo sapien
tctgttttcactggacagactcatg

SEQ ID NO: 3387285 - DNA, 25 bp, Homo sapien
aagagatagacatgggtctgttttc

SEQ ID NO: 3387286 - DNA, 25 bp, Homo sapien
gagcctggagatctgcactgcaggc

SEQ ID NO: 3387287 - DNA, 25 bp, Homo sapien
cagagacaagctgcttgaattcaag

SEQ ID NO: 3387288 - DNA, 25 bp, Homo sapien
ctggtaaacatcaggctctgctcag

SEQ ID NO: 3387289 - DNA, 25 bp, Homo sapien
agctggtaaacatcaggctctgctc

SEQ ID NO: 3387290 - DNA, 25 bp, Homo sapien
cttctctgcagttggcagggatcaa

SEQ ID NO: 3387291 - DNA, 25 bp, Homo sapien
ctgcagttggcagggatcaagcccg

SEQ ID NO: 3387292 - DNA, 25 bp, Homo sapien
gtgccctggcatcactccctgtttc

SEQ ID NO: 3387293 - DNA, 25 bp, Homo sapien
attgctgaggatttgctgtcccagc

SEQ ID NO: 3387294 - DNA, 25 bp, Homo sapien
gattgctgaggatttgctgtcccag

SEQ ID NO: 3387295 - DNA, 25 bp, Homo sapien
tgccctggcatcactccctgtttcc

SEQ ID NO: 3387296 - DNA, 25 bp, Homo sapien
gatattaggcaagcacagcaaactg

SEQ ID NO: 3387297 - DNA, 25 bp, Homo sapien
tcaaactctacttcgctgactgata

SEQ ID NO: 3387298 - DNA, 25 bp, Homo sapien
tgagagccactcaacgtgcgtgcag

SEQ ID NO: 3387299 - DNA, 25 bp, Homo sapien
tctccttcccgatgagaacatggaa

SEQ ID NO: 3387300 - DNA, 25 bp, Homo sapien
ggaattgcaacgcaggcctgtcaga

SEQ ID NO: 3387301 - DNA, 25 bp, Homo sapien
cccaggacatggttgtttgcaagca

SEQ ID NO: 3387302 - DNA, 25 bp, Homo sapien
cataggttctcaagacaagtggact

SEQ ID NO: 3387303 - DNA, 25 bp, Homo sapien
taagctgaatggctggcatggtccc

SEQ ID NO: 3387304 - DNA, 25 bp, Homo sapien
tgttattctgttcccagcgccacag

SEQ ID NO: 3387305 - DNA, 25 bp, Homo sapien
ggtgttattctgttcccagcgccac

SEQ ID NO: 3387306 - DNA, 25 bp, Homo sapien
ggtggtgttattctgttcccagcgc

SEQ ID NO: 3387307 - DNA, 25 bp, Homo sapien
tattctgttcccagcgccacagcat

SEQ ID NO: 3387308 - DNA, 25 bp, Homo sapien
catccttactgagtgataagcacct

SEQ ID NO: 3387309 - DNA, 25 bp, Homo sapien
cttgcctggtgtaaggtaggtgtgc

SEQ ID NO: 3387310 - DNA, 25 bp, Homo sapien
gtaggtgtgcagtcatccttactga

SEQ ID NO: 3387311 - DNA, 25 bp, Homo sapien
ggtgtgcagtcatccttactgagtg

SEQ ID NO: 3387312 - DNA, 25 bp, Homo sapien
agtccagcctccctagccaattatg

SEQ ID NO: 3387313 - DNA, 25 bp, Homo sapien
ccttaacacacagttcttgctgggt

SEQ ID NO: 3387314 - DNA, 25 bp, Homo sapien
cccaaagaaagctccatcagtattt

SEQ ID NO: 3387315 - DNA, 25 bp, Homo sapien
ttatgttgtaaactggacagtaggg

SEQ ID NO: 3387316 - DNA, 25 bp, Homo sapien
tcaaagtccgggtttcaaaatgctc

SEQ ID NO: 3387317 - DNA, 25 bp, Homo sapien
ggtaatcagagaagaagtcgggact

SEQ ID NO: 3387318 - DNA, 25 bp, Homo sapien
cagccatgagaagggtaatcagaga

SEQ ID NO: 3387319 - DNA, 25 bp, Homo sapien
tcgggactttgcaggattcccagaa

SEQ ID NO: 3387320 - DNA, 25 bp, Homo sapien
gggagacccagtcagtcagtgcaaa

SEQ ID NO: 3387321 - DNA, 25 bp, Homo sapien
acacagcaaagggagaggtgcccaa

SEQ ID NO: 3387322 - DNA, 25 bp, Homo sapien
ggagaggggcaatctgctgcccaca

SEQ ID NO: 3387323 - DNA, 25 bp, Homo sapien
tttgtatcgtttagcaatctgaagc

SEQ ID NO: 3387324 - DNA, 25 bp, Homo sapien
cagttcacagatcacaggtggctgg

SEQ ID NO: 3387325 - DNA, 25 bp, Homo sapien
ggtgatgtactattcttaaccaata

SEQ ID NO: 3387326 - DNA, 25 bp, Homo sapien
tactggcactataaggcctaattgc

SEQ ID NO: 3387327 - DNA, 25 bp, Homo sapien
cataaagttgctatacagtgtggcg

SEQ ID NO: 3387328 - DNA, 25 bp, Homo sapien
ggattctgatgtcagccggacctga

SEQ ID NO: 3387329 - DNA, 25 bp, Homo sapien
ttcaaatccctgaactggataatat

SEQ ID NO: 3387330 - DNA, 25 bp, Homo sapien
gacaagaggcttcctaccagcagga

SEQ ID NO: 3387331 - DNA, 25 bp, Homo sapien
tccagtaggagagcccatgacatgc

SEQ ID NO: 3387332 - DNA, 25 bp, Homo sapien
tagtcgcatggtgcctccatgtgcc

SEQ ID NO: 3387333 - DNA, 25 bp, Homo sapien
cagtggggttttgacaatcatcctc

SEQ ID NO: 3387334 - DNA, 25 bp, Homo sapien
tcctcagagcttttagtcgcatggt

SEQ ID NO: 3387335 - DNA, 25 bp, Homo sapien
gggttttgacaatcatcctcagagc

SEQ ID NO: 3387336 - DNA, 25 bp, Homo sapien
actttataatggtcacaggaatccc

SEQ ID NO: 3387337 - DNA, 25 bp, Homo sapien
cccgagcgggaacccataagttgat

SEQ ID NO: 3387338 - DNA, 25 bp, Homo sapien
gcgggaacccataagttgatgctta

SEQ ID NO: 3387339 - DNA, 25 bp, Homo sapien
tggtcacaggaatcccgactttgac

SEQ ID NO: 3387340 - DNA, 25 bp, Homo sapien
cagaaggtcaagtgctacagcagtg

SEQ ID NO: 3387341 - DNA, 25 bp, Homo sapien
aatgatgccacactgttactgaggg

SEQ ID NO: 3387342 - DNA, 25 bp, Homo sapien
tacagcagtgcggaaaaagcagaga

SEQ ID NO: 3387343 - DNA, 25 bp, Homo sapien
tgagataatctaccaatgcctgaca

SEQ ID NO: 3387344 - DNA, 25 bp, Homo sapien
ggccccagggacgtcactataaatg

SEQ ID NO: 3387345 - DNA, 25 bp, Homo sapien
tttagaaactgtataagctgggcac

SEQ ID NO: 3387346 - DNA, 25 bp, Homo sapien
gagttgctcgaccttccttaagaga

SEQ ID NO: 3387347 - DNA, 25 bp, Homo sapien
caaggatgtgtccttaggacctact

SEQ ID NO: 3387348 - DNA, 25 bp, Homo sapien
ccatcttctgatgtattacttggga

SEQ ID NO: 3387349 - DNA, 25 bp, Homo sapien
gatgtattacttgggacatttgtgg

SEQ ID NO: 3387350 - DNA, 25 bp, Homo sapien
tctgatgtattacttgggacatttg

SEQ ID NO: 3387351 - DNA, 25 bp, Homo sapien
tattacttgggacatttgtgggctt

SEQ ID NO: 3387352 - DNA, 25 bp, Homo sapien
gcccaacctctagggcaatgaccat

SEQ ID NO: 3387353 - DNA, 25 bp, Homo sapien
gaaaagtccggttctgcccaatgtc

SEQ ID NO: 3387354 - DNA, 25 bp, Homo sapien
tctgctctccggtttctcagaaaag

SEQ ID NO: 3387355 - DNA, 25 bp, Homo sapien
tcaaataggtgaaatggtgtcccca

SEQ ID NO: 3387356 - DNA, 25 bp, Homo sapien
aggaaaccgaaattagctggtggct

SEQ ID NO: 3387357 - DNA, 25 bp, Homo sapien
gtgaggaaaccgaaattagctggtg

SEQ ID NO: 3387358 - DNA, 25 bp, Homo sapien
tctctccttaacggtttaatgtatc

SEQ ID NO: 3387359 - DNA, 25 bp, Homo sapien
ctctctccttaacggtttaatgtat

SEQ ID NO: 3387360 - DNA, 25 bp, Homo sapien
catttgttatcaagagctaagctgg

SEQ ID NO: 3387361 - DNA, 25 bp, Homo sapien
tctgcagcatctagcaaggagtatg

SEQ ID NO: 3387362 - DNA, 25 bp, Homo sapien
caggtatcaaccacaagtccacata

SEQ ID NO: 3387363 - DNA, 25 bp, Homo sapien
gactgagcagtacgtggttaaatgg

SEQ ID NO: 3387364 - DNA, 25 bp, Homo sapien
tgctccgaggatccatgtgactccc

SEQ ID NO: 3387365 - DNA, 25 bp, Homo sapien
taggcctgctccgaggatccatgtg

SEQ ID NO: 3387366 - DNA, 25 bp, Homo sapien
gaggatccatgtgactcccagagca

SEQ ID NO: 3387367 - DNA, 25 bp, Homo sapien
aaccagtaggcctgctccgaggatc

SEQ ID NO: 3387368 - DNA, 25 bp, Homo sapien
gatcccctctcagagtctgaggcag

SEQ ID NO: 3387369 - DNA, 25 bp, Homo sapien
tttaggaagccagtcggatcccctc

SEQ ID NO: 3387370 - DNA, 25 bp, Homo sapien
agcaaacaggcaactttaggaagcc

SEQ ID NO: 3387371 - DNA, 25 bp, Homo sapien
cagtcggatcccctctcagagtctg

SEQ ID NO: 3387372 - DNA, 25 bp, Homo sapien
cctgatgagacgcttgtggccggat

SEQ ID NO: 3387373 - DNA, 25 bp, Homo sapien
ggccggatttggctaggtaatgatt

SEQ ID NO: 3387374 - DNA, 25 bp, Homo sapien
ccacaacctggataatctgggccag

SEQ ID NO: 3387375 - DNA, 25 bp, Homo sapien
taggtaatgattggcccagtctgtg

SEQ ID NO: 3387376 - DNA, 25 bp, Homo sapien
caaagtaggcccacatgcataatgt

SEQ ID NO: 3387377 - DNA, 25 bp, Homo sapien
tgctgcctgtgctaaaacctgggaa

SEQ ID NO: 3387378 - DNA, 25 bp, Homo sapien
actcagtcaaagtaggcccacatgc

SEQ ID NO: 3387379 - DNA, 25 bp, Homo sapien
ctctgcacagctgcaaaactcagtc

SEQ ID NO: 3387380 - DNA, 25 bp, Homo sapien
ggattattctttgtagccctacagg

SEQ ID NO: 3387381 - DNA, 25 bp, Homo sapien
tggatcacgccttccaccatggaag

SEQ ID NO: 3387382 - DNA, 25 bp, Homo sapien
tgggccctcccaagacatagaatct

SEQ ID NO: 3387383 - DNA, 25 bp, Homo sapien
ctacagggaatgacactaccaaggg

SEQ ID NO: 3387384 - DNA, 25 bp, Homo sapien
tcacctcaggaagcacatgacgtcc

SEQ ID NO: 3387385 - DNA, 25 bp, Homo sapien
tcagcgttctcctgtagagtccagc

SEQ ID NO: 3387386 - DNA, 25 bp, Homo sapien
ttttgagactatgcgaaaatcctgc

SEQ ID NO: 3387387 - DNA, 25 bp, Homo sapien
cctgactggcatatagcataactga

SEQ ID NO: 3387388 - DNA, 25 bp, Homo sapien
aatcccactatctaggaagcccagc

SEQ ID NO: 3387389 - DNA, 25 bp, Homo sapien
gcagcagcaaaaggcccactttctt

SEQ ID NO: 3387390 - DNA, 25 bp, Homo sapien
gaaaagtcgcaaacaatcccactat

SEQ ID NO: 3387391 - DNA, 25 bp, Homo sapien
agcaaaaggcccactttcttctgcc

SEQ ID NO: 3387392 - DNA, 25 bp, Homo sapien
aaagagagtgagctagctgtgattg

SEQ ID NO: 3387393 - DNA, 25 bp, Homo sapien
gaaagagagtgagctagctgtgatt

SEQ ID NO: 3387394 - DNA, 25 bp, Homo sapien
gacaactgcatcgatgacagtcttg

SEQ ID NO: 3387395 - DNA, 25 bp, Homo sapien
agagacaactgcatcgatgacagtc

SEQ ID NO: 3387396 - DNA, 25 bp, Homo sapien
caaggtcgtcatctaaaacagagac

SEQ ID NO: 3387397 - DNA, 25 bp, Homo sapien
acagctggggcaaggtcgtcatcta

SEQ ID NO: 3387398 - DNA, 25 bp, Homo sapien
tcttcggacagccattgatgtcttc

SEQ ID NO: 3387399 - DNA, 25 bp, Homo sapien
tcggacagccattgatgtcttcaat

SEQ ID NO: 3387400 - DNA, 25 bp, Homo sapien
ttgggatctgttcttcggacagcca

SEQ ID NO: 3387401 - DNA, 25 bp, Homo sapien
tctgttcttcggacagccattgatg

SEQ ID NO: 3387402 - DNA, 25 bp, Homo sapien
tccaaggatttggccccaaaagcat

SEQ ID NO: 3387403 - DNA, 25 bp, Homo sapien
tggccccaaaagcatctgggtcaga

SEQ ID NO: 3387404 - DNA, 25 bp, Homo sapien
ttggccccaaaagcatctgggtcag

SEQ ID NO: 3387405 - DNA, 25 bp, Homo sapien
ggatttggccccaaaagcatctggg

SEQ ID NO: 3387406 - DNA, 25 bp, Homo sapien
gcatcaactttcagtcataaaatga

SEQ ID NO: 3387407 - DNA, 25 bp, Homo sapien
cagtcataaaatgaacaagttctgg

SEQ ID NO: 3387408 - DNA, 25 bp, Homo sapien
aatgaacaagttctggccgggcgtg

SEQ ID NO: 3387409 - DNA, 25 bp, Homo sapien
cataaaatgaacaagttctggccgg

SEQ ID NO: 3387410 - DNA, 25 bp, Homo sapien
tctccaggaatctgggccttctccg

SEQ ID NO: 3387411 - DNA, 25 bp, Homo sapien
ggccttctccgtaacctgatgtcat

SEQ ID NO: 3387412 - DNA, 25 bp, Homo sapien
gctttcctctcaagcacagctctcc

SEQ ID NO: 3387413 - DNA, 25 bp, Homo sapien
gcttatctgctttccgtttcctcct

SEQ ID NO: 3387414 - DNA, 25 bp, Homo sapien
agaggtctccacgtccttctaatac

SEQ ID NO: 3387415 - DNA, 25 bp, Homo sapien
aagaggtctccacgtccttctaata

SEQ ID NO: 3387416 - DNA, 25 bp, Homo sapien
taagaggtctccacgtccttctaat

SEQ ID NO: 3387417 - DNA, 25 bp, Homo sapien
gaggtctccacgtccttctaatacc

SEQ ID NO: 3387418 - DNA, 25 bp, Homo sapien
tttagacttgcagggcaacttccat

SEQ ID NO: 3387419 - DNA, 25 bp, Homo sapien
tgtctcccatatcctgaagtatttc

SEQ ID NO: 3387420 - DNA, 25 bp, Homo sapien
gtctcccatatcctgaagtatttcc

SEQ ID NO: 3387421 - DNA, 25 bp, Homo sapien
acttgcagggcaacttccatgggct

SEQ ID NO: 3387422 - DNA, 25 bp, Homo sapien
cacggaggtgggctgacgaggtagg

SEQ ID NO: 3387423 - DNA, 25 bp, Homo sapien
tttattctgggaagtgtcacggagg

SEQ ID NO: 3387424 - DNA, 25 bp, Homo sapien
cccggaatctcttattgcaaaatca

SEQ ID NO: 3387425 - DNA, 25 bp, Homo sapien
tcagcaatagtccagcaatatggca

SEQ ID NO: 3387426 - DNA, 25 bp, Homo sapien
ttctccggatggcaggcattgcaaa

SEQ ID NO: 3387427 - DNA, 25 bp, Homo sapien
gtgacctcctgaacccctctgtcct

SEQ ID NO: 3387428 - DNA, 25 bp, Homo sapien
ctgtgacctcctgaacccctctgtc

SEQ ID NO: 3387429 - DNA, 25 bp, Homo sapien
aaaattctccggatggcaggcattg

SEQ ID NO: 3387430 - DNA, 25 bp, Homo sapien
agcccctggatgtttattcccttag

SEQ ID NO: 3387431 - DNA, 25 bp, Homo sapien
ctggatgtttattcccttagctgcc

SEQ ID NO: 3387432 - DNA, 25 bp, Homo sapien
tcaagcaggcatctatgttttcaat

SEQ ID NO: 3387433 - DNA, 25 bp, Homo sapien
attcaagcaggcatctatgttttca

SEQ ID NO: 3387434 - DNA, 25 bp, Homo sapien
atgctaacaggcctcctttcaaaaa

SEQ ID NO: 3387435 - DNA, 25 bp, Homo sapien
cagagtccatgctaacaggcctcct

SEQ ID NO: 3387436 - DNA, 25 bp, Homo sapien
gctaacaggcctcctttcaaaaagc

SEQ ID NO: 3387437 - DNA, 25 bp, Homo sapien
gctcaatttggctgtttccttcctc

SEQ ID NO: 3387438 - DNA, 25 bp, Homo sapien
ttctgcgaactctggaagcagtgtg

SEQ ID NO: 3387439 - DNA, 25 bp, Homo sapien
aggactgaccacacgacaactgctt

SEQ ID NO: 3387440 - DNA, 25 bp, Homo sapien
cacgacaactgcttctgcgaactct

SEQ ID NO: 3387441 - DNA, 25 bp, Homo sapien
ctgggattaggactgaccacacgac

SEQ ID NO: 3387442 - DNA, 25 bp, Homo sapien
ttatccccatggatgagggtccgta

SEQ ID NO: 3387443 - DNA, 25 bp, Homo sapien
tgatcttatccccatggatgagggt

SEQ ID NO: 3387444 - DNA, 25 bp, Homo sapien
tcttatccccatggatgagggtccg

SEQ ID NO: 3387445 - DNA, 25 bp, Homo sapien
tatccccatggatgagggtccgtac

SEQ ID NO: 3387446 - DNA, 25 bp, Homo sapien
gctgaaatgctttgaggacaggtgc

SEQ ID NO: 3387447 - DNA, 25 bp, Homo sapien
tcctgagtgcaaacccagctttaga

SEQ ID NO: 3387448 - DNA, 25 bp, Homo sapien
tatggggccttccaactgctgatgt

SEQ ID NO: 3387449 - DNA, 25 bp, Homo sapien
caggtgcatacaccctcctgagtgc

SEQ ID NO: 3387450 - DNA, 25 bp, Homo sapien
ctgcttgtatcgggagaggctgaag

SEQ ID NO: 3387451 - DNA, 25 bp, Homo sapien
gccttgaggtttccattcctgatct

SEQ ID NO: 3387452 - DNA, 25 bp, Homo sapien
agaagaggcctagaatggccttgag

SEQ ID NO: 3387453 - DNA, 25 bp, Homo sapien
agaggcctagaatggccttgaggtt

SEQ ID NO: 3387454 - DNA, 25 bp, Homo sapien
gcttggggagtgactggcacctgct

SEQ ID NO: 3387455 - DNA, 25 bp, Homo sapien
ttggggagtgactggcacctgctgc

SEQ ID NO: 3387456 - DNA, 25 bp, Homo sapien
cttggggagtgactggcacctgctg

SEQ ID NO: 3387457 - DNA, 25 bp, Homo sapien
gaggaaggtgcctgaaaaacagaac

SEQ ID NO: 3387458 - DNA, 25 bp, Homo sapien
gaaccatcagttggcaaggagcccc

SEQ ID NO: 3387459 - DNA, 25 bp, Homo sapien
atgaaaaagccatacaggatagcct

SEQ ID NO: 3387460 - DNA, 25 bp, Homo sapien
gtggaggaaggtgcctgaaaaacag

SEQ ID NO: 3387461 - DNA, 25 bp, Homo sapien
tctgacctataaaagtatacatctc

SEQ ID NO: 3387462 - DNA, 25 bp, Homo sapien
taaaagtatacatctctgccagaca

SEQ ID NO: 3387463 - DNA, 25 bp, Homo sapien
tgccagacacaagaagggctcctca

SEQ ID NO: 3387464 - DNA, 25 bp, Homo sapien
catgcatttcaaggccatgctaatt

SEQ ID NO: 3387465 - DNA, 25 bp, Homo sapien
ttgcattacacccatcagtgctggt

SEQ ID NO: 3387466 - DNA, 25 bp, Homo sapien
gaaggctgtaactgtctaaaaggca

SEQ ID NO: 3387467 - DNA, 25 bp, Homo sapien
gaaaaggccattactcttcagcaca

SEQ ID NO: 3387468 - DNA, 25 bp, Homo sapien
tgtgctctgtccaactaaatgggta

SEQ ID NO: 3387469 - DNA, 25 bp, Homo sapien
tttgagatgagtccttggatgatgc

SEQ ID NO: 3387470 - DNA, 25 bp, Homo sapien
gtgaagcggatgattttgctttgag

SEQ ID NO: 3387471 - DNA, 25 bp, Homo sapien
ctgacccagagtgaagcggatgatt

SEQ ID NO: 3387472 - DNA, 25 bp, Homo sapien
ttgagatgagtccttggatgatgca

SEQ ID NO: 3387473 - DNA, 25 bp, Homo sapien
ccttcaacacctgatgacctgtctc

SEQ ID NO: 3387474 - DNA, 25 bp, Homo sapien
tcccttcaacacctgatgacctgtc

SEQ ID NO: 3387475 - DNA, 25 bp, Homo sapien
aacacctgatgacctgtctccaaag

SEQ ID NO: 3387476 - DNA, 25 bp, Homo sapien
tcaacacctgatgacctgtctccaa

SEQ ID NO: 3387477 - DNA, 25 bp, Homo sapien
aaagcaacaggataatgcattcagt

SEQ ID NO: 3387478 - DNA, 25 bp, Homo sapien
cagaagaataacagtgtgtaggaag

SEQ ID NO: 3387479 - DNA, 25 bp, Homo sapien
ctcagaagaataacagtgtgtagga

SEQ ID NO: 3387480 - DNA, 25 bp, Homo sapien
tcagaagaataacagtgtgtaggaa

SEQ ID NO: 3387481 - DNA, 25 bp, Homo sapien
tcatagttgttaaagctctggctgc

SEQ ID NO: 3387482 - DNA, 25 bp, Homo sapien
gctctggctgcgtcggttgttagca

SEQ ID NO: 3387483 - DNA, 25 bp, Homo sapien
gttgttagcagtagttgaccctccg

SEQ ID NO: 3387484 - DNA, 25 bp, Homo sapien
gataccctcgcggtaggacctggaa

SEQ ID NO: 3387485 - DNA, 25 bp, Homo sapien
tccaatgtctcaagagatagaggct

SEQ ID NO: 3387486 - DNA, 25 bp, Homo sapien
ggaatcttctacaccaccaggtagg

SEQ ID NO: 3387487 - DNA, 25 bp, Homo sapien
caaaatgcatgctccaagaagcttg

SEQ ID NO: 3387488 - DNA, 25 bp, Homo sapien
aatagagaaacaccacgtagacagc

SEQ ID NO: 3387489 - DNA, 25 bp, Homo sapien
cattcacagtaggagggctgcccat

SEQ ID NO: 3387490 - DNA, 25 bp, Homo sapien
taggagggctgcccatgtccctggg

SEQ ID NO: 3387491 - DNA, 25 bp, Homo sapien
gagggctgcccatgtccctggggca

SEQ ID NO: 3387492 - DNA, 25 bp, Homo sapien
tcattcacagtaggagggctgccca

SEQ ID NO: 3387493 - DNA, 25 bp, Homo sapien
caggccaggccattgatttccatca

SEQ ID NO: 3387494 - DNA, 25 bp, Homo sapien
caaaccaccgtgtagcatgaccatt

SEQ ID NO: 3387495 - DNA, 25 bp, Homo sapien
tgaactgtgtccatgaggccttggc

SEQ ID NO: 3387496 - DNA, 25 bp, Homo sapien
catgaccattcgtccacagggtgtg

SEQ ID NO: 3387497 - DNA, 25 bp, Homo sapien
ccagtccctaagcttccactttctt

SEQ ID NO: 3387498 - DNA, 25 bp, Homo sapien
tcccagtccctaagcttccactttc

SEQ ID NO: 3387499 - DNA, 25 bp, Homo sapien
cttctcccagtccctaagcttccac

SEQ ID NO: 3387500 - DNA, 25 bp, Homo sapien
tccactttcttctctgaatttccat

SEQ ID NO: 3387501 - DNA, 25 bp, Homo sapien
aagacaaagctcttaagggtatgtt

SEQ ID NO: 3387502 - DNA, 25 bp, Homo sapien
ttctcaacacaagtcatctttccct

SEQ ID NO: 3387503 - DNA, 25 bp, Homo sapien
catctttccctttacgaaaatgaga

SEQ ID NO: 3387504 - DNA, 25 bp, Homo sapien
gaaaatgagataacttctgacaggg

SEQ ID NO: 3387505 - DNA, 25 bp, Homo sapien
gaaaacctagatcctggtggactcc

SEQ ID NO: 3387506 - DNA, 25 bp, Homo sapien
agggcaagtgggagtcaagaattca

SEQ ID NO: 3387507 - DNA, 25 bp, Homo sapien
tgcctaactcagtccgagggcaagt

SEQ ID NO: 3387508 - DNA, 25 bp, Homo sapien
ctgtggatcacaaaaggggttgcct

SEQ ID NO: 3387509 - DNA, 25 bp, Homo sapien
caagaattcattcaagtcactgaat

SEQ ID NO: 3387510 - DNA, 25 bp, Homo sapien
tgtacaggaaccagggatatgactg

SEQ ID NO: 3387511 - DNA, 25 bp, Homo sapien
ttatttggccacatttctcttcgga

SEQ ID NO: 3387512 - DNA, 25 bp, Homo sapien
aattccaacttaaacattctcaagc

SEQ ID NO: 3387513 - DNA, 25 bp, Homo sapien
tgcatggctacgagatagaacacgg

SEQ ID NO: 3387514 - DNA, 25 bp, Homo sapien
ttgtcttcttaatgggaaaacagaa

SEQ ID NO: 3387515 - DNA, 25 bp, Homo sapien
gacagttgtcttcttaatgggaaaa

SEQ ID NO: 3387516 - DNA, 25 bp, Homo sapien
ctgacagttgtcttcttaatgggaa

SEQ ID NO: 3387517 - DNA, 25 bp, Homo sapien
tcttcttaatgggaaaacagaattc

SEQ ID NO: 3387518 - DNA, 25 bp, Homo sapien
tgtattatgccaaatgtgcaggaac

SEQ ID NO: 3387519 - DNA, 25 bp, Homo sapien
gttcttcaaaatttaggatgctggc

SEQ ID NO: 3387520 - DNA, 25 bp, Homo sapien
tcaggagccaaccaaagaacgagct

SEQ ID NO: 3387521 - DNA, 25 bp, Homo sapien
taggaacgtcagacaatttagcagt

SEQ ID NO: 3387522 - DNA, 25 bp, Homo sapien
caatgattccctaggaaaaatcctc

SEQ ID NO: 3387523 - DNA, 25 bp, Homo sapien
aaaatcctccaaccggagaggctgc

SEQ ID NO: 3387524 - DNA, 25 bp, Homo sapien
tcacaagtgttttcggttaaactgc

SEQ ID NO: 3387525 - DNA, 25 bp, Homo sapien
gctgcccttccaattgtcacaagtg

SEQ ID NO: 3387526 - DNA, 25 bp, Homo sapien
ctgaatcatacttgttgacctgcac

SEQ ID NO: 3387527 - DNA, 25 bp, Homo sapien
gaggcctgaatcatacttgttgacc

SEQ ID NO: 3387528 - DNA, 25 bp, Homo sapien
gcctgaatcatacttgttgacctgc

SEQ ID NO: 3387529 - DNA, 25 bp, Homo sapien
aggaggcctgaatcatacttgttga

SEQ ID NO: 3387530 - DNA, 25 bp, Homo sapien
cgctctcttcgaagctgggcagagt

SEQ ID NO: 3387531 - DNA, 25 bp, Homo sapien
cacgctgagggatttgctgcgccaa

SEQ ID NO: 3387532 - DNA, 25 bp, Homo sapien
ccgagagcatggataccgtggcact

SEQ ID NO: 3387533 - DNA, 25 bp, Homo sapien
gatggccgaggaggtactgcaatta

SEQ ID NO: 3387534 - DNA, 25 bp, Homo sapien
tgggcaatgcccttgagtgcaatct

SEQ ID NO: 3387535 - DNA, 25 bp, Homo sapien
tccttatccttctcccgctgttgtt

SEQ ID NO: 3387536 - DNA, 25 bp, Homo sapien
cagtgcccggctaaaagtcctctgg

SEQ ID NO: 3387537 - DNA, 25 bp, Homo sapien
tcattgcctttcagagaactcttct

SEQ ID NO: 3387538 - DNA, 25 bp, Homo sapien
tacaggaaaggtgcaaccgtggcag

SEQ ID NO: 3387539 - DNA, 25 bp, Homo sapien
acttttttggcatctcgggcacagc

SEQ ID NO: 3387540 - DNA, 25 bp, Homo sapien
gaggaactggagtgtctgccgtcca

SEQ ID NO: 3387541 - DNA, 25 bp, Homo sapien
gctgaggtagctgaacactgacggt

SEQ ID NO: 3387542 - DNA, 25 bp, Homo sapien
cagagtgggcattaacgtaaaaacg

SEQ ID NO: 3387543 - DNA, 25 bp, Homo sapien
ccacatcatagacgttttcctcttc

SEQ ID NO: 3387544 - DNA, 25 bp, Homo sapien
taaaaacggggctagtcagatccac

SEQ ID NO: 3387545 - DNA, 25 bp, Homo sapien
aacggggctagtcagatccacatca

SEQ ID NO: 3387546 - DNA, 25 bp, Homo sapien
cttatttccagcgtcacttcccaga

SEQ ID NO: 3387547 - DNA, 25 bp, Homo sapien
ctgattcgtatcctggtgctcttat

SEQ ID NO: 3387548 - DNA, 25 bp, Homo sapien
tgccgaagacctcagagggcaccaa

SEQ ID NO: 3387549 - DNA, 25 bp, Homo sapien
gcaccaagggctgataaaggacagg

SEQ ID NO: 3387550 - DNA, 25 bp, Homo sapien
caggctgtccagtcttggtgaagtg

SEQ ID NO: 3387551 - DNA, 25 bp, Homo sapien
gactcggcagtaacattcccttcag

SEQ ID NO: 3387552 - DNA, 25 bp, Homo sapien
gaagtggctgggctccacgctcaca

SEQ ID NO: 3387553 - DNA, 25 bp, Homo sapien
tgttgagcttgactcggcagtaaca

SEQ ID NO: 3387554 - DNA, 25 bp, Homo sapien
tgacatgcttaggtgatcacgttct

SEQ ID NO: 3387555 - DNA, 25 bp, Homo sapien
ggtgatcacgttctaaactgccaat

SEQ ID NO: 3387556 - DNA, 25 bp, Homo sapien
atgcctcctctgacaatgacctgaa

SEQ ID NO: 3387557 - DNA, 25 bp, Homo sapien
taggatatacccactaactcacagc

SEQ ID NO: 3387558 - DNA, 25 bp, Homo sapien
tgccgcagatcagcgatgttcttca

SEQ ID NO: 3387559 - DNA, 25 bp, Homo sapien
tgtgtgtaacctgagttccccttaa

SEQ ID NO: 3387560 - DNA, 25 bp, Homo sapien
caaattctgccgcagatcagcgatg

SEQ ID NO: 3387561 - DNA, 25 bp, Homo sapien
cagatcagcgatgttcttcactgtc

SEQ ID NO: 3387562 - DNA, 25 bp, Homo sapien
gtgtgggcctccctgtcaagctgag

SEQ ID NO: 3387563 - DNA, 25 bp, Homo sapien
ggcggagtacacatagcgacctgac

SEQ ID NO: 3387564 - DNA, 25 bp, Homo sapien
gatgaacctgctggcgttggctcga

SEQ ID NO: 3387565 - DNA, 25 bp, Homo sapien
tcaagctgagtatgctacggccact

SEQ ID NO: 3387566 - DNA, 25 bp, Homo sapien
aactcaggtgggcagtttgacctcc

SEQ ID NO: 3387567 - DNA, 25 bp, Homo sapien
ccatgtcacacagcctttgatatgg

SEQ ID NO: 3387568 - DNA, 25 bp, Homo sapien
ggcagtttgacctcctccagaagaa

SEQ ID NO: 3387569 - DNA, 25 bp, Homo sapien
tatggacagcagaaactcaggtggg

SEQ ID NO: 3387570 - DNA, 25 bp, Homo sapien
tcagtcttcctaatcccactgagac

SEQ ID NO: 3387571 - DNA, 25 bp, Homo sapien
ccaagatcgtttcagtgggatcggc

SEQ ID NO: 3387572 - DNA, 25 bp, Homo sapien
caagagcgccaaaagccaagatcgt

SEQ ID NO: 3387573 - DNA, 25 bp, Homo sapien
acctgaacttcccaagcgttccaag

SEQ ID NO: 3387574 - DNA, 25 bp, Homo sapien
gtttcctgcactcagtacatcaagt

SEQ ID NO: 3387575 - DNA, 25 bp, Homo sapien
tacatcaagtgggtccaccgtggag

SEQ ID NO: 3387576 - DNA, 25 bp, Homo sapien
cgataagggctagtaggtttcctgc

SEQ ID NO: 3387577 - DNA, 25 bp, Homo sapien
ccagacgccgataagggctagtagg

SEQ ID NO: 3387578 - DNA, 25 bp, Homo sapien
tccagtgtccaaggccagaagaccc

SEQ ID NO: 3387579 - DNA, 25 bp, Homo sapien
ccagtgtccaaggccagaagaccct

SEQ ID NO: 3387580 - DNA, 25 bp, Homo sapien
gactcatgcaaaggctcagttacaa

SEQ ID NO: 3387581 - DNA, 25 bp, Homo sapien
ttctcaaatgcaaaaggagggccca

SEQ ID NO: 3387582 - DNA, 25 bp, Homo sapien
gagcagacactccaatgtgagacta

SEQ ID NO: 3387583 - DNA, 25 bp, Homo sapien
tctgtatcaaggaaaacgtctgtgg

SEQ ID NO: 3387584 - DNA, 25 bp, Homo sapien
ggctctccgcatccaccttcttaag

SEQ ID NO: 3387585 - DNA, 25 bp, Homo sapien
aagagtcagagcctctgctaaaggg

SEQ ID NO: 3387586 - DNA, 25 bp, Homo sapien
gagtcagagcctctgctaaagggac

SEQ ID NO: 3387587 - DNA, 25 bp, Homo sapien
tcagagcctctgctaaagggacaag

SEQ ID NO: 3387588 - DNA, 25 bp, Homo sapien
gggaaaggcaaagctaaatcaggat

SEQ ID NO: 3387589 - DNA, 25 bp, Homo sapien
gcaaagctaaatcaggatcttctgc

SEQ ID NO: 3387590 - DNA, 25 bp, Homo sapien
gtatcagaaaacgacaaccccagaa

SEQ ID NO: 3387591 - DNA, 25 bp, Homo sapien
ccgggtgcaacgtggatgtatcaga

SEQ ID NO: 3387592 - DNA, 25 bp, Homo sapien
gtggctaaattcaacacctccaatg

SEQ ID NO: 3387593 - DNA, 25 bp, Homo sapien
gctcctccctttatgacattaatga

SEQ ID NO: 3387594 - DNA, 25 bp, Homo sapien
ggaagcttctaagctactgtggcta

SEQ ID NO: 3387595 - DNA, 25 bp, Homo sapien
cagaatgggtaagaggaacccagga

SEQ ID NO: 3387596 - DNA, 25 bp, Homo sapien
agaggagaacaggaaggcaaagcaa

SEQ ID NO: 3387597 - DNA, 25 bp, Homo sapien
tcagaggagaacaggaaggcaaagc

SEQ ID NO: 3387598 - DNA, 25 bp, Homo sapien
aggagaacaggaaggcaaagcaaaa

SEQ ID NO: 3387599 - DNA, 25 bp, Homo sapien
cttcagaggagaacaggaaggcaaa

SEQ ID NO: 3387600 - DNA, 25 bp, Homo sapien
tcacagcccccataaaggagactgg

SEQ ID NO: 3387601 - DNA, 25 bp, Homo sapien
cacagcccccataaaggagactggt

SEQ ID NO: 3387602 - DNA, 25 bp, Homo sapien
cctcacagcccccataaaggagact

SEQ ID NO: 3387603 - DNA, 25 bp, Homo sapien
acagcccccataaaggagactggtt

SEQ ID NO: 3387604 - DNA, 25 bp, Homo sapien
ttcaggcgacgggtatagaggccaa

SEQ ID NO: 3387605 - DNA, 25 bp, Homo sapien
gttgcagggtctcccgtaccacagc

SEQ ID NO: 3387606 - DNA, 25 bp, Homo sapien
aggcccagggaggtatttcgttgca

SEQ ID NO: 3387607 - DNA, 25 bp, Homo sapien
ggccaagtccaccatcagtcatgta

SEQ ID NO: 3387608 - DNA, 25 bp, Homo sapien
aagcacatccctagggcctgctgaa

SEQ ID NO: 3387609 - DNA, 25 bp, Homo sapien
gaactccctgtgttactgctgtcag

SEQ ID NO: 3387610 - DNA, 25 bp, Homo sapien
tgagagaggaagtaaagcacatccc

SEQ ID NO: 3387611 - DNA, 25 bp, Homo sapien
tgacaaagacacagtagcaacaagc

SEQ ID NO: 3387612 - DNA, 25 bp, Homo sapien
tctaactggctcagcccgttgtgtg

SEQ ID NO: 3387613 - DNA, 25 bp, Homo sapien
cattcgagaggagcatctaactggc

SEQ ID NO: 3387614 - DNA, 25 bp, Homo sapien
tgatctaatgtcacaccaagcctga

SEQ ID NO: 3387615 - DNA, 25 bp, Homo sapien
tgtcctcgttgtgctctcaatggcg

SEQ ID NO: 3387616 - DNA, 25 bp, Homo sapien
gaatggacaccttaaggccttctcc

SEQ ID NO: 3387617 - DNA, 25 bp, Homo sapien
ttgaagtacagcgagaatggacacc

SEQ ID NO: 3387618 - DNA, 25 bp, Homo sapien
cctaggcttagctttgaagtacagc

SEQ ID NO: 3387619 - DNA, 25 bp, Homo sapien
cgagaatggacaccttaaggccttc

SEQ ID NO: 3387620 - DNA, 25 bp, Homo sapien
acagtcagcatctgaacttgtaaga

SEQ ID NO: 3387621 - DNA, 25 bp, Homo sapien
aagagtgtcacataggttaaaatca

SEQ ID NO: 3387622 - DNA, 25 bp, Homo sapien
tgaacttgtaagagtgtcacatagg

SEQ ID NO: 3387623 - DNA, 25 bp, Homo sapien
agcatctgaacttgtaagagtgtca

SEQ ID NO: 3387624 - DNA, 25 bp, Homo sapien
gaaagcatttctgtagcctcgcttc

SEQ ID NO: 3387625 - DNA, 25 bp, Homo sapien
ctcgcttcctcccagttggtggaac

SEQ ID NO: 3387626 - DNA, 25 bp, Homo sapien
tgggctctgcctgaagggctagttg

SEQ ID NO: 3387627 - DNA, 25 bp, Homo sapien
actgtccactctggtttacagccca

SEQ ID NO: 3387628 - DNA, 25 bp, Homo sapien
ctttcccaccaatagggtccagttg

SEQ ID NO: 3387629 - DNA, 25 bp, Homo sapien
ccaccaatagggtccagttgcttcc

SEQ ID NO: 3387630 - DNA, 25 bp, Homo sapien
ttcccaccaatagggtccagttgct

SEQ ID NO: 3387631 - DNA, 25 bp, Homo sapien
accaatagggtccagttgcttcctt

SEQ ID NO: 3387632 - DNA, 25 bp, Homo sapien
ctgttaaggggcaggaaaagctctc

SEQ ID NO: 3387633 - DNA, 25 bp, Homo sapien
gggcaggaaaagctctctggaagtt

SEQ ID NO: 3387634 - DNA, 25 bp, Homo sapien
taaggggcaggaaaagctctctgga

SEQ ID NO: 3387635 - DNA, 25 bp, Homo sapien
tgttaaggggcaggaaaagctctct

SEQ ID NO: 3387636 - DNA, 25 bp, Homo sapien
tcatctcttatactggttaagtcct

SEQ ID NO: 3387637 - DNA, 25 bp, Homo sapien
tcatctgagcctctatcctaagggt

SEQ ID NO: 3387638 - DNA, 25 bp, Homo sapien
gatgctgatggcaagcatgcttgtt

SEQ ID NO: 3387639 - DNA, 25 bp, Homo sapien
tcctaagggtcaagcttaagatgct

SEQ ID NO: 3387640 - DNA, 25 bp, Homo sapien
gctccaaggacatccttgactgtgt

SEQ ID NO: 3387641 - DNA, 25 bp, Homo sapien
tttccaatgggagtccagctccaag

SEQ ID NO: 3387642 - DNA, 25 bp, Homo sapien
tttttccaatgggagtccagctcca

SEQ ID NO: 3387643 - DNA, 25 bp, Homo sapien
taccacagggtgataatgagggaga

SEQ ID NO: 3387644 - DNA, 25 bp, Homo sapien
tccattgacgtctgaaggcaaagca

SEQ ID NO: 3387645 - DNA, 25 bp, Homo sapien
catttcttagctcattccattgacg

SEQ ID NO: 3387646 - DNA, 25 bp, Homo sapien
tgcaacagcgggtcaaattgaagaa

SEQ ID NO: 3387647 - DNA, 25 bp, Homo sapien
taaagcactgaatggaagggccctc

SEQ ID NO: 3387648 - DNA, 25 bp, Homo sapien
caggcacccagcaactctgtaacta

SEQ ID NO: 3387649 - DNA, 25 bp, Homo sapien
gatcgagaggtcaggcctcagtgct

SEQ ID NO: 3387650 - DNA, 25 bp, Homo sapien
gactagctagcagggatcaccattc

SEQ ID NO: 3387651 - DNA, 25 bp, Homo sapien
tggagaacagcggacaaagaagctg

SEQ ID NO: 3387652 - DNA, 25 bp, Homo sapien
ctaggccagagcatttcactacatt

SEQ ID NO: 3387653 - DNA, 25 bp, Homo sapien
cttgtaaggttcctaggccagagca

SEQ ID NO: 3387654 - DNA, 25 bp, Homo sapien
tgtaaggttcctaggccagagcatt

SEQ ID NO: 3387655 - DNA, 25 bp, Homo sapien
aggttcctaggccagagcatttcac

SEQ ID NO: 3387656 - DNA, 25 bp, Homo sapien
cagtagtggattctaagcccagctc

SEQ ID NO: 3387657 - DNA, 25 bp, Homo sapien
ctggtaaccacaggaggatctgatt

SEQ ID NO: 3387658 - DNA, 25 bp, Homo sapien
agtggattctaagcccagctccctg

SEQ ID NO: 3387659 - DNA, 25 bp, Homo sapien
cacaggaggatctgattgggaaagc

SEQ ID NO: 3387660 - DNA, 25 bp, Homo sapien
agtgctgaggttgtctatggtgtcg

SEQ ID NO: 3387661 - DNA, 25 bp, Homo sapien
tgctgaggttgtctatggtgtcgct

SEQ ID NO: 3387662 - DNA, 25 bp, Homo sapien
cagtgctgaggttgtctatggtgtc

SEQ ID NO: 3387663 - DNA, 25 bp, Homo sapien
gtgctgaggttgtctatggtgtcgc

SEQ ID NO: 3387664 - DNA, 25 bp, Homo sapien
cacatccaggttttttcgagaggag

SEQ ID NO: 3387665 - DNA, 25 bp, Homo sapien
gaggaggcaggtgtgttggcataag

SEQ ID NO: 3387666 - DNA, 25 bp, Homo sapien
caggtgtgttggcataagagctgat

SEQ ID NO: 3387667 - DNA, 25 bp, Homo sapien
tccaggttttttcgagaggaggcag

SEQ ID NO: 3387668 - DNA, 25 bp, Homo sapien
tgctgcggcaaataagagacacaca

SEQ ID NO: 3387669 - DNA, 25 bp, Homo sapien
acaaattatgaaaccgaggtccagg

SEQ ID NO: 3387670 - DNA, 25 bp, Homo sapien
ctcctacagggattagacacgtgcc

SEQ ID NO: 3387671 - DNA, 25 bp, Homo sapien
gacacgtgcccctggatagcagtgg

SEQ ID NO: 3387672 - DNA, 25 bp, Homo sapien
cacccatggtggagcttacgatcca

SEQ ID NO: 3387673 - DNA, 25 bp, Homo sapien
ggaacacacgcttttcaggccacaa

SEQ ID NO: 3387674 - DNA, 25 bp, Homo sapien
ttacgatccagtgaaacaggcagag

SEQ ID NO: 3387675 - DNA, 25 bp, Homo sapien
gcaccacggagggtcagagaatctg

SEQ ID NO: 3387676 - DNA, 25 bp, Homo sapien
gtctgagcctccgtctgatttcttg

SEQ ID NO: 3387677 - DNA, 25 bp, Homo sapien
acctgtgagtgcttctcagcatcag

SEQ ID NO: 3387678 - DNA, 25 bp, Homo sapien
cgctgtctgagcctccgtctgattt

SEQ ID NO: 3387679 - DNA, 25 bp, Homo sapien
tccacctgtgagtgcttctcagcat

SEQ ID NO: 3387680 - DNA, 25 bp, Homo sapien
gaaggattccgcctccacttggaac

SEQ ID NO: 3387681 - DNA, 25 bp, Homo sapien
gactcgtcagacacatcagaaggat

SEQ ID NO: 3387682 - DNA, 25 bp, Homo sapien
gacaggattcttcttgcccgacgtg

SEQ ID NO: 3387683 - DNA, 25 bp, Homo sapien
gaaggcttcgtccttggcatggtga

SEQ ID NO: 3387684 - DNA, 25 bp, Homo sapien
aagcgctgtccctaacatgtccagg

SEQ ID NO: 3387685 - DNA, 25 bp, Homo sapien
gcaaagcagtctaaatttacccagg

SEQ ID NO: 3387686 - DNA, 25 bp, Homo sapien
tatagtctactaatgtaccgtgagc

SEQ ID NO: 3387687 - DNA, 25 bp, Homo sapien
caggataaagcaaagccagccaatc

SEQ ID NO: 3387688 - DNA, 25 bp, Homo sapien
aagccaagagccagctcatccatct

SEQ ID NO: 3387689 - DNA, 25 bp, Homo sapien
taagagagagatcagcaagattagc

SEQ ID NO: 3387690 - DNA, 25 bp, Homo sapien
agcaagattagcctgcaagccaaga

SEQ ID NO: 3387691 - DNA, 25 bp, Homo sapien
atctcgtctgtttaagatgctctcc

SEQ ID NO: 3387692 - DNA, 25 bp, Homo sapien
tgttggacttactgggcctcggcaa

SEQ ID NO: 3387693 - DNA, 25 bp, Homo sapien
tttggattcgtcaccactgctccgg

SEQ ID NO: 3387694 - DNA, 25 bp, Homo sapien
ggattcactttcaccgagttacagg

SEQ ID NO: 3387695 - DNA, 25 bp, Homo sapien
agactggtctgagccggactggaca

SEQ ID NO: 3387696 - DNA, 25 bp, Homo sapien
ggagctggtcaagatcactgcctgc

SEQ ID NO: 3387697 - DNA, 25 bp, Homo sapien
tctggacaaagaacagtgaactgct

SEQ ID NO: 3387698 - DNA, 25 bp, Homo sapien
tctagagcttccacccagtgtgaaa

SEQ ID NO: 3387699 - DNA, 25 bp, Homo sapien
ttcagactgacttggaattccggag

SEQ ID NO: 3387700 - DNA, 25 bp, Homo sapien
ctagcggagactggttgaggtccac

SEQ ID NO: 3387701 - DNA, 25 bp, Homo sapien
ggcacttgcttggtaggcttcccac

SEQ ID NO: 3387702 - DNA, 25 bp, Homo sapien
caggccatccttgctaactgcggag

SEQ ID NO: 3387703 - DNA, 25 bp, Homo sapien
tcagctgtggcgatgggcacttgct

SEQ ID NO: 3387704 - DNA, 25 bp, Homo sapien
acatttgggattcctaagctaatct

SEQ ID NO: 3387705 - DNA, 25 bp, Homo sapien
ttcgacatttgggattcctaagcta

SEQ ID NO: 3387706 - DNA, 25 bp, Homo sapien
ctattcgacatttgggattcctaag

SEQ ID NO: 3387707 - DNA, 25 bp, Homo sapien
catttgggattcctaagctaatctt

SEQ ID NO: 3387708 - DNA, 25 bp, Homo sapien
tctgcagaacttagggctagcagca

SEQ ID NO: 3387709 - DNA, 25 bp, Homo sapien
ctgtttcctgggcagagtacttctg

SEQ ID NO: 3387710 - DNA, 25 bp, Homo sapien
taatgagccaaacttcagcaaagga

SEQ ID NO: 3387711 - DNA, 25 bp, Homo sapien
cacaagagatgcaagcgagagcttc

SEQ ID NO: 3387712 - DNA, 25 bp, Homo sapien
gccccagatcaagtggcagggttta

SEQ ID NO: 3387713 - DNA, 25 bp, Homo sapien
cattatcatcgcaggaaatgggcac

SEQ ID NO: 3387714 - DNA, 25 bp, Homo sapien
aagtgttcctatcaaggtgcgggtc

SEQ ID NO: 3387715 - DNA, 25 bp, Homo sapien
aggcaaagtgttcctatcaaggtgc

SEQ ID NO: 3387716 - DNA, 25 bp, Homo sapien
agtgttcctatcaaggtgcgggtca

SEQ ID NO: 3387717 - DNA, 25 bp, Homo sapien
caaagtgttcctatcaaggtgcggg

SEQ ID NO: 3387718 - DNA, 25 bp, Homo sapien
gagtcacacagccaagctccaaagc

SEQ ID NO: 3387719 - DNA, 25 bp, Homo sapien
agccatgaaggagtcacacagccaa

SEQ ID NO: 3387720 - DNA, 25 bp, Homo sapien
tgaaggagtcacacagccaagctcc

SEQ ID NO: 3387721 - DNA, 25 bp, Homo sapien
tccaaagccacaacagatggcacag

SEQ ID NO: 3387722 - DNA, 25 bp, Homo sapien
aggaaagatgttgtcagtgtgttcg

SEQ ID NO: 3387723 - DNA, 25 bp, Homo sapien
tgttgtcagtgtgttcgtactggat

SEQ ID NO: 3387724 - DNA, 25 bp, Homo sapien
ttcgtactggatgttcatgtgtatg

SEQ ID NO: 3387725 - DNA, 25 bp, Homo sapien
tcagtgtgttcgtactggatgttca

SEQ ID NO: 3387726 - DNA, 25 bp, Homo sapien
catcttcttgcgtgcgaagctggga

SEQ ID NO: 3387727 - DNA, 25 bp, Homo sapien
attcttttgcatcttcttgcgtgcg

SEQ ID NO: 3387728 - DNA, 25 bp, Homo sapien
aattggcagcggtgtcctgaaggcc

SEQ ID NO: 3387729 - DNA, 25 bp, Homo sapien
cagaatgggaccgtaaccattcttt

SEQ ID NO: 3387730 - DNA, 25 bp, Homo sapien
aatcaaaaggttagacattcatgtc

SEQ ID NO: 3387731 - DNA, 25 bp, Homo sapien
gaatagaatcaaaaggttagacatt

SEQ ID NO: 3387732 - DNA, 25 bp, Homo sapien
tagaatcaaaaggttagacattcat

SEQ ID NO: 3387733 - DNA, 25 bp, Homo sapien
aaaaggttagacattcatgtctctg

SEQ ID NO: 3387734 - DNA, 25 bp, Homo sapien
gctattccggaagcggctgtcagtg

SEQ ID NO: 3387735 - DNA, 25 bp, Homo sapien
ggagctattccggaagcggctgtca

SEQ ID NO: 3387736 - DNA, 25 bp, Homo sapien
atactgcccatcagcattggagagg

SEQ ID NO: 3387737 - DNA, 25 bp, Homo sapien
tgtcagtgtatggatcatactgccc

SEQ ID NO: 3387738 - DNA, 25 bp, Homo sapien
gagcctgaacggctcatggttctgc

SEQ ID NO: 3387739 - DNA, 25 bp, Homo sapien
aatgagcctgaacggctcatggttc

SEQ ID NO: 3387740 - DNA, 25 bp, Homo sapien
ccatcccggaatgagcctgaacggc

SEQ ID NO: 3387741 - DNA, 25 bp, Homo sapien
cccggaatgagcctgaacggctcat

SEQ ID NO: 3387742 - DNA, 25 bp, Homo sapien
caaagttgtccacagaacttttctc

SEQ ID NO: 3387743 - DNA, 25 bp, Homo sapien
cttgcgtgatggaacaaaggaagag

SEQ ID NO: 3387744 - DNA, 25 bp, Homo sapien
gtgagctgtgaagacggctgacaaa

SEQ ID NO: 3387745 - DNA, 25 bp, Homo sapien
tcataccttgcgtgatggaacaaag

SEQ ID NO: 3387746 - DNA, 25 bp, Homo sapien
caaccagatgtatagtcctcagact

SEQ ID NO: 3387747 - DNA, 25 bp, Homo sapien
ggcaacaaagggacaaccagatgta

SEQ ID NO: 3387748 - DNA, 25 bp, Homo sapien
tagtcctcagactaggctccgtttg

SEQ ID NO: 3387749 - DNA, 25 bp, Homo sapien
gctccgtttgctccaagattcccca

SEQ ID NO: 3387750 - DNA, 25 bp, Homo sapien
cagactaggcaggagtttccaccgt

SEQ ID NO: 3387751 - DNA, 25 bp, Homo sapien
tgcaggtaacaatcccagactaggc

SEQ ID NO: 3387752 - DNA, 25 bp, Homo sapien
tggttaagtgacgtggccagacaca

SEQ ID NO: 3387753 - DNA, 25 bp, Homo sapien
agtgctgatggctaatggactgccc

SEQ ID NO: 3387754 - DNA, 25 bp, Homo sapien
acagatccttgattttctgagtcaa

SEQ ID NO: 3387755 - DNA, 25 bp, Homo sapien
gacagatccttgattttctgagtca

SEQ ID NO: 3387756 - DNA, 25 bp, Homo sapien
aggctgtgttccaaagagacagatc

SEQ ID NO: 3387757 - DNA, 25 bp, Homo sapien
agacagatccttgattttctgagtc

SEQ ID NO: 3387758 - DNA, 25 bp, Homo sapien
cagcttacgacacagacaatagtgg

SEQ ID NO: 3387759 - DNA, 25 bp, Homo sapien
taacagaggcctttaatgtcccaac

SEQ ID NO: 3387760 - DNA, 25 bp, Homo sapien
tagcaatgccctgcgttctagatct

SEQ ID NO: 3387761 - DNA, 25 bp, Homo sapien
tatatcagcatgtacatccaccctc

SEQ ID NO: 3387762 - DNA, 25 bp, Homo sapien
tagatggctgttatggaaccaaaaa

SEQ ID NO: 3387763 - DNA, 25 bp, Homo sapien
ggtgaattgatagatggctgttatg

SEQ ID NO: 3387764 - DNA, 25 bp, Homo sapien
attgatagatggctgttatggaacc

SEQ ID NO: 3387765 - DNA, 25 bp, Homo sapien
gatagatggctgttatggaaccaaa

SEQ ID NO: 3387766 - DNA, 25 bp, Homo sapien
atgtgctggaaaccaaggagagtga

SEQ ID NO: 3387767 - DNA, 25 bp, Homo sapien
aaaccaaggagagtgaggatccatg

SEQ ID NO: 3387768 - DNA, 25 bp, Homo sapien
accaaggagagtgaggatccatgaa

SEQ ID NO: 3387769 - DNA, 25 bp, Homo sapien
ggaaaccaaggagagtgaggatcca

SEQ ID NO: 3387770 - DNA, 25 bp, Homo sapien
tttgataaaggaaccccagttctca

SEQ ID NO: 3387771 - DNA, 25 bp, Homo sapien
ttgataaaggaaccccagttctcat

SEQ ID NO: 3387772 - DNA, 25 bp, Homo sapien
tgataaaggaaccccagttctcatg

SEQ ID NO: 3387773 - DNA, 25 bp, Homo sapien
ctgggtggtcaaagctgaaactttc

SEQ ID NO: 3387774 - DNA, 25 bp, Homo sapien
tcagctgggtggtcaaagctgaaac

SEQ ID NO: 3387775 - DNA, 25 bp, Homo sapien
ctgtcagctgggtggtcaaagctga

SEQ ID NO: 3387776 - DNA, 25 bp, Homo sapien
gctgggtggtcaaagctgaaacttt

SEQ ID NO: 3387777 - DNA, 25 bp, Homo sapien
ctggtcacagctgtgcatcagggct

SEQ ID NO: 3387778 - DNA, 25 bp, Homo sapien
cttagcacctttcgatatctcaggc

SEQ ID NO: 3387779 - DNA, 25 bp, Homo sapien
gctccaatacagacatggctgatgg

SEQ ID NO: 3387780 - DNA, 25 bp, Homo sapien
acctttcgatatctcaggctctgcc

SEQ ID NO: 3387781 - DNA, 25 bp, Homo sapien
tactttcacgacaccctcatatgca

SEQ ID NO: 3387782 - DNA, 25 bp, Homo sapien
gcactctcacaagcaaactgtactt

SEQ ID NO: 3387783 - DNA, 25 bp, Homo sapien
tctcacaagcaaactgtacttctga

SEQ ID NO: 3387784 - DNA, 25 bp, Homo sapien
ctgtctgtgtaaagagctctcggct

SEQ ID NO: 3387785 - DNA, 25 bp, Homo sapien
accaagactctgttcaaaggctgcc

SEQ ID NO: 3387786 - DNA, 25 bp, Homo sapien
cagctgtcatggtcagactctggag

SEQ ID NO: 3387787 - DNA, 25 bp, Homo sapien
attgtcatgttaccaagactctgtt

SEQ ID NO: 3387788 - DNA, 25 bp, Homo sapien
tcagctgtcatggtcagactctgga

SEQ ID NO: 3387789 - DNA, 25 bp, Homo sapien
tagcagctcaatggtttttcttaac

SEQ ID NO: 3387790 - DNA, 25 bp, Homo sapien
ctgggcagctgcgttctgtttcttt

SEQ ID NO: 3387791 - DNA, 25 bp, Homo sapien
gctcaggtgtgttaattactccatt

SEQ ID NO: 3387792 - DNA, 25 bp, Homo sapien
ttttcttaactcattcagttctgag

SEQ ID NO: 3387793 - DNA, 25 bp, Homo sapien
agacgctgtctgaggagtgctgcct

SEQ ID NO: 3387794 - DNA, 25 bp, Homo sapien
ggagtggctggtggcactgttgatg

SEQ ID NO: 3387795 - DNA, 25 bp, Homo sapien
gagtcactctctatgttgctgccca

SEQ ID NO: 3387796 - DNA, 25 bp, Homo sapien
tgctgcctgcggatgcggaggtctg

SEQ ID NO: 3387797 - DNA, 25 bp, Homo sapien
gggcatgttcctcccttctgaaagg

SEQ ID NO: 3387798 - DNA, 25 bp, Homo sapien
aagccagtgacagggaaagcttcgg

SEQ ID NO: 3387799 - DNA, 25 bp, Homo sapien
gggagtcctctacaattccagttct

SEQ ID NO: 3387800 - DNA, 25 bp, Homo sapien
tcggactttcagacacaacatggct

SEQ ID NO: 3387801 - DNA, 25 bp, Homo sapien
gatgcggatgaggttagtcatatca

SEQ ID NO: 3387802 - DNA, 25 bp, Homo sapien
cacggtgatggatgcggatgaggtt

SEQ ID NO: 3387803 - DNA, 25 bp, Homo sapien
gcttggtatctgatattaaagttgg

SEQ ID NO: 3387804 - DNA, 25 bp, Homo sapien
tagtcatatcaatggatgggttagc

SEQ ID NO: 3387805 - DNA, 25 bp, Homo sapien
tggaacctgtggacccattgtgcgg

SEQ ID NO: 3387806 - DNA, 25 bp, Homo sapien
cattgtgcggtaactttggtgagga

SEQ ID NO: 3387807 - DNA, 25 bp, Homo sapien
ggacttcttcttcccgaaagcttgc

SEQ ID NO: 3387808 - DNA, 25 bp, Homo sapien
ggcaaagaagaatccgtcatctcct

SEQ ID NO: 3387809 - DNA, 25 bp, Homo sapien
tacccatctggtaagctgctaaggc

SEQ ID NO: 3387810 - DNA, 25 bp, Homo sapien
taagtggacttagggtcagcggcac

SEQ ID NO: 3387811 - DNA, 25 bp, Homo sapien
tatactacaaagatctggcctctgg

SEQ ID NO: 3387812 - DNA, 25 bp, Homo sapien
taattctagacctggaacaccatgg

SEQ ID NO: 3387813 - DNA, 25 bp, Homo sapien
ttgcttgcacctgggcagcagaagt

SEQ ID NO: 3387814 - DNA, 25 bp, Homo sapien
cgagaccagattgaccaatacggtg

SEQ ID NO: 3387815 - DNA, 25 bp, Homo sapien
ttcgagaccagattgaccaatacgg

SEQ ID NO: 3387816 - DNA, 25 bp, Homo sapien
gcacctgggcagcagaagttgcagt

SEQ ID NO: 3387817 - DNA, 25 bp, Homo sapien
tacaggcgacagtaactgcacctgg

SEQ ID NO: 3387818 - DNA, 25 bp, Homo sapien
gcatgtgtgagagtcacaggcaact

SEQ ID NO: 3387819 - DNA, 25 bp, Homo sapien
tgctcacacaggttgctatacaaaa

SEQ ID NO: 3387820 - DNA, 25 bp, Homo sapien
tcttcagagcatctggaatagtgct

SEQ ID NO: 3387821 - DNA, 25 bp, Homo sapien
tacacctctaggaagtccaggctgg

SEQ ID NO: 3387822 - DNA, 25 bp, Homo sapien
taatggaaccaaagtagtgctccga

SEQ ID NO: 3387823 - DNA, 25 bp, Homo sapien
acctggatatggatgtctgctggca

SEQ ID NO: 3387824 - DNA, 25 bp, Homo sapien
gatagttctgccatggtcctgcaca

SEQ ID NO: 3387825 - DNA, 25 bp, Homo sapien
tcagggaccagggttattctctgca

SEQ ID NO: 3387826 - DNA, 25 bp, Homo sapien
cagggaccagggttattctctgcat

SEQ ID NO: 3387827 - DNA, 25 bp, Homo sapien
cctcagggaccagggttattctctg

SEQ ID NO: 3387828 - DNA, 25 bp, Homo sapien
tcctcagggaccagggttattctct

SEQ ID NO: 3387829 - DNA, 25 bp, Homo sapien
gtctgtccagcactccacgataagg

SEQ ID NO: 3387830 - DNA, 25 bp, Homo sapien
gaggagcttgcaaaaactggttcta

SEQ ID NO: 3387831 - DNA, 25 bp, Homo sapien
gctgacaccatgtgaggctcgtctg

SEQ ID NO: 3387832 - DNA, 25 bp, Homo sapien
cctacatgaatcttgaaggctcaga

SEQ ID NO: 3387833 - DNA, 25 bp, Homo sapien
actgagagcttctaagcggatatcc

SEQ ID NO: 3387834 - DNA, 25 bp, Homo sapien
catttcggagctgcatgacggtctc

SEQ ID NO: 3387835 - DNA, 25 bp, Homo sapien
gcggatatccgtcagcttcatctcc

SEQ ID NO: 3387836 - DNA, 25 bp, Homo sapien
gcatcctgttcatggcctcccggag

SEQ ID NO: 3387837 - DNA, 25 bp, Homo sapien
ctcagtgaggttcaagctgtgctgg

SEQ ID NO: 3387838 - DNA, 25 bp, Homo sapien
tgacttcagccgatcattctcagct

SEQ ID NO: 3387839 - DNA, 25 bp, Homo sapien
agactctgacttcagccgatcattc

SEQ ID NO: 3387840 - DNA, 25 bp, Homo sapien
ccaggctggttgactcagtgaggtt

SEQ ID NO: 3387841 - DNA, 25 bp, Homo sapien
ttccgagccgagcattcaccagtgt

SEQ ID NO: 3387842 - DNA, 25 bp, Homo sapien
tcaccagtgtcatccagcaacatgt

SEQ ID NO: 3387843 - DNA, 25 bp, Homo sapien
tgacaactatcttaacatgcctgcc

SEQ ID NO: 3387844 - DNA, 25 bp, Homo sapien
tttcctcctgaaagctgacaactat

SEQ ID NO: 3387845 - DNA, 25 bp, Homo sapien
ttgccactaactccaatgcagccaa

SEQ ID NO: 3387846 - DNA, 25 bp, Homo sapien
tttgaacagccgtctaaccacccca

SEQ ID NO: 3387847 - DNA, 25 bp, Homo sapien
tgcagccaataagaaagagatgtgg

SEQ ID NO: 3387848 - DNA, 25 bp, Homo sapien
acatcccacttcgtcttgccactaa

SEQ ID NO: 3387849 - DNA, 25 bp, Homo sapien
gctgtagccaagaacgctgtctgaa

SEQ ID NO: 3387850 - DNA, 25 bp, Homo sapien
tagctgactcactgggtcgacatga

SEQ ID NO: 3387851 - DNA, 25 bp, Homo sapien
tccaaccagatagccacaaggaagc

SEQ ID NO: 3387852 - DNA, 25 bp, Homo sapien
agtgttgctgcgcttgatttctcca

SEQ ID NO: 3387853 - DNA, 25 bp, Homo sapien
tcatgcgtgggcacaagcttcagca

SEQ ID NO: 3387854 - DNA, 25 bp, Homo sapien
tgtagaacgggactgcatccaaagc

SEQ ID NO: 3387855 - DNA, 25 bp, Homo sapien
gagtgactcctacagcctattgcaa

SEQ ID NO: 3387856 - DNA, 25 bp, Homo sapien
tcccagaattgcatggcagtgaagc

SEQ ID NO: 3387857 - DNA, 25 bp, Homo sapien
cctgaaatgttgttagctgggactc

SEQ ID NO: 3387858 - DNA, 25 bp, Homo sapien
tgtgaatactggcagacctagcctg

SEQ ID NO: 3387859 - DNA, 25 bp, Homo sapien
tgcaaggcgggatcatttgattccg

SEQ ID NO: 3387860 - DNA, 25 bp, Homo sapien
tcattaatcagggttgttggcttca

SEQ ID NO: 3387861 - DNA, 25 bp, Homo sapien
ggtaccactgctatccacactaaga

SEQ ID NO: 3387862 - DNA, 25 bp, Homo sapien
tggcatctgcccaaaccaaacctga

SEQ ID NO: 3387863 - DNA, 25 bp, Homo sapien
ctgagtcctgtctgtcacaaccctg

SEQ ID NO: 3387864 - DNA, 25 bp, Homo sapien
tgccatgaaggcaacaccactttta

SEQ ID NO: 3387865 - DNA, 25 bp, Homo sapien
aaggtggcgataaccccgtctgtca

SEQ ID NO: 3387866 - DNA, 25 bp, Homo sapien
tccgacggtgctctatcaggaggga

SEQ ID NO: 3387867 - DNA, 25 bp, Homo sapien
tatatactcagacagccggttggcc

SEQ ID NO: 3387868 - DNA, 25 bp, Homo sapien
cttatggtccacgttaaaggtggcg

SEQ ID NO: 3387869 - DNA, 25 bp, Homo sapien
tcactgttgcactggtcagcaaggt

SEQ ID NO: 3387870 - DNA, 25 bp, Homo sapien
catttgtggtacttgcagttgagca

SEQ ID NO: 3387871 - DNA, 25 bp, Homo sapien
agttgagcagcccattgaagatctc

SEQ ID NO: 3387872 - DNA, 25 bp, Homo sapien
tcccagagagctcacgtggtgtagg

SEQ ID NO: 3387873 - DNA, 25 bp, Homo sapien
tgaagttatggtgaagctgcaggtt

SEQ ID NO: 3387874 - DNA, 25 bp, Homo sapien
gagtcgaagaggtagcctggttcat

SEQ ID NO: 3387875 - DNA, 25 bp, Homo sapien
gttcattgtgccaattatgtaaggg

SEQ ID NO: 3387876 - DNA, 25 bp, Homo sapien
aagctgcaggttgggagtcgaagag

SEQ ID NO: 3387877 - DNA, 25 bp, Homo sapien
tgtgcttgatgtcaggcccggtgct

SEQ ID NO: 3387878 - DNA, 25 bp, Homo sapien
tgcaagcagacgtaccagctaggtg

SEQ ID NO: 3387879 - DNA, 25 bp, Homo sapien
gacaggtcatgtaacttttccagga

SEQ ID NO: 3387880 - DNA, 25 bp, Homo sapien
gacctcaggaaccaaagcacgttag

SEQ ID NO: 3387881 - DNA, 25 bp, Homo sapien
ttcacaggctccgtgtggttggcac

SEQ ID NO: 3387882 - DNA, 25 bp, Homo sapien
ctcaggaatcggccaaggaaaccct

SEQ ID NO: 3387883 - DNA, 25 bp, Homo sapien
acaggctccgtgtggttggcacaaa

SEQ ID NO: 3387884 - DNA, 25 bp, Homo sapien
acccttcacaggctccgtgtggttg

SEQ ID NO: 3387885 - DNA, 25 bp, Homo sapien
tccatattgcgcacccgcccactga

SEQ ID NO: 3387886 - DNA, 25 bp, Homo sapien
gacgtccgaggaactgtgagcctcc

SEQ ID NO: 3387887 - DNA, 25 bp, Homo sapien
agtcaatgatttttaccagctccat

SEQ ID NO: 3387888 - DNA, 25 bp, Homo sapien
acccgcccactgatctctgtttcca

SEQ ID NO: 3387889 - DNA, 25 bp, Homo sapien
tgaacgcaggtatactagccctgga

SEQ ID NO: 3387890 - DNA, 25 bp, Homo sapien
atggtccgagcacccttcacaggag

SEQ ID NO: 3387891 - DNA, 25 bp, Homo sapien
tttaaaaatggaagcccatgcgcag

SEQ ID NO: 3387892 - DNA, 25 bp, Homo sapien
tacattagcactcaaatgggcatgg

SEQ ID NO: 3387893 - DNA, 25 bp, Homo sapien
taatggaatagttccacaagtcggt

SEQ ID NO: 3387894 - DNA, 25 bp, Homo sapien
ctctcgagccgtccacatcgatggg

SEQ ID NO: 3387895 - DNA, 25 bp, Homo sapien
aagtcggtgaaccacactctcgagc

SEQ ID NO: 3387896 - DNA, 25 bp, Homo sapien
tagttccacaagtcggtgaaccaca

SEQ ID NO: 3387897 - DNA, 25 bp, Homo sapien
taacagaggttgcacataggcagtg

SEQ ID NO: 3387898 - DNA, 25 bp, Homo sapien
ccgtttcttgaaatgggtctgactc

SEQ ID NO: 3387899 - DNA, 25 bp, Homo sapien
cagtgaaattatgagggcttctctc

SEQ ID NO: 3387900 - DNA, 25 bp, Homo sapien
ggctggtcctggctcaataaaaccc

SEQ ID NO: 3387901 - DNA, 25 bp, Homo sapien
tggagtagccgtcgaagccgacatc

SEQ ID NO: 3387902 - DNA, 25 bp, Homo sapien
tgcttgcttgtcgatccctcccgag

SEQ ID NO: 3387903 - DNA, 25 bp, Homo sapien
atcctcaggccgtaactgcagcagg

SEQ ID NO: 3387904 - DNA, 25 bp, Homo sapien
agcgggtcaccttcagcatcactgg

SEQ ID NO: 3387905 - DNA, 25 bp, Homo sapien
tagcaacagccgaataaataagaag

SEQ ID NO: 3387906 - DNA, 25 bp, Homo sapien
tctgctatcggtaggagagatcaaa

SEQ ID NO: 3387907 - DNA, 25 bp, Homo sapien
catctcaatggccatgggactcata

SEQ ID NO: 3387908 - DNA, 25 bp, Homo sapien
tagtaggtaatagaggtggcatccc

SEQ ID NO: 3387909 - DNA, 25 bp, Homo sapien
ttacctaaggtatctgagccagcag

SEQ ID NO: 3387910 - DNA, 25 bp, Homo sapien
tccgagtgcaaagagccttcgctta

SEQ ID NO: 3387911 - DNA, 25 bp, Homo sapien
tgtggctgagcatccctgttcctgg

SEQ ID NO: 3387912 - DNA, 25 bp, Homo sapien
gggagcaccagttacaagcaaaggc

SEQ ID NO: 3387913 - DNA, 25 bp, Homo sapien
agagtggagaagcatgagctgcttt

SEQ ID NO: 3387914 - DNA, 25 bp, Homo sapien
gagtggagaagcatgagctgctttc

SEQ ID NO: 3387915 - DNA, 25 bp, Homo sapien
tccaagatgtcatcgtgatggctgt

SEQ ID NO: 3387916 - DNA, 25 bp, Homo sapien
gggctggagtagttggctgcctcct

SEQ ID NO: 3387917 - DNA, 25 bp, Homo sapien
ttggagtcgctgtcatagctctggg

SEQ ID NO: 3387918 - DNA, 25 bp, Homo sapien
gttgctgttggagtcgctgtcatag

SEQ ID NO: 3387919 - DNA, 25 bp, Homo sapien
ggtgttcccgcagctctaaggctgt

SEQ ID NO: 3387920 - DNA, 25 bp, Homo sapien
ctgcacccaggtcgaggctgaagga

SEQ ID NO: 3387921 - DNA, 25 bp, Homo sapien
gctcaggaagtcatcttcagggtga

SEQ ID NO: 3387922 - DNA, 25 bp, Homo sapien
ttctcgctgtggaaggaagcggtcc

SEQ ID NO: 3387923 - DNA, 25 bp, Homo sapien
gcgttgaacgtgaccaaagcaagca

SEQ ID NO: 3387924 - DNA, 25 bp, Homo sapien
ggtttccctgtgtcgtagctctgta

SEQ ID NO: 3387925 - DNA, 25 bp, Homo sapien
ggttagcaccagttctccctgtggc

SEQ ID NO: 3387926 - DNA, 25 bp, Homo sapien
tcaacggcgatgatcctttcccgag

SEQ ID NO: 3387927 - DNA, 25 bp, Homo sapien
tgtgtgttctaaaccctcaaggacg

SEQ ID NO: 3387928 - DNA, 25 bp, Homo sapien
tacctctcgggtaaggaaagcacca

SEQ ID NO: 3387929 - DNA, 25 bp, Homo sapien
gattggaaaactgcccacgaggaga

SEQ ID NO: 3387930 - DNA, 25 bp, Homo sapien
gcaagtcttttgcagggtgaccgca

SEQ ID NO: 3387931 - DNA, 25 bp, Homo sapien
aatttaagactggtacaatcatcag

SEQ ID NO: 3387932 - DNA, 25 bp, Homo sapien
caaaaacctcatgacaaatgaaaat

SEQ ID NO: 3387933 - DNA, 25 bp, Homo sapien
cataccgtacacaaaatactcaatt

SEQ ID NO: 3387934 - DNA, 25 bp, Homo sapien
gagggaggatggaaacataccgtac

SEQ ID NO: 3387935 - DNA, 25 bp, Homo sapien
tgttctttgtcacattttctttgct

SEQ ID NO: 3387936 - DNA, 25 bp, Homo sapien
cacattttctttgcttctgagacat

SEQ ID NO: 3387937 - DNA, 25 bp, Homo sapien
tgtcacattttctttgcttctgaga

SEQ ID NO: 3387938 - DNA, 25 bp, Homo sapien
gtgttctttgtcacattttctttgc

SEQ ID NO: 3387939 - DNA, 25 bp, Homo sapien
ttagagtaaaaaccagtggatccca

SEQ ID NO: 3387940 - DNA, 25 bp, Homo sapien
gaagagggcagtccaaccttcggct

SEQ ID NO: 3387941 - DNA, 25 bp, Homo sapien
tagagtaaaaaccagtggatcccat

SEQ ID NO: 3387942 - DNA, 25 bp, Homo sapien
cagtccaaccttcggctttagagta

SEQ ID NO: 3387943 - DNA, 25 bp, Homo sapien
cagccatcacagcagactggggggc

SEQ ID NO: 3387944 - DNA, 25 bp, Homo sapien
tgttcgctgtccttattgcatttcc

SEQ ID NO: 3387945 - DNA, 25 bp, Homo sapien
tatcatggagtgagccatgcctcca

SEQ ID NO: 3387946 - DNA, 25 bp, Homo sapien
tagggactagatctgtatcatggag

SEQ ID NO: 3387947 - DNA, 25 bp, Homo sapien
ttccccataggagcctagttctgtt

SEQ ID NO: 3387948 - DNA, 25 bp, Homo sapien
tccaggcacggctcgcactggagag

SEQ ID NO: 3387949 - DNA, 25 bp, Homo sapien
cgagacattccaggcacggctcgca

SEQ ID NO: 3387950 - DNA, 25 bp, Homo sapien
tcgcactggagagggccgcgctgct

SEQ ID NO: 3387951 - DNA, 25 bp, Homo sapien
cgctgctgctgcgaccgcacggcgc

SEQ ID NO: 3387952 - DNA, 25 bp, Homo sapien
tgcgattgattgcacataactgata

SEQ ID NO: 3387953 - DNA, 25 bp, Homo sapien
catgctttatgcgattgattgcaca

SEQ ID NO: 3387954 - DNA, 25 bp, Homo sapien
gtatgaatagcagccccgctctctt

SEQ ID NO: 3387955 - DNA, 25 bp, Homo sapien
tcagtaattagattaacaggcaacg

SEQ ID NO: 3387956 - DNA, 25 bp, Homo sapien
gataaacaagcatccacgctgccat

SEQ ID NO: 3387957 - DNA, 25 bp, Homo sapien
ggaacaacggacaactcctccttga

SEQ ID NO: 3387958 - DNA, 25 bp, Homo sapien
ccatcagattctggcgtctttcctt

SEQ ID NO: 3387959 - DNA, 25 bp, Homo sapien
taacccatcatccacactcaatggg

SEQ ID NO: 3387960 - DNA, 25 bp, Homo sapien
attctggtgcttgctaggtgatgca

SEQ ID NO: 3387961 - DNA, 25 bp, Homo sapien
cacagccaaaccaaacagggtgctc

SEQ ID NO: 3387962 - DNA, 25 bp, Homo sapien
caaacagggtgctccagcttctatg

SEQ ID NO: 3387963 - DNA, 25 bp, Homo sapien
catgactgagtgcagcatcacagct

SEQ ID NO: 3387964 - DNA, 25 bp, Homo sapien
gcctaaagttgcctctgtacgtatt

SEQ ID NO: 3387965 - DNA, 25 bp, Homo sapien
caaaatcatatttcggatgcacaca

SEQ ID NO: 3387966 - DNA, 25 bp, Homo sapien
tcctgtaaaaccacgcatagctttt

SEQ ID NO: 3387967 - DNA, 25 bp, Homo sapien
gaactctgatgcaaattatcctgta

SEQ ID NO: 3387968 - DNA, 25 bp, Homo sapien
ttatggagggtcagaaacagcacag

SEQ ID NO: 3387969 - DNA, 25 bp, Homo sapien
ttttatggagggtcagaaacagcac

SEQ ID NO: 3387970 - DNA, 25 bp, Homo sapien
tttatggagggtcagaaacagcaca

SEQ ID NO: 3387971 - DNA, 25 bp, Homo sapien
cagaaaaccctgaatgcgccccctt

SEQ ID NO: 3387972 - DNA, 25 bp, Homo sapien
tcttgtttgatcttcgttagccttt

SEQ ID NO: 3387973 - DNA, 25 bp, Homo sapien
gcccccttcgcccgtgattctgtct

SEQ ID NO: 3387974 - DNA, 25 bp, Homo sapien
gcggtcccttcctgacgtccagaaa

SEQ ID NO: 3387975 - DNA, 25 bp, Homo sapien
ggtgtttttgtcgagcggccagaat

SEQ ID NO: 3387976 - DNA, 25 bp, Homo sapien
caggcgctttctgcgcgagctgcat

SEQ ID NO: 3387977 - DNA, 25 bp, Homo sapien
tcctaagggagcgtccaggcgcttt

SEQ ID NO: 3387978 - DNA, 25 bp, Homo sapien
gcggccagaatgcaaacggtcctaa

SEQ ID NO: 3387979 - DNA, 25 bp, Homo sapien
gtttaataaatctgtatgacgttct

SEQ ID NO: 3387980 - DNA, 25 bp, Homo sapien
aataaatctgtatgacgttcttgtc

SEQ ID NO: 3387981 - DNA, 25 bp, Homo sapien
aaatctgtatgacgttcttgtcttc

SEQ ID NO: 3387982 - DNA, 25 bp, Homo sapien
ttaataaatctgtatgacgttcttg

SEQ ID NO: 3387983 - DNA, 25 bp, Homo sapien
ttttggtgaaaagcgcctctccctc

SEQ ID NO: 3387984 - DNA, 25 bp, Homo sapien
ctttggctgccttcgcaatgactcc

SEQ ID NO: 3387985 - DNA, 25 bp, Homo sapien
cagggcgccgcttcggtctttggct

SEQ ID NO: 3387986 - DNA, 25 bp, Homo sapien
gggtgctcttggcaaaaaacgcaac

SEQ ID NO: 3387987 - DNA, 25 bp, Homo sapien
gcgacacgggtgcatgatttcccag

SEQ ID NO: 3387988 - DNA, 25 bp, Homo sapien
tgagtatgatcaggccaaaggcccc

SEQ ID NO: 3387989 - DNA, 25 bp, Homo sapien
gcgcctcaaaactgcggcgtctgga

SEQ ID NO: 3387990 - DNA, 25 bp, Homo sapien
gccagtagacccaattatgcccttt

SEQ ID NO: 3387991 - DNA, 25 bp, Homo sapien
gctgaaataagaagggctgccggcc

SEQ ID NO: 3387992 - DNA, 25 bp, Homo sapien
agcaatgcacctcaaaccttttgtg

SEQ ID NO: 3387993 - DNA, 25 bp, Homo sapien
gaagcaaccggctcaaaagcagcaa

SEQ ID NO: 3387994 - DNA, 25 bp, Homo sapien
cgcaagggctttacgccaaagaaag

SEQ ID NO: 3387995 - DNA, 25 bp, Homo sapien
caatgatgcctttatgccggcgtgt

SEQ ID NO: 3387996 - DNA, 25 bp, Homo sapien
gctgttggttaactgagagaaagcc

SEQ ID NO: 3387997 - DNA, 25 bp, Homo sapien
tctgtcagaggcaatgaactgcact

SEQ ID NO: 3387998 - DNA, 25 bp, Homo sapien
gaaagccagggttgattgacagtat

SEQ ID NO: 3387999 - DNA, 25 bp, Homo sapien
caggaatgttgatgacggagcctgt

SEQ ID NO: 3388000 - DNA, 25 bp, Homo sapien
gaatgttgatgacggagcctgtgag

SEQ ID NO: 3388001 - DNA, 25 bp, Homo sapien
ggaatgttgatgacggagcctgtga

SEQ ID NO: 3388002 - DNA, 25 bp, Homo sapien
acaggaatgttgatgacggagcctg

SEQ ID NO: 3388003 - DNA, 25 bp, Homo sapien
ctttccgctcttcttatgggtttat

SEQ ID NO: 3388004 - DNA, 25 bp, Homo sapien
acagccaagcctctttcgaaaacaa

SEQ ID NO: 3388005 - DNA, 25 bp, Homo sapien
tccgctcttcttatgggtttattta

SEQ ID NO: 3388006 - DNA, 25 bp, Homo sapien
gctctggtctgctttccgctcttct

SEQ ID NO: 3388007 - DNA, 25 bp, Homo sapien
gctcttggaagcagcccggacattc

SEQ ID NO: 3388008 - DNA, 25 bp, Homo sapien
gatcaccccacgaaggtgactgggt

SEQ ID NO: 3388009 - DNA, 25 bp, Homo sapien
tctgtgaggtaacactccagtggtg

SEQ ID NO: 3388010 - DNA, 25 bp, Homo sapien
ccagaacccgcctgagactgagggt

SEQ ID NO: 3388011 - DNA, 25 bp, Homo sapien
gctctgctaccccagtttgcagcta

SEQ ID NO: 3388012 - DNA, 25 bp, Homo sapien
catggtaggcccgttgtaaatgtgt

SEQ ID NO: 3388013 - DNA, 25 bp, Homo sapien
gttctgggccgacacagctgctctg

SEQ ID NO: 3388014 - DNA, 25 bp, Homo sapien
gtaaatgtgttgttacatggtgcgt

SEQ ID NO: 3388015 - DNA, 25 bp, Homo sapien
ccttggatgcaactgcgatagggac

SEQ ID NO: 3388016 - DNA, 25 bp, Homo sapien
tgtaaagctgacactagtaatgatc

SEQ ID NO: 3388017 - DNA, 25 bp, Homo sapien
tattgttgggtattatgaccattcc

SEQ ID NO: 3388018 - DNA, 25 bp, Homo sapien
acgccattacctcctgtttgtaaag

SEQ ID NO: 3388019 - DNA, 25 bp, Homo sapien
gagggacattctggggaaattctta

SEQ ID NO: 3388020 - DNA, 25 bp, Homo sapien
ggctatgctgctttcgcagttctct

SEQ ID NO: 3388021 - DNA, 25 bp, Homo sapien
aattcttattctcaaggctatgctg

SEQ ID NO: 3388022 - DNA, 25 bp, Homo sapien
tattctcaaggctatgctgctttcg

SEQ ID NO: 3388023 - DNA, 25 bp, Homo sapien
gctgatctttcagccgggattaaat

SEQ ID NO: 3388024 - DNA, 25 bp, Homo sapien
cagactgggataaatgggccctgct

SEQ ID NO: 3388025 - DNA, 25 bp, Homo sapien
gacctttaatgaagcctgacagtac

SEQ ID NO: 3388026 - DNA, 25 bp, Homo sapien
gataaatgggccctgctggtgagca

SEQ ID NO: 3388027 - DNA, 25 bp, Homo sapien
tgccaaagtaacctacgggatgatg

SEQ ID NO: 3388028 - DNA, 25 bp, Homo sapien
aagattaagccgaaggtagtgttca

SEQ ID NO: 3388029 - DNA, 25 bp, Homo sapien
taagccgaaggtagtgttcagggaa

SEQ ID NO: 3388030 - DNA, 25 bp, Homo sapien
gatgaaaatatggaccgatgtagcc

SEQ ID NO: 3388031 - DNA, 25 bp, Homo sapien
gcttggtcttccgggtggcctcgcg

SEQ ID NO: 3388032 - DNA, 25 bp, Homo sapien
cttggtcttccgggtggcctcgcgg

SEQ ID NO: 3388033 - DNA, 25 bp, Homo sapien
cggcttggtcttccgggtggcctcg

SEQ ID NO: 3388034 - DNA, 25 bp, Homo sapien
ttggtcttccgggtggcctcgcggc

SEQ ID NO: 3388035 - DNA, 25 bp, Homo sapien
gggggttggaggcgacggagacagc

SEQ ID NO: 3388036 - DNA, 25 bp, Homo sapien
gggtcctcacgacgcagcaggagca

SEQ ID NO: 3388037 - DNA, 25 bp, Homo sapien
ccggccccgggtcctcacgacgcag

SEQ ID NO: 3388038 - DNA, 25 bp, Homo sapien
ggccccgggtcctcacgacgcagca

SEQ ID NO: 3388039 - DNA, 25 bp, Homo sapien
cccgggtcctcacgacgcagcagga

SEQ ID NO: 3388040 - DNA, 25 bp, Homo sapien
gaggatattgttctccgcagtccgg

SEQ ID NO: 3388041 - DNA, 25 bp, Homo sapien
gaaataacatcgacagatgccggtc

SEQ ID NO: 3388042 - DNA, 25 bp, Homo sapien
gactgccagtccttatcccgaggaa

SEQ ID NO: 3388043 - DNA, 25 bp, Homo sapien
caggtgccacaagctgctggcatca

SEQ ID NO: 3388044 - DNA, 25 bp, Homo sapien
tataagcttcctcgtcgaaggtgag

SEQ ID NO: 3388045 - DNA, 25 bp, Homo sapien
cgctggcgcccaaaataaagacgga

SEQ ID NO: 3388046 - DNA, 25 bp, Homo sapien
tcttcccgaagcttcgacagggctt

SEQ ID NO: 3388047 - DNA, 25 bp, Homo sapien
aggtgagcttcctccggccaatgag

SEQ ID NO: 3388048 - DNA, 25 bp, Homo sapien
gaccttgaaaggcagaggcgtagtc

SEQ ID NO: 3388049 - DNA, 25 bp, Homo sapien
gcaacagaatccaacatcatgacct

SEQ ID NO: 3388050 - DNA, 25 bp, Homo sapien
ggcgtagtcatccaacttttcaaag

SEQ ID NO: 3388051 - DNA, 25 bp, Homo sapien
acttttcaaagtccaccacttcttg

SEQ ID NO: 3388052 - DNA, 25 bp, Homo sapien
tccttgatattactggccagcaaaa

SEQ ID NO: 3388053 - DNA, 25 bp, Homo sapien
aaagaatccttgatattactggcca

SEQ ID NO: 3388054 - DNA, 25 bp, Homo sapien
gatattactggccagcaaaaaggga

SEQ ID NO: 3388055 - DNA, 25 bp, Homo sapien
gaatccttgatattactggccagca

SEQ ID NO: 3388056 - DNA, 25 bp, Homo sapien
tatttacgacgtctccagcactggg

SEQ ID NO: 3388057 - DNA, 25 bp, Homo sapien
ggcctgaactcaaggattactttga

SEQ ID NO: 3388058 - DNA, 25 bp, Homo sapien
aaaggataccaaaggttagtgcagc

SEQ ID NO: 3388059 - DNA, 25 bp, Homo sapien
gacatcatggtttcccttagtcagg

SEQ ID NO: 3388060 - DNA, 25 bp, Homo sapien
caaaaccaggttggcacttgagaca

SEQ ID NO: 3388061 - DNA, 25 bp, Homo sapien
caccaaaaccaggttggcacttgag

SEQ ID NO: 3388062 - DNA, 25 bp, Homo sapien
gcttttggagggcacaccacttgtg

SEQ ID NO: 3388063 - DNA, 25 bp, Homo sapien
tttggagggcacaccacttgtgact

SEQ ID NO: 3388064 - DNA, 25 bp, Homo sapien
caattctaatgtggtagggtctccg

SEQ ID NO: 3388065 - DNA, 25 bp, Homo sapien
cactccccaggcactaagagaacaa

SEQ ID NO: 3388066 - DNA, 25 bp, Homo sapien
tagtaaagaatgcatcctcaaacgt

SEQ ID NO: 3388067 - DNA, 25 bp, Homo sapien
tccgagtatgggtgaggacactccc

SEQ ID NO: 3388068 - DNA, 25 bp, Homo sapien
ctttagcagcaagactggactgcaa

SEQ ID NO: 3388069 - DNA, 25 bp, Homo sapien
tagcagcaagactggactgcaataa

SEQ ID NO: 3388070 - DNA, 25 bp, Homo sapien
ggactgcaataaggaaacaaggaca

SEQ ID NO: 3388071 - DNA, 25 bp, Homo sapien
ctgcaataaggaaacaaggacaatg

SEQ ID NO: 3388072 - DNA, 25 bp, Homo sapien
gaggcctagaaggatggagatctaa

SEQ ID NO: 3388073 - DNA, 25 bp, Homo sapien
tacatgaaagtcaggcttagaccct

SEQ ID NO: 3388074 - DNA, 25 bp, Homo sapien
agattactacttggcttgggtagca

SEQ ID NO: 3388075 - DNA, 25 bp, Homo sapien
taaaatgtgtccaagcaatacatga

SEQ ID NO: 3388076 - DNA, 25 bp, Homo sapien
tctcggtcaacacgaacaaatccct

SEQ ID NO: 3388077 - DNA, 25 bp, Homo sapien
tgcagacttcagcacataatctcgg

SEQ ID NO: 3388078 - DNA, 25 bp, Homo sapien
taacttgtagatataaaaaattgct

SEQ ID NO: 3388079 - DNA, 25 bp, Homo sapien
gctcctttagaggatagcaagttga

SEQ ID NO: 3388080 - DNA, 25 bp, Homo sapien
aaagagataccatagcaggctgaga

SEQ ID NO: 3388081 - DNA, 25 bp, Homo sapien
gggtcatgtactatgcctaaactgt

SEQ ID NO: 3388082 - DNA, 25 bp, Homo sapien
taaaaaccctgcattcctaggctca

SEQ ID NO: 3388083 - DNA, 25 bp, Homo sapien
tgttacaagtttggcccctggcttg

SEQ ID NO: 3388084 - DNA, 25 bp, Homo sapien
tagtatatacacagaactctgtaac

SEQ ID NO: 3388085 - DNA, 25 bp, Homo sapien
agtatatacacagaactctgtaacc

SEQ ID NO: 3388086 - DNA, 25 bp, Homo sapien
taaatacagagtaacgatcaaattt

SEQ ID NO: 3388087 - DNA, 25 bp, Homo sapien
gcctaaatacagagtaacgatcaaa

SEQ ID NO: 3388088 - DNA, 25 bp, Homo sapien
aatacagagtaacgatcaaatttta

SEQ ID NO: 3388089 - DNA, 25 bp, Homo sapien
tacagagtaacgatcaaattttaat

SEQ ID NO: 3388090 - DNA, 25 bp, Homo sapien
tcagcattgctctaaccacggtcac

SEQ ID NO: 3388091 - DNA, 25 bp, Homo sapien
gagccaaagaactttctaaccagcc

SEQ ID NO: 3388092 - DNA, 25 bp, Homo sapien
agccattcacctgggcgagattctt

SEQ ID NO: 3388093 - DNA, 25 bp, Homo sapien
acagaatgcccactggcccaagagt

SEQ ID NO: 3388094 - DNA, 25 bp, Homo sapien
gccatgcgctttccccaggtcatgg

SEQ ID NO: 3388095 - DNA, 25 bp, Homo sapien
atggcttgagagagccatgcgcttt

SEQ ID NO: 3388096 - DNA, 25 bp, Homo sapien
ttgagagagccatgcgctttcccca

SEQ ID NO: 3388097 - DNA, 25 bp, Homo sapien
agagccatgcgctttccccaggtca

SEQ ID NO: 3388098 - DNA, 25 bp, Homo sapien
ttccaaagctccctgagtgatctat

SEQ ID NO: 3388099 - DNA, 25 bp, Homo sapien
gaccctgaaattaccgatttggtga

SEQ ID NO: 3388100 - DNA, 25 bp, Homo sapien
tatatgtataaccaggctctgaacc

SEQ ID NO: 3388101 - DNA, 25 bp, Homo sapien
gagtgatctatatgtataaccaggc

SEQ ID NO: 3388102 - DNA, 25 bp, Homo sapien
cagattattgtgcccacaccccaga

SEQ ID NO: 3388103 - DNA, 25 bp, Homo sapien
cacaccccagaaattttgattcaag

SEQ ID NO: 3388104 - DNA, 25 bp, Homo sapien
gcatcaggggaagtataaacaaaga

SEQ ID NO: 3388105 - DNA, 25 bp, Homo sapien
tggcatcggaaccagtggcatcagg

SEQ ID NO: 3388106 - DNA, 25 bp, Homo sapien
tgcacggtcataaggttttcatggc

SEQ ID NO: 3388107 - DNA, 25 bp, Homo sapien
ttttagagcagagctcatttgcacg

SEQ ID NO: 3388108 - DNA, 25 bp, Homo sapien
cagagctcatttgcacggtcataag

SEQ ID NO: 3388109 - DNA, 25 bp, Homo sapien
catttgcacggtcataaggttttca

SEQ ID NO: 3388110 - DNA, 25 bp, Homo sapien
tagtaaaggcacaatgtttacttac

SEQ ID NO: 3388111 - DNA, 25 bp, Homo sapien
ttacataaagaagtagtaaaggcac

SEQ ID NO: 3388112 - DNA, 25 bp, Homo sapien
tttatttaatcctccccatgtatta

SEQ ID NO: 3388113 - DNA, 25 bp, Homo sapien
tataagcttaggtatataacttcta

SEQ ID NO: 3388114 - DNA, 25 bp, Homo sapien
tattagctgctattatatcacccca

SEQ ID NO: 3388115 - DNA, 25 bp, Homo sapien
tgcatatcacactacatgggcattt

SEQ ID NO: 3388116 - DNA, 25 bp, Homo sapien
gcatatcacactacatgggcatttt

SEQ ID NO: 3388117 - DNA, 25 bp, Homo sapien
tgggcccatccaacttttcccttca

SEQ ID NO: 3388118 - DNA, 25 bp, Homo sapien
tcttttttggtgataccccacagca

SEQ ID NO: 3388119 - DNA, 25 bp, Homo sapien
gcactgaacaataagggtaagtaag

SEQ ID NO: 3388120 - DNA, 25 bp, Homo sapien
ttggtgataccccacagcactgaac

SEQ ID NO: 3388121 - DNA, 25 bp, Homo sapien
cactgaacaataagggtaagtaagg

SEQ ID NO: 3388122 - DNA, 25 bp, Homo sapien
cctgtcctctgtgcgcccctttttc

SEQ ID NO: 3388123 - DNA, 25 bp, Homo sapien
atcggcccatgacgccctctggtgg

SEQ ID NO: 3388124 - DNA, 25 bp, Homo sapien
tttttcctgggatgagcggttagcg

SEQ ID NO: 3388125 - DNA, 25 bp, Homo sapien
ccaaacgctggaggctcggctggtt

SEQ ID NO: 3388126 - DNA, 25 bp, Homo sapien
gagagcgggggctccgcctcctcct

SEQ ID NO: 3388127 - DNA, 25 bp, Homo sapien
cgccgtgcgggtcacgtgaggtggg

SEQ ID NO: 3388128 - DNA, 25 bp, Homo sapien
cctcgaggcgccgtgcgggtcacgt

SEQ ID NO: 3388129 - DNA, 25 bp, Homo sapien
tccggcctcgaggcgccgtgcgggt

SEQ ID NO: 3388130 - DNA, 25 bp, Homo sapien
actccaggaacgagcgcgagcacaa

SEQ ID NO: 3388131 - DNA, 25 bp, Homo sapien
cgccgactccaggaacgagcgcgag

SEQ ID NO: 3388132 - DNA, 25 bp, Homo sapien
gagcgcgagcacaagcgcgaacccg

SEQ ID NO: 3388133 - DNA, 25 bp, Homo sapien
ttcgcagaccgccgggaacgccgaa

SEQ ID NO: 3388134 - DNA, 25 bp, Homo sapien
cgagagcccggcgtgtctgggggcg

SEQ ID NO: 3388135 - DNA, 25 bp, Homo sapien
ccgagagcccggcgtgtctgggggc

SEQ ID NO: 3388136 - DNA, 25 bp, Homo sapien
cccgagagcccggcgtgtctggggg

SEQ ID NO: 3388137 - DNA, 25 bp, Homo sapien
tgatccctgcgagccccccaccctg

SEQ ID NO: 3388138 - DNA, 25 bp, Homo sapien
ggctggacgagccgggtgctgaggg

SEQ ID NO: 3388139 - DNA, 25 bp, Homo sapien
ctccttcatgatccctgcgagcccc

SEQ ID NO: 3388140 - DNA, 25 bp, Homo sapien
gagggtcttccaccggccccacagc

SEQ ID NO: 3388141 - DNA, 25 bp, Homo sapien
acaacaatcagatcggcctcggaca

SEQ ID NO: 3388142 - DNA, 25 bp, Homo sapien
aggtgacgatgggctctcctccgcc

SEQ ID NO: 3388143 - DNA, 25 bp, Homo sapien
atcagatcggcctcggacaccggtg

SEQ ID NO: 3388144 - DNA, 25 bp, Homo sapien
acacaacaatcagatcggcctcgga

SEQ ID NO: 3388145 - DNA, 25 bp, Homo sapien
ccgtgggggagatctgcatcgtcct

SEQ ID NO: 3388146 - DNA, 25 bp, Homo sapien
gggagatctgcatcgtcctcatcct

SEQ ID NO: 3388147 - DNA, 25 bp, Homo sapien
ctgtccgacagttctggcaggtcct

SEQ ID NO: 3388148 - DNA, 25 bp, Homo sapien
tcgtccccgctgtccgacagttctg

SEQ ID NO: 3388149 - DNA, 25 bp, Homo sapien
ctatcacagccacggtaccactggt

SEQ ID NO: 3388150 - DNA, 25 bp, Homo sapien
ttacagctggcatactccccaagtg

SEQ ID NO: 3388151 - DNA, 25 bp, Homo sapien
tccacaaatgtttaccgagataggt

SEQ ID NO: 3388152 - DNA, 25 bp, Homo sapien
aatctgaaggctacttaaagacagg

SEQ ID NO: 3388153 - DNA, 25 bp, Homo sapien
gctcagacttacagtgtgaaaatgt

SEQ ID NO: 3388154 - DNA, 25 bp, Homo sapien
catgctgtcaatattaaactgatgc

SEQ ID NO: 3388155 - DNA, 25 bp, Homo sapien
gaaccatgctgtcaatattaaactg

SEQ ID NO: 3388156 - DNA, 25 bp, Homo sapien
aaactgatgctcagacttacagtgt

SEQ ID NO: 3388157 - DNA, 25 bp, Homo sapien
taaaatttattagcttaatgtatcc

SEQ ID NO: 3388158 - DNA, 25 bp, Homo sapien
ttattagcttaatgtatccataaaa

SEQ ID NO: 3388159 - DNA, 25 bp, Homo sapien
aatttattagcttaatgtatccata

SEQ ID NO: 3388160 - DNA, 25 bp, Homo sapien
ataaaatttattagcttaatgtatc

SEQ ID NO: 3388161 - DNA, 25 bp, Homo sapien
cactgggttgtatatggaattcatg

SEQ ID NO: 3388162 - DNA, 25 bp, Homo sapien
aggcactgggttgtatatggaattc

SEQ ID NO: 3388163 - DNA, 25 bp, Homo sapien
caaggcactgggttgtatatggaat

SEQ ID NO: 3388164 - DNA, 25 bp, Homo sapien
ggcactgggttgtatatggaattca

SEQ ID NO: 3388165 - DNA, 25 bp, Homo sapien
cagtctaattcaaaggcctaaacca

SEQ ID NO: 3388166 - DNA, 25 bp, Homo sapien
gaagaattactgcaaaggctgacca

SEQ ID NO: 3388167 - DNA, 25 bp, Homo sapien
aatcacctggatacttctttcgggc

SEQ ID NO: 3388168 - DNA, 25 bp, Homo sapien
tgtataaacctcacataagagctcc

SEQ ID NO: 3388169 - DNA, 25 bp, Homo sapien
tgtttggccagtttctgttttgctt

SEQ ID NO: 3388170 - DNA, 25 bp, Homo sapien
gtattttgatttcaaaattcttcaa

SEQ ID NO: 3388171 - DNA, 25 bp, Homo sapien
ctcattttgtattttgatttcaaaa

SEQ ID NO: 3388172 - DNA, 25 bp, Homo sapien
aaaattcttcaaactgtttggccag

SEQ ID NO: 3388173 - DNA, 25 bp, Homo sapien
gtatgagaagggtactgacaccggt

SEQ ID NO: 3388174 - DNA, 25 bp, Homo sapien
tgagaagggtactgacaccggttca

SEQ ID NO: 3388175 - DNA, 25 bp, Homo sapien
agggtactgacaccggttcataaag

SEQ ID NO: 3388176 - DNA, 25 bp, Homo sapien
gacaccggttcataaagatcttcta

SEQ ID NO: 3388177 - DNA, 25 bp, Homo sapien
cctggcttccatatgtttcaatttt

SEQ ID NO: 3388178 - DNA, 25 bp, Homo sapien
ctggcttccatatgtttcaattttt

SEQ ID NO: 3388179 - DNA, 25 bp, Homo sapien
ctctggccaatgcggcttcagcaga

SEQ ID NO: 3388180 - DNA, 25 bp, Homo sapien
tctggccaatgcggcttcagcagac

SEQ ID NO: 3388181 - DNA, 25 bp, Homo sapien
gaaaaaactgtcactgtatatctgg

SEQ ID NO: 3388182 - DNA, 25 bp, Homo sapien
catactacaccataattacattctg

SEQ ID NO: 3388183 - DNA, 25 bp, Homo sapien
gggttcatactacaccataattaca

SEQ ID NO: 3388184 - DNA, 25 bp, Homo sapien
aaaaactgtcactgtatatctggtt

SEQ ID NO: 3388185 - DNA, 25 bp, Homo sapien
gtgcatcacaaaatcctgagcaaat

SEQ ID NO: 3388186 - DNA, 25 bp, Homo sapien
ctgtgtgcatcacaaaatcctgagc

SEQ ID NO: 3388187 - DNA, 25 bp, Homo sapien
tgtgtgcatcacaaaatcctgagca

SEQ ID NO: 3388188 - DNA, 25 bp, Homo sapien
catcacaaaatcctgagcaaattgt

SEQ ID NO: 3388189 - DNA, 25 bp, Homo sapien
tagcatttcttcatgtatcccataa

SEQ ID NO: 3388190 - DNA, 25 bp, Homo sapien
tatcccataatgcccgtatgagctg

SEQ ID NO: 3388191 - DNA, 25 bp, Homo sapien
atcctcctggaggtccgcaatgaca

SEQ ID NO: 3388192 - DNA, 25 bp, Homo sapien
tatgagctgaaataaacaccatcct

SEQ ID NO: 3388193 - DNA, 25 bp, Homo sapien
ggtatatgaaatctcggtagctttc

SEQ ID NO: 3388194 - DNA, 25 bp, Homo sapien
ctcggtagctttctgttcgtatttt

SEQ ID NO: 3388195 - DNA, 25 bp, Homo sapien
gattttggtatatgaaatctcggta

SEQ ID NO: 3388196 - DNA, 25 bp, Homo sapien
ggtagctttctgttcgtattttgtc

SEQ ID NO: 3388197 - DNA, 25 bp, Homo sapien
ccttcatgacctagggagtccagtg

SEQ ID NO: 3388198 - DNA, 25 bp, Homo sapien
ggcaaagaaataggtccagggtcac

SEQ ID NO: 3388199 - DNA, 25 bp, Homo sapien
tgctgtgtaccaaagacaagctggc

SEQ ID NO: 3388200 - DNA, 25 bp, Homo sapien
tcttgaacacatggcctgtctgggt

SEQ ID NO: 3388201 - DNA, 25 bp, Homo sapien
tataatatccattgcctggtaaagt

SEQ ID NO: 3388202 - DNA, 25 bp, Homo sapien
gctttagcagcaaacatagagagaa

SEQ ID NO: 3388203 - DNA, 25 bp, Homo sapien
tcttcgccccagctttagcagcaaa

SEQ ID NO: 3388204 - DNA, 25 bp, Homo sapien
ttcagattgatcaactccaagaacc

SEQ ID NO: 3388205 - DNA, 25 bp, Homo sapien
aattagtgtaatagtatcttcaagt

SEQ ID NO: 3388206 - DNA, 25 bp, Homo sapien
atccactcagatatgataacatcta

SEQ ID NO: 3388207 - DNA, 25 bp, Homo sapien
catccactcagatatgataacatct

SEQ ID NO: 3388208 - DNA, 25 bp, Homo sapien
tccactcagatatgataacatctac

SEQ ID NO: 3388209 - DNA, 25 bp, Homo sapien
ctccagtgactccagtgactgcctt

SEQ ID NO: 3388210 - DNA, 25 bp, Homo sapien
tccagtgactccagtgactgccttc

SEQ ID NO: 3388211 - DNA, 25 bp, Homo sapien
ccagtgactccagtgactgccttcc

SEQ ID NO: 3388212 - DNA, 25 bp, Homo sapien
ctttgcataaaggacagaatctaac

SEQ ID NO: 3388213 - DNA, 25 bp, Homo sapien
ctaacatagactcaaacagaagaaa

SEQ ID NO: 3388214 - DNA, 25 bp, Homo sapien
tgttctttgcataaaggacagaatc

SEQ ID NO: 3388215 - DNA, 25 bp, Homo sapien
ggacagaatctaacatagactcaaa

SEQ ID NO: 3388216 - DNA, 25 bp, Homo sapien
taataccacaaggttctgaaataag

SEQ ID NO: 3388217 - DNA, 25 bp, Homo sapien
gctacaaggctgatagtgcaaatgt

SEQ ID NO: 3388218 - DNA, 25 bp, Homo sapien
gagtcttcggatctaaaacttccac

SEQ ID NO: 3388219 - DNA, 25 bp, Homo sapien
gcatgtttattcacatcactcactg

SEQ ID NO: 3388220 - DNA, 25 bp, Homo sapien
tgtacactcctatcctgagccaaag

SEQ ID NO: 3388221 - DNA, 25 bp, Homo sapien
tccagccaggagtagatcataaccc

SEQ ID NO: 3388222 - DNA, 25 bp, Homo sapien
tcactgtaccagagcactgaagtcg

SEQ ID NO: 3388223 - DNA, 25 bp, Homo sapien
taaagaccgtcatcagctgagtaga

SEQ ID NO: 3388224 - DNA, 25 bp, Homo sapien
tctgagatagacgtcgtatggcaat

SEQ ID NO: 3388225 - DNA, 25 bp, Homo sapien
aaattccaaatctgagatagacgtc

SEQ ID NO: 3388226 - DNA, 25 bp, Homo sapien
aaatctgagatagacgtcgtatggc

SEQ ID NO: 3388227 - DNA, 25 bp, Homo sapien
ttccaaatctgagatagacgtcgta

SEQ ID NO: 3388228 - DNA, 25 bp, Homo sapien
ctttcaatatcttcgctaattcttc

SEQ ID NO: 3388229 - DNA, 25 bp, Homo sapien
actttcaatatcttcgctaattctt

SEQ ID NO: 3388230 - DNA, 25 bp, Homo sapien
tcaatatcttcgctaattcttctaa

SEQ ID NO: 3388231 - DNA, 25 bp, Homo sapien
tagggcccatgtagtgggtaaagta

SEQ ID NO: 3388232 - DNA, 25 bp, Homo sapien
tgggtaaagtagcaaaaatgccaca

SEQ ID NO: 3388233 - DNA, 25 bp, Homo sapien
tgcccaatgctagggcccatgtagt

SEQ ID NO: 3388234 - DNA, 25 bp, Homo sapien
gtgggtaaagtagcaaaaatgccac

SEQ ID NO: 3388235 - DNA, 25 bp, Homo sapien
gaaaacactagactgactaaacatt

SEQ ID NO: 3388236 - DNA, 25 bp, Homo sapien
ggatgacttctaattaggatgtaga

SEQ ID NO: 3388237 - DNA, 25 bp, Homo sapien
gatgtagaaggttgcaaaagaccct

SEQ ID NO: 3388238 - DNA, 25 bp, Homo sapien
agccttcaactcctatcaagtagat

SEQ ID NO: 3388239 - DNA, 25 bp, Homo sapien
aacagcctcaaggaatagcataggt

SEQ ID NO: 3388240 - DNA, 25 bp, Homo sapien
tatgatgctactccactggatttcc

SEQ ID NO: 3388241 - DNA, 25 bp, Homo sapien
gctttgttaaagtgtcagcagcata

SEQ ID NO: 3388242 - DNA, 25 bp, Homo sapien
tatatctgcatatgatgctactcca

SEQ ID NO: 3388243 - DNA, 25 bp, Homo sapien
ttgatatcaatgattactgtttcct

SEQ ID NO: 3388244 - DNA, 25 bp, Homo sapien
gcttaccactacaaagaggaagatt

SEQ ID NO: 3388245 - DNA, 25 bp, Homo sapien
ccctacctgtatgataaagacaaac

SEQ ID NO: 3388246 - DNA, 25 bp, Homo sapien
ggcaaagagagtttgtgtatgaaaa

SEQ ID NO: 3388247 - DNA, 25 bp, Homo sapien
cattttatgtggcttaccactacaa

SEQ ID NO: 3388248 - DNA, 25 bp, Homo sapien
caaaagggctacacaagtctttcag

SEQ ID NO: 3388249 - DNA, 25 bp, Homo sapien
gggtcccactttgtattcctatcca

SEQ ID NO: 3388250 - DNA, 25 bp, Homo sapien
tccacgtgagcaatatcaaaagggc

SEQ ID NO: 3388251 - DNA, 25 bp, Homo sapien
gcaaagtcctgcaaaactattaggg

SEQ ID NO: 3388252 - DNA, 25 bp, Homo sapien
tagacagcattcgtacagttgagaa

SEQ ID NO: 3388253 - DNA, 25 bp, Homo sapien
gacagcattcgtacagttgagaaag

SEQ ID NO: 3388254 - DNA, 25 bp, Homo sapien
agcattcgtacagttgagaaagtgg

SEQ ID NO: 3388255 - DNA, 25 bp, Homo sapien
cagcattcgtacagttgagaaagtg

SEQ ID NO: 3388256 - DNA, 25 bp, Homo sapien
gttgtggcaattcttctcaaaatat

SEQ ID NO: 3388257 - DNA, 25 bp, Homo sapien
atatatcaaagtagccagcaattgc

SEQ ID NO: 3388258 - DNA, 25 bp, Homo sapien
cctgttgtggcaattcttctcaaaa

SEQ ID NO: 3388259 - DNA, 25 bp, Homo sapien
caaaatatatatcaaagtagccagc

SEQ ID NO: 3388260 - DNA, 25 bp, Homo sapien
ctctgagggcccgtagagaacacga

SEQ ID NO: 3388261 - DNA, 25 bp, Homo sapien
gctctgagggcccgtagagaacacg

SEQ ID NO: 3388262 - DNA, 25 bp, Homo sapien
tgctctgagggcccgtagagaacac

SEQ ID NO: 3388263 - DNA, 25 bp, Homo sapien
tctgagggcccgtagagaacacgac

SEQ ID NO: 3388264 - DNA, 25 bp, Homo sapien
ctccttcacgatattctataaatac

SEQ ID NO: 3388265 - DNA, 25 bp, Homo sapien
taggctagagtgcttggtatttccc

SEQ ID NO: 3388266 - DNA, 25 bp, Homo sapien
gcttcttccaaggactaggctagag

SEQ ID NO: 3388267 - DNA, 25 bp, Homo sapien
ggtatttccccataagctactgtgg

SEQ ID NO: 3388268 - DNA, 25 bp, Homo sapien
tgttttgagcttatccttcttcggg

SEQ ID NO: 3388269 - DNA, 25 bp, Homo sapien
ggctgaagtatagtaatgcaatcat

SEQ ID NO: 3388270 - DNA, 25 bp, Homo sapien
tttagaaataggaccttgctctgca

SEQ ID NO: 3388271 - DNA, 25 bp, Homo sapien
gaaataggaccttgctctgcaccca

SEQ ID NO: 3388272 - DNA, 25 bp, Homo sapien
gctgaagtatagtaatgcaatcata

SEQ ID NO: 3388273 - DNA, 25 bp, Homo sapien
caccaaaactgggaacgaacagcca

SEQ ID NO: 3388274 - DNA, 25 bp, Homo sapien
cctgaagctatatgcaaagaaggct

SEQ ID NO: 3388275 - DNA, 25 bp, Homo sapien
tcatctgccagctagtgaaagaact

SEQ ID NO: 3388276 - DNA, 25 bp, Homo sapien
tccagagacccaacataaagtaagt

SEQ ID NO: 3388277 - DNA, 25 bp, Homo sapien
tcttgtgaactgtgacctttccttt

SEQ ID NO: 3388278 - DNA, 25 bp, Homo sapien
tgtgaactgtgacctttcctttcaa

SEQ ID NO: 3388279 - DNA, 25 bp, Homo sapien
gtgaactgtgacctttcctttcaag

SEQ ID NO: 3388280 - DNA, 25 bp, Homo sapien
gtgacctttcctttcaaggcttcac

SEQ ID NO: 3388281 - DNA, 25 bp, Homo sapien
tgagttgaattattcaacgtgaggg

SEQ ID NO: 3388282 - DNA, 25 bp, Homo sapien
cacggtgagagaacgtggatctttc

SEQ ID NO: 3388283 - DNA, 25 bp, Homo sapien
gaattattcaacgtgagggtcacgg

SEQ ID NO: 3388284 - DNA, 25 bp, Homo sapien
cactggagaccataagtttgagttg

SEQ ID NO: 3388285 - DNA, 25 bp, Homo sapien
tcctgggcagtactagaaatctata

SEQ ID NO: 3388286 - DNA, 25 bp, Homo sapien
tagataatcaactaggctgtctgca

SEQ ID NO: 3388287 - DNA, 25 bp, Homo sapien
taagaaaatgattacgtggcagacc

SEQ ID NO: 3388288 - DNA, 25 bp, Homo sapien
aaatctggtggagcaaacgtctaag

SEQ ID NO: 3388289 - DNA, 25 bp, Homo sapien
caaagatccactaactgcagctggg

SEQ ID NO: 3388290 - DNA, 25 bp, Homo sapien
caaatttgtgtaggaagccattcaa

SEQ ID NO: 3388291 - DNA, 25 bp, Homo sapien
tggtttagcccaatgaaagcgaatc

SEQ ID NO: 3388292 - DNA, 25 bp, Homo sapien
gtgtcaccaggtgcaaatctgatgg

SEQ ID NO: 3388293 - DNA, 25 bp, Homo sapien
acggcaaggccaagacaccaggacc

SEQ ID NO: 3388294 - DNA, 25 bp, Homo sapien
aaatcttcacggcaaggccaagaca

SEQ ID NO: 3388295 - DNA, 25 bp, Homo sapien
atcttcacggcaaggccaagacacc

SEQ ID NO: 3388296 - DNA, 25 bp, Homo sapien
tacccaaatcttcacggcaaggcca

SEQ ID NO: 3388297 - DNA, 25 bp, Homo sapien
ttggaatgctctttactatcctgag

SEQ ID NO: 3388298 - DNA, 25 bp, Homo sapien
tttggaatgctctttactatcctga

SEQ ID NO: 3388299 - DNA, 25 bp, Homo sapien
ggaatgctctttactatcctgagct

SEQ ID NO: 3388300 - DNA, 25 bp, Homo sapien
tggaatgctctttactatcctgagc

SEQ ID NO: 3388301 - DNA, 25 bp, Homo sapien
tcacaaaactaggatgaggtcactg

SEQ ID NO: 3388302 - DNA, 25 bp, Homo sapien
cacaaaactaggatgaggtcactgc

SEQ ID NO: 3388303 - DNA, 25 bp, Homo sapien
gttctcaggtgtcccactcagagag

SEQ ID NO: 3388304 - DNA, 25 bp, Homo sapien
aagtgccccacgcttccagcaagtt

SEQ ID NO: 3388305 - DNA, 25 bp, Homo sapien
ttaagtgccccacgcttccagcaag

SEQ ID NO: 3388306 - DNA, 25 bp, Homo sapien
gccccacgcttccagcaagttctca

SEQ ID NO: 3388307 - DNA, 25 bp, Homo sapien
ggaagcgctccaggaatgcagtgct

SEQ ID NO: 3388308 - DNA, 25 bp, Homo sapien
gcagtgctgccttgattccacaggg

SEQ ID NO: 3388309 - DNA, 25 bp, Homo sapien
ctattgccgtgtggcttcattcagg

SEQ ID NO: 3388310 - DNA, 25 bp, Homo sapien
gcaggtttgggaacgtgggaagaca

SEQ ID NO: 3388311 - DNA, 25 bp, Homo sapien
cccagccagagtgccgtgactgtgg

SEQ ID NO: 3388312 - DNA, 25 bp, Homo sapien
agcccagccagagtgccgtgactgt

SEQ ID NO: 3388313 - DNA, 25 bp, Homo sapien
cagcccagccagagtgccgtgactg

SEQ ID NO: 3388314 - DNA, 25 bp, Homo sapien
cagccagagtgccgtgactgtgggt

SEQ ID NO: 3388315 - DNA, 25 bp, Homo sapien
gtcattttctttgtcgtgtccctct

SEQ ID NO: 3388316 - DNA, 25 bp, Homo sapien
tcattttctttgtcgtgtccctctg

SEQ ID NO: 3388317 - DNA, 25 bp, Homo sapien
atgcctcctaatccccacatctttg

SEQ ID NO: 3388318 - DNA, 25 bp, Homo sapien
tggttgatgcctcctaatccccaca

SEQ ID NO: 3388319 - DNA, 25 bp, Homo sapien
atttacataattcatcagaacattt

SEQ ID NO: 3388320 - DNA, 25 bp, Homo sapien
aatccatcttcattgacattagcct

SEQ ID NO: 3388321 - DNA, 25 bp, Homo sapien
cagaacatttcatggagggaaatcc

SEQ ID NO: 3388322 - DNA, 25 bp, Homo sapien
tccatcttcattgacattagccttg

SEQ ID NO: 3388323 - DNA, 25 bp, Homo sapien
gctccaaagctggacagtggtttct

SEQ ID NO: 3388324 - DNA, 25 bp, Homo sapien
ctgatccccacggtaagctccaaag

SEQ ID NO: 3388325 - DNA, 25 bp, Homo sapien
cctgggctcgagagtagcatctagt

SEQ ID NO: 3388326 - DNA, 25 bp, Homo sapien
tctctgcagcctgcattgggcctgg

SEQ ID NO: 3388327 - DNA, 25 bp, Homo sapien
atgcattcccacacaggtgcattct

SEQ ID NO: 3388328 - DNA, 25 bp, Homo sapien
ggtgcattctgtaccacaggctgga

SEQ ID NO: 3388329 - DNA, 25 bp, Homo sapien
cacacaggtgcattctgtaccacag

SEQ ID NO: 3388330 - DNA, 25 bp, Homo sapien
cacaggtgcattctgtaccacaggc

SEQ ID NO: 3388331 - DNA, 25 bp, Homo sapien
cgcacggggatcaggtggtcaatcc

SEQ ID NO: 3388332 - DNA, 25 bp, Homo sapien
ttgcctgggcgcacggggatcaggt

SEQ ID NO: 3388333 - DNA, 25 bp, Homo sapien
gatcaggtggtcaatccagcagtct

SEQ ID NO: 3388334 - DNA, 25 bp, Homo sapien
gggatcaggtggtcaatccagcagt

SEQ ID NO: 3388335 - DNA, 25 bp, Homo sapien
tggtttacccaagtaggcctgtgtc

SEQ ID NO: 3388336 - DNA, 25 bp, Homo sapien
ggattggagccagttgatttgccct

SEQ ID NO: 3388337 - DNA, 25 bp, Homo sapien
aagaggagcattatcagagcagtca

SEQ ID NO: 3388338 - DNA, 25 bp, Homo sapien
tcctttcccctagcggagtcttgga

SEQ ID NO: 3388339 - DNA, 25 bp, Homo sapien
caagcaaaacatgtttggaaggtct

SEQ ID NO: 3388340 - DNA, 25 bp, Homo sapien
tcaagcaaaacatgtttggaaggtc

SEQ ID NO: 3388341 - DNA, 25 bp, Homo sapien
agcaaaacatgtttggaaggtctca

SEQ ID NO: 3388342 - DNA, 25 bp, Homo sapien
gcaaaacatgtttggaaggtctcac

SEQ ID NO: 3388343 - DNA, 25 bp, Homo sapien
gcataataccaacaagttctggcct

SEQ ID NO: 3388344 - DNA, 25 bp, Homo sapien
tgctataaccagaatgatgaagaag

SEQ ID NO: 3388345 - DNA, 25 bp, Homo sapien
tccagaattctgaatgagattgagc

SEQ ID NO: 3388346 - DNA, 25 bp, Homo sapien
gaatgagattgagctgtttacatgc

SEQ ID NO: 3388347 - DNA, 25 bp, Homo sapien
ctgagccctgtgagactcaatatgg

SEQ ID NO: 3388348 - DNA, 25 bp, Homo sapien
cctgtgagactcaatatggttaatg

SEQ ID NO: 3388349 - DNA, 25 bp, Homo sapien
ggacattttaccaggcaaatggtag

SEQ ID NO: 3388350 - DNA, 25 bp, Homo sapien
tggtagtctgattgggctcctcggt

SEQ ID NO: 3388351 - DNA, 25 bp, Homo sapien
tttgggccatactcagagaagtaca

SEQ ID NO: 3388352 - DNA, 25 bp, Homo sapien
ttttgggccatactcagagaagtac

SEQ ID NO: 3388353 - DNA, 25 bp, Homo sapien
atttttgggccatactcagagaagt

SEQ ID NO: 3388354 - DNA, 25 bp, Homo sapien
tttttgggccatactcagagaagta

SEQ ID NO: 3388355 - DNA, 25 bp, Homo sapien
tccattgtttgcagcatcatgcttt

SEQ ID NO: 3388356 - DNA, 25 bp, Homo sapien
ttcgtatttttctttcagcttcgcc

SEQ ID NO: 3388357 - DNA, 25 bp, Homo sapien
gtatttttctttcagcttcgccgac

SEQ ID NO: 3388358 - DNA, 25 bp, Homo sapien
ccattgtttgcagcatcatgctttc

SEQ ID NO: 3388359 - DNA, 25 bp, Homo sapien
ttgttcatcatcaccatcttcttca

SEQ ID NO: 3388360 - DNA, 25 bp, Homo sapien
ttttcttgctttttgcagccttgac

SEQ ID NO: 3388361 - DNA, 25 bp, Homo sapien
ttcatcttcatctttctcctcctcc

SEQ ID NO: 3388362 - DNA, 25 bp, Homo sapien
tctttttcttgctttttgcagcctt

SEQ ID NO: 3388363 - DNA, 25 bp, Homo sapien
tttgcaacccgcatactataacagg

SEQ ID NO: 3388364 - DNA, 25 bp, Homo sapien
gccaatttgcaacccgcatactata

SEQ ID NO: 3388365 - DNA, 25 bp, Homo sapien
tactataacaggcaaggttagttgt

SEQ ID NO: 3388366 - DNA, 25 bp, Homo sapien
aacccgcatactataacaggcaagg

SEQ ID NO: 3388367 - DNA, 25 bp, Homo sapien
tgagctttcatcgtttaagagggtt

SEQ ID NO: 3388368 - DNA, 25 bp, Homo sapien
cacactctgagctttcatcgtttaa

SEQ ID NO: 3388369 - DNA, 25 bp, Homo sapien
tcatcgtttaagagggttttcaatc

SEQ ID NO: 3388370 - DNA, 25 bp, Homo sapien
aaccattcactacctgctgcccaca

SEQ ID NO: 3388371 - DNA, 25 bp, Homo sapien
aagctattgctctggcgttagcggg

SEQ ID NO: 3388372 - DNA, 25 bp, Homo sapien
gttttacaagctattgctctggcgt

SEQ ID NO: 3388373 - DNA, 25 bp, Homo sapien
tacaagctattgctctggcgttagc

SEQ ID NO: 3388374 - DNA, 25 bp, Homo sapien
aagataccggtgttttacaagctat

SEQ ID NO: 3388375 - DNA, 25 bp, Homo sapien
attcaagtcgctgccctcctttgca

SEQ ID NO: 3388376 - DNA, 25 bp, Homo sapien
cgcattcaagtcgctgccctccttt

SEQ ID NO: 3388377 - DNA, 25 bp, Homo sapien
gcattcaagtcgctgccctcctttg

SEQ ID NO: 3388378 - DNA, 25 bp, Homo sapien
cattcaagtcgctgccctcctttgc

SEQ ID NO: 3388379 - DNA, 25 bp, Homo sapien
atccggtgacagtcctgacgccagt

SEQ ID NO: 3388380 - DNA, 25 bp, Homo sapien
ttactgccaagacacgaaacgccag

SEQ ID NO: 3388381 - DNA, 25 bp, Homo sapien
actcgtgtccactcggttgtatggg

SEQ ID NO: 3388382 - DNA, 25 bp, Homo sapien
gattttgtcctcgatcactttgttc

SEQ ID NO: 3388383 - DNA, 25 bp, Homo sapien
aggttgagggtctgcgcatagcccc

SEQ ID NO: 3388384 - DNA, 25 bp, Homo sapien
tcttcagggattccgaaaatattac

SEQ ID NO: 3388385 - DNA, 25 bp, Homo sapien
atattactccgaaagaggttgaggg

SEQ ID NO: 3388386 - DNA, 25 bp, Homo sapien
ccacagctctgcgatgactgaagca

SEQ ID NO: 3388387 - DNA, 25 bp, Homo sapien
cctagagtatgctggccagttgtca

SEQ ID NO: 3388388 - DNA, 25 bp, Homo sapien
tacaagtttgataaatcattacccc

SEQ ID NO: 3388389 - DNA, 25 bp, Homo sapien
aggtgcccttggtttgacattttct

SEQ ID NO: 3388390 - DNA, 25 bp, Homo sapien
aaaggccgggtttgcgtcagtgcaa

SEQ ID NO: 3388391 - DNA, 25 bp, Homo sapien
gaaacccgctattgacaagactggg

SEQ ID NO: 3388392 - DNA, 25 bp, Homo sapien
caggcaacagactgaactggtggag

SEQ ID NO: 3388393 - DNA, 25 bp, Homo sapien
tctgacacaggcaacagactgaact

SEQ ID NO: 3388394 - DNA, 25 bp, Homo sapien
actggtggagggtgaaacccgctat

SEQ ID NO: 3388395 - DNA, 25 bp, Homo sapien
ggcttcctaaacattagcaccaata

SEQ ID NO: 3388396 - DNA, 25 bp, Homo sapien
aagaactgccagcggtggtttttct

SEQ ID NO: 3388397 - DNA, 25 bp, Homo sapien
ctttctcccctcgtgttatctttca

SEQ ID NO: 3388398 - DNA, 25 bp, Homo sapien
cgtgttatctttcacggcttcctaa

SEQ ID NO: 3388399 - DNA, 25 bp, Homo sapien
cccgcgggctactgagtttgcaaga

SEQ ID NO: 3388400 - DNA, 25 bp, Homo sapien
gacgtgattccatccgtggccagca

SEQ ID NO: 3388401 - DNA, 25 bp, Homo sapien
cgcgcgtccgctgactggaaagttt

SEQ ID NO: 3388402 - DNA, 25 bp, Homo sapien
gatcttacagtgcagcgcgttgccg

SEQ ID NO: 3388403 - DNA, 25 bp, Homo sapien
tattctcatccccttgctcgtcctc

SEQ ID NO: 3388404 - DNA, 25 bp, Homo sapien
agttccctcgggccttattctcatc

SEQ ID NO: 3388405 - DNA, 25 bp, Homo sapien
tgctggaccagttccctcgggcctt

SEQ ID NO: 3388406 - DNA, 25 bp, Homo sapien
tgaagtccagtttgctggaccagtt

SEQ ID NO: 3388407 - DNA, 25 bp, Homo sapien
gacattgcccagccccactgcgtac

SEQ ID NO: 3388408 - DNA, 25 bp, Homo sapien
cagacattgcccagccccactgcgt

SEQ ID NO: 3388409 - DNA, 25 bp, Homo sapien
caggtagggaaacctccagacattg

SEQ ID NO: 3388410 - DNA, 25 bp, Homo sapien
ggccaggtagggaaacctccagaca

SEQ ID NO: 3388411 - DNA, 25 bp, Homo sapien
taacctcgttggatgcccggagtgc

SEQ ID NO: 3388412 - DNA, 25 bp, Homo sapien
ctaaggagtcccctaggaagacagg

SEQ ID NO: 3388413 - DNA, 25 bp, Homo sapien
gcacccgtgcttacgtggctcagga

SEQ ID NO: 3388414 - DNA, 25 bp, Homo sapien
tctctgaacacttgaccgctagcac

SEQ ID NO: 3388415 - DNA, 25 bp, Homo sapien
ggaaagagagtggggagtgagagcc

SEQ ID NO: 3388416 - DNA, 25 bp, Homo sapien
tggaaagagagtggggagtgagagc

SEQ ID NO: 3388417 - DNA, 25 bp, Homo sapien
ttggaaagagagtggggagtgagag

SEQ ID NO: 3388418 - DNA, 25 bp, Homo sapien
cttggaaagagagtggggagtgaga

SEQ ID NO: 3388419 - DNA, 25 bp, Homo sapien
ggcaaactggcccagcgacacctcc

SEQ ID NO: 3388420 - DNA, 25 bp, Homo sapien
gctgggatggccttccacacagaca

SEQ ID NO: 3388421 - DNA, 25 bp, Homo sapien
agaagatgggtaatccagccagagc

SEQ ID NO: 3388422 - DNA, 25 bp, Homo sapien
cttgtagagctgggatggccttcca

SEQ ID NO: 3388423 - DNA, 25 bp, Homo sapien
cacattgtagtatatggctattagg

SEQ ID NO: 3388424 - DNA, 25 bp, Homo sapien
gagccccagggtagtacagacacaa

SEQ ID NO: 3388425 - DNA, 25 bp, Homo sapien
tgcattctggcgtattccaagggtt

SEQ ID NO: 3388426 - DNA, 25 bp, Homo sapien
tccaagggttgttgcaggagcccca

SEQ ID NO: 3388427 - DNA, 25 bp, Homo sapien
cattgtcacgttgggataagcggtc

SEQ ID NO: 3388428 - DNA, 25 bp, Homo sapien
cagaaagtcgagttcttgatctgta

SEQ ID NO: 3388429 - DNA, 25 bp, Homo sapien
gaagtactcttcacttccactgaca

SEQ ID NO: 3388430 - DNA, 25 bp, Homo sapien
gacaaatgtcttattggcctggctg

SEQ ID NO: 3388431 - DNA, 25 bp, Homo sapien
gctagtggccacctgatctcgccag

SEQ ID NO: 3388432 - DNA, 25 bp, Homo sapien
cttgattcctttagccaatgatgca

SEQ ID NO: 3388433 - DNA, 25 bp, Homo sapien
gtggccacctgatctcgccaggata

SEQ ID NO: 3388434 - DNA, 25 bp, Homo sapien
agagctagtggccacctgatctcgc

SEQ ID NO: 3388435 - DNA, 25 bp, Homo sapien
agccagcagcacaaattctagagtt

SEQ ID NO: 3388436 - DNA, 25 bp, Homo sapien
gactgaatgatatcagggaggttcc

SEQ ID NO: 3388437 - DNA, 25 bp, Homo sapien
cagttttgatcttcagccagcttct

SEQ ID NO: 3388438 - DNA, 25 bp, Homo sapien
ctagagtttagggaaagtgactgaa

SEQ ID NO: 3388439 - DNA, 25 bp, Homo sapien
tgaagtctaaggagaagtgaagccc

SEQ ID NO: 3388440 - DNA, 25 bp, Homo sapien
aaatccaagggcatctgacgtctca

SEQ ID NO: 3388441 - DNA, 25 bp, Homo sapien
ttcctgcaccacagaacagcagtct

SEQ ID NO: 3388442 - DNA, 25 bp, Homo sapien
gaagcccttccacacgtggatgtta

SEQ ID NO: 3388443 - DNA, 25 bp, Homo sapien
ctgggcgtctactaagacgttcatg

SEQ ID NO: 3388444 - DNA, 25 bp, Homo sapien
actaagacgttcatggagatgacac

SEQ ID NO: 3388445 - DNA, 25 bp, Homo sapien
gtctactaagacgttcatggagatg

SEQ ID NO: 3388446 - DNA, 25 bp, Homo sapien
aagacgttcatggagatgacactga

SEQ ID NO: 3388447 - DNA, 25 bp, Homo sapien
cagaaggagcattgctcggggaaga

SEQ ID NO: 3388448 - DNA, 25 bp, Homo sapien
aggagcattgctcggggaagagtgg

SEQ ID NO: 3388449 - DNA, 25 bp, Homo sapien
ctgtgcagaaggagcattgctcggg

SEQ ID NO: 3388450 - DNA, 25 bp, Homo sapien
gaaggagcattgctcggggaagagt

SEQ ID NO: 3388451 - DNA, 25 bp, Homo sapien
gatgaggaggatcacgagtacgaca

SEQ ID NO: 3388452 - DNA, 25 bp, Homo sapien
cgtggcatccgtgagtttctcccac

SEQ ID NO: 3388453 - DNA, 25 bp, Homo sapien
ggtgtgatgaagtaccagatcccag

SEQ ID NO: 3388454 - DNA, 25 bp, Homo sapien
tacgacatacgggaacgtggccgtg

SEQ ID NO: 3388455 - DNA, 25 bp, Homo sapien
tccccatgcagcagataaagagaag

SEQ ID NO: 3388456 - DNA, 25 bp, Homo sapien
agagagtgatcaggcctccccatgc

SEQ ID NO: 3388457 - DNA, 25 bp, Homo sapien
gagagagtgatcaggcctccccatg

SEQ ID NO: 3388458 - DNA, 25 bp, Homo sapien
cctccccatgcagcagataaagaga

SEQ ID NO: 3388459 - DNA, 25 bp, Homo sapien
cagctatgcccagatcttgtagtac

SEQ ID NO: 3388460 - DNA, 25 bp, Homo sapien
tgcccagatcttgtagtacctctac

SEQ ID NO: 3388461 - DNA, 25 bp, Homo sapien
gctatgcccagatcttgtagtacct

SEQ ID NO: 3388462 - DNA, 25 bp, Homo sapien
cagatcttgtagtacctctacatac

SEQ ID NO: 3388463 - DNA, 25 bp, Homo sapien
cacacaaatgtgtgcccacatgttt

SEQ ID NO: 3388464 - DNA, 25 bp, Homo sapien
ggtgtgcttggtgagtggaaaggga

SEQ ID NO: 3388465 - DNA, 25 bp, Homo sapien
gaccagagttttccattaggtgtgc

SEQ ID NO: 3388466 - DNA, 25 bp, Homo sapien
acacaaatgtgtgcccacatgtttg

SEQ ID NO: 3388467 - DNA, 25 bp, Homo sapien
ggccatgaagccgataacggagaag

SEQ ID NO: 3388468 - DNA, 25 bp, Homo sapien
gaagatgacgaagccggcaaagatg

SEQ ID NO: 3388469 - DNA, 25 bp, Homo sapien
gcactgttggtgcaggtgacaatta

SEQ ID NO: 3388470 - DNA, 25 bp, Homo sapien
gttgactttgcgttcattggccatg

SEQ ID NO: 3388471 - DNA, 25 bp, Homo sapien
gcttccgggtaaaccacaaatgcaa

SEQ ID NO: 3388472 - DNA, 25 bp, Homo sapien
cttccgggtaaaccacaaatgcaat

SEQ ID NO: 3388473 - DNA, 25 bp, Homo sapien
ggcttccgggtaaaccacaaatgca

SEQ ID NO: 3388474 - DNA, 25 bp, Homo sapien
ttccgggtaaaccacaaatgcaatg

SEQ ID NO: 3388475 - DNA, 25 bp, Homo sapien
gatgatggcccagaacggagagaga

SEQ ID NO: 3388476 - DNA, 25 bp, Homo sapien
tacttgggaaactcgtctgagatgg

SEQ ID NO: 3388477 - DNA, 25 bp, Homo sapien
tctgagatggaggtcactatggtct

SEQ ID NO: 3388478 - DNA, 25 bp, Homo sapien
tgagtgatcattggaaaacccatga

SEQ ID NO: 3388479 - DNA, 25 bp, Homo sapien
aaacactggcttgtgtgtgcgtagg

SEQ ID NO: 3388480 - DNA, 25 bp, Homo sapien
gcataggaggcagcataggtgtcca

SEQ ID NO: 3388481 - DNA, 25 bp, Homo sapien
aatggcaatgatgacaagggcatag

SEQ ID NO: 3388482 - DNA, 25 bp, Homo sapien
catacacataagagatccccacgag

SEQ ID NO: 3388483 - DNA, 25 bp, Homo sapien
gagatccccacgagctcaaaaatgg

SEQ ID NO: 3388484 - DNA, 25 bp, Homo sapien
tcaagctctacttcagcaacaggca

SEQ ID NO: 3388485 - DNA, 25 bp, Homo sapien
cactcaagctctacttcagcaacag

SEQ ID NO: 3388486 - DNA, 25 bp, Homo sapien
actcaagctctacttcagcaacagg

SEQ ID NO: 3388487 - DNA, 25 bp, Homo sapien
cgacactcaagctctacttcagcaa

SEQ ID NO: 3388488 - DNA, 25 bp, Homo sapien
catgccggttgctattgtgacagta

SEQ ID NO: 3388489 - DNA, 25 bp, Homo sapien
cactgatatggcatgccggttgcta

SEQ ID NO: 3388490 - DNA, 25 bp, Homo sapien
tgataatggccccactgatatggca

SEQ ID NO: 3388491 - DNA, 25 bp, Homo sapien
ccggttgctattgtgacagtaggaa

SEQ ID NO: 3388492 - DNA, 25 bp, Homo sapien
gatccaaatcagaggcgcacaccca

SEQ ID NO: 3388493 - DNA, 25 bp, Homo sapien
ccatccagatccaaatcagaggcgc

SEQ ID NO: 3388494 - DNA, 25 bp, Homo sapien
tttcttcctgagattcacttcttag

SEQ ID NO: 3388495 - DNA, 25 bp, Homo sapien
tcctgagattcacttcttagaattc

SEQ ID NO: 3388496 - DNA, 25 bp, Homo sapien
tggaactagggaacactacaccctg

SEQ ID NO: 3388497 - DNA, 25 bp, Homo sapien
tgaagggccctcagcttaatactcc

SEQ ID NO: 3388498 - DNA, 25 bp, Homo sapien
tctctgggcaacaaaagggctcaca

SEQ ID NO: 3388499 - DNA, 25 bp, Homo sapien
gatgccacctccaaggattttctga

SEQ ID NO: 3388500 - DNA, 25 bp, Homo sapien
gactttccagaagatgttaggctgg

SEQ ID NO: 3388501 - DNA, 25 bp, Homo sapien
ctatatcttcacagaatctttgcaa

SEQ ID NO: 3388502 - DNA, 25 bp, Homo sapien
gcccagcagactttccagaagatgt

SEQ ID NO: 3388503 - DNA, 25 bp, Homo sapien
ggggttacaaatgcccagcagactt

SEQ ID NO: 3388504 - DNA, 25 bp, Homo sapien
gtggtccccgggccgtgactgagct

SEQ ID NO: 3388505 - DNA, 25 bp, Homo sapien
tggaatgaggaatggcccacatccc

SEQ ID NO: 3388506 - DNA, 25 bp, Homo sapien
cccggagcttcctctaatgctggct

SEQ ID NO: 3388507 - DNA, 25 bp, Homo sapien
ttctggaatgaggaatggcccacat

SEQ ID NO: 3388508 - DNA, 25 bp, Homo sapien
ccagttaggatagcggtaagagcca

SEQ ID NO: 3388509 - DNA, 25 bp, Homo sapien
taattgggatccagatgacggaaca

SEQ ID NO: 3388510 - DNA, 25 bp, Homo sapien
caggcgagcattagccatccgagca

SEQ ID NO: 3388511 - DNA, 25 bp, Homo sapien
catccgagcaccatggaccagttag

SEQ ID NO: 3388512 - DNA, 25 bp, Homo sapien
ctgcaaagaagccaaagacagacat

SEQ ID NO: 3388513 - DNA, 25 bp, Homo sapien
gatcatgttcttgtaacgctccccg

SEQ ID NO: 3388514 - DNA, 25 bp, Homo sapien
gctgtggcgagcacaccaacttcag

SEQ ID NO: 3388515 - DNA, 25 bp, Homo sapien
tccccgcggtgttgagctaagaatg

SEQ ID NO: 3388516 - DNA, 25 bp, Homo sapien
cagtttgagtcccaaggaagaggtt

SEQ ID NO: 3388517 - DNA, 25 bp, Homo sapien
cagaaattgggttggcgtccagcat

SEQ ID NO: 3388518 - DNA, 25 bp, Homo sapien
taccattgtgcgacgtctgctgcag

SEQ ID NO: 3388519 - DNA, 25 bp, Homo sapien
actctcatgcgtggatgtgaaccaa

SEQ ID NO: 3388520 - DNA, 25 bp, Homo sapien
ctctgcagggtaaaacgtgtggtca

SEQ ID NO: 3388521 - DNA, 25 bp, Homo sapien
tagacacatttgtacctgataagca

SEQ ID NO: 3388522 - DNA, 25 bp, Homo sapien
cttacttttaggcatgggaaaccat

SEQ ID NO: 3388523 - DNA, 25 bp, Homo sapien
cctctaaggatatgacaggattact

SEQ ID NO: 3388524 - DNA, 25 bp, Homo sapien
gaccacagacctcatgcaatacata

SEQ ID NO: 3388525 - DNA, 25 bp, Homo sapien
gaagttttctgcttgatacccagtg

SEQ ID NO: 3388526 - DNA, 25 bp, Homo sapien
ttttggtcctgcaaaacacctgcca

SEQ ID NO: 3388527 - DNA, 25 bp, Homo sapien
aacagttattgtgctagcctctggg

SEQ ID NO: 3388528 - DNA, 25 bp, Homo sapien
tcaaatccaggtgcaacaacagtag

SEQ ID NO: 3388529 - DNA, 25 bp, Homo sapien
gcctgcatttaggacattagccaag

SEQ ID NO: 3388530 - DNA, 25 bp, Homo sapien
gaggtagggcctcaagaatgacttc

SEQ ID NO: 3388531 - DNA, 25 bp, Homo sapien
gatgtatttaatccgtggcaggcaa

SEQ ID NO: 3388532 - DNA, 25 bp, Homo sapien
tgggcaacagtacccacaaaagatg

SEQ ID NO: 3388533 - DNA, 25 bp, Homo sapien
tcccaggacggcagttttccatggc

SEQ ID NO: 3388534 - DNA, 25 bp, Homo sapien
agcacagtatctcgttttcccagga

SEQ ID NO: 3388535 - DNA, 25 bp, Homo sapien
aaaattgatcaatctgggggatacc

SEQ ID NO: 3388536 - DNA, 25 bp, Homo sapien
cccccatgagggtgattaataattc

SEQ ID NO: 3388537 - DNA, 25 bp, Homo sapien
gggcaccgaagctaggtggaagcaa

SEQ ID NO: 3388538 - DNA, 25 bp, Homo sapien
tggaagcaaatgagcctggatcctg

SEQ ID NO: 3388539 - DNA, 25 bp, Homo sapien
aggtggctcggcagcgccgggtgct

SEQ ID NO: 3388540 - DNA, 25 bp, Homo sapien
gagccgccaaacttgctagcgggcg

SEQ ID NO: 3388541 - DNA, 25 bp, Homo sapien
tgtcctggcagtgcacacacagaac

SEQ ID NO: 3388542 - DNA, 25 bp, Homo sapien
tgcacacacagaaccacacaactaa

SEQ ID NO: 3388543 - DNA, 25 bp, Homo sapien
caactaaaatcaaatccatcggcat

SEQ ID NO: 3388544 - DNA, 25 bp, Homo sapien
cacacagaaccacacaactaaaatc

SEQ ID NO: 3388545 - DNA, 25 bp, Homo sapien
agttctccatatcagcgataacacg

SEQ ID NO: 3388546 - DNA, 25 bp, Homo sapien
tagttctccatatcagcgataacac

SEQ ID NO: 3388547 - DNA, 25 bp, Homo sapien
ttgctgaagcagagacttcagaact

SEQ ID NO: 3388548 - DNA, 25 bp, Homo sapien
ctccctgaagggattgctgaagcag

SEQ ID NO: 3388549 - DNA, 25 bp, Homo sapien
cggtgacgatatccatctgaaggtc

SEQ ID NO: 3388550 - DNA, 25 bp, Homo sapien
tgctttgctggcattgtgcattcca

SEQ ID NO: 3388551 - DNA, 25 bp, Homo sapien
gttcacaaggtcaagctcggtgacg

SEQ ID NO: 3388552 - DNA, 25 bp, Homo sapien
tcaagctcggtgacgatatccatct

SEQ ID NO: 3388553 - DNA, 25 bp, Homo sapien
gatcgaatgctttcaatcacattaa

SEQ ID NO: 3388554 - DNA, 25 bp, Homo sapien
gctttcaatcacattaatagtgaca

SEQ ID NO: 3388555 - DNA, 25 bp, Homo sapien
atggacatggatcgaatgctttcaa

SEQ ID NO: 3388556 - DNA, 25 bp, Homo sapien
catggatcgaatgctttcaatcaca

SEQ ID NO: 3388557 - DNA, 25 bp, Homo sapien
tgaagaaatgttttaggtttgacac

SEQ ID NO: 3388558 - DNA, 25 bp, Homo sapien
ttgaagaaatgttttaggtttgaca

SEQ ID NO: 3388559 - DNA, 25 bp, Homo sapien
gatactcctgttgctcacatgcctg

SEQ ID NO: 3388560 - DNA, 25 bp, Homo sapien
gagactgtactcagatactcctgtt

SEQ ID NO: 3388561 - DNA, 25 bp, Homo sapien
tactcagatactcctgttgctcaca

SEQ ID NO: 3388562 - DNA, 25 bp, Homo sapien
tctgatggttcctcacctactttca

SEQ ID NO: 3388563 - DNA, 25 bp, Homo sapien
ccaaatcccattgcaggtcacttga

SEQ ID NO: 3388564 - DNA, 25 bp, Homo sapien
tcttactgccgggtaccacagcttc

SEQ ID NO: 3388565 - DNA, 25 bp, Homo sapien
gcacatcttactgccgggtaccaca

SEQ ID NO: 3388566 - DNA, 25 bp, Homo sapien
ttcccgcacatcttactgccgggta

SEQ ID NO: 3388567 - DNA, 25 bp, Homo sapien
tactgccgggtaccacagcttcttc

SEQ ID NO: 3388568 - DNA, 25 bp, Homo sapien
taggcgactacaactggatccagga

SEQ ID NO: 3388569 - DNA, 25 bp, Homo sapien
tgagcactcaggtgagagcagccct

SEQ ID NO: 3388570 - DNA, 25 bp, Homo sapien
tcagctagttttctgcctgcttcag

SEQ ID NO: 3388571 - DNA, 25 bp, Homo sapien
gagcagccctctaagtaacagcgcc

SEQ ID NO: 3388572 - DNA, 25 bp, Homo sapien
cagcagccaggagtcatgaagcaat

SEQ ID NO: 3388573 - DNA, 25 bp, Homo sapien
tttccacagcagccaggagtcatga

SEQ ID NO: 3388574 - DNA, 25 bp, Homo sapien
cacagcagccaggagtcatgaagca

SEQ ID NO: 3388575 - DNA, 25 bp, Homo sapien
ccacagcagccaggagtcatgaagc

SEQ ID NO: 3388576 - DNA, 25 bp, Homo sapien
ggaggaggaagttgtaataagccaa

SEQ ID NO: 3388577 - DNA, 25 bp, Homo sapien
gaggaagttgtaataagccaaggtg

SEQ ID NO: 3388578 - DNA, 25 bp, Homo sapien
gtaataagccaaggtggcgccactg

SEQ ID NO: 3388579 - DNA, 25 bp, Homo sapien
aagttgtaataagccaaggtggcgc

SEQ ID NO: 3388580 - DNA, 25 bp, Homo sapien
tgcattcattcaatgcaaatcccgg

SEQ ID NO: 3388581 - DNA, 25 bp, Homo sapien
ttcaatgcaaatcccggaaatgctg

SEQ ID NO: 3388582 - DNA, 25 bp, Homo sapien
caaatcccggaaatgctgtctctgt

SEQ ID NO: 3388583 - DNA, 25 bp, Homo sapien
cattcattcaatgcaaatcccggaa

SEQ ID NO: 3388584 - DNA, 25 bp, Homo sapien
ccagttctcgaatggacagtatcac

SEQ ID NO: 3388585 - DNA, 25 bp, Homo sapien
tctgctgtacagtggccaaaatggt

SEQ ID NO: 3388586 - DNA, 25 bp, Homo sapien
cagtatcactcctgaagtggatggc

SEQ ID NO: 3388587 - DNA, 25 bp, Homo sapien
cacatgaggagctgcatggatctct

SEQ ID NO: 3388588 - DNA, 25 bp, Homo sapien
tgcaaaaaagtgggtaaagatattg

SEQ ID NO: 3388589 - DNA, 25 bp, Homo sapien
atttcaaatcctttgcaaaaaagtg

SEQ ID NO: 3388590 - DNA, 25 bp, Homo sapien
aaagtgggtaaagatattgacaaat

SEQ ID NO: 3388591 - DNA, 25 bp, Homo sapien
ggtaaagatattgacaaattctcat

SEQ ID NO: 3388592 - DNA, 25 bp, Homo sapien
gacttactaaagatcctcctgaagt

SEQ ID NO: 3388593 - DNA, 25 bp, Homo sapien
cttactaaagatcctcctgaagtct

SEQ ID NO: 3388594 - DNA, 25 bp, Homo sapien
tctccagtaagacttactaaagatc

SEQ ID NO: 3388595 - DNA, 25 bp, Homo sapien
gtaagacttactaaagatcctcctg

SEQ ID NO: 3388596 - DNA, 25 bp, Homo sapien
cctcatcataatcatacttaagctc

SEQ ID NO: 3388597 - DNA, 25 bp, Homo sapien
taagctcaatcaggcacttgacaca

SEQ ID NO: 3388598 - DNA, 25 bp, Homo sapien
tagtgtaggagcctgagagcaagct

SEQ ID NO: 3388599 - DNA, 25 bp, Homo sapien
ggcacttgacacatcttactgtagt

SEQ ID NO: 3388600 - DNA, 25 bp, Homo sapien
ctgcagaagaatgaatacatccaca

SEQ ID NO: 3388601 - DNA, 25 bp, Homo sapien
actgcagaagaatgaatacatccac

SEQ ID NO: 3388602 - DNA, 25 bp, Homo sapien
tgcagaagaatgaatacatccacac

SEQ ID NO: 3388603 - DNA, 25 bp, Homo sapien
tcttgaacggtgatgtgagaacgtt

SEQ ID NO: 3388604 - DNA, 25 bp, Homo sapien
atacatccttgacctttaaaacgag

SEQ ID NO: 3388605 - DNA, 25 bp, Homo sapien
taaaacgaggagaggagatccaatc

SEQ ID NO: 3388606 - DNA, 25 bp, Homo sapien
tgagaacgtttcaaaaagaagctag

SEQ ID NO: 3388607 - DNA, 25 bp, Homo sapien
attccaacaatgatttttctgtggc

SEQ ID NO: 3388608 - DNA, 25 bp, Homo sapien
ttttctgtggccctgaacaaaccat

SEQ ID NO: 3388609 - DNA, 25 bp, Homo sapien
tccaacaatgatttttctgtggccc

SEQ ID NO: 3388610 - DNA, 25 bp, Homo sapien
aacaatgatttttctgtggccctga

SEQ ID NO: 3388611 - DNA, 25 bp, Homo sapien
tacgagcaagtgaataggagccacg

SEQ ID NO: 3388612 - DNA, 25 bp, Homo sapien
aagggagcagaagtctgacgctacg

SEQ ID NO: 3388613 - DNA, 25 bp, Homo sapien
tcttgatgaagggagcagaagtctg

SEQ ID NO: 3388614 - DNA, 25 bp, Homo sapien
gaagtctgacgctacgagcaagtga

SEQ ID NO: 3388615 - DNA, 25 bp, Homo sapien
taactgacagtgcaaccttgtgcca

SEQ ID NO: 3388616 - DNA, 25 bp, Homo sapien
tgtccatctgccatgcggtaaggaa

SEQ ID NO: 3388617 - DNA, 25 bp, Homo sapien
ttacagtcgacatggagcaggagat

SEQ ID NO: 3388618 - DNA, 25 bp, Homo sapien
gtgataccgaatctcatccctcagg

SEQ ID NO: 3388619 - DNA, 25 bp, Homo sapien
tctgaagctgactgaccttggaata

SEQ ID NO: 3388620 - DNA, 25 bp, Homo sapien
cagagctagagtggcaggcatattc

SEQ ID NO: 3388621 - DNA, 25 bp, Homo sapien
tcctcatgagaaatgcggtctgaag

SEQ ID NO: 3388622 - DNA, 25 bp, Homo sapien
gaagggaggctatccccaatatgcc

SEQ ID NO: 3388623 - DNA, 25 bp, Homo sapien
tcaccgagctaccaaggcctccatg

SEQ ID NO: 3388624 - DNA, 25 bp, Homo sapien
ggcctccatggccagaaaagcctgc

SEQ ID NO: 3388625 - DNA, 25 bp, Homo sapien
cagaaaagcctgcatcccacacagg

SEQ ID NO: 3388626 - DNA, 25 bp, Homo sapien
cacacaggctgtccactgtcacatg

SEQ ID NO: 3388627 - DNA, 25 bp, Homo sapien
actgtgcactgccctctgtcttgta

SEQ ID NO: 3388628 - DNA, 25 bp, Homo sapien
ctactgtgcactgccctctgtcttg

SEQ ID NO: 3388629 - DNA, 25 bp, Homo sapien
tgtgcactgccctctgtcttgtagg

SEQ ID NO: 3388630 - DNA, 25 bp, Homo sapien
ctgtgcactgccctctgtcttgtag

SEQ ID NO: 3388631 - DNA, 25 bp, Homo sapien
gcaggaaaaagagtgcacagaaaca

SEQ ID NO: 3388632 - DNA, 25 bp, Homo sapien
cttcatcctcacatcctaaccccaa

SEQ ID NO: 3388633 - DNA, 25 bp, Homo sapien
acagaaacattttccgtgcaagcct

SEQ ID NO: 3388634 - DNA, 25 bp, Homo sapien
ttttccgtgcaagcctcttcatcct

SEQ ID NO: 3388635 - DNA, 25 bp, Homo sapien
ggcattcaatagtaactgccagctg

SEQ ID NO: 3388636 - DNA, 25 bp, Homo sapien
ttagataaaatttcctgttctgaag

SEQ ID NO: 3388637 - DNA, 25 bp, Homo sapien
gctacaagctcggaaagtgtctgat

SEQ ID NO: 3388638 - DNA, 25 bp, Homo sapien
ctgccagctgtttaatcaaaaagtt

SEQ ID NO: 3388639 - DNA, 25 bp, Homo sapien
tgaataagccatgcttttggttgcg

SEQ ID NO: 3388640 - DNA, 25 bp, Homo sapien
tgcgctggccaagccataaattgat

SEQ ID NO: 3388641 - DNA, 25 bp, Homo sapien
ttggtatctggagggtctatcacac

SEQ ID NO: 3388642 - DNA, 25 bp, Homo sapien
ggagggtctatcacacgctcataaa

SEQ ID NO: 3388643 - DNA, 25 bp, Homo sapien
gcccggccgcatgtgtcttcacagt

SEQ ID NO: 3388644 - DNA, 25 bp, Homo sapien
tccttaaggaatcaccatactatcg

SEQ ID NO: 3388645 - DNA, 25 bp, Homo sapien
caaatggtgtttccggtcatagatc

SEQ ID NO: 3388646 - DNA, 25 bp, Homo sapien
tgtatacactcagtaatggaactgc

SEQ ID NO: 3388647 - DNA, 25 bp, Homo sapien
tagtggcttaccaaactatttttgc

SEQ ID NO: 3388648 - DNA, 25 bp, Homo sapien
cagtaagttcaacatctgtgcttcc

SEQ ID NO: 3388649 - DNA, 25 bp, Homo sapien
tattgttgaatactacagtagtcca

SEQ ID NO: 3388650 - DNA, 25 bp, Homo sapien
tggagaacagatctgcccctttact

SEQ ID NO: 3388651 - DNA, 25 bp, Homo sapien
gtttccactgggatcacctattctt

SEQ ID NO: 3388652 - DNA, 25 bp, Homo sapien
cttttgatgtttccactgggatcac

SEQ ID NO: 3388653 - DNA, 25 bp, Homo sapien
cactgggatcacctattctttgaag

SEQ ID NO: 3388654 - DNA, 25 bp, Homo sapien
gatgtttccactgggatcacctatt

SEQ ID NO: 3388655 - DNA, 25 bp, Homo sapien
ttttgtagtgttgaattgatcaaga

SEQ ID NO: 3388656 - DNA, 25 bp, Homo sapien
gatttttgtagtgttgaattgatca

SEQ ID NO: 3388657 - DNA, 25 bp, Homo sapien
cagggagatttttgtagtgttgaat

SEQ ID NO: 3388658 - DNA, 25 bp, Homo sapien
ctttttcagggagatttttgtagtg

SEQ ID NO: 3388659 - DNA, 25 bp, Homo sapien
tttggacactgtgttatatatccat

SEQ ID NO: 3388660 - DNA, 25 bp, Homo sapien
cattcggcataaagatgatcttccc

SEQ ID NO: 3388661 - DNA, 25 bp, Homo sapien
tatatatccattcggcataaagatg

SEQ ID NO: 3388662 - DNA, 25 bp, Homo sapien
cactgtgttatatatccattcggca

SEQ ID NO: 3388663 - DNA, 25 bp, Homo sapien
tcatcttggccaaaagctcttgtaa

SEQ ID NO: 3388664 - DNA, 25 bp, Homo sapien
gtcatcttggccaaaagctcttgta

SEQ ID NO: 3388665 - DNA, 25 bp, Homo sapien
atccattattccttgcaccaggctt

SEQ ID NO: 3388666 - DNA, 25 bp, Homo sapien
ttccttgcaccaggcttaagaaatc

SEQ ID NO: 3388667 - DNA, 25 bp, Homo sapien
ttttccaattgactaagtcttgtct

SEQ ID NO: 3388668 - DNA, 25 bp, Homo sapien
ttgacaagtcttctcacaatgacag

SEQ ID NO: 3388669 - DNA, 25 bp, Homo sapien
tgacaagtcttctcacaatgacagt

SEQ ID NO: 3388670 - DNA, 25 bp, Homo sapien
taagtcttgtctctgcataatttag

SEQ ID NO: 3388671 - DNA, 25 bp, Homo sapien
gcaatggtcaccatctacccaagag

SEQ ID NO: 3388672 - DNA, 25 bp, Homo sapien
ggtcaccatctacccaagagtcttg

SEQ ID NO: 3388673 - DNA, 25 bp, Homo sapien
tacccaagagtcttgatctcgatag

SEQ ID NO: 3388674 - DNA, 25 bp, Homo sapien
ttgatctcgatagagcagtccactc

SEQ ID NO: 3388675 - DNA, 25 bp, Homo sapien
tccttcggcattccacggcaccact

SEQ ID NO: 3388676 - DNA, 25 bp, Homo sapien
cactggccagcaatgtgcactggga

SEQ ID NO: 3388677 - DNA, 25 bp, Homo sapien
ggacaggacatccttcggcattcca

SEQ ID NO: 3388678 - DNA, 25 bp, Homo sapien
tcggcagaccttacagcactggcca

SEQ ID NO: 3388679 - DNA, 25 bp, Homo sapien
ctgccaacttggcaaggcagcttgt

SEQ ID NO: 3388680 - DNA, 25 bp, Homo sapien
agtgacagttctgctaagtgcactg

SEQ ID NO: 3388681 - DNA, 25 bp, Homo sapien
gcactgttgtcaaatctgccatctg

SEQ ID NO: 3388682 - DNA, 25 bp, Homo sapien
gaattcctgtctaataaattcccac

SEQ ID NO: 3388683 - DNA, 25 bp, Homo sapien
agctcttggttaaaatccgctggcc

SEQ ID NO: 3388684 - DNA, 25 bp, Homo sapien
tcggcattcccgacagctcttggtt

SEQ ID NO: 3388685 - DNA, 25 bp, Homo sapien
ggttaaaatccgctggccttctgca

SEQ ID NO: 3388686 - DNA, 25 bp, Homo sapien
cccgacagctcttggttaaaatccg

SEQ ID NO: 3388687 - DNA, 25 bp, Homo sapien
ccagaagtgatagggaccataaaat

SEQ ID NO: 3388688 - DNA, 25 bp, Homo sapien
gaagtgatagggaccataaaattaa

SEQ ID NO: 3388689 - DNA, 25 bp, Homo sapien
tgatagggaccataaaattaacact

SEQ ID NO: 3388690 - DNA, 25 bp, Homo sapien
ttccagaagtgatagggaccataaa

SEQ ID NO: 3388691 - DNA, 25 bp, Homo sapien
agcactgcccttgggcaatggagcc

SEQ ID NO: 3388692 - DNA, 25 bp, Homo sapien
cactgcccttgggcaatggagccat

SEQ ID NO: 3388693 - DNA, 25 bp, Homo sapien
agagcactgcccttgggcaatggag

SEQ ID NO: 3388694 - DNA, 25 bp, Homo sapien
gagcactgcccttgggcaatggagc

SEQ ID NO: 3388695 - DNA, 25 bp, Homo sapien
ggtttatcaatgctttgctgcaact

SEQ ID NO: 3388696 - DNA, 25 bp, Homo sapien
taggtttatcaatgctttgctgcaa

SEQ ID NO: 3388697 - DNA, 25 bp, Homo sapien
aggtttatcaatgctttgctgcaac

SEQ ID NO: 3388698 - DNA, 25 bp, Homo sapien
gcagcactgattctcaggaagaatg

SEQ ID NO: 3388699 - DNA, 25 bp, Homo sapien
cagcactgattctcaggaagaatgt

SEQ ID NO: 3388700 - DNA, 25 bp, Homo sapien
tccttgctgccaaccagtctgtgga

SEQ ID NO: 3388701 - DNA, 25 bp, Homo sapien
caaccagtctgtggacaatcagtcc

SEQ ID NO: 3388702 - DNA, 25 bp, Homo sapien
tcagtccacaaagcaaacgatgctg

SEQ ID NO: 3388703 - DNA, 25 bp, Homo sapien
ccatatgcaggatacaaattacttt

SEQ ID NO: 3388704 - DNA, 25 bp, Homo sapien
aatgaatttcatgttgccagcacaa

SEQ ID NO: 3388705 - DNA, 25 bp, Homo sapien
ctcaaggtaaagaggagggtaaatg

SEQ ID NO: 3388706 - DNA, 25 bp, Homo sapien
tcaaggtaaagaggagggtaaatga

SEQ ID NO: 3388707 - DNA, 25 bp, Homo sapien
atttcatgttgccagcacaaactgt

SEQ ID NO: 3388708 - DNA, 25 bp, Homo sapien
aaggggtacttttaggcatcacgtg

SEQ ID NO: 3388709 - DNA, 25 bp, Homo sapien
ggtacttttaggcatcacgtgtctc

SEQ ID NO: 3388710 - DNA, 25 bp, Homo sapien
aggcatcacgtgtctctcttccaga

SEQ ID NO: 3388711 - DNA, 25 bp, Homo sapien
tttaggcatcacgtgtctctcttcc

SEQ ID NO: 3388712 - DNA, 25 bp, Homo sapien
gtattccagtttttgcactctgagt

SEQ ID NO: 3388713 - DNA, 25 bp, Homo sapien
ccctggacagagatgtaaccactct

SEQ ID NO: 3388714 - DNA, 25 bp, Homo sapien
tcacaagtagcttttgtattccagt

SEQ ID NO: 3388715 - DNA, 25 bp, Homo sapien
cttgcactcacaagtagcttttgta

SEQ ID NO: 3388716 - DNA, 25 bp, Homo sapien
tagtgattgttatgtgcacagcagc

SEQ ID NO: 3388717 - DNA, 25 bp, Homo sapien
gtgcttcataacgaccttcaaaggt

SEQ ID NO: 3388718 - DNA, 25 bp, Homo sapien
gaatatgatgtgtctatggttgatc

SEQ ID NO: 3388719 - DNA, 25 bp, Homo sapien
gaagatggcaatctcatcaaataag

SEQ ID NO: 3388720 - DNA, 25 bp, Homo sapien
tgagagcctgaacaggcttttcaag

SEQ ID NO: 3388721 - DNA, 25 bp, Homo sapien
gcctgaacaggcttttcaagatggc

SEQ ID NO: 3388722 - DNA, 25 bp, Homo sapien
aaattgaaagcctttggtgcttcct

SEQ ID NO: 3388723 - DNA, 25 bp, Homo sapien
tttccactgagagcctgaacaggct

SEQ ID NO: 3388724 - DNA, 25 bp, Homo sapien
tatcaagtgtagctcatagcatgcc

SEQ ID NO: 3388725 - DNA, 25 bp, Homo sapien
tgacaatggccagctgaaaaatgca

SEQ ID NO: 3388726 - DNA, 25 bp, Homo sapien
tctgtcatgggagagaacgggacct

SEQ ID NO: 3388727 - DNA, 25 bp, Homo sapien
ttcagttgccaagggtgcacaagga

SEQ ID NO: 3388728 - DNA, 25 bp, Homo sapien
tacaatacctgtcaccttgggaatg

SEQ ID NO: 3388729 - DNA, 25 bp, Homo sapien
tagcccaagatctagctgaactgag

SEQ ID NO: 3388730 - DNA, 25 bp, Homo sapien
gcaggttccagttcaaaagcagcca

SEQ ID NO: 3388731 - DNA, 25 bp, Homo sapien
tagcgagtatcgttcccagagcagg

SEQ ID NO: 3388732 - DNA, 25 bp, Homo sapien
gagatgggtaaatcgggaagataaa

SEQ ID NO: 3388733 - DNA, 25 bp, Homo sapien
cagttttacggagatgggtaaatcg

SEQ ID NO: 3388734 - DNA, 25 bp, Homo sapien
actgttcagttttacggagatgggt

SEQ ID NO: 3388735 - DNA, 25 bp, Homo sapien
tgttcagttttacggagatgggtaa

SEQ ID NO: 3388736 - DNA, 25 bp, Homo sapien
tgcttcagcctgctgagcagctaag

SEQ ID NO: 3388737 - DNA, 25 bp, Homo sapien
gctcaagcaatgctcaaaatgctga

SEQ ID NO: 3388738 - DNA, 25 bp, Homo sapien
ctcactgaaatttagaactcctggg

SEQ ID NO: 3388739 - DNA, 25 bp, Homo sapien
catggctcactgaaatttagaactc

SEQ ID NO: 3388740 - DNA, 25 bp, Homo sapien
gatggaacctcgaaaccaacagtat

SEQ ID NO: 3388741 - DNA, 25 bp, Homo sapien
ttgatggaacctcgaaaccaacagt

SEQ ID NO: 3388742 - DNA, 25 bp, Homo sapien
gctgcagttgatggaacctcgaaac

SEQ ID NO: 3388743 - DNA, 25 bp, Homo sapien
cagttgatggaacctcgaaaccaac

SEQ ID NO: 3388744 - DNA, 25 bp, Homo sapien
cttgccctgaatgatcctgtcggtc

SEQ ID NO: 3388745 - DNA, 25 bp, Homo sapien
cccagaatactgaattttgctccat

SEQ ID NO: 3388746 - DNA, 25 bp, Homo sapien
ttccccagaatactgaattttgctc

SEQ ID NO: 3388747 - DNA, 25 bp, Homo sapien
accttggtacgcatcttccccagaa

SEQ ID NO: 3388748 - DNA, 25 bp, Homo sapien
cagaaaccttggtacgcatcttccc

SEQ ID NO: 3388749 - DNA, 25 bp, Homo sapien
actaaatgcatagattttactcccc

SEQ ID NO: 3388750 - DNA, 25 bp, Homo sapien
gactaaatgcatagattttactccc

SEQ ID NO: 3388751 - DNA, 25 bp, Homo sapien
ggactaaatgcatagattttactcc

SEQ ID NO: 3388752 - DNA, 25 bp, Homo sapien
tggactaaatgcatagattttactc

SEQ ID NO: 3388753 - DNA, 25 bp, Homo sapien
gtctgcatccatgaaccacctgctg

SEQ ID NO: 3388754 - DNA, 25 bp, Homo sapien
cgagctttgattcctgatgtctgca

SEQ ID NO: 3388755 - DNA, 25 bp, Homo sapien
ttagagccgagctttgattcctgat

SEQ ID NO: 3388756 - DNA, 25 bp, Homo sapien
gattcctgatgtctgcatccatgaa

SEQ ID NO: 3388757 - DNA, 25 bp, Homo sapien
aaggaagatacatggaggtatgaag

SEQ ID NO: 3388758 - DNA, 25 bp, Homo sapien
ggaagatacatggaggtatgaagaa

SEQ ID NO: 3388759 - DNA, 25 bp, Homo sapien
aagatacatggaggtatgaagaagg

SEQ ID NO: 3388760 - DNA, 25 bp, Homo sapien
tttaaggaagatacatggaggtatg

SEQ ID NO: 3388761 - DNA, 25 bp, Homo sapien
tgttctaggcagtgctatagagcac

SEQ ID NO: 3388762 - DNA, 25 bp, Homo sapien
tctaggcagtgctatagagcacact

SEQ ID NO: 3388763 - DNA, 25 bp, Homo sapien
taggcagtgctatagagcacacttc

SEQ ID NO: 3388764 - DNA, 25 bp, Homo sapien
ttctgttctaggcagtgctatagag

SEQ ID NO: 3388765 - DNA, 25 bp, Homo sapien
ccaggagtggcgccttacgcctgta

SEQ ID NO: 3388766 - DNA, 25 bp, Homo sapien
gtcaaaacctaaggcgactcaaaca

SEQ ID NO: 3388767 - DNA, 25 bp, Homo sapien
tcacttgaaccttgaactggggagg

SEQ ID NO: 3388768 - DNA, 25 bp, Homo sapien
tgctacctccaatgtcaaagataag

SEQ ID NO: 3388769 - DNA, 25 bp, Homo sapien
ttataaacccagctgagaccaatgt

SEQ ID NO: 3388770 - DNA, 25 bp, Homo sapien
tttctgggccatttaacacccattc

SEQ ID NO: 3388771 - DNA, 25 bp, Homo sapien
tgaatactggaaagatgaactagcc

SEQ ID NO: 3388772 - DNA, 25 bp, Homo sapien
caacaacaaatgaggtcgttgaata

SEQ ID NO: 3388773 - DNA, 25 bp, Homo sapien
agccaatgccccttgactgtccctt

SEQ ID NO: 3388774 - DNA, 25 bp, Homo sapien
gtcccttcacaagatgagatgagag

SEQ ID NO: 3388775 - DNA, 25 bp, Homo sapien
gactcatccaccgagccagccaatg

SEQ ID NO: 3388776 - DNA, 25 bp, Homo sapien
cttgactgtcccttcacaagatgag

SEQ ID NO: 3388777 - DNA, 25 bp, Homo sapien
taacccaggaaggttgacacacaca

SEQ ID NO: 3388778 - DNA, 25 bp, Homo sapien
gacacagtcacagcgatataaccca

SEQ ID NO: 3388779 - DNA, 25 bp, Homo sapien
gacacacacagtattggcatgacag

SEQ ID NO: 3388780 - DNA, 25 bp, Homo sapien
gtcatccacacgaatgtatcctggg

SEQ ID NO: 3388781 - DNA, 25 bp, Homo sapien
ccaacagagtcagtgaccactgtag

SEQ ID NO: 3388782 - DNA, 25 bp, Homo sapien
aacagagtcagtgaccactgtagtg

SEQ ID NO: 3388783 - DNA, 25 bp, Homo sapien
ctactccaacagagtcagtgaccac

SEQ ID NO: 3388784 - DNA, 25 bp, Homo sapien
actccaacagagtcagtgaccactg

SEQ ID NO: 3388785 - DNA, 25 bp, Homo sapien
ccacagtcctcatcaagatttctga

SEQ ID NO: 3388786 - DNA, 25 bp, Homo sapien
atgaaggtccttgaatctggcctag

SEQ ID NO: 3388787 - DNA, 25 bp, Homo sapien
tgaaagcgtctaatgaaggtccttg

SEQ ID NO: 3388788 - DNA, 25 bp, Homo sapien
tctaatgaaggtccttgaatctggc

SEQ ID NO: 3388789 - DNA, 25 bp, Homo sapien
gcgtctaatgaaggtccttgaatct

SEQ ID NO: 3388790 - DNA, 25 bp, Homo sapien
actgacttctaaaaactgagtagca

SEQ ID NO: 3388791 - DNA, 25 bp, Homo sapien
actaccacagggtgaaacatccaat

SEQ ID NO: 3388792 - DNA, 25 bp, Homo sapien
gaaccccttggcacagacattattt

SEQ ID NO: 3388793 - DNA, 25 bp, Homo sapien
taacacttgtgacagacactaactg

SEQ ID NO: 3388794 - DNA, 25 bp, Homo sapien
catccactgtctcaggtgtagtctt

SEQ ID NO: 3388795 - DNA, 25 bp, Homo sapien
ttagcatccactgtctcaggtgtag

SEQ ID NO: 3388796 - DNA, 25 bp, Homo sapien
tctgtgtaatgcattgcctttctcc

SEQ ID NO: 3388797 - DNA, 25 bp, Homo sapien
ttctcctccatcatgcttagcatcc

SEQ ID NO: 3388798 - DNA, 25 bp, Homo sapien
cacagtacttaataggtttgttcac

SEQ ID NO: 3388799 - DNA, 25 bp, Homo sapien
acaaacaccctaggggcaagctcca

SEQ ID NO: 3388800 - DNA, 25 bp, Homo sapien
ttgggtcaagggcaacacagtactt

SEQ ID NO: 3388801 - DNA, 25 bp, Homo sapien
ttatgatgaatttgggtcaagggca

SEQ ID NO: 3388802 - DNA, 25 bp, Homo sapien
cctcttccctactttaagatggtat

SEQ ID NO: 3388803 - DNA, 25 bp, Homo sapien
gtggcagaagtaagatggacctgct

SEQ ID NO: 3388804 - DNA, 25 bp, Homo sapien
taagatggtattttgggtggcagaa

SEQ ID NO: 3388805 - DNA, 25 bp, Homo sapien
gtaagatggacctgctctctttgat

SEQ ID NO: 3388806 - DNA, 25 bp, Homo sapien
gccagtgttacagtcaagatttgaa

SEQ ID NO: 3388807 - DNA, 25 bp, Homo sapien
tgtcagccagtgttacagtcaagat

SEQ ID NO: 3388808 - DNA, 25 bp, Homo sapien
ctctatattgtcagccagtgttaca

SEQ ID NO: 3388809 - DNA, 25 bp, Homo sapien
cagtcaagatttgaagaggcaaaag

SEQ ID NO: 3388810 - DNA, 25 bp, Homo sapien
ttttctgcttaaatttatcatgatc

SEQ ID NO: 3388811 - DNA, 25 bp, Homo sapien
gcttaaatttatcatgatcaggcat

SEQ ID NO: 3388812 - DNA, 25 bp, Homo sapien
tatcaatatcctccaatacttctat

SEQ ID NO: 3388813 - DNA, 25 bp, Homo sapien
ctatatcaatatcctccaatacttc

SEQ ID NO: 3388814 - DNA, 25 bp, Homo sapien
acagttgtcctggtattccactaac

SEQ ID NO: 3388815 - DNA, 25 bp, Homo sapien
cactaacttcttctaacttagccat

SEQ ID NO: 3388816 - DNA, 25 bp, Homo sapien
tattccactaacttcttctaactta

SEQ ID NO: 3388817 - DNA, 25 bp, Homo sapien
agttgtcctggtattccactaactt

SEQ ID NO: 3388818 - DNA, 25 bp, Homo sapien
tgattctgtcccactctccgggtgc

SEQ ID NO: 3388819 - DNA, 25 bp, Homo sapien
ctgattctgtcccactctccgggtg

SEQ ID NO: 3388820 - DNA, 25 bp, Homo sapien
gattctgtcccactctccgggtgcc

SEQ ID NO: 3388821 - DNA, 25 bp, Homo sapien
ggctgattctgtcccactctccggg

SEQ ID NO: 3388822 - DNA, 25 bp, Homo sapien
tgggtgacatggcaactcttcctgg

SEQ ID NO: 3388823 - DNA, 25 bp, Homo sapien
gggtgacatggcaactcttcctggg

SEQ ID NO: 3388824 - DNA, 25 bp, Homo sapien
taaaaggcatcggtggacgacctgg

SEQ ID NO: 3388825 - DNA, 25 bp, Homo sapien
gccataaaaggcatcggtggacgac

SEQ ID NO: 3388826 - DNA, 25 bp, Homo sapien
catctgagtgctcaaaagcctgagg

SEQ ID NO: 3388827 - DNA, 25 bp, Homo sapien
cacatctgagtgctcaaaagcctga

SEQ ID NO: 3388828 - DNA, 25 bp, Homo sapien
tccacatctgagtgctcaaaagcct

SEQ ID NO: 3388829 - DNA, 25 bp, Homo sapien
gtccacatctgagtgctcaaaagcc

SEQ ID NO: 3388830 - DNA, 25 bp, Homo sapien
atgtattgaaggagtcatggaacaa

SEQ ID NO: 3388831 - DNA, 25 bp, Homo sapien
catgtattgaaggagtcatggaaca

SEQ ID NO: 3388832 - DNA, 25 bp, Homo sapien
tattctcattcgcaagctttatttg

SEQ ID NO: 3388833 - DNA, 25 bp, Homo sapien
gttcagctgaccctatgaatagatg

SEQ ID NO: 3388834 - DNA, 25 bp, Homo sapien
ctggagctctcttgagcattcacag

SEQ ID NO: 3388835 - DNA, 25 bp, Homo sapien
tcacagggatagagcaagcccttct

SEQ ID NO: 3388836 - DNA, 25 bp, Homo sapien
cctctggctgaggctgtctaacagc

SEQ ID NO: 3388837 - DNA, 25 bp, Homo sapien
gttcctctggctgaggctgtctaac

SEQ ID NO: 3388838 - DNA, 25 bp, Homo sapien
caaattctacatccagttcctctgg

SEQ ID NO: 3388839 - DNA, 25 bp, Homo sapien
aaattctacatccagttcctctggc

SEQ ID NO: 3388840 - DNA, 25 bp, Homo sapien
gggcttgaacaacccactctcagca

SEQ ID NO: 3388841 - DNA, 25 bp, Homo sapien
ggatttgaactggactttaggccaa

SEQ ID NO: 3388842 - DNA, 25 bp, Homo sapien
gggatcacacattactattacagaa

SEQ ID NO: 3388843 - DNA, 25 bp, Homo sapien
tccagcactggaggacccaaattca

SEQ ID NO: 3388844 - DNA, 25 bp, Homo sapien
catgttcatgaaggcttacacactt

SEQ ID NO: 3388845 - DNA, 25 bp, Homo sapien
atgttcatgaaggcttacacacttt

SEQ ID NO: 3388846 - DNA, 25 bp, Homo sapien
ttccagggtgagagaaaaagagaaa

SEQ ID NO: 3388847 - DNA, 25 bp, Homo sapien
ccagggtgagagaaaaagagaaata

SEQ ID NO: 3388848 - DNA, 25 bp, Homo sapien
cagggtgagagaaaaagagaaatac

SEQ ID NO: 3388849 - DNA, 25 bp, Homo sapien
agggtgagagaaaaagagaaatact

SEQ ID NO: 3388850 - DNA, 25 bp, Homo sapien
ccccacgtagcccggtttgcaggtg

SEQ ID NO: 3388851 - DNA, 25 bp, Homo sapien
cacgtagcccggtttgcaggtgcag

SEQ ID NO: 3388852 - DNA, 25 bp, Homo sapien
acgtagcccggtttgcaggtgcagc

SEQ ID NO: 3388853 - DNA, 25 bp, Homo sapien
ccacgtagcccggtttgcaggtgca

SEQ ID NO: 3388854 - DNA, 25 bp, Homo sapien
gaaggtccgacgcacaagtgccaag

SEQ ID NO: 3388855 - DNA, 25 bp, Homo sapien
ttaccaagaaggtccgacgcacaag

SEQ ID NO: 3388856 - DNA, 25 bp, Homo sapien
aactcaacactaaggcggcaagcct

SEQ ID NO: 3388857 - DNA, 25 bp, Homo sapien
gcagaatggctgctcacaactcaac

SEQ ID NO: 3388858 - DNA, 25 bp, Homo sapien
attccatcgccttgaacctcctcat

SEQ ID NO: 3388859 - DNA, 25 bp, Homo sapien
ccattccatcgccttgaacctcctc

SEQ ID NO: 3388860 - DNA, 25 bp, Homo sapien
ggtgatccattccatcgccttgaac

SEQ ID NO: 3388861 - DNA, 25 bp, Homo sapien
tgatccattccatcgccttgaacct

SEQ ID NO: 3388862 - DNA, 25 bp, Homo sapien
caaaatctgcttggttcattgaata
